United States Patent Application Publication US 2005/0244851 A1 - sequence listing, part 41

SEQ ID NO: 1586218 - DNA, 25 bp, Homo sapien
caaaccatctgtgggcgcacaccca

SEQ ID NO: 1586219 - DNA, 25 bp, Homo sapien
tctggtcactgcagggccaaaccat

SEQ ID NO: 1586220 - DNA, 25 bp, Homo sapien
tggcagaactttccatactattggc

SEQ ID NO: 1586221 - DNA, 25 bp, Homo sapien
gctgcacgcccaacggccgcgcagt

SEQ ID NO: 1586222 - DNA, 25 bp, Homo sapien
tgcccattggcctccccgagacccg

SEQ ID NO: 1586223 - DNA, 25 bp, Homo sapien
gcgcagtctcgaccccacagacgcg

SEQ ID NO: 1586224 - DNA, 25 bp, Homo sapien
tattccccacacgtcacgccctgca

SEQ ID NO: 1586225 - DNA, 25 bp, Homo sapien
ctatttattccccacacgtcacgcc

SEQ ID NO: 1586226 - DNA, 25 bp, Homo sapien
tatttattccccacacgtcacgccc

SEQ ID NO: 1586227 - DNA, 25 bp, Homo sapien
tttattccccacacgtcacgccctg

SEQ ID NO: 1586228 - DNA, 25 bp, Homo sapien
gacagaaggtcatgatgtcgcccct

SEQ ID NO: 1586229 - DNA, 25 bp, Homo sapien
tctcacagacgggagagttcctgca

SEQ ID NO: 1586230 - DNA, 25 bp, Homo sapien
gggagcaccccaggattctagaaaa

SEQ ID NO: 1586231 - DNA, 25 bp, Homo sapien
catcttgacatgcaggtccgaggtc

SEQ ID NO: 1586232 - DNA, 25 bp, Homo sapien
cgctgggcgtccgactccggatctg

SEQ ID NO: 1586233 - DNA, 25 bp, Homo sapien
ctcctgagctgctctatcaactctg

SEQ ID NO: 1586234 - DNA, 25 bp, Homo sapien
cctgctggtcgtcgttgctggcgct

SEQ ID NO: 1586235 - DNA, 25 bp, Homo sapien
gagctgctctatcaactctgggttc

SEQ ID NO: 1586236 - DNA, 25 bp, Homo sapien
gccacccgaaatcatgccggacatg

SEQ ID NO: 1586237 - DNA, 25 bp, Homo sapien
gggttgttgccacccgaaatcatgc

SEQ ID NO: 1586238 - DNA, 25 bp, Homo sapien
gtcgttctgcgaggggctggtgccg

SEQ ID NO: 1586239 - DNA, 25 bp, Homo sapien
ttgttgccacccgaaatcatgccgg

SEQ ID NO: 1586240 - DNA, 25 bp, Homo sapien
tgggaagacccacttgatcccggga

SEQ ID NO: 1586241 - DNA, 25 bp, Homo sapien
tttaagatttgaccgtgggccagcc

SEQ ID NO: 1586242 - DNA, 25 bp, Homo sapien
caggattcacacagacgattgcaca

SEQ ID NO: 1586243 - DNA, 25 bp, Homo sapien
gtgaccctatgagccagcgagtgca

SEQ ID NO: 1586244 - DNA, 25 bp, Homo sapien
gctgctgaatctggggattgttcat

SEQ ID NO: 1586245 - DNA, 25 bp, Homo sapien
gaatctggggattgttcattaggtt

SEQ ID NO: 1586246 - DNA, 25 bp, Homo sapien
gctgaatctggggattgttcattag

SEQ ID NO: 1586247 - DNA, 25 bp, Homo sapien
agctgctgaatctggggattgttca

SEQ ID NO: 1586248 - DNA, 25 bp, Homo sapien
tgtgacctccacattgtgacttaaa

SEQ ID NO: 1586249 - DNA, 25 bp, Homo sapien
tccagcacgccaaccaacagtaaga

SEQ ID NO: 1586250 - DNA, 25 bp, Homo sapien
gaagacaaagctcccagcgcatcat

SEQ ID NO: 1586251 - DNA, 25 bp, Homo sapien
gagccgggcattcggtctttcatac

SEQ ID NO: 1586252 - DNA, 25 bp, Homo sapien
aggccggcgatgtcgaagctgccca

SEQ ID NO: 1586253 - DNA, 25 bp, Homo sapien
ggcgatgtcgaagctgcccacgcct

SEQ ID NO: 1586254 - DNA, 25 bp, Homo sapien
caggccggcgatgtcgaagctgccc

SEQ ID NO: 1586255 - DNA, 25 bp, Homo sapien
gccggcgatgtcgaagctgcccacg

SEQ ID NO: 1586256 - DNA, 25 bp, Homo sapien
gttaagcctagagccactggtgcgc

SEQ ID NO: 1586257 - DNA, 25 bp, Homo sapien
ccaggcctgggtctaatgaaatggc

SEQ ID NO: 1586258 - DNA, 25 bp, Homo sapien
cacacagtcagctcggcgttctgga

SEQ ID NO: 1586259 - DNA, 25 bp, Homo sapien
ggcatgaaccttctcacgacactca

SEQ ID NO: 1586260 - DNA, 25 bp, Homo sapien
tggacttgtatgtctcgttgtcggg

SEQ ID NO: 1586261 - DNA, 25 bp, Homo sapien
ttcttgtagtaagccacggcctcca

SEQ ID NO: 1586262 - DNA, 25 bp, Homo sapien
ccgctatcttgaggttggacttgta

SEQ ID NO: 1586263 - DNA, 25 bp, Homo sapien
gcagcttcagctccgctatcttgag

SEQ ID NO: 1586264 - DNA, 25 bp, Homo sapien
ccttgctgtaggccgggtcaatgca

SEQ ID NO: 1586265 - DNA, 25 bp, Homo sapien
agttgccgagtttgctgtaggctgc

SEQ ID NO: 1586266 - DNA, 25 bp, Homo sapien
tgcagatggcccgctcacagtcctg

SEQ ID NO: 1586267 - DNA, 25 bp, Homo sapien
tgcaccgcgcctgcgtagttgccga

SEQ ID NO: 1586268 - DNA, 25 bp, Homo sapien
ctcgatggcttttccgtagaaatgc

SEQ ID NO: 1586269 - DNA, 25 bp, Homo sapien
ttccgtagaaatgcacggcagcttc

SEQ ID NO: 1586270 - DNA, 25 bp, Homo sapien
gttgagctcgatggcttttccgtag

SEQ ID NO: 1586271 - DNA, 25 bp, Homo sapien
agaaatgcacggcagcttcaaagtt

SEQ ID NO: 1586272 - DNA, 25 bp, Homo sapien
ggcggggttcgcgcggggctcctca

SEQ ID NO: 1586273 - DNA, 25 bp, Homo sapien
cttcggttttgaggcgctctgcctc

SEQ ID NO: 1586274 - DNA, 25 bp, Homo sapien
ctgctgagtcctcctcggaaggcgg

SEQ ID NO: 1586275 - DNA, 25 bp, Homo sapien
gcctctgctgagtcctcctcggaag

SEQ ID NO: 1586276 - DNA, 25 bp, Homo sapien
ccgtggcagccgcttcaaatatctc

SEQ ID NO: 1586277 - DNA, 25 bp, Homo sapien
ctgtcttctaccgtcaccccaaacg

SEQ ID NO: 1586278 - DNA, 25 bp, Homo sapien
gggagcgcaaggtcactgtcttcta

SEQ ID NO: 1586279 - DNA, 25 bp, Homo sapien
cttcaaatatctccggcagagtctg

SEQ ID NO: 1586280 - DNA, 25 bp, Homo sapien
tctcctgagcatcggacgagaggcc

SEQ ID NO: 1586281 - DNA, 25 bp, Homo sapien
agctggtcatgcaggaactggatga

SEQ ID NO: 1586282 - DNA, 25 bp, Homo sapien
catgcaggaactggatgatggcgta

SEQ ID NO: 1586283 - DNA, 25 bp, Homo sapien
ctctcctgagcatcggacgagaggc

SEQ ID NO: 1586284 - DNA, 25 bp, Homo sapien
tttcctgccaaagctctaaagggtg

SEQ ID NO: 1586285 - DNA, 25 bp, Homo sapien
cagtgaccttcacggctctgagcag

SEQ ID NO: 1586286 - DNA, 25 bp, Homo sapien
gaatctggagctgtagtctatggac

SEQ ID NO: 1586287 - DNA, 25 bp, Homo sapien
tctgagcaggaagccccgacgtgag

SEQ ID NO: 1586288 - DNA, 25 bp, Homo sapien
gttctgggctagtcacgtccacctg

SEQ ID NO: 1586289 - DNA, 25 bp, Homo sapien
gggacctgagcacgggaccttgtct

SEQ ID NO: 1586290 - DNA, 25 bp, Homo sapien
aggctggcgatggtgactctaaaca

SEQ ID NO: 1586291 - DNA, 25 bp, Homo sapien
cagatgtaacaagctgcgtggagaa

SEQ ID NO: 1586292 - DNA, 25 bp, Homo sapien
ggttcccggatcgtggcctgcaaag

SEQ ID NO: 1586293 - DNA, 25 bp, Homo sapien
gaactgcgagggaaatcaatcttgg

SEQ ID NO: 1586294 - DNA, 25 bp, Homo sapien
cacacgaagagaggtgaggctcgct

SEQ ID NO: 1586295 - DNA, 25 bp, Homo sapien
aggtcgctgtggtggccctaatgca

SEQ ID NO: 1586296 - DNA, 25 bp, Homo sapien
tcagtcctcgtgacgactccaacaa

SEQ ID NO: 1586297 - DNA, 25 bp, Homo sapien
tccaacaagcgggtcggccctgtct

SEQ ID NO: 1586298 - DNA, 25 bp, Homo sapien
tcgtgacgactccaacaagcgggtc

SEQ ID NO: 1586299 - DNA, 25 bp, Homo sapien
gttgggcagggacgcgtggtcgcat

SEQ ID NO: 1586300 - DNA, 25 bp, Homo sapien
aaaagaaagactggtcgggcacagt

SEQ ID NO: 1586301 - DNA, 25 bp, Homo sapien
caacaggtgaaacccagtgtacaaa

SEQ ID NO: 1586302 - DNA, 25 bp, Homo sapien
tggtgccgacatctcttcagaggtt

SEQ ID NO: 1586303 - DNA, 25 bp, Homo sapien
gagggtcacacccaaccaggtgtct

SEQ ID NO: 1586304 - DNA, 25 bp, Homo sapien
caggcagacacacctcacttggtga

SEQ ID NO: 1586305 - DNA, 25 bp, Homo sapien
taacaggcggcatcaggtcaggatc

SEQ ID NO: 1586306 - DNA, 25 bp, Homo sapien
tttctgctcttcagaggggggtcca

SEQ ID NO: 1586307 - DNA, 25 bp, Homo sapien
ggcactcggtgtctttggaacaatc

SEQ ID NO: 1586308 - DNA, 25 bp, Homo sapien
tcaaatctgcttcaacagccaggct

SEQ ID NO: 1586309 - DNA, 25 bp, Homo sapien
caagcatgaggacggcattttcctc

SEQ ID NO: 1586310 - DNA, 25 bp, Homo sapien
ggtcatcagcccgtatggtagggtt

SEQ ID NO: 1586311 - DNA, 25 bp, Homo sapien
catcagcccgtatggtagggttttt

SEQ ID NO: 1586312 - DNA, 25 bp, Homo sapien
ctcaggtcatcagcccgtatggtag

SEQ ID NO: 1586313 - DNA, 25 bp, Homo sapien
acctcaggtcatcagcccgtatggt

SEQ ID NO: 1586314 - DNA, 25 bp, Homo sapien
tctagcacgatatgcagaagaagac

SEQ ID NO: 1586315 - DNA, 25 bp, Homo sapien
tggtggacggtcctgaatcccagat

SEQ ID NO: 1586316 - DNA, 25 bp, Homo sapien
cccacctctagcacgatatgcagaa

SEQ ID NO: 1586317 - DNA, 25 bp, Homo sapien
ccaggtttacacagcgggtgggagg

SEQ ID NO: 1586318 - DNA, 25 bp, Homo sapien
gagttctcagattccgctggaccct

SEQ ID NO: 1586319 - DNA, 25 bp, Homo sapien
tcagattccgctggaccctgcggct

SEQ ID NO: 1586320 - DNA, 25 bp, Homo sapien
ctaaacatgatataagacgaacgcc

SEQ ID NO: 1586321 - DNA, 25 bp, Homo sapien
cgcctgctaattctttggagttctc

SEQ ID NO: 1586322 - DNA, 25 bp, Homo sapien
tcccgccgtcctcgccaccaggccg

SEQ ID NO: 1586323 - DNA, 25 bp, Homo sapien
cccgccgtcctcgccaccaggccgc

SEQ ID NO: 1586324 - DNA, 25 bp, Homo sapien
ccgccgtcctcgccaccaggccgcg

SEQ ID NO: 1586325 - DNA, 25 bp, Homo sapien
ctcccgccgtcctcgccaccaggcc

SEQ ID NO: 1586326 - DNA, 25 bp, Homo sapien
tgcgcaaaagaaaggcgcccggagt

SEQ ID NO: 1586327 - DNA, 25 bp, Homo sapien
gttgcgcttgcgcaccgcggtgccg

SEQ ID NO: 1586328 - DNA, 25 bp, Homo sapien
gacccaccgacggttgcgcttgcgc

SEQ ID NO: 1586329 - DNA, 25 bp, Homo sapien
agggcgcgacgcctgcgcaaaagaa

SEQ ID NO: 1586330 - DNA, 25 bp, Homo sapien
cagggggaggcttgaaatttattct

SEQ ID NO: 1586331 - DNA, 25 bp, Homo sapien
ggttcttacatgagcctcctggagc

SEQ ID NO: 1586332 - DNA, 25 bp, Homo sapien
gctctggcgggaggatcttctctgt

SEQ ID NO: 1586333 - DNA, 25 bp, Homo sapien
gcctgccatagttggtgtcccttgg

SEQ ID NO: 1586334 - DNA, 25 bp, Homo sapien
tcactctcattgcccagcctggggt

SEQ ID NO: 1586335 - DNA, 25 bp, Homo sapien
atcttcccacctcaatctcccaggt

SEQ ID NO: 1586336 - DNA, 25 bp, Homo sapien
cttcccacctcaatctcccaggtag

SEQ ID NO: 1586337 - DNA, 25 bp, Homo sapien
actctcattgcccagcctggggtgc

SEQ ID NO: 1586338 - DNA, 25 bp, Homo sapien
tccatttggaatccccagcgtctat

SEQ ID NO: 1586339 - DNA, 25 bp, Homo sapien
tctgtccctccatttggaatcccca

SEQ ID NO: 1586340 - DNA, 25 bp, Homo sapien
tccattgagcttgtcacccagatag

SEQ ID NO: 1586341 - DNA, 25 bp, Homo sapien
gcttccattgagcttgtcacccaga

SEQ ID NO: 1586342 - DNA, 25 bp, Homo sapien
ttttagatgaagtcttactgtgttt

SEQ ID NO: 1586343 - DNA, 25 bp, Homo sapien
ccgcacccagccacccaggattttt

SEQ ID NO: 1586344 - DNA, 25 bp, Homo sapien
cagccacccaggattttttttagat

SEQ ID NO: 1586345 - DNA, 25 bp, Homo sapien
tagatgaagtcttactgtgtttctc

SEQ ID NO: 1586346 - DNA, 25 bp, Homo sapien
gacacatgagggtgcacactggaga

SEQ ID NO: 1586347 - DNA, 25 bp, Homo sapien
tcggcttttcgaagacacatgataa

SEQ ID NO: 1586348 - DNA, 25 bp, Homo sapien
gaaaccctatgagtgcaagcaatgt

SEQ ID NO: 1586349 - DNA, 25 bp, Homo sapien
cctatgaatgcaaccagtgcgggaa

SEQ ID NO: 1586350 - DNA, 25 bp, Homo sapien
acagtgatatctaggcaagtgtgcc

SEQ ID NO: 1586351 - DNA, 25 bp, Homo sapien
gaagagttatggtcatctgcacagt

SEQ ID NO: 1586352 - DNA, 25 bp, Homo sapien
tgcacagttgtagcccgttgcgagt

SEQ ID NO: 1586353 - DNA, 25 bp, Homo sapien
gctgcccctacacactgatggaaaa

SEQ ID NO: 1586354 - DNA, 25 bp, Homo sapien
ctgtcgcttacgcttccagttagca

SEQ ID NO: 1586355 - DNA, 25 bp, Homo sapien
gcttccagttagcaacttggtcgtg

SEQ ID NO: 1586356 - DNA, 25 bp, Homo sapien
caacttggtcgtggaaaacacctgc

SEQ ID NO: 1586357 - DNA, 25 bp, Homo sapien
ttagcaacttggtcgtggaaaacac

SEQ ID NO: 1586358 - DNA, 25 bp, Homo sapien
aaatgacgaggtggcagcgccggtt

SEQ ID NO: 1586359 - DNA, 25 bp, Homo sapien
caggattgatgctgaaatgacgagg

SEQ ID NO: 1586360 - DNA, 25 bp, Homo sapien
cctctcccggatgtgacgtagcgtg

SEQ ID NO: 1586361 - DNA, 25 bp, Homo sapien
tagcgtgacgcctgcaggattgatg

SEQ ID NO: 1586362 - DNA, 25 bp, Homo sapien
cttctcgcttctctctgaatctgtg

SEQ ID NO: 1586363 - DNA, 25 bp, Homo sapien
gagtctaccgaaggcttttgtacac

SEQ ID NO: 1586364 - DNA, 25 bp, Homo sapien
ccaatgtgaatccttatgtctttgt

SEQ ID NO: 1586365 - DNA, 25 bp, Homo sapien
tgtctttgtaaggacgagagtctac

SEQ ID NO: 1586366 - DNA, 25 bp, Homo sapien
taaggacgagagtctaccgaaggct

SEQ ID NO: 1586367 - DNA, 25 bp, Homo sapien
tgttctcatgtgaaccctaaggtcc

SEQ ID NO: 1586368 - DNA, 25 bp, Homo sapien
tccacagcgcttttccccagagtgt

SEQ ID NO: 1586369 - DNA, 25 bp, Homo sapien
catgtatgatcaggtagaaggaacg

SEQ ID NO: 1586370 - DNA, 25 bp, Homo sapien
cctaaggtccgagggccaactgtag

SEQ ID NO: 1586371 - DNA, 25 bp, Homo sapien
acacattgtatcatccgcctcccgg

SEQ ID NO: 1586372 - DNA, 25 bp, Homo sapien
ccacacattgtatcatccgcctccc

SEQ ID NO: 1586373 - DNA, 25 bp, Homo sapien
cacattgtatcatccgcctcccggg

SEQ ID NO: 1586374 - DNA, 25 bp, Homo sapien
tggcgtgatctccacacattgtatc

SEQ ID NO: 1586375 - DNA, 25 bp, Homo sapien
cagagggacctctacagagatgtga

SEQ ID NO: 1586376 - DNA, 25 bp, Homo sapien
gatgctggagaccttccggaacctg

SEQ ID NO: 1586377 - DNA, 25 bp, Homo sapien
taacattcgcgtcatagaggaggtg

SEQ ID NO: 1586378 - DNA, 25 bp, Homo sapien
cagtaggtgaggatggcatcattcc

SEQ ID NO: 1586379 - DNA, 25 bp, Homo sapien
tgtgaaatgtgggaaaggactaaga

SEQ ID NO: 1586380 - DNA, 25 bp, Homo sapien
cagacatgttcacagccaccatgga

SEQ ID NO: 1586381 - DNA, 25 bp, Homo sapien
tagaatctagtcattattccctaac

SEQ ID NO: 1586382 - DNA, 25 bp, Homo sapien
ggacctagaatctagtcattattcc

SEQ ID NO: 1586383 - DNA, 25 bp, Homo sapien
gcaggacagtcttcacgcatctttc

SEQ ID NO: 1586384 - DNA, 25 bp, Homo sapien
tctcttaaaaggcacgtcaagtctc

SEQ ID NO: 1586385 - DNA, 25 bp, Homo sapien
ccatatgaatgcaccaagtgcagga

SEQ ID NO: 1586386 - DNA, 25 bp, Homo sapien
cacaagaaagtttctgctggagaaa

SEQ ID NO: 1586387 - DNA, 25 bp, Homo sapien
gctgcacaagcaccagccataccag

SEQ ID NO: 1586388 - DNA, 25 bp, Homo sapien
tgcccctcagtttcgcaatcaccga

SEQ ID NO: 1586389 - DNA, 25 bp, Homo sapien
agccataccagaccccgaagctcac

SEQ ID NO: 1586390 - DNA, 25 bp, Homo sapien
cgcaatcaccgaggccggaggcagt

SEQ ID NO: 1586391 - DNA, 25 bp, Homo sapien
aaggaatcactattaaggctgaggc

SEQ ID NO: 1586392 - DNA, 25 bp, Homo sapien
taagtgctataccaggttttcctac

SEQ ID NO: 1586393 - DNA, 25 bp, Homo sapien
tctcccaggtccactgtattcgtag

SEQ ID NO: 1586394 - DNA, 25 bp, Homo sapien
gctgaggcatgtaaaggcaatacca

SEQ ID NO: 1586395 - DNA, 25 bp, Homo sapien
tgtgcttgaagcgatgcgagatacc

SEQ ID NO: 1586396 - DNA, 25 bp, Homo sapien
cacaagaaggttcgcagtctggctc

SEQ ID NO: 1586397 - DNA, 25 bp, Homo sapien
tacagtctgcgttttcataggaggg

SEQ ID NO: 1586398 - DNA, 25 bp, Homo sapien
taagtgggacatccgaaggccttcc

SEQ ID NO: 1586399 - DNA, 25 bp, Homo sapien
tgggaagcaagctactagtcatgaa

SEQ ID NO: 1586400 - DNA, 25 bp, Homo sapien
gaagcaagctactagtcatgaatga

SEQ ID NO: 1586401 - DNA, 25 bp, Homo sapien
tcaaaatgggaagcaagctactagt

SEQ ID NO: 1586402 - DNA, 25 bp, Homo sapien
aatgggaagcaagctactagtcatg

SEQ ID NO: 1586403 - DNA, 25 bp, Homo sapien
cagacacgtgacattgacatcacat

SEQ ID NO: 1586404 - DNA, 25 bp, Homo sapien
cctgatattgtttccaactgtttca

SEQ ID NO: 1586405 - DNA, 25 bp, Homo sapien
aaatactctcttaggaaaagtctca

SEQ ID NO: 1586406 - DNA, 25 bp, Homo sapien
cagcccacggtgtttcttatagatg

SEQ ID NO: 1586407 - DNA, 25 bp, Homo sapien
ggaatcacttcctgtgaactttaca

SEQ ID NO: 1586408 - DNA, 25 bp, Homo sapien
gatttggtgctgatctccagtgtta

SEQ ID NO: 1586409 - DNA, 25 bp, Homo sapien
cattcccaaaaacgtccctctgaga

SEQ ID NO: 1586410 - DNA, 25 bp, Homo sapien
tttctccaaaaatagaccaggaatc

SEQ ID NO: 1586411 - DNA, 25 bp, Homo sapien
cagtgagggaatgacaccaccctta

SEQ ID NO: 1586412 - DNA, 25 bp, Homo sapien
agtgagggaatgacaccacccttac

SEQ ID NO: 1586413 - DNA, 25 bp, Homo sapien
gcagtgagggaatgacaccaccctt

SEQ ID NO: 1586414 - DNA, 25 bp, Homo sapien
ccacttcctcaaagatcacgcagtc

SEQ ID NO: 1586415 - DNA, 25 bp, Homo sapien
gccacttcctcaaagatcacgcagt

SEQ ID NO: 1586416 - DNA, 25 bp, Homo sapien
tagcgccccgcggtccagcgaccgg

SEQ ID NO: 1586417 - DNA, 25 bp, Homo sapien
gggttagcgccccgcggtccagcga

SEQ ID NO: 1586418 - DNA, 25 bp, Homo sapien
gtgagcacgacaggacacctgagcc

SEQ ID NO: 1586419 - DNA, 25 bp, Homo sapien
ccccgcggtccagcgaccggcgcag

SEQ ID NO: 1586420 - DNA, 25 bp, Homo sapien
tacacattcatcaggctgggaggac

SEQ ID NO: 1586421 - DNA, 25 bp, Homo sapien
aaggacacctttttctgagccatca

SEQ ID NO: 1586422 - DNA, 25 bp, Homo sapien
ttcttggacacagagaatccgtctc

SEQ ID NO: 1586423 - DNA, 25 bp, Homo sapien
ttgcctaatatcacccgagagctga

SEQ ID NO: 1586424 - DNA, 25 bp, Homo sapien
tgtgaagccgttggccagagagcag

SEQ ID NO: 1586425 - DNA, 25 bp, Homo sapien
ggctgctaggatgtctgtcctggct

SEQ ID NO: 1586426 - DNA, 25 bp, Homo sapien
cagatgggatgtacggttcctaggc

SEQ ID NO: 1586427 - DNA, 25 bp, Homo sapien
cctgggagtctggacttcgggtaca

SEQ ID NO: 1586428 - DNA, 25 bp, Homo sapien
actcaggactgaggacgactccttg

SEQ ID NO: 1586429 - DNA, 25 bp, Homo sapien
tcagtagaccacctcatacacggtg

SEQ ID NO: 1586430 - DNA, 25 bp, Homo sapien
tatttctggagatgtcacaactcag

SEQ ID NO: 1586431 - DNA, 25 bp, Homo sapien
ccccgagcctgtcacgatgtatttg

SEQ ID NO: 1586432 - DNA, 25 bp, Homo sapien
aagggcacagtgaggcatggtcccc

SEQ ID NO: 1586433 - DNA, 25 bp, Homo sapien
ggcacagtgaggcatggtccccaca

SEQ ID NO: 1586434 - DNA, 25 bp, Homo sapien
acagtgaggcatggtccccacagat

SEQ ID NO: 1586435 - DNA, 25 bp, Homo sapien
agtgaggcatggtccccacagatgg

SEQ ID NO: 1586436 - DNA, 25 bp, Homo sapien
tggcatacccgggcacatggccctg

SEQ ID NO: 1586437 - DNA, 25 bp, Homo sapien
acatggccctgccagagtgggggct

SEQ ID NO: 1586438 - DNA, 25 bp, Homo sapien
cctggcatacccgggcacatggccc

SEQ ID NO: 1586439 - DNA, 25 bp, Homo sapien
tggccctgccagagtgggggctcca

SEQ ID NO: 1586440 - DNA, 25 bp, Homo sapien
cctccaggcgttgagcaggttgtcc

SEQ ID NO: 1586441 - DNA, 25 bp, Homo sapien
gctggccccgtacggcgtcctccag

SEQ ID NO: 1586442 - DNA, 25 bp, Homo sapien
tccaggcgttgagcaggttgtcctt

SEQ ID NO: 1586443 - DNA, 25 bp, Homo sapien
aaatgctggccccgtacggcgtcct

SEQ ID NO: 1586444 - DNA, 25 bp, Homo sapien
tccggcttgcggacgtgcaggatct

SEQ ID NO: 1586445 - DNA, 25 bp, Homo sapien
agctggtatttctccggcttgcgga

SEQ ID NO: 1586446 - DNA, 25 bp, Homo sapien
cgaccgccagccagtcctggttagg

SEQ ID NO: 1586447 - DNA, 25 bp, Homo sapien
tgcaggatctccacgttgctactct

SEQ ID NO: 1586448 - DNA, 25 bp, Homo sapien
ggagctgagatcacaacacagcaac

SEQ ID NO: 1586449 - DNA, 25 bp, Homo sapien
aattcccacactgggaagccgaggc

SEQ ID NO: 1586450 - DNA, 25 bp, Homo sapien
tgagatcacaacacagcaactctgt

SEQ ID NO: 1586451 - DNA, 25 bp, Homo sapien
tgtaattcccacactgggaagccga

SEQ ID NO: 1586452 - DNA, 25 bp, Homo sapien
gccgtaatcggaaatatcaatgcag

SEQ ID NO: 1586453 - DNA, 25 bp, Homo sapien
ctgtccagagccgagtgccgtaatc

SEQ ID NO: 1586454 - DNA, 25 bp, Homo sapien
gaaatatcaatgcagctggcgccgt

SEQ ID NO: 1586455 - DNA, 25 bp, Homo sapien
ccagagccgagtgccgtaatcggaa

SEQ ID NO: 1586456 - DNA, 25 bp, Homo sapien
gggctgaggaagtcagctcggcctt

SEQ ID NO: 1586457 - DNA, 25 bp, Homo sapien
cacaatgttgccatcgctgcagcag

SEQ ID NO: 1586458 - DNA, 25 bp, Homo sapien
ctgaccatagtctgattctgcaggt

SEQ ID NO: 1586459 - DNA, 25 bp, Homo sapien
gcagcaacttgcaggaacgaatgta

SEQ ID NO: 1586460 - DNA, 25 bp, Homo sapien
ctgggccacgggcgtcttggcccca

SEQ ID NO: 1586461 - DNA, 25 bp, Homo sapien
gccacgggcgtcttggccccaggct

SEQ ID NO: 1586462 - DNA, 25 bp, Homo sapien
tgggccacgggcgtcttggccccag

SEQ ID NO: 1586463 - DNA, 25 bp, Homo sapien
ccccaggctggcccacgtcccacac

SEQ ID NO: 1586464 - DNA, 25 bp, Homo sapien
tcgccatgggccagcgtgtgcagct

SEQ ID NO: 1586465 - DNA, 25 bp, Homo sapien
gggatgcccgcgcctaccagtgcat

SEQ ID NO: 1586466 - DNA, 25 bp, Homo sapien
agccgctgatggtgaccgcgcagac

SEQ ID NO: 1586467 - DNA, 25 bp, Homo sapien
tgccgcccgtgtacacatgctgtgt

SEQ ID NO: 1586468 - DNA, 25 bp, Homo sapien
ctgcccgtccgcagacacgtggaag

SEQ ID NO: 1586469 - DNA, 25 bp, Homo sapien
ggtggcacaaatacacagggagtct

SEQ ID NO: 1586470 - DNA, 25 bp, Homo sapien
taataaatgttcgttcaaccgagga

SEQ ID NO: 1586471 - DNA, 25 bp, Homo sapien
ggtgtggcgcatggtaaacaagcac

SEQ ID NO: 1586472 - DNA, 25 bp, Homo sapien
agtgttccagaccagctagagggtc

SEQ ID NO: 1586473 - DNA, 25 bp, Homo sapien
ctcggagatggggatgagactcaaa

SEQ ID NO: 1586474 - DNA, 25 bp, Homo sapien
accctcggagatggggatgagactc

SEQ ID NO: 1586475 - DNA, 25 bp, Homo sapien
ggaagagacggatgaccctcggaga

SEQ ID NO: 1586476 - DNA, 25 bp, Homo sapien
aagagacggatgaccctcggagatg

SEQ ID NO: 1586477 - DNA, 25 bp, Homo sapien
ggggagcgtccgtacaccacagagc

SEQ ID NO: 1586478 - DNA, 25 bp, Homo sapien
gagcgtccgtacaccacagagctgc

SEQ ID NO: 1586479 - DNA, 25 bp, Homo sapien
cacgggggagcgtccgtacaccaca

SEQ ID NO: 1586480 - DNA, 25 bp, Homo sapien
acgggggagcgtccgtacaccacag

SEQ ID NO: 1586481 - DNA, 25 bp, Homo sapien
aggctgacgtaggagctgggcacgg

SEQ ID NO: 1586482 - DNA, 25 bp, Homo sapien
cacggagaggtctccgttgagagtg

SEQ ID NO: 1586483 - DNA, 25 bp, Homo sapien
ctgggcacggagaggtctccgttga

SEQ ID NO: 1586484 - DNA, 25 bp, Homo sapien
tgacgtaggagctgggcacggagag

SEQ ID NO: 1586485 - DNA, 25 bp, Homo sapien
tatcgttcctccagtggacacgact

SEQ ID NO: 1586486 - DNA, 25 bp, Homo sapien
gacaggttttgacgccctggaccca

SEQ ID NO: 1586487 - DNA, 25 bp, Homo sapien
gagctccctggcctttcatttagag

SEQ ID NO: 1586488 - DNA, 25 bp, Homo sapien
tttccatgtgctggttccacattgg

SEQ ID NO: 1586489 - DNA, 25 bp, Homo sapien
atcttgggtacctgccttggtacca

SEQ ID NO: 1586490 - DNA, 25 bp, Homo sapien
cctgactatacagggctgtgagttt

SEQ ID NO: 1586491 - DNA, 25 bp, Homo sapien
tgccttggtaccagccctgactata

SEQ ID NO: 1586492 - DNA, 25 bp, Homo sapien
cagaaaagatgagcactgtcattcc

SEQ ID NO: 1586493 - DNA, 25 bp, Homo sapien
cagaggtgactggccgagctgggcc

SEQ ID NO: 1586494 - DNA, 25 bp, Homo sapien
aggtgactggccgagctgggcccgg

SEQ ID NO: 1586495 - DNA, 25 bp, Homo sapien
gaggtgactggccgagctgggcccg

SEQ ID NO: 1586496 - DNA, 25 bp, Homo sapien
agaggtgactggccgagctgggccc

SEQ ID NO: 1586497 - DNA, 25 bp, Homo sapien
ggcaggagtgctggcgggaaggtca

SEQ ID NO: 1586498 - DNA, 25 bp, Homo sapien
aggagtcacaggatttggaggcagg

SEQ ID NO: 1586499 - DNA, 25 bp, Homo sapien
caggagtgctggcgggaaggtcatt

SEQ ID NO: 1586500 - DNA, 25 bp, Homo sapien
gggaggagtcacaggatttggaggc

SEQ ID NO: 1586501 - DNA, 25 bp, Homo sapien
tgcagatgggtacctttccgcaggg

SEQ ID NO: 1586502 - DNA, 25 bp, Homo sapien
accaggtcccgacgggcaggaatgc

SEQ ID NO: 1586503 - DNA, 25 bp, Homo sapien
agctccttggctctaggcagcggtg

SEQ ID NO: 1586504 - DNA, 25 bp, Homo sapien
aggaatgcagatgggtacctttccg

SEQ ID NO: 1586505 - DNA, 25 bp, Homo sapien
ccagattgtaatcactcttgtcttc

SEQ ID NO: 1586506 - DNA, 25 bp, Homo sapien
gtccaccaccagattgtaatcactc

SEQ ID NO: 1586507 - DNA, 25 bp, Homo sapien
caccaccagattgtaatcactcttg

SEQ ID NO: 1586508 - DNA, 25 bp, Homo sapien
ctcgtccaccaccagattgtaatca

SEQ ID NO: 1586509 - DNA, 25 bp, Homo sapien
actcggtcgctcctcctccacgaga

SEQ ID NO: 1586510 - DNA, 25 bp, Homo sapien
ccaccagggccactcggtcgctcct

SEQ ID NO: 1586511 - DNA, 25 bp, Homo sapien
ctcctcctccacgagactctcaggg

SEQ ID NO: 1586512 - DNA, 25 bp, Homo sapien
ctccacgagactctcagggggcgag

SEQ ID NO: 1586513 - DNA, 25 bp, Homo sapien
ttggggagcacccacagatattgct

SEQ ID NO: 1586514 - DNA, 25 bp, Homo sapien
acagatattgctgaacggctgatgg

SEQ ID NO: 1586515 - DNA, 25 bp, Homo sapien
gagcacccacagatattgctgaacg

SEQ ID NO: 1586516 - DNA, 25 bp, Homo sapien
cccacagatattgctgaacggctga

SEQ ID NO: 1586517 - DNA, 25 bp, Homo sapien
ccatgatcgacctaggtctcattct

SEQ ID NO: 1586518 - DNA, 25 bp, Homo sapien
tcagctcagaaccagcgttggcctc

SEQ ID NO: 1586519 - DNA, 25 bp, Homo sapien
ccaccatgatcgacctaggtctcat

SEQ ID NO: 1586520 - DNA, 25 bp, Homo sapien
catcagctcagaaccagcgttggcc

SEQ ID NO: 1586521 - DNA, 25 bp, Homo sapien
cagattgggaatgggataaagagaa

SEQ ID NO: 1586522 - DNA, 25 bp, Homo sapien
gcgtttgtatccacggcgccagagg

SEQ ID NO: 1586523 - DNA, 25 bp, Homo sapien
tgacagattgggaatgggataaaga

SEQ ID NO: 1586524 - DNA, 25 bp, Homo sapien
gagaaagaatgaggcgtttgtatcc

SEQ ID NO: 1586525 - DNA, 25 bp, Homo sapien
tccacgcccgcacggtcctccttga

SEQ ID NO: 1586526 - DNA, 25 bp, Homo sapien
tcctccttgacagccgccgccagct

SEQ ID NO: 1586527 - DNA, 25 bp, Homo sapien
agacagagcaagcagccccgtagca

SEQ ID NO: 1586528 - DNA, 25 bp, Homo sapien
cacagggggtgcgtggtgggacagc

SEQ ID NO: 1586529 - DNA, 25 bp, Homo sapien
gacctgggagtgggcgtctccccat

SEQ ID NO: 1586530 - DNA, 25 bp, Homo sapien
agcatgtgcccctggggttcccagg

SEQ ID NO: 1586531 - DNA, 25 bp, Homo sapien
ccagctttaacacctcctgggtggg

SEQ ID NO: 1586532 - DNA, 25 bp, Homo sapien
gggatgggacctaagcacagcatgt

SEQ ID NO: 1586533 - DNA, 25 bp, Homo sapien
tgaggctgttcagctcccccacggt

SEQ ID NO: 1586534 - DNA, 25 bp, Homo sapien
cccgatgaggctgttcagctccccc

SEQ ID NO: 1586535 - DNA, 25 bp, Homo sapien
gacctgcttggcgcgttctacggcc

SEQ ID NO: 1586536 - DNA, 25 bp, Homo sapien
ctgcttggcgcgttctacggcctgg

SEQ ID NO: 1586537 - DNA, 25 bp, Homo sapien
tggagtgggaggattacgctagtcc

SEQ ID NO: 1586538 - DNA, 25 bp, Homo sapien
tatacttatttaagccggagtctca

SEQ ID NO: 1586539 - DNA, 25 bp, Homo sapien
tacttatttaagccggagtctcact

SEQ ID NO: 1586540 - DNA, 25 bp, Homo sapien
gagtgggaggattacgctagtccag

SEQ ID NO: 1586541 - DNA, 25 bp, Homo sapien
gcgcagataccgctcagacgcttca

SEQ ID NO: 1586542 - DNA, 25 bp, Homo sapien
gataccgctcagacgcttcacaatc

SEQ ID NO: 1586543 - DNA, 25 bp, Homo sapien
gggataatctgagcgcagataccgc

SEQ ID NO: 1586544 - DNA, 25 bp, Homo sapien
tcaggaaggggataatctgagcgca

SEQ ID NO: 1586545 - DNA, 25 bp, Homo sapien
tgagcccgtacgacatctcataata

SEQ ID NO: 1586546 - DNA, 25 bp, Homo sapien
gcttatgcatttcaatgttgagccc

SEQ ID NO: 1586547 - DNA, 25 bp, Homo sapien
aatgttgagcccgtacgacatctca

SEQ ID NO: 1586548 - DNA, 25 bp, Homo sapien
catttcaatgttgagcccgtacgac

SEQ ID NO: 1586549 - DNA, 25 bp, Homo sapien
gacataatgtcgctgcatttccgtc

SEQ ID NO: 1586550 - DNA, 25 bp, Homo sapien
gctgcatttccgtcttctcgctggc

SEQ ID NO: 1586551 - DNA, 25 bp, Homo sapien
catgacataatgtcgctgcatttcc

SEQ ID NO: 1586552 - DNA, 25 bp, Homo sapien
atttccgtcttctcgctggccagct

SEQ ID NO: 1586553 - DNA, 25 bp, Homo sapien
gaagaaactggaattcttctttgat

SEQ ID NO: 1586554 - DNA, 25 bp, Homo sapien
cgcagatctccaagatcgagaactt

SEQ ID NO: 1586555 - DNA, 25 bp, Homo sapien
aaactggaattcttctttgatgcgg

SEQ ID NO: 1586556 - DNA, 25 bp, Homo sapien
tccaagatcgagaacttgaagggct

SEQ ID NO: 1586557 - DNA, 25 bp, Homo sapien
ctgccgatccgaaaagccccccagg

SEQ ID NO: 1586558 - DNA, 25 bp, Homo sapien
caggcgccaccagagcttgatgata

SEQ ID NO: 1586559 - DNA, 25 bp, Homo sapien
gcgccaccagagcttgatgatatgg

SEQ ID NO: 1586560 - DNA, 25 bp, Homo sapien
ccccaggcgccaccagagcttgatg

SEQ ID NO: 1586561 - DNA, 25 bp, Homo sapien
cggcgcggggcaagggaccctggag

SEQ ID NO: 1586562 - DNA, 25 bp, Homo sapien
aagcggcgcggggcaagggaccctg

SEQ ID NO: 1586563 - DNA, 25 bp, Homo sapien
cctggagtccctggcgcgcccccaa

SEQ ID NO: 1586564 - DNA, 25 bp, Homo sapien
gggaggctgcccgaagaaagaggga

SEQ ID NO: 1586565 - DNA, 25 bp, Homo sapien
ggcttgcggggagcggggaccagtc

SEQ ID NO: 1586566 - DNA, 25 bp, Homo sapien
gcttgcggggagcggggaccagtct

SEQ ID NO: 1586567 - DNA, 25 bp, Homo sapien
gacaagctagtatactggaaaaaga

SEQ ID NO: 1586568 - DNA, 25 bp, Homo sapien
ctctgtagagatcagacgattgaac

SEQ ID NO: 1586569 - DNA, 25 bp, Homo sapien
cgagataagctgactatatacagac

SEQ ID NO: 1586570 - DNA, 25 bp, Homo sapien
aagcccacccttgatacagcatttt

SEQ ID NO: 1586571 - DNA, 25 bp, Homo sapien
gcccaccctcaccctgctcctccca

SEQ ID NO: 1586572 - DNA, 25 bp, Homo sapien
gggaatcctgggtcgcccaccctca

SEQ ID NO: 1586573 - DNA, 25 bp, Homo sapien
ccaccctcaccctgctcctcccagc

SEQ ID NO: 1586574 - DNA, 25 bp, Homo sapien
ctcatctttatttgggaaggggagg

SEQ ID NO: 1586575 - DNA, 25 bp, Homo sapien
tgggcgatgggagaggaccaggtgg

SEQ ID NO: 1586576 - DNA, 25 bp, Homo sapien
ccttttgtgggcgatgggagaggac

SEQ ID NO: 1586577 - DNA, 25 bp, Homo sapien
tcagctaagctcgtccctcgtgccc

SEQ ID NO: 1586578 - DNA, 25 bp, Homo sapien
cgtgcccccccttttgtgggcgatg

SEQ ID NO: 1586579 - DNA, 25 bp, Homo sapien
aaggggcagctagcattgcgtgcat

SEQ ID NO: 1586580 - DNA, 25 bp, Homo sapien
aaaggggcagctagcattgcgtgca

SEQ ID NO: 1586581 - DNA, 25 bp, Homo sapien
gctgctgcgcttcgcgaggtcttgc

SEQ ID NO: 1586582 - DNA, 25 bp, Homo sapien
cgcttcgcgaggtcttgctcccttg

SEQ ID NO: 1586583 - DNA, 25 bp, Homo sapien
tggcccaggcagactgtcggttaca

SEQ ID NO: 1586584 - DNA, 25 bp, Homo sapien
cagactgtcggttacacatgttcaa

SEQ ID NO: 1586585 - DNA, 25 bp, Homo sapien
tagcttgcctcacatgtcagggcag

SEQ ID NO: 1586586 - DNA, 25 bp, Homo sapien
gaccctccaggccttagcttgcctc

SEQ ID NO: 1586587 - DNA, 25 bp, Homo sapien
aggccttagcttgcctcacatgtca

SEQ ID NO: 1586588 - DNA, 25 bp, Homo sapien
tccaggccttagcttgcctcacatg

SEQ ID NO: 1586589 - DNA, 25 bp, Homo sapien
gagctccgctgtgtcttgtgctaaa

SEQ ID NO: 1586590 - DNA, 25 bp, Homo sapien
cgccggcggccaccataaatactat

SEQ ID NO: 1586591 - DNA, 25 bp, Homo sapien
ggcggccaccataaatactatggga

SEQ ID NO: 1586592 - DNA, 25 bp, Homo sapien
tactatgggagtttagccaatcccg

SEQ ID NO: 1586593 - DNA, 25 bp, Homo sapien
ggtgtcaccatcgtgcccgttcttg

SEQ ID NO: 1586594 - DNA, 25 bp, Homo sapien
cctgggaacccagcgcggacagcga

SEQ ID NO: 1586595 - DNA, 25 bp, Homo sapien
taatccgacttctcgccatcatcct

SEQ ID NO: 1586596 - DNA, 25 bp, Homo sapien
ccggtgcctgcgctgaccgccggca

SEQ ID NO: 1586597 - DNA, 25 bp, Homo sapien
gggaggggaacattagctgcctggg

SEQ ID NO: 1586598 - DNA, 25 bp, Homo sapien
tgatagagttcagctcgggagcggt

SEQ ID NO: 1586599 - DNA, 25 bp, Homo sapien
tcggatgatagagttcagctcggga

SEQ ID NO: 1586600 - DNA, 25 bp, Homo sapien
agttcagctcgggagcggtgacctg

SEQ ID NO: 1586601 - DNA, 25 bp, Homo sapien
agctcgggagcggtgacctgcttgg

SEQ ID NO: 1586602 - DNA, 25 bp, Homo sapien
caagctcgtctcttcgtctggccaa

SEQ ID NO: 1586603 - DNA, 25 bp, Homo sapien
gaaacagcttttgagtgagcccggg

SEQ ID NO: 1586604 - DNA, 25 bp, Homo sapien
tgctaagacttgtccctgggcaaag

SEQ ID NO: 1586605 - DNA, 25 bp, Homo sapien
acattcctggtgcagtttaggccca

SEQ ID NO: 1586606 - DNA, 25 bp, Homo sapien
ctcttgggagaggtagggcaggacc

SEQ ID NO: 1586607 - DNA, 25 bp, Homo sapien
aaatcccgttcagccttttgacgat

SEQ ID NO: 1586608 - DNA, 25 bp, Homo sapien
cgttcagccttttgacgatctcagc

SEQ ID NO: 1586609 - DNA, 25 bp, Homo sapien
ggcacaaatcccgttcagccttttg

SEQ ID NO: 1586610 - DNA, 25 bp, Homo sapien
cctgccacttgcggcttctaagagg

SEQ ID NO: 1586611 - DNA, 25 bp, Homo sapien
atgagcaaagccgtgttcgggcccg

SEQ ID NO: 1586612 - DNA, 25 bp, Homo sapien
gctggacaccggctgtcgcctgcag

SEQ ID NO: 1586613 - DNA, 25 bp, Homo sapien
cacacagatgaagccggcttcagtc

SEQ ID NO: 1586614 - DNA, 25 bp, Homo sapien
ctcgatgttcaagccgtaggacatc

SEQ ID NO: 1586615 - DNA, 25 bp, Homo sapien
tctcgatgttcaagccgtaggacat

SEQ ID NO: 1586616 - DNA, 25 bp, Homo sapien
gatgttcaagccgtaggacatctcg

SEQ ID NO: 1586617 - DNA, 25 bp, Homo sapien
tctatgtcttgtctgcgggtgggcc

SEQ ID NO: 1586618 - DNA, 25 bp, Homo sapien
cattcccaggccttcacgtagtttc

SEQ ID NO: 1586619 - DNA, 25 bp, Homo sapien
gatttgggtactgggctgagacccc

SEQ ID NO: 1586620 - DNA, 25 bp, Homo sapien
tttgcctgcctaggtataaacagtg

SEQ ID NO: 1586621 - DNA, 25 bp, Homo sapien
gccggctgaatggagaacaggcccc

SEQ ID NO: 1586622 - DNA, 25 bp, Homo sapien
gcggtttggcacctcggccactgcc

SEQ ID NO: 1586623 - DNA, 25 bp, Homo sapien
tgaatggagaacaggccccgatcct

SEQ ID NO: 1586624 - DNA, 25 bp, Homo sapien
tctgccaggctagcgaggcaggctc

SEQ ID NO: 1586625 - DNA, 25 bp, Homo sapien
catcacatagtgacgctgcatctct

SEQ ID NO: 1586626 - DNA, 25 bp, Homo sapien
caacttgtcacattcgagcttgagg

SEQ ID NO: 1586627 - DNA, 25 bp, Homo sapien
cacatagtgacgctgcatctctgac

SEQ ID NO: 1586628 - DNA, 25 bp, Homo sapien
tggccaacttgtcacattcgagctt

SEQ ID NO: 1586629 - DNA, 25 bp, Homo sapien
tctgagagtctcacgagccttcacc

SEQ ID NO: 1586630 - DNA, 25 bp, Homo sapien
acgaggcccgcaacgtcattgtcac

SEQ ID NO: 1586631 - DNA, 25 bp, Homo sapien
tagatgacacagtggacacccagag

SEQ ID NO: 1586632 - DNA, 25 bp, Homo sapien
cacggtaacgctagctctgagagtc

SEQ ID NO: 1586633 - DNA, 25 bp, Homo sapien
gaacatccggtgtgtgcctctgata

SEQ ID NO: 1586634 - DNA, 25 bp, Homo sapien
ttgagaatgggtacgacagtcggac

SEQ ID NO: 1586635 - DNA, 25 bp, Homo sapien
tcttgagcacacagggagtacccaa

SEQ ID NO: 1586636 - DNA, 25 bp, Homo sapien
ttccggcttagcagaggtcacacag

SEQ ID NO: 1586637 - DNA, 25 bp, Homo sapien
ttgccatctgcgcagaagaaatggg

SEQ ID NO: 1586638 - DNA, 25 bp, Homo sapien
ggtcagagtctagcatatattattt

SEQ ID NO: 1586639 - DNA, 25 bp, Homo sapien
gtgattaggtcagagtctagcatat

SEQ ID NO: 1586640 - DNA, 25 bp, Homo sapien
gggactcacattctcgggacgcagg

SEQ ID NO: 1586641 - DNA, 25 bp, Homo sapien
tgatgcggtcgcaggagtccgaggt

SEQ ID NO: 1586642 - DNA, 25 bp, Homo sapien
gctgaaattcgtctttgatgcggtc

SEQ ID NO: 1586643 - DNA, 25 bp, Homo sapien
ctgtggtactgagcttgcagtagct

SEQ ID NO: 1586644 - DNA, 25 bp, Homo sapien
caggagtccgaggtggtgaatttga

SEQ ID NO: 1586645 - DNA, 25 bp, Homo sapien
tgtagggatggggcggcccgggtca

SEQ ID NO: 1586646 - DNA, 25 bp, Homo sapien
cctcaagggccggctaggagggagc

SEQ ID NO: 1586647 - DNA, 25 bp, Homo sapien
ccctcaagggccggctaggagggag

SEQ ID NO: 1586648 - DNA, 25 bp, Homo sapien
aggcgtgggctggacccccctcaag

SEQ ID NO: 1586649 - DNA, 25 bp, Homo sapien
agggtgcgccctctaccgccctcca

SEQ ID NO: 1586650 - DNA, 25 bp, Homo sapien
tggggggcagggtgcgccctctacc

SEQ ID NO: 1586651 - DNA, 25 bp, Homo sapien
tgcgttttaaggcccgccctagatg

SEQ ID NO: 1586652 - DNA, 25 bp, Homo sapien
gggcagggtgcgccctctaccgccc

SEQ ID NO: 1586653 - DNA, 25 bp, Homo sapien
atccccgggctagaggtgcctcgcg

SEQ ID NO: 1586654 - DNA, 25 bp, Homo sapien
ccaaaggatccccgggctagaggtg

SEQ ID NO: 1586655 - DNA, 25 bp, Homo sapien
tcctcggggacacgctcttccggga

SEQ ID NO: 1586656 - DNA, 25 bp, Homo sapien
ctctcggtgctcgaaatcttccggg

SEQ ID NO: 1586657 - DNA, 25 bp, Homo sapien
tttgtcccggcgccgatcggcagct

SEQ ID NO: 1586658 - DNA, 25 bp, Homo sapien
gcggccgcgcctttgtcccggcgcc

SEQ ID NO: 1586659 - DNA, 25 bp, Homo sapien
ccgcgcctttgtcccggcgccgatc

SEQ ID NO: 1586660 - DNA, 25 bp, Homo sapien
cctttgtcccggcgccgatcggcag

SEQ ID NO: 1586661 - DNA, 25 bp, Homo sapien
tcctgcgcgcccggcgcccctcccc

SEQ ID NO: 1586662 - DNA, 25 bp, Homo sapien
cctgcgcgcccggcgcccctccccg

SEQ ID NO: 1586663 - DNA, 25 bp, Homo sapien
ctgcgcgcccggcgcccctccccgc

SEQ ID NO: 1586664 - DNA, 25 bp, Homo sapien
ctattgtctaatggcggcgacgccg

SEQ ID NO: 1586665 - DNA, 25 bp, Homo sapien
cgctattgtctaatggcggcgacgc

SEQ ID NO: 1586666 - DNA, 25 bp, Homo sapien
gctattgtctaatggcggcgacgcc

SEQ ID NO: 1586667 - DNA, 25 bp, Homo sapien
tgtggcacgacctggacgcgtgcca

SEQ ID NO: 1586668 - DNA, 25 bp, Homo sapien
agaaaggcagcggtaatgccgcctt

SEQ ID NO: 1586669 - DNA, 25 bp, Homo sapien
tgccacggacgtgctctgtgacctt

SEQ ID NO: 1586670 - DNA, 25 bp, Homo sapien
agggacccggctgcccgcgtcgaag

SEQ ID NO: 1586671 - DNA, 25 bp, Homo sapien
ggggacagttctgcagaaaaaccag

SEQ ID NO: 1586672 - DNA, 25 bp, Homo sapien
acaagctgaattcctggcaggtcag

SEQ ID NO: 1586673 - DNA, 25 bp, Homo sapien
tgccgccggccgctgttccacggat

SEQ ID NO: 1586674 - DNA, 25 bp, Homo sapien
gcgcccgtgccgccggccgctgttc

SEQ ID NO: 1586675 - DNA, 25 bp, Homo sapien
tgcccacacgggggcagtgtgtcat

SEQ ID NO: 1586676 - DNA, 25 bp, Homo sapien
ggccgctgttccacggatgcccaca

SEQ ID NO: 1586677 - DNA, 25 bp, Homo sapien
tataaattctggtggccacttccat

SEQ ID NO: 1586678 - DNA, 25 bp, Homo sapien
ttataaattctggtggccacttcca

SEQ ID NO: 1586679 - DNA, 25 bp, Homo sapien
ttttataaattctggtggccacttc

SEQ ID NO: 1586680 - DNA, 25 bp, Homo sapien
tttataaattctggtggccacttcc

SEQ ID NO: 1586681 - DNA, 25 bp, Homo sapien
tacagctgaggcgagccaggcatag

SEQ ID NO: 1586682 - DNA, 25 bp, Homo sapien
ccatgaccccaggatacagctgagg

SEQ ID NO: 1586683 - DNA, 25 bp, Homo sapien
ctcttaacagcgcaggcctctgtgt

SEQ ID NO: 1586684 - DNA, 25 bp, Homo sapien
ggttgtggcatgaatgtcccctcac

SEQ ID NO: 1586685 - DNA, 25 bp, Homo sapien
tcctgcgagtgacgcttggtgaaca

SEQ ID NO: 1586686 - DNA, 25 bp, Homo sapien
cagaccagaccaggtggatttcacc

SEQ ID NO: 1586687 - DNA, 25 bp, Homo sapien
cttgaaggccggtgggatcgtccca

SEQ ID NO: 1586688 - DNA, 25 bp, Homo sapien
tggcatcagtgtttactcctgcgag

SEQ ID NO: 1586689 - DNA, 25 bp, Homo sapien
tttgtcaacggcaaaggcagccttt

SEQ ID NO: 1586690 - DNA, 25 bp, Homo sapien
tcaaggagtacaacctggtctgagc

SEQ ID NO: 1586691 - DNA, 25 bp, Homo sapien
gacacggagaacatccgcttcgtgt

SEQ ID NO: 1586692 - DNA, 25 bp, Homo sapien
tgttcgcggccgtgaaggacaccat

SEQ ID NO: 1586693 - DNA, 25 bp, Homo sapien
gctgggaccgccaaaacgtcgtggc

SEQ ID NO: 1586694 - DNA, 25 bp, Homo sapien
gcagtggttctcgtgccagtggcac

SEQ ID NO: 1586695 - DNA, 25 bp, Homo sapien
aacgatttctcgtgagtgccgacca

SEQ ID NO: 1586696 - DNA, 25 bp, Homo sapien
cggacgggacccagtgatacttgta

SEQ ID NO: 1586697 - DNA, 25 bp, Homo sapien
gaaggtggcacttaccagcacgact

SEQ ID NO: 1586698 - DNA, 25 bp, Homo sapien
tcagtttcattgagtccgataggcc

SEQ ID NO: 1586699 - DNA, 25 bp, Homo sapien
cccagatactacagtgcagcagaga

SEQ ID NO: 1586700 - DNA, 25 bp, Homo sapien
cacaagggtgcgatttccccacatc

SEQ ID NO: 1586701 - DNA, 25 bp, Homo sapien
acagcgcccagccaatggtggctga

SEQ ID NO: 1586702 - DNA, 25 bp, Homo sapien
agcgcccagccaatggtggctgatt

SEQ ID NO: 1586703 - DNA, 25 bp, Homo sapien
cagcgcccagccaatggtggctgat

SEQ ID NO: 1586704 - DNA, 25 bp, Homo sapien
tagctcagcccgtttagggaaccgc

SEQ ID NO: 1586705 - DNA, 25 bp, Homo sapien
ccaaaaatgccgcagggagatgcta

SEQ ID NO: 1586706 - DNA, 25 bp, Homo sapien
tggattctgtggataccggcttcac

SEQ ID NO: 1586707 - DNA, 25 bp, Homo sapien
catgtggcaaggaagtagctcagcc

SEQ ID NO: 1586708 - DNA, 25 bp, Homo sapien
gatcaacaggatcctcttggagcag

SEQ ID NO: 1586709 - DNA, 25 bp, Homo sapien
catatacaatagcagacgtggctct

SEQ ID NO: 1586710 - DNA, 25 bp, Homo sapien
gccaagttccttgtccaacgtgcga

SEQ ID NO: 1586711 - DNA, 25 bp, Homo sapien
acattggcatcgtggagccgtcgcc

SEQ ID NO: 1586712 - DNA, 25 bp, Homo sapien
gactctgtgcacatagctggctcca

SEQ ID NO: 1586713 - DNA, 25 bp, Homo sapien
ctagtttgagccagagcgggactga

SEQ ID NO: 1586714 - DNA, 25 bp, Homo sapien
tgagactcgcacctagaattctggt

SEQ ID NO: 1586715 - DNA, 25 bp, Homo sapien
catcaaatctgtgtcgcgggtggca

SEQ ID NO: 1586716 - DNA, 25 bp, Homo sapien
ggtgaaggactcacacgaccccaag

SEQ ID NO: 1586717 - DNA, 25 bp, Homo sapien
tgaaggactcacacgaccccaagtt

SEQ ID NO: 1586718 - DNA, 25 bp, Homo sapien
gccgtgtcccattttgttggtgaag

SEQ ID NO: 1586719 - DNA, 25 bp, Homo sapien
ctggccgtgtcccattttgttggtg

SEQ ID NO: 1586720 - DNA, 25 bp, Homo sapien
actggagagtcgaggcggccacccc

SEQ ID NO: 1586721 - DNA, 25 bp, Homo sapien
gagttggaggcgttggagacagccc

SEQ ID NO: 1586722 - DNA, 25 bp, Homo sapien
tgagccaaatagacatgacccctgg

SEQ ID NO: 1586723 - DNA, 25 bp, Homo sapien
gtgcccagccgagaaaagcctgttt

SEQ ID NO: 1586724 - DNA, 25 bp, Homo sapien
gaaaatctgtggctggccctgcaag

SEQ ID NO: 1586725 - DNA, 25 bp, Homo sapien
gtgtctttgaacctctagtcccagg

SEQ ID NO: 1586726 - DNA, 25 bp, Homo sapien
gaagactccagcatcagtatcccgg

SEQ ID NO: 1586727 - DNA, 25 bp, Homo sapien
gcctgaagtttcagcttgcacccag

SEQ ID NO: 1586728 - DNA, 25 bp, Homo sapien
aacatcttcgtgtccatgcgggcca

SEQ ID NO: 1586729 - DNA, 25 bp, Homo sapien
caaaggtctgagcaacgcgagtgcc

SEQ ID NO: 1586730 - DNA, 25 bp, Homo sapien
tggagcggctgcagattccattcag

SEQ ID NO: 1586731 - DNA, 25 bp, Homo sapien
aaatgcagccaaggatacatgcgcg

SEQ ID NO: 1586732 - DNA, 25 bp, Homo sapien
ccctcctgtgcaatggggcaagtcc

SEQ ID NO: 1586733 - DNA, 25 bp, Homo sapien
ttcatcatcagtcccggtttcccct

SEQ ID NO: 1586734 - DNA, 25 bp, Homo sapien
gaggagtgggtctcagggatcagga

SEQ ID NO: 1586735 - DNA, 25 bp, Homo sapien
cagctgcagcctaactgcttcatca

SEQ ID NO: 1586736 - DNA, 25 bp, Homo sapien
caatgatggcttaccacggcctcaa

SEQ ID NO: 1586737 - DNA, 25 bp, Homo sapien
cagcaaagaccctagttcctaataa

SEQ ID NO: 1586738 - DNA, 25 bp, Homo sapien
gtttcaaaattgctccacccatacg

SEQ ID NO: 1586739 - DNA, 25 bp, Homo sapien
ttgaagtcctatttaaccctgcaag

SEQ ID NO: 1586740 - DNA, 25 bp, Homo sapien
tgctgaagacggtgctgatgatcct

SEQ ID NO: 1586741 - DNA, 25 bp, Homo sapien
tcttctgcctggtgatcttcgccgg

SEQ ID NO: 1586742 - DNA, 25 bp, Homo sapien
tggaactgcctgtgcgcctttgacc

SEQ ID NO: 1586743 - DNA, 25 bp, Homo sapien
tccttccgcagcagggaggtgtgca

SEQ ID NO: 1586744 - DNA, 25 bp, Homo sapien
accgcacccagtcctgcctcctttg

SEQ ID NO: 1586745 - DNA, 25 bp, Homo sapien
gtcctgcctcctttgaacacaaatc

SEQ ID NO: 1586746 - DNA, 25 bp, Homo sapien
cagtcctgcctcctttgaacacaaa

SEQ ID NO: 1586747 - DNA, 25 bp, Homo sapien
acccagtcctgcctcctttgaacac

SEQ ID NO: 1586748 - DNA, 25 bp, Homo sapien
ttgaatacaggaggggagcgaccac

SEQ ID NO: 1586749 - DNA, 25 bp, Homo sapien
aaattctgcatgtagcttctcccgg

SEQ ID NO: 1586750 - DNA, 25 bp, Homo sapien
ccaggccatcagtcggggattgaat

SEQ ID NO: 1586751 - DNA, 25 bp, Homo sapien
cctctgtgagcgaatctggcctggc

SEQ ID NO: 1586752 - DNA, 25 bp, Homo sapien
ccatcccaggagggttttctgcttc

SEQ ID NO: 1586753 - DNA, 25 bp, Homo sapien
tgaatcgtgggcagaagtgttcaca

SEQ ID NO: 1586754 - DNA, 25 bp, Homo sapien
gaaaagatgggagcccctgtgttcc

SEQ ID NO: 1586755 - DNA, 25 bp, Homo sapien
caaccgatccaggacttacccataa

SEQ ID NO: 1586756 - DNA, 25 bp, Homo sapien
tctgagcaggtacaaagaagaaaag

SEQ ID NO: 1586757 - DNA, 25 bp, Homo sapien
tgaggcgccagataacttaataagc

SEQ ID NO: 1586758 - DNA, 25 bp, Homo sapien
tgtgagggtgcctctgtacagctgc

SEQ ID NO: 1586759 - DNA, 25 bp, Homo sapien
ttcgtttggacatccggcaaggcct

SEQ ID NO: 1586760 - DNA, 25 bp, Homo sapien
caaagaagatttcccgcggctgaag

SEQ ID NO: 1586761 - DNA, 25 bp, Homo sapien
tgttacgtgtttcaggtgagaagca

SEQ ID NO: 1586762 - DNA, 25 bp, Homo sapien
tctgctacgagtaatttcatgaagt

SEQ ID NO: 1586763 - DNA, 25 bp, Homo sapien
gcagcaaagcgtcttaatgttcaaa

SEQ ID NO: 1586764 - DNA, 25 bp, Homo sapien
gaggcctcagctctttgccacgtgt

SEQ ID NO: 1586765 - DNA, 25 bp, Homo sapien
catttctgttgatcaggagtccagg

SEQ ID NO: 1586766 - DNA, 25 bp, Homo sapien
tctcatgagattgcaaactgtcagc

SEQ ID NO: 1586767 - DNA, 25 bp, Homo sapien
tccaggactgatttagctgggtggt

SEQ ID NO: 1586768 - DNA, 25 bp, Homo sapien
tgagccaccctgctcggttttgttt

SEQ ID NO: 1586769 - DNA, 25 bp, Homo sapien
aactatgagccaccctgctcggttt

SEQ ID NO: 1586770 - DNA, 25 bp, Homo sapien
ttacaactatgagccaccctgctcg

SEQ ID NO: 1586771 - DNA, 25 bp, Homo sapien
tatgagccaccctgctcggttttgt

SEQ ID NO: 1586772 - DNA, 25 bp, Homo sapien
tgtctaaaaagatctgtggggtgat

SEQ ID NO: 1586773 - DNA, 25 bp, Homo sapien
caaatatacaggacatctatgttac

SEQ ID NO: 1586774 - DNA, 25 bp, Homo sapien
actgtatgagattccattggaaggt

SEQ ID NO: 1586775 - DNA, 25 bp, Homo sapien
gagattccattggaaggttttccta

SEQ ID NO: 1586776 - DNA, 25 bp, Homo sapien
gttggcctcaaactcctgggctcaa

SEQ ID NO: 1586777 - DNA, 25 bp, Homo sapien
acccagctaatattttatatatata

SEQ ID NO: 1586778 - DNA, 25 bp, Homo sapien
ggttggcctcaaactcctgggctca

SEQ ID NO: 1586779 - DNA, 25 bp, Homo sapien
accgcccctggctgacacccggcta

SEQ ID NO: 1586780 - DNA, 25 bp, Homo sapien
ccgcccctggctgacacccggctaa

SEQ ID NO: 1586781 - DNA, 25 bp, Homo sapien
gaggccaaagcaaacgaataagctg

SEQ ID NO: 1586782 - DNA, 25 bp, Homo sapien
ggtgacaagagcgtgacgctgtctc

SEQ ID NO: 1586783 - DNA, 25 bp, Homo sapien
gccaaagcaaacgaataagctgagg

SEQ ID NO: 1586784 - DNA, 25 bp, Homo sapien
aaaacattctcaaggccatgtgcag

SEQ ID NO: 1586785 - DNA, 25 bp, Homo sapien
gacagggcgtcttcctaagttattc

SEQ ID NO: 1586786 - DNA, 25 bp, Homo sapien
acacatagacgcacacactcaggag

SEQ ID NO: 1586787 - DNA, 25 bp, Homo sapien
aagacgcaacgtttccaactctcgg

SEQ ID NO: 1586788 - DNA, 25 bp, Homo sapien
tctgtccggagaccaggtgagcaca

SEQ ID NO: 1586789 - DNA, 25 bp, Homo sapien
agcggagaccgcagaggcgggcagg

SEQ ID NO: 1586790 - DNA, 25 bp, Homo sapien
ggtgtcgcgggggtgcgtggcgctt

SEQ ID NO: 1586791 - DNA, 25 bp, Homo sapien
tggcgcttgcgagccctggccaggg

SEQ ID NO: 1586792 - DNA, 25 bp, Homo sapien
ggccgggcagcggagaccgcagagg

SEQ ID NO: 1586793 - DNA, 25 bp, Homo sapien
tgcatggtgcttagtcaaggactcc

SEQ ID NO: 1586794 - DNA, 25 bp, Homo sapien
gggcgcgacgagaaccaactcttta

SEQ ID NO: 1586795 - DNA, 25 bp, Homo sapien
gtgccttgccttccgagaataagta

SEQ ID NO: 1586796 - DNA, 25 bp, Homo sapien
gaacccgctcgctcctaaagagaaa

SEQ ID NO: 1586797 - DNA, 25 bp, Homo sapien
caagcatctcgtgtagggacccacg

SEQ ID NO: 1586798 - DNA, 25 bp, Homo sapien
tggccacgacattgcccttaagtaa

SEQ ID NO: 1586799 - DNA, 25 bp, Homo sapien
ccttaagtaatatgcattggccaga

SEQ ID NO: 1586800 - DNA, 25 bp, Homo sapien
tccccaggcgatacagagggagagc

SEQ ID NO: 1586801 - DNA, 25 bp, Homo sapien
ggcacctgacaatgacccgggtgga

SEQ ID NO: 1586802 - DNA, 25 bp, Homo sapien
gctatggacaccacacctatgccag

SEQ ID NO: 1586803 - DNA, 25 bp, Homo sapien
tcagatcccaaaggaatgccaaagg

SEQ ID NO: 1586804 - DNA, 25 bp, Homo sapien
gggaggcctcccaaatatatgcaaa

SEQ ID NO: 1586805 - DNA, 25 bp, Homo sapien
tcattttggttttcgcggacgcgcc

SEQ ID NO: 1586806 - DNA, 25 bp, Homo sapien
gctttctgcttaccgcacactggat

SEQ ID NO: 1586807 - DNA, 25 bp, Homo sapien
cccaatccggagaaggttccagcag

SEQ ID NO: 1586808 - DNA, 25 bp, Homo sapien
aaaaatgctcatgaacccaatccgg

SEQ ID NO: 1586809 - DNA, 25 bp, Homo sapien
cattgttcagggtaaggtccagggc

SEQ ID NO: 1586810 - DNA, 25 bp, Homo sapien
ttccaagatattgcagggccctggg

SEQ ID NO: 1586811 - DNA, 25 bp, Homo sapien
gctcccaggaaaaaagtcacgtgcc

SEQ ID NO: 1586812 - DNA, 25 bp, Homo sapien
tgtttaatctgctcagggcgtctgg

SEQ ID NO: 1586813 - DNA, 25 bp, Homo sapien
agatttgcttggagacggcgctcag

SEQ ID NO: 1586814 - DNA, 25 bp, Homo sapien
cagatggagtcatttcacgggcttc

SEQ ID NO: 1586815 - DNA, 25 bp, Homo sapien
tgcgggtgtctcctcaaccagggat

SEQ ID NO: 1586816 - DNA, 25 bp, Homo sapien
taatgcaggccattgggaagcagct

SEQ ID NO: 1586817 - DNA, 25 bp, Homo sapien
gagtataagaagaatcaccaggcag

SEQ ID NO: 1586818 - DNA, 25 bp, Homo sapien
ggactccattctgaacgtggtctcc

SEQ ID NO: 1586819 - DNA, 25 bp, Homo sapien
tccattctgaacgtggtctcctcct

SEQ ID NO: 1586820 - DNA, 25 bp, Homo sapien
ctctggtcctggtataggttggact

SEQ ID NO: 1586821 - DNA, 25 bp, Homo sapien
actccattctgaacgtggtctcctc

SEQ ID NO: 1586822 - DNA, 25 bp, Homo sapien
ctggccttggaacaccagaggcggt

SEQ ID NO: 1586823 - DNA, 25 bp, Homo sapien
cagcaagaccaaatagacgatgaac

SEQ ID NO: 1586824 - DNA, 25 bp, Homo sapien
aggaagccgactaccgcagccaggc

SEQ ID NO: 1586825 - DNA, 25 bp, Homo sapien
ttggaacaccagaggcggttggcca

SEQ ID NO: 1586826 - DNA, 25 bp, Homo sapien
gaagttggggaggttcgactcagag

SEQ ID NO: 1586827 - DNA, 25 bp, Homo sapien
gttggggaggttcgactcagaggaa

SEQ ID NO: 1586828 - DNA, 25 bp, Homo sapien
gggaggttcgactcagaggaagaaa

SEQ ID NO: 1586829 - DNA, 25 bp, Homo sapien
caggaagttggggaggttcgactca

SEQ ID NO: 1586830 - DNA, 25 bp, Homo sapien
ccagcaccagaagggcccccagggt

SEQ ID NO: 1586831 - DNA, 25 bp, Homo sapien
ccacaggtttggtgtgggcgaggcc

SEQ ID NO: 1586832 - DNA, 25 bp, Homo sapien
gacggtcgagtgagccagcagccag

SEQ ID NO: 1586833 - DNA, 25 bp, Homo sapien
cggcgtccacaggtttggtgtgggc

SEQ ID NO: 1586834 - DNA, 25 bp, Homo sapien
cgggtcggcgtccacaggtttggtg

SEQ ID NO: 1586835 - DNA, 25 bp, Homo sapien
cttaacaccccgtgaaatggtgccg

SEQ ID NO: 1586836 - DNA, 25 bp, Homo sapien
tgtgctctcagagtacacatgaggc

SEQ ID NO: 1586837 - DNA, 25 bp, Homo sapien
gaggctccgtgctcggcaatttcac

SEQ ID NO: 1586838 - DNA, 25 bp, Homo sapien
gccggtctcattgtgcccaggaaag

SEQ ID NO: 1586839 - DNA, 25 bp, Homo sapien
ttgaaggcaatggaggggcggcggg

SEQ ID NO: 1586840 - DNA, 25 bp, Homo sapien
cagaaggagcttcgggatggggggt

SEQ ID NO: 1586841 - DNA, 25 bp, Homo sapien
ggtccttgaaggcaatggaggggcg

SEQ ID NO: 1586842 - DNA, 25 bp, Homo sapien
gatggggggtccttgaaggcaatgg

SEQ ID NO: 1586843 - DNA, 25 bp, Homo sapien
cctccaagtcctcgccggtcaggct

SEQ ID NO: 1586844 - DNA, 25 bp, Homo sapien
gctggggcgcagctcccggggtgcg

SEQ ID NO: 1586845 - DNA, 25 bp, Homo sapien
ctcctggtctggcttcgggccaaac

SEQ ID NO: 1586846 - DNA, 25 bp, Homo sapien
ctggtctggcttcgggccaaacgcc

SEQ ID NO: 1586847 - DNA, 25 bp, Homo sapien
ccggtactcctcgtacagcggcggg

SEQ ID NO: 1586848 - DNA, 25 bp, Homo sapien
acagcacgtacctgggcaggcggat

SEQ ID NO: 1586849 - DNA, 25 bp, Homo sapien
tgaggtgcccgacgatggcgtaggc

SEQ ID NO: 1586850 - DNA, 25 bp, Homo sapien
ggtcgtgggcgaggtctttgatgag

SEQ ID NO: 1586851 - DNA, 25 bp, Homo sapien
gtgacccacacagcggaagtattaa

SEQ ID NO: 1586852 - DNA, 25 bp, Homo sapien
acccacacagcggaagtattaaggg

SEQ ID NO: 1586853 - DNA, 25 bp, Homo sapien
gacccacacagcggaagtattaagg

SEQ ID NO: 1586854 - DNA, 25 bp, Homo sapien
aggtgacccacacagcggaagtatt

SEQ ID NO: 1586855 - DNA, 25 bp, Homo sapien
gagccccacggaaccatagtagaat

SEQ ID NO: 1586856 - DNA, 25 bp, Homo sapien
gaacagatcgcaagagagagagccc

SEQ ID NO: 1586857 - DNA, 25 bp, Homo sapien
ggttggaggccaacaagaaagtgac

SEQ ID NO: 1586858 - DNA, 25 bp, Homo sapien
ttcactgaagccgaaagcaaggtca

SEQ ID NO: 1586859 - DNA, 25 bp, Homo sapien
gaccctgtgtcccattcctagtgaa

SEQ ID NO: 1586860 - DNA, 25 bp, Homo sapien
tgcgcccagcaagacacaagcgatg

SEQ ID NO: 1586861 - DNA, 25 bp, Homo sapien
tgaagctgaagccaccataacgtca

SEQ ID NO: 1586862 - DNA, 25 bp, Homo sapien
ggtttagacgccaaagctctgcggg

SEQ ID NO: 1586863 - DNA, 25 bp, Homo sapien
cagctgctccaggccgtccgcgtac

SEQ ID NO: 1586864 - DNA, 25 bp, Homo sapien
aggagggggccccgcgcagctgctc

SEQ ID NO: 1586865 - DNA, 25 bp, Homo sapien
ctaggagggggccccgcgcagctgc

SEQ ID NO: 1586866 - DNA, 25 bp, Homo sapien
cgcagctgctccaggccgtccgcgt

SEQ ID NO: 1586867 - DNA, 25 bp, Homo sapien
acgtagccgacctcgtggcggaaga

SEQ ID NO: 1586868 - DNA, 25 bp, Homo sapien
cgctctgggtcgtccgcgtgagcct

SEQ ID NO: 1586869 - DNA, 25 bp, Homo sapien
tgcagctgtcccaggacgtagccga

SEQ ID NO: 1586870 - DNA, 25 bp, Homo sapien
cgcccggtctcgtgctcatacatgt

SEQ ID NO: 1586871 - DNA, 25 bp, Homo sapien
tccagcctgcgcacggccagctggc

SEQ ID NO: 1586872 - DNA, 25 bp, Homo sapien
cacgtcacgctcctcagccggcggg

SEQ ID NO: 1586873 - DNA, 25 bp, Homo sapien
ttgcgcagggcgaacatggcgcggt

SEQ ID NO: 1586874 - DNA, 25 bp, Homo sapien
tatcgctcgaagagcggccgggact

SEQ ID NO: 1586875 - DNA, 25 bp, Homo sapien
gcctgcgggccactgtaagggcttg

SEQ ID NO: 1586876 - DNA, 25 bp, Homo sapien
ctgcgggccactgtaagggcttggg

SEQ ID NO: 1586877 - DNA, 25 bp, Homo sapien
cctgcgggccactgtaagggcttgg

SEQ ID NO: 1586878 - DNA, 25 bp, Homo sapien
caggatctccagaacttccgggtcc

SEQ ID NO: 1586879 - DNA, 25 bp, Homo sapien
acggggtccgaggaatactgcttca

SEQ ID NO: 1586880 - DNA, 25 bp, Homo sapien
ctcgatgacggggtccgaggaatac

SEQ ID NO: 1586881 - DNA, 25 bp, Homo sapien
tcaggatctccagaacttccgggtc

SEQ ID NO: 1586882 - DNA, 25 bp, Homo sapien
agaagcagccggagagctcatgttg

SEQ ID NO: 1586883 - DNA, 25 bp, Homo sapien
gaagaagcagccggagagctcatgt

SEQ ID NO: 1586884 - DNA, 25 bp, Homo sapien
ctgggaagaagcagccggagagctc

SEQ ID NO: 1586885 - DNA, 25 bp, Homo sapien
aagcagccggagagctcatgttggt

SEQ ID NO: 1586886 - DNA, 25 bp, Homo sapien
tcctgacgggtgtcttgcagcacgt

SEQ ID NO: 1586887 - DNA, 25 bp, Homo sapien
tgatccatgcaatggcgcctgggcc

SEQ ID NO: 1586888 - DNA, 25 bp, Homo sapien
atggcgcgggcatcctgcatctggc

SEQ ID NO: 1586889 - DNA, 25 bp, Homo sapien
ggaatcgtcatcgaaggcctggctg

SEQ ID NO: 1586890 - DNA, 25 bp, Homo sapien
gctgtcaatgggtcccggccttcca

SEQ ID NO: 1586891 - DNA, 25 bp, Homo sapien
gtcaatgggtcccggccttccacaa

SEQ ID NO: 1586892 - DNA, 25 bp, Homo sapien
tgctgtcaatgggtcccggccttcc

SEQ ID NO: 1586893 - DNA, 25 bp, Homo sapien
cgtgctgtcaatgggtcccggcctt

SEQ ID NO: 1586894 - DNA, 25 bp, Homo sapien
cgtgatcgccgcctccgggacgcct

SEQ ID NO: 1586895 - DNA, 25 bp, Homo sapien
gatcgccgcctccgggacgcctcac

SEQ ID NO: 1586896 - DNA, 25 bp, Homo sapien
tgatcgccgcctccgggacgcctca

SEQ ID NO: 1586897 - DNA, 25 bp, Homo sapien
gtgatcgccgcctccgggacgcctc

SEQ ID NO: 1586898 - DNA, 25 bp, Homo sapien
tgagacctagtgagaggctccgtgc

SEQ ID NO: 1586899 - DNA, 25 bp, Homo sapien
gcaacgtatgccctttcatgggaaa

SEQ ID NO: 1586900 - DNA, 25 bp, Homo sapien
tccccactgcggtacaagaagtgag

SEQ ID NO: 1586901 - DNA, 25 bp, Homo sapien
cagtattcctagtgcgttcttcggg

SEQ ID NO: 1586902 - DNA, 25 bp, Homo sapien
gaagacgaagttgccattgtcccga

SEQ ID NO: 1586903 - DNA, 25 bp, Homo sapien
tgctgtctacacaacatgaagcctg

SEQ ID NO: 1586904 - DNA, 25 bp, Homo sapien
tgcagagcctttagggagacccgtt

SEQ ID NO: 1586905 - DNA, 25 bp, Homo sapien
tgaagcctgggtcggaatagcatca

SEQ ID NO: 1586906 - DNA, 25 bp, Homo sapien
gggctcctgctatccgtggctgtga

SEQ ID NO: 1586907 - DNA, 25 bp, Homo sapien
ttgtcatcaaatcagggctcaccct

SEQ ID NO: 1586908 - DNA, 25 bp, Homo sapien
tgtccaatcagagtcccattcccag

SEQ ID NO: 1586909 - DNA, 25 bp, Homo sapien
taatcacatctgcaagaaactcgtg

SEQ ID NO: 1586910 - DNA, 25 bp, Homo sapien
cagtaatagaagtgtagtccaggcc

SEQ ID NO: 1586911 - DNA, 25 bp, Homo sapien
gagctcaaaggcaggatcacacgga

SEQ ID NO: 1586912 - DNA, 25 bp, Homo sapien
tggtcgtccctcaatgtgctcagcg

SEQ ID NO: 1586913 - DNA, 25 bp, Homo sapien
taacgccatgcgagtagtttcggga

SEQ ID NO: 1586914 - DNA, 25 bp, Homo sapien
tgagaggatgggagtgcggatgctt

SEQ ID NO: 1586915 - DNA, 25 bp, Homo sapien
agcagatggttgagcggatggatga

SEQ ID NO: 1586916 - DNA, 25 bp, Homo sapien
agtgcggatgcttgagcggatggga

SEQ ID NO: 1586917 - DNA, 25 bp, Homo sapien
tgtttgagtggatgggagagtgtat

SEQ ID NO: 1586918 - DNA, 25 bp, Homo sapien
agagcggatgagagagtggatggtt

SEQ ID NO: 1586919 - DNA, 25 bp, Homo sapien
gatgagagagtggatggttgagcgg

SEQ ID NO: 1586920 - DNA, 25 bp, Homo sapien
ggatgagagagtggatggttgagcg

SEQ ID NO: 1586921 - DNA, 25 bp, Homo sapien
agcggatgagagagtggatggttga

SEQ ID NO: 1586922 - DNA, 25 bp, Homo sapien
cagtaactgtatgcacgtggctgga

SEQ ID NO: 1586923 - DNA, 25 bp, Homo sapien
catctgtgcagagttgatgagcccc

SEQ ID NO: 1586924 - DNA, 25 bp, Homo sapien
aatgctccaaccttggctaggtgcg

SEQ ID NO: 1586925 - DNA, 25 bp, Homo sapien
cagatgaccctgtgaacgtcctaca

SEQ ID NO: 1586926 - DNA, 25 bp, Homo sapien
tccccacatcccaacatcctggtgt

SEQ ID NO: 1586927 - DNA, 25 bp, Homo sapien
ctccccacatcccaacatcctggtg

SEQ ID NO: 1586928 - DNA, 25 bp, Homo sapien
cccatttcatcggtggggacgtgga

SEQ ID NO: 1586929 - DNA, 25 bp, Homo sapien
accaccccttcccatttcatcggtg

SEQ ID NO: 1586930 - DNA, 25 bp, Homo sapien
ccgtcttacagtgaggtggcgttca

SEQ ID NO: 1586931 - DNA, 25 bp, Homo sapien
gtggcgttcagtaccttcaccacgc

SEQ ID NO: 1586932 - DNA, 25 bp, Homo sapien
aaatacaaaatctaccgtcttacag

SEQ ID NO: 1586933 - DNA, 25 bp, Homo sapien
tgtccccattatgtcacctagtcac

SEQ ID NO: 1586934 - DNA, 25 bp, Homo sapien
ctgagtctcgttccagcacggtggc

SEQ ID NO: 1586935 - DNA, 25 bp, Homo sapien
catagaagtgggatcacagcgtacc

SEQ ID NO: 1586936 - DNA, 25 bp, Homo sapien
cacaaatcgtgctgctgtgagccac

SEQ ID NO: 1586937 - DNA, 25 bp, Homo sapien
tcagagcttcgcacctccttgtggc

SEQ ID NO: 1586938 - DNA, 25 bp, Homo sapien
cactgggtggcctttatgctgtcaa

SEQ ID NO: 1586939 - DNA, 25 bp, Homo sapien
gaacaaatgtgtctgcggccgtctc

SEQ ID NO: 1586940 - DNA, 25 bp, Homo sapien
aaaggctcatgtgtgtgacgtcccc

SEQ ID NO: 1586941 - DNA, 25 bp, Homo sapien
actgcaaacgcactgggagcttcgg

SEQ ID NO: 1586942 - DNA, 25 bp, Homo sapien
cctttctagtggaaaagccgagtct

SEQ ID NO: 1586943 - DNA, 25 bp, Homo sapien
tcctgccatgagagctggaaccggg

SEQ ID NO: 1586944 - DNA, 25 bp, Homo sapien
tttgaaccctgctagactgtcttgg

SEQ ID NO: 1586945 - DNA, 25 bp, Homo sapien
gggctcccgcaagtgtgtaataacg

SEQ ID NO: 1586946 - DNA, 25 bp, Homo sapien
gaggctggacaaggactgtaggaat

SEQ ID NO: 1586947 - DNA, 25 bp, Homo sapien
ctggcctagtgggtcccccagtctt

SEQ ID NO: 1586948 - DNA, 25 bp, Homo sapien
gctggacaaggactgtaggaatcca

SEQ ID NO: 1586949 - DNA, 25 bp, Homo sapien
tggcctagtgggtcccccagtcttc

SEQ ID NO: 1586950 - DNA, 25 bp, Homo sapien
tgaaggacagactccaagtggcgag

SEQ ID NO: 1586951 - DNA, 25 bp, Homo sapien
taccaacaccgtgagtgcagcatgc

SEQ ID NO: 1586952 - DNA, 25 bp, Homo sapien
caaagcactcgctgtagacatgggc

SEQ ID NO: 1586953 - DNA, 25 bp, Homo sapien
agtgctcaacaggaaccggtacggg

SEQ ID NO: 1586954 - DNA, 25 bp, Homo sapien
atctctttatttgctgccagcagag

SEQ ID NO: 1586955 - DNA, 25 bp, Homo sapien
ctctttatttgctgccagcagagtc

SEQ ID NO: 1586956 - DNA, 25 bp, Homo sapien
catctctttatttgctgccagcaga

SEQ ID NO: 1586957 - DNA, 25 bp, Homo sapien
tctctttatttgctgccagcagagt

SEQ ID NO: 1586958 - DNA, 25 bp, Homo sapien
caggctccagccgtcctgagggggc

SEQ ID NO: 1586959 - DNA, 25 bp, Homo sapien
tcctgagggggccctggcagtgtct

SEQ ID NO: 1586960 - DNA, 25 bp, Homo sapien
ccaggctccagccgtcctgaggggg

SEQ ID NO: 1586961 - DNA, 25 bp, Homo sapien
tgagggggccctggcagtgtctgga

SEQ ID NO: 1586962 - DNA, 25 bp, Homo sapien
gattagagttgagaatgggacaccc

SEQ ID NO: 1586963 - DNA, 25 bp, Homo sapien
tagagttgagaatgggacaccctca

SEQ ID NO: 1586964 - DNA, 25 bp, Homo sapien
ttagagttgagaatgggacaccctc

SEQ ID NO: 1586965 - DNA, 25 bp, Homo sapien
ggattagagttgagaatgggacacc

SEQ ID NO: 1586966 - DNA, 25 bp, Homo sapien
ctcgtgcgtccccacagttcccttg

SEQ ID NO: 1586967 - DNA, 25 bp, Homo sapien
tgcgtccccacagttcccttgcaca

SEQ ID NO: 1586968 - DNA, 25 bp, Homo sapien
cgtccccacagttcccttgcacagg

SEQ ID NO: 1586969 - DNA, 25 bp, Homo sapien
gcatcctcgtgcgtccccacagttc

SEQ ID NO: 1586970 - DNA, 25 bp, Homo sapien
ggaggggtggaaatggcattagaga

SEQ ID NO: 1586971 - DNA, 25 bp, Homo sapien
gcattagagagtgtgggtcagtgtc

SEQ ID NO: 1586972 - DNA, 25 bp, Homo sapien
cattagagagtgtgggtcagtgtct

SEQ ID NO: 1586973 - DNA, 25 bp, Homo sapien
ggggtggaaatggcattagagagtg

SEQ ID NO: 1586974 - DNA, 25 bp, Homo sapien
ccaccatcgcccagtggtaaaagct

SEQ ID NO: 1586975 - DNA, 25 bp, Homo sapien
gccacagcaggaggctacagagaca

SEQ ID NO: 1586976 - DNA, 25 bp, Homo sapien
gtggtaaaagctcacgcaggccctg

SEQ ID NO: 1586977 - DNA, 25 bp, Homo sapien
cgtcacagccaccatcgcccagtgg

SEQ ID NO: 1586978 - DNA, 25 bp, Homo sapien
agccgtacacgaacgctccgctgtt

SEQ ID NO: 1586979 - DNA, 25 bp, Homo sapien
gccaccttatccaagaagctcatgg

SEQ ID NO: 1586980 - DNA, 25 bp, Homo sapien
gctcatggagccgtacacgaacgct

SEQ ID NO: 1586981 - DNA, 25 bp, Homo sapien
aagaagctcatggagccgtacacga

SEQ ID NO: 1586982 - DNA, 25 bp, Homo sapien
agcacagccgctgcgtacacggcca

SEQ ID NO: 1586983 - DNA, 25 bp, Homo sapien
gtgacgaggatggtggcacagccag

SEQ ID NO: 1586984 - DNA, 25 bp, Homo sapien
gggaccgatgaggtcggccgtcatg

SEQ ID NO: 1586985 - DNA, 25 bp, Homo sapien
gccgtcatggccagcgaggtgacga

SEQ ID NO: 1586986 - DNA, 25 bp, Homo sapien
ccaggggaatggtcgcgatgaactt

SEQ ID NO: 1586987 - DNA, 25 bp, Homo sapien
aagccgctgaggtacatcaccaggg

SEQ ID NO: 1586988 - DNA, 25 bp, Homo sapien
caatgcacttgttgatgggcttcat

SEQ ID NO: 1586989 - DNA, 25 bp, Homo sapien
gacaagaagccgctgaggtacatca

SEQ ID NO: 1586990 - DNA, 25 bp, Homo sapien
gtacatggccatgtaggtctgggac

SEQ ID NO: 1586991 - DNA, 25 bp, Homo sapien
caggtggagcgagtaggtgaggtac

SEQ ID NO: 1586992 - DNA, 25 bp, Homo sapien
cctggtggtcatgtacagtatgccc

SEQ ID NO: 1586993 - DNA, 25 bp, Homo sapien
aggttcacgatgagcctggtggtca

SEQ ID NO: 1586994 - DNA, 25 bp, Homo sapien
gcccaggtggaatagcagtgagaac

SEQ ID NO: 1586995 - DNA, 25 bp, Homo sapien
agtgagaacacggcgccgacaccca

SEQ ID NO: 1586996 - DNA, 25 bp, Homo sapien
tagaaagccggctcccggagccagt

SEQ ID NO: 1586997 - DNA, 25 bp, Homo sapien
ccgggtgcccaggtggaatagcagt

SEQ ID NO: 1586998 - DNA, 25 bp, Homo sapien
ccaggcggcgccgtagacggtgatg

SEQ ID NO: 1586999 - DNA, 25 bp, Homo sapien
cacccgcgacgagccctgcaggtgc

SEQ ID NO: 1587000 - DNA, 25 bp, Homo sapien
cggcgccgtagacggtgatgttggc

SEQ ID NO: 1587001 - DNA, 25 bp, Homo sapien
tgatgctgatgtcttgggtgggctc

SEQ ID NO: 1587002 - DNA, 25 bp, Homo sapien
gactgacaggtgattccaaccactg

SEQ ID NO: 1587003 - DNA, 25 bp, Homo sapien
tcaacaagacgccaggaacctgggt

SEQ ID NO: 1587004 - DNA, 25 bp, Homo sapien
tacctaacgcgggaaagctgtgacc

SEQ ID NO: 1587005 - DNA, 25 bp, Homo sapien
ccaggaccagggtacagtgactcgg

SEQ ID NO: 1587006 - DNA, 25 bp, Homo sapien
agtgtgttataaccaaggaccttgg

SEQ ID NO: 1587007 - DNA, 25 bp, Homo sapien
ccttggtcagctcgggtgtgtccac

SEQ ID NO: 1587008 - DNA, 25 bp, Homo sapien
taaccaaggaccttggtcagctcgg

SEQ ID NO: 1587009 - DNA, 25 bp, Homo sapien
caaggaccttggtcagctcgggtgt

SEQ ID NO: 1587010 - DNA, 25 bp, Homo sapien
aaaacagctgggtgtagtgacatac

SEQ ID NO: 1587011 - DNA, 25 bp, Homo sapien
cagctgggtgtagtgacatactcct

SEQ ID NO: 1587012 - DNA, 25 bp, Homo sapien
tgggtgtagtgacatactcctgtag

SEQ ID NO: 1587013 - DNA, 25 bp, Homo sapien
taaaaaacagctgggtgtagtgaca

SEQ ID NO: 1587014 - DNA, 25 bp, Homo sapien
gaagatcacgatgaacgggccgtag

SEQ ID NO: 1587015 - DNA, 25 bp, Homo sapien
gctccaccttctcatggtcgttggt

SEQ ID NO: 1587016 - DNA, 25 bp, Homo sapien
gcccagccaaactggaagatcacga

SEQ ID NO: 1587017 - DNA, 25 bp, Homo sapien
tcatggtcgttggtgacgagctccg

SEQ ID NO: 1587018 - DNA, 25 bp, Homo sapien
cgaccaggtgccaggccttgcgcgg

SEQ ID NO: 1587019 - DNA, 25 bp, Homo sapien
cctcgtagcccacgagcggtgtgca

SEQ ID NO: 1587020 - DNA, 25 bp, Homo sapien
acaggtcgttgaggaagtggcccac

SEQ ID NO: 1587021 - DNA, 25 bp, Homo sapien
taggcgcgcaccgagtgcaggtaga

SEQ ID NO: 1587022 - DNA, 25 bp, Homo sapien
gcaggtaggtgaaccacatggacgc

SEQ ID NO: 1587023 - DNA, 25 bp, Homo sapien
gccgcgccaccagggacagcggccg

SEQ ID NO: 1587024 - DNA, 25 bp, Homo sapien
cgcgccaccagggacagcggccgcg

SEQ ID NO: 1587025 - DNA, 25 bp, Homo sapien
caccagggacagcggccgcggggac

SEQ ID NO: 1587026 - DNA, 25 bp, Homo sapien
agccgcgccaccagggacagcggcc

SEQ ID NO: 1587027 - DNA, 25 bp, Homo sapien
ggctccgcggagggtaccctggcca

SEQ ID NO: 1587028 - DNA, 25 bp, Homo sapien
gctccgcggagggtaccctggccag

SEQ ID NO: 1587029 - DNA, 25 bp, Homo sapien
ccgcgtcccgctctcttacggccgc

SEQ ID NO: 1587030 - DNA, 25 bp, Homo sapien
tcccgctctcttacggccgcgccct

SEQ ID NO: 1587031 - DNA, 25 bp, Homo sapien
cgccgggcaccccgcgtcccgctct

SEQ ID NO: 1587032 - DNA, 25 bp, Homo sapien
gcgccctcacccacgtccgccgcgt

SEQ ID NO: 1587033 - DNA, 25 bp, Homo sapien
tggagtcctggctactccggaggtt

SEQ ID NO: 1587034 - DNA, 25 bp, Homo sapien
ctccggaggttgctgtgggaggatc

SEQ ID NO: 1587035 - DNA, 25 bp, Homo sapien
cactgaagcccaggaaacgaaggct

SEQ ID NO: 1587036 - DNA, 25 bp, Homo sapien
actgaagcccaggaaacgaaggctg

SEQ ID NO: 1587037 - DNA, 25 bp, Homo sapien
agctgagatccgatgactacactcc

SEQ ID NO: 1587038 - DNA, 25 bp, Homo sapien
aatacacagcagaataggacctcac

SEQ ID NO: 1587039 - DNA, 25 bp, Homo sapien
catgaaggcactggtataatacaca

SEQ ID NO: 1587040 - DNA, 25 bp, Homo sapien
agttgaagcttacagcatgaaggca

SEQ ID NO: 1587041 - DNA, 25 bp, Homo sapien
tctgagcgatattattgagtaaaca

SEQ ID NO: 1587042 - DNA, 25 bp, Homo sapien
gctgccatctagtttcacgcagatt

SEQ ID NO: 1587043 - DNA, 25 bp, Homo sapien
tgccatctagtttcacgcagattct

SEQ ID NO: 1587044 - DNA, 25 bp, Homo sapien
gccggctgccatctagtttcacgca

SEQ ID NO: 1587045 - DNA, 25 bp, Homo sapien
cggctgccatctagtttcacgcaga

SEQ ID NO: 1587046 - DNA, 25 bp, Homo sapien
tatttaaccctttgaggaaatgcca

SEQ ID NO: 1587047 - DNA, 25 bp, Homo sapien
ttaaccctttgaggaaatgccagtc

SEQ ID NO: 1587048 - DNA, 25 bp, Homo sapien
caaagcagctgcatctgcctcctag

SEQ ID NO: 1587049 - DNA, 25 bp, Homo sapien
agcagctgcatctgcctcctagaca

SEQ ID NO: 1587050 - DNA, 25 bp, Homo sapien
caatgggaccgttcgccgaggcctt

SEQ ID NO: 1587051 - DNA, 25 bp, Homo sapien
tcgcgcagtcgggaggtccgggaaa

SEQ ID NO: 1587052 - DNA, 25 bp, Homo sapien
cggttggttggagcgtcgcgcagtc

SEQ ID NO: 1587053 - DNA, 25 bp, Homo sapien
gccgaggccttcattagcatgccgg

SEQ ID NO: 1587054 - DNA, 25 bp, Homo sapien
tcgggctcatgcactctcgctgcag

SEQ ID NO: 1587055 - DNA, 25 bp, Homo sapien
tgaccgcggtatccttggctccagg

SEQ ID NO: 1587056 - DNA, 25 bp, Homo sapien
gcctcctcgggctcatgcactctcg

SEQ ID NO: 1587057 - DNA, 25 bp, Homo sapien
gggctgaccgcggtatccttggctc

SEQ ID NO: 1587058 - DNA, 25 bp, Homo sapien
aagtcaacgccaaccctgtactcaa

SEQ ID NO: 1587059 - DNA, 25 bp, Homo sapien
gatttgaattgcttgtggctccgcc

SEQ ID NO: 1587060 - DNA, 25 bp, Homo sapien
cctgtgggcccgttctccagcagaa

SEQ ID NO: 1587061 - DNA, 25 bp, Homo sapien
tgtactcaaacctcggcccatagtt

SEQ ID NO: 1587062 - DNA, 25 bp, Homo sapien
aaggcaccggtcacgggctacgtgc

SEQ ID NO: 1587063 - DNA, 25 bp, Homo sapien
aagattctgccgaatgggcccaagg

SEQ ID NO: 1587064 - DNA, 25 bp, Homo sapien
aagaaacgcggctggcccaagggca

SEQ ID NO: 1587065 - DNA, 25 bp, Homo sapien
cccaagggcaagaagcggaagaaga

SEQ ID NO: 1587066 - DNA, 25 bp, Homo sapien
acgcctgtcatcccagcactttggg

SEQ ID NO: 1587067 - DNA, 25 bp, Homo sapien
tcacctgaggtcagaccagcctggc

SEQ ID NO: 1587068 - DNA, 25 bp, Homo sapien
tgggaggggtcgggcgcggtggctc

SEQ ID NO: 1587069 - DNA, 25 bp, Homo sapien
catagtgaaaccctccccctctact

SEQ ID NO: 1587070 - DNA, 25 bp, Homo sapien
gaacccggaaaaagcactcgctgcg

SEQ ID NO: 1587071 - DNA, 25 bp, Homo sapien
cagaagaacctcacagccgagggtg

SEQ ID NO: 1587072 - DNA, 25 bp, Homo sapien
tcgctgcgcgatacacccagaagaa

SEQ ID NO: 1587073 - DNA, 25 bp, Homo sapien
ggaggacagccacgcgctacactgg

SEQ ID NO: 1587074 - DNA, 25 bp, Homo sapien
tcagggtcaaagagcatgcaaggcc

SEQ ID NO: 1587075 - DNA, 25 bp, Homo sapien
caaaggtggtttgattgcaggttcc

SEQ ID NO: 1587076 - DNA, 25 bp, Homo sapien
ggaagcaactgtaccccagcaagta

SEQ ID NO: 1587077 - DNA, 25 bp, Homo sapien
gaggcccaatgcacaaactccagag

SEQ ID NO: 1587078 - DNA, 25 bp, Homo sapien
ccactgtactccaggctgggccaca

SEQ ID NO: 1587079 - DNA, 25 bp, Homo sapien
tgtactccaggctgggccacagagt

SEQ ID NO: 1587080 - DNA, 25 bp, Homo sapien
actgtactccaggctgggccacaga

SEQ ID NO: 1587081 - DNA, 25 bp, Homo sapien
gtactccaggctgggccacagagtg

SEQ ID NO: 1587082 - DNA, 25 bp, Homo sapien
gaacaggcagatgggctgtccgagg

SEQ ID NO: 1587083 - DNA, 25 bp, Homo sapien
ccaagggctccgcggaaaggcgcgg

SEQ ID NO: 1587084 - DNA, 25 bp, Homo sapien
cttggtaaaaggatcagggaggagt

SEQ ID NO: 1587085 - DNA, 25 bp, Homo sapien
tgcttggtaaaaggatcagggagga

SEQ ID NO: 1587086 - DNA, 25 bp, Homo sapien
ccggagcgctgcgtgagctggggct

SEQ ID NO: 1587087 - DNA, 25 bp, Homo sapien
cggagcgctgcgtgagctggggctg

SEQ ID NO: 1587088 - DNA, 25 bp, Homo sapien
ggagcgctgcgtgagctggggctgg

SEQ ID NO: 1587089 - DNA, 25 bp, Homo sapien
gcaggcgggtttcgcagcactgtct

SEQ ID NO: 1587090 - DNA, 25 bp, Homo sapien
ggcggaacaggatatacacccaggg

SEQ ID NO: 1587091 - DNA, 25 bp, Homo sapien
cgcgcaagtagatgagcagctcctt

SEQ ID NO: 1587092 - DNA, 25 bp, Homo sapien
ttccaggtggccacgcgcaagtaga

SEQ ID NO: 1587093 - DNA, 25 bp, Homo sapien
caccctcataggctcacagtccagt

SEQ ID NO: 1587094 - DNA, 25 bp, Homo sapien
agcagctgaggaactcccagggcgc

SEQ ID NO: 1587095 - DNA, 25 bp, Homo sapien
cctgtaggctgaatgaagcagcaac

SEQ ID NO: 1587096 - DNA, 25 bp, Homo sapien
cctgagcagtaggtcctgtaggctg

SEQ ID NO: 1587097 - DNA, 25 bp, Homo sapien
ggtattgcacggtgtagcgacccac

SEQ ID NO: 1587098 - DNA, 25 bp, Homo sapien
tgctgggacaccacgatggtaccgg

SEQ ID NO: 1587099 - DNA, 25 bp, Homo sapien
tcctgcccgtggtagacgtggcaca

SEQ ID NO: 1587100 - DNA, 25 bp, Homo sapien
gaagaagatcatgacgacgcccatg

SEQ ID NO: 1587101 - DNA, 25 bp, Homo sapien
agtcaccaccccatcaggccgatgc

SEQ ID NO: 1587102 - DNA, 25 bp, Homo sapien
tcaggccgatgctgcagacagggca

SEQ ID NO: 1587103 - DNA, 25 bp, Homo sapien
cccatcaggccgatgctgcagacag

SEQ ID NO: 1587104 - DNA, 25 bp, Homo sapien
gagccctgagggatcagtcaccacc

SEQ ID NO: 1587105 - DNA, 25 bp, Homo sapien
gctaagccgagctgggacgggtggg

SEQ ID NO: 1587106 - DNA, 25 bp, Homo sapien
ctgagcaggcagatgtgcgggcgcc

SEQ ID NO: 1587107 - DNA, 25 bp, Homo sapien
agagacctcatctgcggggctccca

SEQ ID NO: 1587108 - DNA, 25 bp, Homo sapien
gaaggacgggctcgagcgggacctc

SEQ ID NO: 1587109 - DNA, 25 bp, Homo sapien
aaacatgcgatcttgccaataggcc

SEQ ID NO: 1587110 - DNA, 25 bp, Homo sapien
tctgttggagatgttcccgtcggat

SEQ ID NO: 1587111 - DNA, 25 bp, Homo sapien
aacggaactatttccagatgaggcg

SEQ ID NO: 1587112 - DNA, 25 bp, Homo sapien
caataggccaattccatgagaacaa

SEQ ID NO: 1587113 - DNA, 25 bp, Homo sapien
ctgtcctgatatgggcaaaactcgg

SEQ ID NO: 1587114 - DNA, 25 bp, Homo sapien
tatgggcaaaactcggggtcactgg

SEQ ID NO: 1587115 - DNA, 25 bp, Homo sapien
gccactgtcctgatatgggcaaaac

SEQ ID NO: 1587116 - DNA, 25 bp, Homo sapien
cactgtcctgatatgggcaaaactc

SEQ ID NO: 1587117 - DNA, 25 bp, Homo sapien
gacagagacagggacctcgacgcat

SEQ ID NO: 1587118 - DNA, 25 bp, Homo sapien
cagggacctcgacgcatcctccata

SEQ ID NO: 1587119 - DNA, 25 bp, Homo sapien
agagacagggacctcgacgcatcct

SEQ ID NO: 1587120 - DNA, 25 bp, Homo sapien
gagacagggacctcgacgcatcctc

SEQ ID NO: 1587121 - DNA, 25 bp, Homo sapien
cttctgcagtggcggatcgggcgcc

SEQ ID NO: 1587122 - DNA, 25 bp, Homo sapien
ctgcggggaaatggaccccaccagc

SEQ ID NO: 1587123 - DNA, 25 bp, Homo sapien
ctgcagtggcggatcgggcgccagc

SEQ ID NO: 1587124 - DNA, 25 bp, Homo sapien
caccagccagcacggggtgagttgg

SEQ ID NO: 1587125 - DNA, 25 bp, Homo sapien
acgcccagtgggtgccccgtgatgt

SEQ ID NO: 1587126 - DNA, 25 bp, Homo sapien
tcgtgctcgaaagatgcccctagcg

SEQ ID NO: 1587127 - DNA, 25 bp, Homo sapien
gaggcctggcgaaagaaagatgcgg

SEQ ID NO: 1587128 - DNA, 25 bp, Homo sapien
tccgttgcatcaggaccctaggcca

SEQ ID NO: 1587129 - DNA, 25 bp, Homo sapien
gagtattcccactcgcggttgacga

SEQ ID NO: 1587130 - DNA, 25 bp, Homo sapien
tagcggtagcgcttgaagtgaaacc

SEQ ID NO: 1587131 - DNA, 25 bp, Homo sapien
ttggcccgccggaagaagatgtcct

SEQ ID NO: 1587132 - DNA, 25 bp, Homo sapien
acttgtatccctgcacgatcttggg

SEQ ID NO: 1587133 - DNA, 25 bp, Homo sapien
gtgacggaatgcacgctcagagacc

SEQ ID NO: 1587134 - DNA, 25 bp, Homo sapien
atgaatgaaggaacgccccagtgcg

SEQ ID NO: 1587135 - DNA, 25 bp, Homo sapien
ctctgtcttaggacggaggctgccc

SEQ ID NO: 1587136 - DNA, 25 bp, Homo sapien
ggacagcggccggtaaaagcttcca

SEQ ID NO: 1587137 - DNA, 25 bp, Homo sapien
tccagtggcagctcgtgcgccgtga

SEQ ID NO: 1587138 - DNA, 25 bp, Homo sapien
tgctggcgcgagagctgcaggcgct

SEQ ID NO: 1587139 - DNA, 25 bp, Homo sapien
ggtcctcatccggttccagcacgtg

SEQ ID NO: 1587140 - DNA, 25 bp, Homo sapien
cggttccagcacgtgcgcgtccagt

SEQ ID NO: 1587141 - DNA, 25 bp, Homo sapien
ggcgtcgtagtcgtccaggctctgc

SEQ ID NO: 1587142 - DNA, 25 bp, Homo sapien
ctgtacctgccggcgtcgtagtcgt

SEQ ID NO: 1587143 - DNA, 25 bp, Homo sapien
ccccgtcgccgtcgccctctgtcgg

SEQ ID NO: 1587144 - DNA, 25 bp, Homo sapien
tgccggcgtcgtagtcgtccaggct

SEQ ID NO: 1587145 - DNA, 25 bp, Homo sapien
gagagcgttggaggcgcggaggctg

SEQ ID NO: 1587146 - DNA, 25 bp, Homo sapien
ccgcgtctgcatcggcgtccccggg

SEQ ID NO: 1587147 - DNA, 25 bp, Homo sapien
gtctgcatcggcgtccccggggtgc

SEQ ID NO: 1587148 - DNA, 25 bp, Homo sapien
ctgctccgcgtctgcatcggcgtcc

SEQ ID NO: 1587149 - DNA, 25 bp, Homo sapien
ttgtacagcttctgccgcagcacgt

SEQ ID NO: 1587150 - DNA, 25 bp, Homo sapien
ttctgccgcagcacgtcctggtggc

SEQ ID NO: 1587151 - DNA, 25 bp, Homo sapien
gcacgtcctggtggcgctcacgcag

SEQ ID NO: 1587152 - DNA, 25 bp, Homo sapien
ggggaacagcggctcgctctccacg

SEQ ID NO: 1587153 - DNA, 25 bp, Homo sapien
ggacgcagagccggggtcacccgca

SEQ ID NO: 1587154 - DNA, 25 bp, Homo sapien
tgggacgcagagccggggtcacccg

SEQ ID NO: 1587155 - DNA, 25 bp, Homo sapien
ctgggacgcagagccggggtcaccc

SEQ ID NO: 1587156 - DNA, 25 bp, Homo sapien
gacgcagagccggggtcacccgcat

SEQ ID NO: 1587157 - DNA, 25 bp, Homo sapien
gggccaccagcgcggattttgccct

SEQ ID NO: 1587158 - DNA, 25 bp, Homo sapien
catgtccaggttggggccaccagcg

SEQ ID NO: 1587159 - DNA, 25 bp, Homo sapien
cagcgcggattttgccctcgatgcc

SEQ ID NO: 1587160 - DNA, 25 bp, Homo sapien
ctctcccagtagcccatgtccaggt

SEQ ID NO: 1587161 - DNA, 25 bp, Homo sapien
gcacatcagagctgacggaggcgtt

SEQ ID NO: 1587162 - DNA, 25 bp, Homo sapien
ccttgaacaccgactgcacatcaga

SEQ ID NO: 1587163 - DNA, 25 bp, Homo sapien
tgcagctggttgtatgtcttcccct

SEQ ID NO: 1587164 - DNA, 25 bp, Homo sapien
ggttgtatgtcttccccttgaacac

SEQ ID NO: 1587165 - DNA, 25 bp, Homo sapien
gtgcaggcaccctgctcgagacctg

SEQ ID NO: 1587166 - DNA, 25 bp, Homo sapien
tgagaacatcccttccgccaggaag

SEQ ID NO: 1587167 - DNA, 25 bp, Homo sapien
atccagcgatggcagcttcccgagg

SEQ ID NO: 1587168 - DNA, 25 bp, Homo sapien
gatagagtctagacggacccgagtc

SEQ ID NO: 1587169 - DNA, 25 bp, Homo sapien
ttattcatgtaaacggccgggcacg

SEQ ID NO: 1587170 - DNA, 25 bp, Homo sapien
gaaagccgggtctggacatgctgct

SEQ ID NO: 1587171 - DNA, 25 bp, Homo sapien
caggtcagcgtctatagaaagccgg

SEQ ID NO: 1587172 - DNA, 25 bp, Homo sapien
gggatgacacccgttttctactgca

SEQ ID NO: 1587173 - DNA, 25 bp, Homo sapien
gcggagcttggagatctcgtcctcg

SEQ ID NO: 1587174 - DNA, 25 bp, Homo sapien
gtcatgtcccgccagaagtcggcgt

SEQ ID NO: 1587175 - DNA, 25 bp, Homo sapien
tcccgccagaagtcggcgttcttgc

SEQ ID NO: 1587176 - DNA, 25 bp, Homo sapien
ctcgtcctcggtgatggtggtcatg

SEQ ID NO: 1587177 - DNA, 25 bp, Homo sapien
cccgtcccggatgcggatcttggaa

SEQ ID NO: 1587178 - DNA, 25 bp, Homo sapien
gaacgtgtagggctcatgcatctcc

SEQ ID NO: 1587179 - DNA, 25 bp, Homo sapien
gatgtacttggccagcaggtcgatg

SEQ ID NO: 1587180 - DNA, 25 bp, Homo sapien
gccagatcgtcatcctcagcgctga

SEQ ID NO: 1587181 - DNA, 25 bp, Homo sapien
tgctcctcccatgtcttgaagtgct

SEQ ID NO: 1587182 - DNA, 25 bp, Homo sapien
tcccatgtcttgaagtgctctgcct

SEQ ID NO: 1587183 - DNA, 25 bp, Homo sapien
ctcccatgtcttgaagtgctctgcc

SEQ ID NO: 1587184 - DNA, 25 bp, Homo sapien
tcctggatcctcttgttccgctcct

SEQ ID NO: 1587185 - DNA, 25 bp, Homo sapien
ttgtcggtgttggtgtagcccatgt

SEQ ID NO: 1587186 - DNA, 25 bp, Homo sapien
gccgtgcgcgcttctcctcgggcgt

SEQ ID NO: 1587187 - DNA, 25 bp, Homo sapien
ttctcctcgggcgtctcgaaggcct

SEQ ID NO: 1587188 - DNA, 25 bp, Homo sapien
ttggtgtagcccatgtactcctcac

SEQ ID NO: 1587189 - DNA, 25 bp, Homo sapien
ctaggagaccacgagcgtgcgcgcc

SEQ ID NO: 1587190 - DNA, 25 bp, Homo sapien
tcctctcctgagtccgactgagagg

SEQ ID NO: 1587191 - DNA, 25 bp, Homo sapien
atgctgaggagctaggagaccacga

SEQ ID NO: 1587192 - DNA, 25 bp, Homo sapien
tctcttgagtgccacttgggccgcg

SEQ ID NO: 1587193 - DNA, 25 bp, Homo sapien
cctgagcgctgccaccgctcttcct

SEQ ID NO: 1587194 - DNA, 25 bp, Homo sapien
atccctgagcgctgccaccgctctt

SEQ ID NO: 1587195 - DNA, 25 bp, Homo sapien
tcgcatccctgagcgctgccaccgc

SEQ ID NO: 1587196 - DNA, 25 bp, Homo sapien
ctgagcgctgccaccgctcttcctc

SEQ ID NO: 1587197 - DNA, 25 bp, Homo sapien
gtcggtttcgccgcccatggctcct

SEQ ID NO: 1587198 - DNA, 25 bp, Homo sapien
gcgccgtcggtttcgccgcccatgg

SEQ ID NO: 1587199 - DNA, 25 bp, Homo sapien
tgcgccgtccctcgtcctcccggcg

SEQ ID NO: 1587200 - DNA, 25 bp, Homo sapien
tctgcgccgtccctcgtcctcccgg

SEQ ID NO: 1587201 - DNA, 25 bp, Homo sapien
gcgtgtgtcccgacccatcggctgg

SEQ ID NO: 1587202 - DNA, 25 bp, Homo sapien
accaatagccgaagcctgcgctggg

SEQ ID NO: 1587203 - DNA, 25 bp, Homo sapien
cgcggaccgcgagcgcgagcgtgtg

SEQ ID NO: 1587204 - DNA, 25 bp, Homo sapien
gtggccgcggcaccaacaccaatag

SEQ ID NO: 1587205 - DNA, 25 bp, Homo sapien
caccactctgggtttgagggacaca

SEQ ID NO: 1587206 - DNA, 25 bp, Homo sapien
gaagtttccgccttgtcagtctcag

SEQ ID NO: 1587207 - DNA, 25 bp, Homo sapien
gatctgagggagaccgagttcgcta

SEQ ID NO: 1587208 - DNA, 25 bp, Homo sapien
catttctcctgcaaaggcgcgtcgg

SEQ ID NO: 1587209 - DNA, 25 bp, Homo sapien
aggccaaggtcgcttcccagggctg

SEQ ID NO: 1587210 - DNA, 25 bp, Homo sapien
ccccacgtgggcttgtcctgatgga

SEQ ID NO: 1587211 - DNA, 25 bp, Homo sapien
agcaccaggctgtgaactgaggcca

SEQ ID NO: 1587212 - DNA, 25 bp, Homo sapien
ctctgagcacgcagggaggacccca

SEQ ID NO: 1587213 - DNA, 25 bp, Homo sapien
ggaacatagctgctgagtggccgca

SEQ ID NO: 1587214 - DNA, 25 bp, Homo sapien
ccacagtcgatgttcaggccagatg

SEQ ID NO: 1587215 - DNA, 25 bp, Homo sapien
gagaaaacgtctccgttgcctgggc

SEQ ID NO: 1587216 - DNA, 25 bp, Homo sapien
taaggactcaaatgcgattggccgc

SEQ ID NO: 1587217 - DNA, 25 bp, Homo sapien
ggcaggctgccgaccggggtgccgg

SEQ ID NO: 1587218 - DNA, 25 bp, Homo sapien
ggccgtcggcatccgtgcaggggga

SEQ ID NO: 1587219 - DNA, 25 bp, Homo sapien
gcgaggcgggcatctcccgagctct

SEQ ID NO: 1587220 - DNA, 25 bp, Homo sapien
ggggcagccggagcagaagtggagc

SEQ ID NO: 1587221 - DNA, 25 bp, Homo sapien
ggggcctgggcgctatagtggagcg

SEQ ID NO: 1587222 - DNA, 25 bp, Homo sapien
ggcctgggcgctatagtggagcggg

SEQ ID NO: 1587223 - DNA, 25 bp, Homo sapien
gcgctatagtggagcggggagtaca

SEQ ID NO: 1587224 - DNA, 25 bp, Homo sapien
ccgggggggcctgggcgctatagtg

SEQ ID NO: 1587225 - DNA, 25 bp, Homo sapien
cagagtgagggccaagttcagggct

SEQ ID NO: 1587226 - DNA, 25 bp, Homo sapien
caagttcagggctaggcacaggcag

SEQ ID NO: 1587227 - DNA, 25 bp, Homo sapien
agccaggagacgccttcctgagcag

SEQ ID NO: 1587228 - DNA, 25 bp, Homo sapien
gagggagggtgcgttcctccaacac

SEQ ID NO: 1587229 - DNA, 25 bp, Homo sapien
agggtggccggctgcggtcacttac

SEQ ID NO: 1587230 - DNA, 25 bp, Homo sapien
gaggcgctcagcgtcacggcccgca

SEQ ID NO: 1587231 - DNA, 25 bp, Homo sapien
acggcccgcagtcggcgatggcggg

SEQ ID NO: 1587232 - DNA, 25 bp, Homo sapien
ggcgctcagcgtcacggcccgcagt

SEQ ID NO: 1587233 - DNA, 25 bp, Homo sapien
cccgaggcgctcagcgtcacggccc

SEQ ID NO: 1587234 - DNA, 25 bp, Homo sapien
cgtaccatccggagaccaggacgcg

SEQ ID NO: 1587235 - DNA, 25 bp, Homo sapien
caggaaaaggggtgacgacgtgcgg

SEQ ID NO: 1587236 - DNA, 25 bp, Homo sapien
aggacgcgcacaaaccagtcccagg

SEQ ID NO: 1587237 - DNA, 25 bp, Homo sapien
acagacacacagcacgacatggccc

SEQ ID NO: 1587238 - DNA, 25 bp, Homo sapien
tgtgcacacggtggagcgtgtgtga

SEQ ID NO: 1587239 - DNA, 25 bp, Homo sapien
gtgagagagagtccggttgacgagc

SEQ ID NO: 1587240 - DNA, 25 bp, Homo sapien
tccggttgacgagccggcggcagga

SEQ ID NO: 1587241 - DNA, 25 bp, Homo sapien
tgcacacggtggagcgtgtgtgaga

SEQ ID NO: 1587242 - DNA, 25 bp, Homo sapien
aaagtagatgtcggtggcgggcgcg

SEQ ID NO: 1587243 - DNA, 25 bp, Homo sapien
tggcaggtgcgccctcctcgtctga

SEQ ID NO: 1587244 - DNA, 25 bp, Homo sapien
agtagatgtcggtggcgggcgcgtc

SEQ ID NO: 1587245 - DNA, 25 bp, Homo sapien
gcaggtgcgccctcctcgtctgagg

SEQ ID NO: 1587246 - DNA, 25 bp, Homo sapien
tttaggagggatcacagacggaagc

SEQ ID NO: 1587247 - DNA, 25 bp, Homo sapien
tgccatgtcggaggtacagttcctt

SEQ ID NO: 1587248 - DNA, 25 bp, Homo sapien
caatggcaaagagttgacagtggca

SEQ ID NO: 1587249 - DNA, 25 bp, Homo sapien
ttgcatttgcggaaacggaggcacg

SEQ ID NO: 1587250 - DNA, 25 bp, Homo sapien
tgcagatcctcttccgcgggtggct

SEQ ID NO: 1587251 - DNA, 25 bp, Homo sapien
cacgctgcacgcaggctccacctgc

SEQ ID NO: 1587252 - DNA, 25 bp, Homo sapien
ggaccacaatctccacgctgcacgc

SEQ ID NO: 1587253 - DNA, 25 bp, Homo sapien
ttccgcgggtggctcctcctgcggc

SEQ ID NO: 1587254 - DNA, 25 bp, Homo sapien
catcctgtccagacgactgtgtgcg

SEQ ID NO: 1587255 - DNA, 25 bp, Homo sapien
tcctgtccagacgactgtgtgcgcc

SEQ ID NO: 1587256 - DNA, 25 bp, Homo sapien
ctgtccagacgactgtgtgcgccgc

SEQ ID NO: 1587257 - DNA, 25 bp, Homo sapien
ctgccatcctgtccagacgactgtg

SEQ ID NO: 1587258 - DNA, 25 bp, Homo sapien
tgacagagtcgtggcaatggaggct

SEQ ID NO: 1587259 - DNA, 25 bp, Homo sapien
tctccgagggggaccgctcaggaat

SEQ ID NO: 1587260 - DNA, 25 bp, Homo sapien
cttcttcgaaagaaggtggcgtgca

SEQ ID NO: 1587261 - DNA, 25 bp, Homo sapien
ctgtaccgcggctgctccgacgtct

SEQ ID NO: 1587262 - DNA, 25 bp, Homo sapien
tcccgctcgctagggatctggctgg

SEQ ID NO: 1587263 - DNA, 25 bp, Homo sapien
ccccgcaggtcgtactgggcctcct

SEQ ID NO: 1587264 - DNA, 25 bp, Homo sapien
agcggtgggccccagcggtttcaca

SEQ ID NO: 1587265 - DNA, 25 bp, Homo sapien
ccttcttggagggcgaggacttcag

SEQ ID NO: 1587266 - DNA, 25 bp, Homo sapien
ccgaaagaccgtgttgctcatgaac

SEQ ID NO: 1587267 - DNA, 25 bp, Homo sapien
gagttcttccgaaagaccgtgttgc

SEQ ID NO: 1587268 - DNA, 25 bp, Homo sapien
aaaagcgctcggcatagaagctggg

SEQ ID NO: 1587269 - DNA, 25 bp, Homo sapien
catgaacttgaaaaagcgctcggca

SEQ ID NO: 1587270 - DNA, 25 bp, Homo sapien
cccatcgtggacgagggccttccag

SEQ ID NO: 1587271 - DNA, 25 bp, Homo sapien
cttccaggtgtgctccagtttcttg

SEQ ID NO: 1587272 - DNA, 25 bp, Homo sapien
ccatcgtggacgagggccttccagg

SEQ ID NO: 1587273 - DNA, 25 bp, Homo sapien
cagacccggggcgtccacctgtagg

SEQ ID NO: 1587274 - DNA, 25 bp, Homo sapien
ggcgtccacctgtaggactgcagac

SEQ ID NO: 1587275 - DNA, 25 bp, Homo sapien
tccacctgtaggactgcagacccgg

SEQ ID NO: 1587276 - DNA, 25 bp, Homo sapien
tgtgggactgcagacccggggcgtc

SEQ ID NO: 1587277 - DNA, 25 bp, Homo sapien
gctccccgcggccgttcacagcggg

SEQ ID NO: 1587278 - DNA, 25 bp, Homo sapien
cgatgatgccaatgtgcagcagcag

SEQ ID NO: 1587279 - DNA, 25 bp, Homo sapien
gttcacagcggggatcccgcccatc

SEQ ID NO: 1587280 - DNA, 25 bp, Homo sapien
ctgtaggactgcaggatgtcgatga

SEQ ID NO: 1587281 - DNA, 25 bp, Homo sapien
cgatgttgtgcacgcccagcagcag

SEQ ID NO: 1587282 - DNA, 25 bp, Homo sapien
gtgtcatccgattcgatggcctccc

SEQ ID NO: 1587283 - DNA, 25 bp, Homo sapien
tccatggccgtggagtagagcgcct

SEQ ID NO: 1587284 - DNA, 25 bp, Homo sapien
cgctcgcgctcgtgctggtcgatgt

SEQ ID NO: 1587285 - DNA, 25 bp, Homo sapien
taggtggagcccttgaggtcgaact

SEQ ID NO: 1587286 - DNA, 25 bp, Homo sapien
ttgaggtgcatcttgaccacgcggg

SEQ ID NO: 1587287 - DNA, 25 bp, Homo sapien
tgttcatgaccacgacgcggatgtt

SEQ ID NO: 1587288 - DNA, 25 bp, Homo sapien
tgcacgcagtacagcccatagaact

SEQ ID NO: 1587289 - DNA, 25 bp, Homo sapien
tcgtcgtcgctggtgacgtagaaga

SEQ ID NO: 1587290 - DNA, 25 bp, Homo sapien
gcatgacggtcttgatgatgaactc

SEQ ID NO: 1587291 - DNA, 25 bp, Homo sapien
ggttggacagctcgatcagcggctc

SEQ ID NO: 1587292 - DNA, 25 bp, Homo sapien
tagtagccagggagcagcttctgca

SEQ ID NO: 1587293 - DNA, 25 bp, Homo sapien
atcatctggccggatcccaaagagc

SEQ ID NO: 1587294 - DNA, 25 bp, Homo sapien
gtcttgaagcggaagtcctggaagt

SEQ ID NO: 1587295 - DNA, 25 bp, Homo sapien
gtaatcatctggccggatcccaaag

SEQ ID NO: 1587296 - DNA, 25 bp, Homo sapien
tggccggatcccaaagagctcccgg

SEQ ID NO: 1587297 - DNA, 25 bp, Homo sapien
cggtgtagccgatgcccagctggat

SEQ ID NO: 1587298 - DNA, 25 bp, Homo sapien
gcatgagcacgtcgcgttcgggctt

SEQ ID NO: 1587299 - DNA, 25 bp, Homo sapien
cacggtgtagccgatgcccagctgg

SEQ ID NO: 1587300 - DNA, 25 bp, Homo sapien
cacgtagaagtcctgcatgagcacg

SEQ ID NO: 1587301 - DNA, 25 bp, Homo sapien
tgtcccatccactgcccgaggtggt

SEQ ID NO: 1587302 - DNA, 25 bp, Homo sapien
cacatctcagtaaaacggttacttt

SEQ ID NO: 1587303 - DNA, 25 bp, Homo sapien
ggccccatccatgctaccagtggga

SEQ ID NO: 1587304 - DNA, 25 bp, Homo sapien
caggcttcctaccaacacggtgtga

SEQ ID NO: 1587305 - DNA, 25 bp, Homo sapien
gccggatgcgtccacacctcgatgg

SEQ ID NO: 1587306 - DNA, 25 bp, Homo sapien
cccggctgtgccgtcatggacagaa

SEQ ID NO: 1587307 - DNA, 25 bp, Homo sapien
tcgatggcccaacttcttcccatgg

SEQ ID NO: 1587308 - DNA, 25 bp, Homo sapien
cttcttgtaggtggtttcgccggat

SEQ ID NO: 1587309 - DNA, 25 bp, Homo sapien
tggggccgccttcttctgagccaaa

SEQ ID NO: 1587310 - DNA, 25 bp, Homo sapien
ggggccgccttcttctgagccaaac

SEQ ID NO: 1587311 - DNA, 25 bp, Homo sapien
ctctgttggggccgccttcttctga

SEQ ID NO: 1587312 - DNA, 25 bp, Homo sapien
tgttggggccgccttcttctgagcc

SEQ ID NO: 1587313 - DNA, 25 bp, Homo sapien
acggagggcctggggcttggacctg

SEQ ID NO: 1587314 - DNA, 25 bp, Homo sapien
cacggagggcctggggcttggacct

SEQ ID NO: 1587315 - DNA, 25 bp, Homo sapien
cggagggcctggggcttggacctgc

SEQ ID NO: 1587316 - DNA, 25 bp, Homo sapien
tgaatgcgacttggtggagcagccc

SEQ ID NO: 1587317 - DNA, 25 bp, Homo sapien
ggtgaccgccctgccgtctgaaaac

SEQ ID NO: 1587318 - DNA, 25 bp, Homo sapien
accgcgggcactgaaggcaactgaa

SEQ ID NO: 1587319 - DNA, 25 bp, Homo sapien
ggagcagcccatagctttgctctgc

SEQ ID NO: 1587320 - DNA, 25 bp, Homo sapien
ttctcaaggcagcaagaacagctga

SEQ ID NO: 1587321 - DNA, 25 bp, Homo sapien
tctgggggacagacccatggtgctc

SEQ ID NO: 1587322 - DNA, 25 bp, Homo sapien
gctgaagggtcctcccctcgggcca

SEQ ID NO: 1587323 - DNA, 25 bp, Homo sapien
cagcaagaacagctgaagggtcctc

SEQ ID NO: 1587324 - DNA, 25 bp, Homo sapien
ctgctgggaacgtccctgcactggg

SEQ ID NO: 1587325 - DNA, 25 bp, Homo sapien
cctgctgggaacgtccctgcactgg

SEQ ID NO: 1587326 - DNA, 25 bp, Homo sapien
taagggactggccggggccgaagca

SEQ ID NO: 1587327 - DNA, 25 bp, Homo sapien
ggccctgctgggaacgtccctgcac

SEQ ID NO: 1587328 - DNA, 25 bp, Homo sapien
gaggcaagctcgagggtgggtggaa

SEQ ID NO: 1587329 - DNA, 25 bp, Homo sapien
tggcctcatccctgtagaaccaagg

SEQ ID NO: 1587330 - DNA, 25 bp, Homo sapien
agagggcccagcgaggcaagctcga

SEQ ID NO: 1587331 - DNA, 25 bp, Homo sapien
tccctgtagaaccaaggtccagacc

SEQ ID NO: 1587332 - DNA, 25 bp, Homo sapien
ctctgtcacctgctcacagactctg

SEQ ID NO: 1587333 - DNA, 25 bp, Homo sapien
tgatacatggctgttgtcatcccca

SEQ ID NO: 1587334 - DNA, 25 bp, Homo sapien
gcaccacctgatacatggctgttgt

SEQ ID NO: 1587335 - DNA, 25 bp, Homo sapien
gttgtcatccccacaacaggggtcc

SEQ ID NO: 1587336 - DNA, 25 bp, Homo sapien
caagcccagcgagtcgccgtaaact

SEQ ID NO: 1587337 - DNA, 25 bp, Homo sapien
cagcgagtcgccgtaaactgtcacc

SEQ ID NO: 1587338 - DNA, 25 bp, Homo sapien
cgccgtaaactgtcacccggtacat

SEQ ID NO: 1587339 - DNA, 25 bp, Homo sapien
cgagtcgccgtaaactgtcacccgg

SEQ ID NO: 1587340 - DNA, 25 bp, Homo sapien
tcaagctctgaagaaacacggtttt

SEQ ID NO: 1587341 - DNA, 25 bp, Homo sapien
ttcaagctctgaagaaacacggttt

SEQ ID NO: 1587342 - DNA, 25 bp, Homo sapien
caagctctgaagaaacacggttttt

SEQ ID NO: 1587343 - DNA, 25 bp, Homo sapien
ttttcaagctctgaagaaacacggt

SEQ ID NO: 1587344 - DNA, 25 bp, Homo sapien
ctgcttcccctcccgggcagtccca

SEQ ID NO: 1587345 - DNA, 25 bp, Homo sapien
ctctcccgggcagtcccacacctcc

SEQ ID NO: 1587346 - DNA, 25 bp, Homo sapien
cccacactggagcccctgcttcccc

SEQ ID NO: 1587347 - DNA, 25 bp, Homo sapien
tcccacaccccccccacgctggagc

SEQ ID NO: 1587348 - DNA, 25 bp, Homo sapien
tgctgaaggtcacccggcacgtagg

SEQ ID NO: 1587349 - DNA, 25 bp, Homo sapien
ccaggcagcaaagccccgggcggct

SEQ ID NO: 1587350 - DNA, 25 bp, Homo sapien
aggcagcaaagccccgggcggctct

SEQ ID NO: 1587351 - DNA, 25 bp, Homo sapien
acctgctgaaggtcacccggcacgt

SEQ ID NO: 1587352 - DNA, 25 bp, Homo sapien
ccgcctcgtccggtacctccagctc

SEQ ID NO: 1587353 - DNA, 25 bp, Homo sapien
acggcccccgcctcagcgctctccg

SEQ ID NO: 1587354 - DNA, 25 bp, Homo sapien
cctcgtccggtacctccagctccat

SEQ ID NO: 1587355 - DNA, 25 bp, Homo sapien
gctctccgcctcgtccggtacctcc

SEQ ID NO: 1587356 - DNA, 25 bp, Homo sapien
ccgagggggacccgagctgcgaccg

SEQ ID NO: 1587357 - DNA, 25 bp, Homo sapien
gagggggacccgagctgcgaccgcc

SEQ ID NO: 1587358 - DNA, 25 bp, Homo sapien
gggggacccgagctgcgaccgccgc

SEQ ID NO: 1587359 - DNA, 25 bp, Homo sapien
ggacccgagctgcgaccgccgccgc

SEQ ID NO: 1587360 - DNA, 25 bp, Homo sapien
acagagtttggcgtcaagctgggca

SEQ ID NO: 1587361 - DNA, 25 bp, Homo sapien
tcaagcacattacagattcgggcct

SEQ ID NO: 1587362 - DNA, 25 bp, Homo sapien
acaatcagatctcgggtcctacggg

SEQ ID NO: 1587363 - DNA, 25 bp, Homo sapien
tgtgcatggcaacatcacgagtggc

SEQ ID NO: 1587364 - DNA, 25 bp, Homo sapien
tttgaaatcgcaggtgagaagccag

SEQ ID NO: 1587365 - DNA, 25 bp, Homo sapien
ctttgatcgcaaatgggaccctgat

SEQ ID NO: 1587366 - DNA, 25 bp, Homo sapien
agccagtttcaagcgcccggtagtg

SEQ ID NO: 1587367 - DNA, 25 bp, Homo sapien
tattgacgaacacatgcagtgggcc

SEQ ID NO: 1587368 - DNA, 25 bp, Homo sapien
gcacatagtagttgcgtgtcttttt

SEQ ID NO: 1587369 - DNA, 25 bp, Homo sapien
caatcatagttcgttgcggcctcca

SEQ ID NO: 1587370 - DNA, 25 bp, Homo sapien
gatggtatcagacttggtggcacag

SEQ ID NO: 1587371 - DNA, 25 bp, Homo sapien
gcggtggtgagcactcaatgtgctc

SEQ ID NO: 1587372 - DNA, 25 bp, Homo sapien
gaccctgatccgagactttgccaaa

SEQ ID NO: 1587373 - DNA, 25 bp, Homo sapien
agagtattttcacagcaccggcttc

SEQ ID NO: 1587374 - DNA, 25 bp, Homo sapien
tatgcgagtacatgatgcggagtcc

SEQ ID NO: 1587375 - DNA, 25 bp, Homo sapien
agaacctatgaacgggaagccctga

SEQ ID NO: 1587376 - DNA, 25 bp, Homo sapien
cagctggcatcgtcttgatatgcac

SEQ ID NO: 1587377 - DNA, 25 bp, Homo sapien
tcctggcctgtaaggaggcgatatg

SEQ ID NO: 1587378 - DNA, 25 bp, Homo sapien
aggaggcgatatgtggcagctggca

SEQ ID NO: 1587379 - DNA, 25 bp, Homo sapien
ggcagctggcatcgtcttgatatgc

SEQ ID NO: 1587380 - DNA, 25 bp, Homo sapien
gacgtgggggcgcccctggccacca

SEQ ID NO: 1587381 - DNA, 25 bp, Homo sapien
ggagtggaggcggaacggggctcag

SEQ ID NO: 1587382 - DNA, 25 bp, Homo sapien
gcaggcctgggctcgtgggggacgt

SEQ ID NO: 1587383 - DNA, 25 bp, Homo sapien
agtggaggcggaacggggctcaggg

SEQ ID NO: 1587384 - DNA, 25 bp, Homo sapien
cctcggtgagcagctcgatgatgcg

SEQ ID NO: 1587385 - DNA, 25 bp, Homo sapien
ggcgtgtggcgtggccaccacactc

SEQ ID NO: 1587386 - DNA, 25 bp, Homo sapien
acgctcggcgatgccaccacggagg

SEQ ID NO: 1587387 - DNA, 25 bp, Homo sapien
gatctcaatgatgcggtggccgacg

SEQ ID NO: 1587388 - DNA, 25 bp, Homo sapien
tgctcaggggccgtgctcagggccg

SEQ ID NO: 1587389 - DNA, 25 bp, Homo sapien
gggggctgctcaggggccgtgctca

SEQ ID NO: 1587390 - DNA, 25 bp, Homo sapien
gccgtgctcagggccgccctacccc

SEQ ID NO: 1587391 - DNA, 25 bp, Homo sapien
ggggccgtgctcagggccgccctac

SEQ ID NO: 1587392 - DNA, 25 bp, Homo sapien
cgggagggcagtggacgatgctgag

SEQ ID NO: 1587393 - DNA, 25 bp, Homo sapien
gatgctgagtgtcaccgacgtctgc

SEQ ID NO: 1587394 - DNA, 25 bp, Homo sapien
tgagtgtcaccgacgtctgcgactt

SEQ ID NO: 1587395 - DNA, 25 bp, Homo sapien
gtgtcaccgacgtctgcgacttcgt

SEQ ID NO: 1587396 - DNA, 25 bp, Homo sapien
aaagccaagccgacagccgggctct

SEQ ID NO: 1587397 - DNA, 25 bp, Homo sapien
tgtgatagagaacagactcgggccc

SEQ ID NO: 1587398 - DNA, 25 bp, Homo sapien
tgtctgacccgagccatatcgcttc

SEQ ID NO: 1587399 - DNA, 25 bp, Homo sapien
gctgcaaacatctgtaagaggctgc

SEQ ID NO: 1587400 - DNA, 25 bp, Homo sapien
gctggtcccgttgatggcggtcagg

SEQ ID NO: 1587401 - DNA, 25 bp, Homo sapien
tggcgatgacggctgtgggcagcag

SEQ ID NO: 1587402 - DNA, 25 bp, Homo sapien
caggcggtccccgatgctgagggcc

SEQ ID NO: 1587403 - DNA, 25 bp, Homo sapien
tgagggcccccgagcgctcagcagg

SEQ ID NO: 1587404 - DNA, 25 bp, Homo sapien
ctgggacacacagggggcgcggagg

SEQ ID NO: 1587405 - DNA, 25 bp, Homo sapien
gaggctgctcagcagggcccggtgc

SEQ ID NO: 1587406 - DNA, 25 bp, Homo sapien
gggacacacagggggcgcggaggct

SEQ ID NO: 1587407 - DNA, 25 bp, Homo sapien
gcccggtgcaggtgcacgggtgtgg

SEQ ID NO: 1587408 - DNA, 25 bp, Homo sapien
tgggctcgggtgcacgcccacctgg

SEQ ID NO: 1587409 - DNA, 25 bp, Homo sapien
ctggctggggtcaataccgctttcc

SEQ ID NO: 1587410 - DNA, 25 bp, Homo sapien
tttcccgtaggaactggctgtaggc

SEQ ID NO: 1587411 - DNA, 25 bp, Homo sapien
caggtccccattatggaggtggcag

SEQ ID NO: 1587412 - DNA, 25 bp, Homo sapien
cccaaagtccccagggtcctcagag

SEQ ID NO: 1587413 - DNA, 25 bp, Homo sapien
gggtcctcagagctgagccctcctg

SEQ ID NO: 1587414 - DNA, 25 bp, Homo sapien
gtcctcagagctgagccctcctgtc

SEQ ID NO: 1587415 - DNA, 25 bp, Homo sapien
cagggtcctcagagctgagccctcc

SEQ ID NO: 1587416 - DNA, 25 bp, Homo sapien
cagcacgcagccgatgtcggctgtg

SEQ ID NO: 1587417 - DNA, 25 bp, Homo sapien
ctgtgtaggagatggtatgcagggc

SEQ ID NO: 1587418 - DNA, 25 bp, Homo sapien
cctccgcgtagaatacgtggcagag

SEQ ID NO: 1587419 - DNA, 25 bp, Homo sapien
acgtggcagagcatcttgtagaggc

SEQ ID NO: 1587420 - DNA, 25 bp, Homo sapien
aagaccttgatcctcttggtggaga

SEQ ID NO: 1587421 - DNA, 25 bp, Homo sapien
cacctccgtcatgggctgggtctcc

SEQ ID NO: 1587422 - DNA, 25 bp, Homo sapien
tgggagtccgctgtcaagaccttga

SEQ ID NO: 1587423 - DNA, 25 bp, Homo sapien
gacgaacaggtccacctccgtcatg

SEQ ID NO: 1587424 - DNA, 25 bp, Homo sapien
gcggtccatggcctcccgggcctgg

SEQ ID NO: 1587425 - DNA, 25 bp, Homo sapien
ccatggcctcccgggcctgggccat

SEQ ID NO: 1587426 - DNA, 25 bp, Homo sapien
ggtccatggcctcccgggcctgggc

SEQ ID NO: 1587427 - DNA, 25 bp, Homo sapien
tccatggcctcccgggcctgggcca

SEQ ID NO: 1587428 - DNA, 25 bp, Homo sapien
tgctggtgggcgggttccgttccga

SEQ ID NO: 1587429 - DNA, 25 bp, Homo sapien
cgcgtgctggtgggcgggttccgtt

SEQ ID NO: 1587430 - DNA, 25 bp, Homo sapien
gcgtgctggtgggcgggttccgttc

SEQ ID NO: 1587431 - DNA, 25 bp, Homo sapien
gacaccgtccaggaggtcttcatgg

SEQ ID NO: 1587432 - DNA, 25 bp, Homo sapien
tggccccaaatatgacaccgtccag

SEQ ID NO: 1587433 - DNA, 25 bp, Homo sapien
ccaaatatgacaccgtccaggaggt

SEQ ID NO: 1587434 - DNA, 25 bp, Homo sapien
tatgacaccgtccaggaggtcttca

SEQ ID NO: 1587435 - DNA, 25 bp, Homo sapien
acagcgaagagggtcggcccccagg

SEQ ID NO: 1587436 - DNA, 25 bp, Homo sapien
ggcgacagcgaagagggtcggcccc

SEQ ID NO: 1587437 - DNA, 25 bp, Homo sapien
agggcgacagcgaagagggtcggcc

SEQ ID NO: 1587438 - DNA, 25 bp, Homo sapien
cgacagcgaagagggtcggccccca

SEQ ID NO: 1587439 - DNA, 25 bp, Homo sapien
aattccatgatcaggccggaaccag

SEQ ID NO: 1587440 - DNA, 25 bp, Homo sapien
gttctagaaccatccaagcagcctg

SEQ ID NO: 1587441 - DNA, 25 bp, Homo sapien
tggattcaaagccagatctagcacc

SEQ ID NO: 1587442 - DNA, 25 bp, Homo sapien
ctcaaggactcgcaggtgggaaacc

SEQ ID NO: 1587443 - DNA, 25 bp, Homo sapien
aagttaatttcttagccaggtatgg

SEQ ID NO: 1587444 - DNA, 25 bp, Homo sapien
taaatatgttagcttaattaaaatg

SEQ ID NO: 1587445 - DNA, 25 bp, Homo sapien
atatgttagcttaattaaaatgtta

SEQ ID NO: 1587446 - DNA, 25 bp, Homo sapien
taaaaatattgattgtatgttgaaa

SEQ ID NO: 1587447 - DNA, 25 bp, Homo sapien
ctggggggcagggtaggaagccagg

SEQ ID NO: 1587448 - DNA, 25 bp, Homo sapien
gggcagggtaggaagccagggtctc

SEQ ID NO: 1587449 - DNA, 25 bp, Homo sapien
cagggtaggaagccagggtctcggg

SEQ ID NO: 1587450 - DNA, 25 bp, Homo sapien
tcctggggggcagggtaggaagcca

SEQ ID NO: 1587451 - DNA, 25 bp, Homo sapien
gggcaggactgagtctccctgcttg

SEQ ID NO: 1587452 - DNA, 25 bp, Homo sapien
ggcaggactgagtctccctgcttgg

SEQ ID NO: 1587453 - DNA, 25 bp, Homo sapien
gcaggactgagtctccctgcttggt

SEQ ID NO: 1587454 - DNA, 25 bp, Homo sapien
accagtctgggaaggcgggcattcc

SEQ ID NO: 1587455 - DNA, 25 bp, Homo sapien
tcttcaggtgtgactagaggcaccg

SEQ ID NO: 1587456 - DNA, 25 bp, Homo sapien
tctagaggctcttcaggaccagtct

SEQ ID NO: 1587457 - DNA, 25 bp, Homo sapien
cagatcgcctggcagagcttcaaac

SEQ ID NO: 1587458 - DNA, 25 bp, Homo sapien
ccgaaggcacaagaatgtccctggg

SEQ ID NO: 1587459 - DNA, 25 bp, Homo sapien
cctccgaaggcacaagaatgtccct

SEQ ID NO: 1587460 - DNA, 25 bp, Homo sapien
ctgtcaggggtgaggtcctccgaag

SEQ ID NO: 1587461 - DNA, 25 bp, Homo sapien
atcgggaaattgtggggaagtccat

SEQ ID NO: 1587462 - DNA, 25 bp, Homo sapien
ggcttaggccggcatcttcaggcag

SEQ ID NO: 1587463 - DNA, 25 bp, Homo sapien
ccaggcttaggccggcatcttcagg

SEQ ID NO: 1587464 - DNA, 25 bp, Homo sapien
caggcttaggccggcatcttcaggc

SEQ ID NO: 1587465 - DNA, 25 bp, Homo sapien
aggcttaggccggcatcttcaggca

SEQ ID NO: 1587466 - DNA, 25 bp, Homo sapien
ggcacataatttaatacccactaac

SEQ ID NO: 1587467 - DNA, 25 bp, Homo sapien
gcacataatttaatacccactaacc

SEQ ID NO: 1587468 - DNA, 25 bp, Homo sapien
ggccgcgtccccagaaggcgcagct

SEQ ID NO: 1587469 - DNA, 25 bp, Homo sapien
ctggcccattgagcatgcgcggcct

SEQ ID NO: 1587470 - DNA, 25 bp, Homo sapien
gcccgctcctctatccgcgcagagc

SEQ ID NO: 1587471 - DNA, 25 bp, Homo sapien
ttcccaaatcgaggccgcctcagcc

SEQ ID NO: 1587472 - DNA, 25 bp, Homo sapien
gtgcttgccagtcccagcgggttct

SEQ ID NO: 1587473 - DNA, 25 bp, Homo sapien
gagggtagctactgcagctcctgcc

SEQ ID NO: 1587474 - DNA, 25 bp, Homo sapien
tcttgtgcttactgccgtgtcccca

SEQ ID NO: 1587475 - DNA, 25 bp, Homo sapien
gaacggtctgacgatgacgacacac

SEQ ID NO: 1587476 - DNA, 25 bp, Homo sapien
cacgcccaattaacagacaggagac

SEQ ID NO: 1587477 - DNA, 25 bp, Homo sapien
acctggcctgagaatacttgggtca

SEQ ID NO: 1587478 - DNA, 25 bp, Homo sapien
gaagcagagagatttacactcatct

SEQ ID NO: 1587479 - DNA, 25 bp, Homo sapien
gcgagcacacggtgagaggagacca

SEQ ID NO: 1587480 - DNA, 25 bp, Homo sapien
ctggcctgaccacggttgctccatg

SEQ ID NO: 1587481 - DNA, 25 bp, Homo sapien
tgacctcggcctaggccaaggcgtg

SEQ ID NO: 1587482 - DNA, 25 bp, Homo sapien
ttgctccatgacctcggcctaggcc

SEQ ID NO: 1587483 - DNA, 25 bp, Homo sapien
ctgtcaccagggcacgtccccggtt

SEQ ID NO: 1587484 - DNA, 25 bp, Homo sapien
gccctgtccagagcctgtgcatgtt

SEQ ID NO: 1587485 - DNA, 25 bp, Homo sapien
agcaaaggcatgaggcccgaaggac

SEQ ID NO: 1587486 - DNA, 25 bp, Homo sapien
gagcctgtgcatgttccttggccag

SEQ ID NO: 1587487 - DNA, 25 bp, Homo sapien
aagccatctgcgaaggtgggagcaa

SEQ ID NO: 1587488 - DNA, 25 bp, Homo sapien
tggcccggcggttctggaaccacac

SEQ ID NO: 1587489 - DNA, 25 bp, Homo sapien
ttggcccggcggttctggaaccaca

SEQ ID NO: 1587490 - DNA, 25 bp, Homo sapien
tagtgagaggcctcgaacgcccgct

SEQ ID NO: 1587491 - DNA, 25 bp, Homo sapien
cacctcaggtaggtgcaccttggct

SEQ ID NO: 1587492 - DNA, 25 bp, Homo sapien
gaaggtggtgcggttcctccggtgc

SEQ ID NO: 1587493 - DNA, 25 bp, Homo sapien
acggctgtacacatccgggtagtga

SEQ ID NO: 1587494 - DNA, 25 bp, Homo sapien
ggcccctcgcccgggctcaggaaca

SEQ ID NO: 1587495 - DNA, 25 bp, Homo sapien
gcccctcgcccgggctcaggaacat

SEQ ID NO: 1587496 - DNA, 25 bp, Homo sapien
gttgccggcccctcgcccgggctca

SEQ ID NO: 1587497 - DNA, 25 bp, Homo sapien
gggacagatggtggggagacggctg

SEQ ID NO: 1587498 - DNA, 25 bp, Homo sapien
cgggacagatggtggggagacggct

SEQ ID NO: 1587499 - DNA, 25 bp, Homo sapien
agcgggacagatggtggggagacgg

SEQ ID NO: 1587500 - DNA, 25 bp, Homo sapien
gcgggacagatggtggggagacggc

SEQ ID NO: 1587501 - DNA, 25 bp, Homo sapien
cactggggccggcatgcgctctgca

SEQ ID NO: 1587502 - DNA, 25 bp, Homo sapien
ctctctgtgtgtgtcaccgtccctg

SEQ ID NO: 1587503 - DNA, 25 bp, Homo sapien
gtgtgtcaccgtccctgttttctct

SEQ ID NO: 1587504 - DNA, 25 bp, Homo sapien
tggggccggcatgcgctctgcatcc

SEQ ID NO: 1587505 - DNA, 25 bp, Homo sapien
tccacgggacacctgccccagcggg

SEQ ID NO: 1587506 - DNA, 25 bp, Homo sapien
gcctggcgctgcgtctgctgtggcc

SEQ ID NO: 1587507 - DNA, 25 bp, Homo sapien
ggcagcccctccgtcgatttccacg

SEQ ID NO: 1587508 - DNA, 25 bp, Homo sapien
cctggcgctgcgtctgctgtggcct

SEQ ID NO: 1587509 - DNA, 25 bp, Homo sapien
atgctgcacaactcccgggccagct

SEQ ID NO: 1587510 - DNA, 25 bp, Homo sapien
cagcagctgctcatgaggacatgca

SEQ ID NO: 1587511 - DNA, 25 bp, Homo sapien
tcagccaacttgcagaagggtgccc

SEQ ID NO: 1587512 - DNA, 25 bp, Homo sapien
cagcttctcagccaacttgcagaag

SEQ ID NO: 1587513 - DNA, 25 bp, Homo sapien
caggaggatgacttgcccgcctgga

SEQ ID NO: 1587514 - DNA, 25 bp, Homo sapien
ggcgatcatccttcgcaggtctggg

SEQ ID NO: 1587515 - DNA, 25 bp, Homo sapien
agtccttagaatccgtctttatcgg

SEQ ID NO: 1587516 - DNA, 25 bp, Homo sapien
caccaggaggatgacttgcccgcct

SEQ ID NO: 1587517 - DNA, 25 bp, Homo sapien
actctctcggtcctctggggccaag

SEQ ID NO: 1587518 - DNA, 25 bp, Homo sapien
tccactctctcggtcctctggggcc

SEQ ID NO: 1587519 - DNA, 25 bp, Homo sapien
tcagtgcccccacgccgcactctcc

SEQ ID NO: 1587520 - DNA, 25 bp, Homo sapien
gcccccacgccgcactctccactct

SEQ ID NO: 1587521 - DNA, 25 bp, Homo sapien
gtcctgccctgagacggaggctggg

SEQ ID NO: 1587522 - DNA, 25 bp, Homo sapien
gctcctggcttcggggcgaggtgga

SEQ ID NO: 1587523 - DNA, 25 bp, Homo sapien
ctcctggcttcggggcgaggtggag

SEQ ID NO: 1587524 - DNA, 25 bp, Homo sapien
ggttccatgcggtaccccttctcca

SEQ ID NO: 1587525 - DNA, 25 bp, Homo sapien
cggcctccgacacctctttcagtga

SEQ ID NO: 1587526 - DNA, 25 bp, Homo sapien
ctgcactgcgtagctcccgggccag

SEQ ID NO: 1587527 - DNA, 25 bp, Homo sapien
ttctcggccagtttgcggaagggtg

SEQ ID NO: 1587528 - DNA, 25 bp, Homo sapien
ctgcccggaacccagtgcctccctg

SEQ ID NO: 1587529 - DNA, 25 bp, Homo sapien
gtgcctccctgggacccccgctcac

SEQ ID NO: 1587530 - DNA, 25 bp, Homo sapien
ccagtgcctccctgggacccccgct

SEQ ID NO: 1587531 - DNA, 25 bp, Homo sapien
tgcccggaacccagtgcctccctgg

SEQ ID NO: 1587532 - DNA, 25 bp, Homo sapien
ttagggtacggagcccgtccatatg

SEQ ID NO: 1587533 - DNA, 25 bp, Homo sapien
ccgtccatatgagaagacctcccag

SEQ ID NO: 1587534 - DNA, 25 bp, Homo sapien
caaaactccagacatccgacttgct

SEQ ID NO: 1587535 - DNA, 25 bp, Homo sapien
tccagacatccgacttgctggtgaa

SEQ ID NO: 1587536 - DNA, 25 bp, Homo sapien
ctgtggggcccgagacgggggtgag

SEQ ID NO: 1587537 - DNA, 25 bp, Homo sapien
ccctgcttcctccaggaagccctcc

SEQ ID NO: 1587538 - DNA, 25 bp, Homo sapien
ttttctgctccagcccctgcttcct

SEQ ID NO: 1587539 - DNA, 25 bp, Homo sapien
gagggacccctcaggttttctgctc

SEQ ID NO: 1587540 - DNA, 25 bp, Homo sapien
agccattgcccttggagtttcagag

SEQ ID NO: 1587541 - DNA, 25 bp, Homo sapien
gggacatacccagggtcatacagca

SEQ ID NO: 1587542 - DNA, 25 bp, Homo sapien
agtcctgagcccacgcctttttcag

SEQ ID NO: 1587543 - DNA, 25 bp, Homo sapien
gctacgaggaacaattatgggccaa

SEQ ID NO: 1587544 - DNA, 25 bp, Homo sapien
gcagccggcttgagtctagcccctt

SEQ ID NO: 1587545 - DNA, 25 bp, Homo sapien
ccaggtcctctgagaccaggatgtt

SEQ ID NO: 1587546 - DNA, 25 bp, Homo sapien
ctcgggcgccgtccacttgacgggc

SEQ ID NO: 1587547 - DNA, 25 bp, Homo sapien
ccttccgctcggctttggccaggcc

SEQ ID NO: 1587548 - DNA, 25 bp, Homo sapien
agtttccccttgatggatcttggaa

SEQ ID NO: 1587549 - DNA, 25 bp, Homo sapien
cttgatggatcttggaatctgcgcc

SEQ ID NO: 1587550 - DNA, 25 bp, Homo sapien
ggatcttggaatctgcgccccgacg

SEQ ID NO: 1587551 - DNA, 25 bp, Homo sapien
tgatggatcttggaatctgcgcccc

SEQ ID NO: 1587552 - DNA, 25 bp, Homo sapien
agagaaaactgcaggagctgagcgg

SEQ ID NO: 1587553 - DNA, 25 bp, Homo sapien
cccgggtccgcagaaagttcaccag

SEQ ID NO: 1587554 - DNA, 25 bp, Homo sapien
gagctgagcggtgttcacgagggct

SEQ ID NO: 1587555 - DNA, 25 bp, Homo sapien
cggtgttcacgagggctcgaccccg

SEQ ID NO: 1587556 - DNA, 25 bp, Homo sapien
agatggccgcgggatgttggggctg

SEQ ID NO: 1587557 - DNA, 25 bp, Homo sapien
ggagatggccgcgggatgttggggc

SEQ ID NO: 1587558 - DNA, 25 bp, Homo sapien
ctgctccgctgcgtgggccccctcc

SEQ ID NO: 1587559 - DNA, 25 bp, Homo sapien
gatgttggggctgctccgctgcgtg

SEQ ID NO: 1587560 - DNA, 25 bp, Homo sapien
ccatgacaatgtacagcccctggtg

SEQ ID NO: 1587561 - DNA, 25 bp, Homo sapien
tgctccatgacaatgtacagcccct

SEQ ID NO: 1587562 - DNA, 25 bp, Homo sapien
aggagacgcaccaggttctcgtgtt

SEQ ID NO: 1587563 - DNA, 25 bp, Homo sapien
caccaggttctcgtgttgcatcttc

SEQ ID NO: 1587564 - DNA, 25 bp, Homo sapien
tttgccccaggtactcaccctgcag

SEQ ID NO: 1587565 - DNA, 25 bp, Homo sapien
acacttgatattcttcacggccacc

SEQ ID NO: 1587566 - DNA, 25 bp, Homo sapien
cctgggctgtcacatcacacttgat

SEQ ID NO: 1587567 - DNA, 25 bp, Homo sapien
tcatgacggccgtctcgtccaggaa

SEQ ID NO: 1587568 - DNA, 25 bp, Homo sapien
aaactctccctctccgatctgtgct

SEQ ID NO: 1587569 - DNA, 25 bp, Homo sapien
tgtgctcccaatgtcaaatgctgca

SEQ ID NO: 1587570 - DNA, 25 bp, Homo sapien
ctcccaatgtcaaatgctgcaggtt

SEQ ID NO: 1587571 - DNA, 25 bp, Homo sapien
tgctgcaggttcagtaaccagcccg

SEQ ID NO: 1587572 - DNA, 25 bp, Homo sapien
aaaggtggctcaggccatgcaggca

SEQ ID NO: 1587573 - DNA, 25 bp, Homo sapien
catgatagaaagataaccttgaggc

SEQ ID NO: 1587574 - DNA, 25 bp, Homo sapien
tctccctggaggcatggtttcatga

SEQ ID NO: 1587575 - DNA, 25 bp, Homo sapien
atattgaggatttcactacttaggg

SEQ ID NO: 1587576 - DNA, 25 bp, Homo sapien
tggtgacagatgagtggcgaagctg

SEQ ID NO: 1587577 - DNA, 25 bp, Homo sapien
gaacctggccaaggagggaatgctg

SEQ ID NO: 1587578 - DNA, 25 bp, Homo sapien
caggtcttgggaacctggccaagga

SEQ ID NO: 1587579 - DNA, 25 bp, Homo sapien
ttctggctcagatggtggatgatgg

SEQ ID NO: 1587580 - DNA, 25 bp, Homo sapien
ctattgaataaaggactgatctgtg

SEQ ID NO: 1587581 - DNA, 25 bp, Homo sapien
gtcttctatcccatagctgggcatg

SEQ ID NO: 1587582 - DNA, 25 bp, Homo sapien
tggcctcagaggtgcggggccccag

SEQ ID NO: 1587583 - DNA, 25 bp, Homo sapien
ggagacaggcttgggtgatctggcc

SEQ ID NO: 1587584 - DNA, 25 bp, Homo sapien
gcagatagcgcccttgtccttgctg

SEQ ID NO: 1587585 - DNA, 25 bp, Homo sapien
gtctcaccagcttggtgcagatagc

SEQ ID NO: 1587586 - DNA, 25 bp, Homo sapien
ctcctcggccgacttggtcccgtgt

SEQ ID NO: 1587587 - DNA, 25 bp, Homo sapien
ccgtgtttccgctttggtctcacca

SEQ ID NO: 1587588 - DNA, 25 bp, Homo sapien
ggtgggacagccatgagcccagccc

SEQ ID NO: 1587589 - DNA, 25 bp, Homo sapien
cagaggagtcactctagtccctgga

SEQ ID NO: 1587590 - DNA, 25 bp, Homo sapien
tccataggaacgggaaaggaggcaa

SEQ ID NO: 1587591 - DNA, 25 bp, Homo sapien
cacctgtagattgggcagtccatag

SEQ ID NO: 1587592 - DNA, 25 bp, Homo sapien
tcctctggattggtatcaacttggg

SEQ ID NO: 1587593 - DNA, 25 bp, Homo sapien
aaagctcacgcacaggacgtagtcg

SEQ ID NO: 1587594 - DNA, 25 bp, Homo sapien
aggaacagcccatcctcgggaggct

SEQ ID NO: 1587595 - DNA, 25 bp, Homo sapien
ccaccatgtccatgaggttgcagaa

SEQ ID NO: 1587596 - DNA, 25 bp, Homo sapien
tcatcgattgtgaggtggccgtcgc

SEQ ID NO: 1587597 - DNA, 25 bp, Homo sapien
tccactggtgtggtgcttgacgcgg

SEQ ID NO: 1587598 - DNA, 25 bp, Homo sapien
tgtggtgcttgacgcggtaccagct

SEQ ID NO: 1587599 - DNA, 25 bp, Homo sapien
agcttggggtctgcggagagggcct

SEQ ID NO: 1587600 - DNA, 25 bp, Homo sapien
tgcttgacgcggtaccagctcttgt

SEQ ID NO: 1587601 - DNA, 25 bp, Homo sapien
gatggtgaccacgtcgcccttgcgg

SEQ ID NO: 1587602 - DNA, 25 bp, Homo sapien
tggtgaccacgtcgcccttgcggaa

SEQ ID NO: 1587603 - DNA, 25 bp, Homo sapien
catttggtgatacactgggtgcccg

SEQ ID NO: 1587604 - DNA, 25 bp, Homo sapien
gggcgggtgtgctcgcatttggtga

SEQ ID NO: 1587605 - DNA, 25 bp, Homo sapien
ggcaaagggaggacatcacggagat

SEQ ID NO: 1587606 - DNA, 25 bp, Homo sapien
aggggcaaagggaggacatcacgga

SEQ ID NO: 1587607 - DNA, 25 bp, Homo sapien
gagaggggcaaagggaggacatcac

SEQ ID NO: 1587608 - DNA, 25 bp, Homo sapien
caaagggaggacatcacggagatgt

SEQ ID NO: 1587609 - DNA, 25 bp, Homo sapien
gggtgccaggctcggaggaagcggg

SEQ ID NO: 1587610 - DNA, 25 bp, Homo sapien
tcagcagaatcacagccgtgaaatg

SEQ ID NO: 1587611 - DNA, 25 bp, Homo sapien
cagccgtgaaatgcccgccaggaaa

SEQ ID NO: 1587612 - DNA, 25 bp, Homo sapien
aatcacagccgtgaaatgcccgcca

SEQ ID NO: 1587613 - DNA, 25 bp, Homo sapien
cgccaggaaaccagagagcctcgcc

SEQ ID NO: 1587614 - DNA, 25 bp, Homo sapien
gggacgctgggaatggcctgccaca

SEQ ID NO: 1587615 - DNA, 25 bp, Homo sapien
cactgagcaagtggtcacagtcggg

SEQ ID NO: 1587616 - DNA, 25 bp, Homo sapien
ccacaggccagtcggctggcacagg

SEQ ID NO: 1587617 - DNA, 25 bp, Homo sapien
tgccactggaccgagcctggttctt

SEQ ID NO: 1587618 - DNA, 25 bp, Homo sapien
tgcgcgcccgggacgcgcacactcg

SEQ ID NO: 1587619 - DNA, 25 bp, Homo sapien
ctgcgcgcccgggacgcgcacactc

SEQ ID NO: 1587620 - DNA, 25 bp, Homo sapien
gctgcgcgcccgggacgcgcacact

SEQ ID NO: 1587621 - DNA, 25 bp, Homo sapien
ccgctgcgcgcccgggacgcgcaca

SEQ ID NO: 1587622 - DNA, 25 bp, Homo sapien
tagcgccggccgcactgcggtctcc

SEQ ID NO: 1587623 - DNA, 25 bp, Homo sapien
aggcggtcccggctgcacaacttgg

SEQ ID NO: 1587624 - DNA, 25 bp, Homo sapien
agccggctgcacaccccgaggcggt

SEQ ID NO: 1587625 - DNA, 25 bp, Homo sapien
gagcgagttgctccgtttcctcatt

SEQ ID NO: 1587626 - DNA, 25 bp, Homo sapien
gggcgcacgcgggctccacgcctgg

SEQ ID NO: 1587627 - DNA, 25 bp, Homo sapien
ggcgcacgcgggctccacgcctggc

SEQ ID NO: 1587628 - DNA, 25 bp, Homo sapien
cggggcgcacgcgggctccacgcct

SEQ ID NO: 1587629 - DNA, 25 bp, Homo sapien
ggggcgcacgcgggctccacgcctg

SEQ ID NO: 1587630 - DNA, 25 bp, Homo sapien
ccaccacgccttgcaccttatcatc

SEQ ID NO: 1587631 - DNA, 25 bp, Homo sapien
atcatcctttctaagggatgagtcc

SEQ ID NO: 1587632 - DNA, 25 bp, Homo sapien
cacgccttgcaccttatcatccttt

SEQ ID NO: 1587633 - DNA, 25 bp, Homo sapien
tatcatcctttctaagggatgagtc

SEQ ID NO: 1587634 - DNA, 25 bp, Homo sapien
cttcgttcagcagggaaatgtccct

SEQ ID NO: 1587635 - DNA, 25 bp, Homo sapien
gccttctcttcgttcagcagggaaa

SEQ ID NO: 1587636 - DNA, 25 bp, Homo sapien
tgctgaccacgggtccctcgccgag

SEQ ID NO: 1587637 - DNA, 25 bp, Homo sapien
tcgccgaggtctgccttctcttcgt

SEQ ID NO: 1587638 - DNA, 25 bp, Homo sapien
gacatttaagatgctctagcacccc

SEQ ID NO: 1587639 - DNA, 25 bp, Homo sapien
gagagggacatttaagatgctctag

SEQ ID NO: 1587640 - DNA, 25 bp, Homo sapien
catttaagatgctctagcaccccat

SEQ ID NO: 1587641 - DNA, 25 bp, Homo sapien
gggacatttaagatgctctagcacc

SEQ ID NO: 1587642 - DNA, 25 bp, Homo sapien
tttgtctttccagtcccgcctgccg

SEQ ID NO: 1587643 - DNA, 25 bp, Homo sapien
tgacagcctgcccttccgtttttgt

SEQ ID NO: 1587644 - DNA, 25 bp, Homo sapien
gcctgccggattgggttccagccct

SEQ ID NO: 1587645 - DNA, 25 bp, Homo sapien
tccgtgaccttgcagatgcaggtga

SEQ ID NO: 1587646 - DNA, 25 bp, Homo sapien
gaatcccttcgctaaccaactgctt

SEQ ID NO: 1587647 - DNA, 25 bp, Homo sapien
cttgattttgctgtcgcgccgccta

SEQ ID NO: 1587648 - DNA, 25 bp, Homo sapien
gagttgctaggagggccgacttaac

SEQ ID NO: 1587649 - DNA, 25 bp, Homo sapien
agcgaccgcgtttcaggcccgtgga

SEQ ID NO: 1587650 - DNA, 25 bp, Homo sapien
gcctctcccggggcataaggaagga

SEQ ID NO: 1587651 - DNA, 25 bp, Homo sapien
cgcctctcccggggcataaggaagg

SEQ ID NO: 1587652 - DNA, 25 bp, Homo sapien
atggccagcatccacaagacggcgg

SEQ ID NO: 1587653 - DNA, 25 bp, Homo sapien
taccacgaggtgagtttagagccag

SEQ ID NO: 1587654 - DNA, 25 bp, Homo sapien
tgatttcaaatccatgccgcagccg

SEQ ID NO: 1587655 - DNA, 25 bp, Homo sapien
tgcccggtctgaagcacaggtgttt

SEQ ID NO: 1587656 - DNA, 25 bp, Homo sapien
gaagcgggcccccagccggtgtctg

SEQ ID NO: 1587657 - DNA, 25 bp, Homo sapien
tctgggcggcaggagatccatgccc

SEQ ID NO: 1587658 - DNA, 25 bp, Homo sapien
ccctcgccaggtccccgttgcctct

SEQ ID NO: 1587659 - DNA, 25 bp, Homo sapien
cgccaggtccccgttgcctcttccg

SEQ ID NO: 1587660 - DNA, 25 bp, Homo sapien
ggaaggccagcattcgcagggcgtg

SEQ ID NO: 1587661 - DNA, 25 bp, Homo sapien
ttgtgggtctgccggaaggccagca

SEQ ID NO: 1587662 - DNA, 25 bp, Homo sapien
cttgtgggtctgccggaaggccagc

SEQ ID NO: 1587663 - DNA, 25 bp, Homo sapien
ccggaaggccagcattcgcagggcg

SEQ ID NO: 1587664 - DNA, 25 bp, Homo sapien
tcttcccgctcttggagggtcatgg

SEQ ID NO: 1587665 - DNA, 25 bp, Homo sapien
atctgtctggtctctctcgcaggga

SEQ ID NO: 1587666 - DNA, 25 bp, Homo sapien
tcatgggctcgagggcatctgtctg

SEQ ID NO: 1587667 - DNA, 25 bp, Homo sapien
tggcggtcacgtcttcccgctcttg

SEQ ID NO: 1587668 - DNA, 25 bp, Homo sapien
actccaggactcgcctgactgcatc

SEQ ID NO: 1587669 - DNA, 25 bp, Homo sapien
tccaggactcgcctgactgcatccc

SEQ ID NO: 1587670 - DNA, 25 bp, Homo sapien
ggactcgcctgactgcatccccggg

SEQ ID NO: 1587671 - DNA, 25 bp, Homo sapien
caggactcgcctgactgcatccccg

SEQ ID NO: 1587672 - DNA, 25 bp, Homo sapien
ctgatgacgatcacgcatggctgca

SEQ ID NO: 1587673 - DNA, 25 bp, Homo sapien
gatcacgcatggctgcaggccgctg

SEQ ID NO: 1587674 - DNA, 25 bp, Homo sapien
ctcaggaccctgatgacgatcacgc

SEQ ID NO: 1587675 - DNA, 25 bp, Homo sapien
caggtgggcacacgccggcagaggt

SEQ ID NO: 1587676 - DNA, 25 bp, Homo sapien
gactcgaggcacttcttggggctca

SEQ ID NO: 1587677 - DNA, 25 bp, Homo sapien
cacctggcatgacggagggcggcca

SEQ ID NO: 1587678 - DNA, 25 bp, Homo sapien
cggccagggactcgaggcacttctt

SEQ ID NO: 1587679 - DNA, 25 bp, Homo sapien
ctgaaaccacctggcatgacggagg

SEQ ID NO: 1587680 - DNA, 25 bp, Homo sapien
gcatcagcctgaggctcctccacac

SEQ ID NO: 1587681 - DNA, 25 bp, Homo sapien
ctgcatcagcctgaggctcctccac

SEQ ID NO: 1587682 - DNA, 25 bp, Homo sapien
tgcatcagcctgaggctcctccaca

SEQ ID NO: 1587683 - DNA, 25 bp, Homo sapien
agaagaaaaacctcgaggtgtgcgg

SEQ ID NO: 1587684 - DNA, 25 bp, Homo sapien
tgtgcggggaaggtgcctcgtcccg

SEQ ID NO: 1587685 - DNA, 25 bp, Homo sapien
cggggaaggtgcctcgtcccgctct

SEQ ID NO: 1587686 - DNA, 25 bp, Homo sapien
ctagaagaaaaacctcgaggtgtgc

SEQ ID NO: 1587687 - DNA, 25 bp, Homo sapien
gtcctttgccgccagggctggtgtc

SEQ ID NO: 1587688 - DNA, 25 bp, Homo sapien
ctgtcctttgccgccagggctggtg

SEQ ID NO: 1587689 - DNA, 25 bp, Homo sapien
tgtcctttgccgccagggctggtgt

SEQ ID NO: 1587690 - DNA, 25 bp, Homo sapien
ctcccgcatcagaggtgaggtgaca

SEQ ID NO: 1587691 - DNA, 25 bp, Homo sapien
gatatggtgacctgcatcctgggct

SEQ ID NO: 1587692 - DNA, 25 bp, Homo sapien
gcttcagggtcggaggagacctcat

SEQ ID NO: 1587693 - DNA, 25 bp, Homo sapien
ggtgacagatatggtgacctgcatc

SEQ ID NO: 1587694 - DNA, 25 bp, Homo sapien
gcagcaggctgtgcgtgggcttctc

SEQ ID NO: 1587695 - DNA, 25 bp, Homo sapien
agagcagagcgaggcgcacgttcct

SEQ ID NO: 1587696 - DNA, 25 bp, Homo sapien
gaggaggcctttcgccaggatgcct

SEQ ID NO: 1587697 - DNA, 25 bp, Homo sapien
gctgggcgatcctccgcagcaggct

SEQ ID NO: 1587698 - DNA, 25 bp, Homo sapien
ggctccaggcccatcagagctaggg

SEQ ID NO: 1587699 - DNA, 25 bp, Homo sapien
ctgcagggtctcgtcccgaggagct

SEQ ID NO: 1587700 - DNA, 25 bp, Homo sapien
tgcaaaccagcctcgttcagtgccg

SEQ ID NO: 1587701 - DNA, 25 bp, Homo sapien
gcattagaacagcacggatcacccg

SEQ ID NO: 1587702 - DNA, 25 bp, Homo sapien
cctggggaaggggatctccaatgac

SEQ ID NO: 1587703 - DNA, 25 bp, Homo sapien
ctctgtcctggctgagagccgggcc

SEQ ID NO: 1587704 - DNA, 25 bp, Homo sapien
gccctggggaaggggatctccaatg

SEQ ID NO: 1587705 - DNA, 25 bp, Homo sapien
ctgtcctggctgagagccgggccct

SEQ ID NO: 1587706 - DNA, 25 bp, Homo sapien
ctgcgcttgtcaccctcttcctctc

SEQ ID NO: 1587707 - DNA, 25 bp, Homo sapien
ctctcggcggccccggtcctcctcg

SEQ ID NO: 1587708 - DNA, 25 bp, Homo sapien
cctcctcggccagtgtgtcggacac

SEQ ID NO: 1587709 - DNA, 25 bp, Homo sapien
gtcctcctcggccagtgtgtcggac

SEQ ID NO: 1587710 - DNA, 25 bp, Homo sapien
catgacgtgccggtcgtcgctggac

SEQ ID NO: 1587711 - DNA, 25 bp, Homo sapien
agggcccgctctgcgtgggacacgg

SEQ ID NO: 1587712 - DNA, 25 bp, Homo sapien
tagatggtggcgtgcttgcacatga

SEQ ID NO: 1587713 - DNA, 25 bp, Homo sapien
tctgcgtgggacacggccctctgca

SEQ ID NO: 1587714 - DNA, 25 bp, Homo sapien
tggcgggtgactccggcctgcccat

SEQ ID NO: 1587715 - DNA, 25 bp, Homo sapien
gtgactccggcctgcccatgagcag

SEQ ID NO: 1587716 - DNA, 25 bp, Homo sapien
tggagtggggcgctggcgggtgact

SEQ ID NO: 1587717 - DNA, 25 bp, Homo sapien
gggcgctggcgggtgactccggcct

SEQ ID NO: 1587718 - DNA, 25 bp, Homo sapien
cccttgccaagacccgcagccgggc

SEQ ID NO: 1587719 - DNA, 25 bp, Homo sapien
cttgccaagacccgcagccgggcac

SEQ ID NO: 1587720 - DNA, 25 bp, Homo sapien
aggcccccttgccaagacccgcagc

SEQ ID NO: 1587721 - DNA, 25 bp, Homo sapien
cccccttgccaagacccgcagccgg

SEQ ID NO: 1587722 - DNA, 25 bp, Homo sapien
aggaccttccgagcccggctgctgg

SEQ ID NO: 1587723 - DNA, 25 bp, Homo sapien
ctgctgggctccgtggcaatgggaa

SEQ ID NO: 1587724 - DNA, 25 bp, Homo sapien
tcctctccgcgtgccagcgccgcag

SEQ ID NO: 1587725 - DNA, 25 bp, Homo sapien
tggcaatgggaaggtccgggttcac

SEQ ID NO: 1587726 - DNA, 25 bp, Homo sapien
atacacttttgagacgaggaccaag

SEQ ID NO: 1587727 - DNA, 25 bp, Homo sapien
gcccggccgaagatacacttttgag

SEQ ID NO: 1587728 - DNA, 25 bp, Homo sapien
gatacacttttgagacgaggaccaa

SEQ ID NO: 1587729 - DNA, 25 bp, Homo sapien
tcacgtgcaggtccttcgcgttaag

SEQ ID NO: 1587730 - DNA, 25 bp, Homo sapien
taaggtcgttgaaactgcactcgca

SEQ ID NO: 1587731 - DNA, 25 bp, Homo sapien
tgcactcgcacagcttgcagtggaa

SEQ ID NO: 1587732 - DNA, 25 bp, Homo sapien
gaagcgaagcactcgcccttcgtcg

SEQ ID NO: 1587733 - DNA, 25 bp, Homo sapien
atattccgggcccaccggctgcgca

SEQ ID NO: 1587734 - DNA, 25 bp, Homo sapien
cctttgagcctccttgggtaggtgc

SEQ ID NO: 1587735 - DNA, 25 bp, Homo sapien
tgggtaggtgctccgggaccctcta

SEQ ID NO: 1587736 - DNA, 25 bp, Homo sapien
agcccgcgggagcttcctttgagcc

SEQ ID NO: 1587737 - DNA, 25 bp, Homo sapien
ccgggaagacatgacgaaaatcgac

SEQ ID NO: 1587738 - DNA, 25 bp, Homo sapien
acgaaactttcactaggcggccagg

SEQ ID NO: 1587739 - DNA, 25 bp, Homo sapien
tcgactggatggtagattttctcac

SEQ ID NO: 1587740 - DNA, 25 bp, Homo sapien
ttctcacgaaactttcactaggcgg

SEQ ID NO: 1587741 - DNA, 25 bp, Homo sapien
gcataaggccttcgaggccacgggt

SEQ ID NO: 1587742 - DNA, 25 bp, Homo sapien
ccagtttggcgtgcagcttgaagac

SEQ ID NO: 1587743 - DNA, 25 bp, Homo sapien
caggctcgagggtgggaatgggctt

SEQ ID NO: 1587744 - DNA, 25 bp, Homo sapien
gggcttccccagtttggcgtgcagc

SEQ ID NO: 1587745 - DNA, 25 bp, Homo sapien
ggctgcacgcctgtcttctgggccg

SEQ ID NO: 1587746 - DNA, 25 bp, Homo sapien
cacaggtcgcaatgcagctgcgcct

SEQ ID NO: 1587747 - DNA, 25 bp, Homo sapien
aggacacggcgcacaggtcgcaatg

SEQ ID NO: 1587748 - DNA, 25 bp, Homo sapien
tctggtgcttggatccccggatgtg

SEQ ID NO: 1587749 - DNA, 25 bp, Homo sapien
tgctgcccgaaggatagtcacgtac

SEQ ID NO: 1587750 - DNA, 25 bp, Homo sapien
catccggtactactgggcccaaaat

SEQ ID NO: 1587751 - DNA, 25 bp, Homo sapien
gcttgaaatcctcaaatgaagccgg

SEQ ID NO: 1587752 - DNA, 25 bp, Homo sapien
taggaaactgctaatagacacaggg

SEQ ID NO: 1587753 - DNA, 25 bp, Homo sapien
ttgcagatgtcgcagtagtgaagct

SEQ ID NO: 1587754 - DNA, 25 bp, Homo sapien
tgcagatgtcgcagtagtgaagctg

SEQ ID NO: 1587755 - DNA, 25 bp, Homo sapien
gctgatcttgcagatgtcgcagtag

SEQ ID NO: 1587756 - DNA, 25 bp, Homo sapien
cagcgcagctgatcttgcagatgtc

SEQ ID NO: 1587757 - DNA, 25 bp, Homo sapien
gcggagtacaccgacgcgtcatagt

SEQ ID NO: 1587758 - DNA, 25 bp, Homo sapien
gaagcggtggcttcgagtcggccct

SEQ ID NO: 1587759 - DNA, 25 bp, Homo sapien
accgacgcgtcatagttcgggtagc

SEQ ID NO: 1587760 - DNA, 25 bp, Homo sapien
ctggcagcggagtacaccgacgcgt

SEQ ID NO: 1587761 - DNA, 25 bp, Homo sapien
acgactcgggctggacgcctgtcgc

SEQ ID NO: 1587762 - DNA, 25 bp, Homo sapien
taggtgtatcccgaggacaaggtgc

SEQ ID NO: 1587763 - DNA, 25 bp, Homo sapien
aaggtgctcgctggctgtccggact

SEQ ID NO: 1587764 - DNA, 25 bp, Homo sapien
tcacgatggaagctgacgactcggg

SEQ ID NO: 1587765 - DNA, 25 bp, Homo sapien
tgcggctgtcatgcgcccagactgg

SEQ ID NO: 1587766 - DNA, 25 bp, Homo sapien
gctgactgtccgtagctgtaactgt

SEQ ID NO: 1587767 - DNA, 25 bp, Homo sapien
cggagtctgcggctgtcatgcgccc

SEQ ID NO: 1587768 - DNA, 25 bp, Homo sapien
gcagcagactggaagtacggcctgt

SEQ ID NO: 1587769 - DNA, 25 bp, Homo sapien
ctggtatccaccgtaccctgccggg

SEQ ID NO: 1587770 - DNA, 25 bp, Homo sapien
cctggccggagtggggctggtatcc

SEQ ID NO: 1587771 - DNA, 25 bp, Homo sapien
gggtcggctgccgtaggcgaagtcc

SEQ ID NO: 1587772 - DNA, 25 bp, Homo sapien
ggctcctggggtcggctgccgtagg

SEQ ID NO: 1587773 - DNA, 25 bp, Homo sapien
ggccgggttcacggcagggtccatc

SEQ ID NO: 1587774 - DNA, 25 bp, Homo sapien
gccgggttcacggcagggtccatcc

SEQ ID NO: 1587775 - DNA, 25 bp, Homo sapien
ccacatgctggacattcatgaacac

SEQ ID NO: 1587776 - DNA, 25 bp, Homo sapien
ccatgacacagacacccgatgaaca

SEQ ID NO: 1587777 - DNA, 25 bp, Homo sapien
gctggacattcatgaacaccatgac

SEQ ID NO: 1587778 - DNA, 25 bp, Homo sapien
actgtggacacttgatggacaccat

SEQ ID NO: 1587779 - DNA, 25 bp, Homo sapien
gggacactcaaacaccatgaccatg

SEQ ID NO: 1587780 - DNA, 25 bp, Homo sapien
catgactatgggacactcaaacacc

SEQ ID NO: 1587781 - DNA, 25 bp, Homo sapien
catgactatgggacacccgatgaac

SEQ ID NO: 1587782 - DNA, 25 bp, Homo sapien
tgatgaatgctgtgactgtggaact

SEQ ID NO: 1587783 - DNA, 25 bp, Homo sapien
gacaatacattcgatgaacaccgtg

SEQ ID NO: 1587784 - DNA, 25 bp, Homo sapien
ttgatgaacactgtgactatggaca

SEQ ID NO: 1587785 - DNA, 25 bp, Homo sapien
gtgacacccgatgaacatcccgaca

SEQ ID NO: 1587786 - DNA, 25 bp, Homo sapien
caccgtgactactgacatttgatga

SEQ ID NO: 1587787 - DNA, 25 bp, Homo sapien
aaggcctcttaagcttgggcacagg

SEQ ID NO: 1587788 - DNA, 25 bp, Homo sapien
caatagcagggttcactaatgtgac

SEQ ID NO: 1587789 - DNA, 25 bp, Homo sapien
tgacagacatggtgtggctcacaaa

SEQ ID NO: 1587790 - DNA, 25 bp, Homo sapien
gacacattgtccacggctcatcttg

SEQ ID NO: 1587791 - DNA, 25 bp, Homo sapien
gaagagtagcaaggacatggtggga

SEQ ID NO: 1587792 - DNA, 25 bp, Homo sapien
agtagcaaggacatggtgggaaggg

SEQ ID NO: 1587793 - DNA, 25 bp, Homo sapien
agagtagcaaggacatggtgggaag

SEQ ID NO: 1587794 - DNA, 25 bp, Homo sapien
aagagtagcaaggacatggtgggaa

SEQ ID NO: 1587795 - DNA, 25 bp, Homo sapien
ctgtcacaggtggatcaaaaagcat

SEQ ID NO: 1587796 - DNA, 25 bp, Homo sapien
tcccctgaaaatgacaaagacaggt

SEQ ID NO: 1587797 - DNA, 25 bp, Homo sapien
ccagaccccgggttgagaatccctg

SEQ ID NO: 1587798 - DNA, 25 bp, Homo sapien
gtcagatgaaagctgtggcctcccg

SEQ ID NO: 1587799 - DNA, 25 bp, Homo sapien
tgcgggttgcactatgagaaattct

SEQ ID NO: 1587800 - DNA, 25 bp, Homo sapien
gccatcttctggctaagctgaaaaa

SEQ ID NO: 1587801 - DNA, 25 bp, Homo sapien
aaagtcattagaggccttctgaggc

SEQ ID NO: 1587802 - DNA, 25 bp, Homo sapien
tactttaaatcccaacttagcatgg

SEQ ID NO: 1587803 - DNA, 25 bp, Homo sapien
gcggcagattcattgagtcattgga

SEQ ID NO: 1587804 - DNA, 25 bp, Homo sapien
aagtgaaagcagtcccgggcgatcc

SEQ ID NO: 1587805 - DNA, 25 bp, Homo sapien
cagcagcggggaataaccagaccaa

SEQ ID NO: 1587806 - DNA, 25 bp, Homo sapien
gctgctgtcatgggcgctgtcacag

SEQ ID NO: 1587807 - DNA, 25 bp, Homo sapien
aacagggcagcgcatttgagcagag

SEQ ID NO: 1587808 - DNA, 25 bp, Homo sapien
gatctgatggttctcatgccgccgg

SEQ ID NO: 1587809 - DNA, 25 bp, Homo sapien
tgaagtgcccggaacctggattggt

SEQ ID NO: 1587810 - DNA, 25 bp, Homo sapien
ctttctcacgggctggtcatggcgg

SEQ ID NO: 1587811 - DNA, 25 bp, Homo sapien
aaatacagacgaggcaggctggtgc

SEQ ID NO: 1587812 - DNA, 25 bp, Homo sapien
gcagaaggaagcgtgaaggtccaaa

SEQ ID NO: 1587813 - DNA, 25 bp, Homo sapien
tcccattttgggatctgcacgaagg

SEQ ID NO: 1587814 - DNA, 25 bp, Homo sapien
cgtgcaggcgcttggacttggatat

SEQ ID NO: 1587815 - DNA, 25 bp, Homo sapien
actgcacaggcgtgagaaccaaaca

SEQ ID NO: 1587816 - DNA, 25 bp, Homo sapien
acgcccagcggaatctcccactttt

SEQ ID NO: 1587817 - DNA, 25 bp, Homo sapien
gtgagaaccaaacacggcctgcagg

SEQ ID NO: 1587818 - DNA, 25 bp, Homo sapien
gaggaggtgagagcgatagttgaga

SEQ ID NO: 1587819 - DNA, 25 bp, Homo sapien
ctgtttggagtcacctgttgctgga

SEQ ID NO: 1587820 - DNA, 25 bp, Homo sapien
ctgtactacaccagagacagctgcc

SEQ ID NO: 1587821 - DNA, 25 bp, Homo sapien
atctccatgacaacaagcacgcgct

SEQ ID NO: 1587822 - DNA, 25 bp, Homo sapien
catgacaacaagcacgcgctggtgc

SEQ ID NO: 1587823 - DNA, 25 bp, Homo sapien
tgtgctgtcggcttcccgacttttg

SEQ ID NO: 1587824 - DNA, 25 bp, Homo sapien
cagactgacggctgtgctgtcggct

SEQ ID NO: 1587825 - DNA, 25 bp, Homo sapien
acggctgtgctgtcggcttcccgac

SEQ ID NO: 1587826 - DNA, 25 bp, Homo sapien
ttggccacagactgacggctgtgct

SEQ ID NO: 1587827 - DNA, 25 bp, Homo sapien
gggtattaacaggttctgtcactgg

SEQ ID NO: 1587828 - DNA, 25 bp, Homo sapien
tcccatcaggggtattaacaggttc

SEQ ID NO: 1587829 - DNA, 25 bp, Homo sapien
tattaacaggttctgtcactggcac

SEQ ID NO: 1587830 - DNA, 25 bp, Homo sapien
actggggctgccgagcctgttctca

SEQ ID NO: 1587831 - DNA, 25 bp, Homo sapien
caaataatgcctatcatcttgtttc

SEQ ID NO: 1587832 - DNA, 25 bp, Homo sapien
cgcctggccaaaacatacgtacttt

SEQ ID NO: 1587833 - DNA, 25 bp, Homo sapien
caagaaagaatgtctagttaaccta

SEQ ID NO: 1587834 - DNA, 25 bp, Homo sapien
tctagttaacctaaagtcattcaaa

SEQ ID NO: 1587835 - DNA, 25 bp, Homo sapien
taccagctggaaactaacacaaggg

SEQ ID NO: 1587836 - DNA, 25 bp, Homo sapien
ctgaaatgcagtaggaacaccgcgg

SEQ ID NO: 1587837 - DNA, 25 bp, Homo sapien
gaaagggcacagcaatatcacagca

SEQ ID NO: 1587838 - DNA, 25 bp, Homo sapien
gatagcagagatgctccgaggagca

SEQ ID NO: 1587839 - DNA, 25 bp, Homo sapien
gaagtcgaaatactgactcgtcgcc

SEQ ID NO: 1587840 - DNA, 25 bp, Homo sapien
tgcgcgaagtcgaaatactgactcg

SEQ ID NO: 1587841 - DNA, 25 bp, Homo sapien
gccgccctgcgcgaagtcgaaatac

SEQ ID NO: 1587842 - DNA, 25 bp, Homo sapien
tcgaaatactgactcgtcgccatct

SEQ ID NO: 1587843 - DNA, 25 bp, Homo sapien
tcctcggatgcagaatccgcccctg

SEQ ID NO: 1587844 - DNA, 25 bp, Homo sapien
ctcggatgcagaatccgcccctgcg

SEQ ID NO: 1587845 - DNA, 25 bp, Homo sapien
cttcctcggatgcagaatccgcccc

SEQ ID NO: 1587846 - DNA, 25 bp, Homo sapien
cggatgcagaatccgcccctgcgag

SEQ ID NO: 1587847 - DNA, 25 bp, Homo sapien
gaatgccttgaagtaatcggtctcc

SEQ ID NO: 1587848 - DNA, 25 bp, Homo sapien
tcggtctccttcaaaatgagtcagg

SEQ ID NO: 1587849 - DNA, 25 bp, Homo sapien
aggaggactgttgaagacggcatct

SEQ ID NO: 1587850 - DNA, 25 bp, Homo sapien
tttcaatctgagagggttccggagg

SEQ ID NO: 1587851 - DNA, 25 bp, Homo sapien
gaaagaactcattccacccaatcgg

SEQ ID NO: 1587852 - DNA, 25 bp, Homo sapien
taataattgagtgtctacagcagca

SEQ ID NO: 1587853 - DNA, 25 bp, Homo sapien
aagtgacaagtgaggccctacctga

SEQ ID NO: 1587854 - DNA, 25 bp, Homo sapien
ggtgcctgccggctaaacattctgc

SEQ ID NO: 1587855 - DNA, 25 bp, Homo sapien
gtcccagaggcctccgagaggccaa

SEQ ID NO: 1587856 - DNA, 25 bp, Homo sapien
ctcaatttccttgactgaccagagg

SEQ ID NO: 1587857 - DNA, 25 bp, Homo sapien
gctgtgcttccgtggacctcaattt

SEQ ID NO: 1587858 - DNA, 25 bp, Homo sapien
ccccagcagggttcatgttctgctg

SEQ ID NO: 1587859 - DNA, 25 bp, Homo sapien
gaattgtccgtgcaactacccgcaa

SEQ ID NO: 1587860 - DNA, 25 bp, Homo sapien
gctgtgtagagaagcagccccgtcc

SEQ ID NO: 1587861 - DNA, 25 bp, Homo sapien
tcctgggctaatggcagcaacaggc

SEQ ID NO: 1587862 - DNA, 25 bp, Homo sapien
tgcctgcgaacttacgggcctggct

SEQ ID NO: 1587863 - DNA, 25 bp, Homo sapien
gcttgagcgcctcggtcttgagcag

SEQ ID NO: 1587864 - DNA, 25 bp, Homo sapien
gaggctacttgcttggccagcgcct

SEQ ID NO: 1587865 - DNA, 25 bp, Homo sapien
tggtgtactccttcagacgcgtggt

SEQ ID NO: 1587866 - DNA, 25 bp, Homo sapien
tgcacgaagcgcatctcggaggcta

SEQ ID NO: 1587867 - DNA, 25 bp, Homo sapien
tgctctctcgagaaaaacgctgcgg

SEQ ID NO: 1587868 - DNA, 25 bp, Homo sapien
cacctgccagtgtgaactgaggttc

SEQ ID NO: 1587869 - DNA, 25 bp, Homo sapien
gggctcatccggcagcagagtcaac

SEQ ID NO: 1587870 - DNA, 25 bp, Homo sapien
cagagtcaacgcctcgtgacggaga

SEQ ID NO: 1587871 - DNA, 25 bp, Homo sapien
cttaatccaggaatgttccaggctc

SEQ ID NO: 1587872 - DNA, 25 bp, Homo sapien
gttccaggctctgggcaatggtcat

SEQ ID NO: 1587873 - DNA, 25 bp, Homo sapien
taatccaggaatgttccaggctctg

SEQ ID NO: 1587874 - DNA, 25 bp, Homo sapien
atgttccaggctctgggcaatggtc

SEQ ID NO: 1587875 - DNA, 25 bp, Homo sapien
gtaagcaatgtctgatccccagccg

SEQ ID NO: 1587876 - DNA, 25 bp, Homo sapien
ttactctctccagcccaaggggtaa

SEQ ID NO: 1587877 - DNA, 25 bp, Homo sapien
gtctgatccccagccgcagggaggt

SEQ ID NO: 1587878 - DNA, 25 bp, Homo sapien
cccaaggggtaagcaatgtctgatc

SEQ ID NO: 1587879 - DNA, 25 bp, Homo sapien
ttgggatctttgacgagcagccggc

SEQ ID NO: 1587880 - DNA, 25 bp, Homo sapien
gaagtactcctcgtcgaagtcgtag

SEQ ID NO: 1587881 - DNA, 25 bp, Homo sapien
gctcgctggtgttgctgaagtactc

SEQ ID NO: 1587882 - DNA, 25 bp, Homo sapien
agcagccggcgaatgaagtccttgg

SEQ ID NO: 1587883 - DNA, 25 bp, Homo sapien
ctgggctcccaccacggccgcgccg

SEQ ID NO: 1587884 - DNA, 25 bp, Homo sapien
gactaaacgtggactcagacgcctt

SEQ ID NO: 1587885 - DNA, 25 bp, Homo sapien
ccttggagactcgaagtatctgtgc

SEQ ID NO: 1587886 - DNA, 25 bp, Homo sapien
gtatctgtgcagacgcagagcccga

SEQ ID NO: 1587887 - DNA, 25 bp, Homo sapien
actgaagccccgtctgatcgtctga

SEQ ID NO: 1587888 - DNA, 25 bp, Homo sapien
gatataggtgatgacaccgatgctc

SEQ ID NO: 1587889 - DNA, 25 bp, Homo sapien
ggatataggtgatgacaccgatgct

SEQ ID NO: 1587890 - DNA, 25 bp, Homo sapien
aggatataggtgatgacaccgatgc

SEQ ID NO: 1587891 - DNA, 25 bp, Homo sapien
aggcccagcggctcatagttcacaa

SEQ ID NO: 1587892 - DNA, 25 bp, Homo sapien
caggcccagcggctcatagttcaca

SEQ ID NO: 1587893 - DNA, 25 bp, Homo sapien
ggcccagcggctcatagttcacaat

SEQ ID NO: 1587894 - DNA, 25 bp, Homo sapien
gatgttcttgaactcgttccccgcc

SEQ ID NO: 1587895 - DNA, 25 bp, Homo sapien
ggcacgttcttgtccagcagcatga

SEQ ID NO: 1587896 - DNA, 25 bp, Homo sapien
tcttgtgcgcgatgccgaagtcgat

SEQ ID NO: 1587897 - DNA, 25 bp, Homo sapien
cttgattcgtgggttgggcacgttc

SEQ ID NO: 1587898 - DNA, 25 bp, Homo sapien
tggggtgggaggaggctcagcaggg

SEQ ID NO: 1587899 - DNA, 25 bp, Homo sapien
gggtgggaggaggctcagcagggaa

SEQ ID NO: 1587900 - DNA, 25 bp, Homo sapien
gtgggaggaggctcagcagggaaag

SEQ ID NO: 1587901 - DNA, 25 bp, Homo sapien
tgggaggaggctcagcagggaaagc

SEQ ID NO: 1587902 - DNA, 25 bp, Homo sapien
tcacccccacgctccccaaacctca

SEQ ID NO: 1587903 - DNA, 25 bp, Homo sapien
ccacacctcacccccacgcgcagga

SEQ ID NO: 1587904 - DNA, 25 bp, Homo sapien
cctcacccccacgctccccacacct

SEQ ID NO: 1587905 - DNA, 25 bp, Homo sapien
tcacccccacgctccccacacctca

SEQ ID NO: 1587906 - DNA, 25 bp, Homo sapien
ggccccacagggccctacagggctc

SEQ ID NO: 1587907 - DNA, 25 bp, Homo sapien
ccccacagggccctacagggctcac

SEQ ID NO: 1587908 - DNA, 25 bp, Homo sapien
gccccacagggccctacagggctca

SEQ ID NO: 1587909 - DNA, 25 bp, Homo sapien
tgacaggcggcgcttcttgatgaac

SEQ ID NO: 1587910 - DNA, 25 bp, Homo sapien
ttcaggtcaaagtgtgcgatgcgct

SEQ ID NO: 1587911 - DNA, 25 bp, Homo sapien
tagagtgcaggtagtgaacgccgtc

SEQ ID NO: 1587912 - DNA, 25 bp, Homo sapien
ggatctcccgcaggatgttcacctc

SEQ ID NO: 1587913 - DNA, 25 bp, Homo sapien
gccggcacttccgcacgatcgcaaa

SEQ ID NO: 1587914 - DNA, 25 bp, Homo sapien
tgccggcacttccgcacgatcgcaa

SEQ ID NO: 1587915 - DNA, 25 bp, Homo sapien
ctgccggcacttccgcacgatcgca

SEQ ID NO: 1587916 - DNA, 25 bp, Homo sapien
ttgggcgcggccctgcaccaggcac

SEQ ID NO: 1587917 - DNA, 25 bp, Homo sapien
aggcacttgaaggacatgagctggc

SEQ ID NO: 1587918 - DNA, 25 bp, Homo sapien
tgcaccaggcacttgaaggacatga

SEQ ID NO: 1587919 - DNA, 25 bp, Homo sapien
tccacttgctcctcttgggcgcggc

SEQ ID NO: 1587920 - DNA, 25 bp, Homo sapien
gagagcaattccttagcgccccaca

SEQ ID NO: 1587921 - DNA, 25 bp, Homo sapien
gcgccttctcagagagcaattcctt

SEQ ID NO: 1587922 - DNA, 25 bp, Homo sapien
tcagagagcaattccttagcgcccc

SEQ ID NO: 1587923 - DNA, 25 bp, Homo sapien
ttctcagagagcaattccttagcgc

SEQ ID NO: 1587924 - DNA, 25 bp, Homo sapien
gacttgctccttagaggcaaggcca

SEQ ID NO: 1587925 - DNA, 25 bp, Homo sapien
cacagacttgctccttagaggcaag

SEQ ID NO: 1587926 - DNA, 25 bp, Homo sapien
ttgctccttagaggcaaggccactg

SEQ ID NO: 1587927 - DNA, 25 bp, Homo sapien
agacagcccccggtctcactggcca

SEQ ID NO: 1587928 - DNA, 25 bp, Homo sapien
cagagctgtcaaacccgtgaggtgt

SEQ ID NO: 1587929 - DNA, 25 bp, Homo sapien
tgaagcagtgccgtcagaacagcag

SEQ ID NO: 1587930 - DNA, 25 bp, Homo sapien
tggccagtcccgagaaaaactgcga

SEQ ID NO: 1587931 - DNA, 25 bp, Homo sapien
tccaaggcttcacggcaaaaacaga

SEQ ID NO: 1587932 - DNA, 25 bp, Homo sapien
tttgctgacttttgccaaacgaccc

SEQ ID NO: 1587933 - DNA, 25 bp, Homo sapien
ttttgctgacttttgccaaacgacc

SEQ ID NO: 1587934 - DNA, 25 bp, Homo sapien
aattttgctgacttttgccaaacga

SEQ ID NO: 1587935 - DNA, 25 bp, Homo sapien
gaattttgctgacttttgccaaacg

SEQ ID NO: 1587936 - DNA, 25 bp, Homo sapien
aaataaggctggaggctctacaaaa

SEQ ID NO: 1587937 - DNA, 25 bp, Homo sapien
cagtagcaaactcaccaaataaggc

SEQ ID NO: 1587938 - DNA, 25 bp, Homo sapien
gacacagagctcacttatttacatt

SEQ ID NO: 1587939 - DNA, 25 bp, Homo sapien
tcaggatcccaaaagagcctgcagc

SEQ ID NO: 1587940 - DNA, 25 bp, Homo sapien
attgaccgaggtttgggcccagctg

SEQ ID NO: 1587941 - DNA, 25 bp, Homo sapien
gcatgttaaacaattgaccgaggtt

SEQ ID NO: 1587942 - DNA, 25 bp, Homo sapien
tttttcccacaagcatgttaaacaa

SEQ ID NO: 1587943 - DNA, 25 bp, Homo sapien
caaaagaggattaacacagggagat

SEQ ID NO: 1587944 - DNA, 25 bp, Homo sapien
tgtctgactccacggcccaaattcg

SEQ ID NO: 1587945 - DNA, 25 bp, Homo sapien
tgccccatgccaggcacggtcttgg

SEQ ID NO: 1587946 - DNA, 25 bp, Homo sapien
atctgttgctctggtgccccatgcc

SEQ ID NO: 1587947 - DNA, 25 bp, Homo sapien
tgtaacggctcaattacttttctcc

SEQ ID NO: 1587948 - DNA, 25 bp, Homo sapien
cccccatctcataatggtcctccac

SEQ ID NO: 1587949 - DNA, 25 bp, Homo sapien
tcctcccccatctcataatggtcct

SEQ ID NO: 1587950 - DNA, 25 bp, Homo sapien
cctcccccatctcataatggtcctc

SEQ ID NO: 1587951 - DNA, 25 bp, Homo sapien
tcccccatctcataatggtcctcca

SEQ ID NO: 1587952 - DNA, 25 bp, Homo sapien
gacctcaggagtcccctaatggcaa

SEQ ID NO: 1587953 - DNA, 25 bp, Homo sapien
gaaagtgcagtcaccgcagcctgga

SEQ ID NO: 1587954 - DNA, 25 bp, Homo sapien
cagggaaagtgcagtcaccgcagcc

SEQ ID NO: 1587955 - DNA, 25 bp, Homo sapien
taggacctcaggagtcccctaatgg

SEQ ID NO: 1587956 - DNA, 25 bp, Homo sapien
ggccgccaaaaagggccccatctga

SEQ ID NO: 1587957 - DNA, 25 bp, Homo sapien
ccagtggctccctttgcagaacctc

SEQ ID NO: 1587958 - DNA, 25 bp, Homo sapien
aagcccctaggcagaccccagtggc

SEQ ID NO: 1587959 - DNA, 25 bp, Homo sapien
ttctcgcccgcaatctccgcacaag

SEQ ID NO: 1587960 - DNA, 25 bp, Homo sapien
cccccgaagcgccgctctggcccca

SEQ ID NO: 1587961 - DNA, 25 bp, Homo sapien
cctccagcctcggcccgagcccgct

SEQ ID NO: 1587962 - DNA, 25 bp, Homo sapien
ggcccccgaagcgccgctctggccc

SEQ ID NO: 1587963 - DNA, 25 bp, Homo sapien
ccgaagcgccgctctggccccaccc

SEQ ID NO: 1587964 - DNA, 25 bp, Homo sapien
cctccgcagcccggagaatacggcc

SEQ ID NO: 1587965 - DNA, 25 bp, Homo sapien
tccgcagcccggagaatacggccgg

SEQ ID NO: 1587966 - DNA, 25 bp, Homo sapien
gcagcccggagaatacggccggcgc

SEQ ID NO: 1587967 - DNA, 25 bp, Homo sapien
cgcagcccggagaatacggccggcg

SEQ ID NO: 1587968 - DNA, 25 bp, Homo sapien
tgacatctcgtaattccttgccgca

SEQ ID NO: 1587969 - DNA, 25 bp, Homo sapien
ggaaagttgctgaaacctgcgaagt

SEQ ID NO: 1587970 - DNA, 25 bp, Homo sapien
gaacgttccacctaacactgaggca

SEQ ID NO: 1587971 - DNA, 25 bp, Homo sapien
tcccctgcgaagacaccgtgaaaaa

SEQ ID NO: 1587972 - DNA, 25 bp, Homo sapien
tgcgggccatgtacccaaataaacc

SEQ ID NO: 1587973 - DNA, 25 bp, Homo sapien
tagaaatcatctacccgcgtgttcc

SEQ ID NO: 1587974 - DNA, 25 bp, Homo sapien
tggaaaaagtgttgggtgtcccatc

SEQ ID NO: 1587975 - DNA, 25 bp, Homo sapien
tccctactaagagggcgtgtctgct

SEQ ID NO: 1587976 - DNA, 25 bp, Homo sapien
ttgaaagaaacggcatcaagtgtta

SEQ ID NO: 1587977 - DNA, 25 bp, Homo sapien
gaaagaaacggcatcaagtgttatg

SEQ ID NO: 1587978 - DNA, 25 bp, Homo sapien
aaagaaacggcatcaagtgttatgg

SEQ ID NO: 1587979 - DNA, 25 bp, Homo sapien
atattgaaagaaacggcatcaagtg

SEQ ID NO: 1587980 - DNA, 25 bp, Homo sapien
gggagcgtcgctgtgtcgggacagt

SEQ ID NO: 1587981 - DNA, 25 bp, Homo sapien
gacagtctccaggtgtcgtctgaga

SEQ ID NO: 1587982 - DNA, 25 bp, Homo sapien
tctgagaattcgaggacgtggtgct

SEQ ID NO: 1587983 - DNA, 25 bp, Homo sapien
tcgtctgagaattcgaggacgtggt

SEQ ID NO: 1587984 - DNA, 25 bp, Homo sapien
gcccgtgttggacctcaggtcagcg

SEQ ID NO: 1587985 - DNA, 25 bp, Homo sapien
cttctttcaggcccttgcgcttgcg

SEQ ID NO: 1587986 - DNA, 25 bp, Homo sapien
caggatctgccagtggtcaaacaca

SEQ ID NO: 1587987 - DNA, 25 bp, Homo sapien
gggtctccgggcaggatctgccagt

SEQ ID NO: 1587988 - DNA, 25 bp, Homo sapien
caaaggactcgttgacgggcagata

SEQ ID NO: 1587989 - DNA, 25 bp, Homo sapien
tgaccacaaacatgggggtgccggc

SEQ ID NO: 1587990 - DNA, 25 bp, Homo sapien
tcctgttcaaaaccccgtagatgcc

SEQ ID NO: 1587991 - DNA, 25 bp, Homo sapien
acctgggactcctcgaacacgtggc

SEQ ID NO: 1587992 - DNA, 25 bp, Homo sapien
tgggctccatgaggcgtggctgggc

SEQ ID NO: 1587993 - DNA, 25 bp, Homo sapien
acactggcatagaggcagcgccgtg

SEQ ID NO: 1587994 - DNA, 25 bp, Homo sapien
ggtggatggcgtcggcgtgcagggt

SEQ ID NO: 1587995 - DNA, 25 bp, Homo sapien
gacgtcgtggacgtcgaagcgcaca

SEQ ID NO: 1587996 - DNA, 25 bp, Homo sapien
ttggccccattagggtctctgtctc

SEQ ID NO: 1587997 - DNA, 25 bp, Homo sapien
ccattagggtctctgtctcgggagg

SEQ ID NO: 1587998 - DNA, 25 bp, Homo sapien
cgccttggccccattagggtctctg

SEQ ID NO: 1587999 - DNA, 25 bp, Homo sapien
ccccattagggtctctgtctcggga

SEQ ID NO: 1588000 - DNA, 25 bp, Homo sapien
tctgcacatgctgagccgtgcctca

SEQ ID NO: 1588001 - DNA, 25 bp, Homo sapien
ggaaacgggtgtggtctgcacatgc

SEQ ID NO: 1588002 - DNA, 25 bp, Homo sapien
ctggaaacgggtgtggtctgcacat

SEQ ID NO: 1588003 - DNA, 25 bp, Homo sapien
tggtctgcacatgctgagccgtgcc

SEQ ID NO: 1588004 - DNA, 25 bp, Homo sapien
tgatctcgttgaggtactgcacacc

SEQ ID NO: 1588005 - DNA, 25 bp, Homo sapien
gaagggccgcgccttcatgtacagc

SEQ ID NO: 1588006 - DNA, 25 bp, Homo sapien
aaagcaccagatcttgcgggcctca

SEQ ID NO: 1588007 - DNA, 25 bp, Homo sapien
gaggcagagcacgttcgactcttca

SEQ ID NO: 1588008 - DNA, 25 bp, Homo sapien
gcggtacgagacgaccgggtcagat

SEQ ID NO: 1588009 - DNA, 25 bp, Homo sapien
tcgcggtacgagacgaccgggtcag

SEQ ID NO: 1588010 - DNA, 25 bp, Homo sapien
ctcgcggtacgagacgaccgggtca

SEQ ID NO: 1588011 - DNA, 25 bp, Homo sapien
cggtacgagacgaccgggtcagatt

SEQ ID NO: 1588012 - DNA, 25 bp, Homo sapien
ctgcaaaaagaggttaagtcccact

SEQ ID NO: 1588013 - DNA, 25 bp, Homo sapien
tgcaaaaagaggttaagtcccactc

SEQ ID NO: 1588014 - DNA, 25 bp, Homo sapien
gcgatgatatgctctcccgactcct

SEQ ID NO: 1588015 - DNA, 25 bp, Homo sapien
tcgccggcgcccgcgatgatatgct

SEQ ID NO: 1588016 - DNA, 25 bp, Homo sapien
ggggatgcaggcgtggtcctcctcc

SEQ ID NO: 1588017 - DNA, 25 bp, Homo sapien
gatggggatgcaggcgtggtcctcc

SEQ ID NO: 1588018 - DNA, 25 bp, Homo sapien
ctgaaagggatgcgggtcagcacca

SEQ ID NO: 1588019 - DNA, 25 bp, Homo sapien
tgaacttcatcacccgcatgttgtg

SEQ ID NO: 1588020 - DNA, 25 bp, Homo sapien
tgacaacagggctgacgctgaactt

SEQ ID NO: 1588021 - DNA, 25 bp, Homo sapien
cacgtagcggcccatcatcaagatt

SEQ ID NO: 1588022 - DNA, 25 bp, Homo sapien
caaggcacatcctcgatgggctcca

SEQ ID NO: 1588023 - DNA, 25 bp, Homo sapien
tccttacttctagctcccgactgag

SEQ ID NO: 1588024 - DNA, 25 bp, Homo sapien
ggcagggcccgcaacagtgccaagg

SEQ ID NO: 1588025 - DNA, 25 bp, Homo sapien
agtatcaccctatattccttctatg

SEQ ID NO: 1588026 - DNA, 25 bp, Homo sapien
tcccgactgaggagcccaagacttg

SEQ ID NO: 1588027 - DNA, 25 bp, Homo sapien
ctccttcttcccaggggtatagttg

SEQ ID NO: 1588028 - DNA, 25 bp, Homo sapien
tatagttgggccccatgatcctgac

SEQ ID NO: 1588029 - DNA, 25 bp, Homo sapien
ttcaggccagtggagaccagccccg

SEQ ID NO: 1588030 - DNA, 25 bp, Homo sapien
aggccagtggagaccagccccgaga

SEQ ID NO: 1588031 - DNA, 25 bp, Homo sapien
cagtggagaccagccccgagaagac

SEQ ID NO: 1588032 - DNA, 25 bp, Homo sapien
gccagtggagaccagccccgagaag

SEQ ID NO: 1588033 - DNA, 25 bp, Homo sapien
ttgtcggaggttggcaccattttgg

SEQ ID NO: 1588034 - DNA, 25 bp, Homo sapien
gtcggaggttggcaccattttggaa

SEQ ID NO: 1588035 - DNA, 25 bp, Homo sapien
cctttgtcggaggttggcaccattt

SEQ ID NO: 1588036 - DNA, 25 bp, Homo sapien
cgacctttgtcggaggttggcacca

SEQ ID NO: 1588037 - DNA, 25 bp, Homo sapien
gcaacccacaaccttgggcaacagg

SEQ ID NO: 1588038 - DNA, 25 bp, Homo sapien
ccttctggaaccctgcaacccacaa

SEQ ID NO: 1588039 - DNA, 25 bp, Homo sapien
aacaggaagtcatccggctgcatct

SEQ ID NO: 1588040 - DNA, 25 bp, Homo sapien
aaaacccgcaagctttattccagtg

SEQ ID NO: 1588041 - DNA, 25 bp, Homo sapien
gggcccctcgtacaggagctcgcag

SEQ ID NO: 1588042 - DNA, 25 bp, Homo sapien
tgcaacaaggcgtctccggcaggca

SEQ ID NO: 1588043 - DNA, 25 bp, Homo sapien
agcggtacttctgggccgtcacagg

SEQ ID NO: 1588044 - DNA, 25 bp, Homo sapien
caggtggatggtgatcatctgcaac

SEQ ID NO: 1588045 - DNA, 25 bp, Homo sapien
gcgggggcagagagcggtgcatgag

SEQ ID NO: 1588046 - DNA, 25 bp, Homo sapien
tgcgggggcagagagcggtgcatga

SEQ ID NO: 1588047 - DNA, 25 bp, Homo sapien
ctgcgggggcagagagcggtgcatg

SEQ ID NO: 1588048 - DNA, 25 bp, Homo sapien
tgaaattcatgatcgcatcaaacac

SEQ ID NO: 1588049 - DNA, 25 bp, Homo sapien
ctttcttgaaattcatgatcgcatc

SEQ ID NO: 1588050 - DNA, 25 bp, Homo sapien
gatgtccagtttctctatcagtttt

SEQ ID NO: 1588051 - DNA, 25 bp, Homo sapien
ttgatgtccagtttctctatcagtt

SEQ ID NO: 1588052 - DNA, 25 bp, Homo sapien
cagaaggtgcgtggcagcttcttcc

SEQ ID NO: 1588053 - DNA, 25 bp, Homo sapien
cttgaagatggggtccaggatcagc

SEQ ID NO: 1588054 - DNA, 25 bp, Homo sapien
gggtccaggatcagctggcagaagg

SEQ ID NO: 1588055 - DNA, 25 bp, Homo sapien
ggcagaaggtgcgtggcagcttctt

SEQ ID NO: 1588056 - DNA, 25 bp, Homo sapien
gctgaacttgccgttggctgggtca

SEQ ID NO: 1588057 - DNA, 25 bp, Homo sapien
acttgctgaacttgccgttggctgg

SEQ ID NO: 1588058 - DNA, 25 bp, Homo sapien
gaacttgccgttggctgggtcaaag

SEQ ID NO: 1588059 - DNA, 25 bp, Homo sapien
ggctgacttgctgaacttgccgttg

SEQ ID NO: 1588060 - DNA, 25 bp, Homo sapien
catcatgtcctctactttcttggcc

SEQ ID NO: 1588061 - DNA, 25 bp, Homo sapien
atgtcctctactttcttggcccgct

SEQ ID NO: 1588062 - DNA, 25 bp, Homo sapien
tcatgtcctctactttcttggcccg

SEQ ID NO: 1588063 - DNA, 25 bp, Homo sapien
tcctctactttcttggcccgctcgg

SEQ ID NO: 1588064 - DNA, 25 bp, Homo sapien
ccacggtaccgaggacaggatcgat

SEQ ID NO: 1588065 - DNA, 25 bp, Homo sapien
ggccacatacatctcggcaaactgc

SEQ ID NO: 1588066 - DNA, 25 bp, Homo sapien
caaactgcttcagggtgaaggccca

SEQ ID NO: 1588067 - DNA, 25 bp, Homo sapien
ttggcggcgaacttggccacataca

SEQ ID NO: 1588068 - DNA, 25 bp, Homo sapien
ctcagacgcaggctttcttcagtag

SEQ ID NO: 1588069 - DNA, 25 bp, Homo sapien
gcctcagacgcaggctttcttcagt

SEQ ID NO: 1588070 - DNA, 25 bp, Homo sapien
gacgcaggctttcttcagtagacat

SEQ ID NO: 1588071 - DNA, 25 bp, Homo sapien
cagacgcaggctttcttcagtagac

SEQ ID NO: 1588072 - DNA, 25 bp, Homo sapien
agcagggcgcggtccatcttgttca

SEQ ID NO: 1588073 - DNA, 25 bp, Homo sapien
gcttgatgcgctcggcaatggcctg

SEQ ID NO: 1588074 - DNA, 25 bp, Homo sapien
cgccctcgccgtaggtggagatgat

SEQ ID NO: 1588075 - DNA, 25 bp, Homo sapien
gatgacgttcacgttctccacgatg

SEQ ID NO: 1588076 - DNA, 25 bp, Homo sapien
accaatgcgccatcggtgactcgga

SEQ ID NO: 1588077 - DNA, 25 bp, Homo sapien
tctccgagagctcgtagaagaggga

SEQ ID NO: 1588078 - DNA, 25 bp, Homo sapien
tccttgctctgcttgatgaagttca

SEQ ID NO: 1588079 - DNA, 25 bp, Homo sapien
tccgaggagaagtcgacatgcccgg

SEQ ID NO: 1588080 - DNA, 25 bp, Homo sapien
ggtatcagtgaagcgtgtctccccg

SEQ ID NO: 1588081 - DNA, 25 bp, Homo sapien
tgatggcgcggatctggtctaccgt

SEQ ID NO: 1588082 - DNA, 25 bp, Homo sapien
gacttgatggtgatgcaacgctcct

SEQ ID NO: 1588083 - DNA, 25 bp, Homo sapien
gacagacatgttgcggatgttggcc

SEQ ID NO: 1588084 - DNA, 25 bp, Homo sapien
tctcccaggtagaaccgaaagaagc

SEQ ID NO: 1588085 - DNA, 25 bp, Homo sapien
tcgcgccgaggatggcggcgacgac

SEQ ID NO: 1588086 - DNA, 25 bp, Homo sapien
accgaaagaagcgagtcgcgccgag

SEQ ID NO: 1588087 - DNA, 25 bp, Homo sapien
tggcggatggcggtggattctccca

SEQ ID NO: 1588088 - DNA, 25 bp, Homo sapien
agatcacggcactgcatgcactcca

SEQ ID NO: 1588089 - DNA, 25 bp, Homo sapien
cgagatcacggcactgcatgcactc

SEQ ID NO: 1588090 - DNA, 25 bp, Homo sapien
gatcacggcactgcatgcactccag

SEQ ID NO: 1588091 - DNA, 25 bp, Homo sapien
ccgagatcacggcactgcatgcact

SEQ ID NO: 1588092 - DNA, 25 bp, Homo sapien
cccgattcaagcgattcacctgcct

SEQ ID NO: 1588093 - DNA, 25 bp, Homo sapien
ctgcagcctccgccacccgattcaa

SEQ ID NO: 1588094 - DNA, 25 bp, Homo sapien
tggcctcctaaagcgctgggattac

SEQ ID NO: 1588095 - DNA, 25 bp, Homo sapien
cttggcctcctaaagcgctgggatt

SEQ ID NO: 1588096 - DNA, 25 bp, Homo sapien
ggaggcggaggtgcgtgaatcactt

SEQ ID NO: 1588097 - DNA, 25 bp, Homo sapien
gcggaggtgcgtgaatcacttgagg

SEQ ID NO: 1588098 - DNA, 25 bp, Homo sapien
aggcggaggtgcgtgaatcacttga

SEQ ID NO: 1588099 - DNA, 25 bp, Homo sapien
tgggaggcggaggtgcgtgaatcac

SEQ ID NO: 1588100 - DNA, 25 bp, Homo sapien
cagctcataggtatttttgcccagg

SEQ ID NO: 1588101 - DNA, 25 bp, Homo sapien
tatcttacataacagtggaggtggt

SEQ ID NO: 1588102 - DNA, 25 bp, Homo sapien
catttacttaagtgcaaaacgggag

SEQ ID NO: 1588103 - DNA, 25 bp, Homo sapien
gatgaattctgtcctaaaacaggct

SEQ ID NO: 1588104 - DNA, 25 bp, Homo sapien
cacgcgccgagcagcgagcgtttta

SEQ ID NO: 1588105 - DNA, 25 bp, Homo sapien
tgtacctctggactctcctatcggg

SEQ ID NO: 1588106 - DNA, 25 bp, Homo sapien
tgcaaatgcatcctcgcccagagac

SEQ ID NO: 1588107 - DNA, 25 bp, Homo sapien
cctctctggcgaccactttgacgtt

SEQ ID NO: 1588108 - DNA, 25 bp, Homo sapien
catgggttgcggtcgcttcccaagg

SEQ ID NO: 1588109 - DNA, 25 bp, Homo sapien
tccctacggaacagcacagatgtcc

SEQ ID NO: 1588110 - DNA, 25 bp, Homo sapien
agctacctcggtaattccaattcag

SEQ ID NO: 1588111 - DNA, 25 bp, Homo sapien
gggtctcagttttctagccagctac

SEQ ID NO: 1588112 - DNA, 25 bp, Homo sapien
ttactgtgtactgtactgcctgggc

SEQ ID NO: 1588113 - DNA, 25 bp, Homo sapien
gaccgacgaaactgaaaaactgtaa

SEQ ID NO: 1588114 - DNA, 25 bp, Homo sapien
ttacagtttttcagtttcgtcggtc

SEQ ID NO: 1588115 - DNA, 25 bp, Homo sapien
ttgaagagcaattatatggtgtgtg

SEQ ID NO: 1588116 - DNA, 25 bp, Homo sapien
ctttgaagagcaattatatggtgtg

SEQ ID NO: 1588117 - DNA, 25 bp, Homo sapien
tgaagagcaattatatggtgtgtga

SEQ ID NO: 1588118 - DNA, 25 bp, Homo sapien
ggctttgaagagcaattatatggtg

SEQ ID NO: 1588119 - DNA, 25 bp, Homo sapien
ttgggcacgaatcctggctgcagca

SEQ ID NO: 1588120 - DNA, 25 bp, Homo sapien
ttcatgggtggcctcgcacaggtat

SEQ ID NO: 1588121 - DNA, 25 bp, Homo sapien
cggaggccctcagacttcgtggtgt

SEQ ID NO: 1588122 - DNA, 25 bp, Homo sapien
tcaggacacggctgtagaaccgctg

SEQ ID NO: 1588123 - DNA, 25 bp, Homo sapien
ttcctacggaagtcccagagggctc

SEQ ID NO: 1588124 - DNA, 25 bp, Homo sapien
ggtttagtgcaatccccgaggtctg

SEQ ID NO: 1588125 - DNA, 25 bp, Homo sapien
taactctgaggttgtagctcctggg

SEQ ID NO: 1588126 - DNA, 25 bp, Homo sapien
tctgaatcgtgcaaagacccctgtc

SEQ ID NO: 1588127 - DNA, 25 bp, Homo sapien
tggaaagagggctcacccctcaggg

SEQ ID NO: 1588128 - DNA, 25 bp, Homo sapien
gttggttttattgcgagggggtgca

SEQ ID NO: 1588129 - DNA, 25 bp, Homo sapien
aggtggaaagagggctcacccctca

SEQ ID NO: 1588130 - DNA, 25 bp, Homo sapien
tattgcgagggggtgcatggatagg

SEQ ID NO: 1588131 - DNA, 25 bp, Homo sapien
gagacgagaagatgtgtgtgtcaca

SEQ ID NO: 1588132 - DNA, 25 bp, Homo sapien
ccaaaaccatcctgtagaaacaata

SEQ ID NO: 1588133 - DNA, 25 bp, Homo sapien
ccacgacagatggttttctctccag

SEQ ID NO: 1588134 - DNA, 25 bp, Homo sapien
gaacagctcgccctgtgacactggg

SEQ ID NO: 1588135 - DNA, 25 bp, Homo sapien
gggtcccatgctagcattgcatatg

SEQ ID NO: 1588136 - DNA, 25 bp, Homo sapien
gcatctggcgacatagtctccccaa

SEQ ID NO: 1588137 - DNA, 25 bp, Homo sapien
tggctcggtcaacaccgggccttgt

SEQ ID NO: 1588138 - DNA, 25 bp, Homo sapien
cagagcgtctattttcggggtccca

SEQ ID NO: 1588139 - DNA, 25 bp, Homo sapien
cggtggttctaaggccctggaggtg

SEQ ID NO: 1588140 - DNA, 25 bp, Homo sapien
ctttgagtaaaaagaggggtgcctg

SEQ ID NO: 1588141 - DNA, 25 bp, Homo sapien
gatcggggtgctccggctggaaggc

SEQ ID NO: 1588142 - DNA, 25 bp, Homo sapien
tccttggtggccatgcgggagggac

SEQ ID NO: 1588143 - DNA, 25 bp, Homo sapien
catgcgggagggacaggcgtgttgg

SEQ ID NO: 1588144 - DNA, 25 bp, Homo sapien
agggtaggcgcatccaaggtccagc

SEQ ID NO: 1588145 - DNA, 25 bp, Homo sapien
cacagtcctgccttcgaggctgacg

SEQ ID NO: 1588146 - DNA, 25 bp, Homo sapien
ctcttcacgtcagaaccaaaaaagg

SEQ ID NO: 1588147 - DNA, 25 bp, Homo sapien
cagaagcgggcgctaagacctcttc

SEQ ID NO: 1588148 - DNA, 25 bp, Homo sapien
tctgggggtgaagcacaaacacctc

SEQ ID NO: 1588149 - DNA, 25 bp, Homo sapien
taagaattaagataaagtgtagtac

SEQ ID NO: 1588150 - DNA, 25 bp, Homo sapien
cgttccgttacaaagtgccaagact

SEQ ID NO: 1588151 - DNA, 25 bp, Homo sapien
tccgttacaaagtgccaagacttct

SEQ ID NO: 1588152 - DNA, 25 bp, Homo sapien
caaagtgccaagacttctaatgtgg

SEQ ID NO: 1588153 - DNA, 25 bp, Homo sapien
tcccgccggttgtaagtgccgtgaa

SEQ ID NO: 1588154 - DNA, 25 bp, Homo sapien
aataggtttgtgtctcagtggccag

SEQ ID NO: 1588155 - DNA, 25 bp, Homo sapien
tcccttagtaagtgccctgaggaag

SEQ ID NO: 1588156 - DNA, 25 bp, Homo sapien
gggcccattttaacgtccgctcaga

SEQ ID NO: 1588157 - DNA, 25 bp, Homo sapien
cccgaaacccagcgatggggtggtg

SEQ ID NO: 1588158 - DNA, 25 bp, Homo sapien
cgaaacccagcgatggggtggtggg

SEQ ID NO: 1588159 - DNA, 25 bp, Homo sapien
agccccgaaacccagcgatggggtg

SEQ ID NO: 1588160 - DNA, 25 bp, Homo sapien
caagccccgaaacccagcgatgggg

SEQ ID NO: 1588161 - DNA, 25 bp, Homo sapien
gaaagcgctaccctagattctgtga

SEQ ID NO: 1588162 - DNA, 25 bp, Homo sapien
tgagaaagcgctaccctagattctg

SEQ ID NO: 1588163 - DNA, 25 bp, Homo sapien
tagattctgtgacgcgtcatatata

SEQ ID NO: 1588164 - DNA, 25 bp, Homo sapien
cctagattctgtgacgcgtcatata

SEQ ID NO: 1588165 - DNA, 25 bp, Homo sapien
ttaggcgagtccggctgtgaagtta

SEQ ID NO: 1588166 - DNA, 25 bp, Homo sapien
taggcgagtccggctgtgaagttac

SEQ ID NO: 1588167 - DNA, 25 bp, Homo sapien
cctcgtcctcgtccttaaagtgctt

SEQ ID NO: 1588168 - DNA, 25 bp, Homo sapien
aagccgtcggggctggccacgtcct

SEQ ID NO: 1588169 - DNA, 25 bp, Homo sapien
accggcgcccgctacattcaaccgg

SEQ ID NO: 1588170 - DNA, 25 bp, Homo sapien
cgctacattcaaccggcccaagccg

SEQ ID NO: 1588171 - DNA, 25 bp, Homo sapien
ctggccgttgcgccgggcgtcgggg

SEQ ID NO: 1588172 - DNA, 25 bp, Homo sapien
ggggcttgcggccgcggcgcgaggg

SEQ ID NO: 1588173 - DNA, 25 bp, Homo sapien
ggcttgcggccgcggcgcgagggga

SEQ ID NO: 1588174 - DNA, 25 bp, Homo sapien
gcttgcggccgcggcgcgaggggac

SEQ ID NO: 1588175 - DNA, 25 bp, Homo sapien
gggcttgcggccgcggcgcgagggg

SEQ ID NO: 1588176 - DNA, 25 bp, Homo sapien
tcggagcggacgaaggtcttgcagc

SEQ ID NO: 1588177 - DNA, 25 bp, Homo sapien
gtctgtgcaggtggtcggagcggac

SEQ ID NO: 1588178 - DNA, 25 bp, Homo sapien
agcggacgaaggtcttgcagcagct

SEQ ID NO: 1588179 - DNA, 25 bp, Homo sapien
caggtggtcggagcggacgaaggtc

SEQ ID NO: 1588180 - DNA, 25 bp, Homo sapien
cgtagttgtgggcaaaggcggcgcc

SEQ ID NO: 1588181 - DNA, 25 bp, Homo sapien
ttcttcaggtcgtagttgtgggcaa

SEQ ID NO: 1588182 - DNA, 25 bp, Homo sapien
cttcaggtcgtagttgtgggcaaag

SEQ ID NO: 1588183 - DNA, 25 bp, Homo sapien
caggtcgtagttgtgggcaaaggcg

SEQ ID NO: 1588184 - DNA, 25 bp, Homo sapien
atcacccttgcagaacacggaccgt

SEQ ID NO: 1588185 - DNA, 25 bp, Homo sapien
gggcgatttcgcattctgaacatct

SEQ ID NO: 1588186 - DNA, 25 bp, Homo sapien
tgaacatctaaagagggcctcggac

SEQ ID NO: 1588187 - DNA, 25 bp, Homo sapien
caccagaggtttcggtgccccgatg

SEQ ID NO: 1588188 - DNA, 25 bp, Homo sapien
caacgccctgctgtgactcagaggg

SEQ ID NO: 1588189 - DNA, 25 bp, Homo sapien
agaggggcctcgggctcccaggctt

SEQ ID NO: 1588190 - DNA, 25 bp, Homo sapien
tcaacgccctgctgtgactcagagg

SEQ ID NO: 1588191 - DNA, 25 bp, Homo sapien
cctcgggctcccaggcttttggagg

SEQ ID NO: 1588192 - DNA, 25 bp, Homo sapien
gcgggaggggtcgtgagcggcggat

SEQ ID NO: 1588193 - DNA, 25 bp, Homo sapien
atgtgtaggtgacgtgcatgtgtct

SEQ ID NO: 1588194 - DNA, 25 bp, Homo sapien
gtgtgtggatgtgtaggtgacgtgc

SEQ ID NO: 1588195 - DNA, 25 bp, Homo sapien
gaggggtcgtgagcggcggatgctg

SEQ ID NO: 1588196 - DNA, 25 bp, Homo sapien
ctggtgaagcggaccttgcagatgt

SEQ ID NO: 1588197 - DNA, 25 bp, Homo sapien
agcggaccttgcagatgttgcactc

SEQ ID NO: 1588198 - DNA, 25 bp, Homo sapien
gtgaagcggaccttgcagatgttgc

SEQ ID NO: 1588199 - DNA, 25 bp, Homo sapien
cttgcagatgttgcactcgtagggc

SEQ ID NO: 1588200 - DNA, 25 bp, Homo sapien
cctggatgaccttctcgcagatggg

SEQ ID NO: 1588201 - DNA, 25 bp, Homo sapien
tgggtgcggatgtgtcgcggcagct

SEQ ID NO: 1588202 - DNA, 25 bp, Homo sapien
gcttgccggcgccctggatgacctt

SEQ ID NO: 1588203 - DNA, 25 bp, Homo sapien
gatgtgtcgcggcagcttgccggcg

SEQ ID NO: 1588204 - DNA, 25 bp, Homo sapien
tcgtgggcgccgctgaagtacttca

SEQ ID NO: 1588205 - DNA, 25 bp, Homo sapien
acttcaggtagtagtccatgacgcc

SEQ ID NO: 1588206 - DNA, 25 bp, Homo sapien
tctggaaggccttggctcggatctt

SEQ ID NO: 1588207 - DNA, 25 bp, Homo sapien
accttctgcgaccaggccgggtaga

SEQ ID NO: 1588208 - DNA, 25 bp, Homo sapien
cttgtcgtcggcccgcgactcctcg

SEQ ID NO: 1588209 - DNA, 25 bp, Homo sapien
tgtcgtcggcccgcgactcctcgtc

SEQ ID NO: 1588210 - DNA, 25 bp, Homo sapien
ttgtcgtcggcccgcgactcctcgt

SEQ ID NO: 1588211 - DNA, 25 bp, Homo sapien
gtcgtcggcccgcgactcctcgtcg

SEQ ID NO: 1588212 - DNA, 25 bp, Homo sapien
gcctccgacagcgaggcggcctcct

SEQ ID NO: 1588213 - DNA, 25 bp, Homo sapien
gccctcggccgctcccgacaggaag

SEQ ID NO: 1588214 - DNA, 25 bp, Homo sapien
tctccgccgcggccgtagtggccgt

SEQ ID NO: 1588215 - DNA, 25 bp, Homo sapien
ggccgccagcccgtccacgtcgggc

SEQ ID NO: 1588216 - DNA, 25 bp, Homo sapien
ccggcccatagaagtctaagccgtt

SEQ ID NO: 1588217 - DNA, 25 bp, Homo sapien
ggcccggcccatagaagtctaagcc

SEQ ID NO: 1588218 - DNA, 25 bp, Homo sapien
agacccgggttgctgtcgccctcgt

SEQ ID NO: 1588219 - DNA, 25 bp, Homo sapien
ctaagccgttgcagtcgcccgcggc

SEQ ID NO: 1588220 - DNA, 25 bp, Homo sapien
ggtcatcatcggacgccccaaaggc

SEQ ID NO: 1588221 - DNA, 25 bp, Homo sapien
gtcatcatcggacgccccaaaggcg

SEQ ID NO: 1588222 - DNA, 25 bp, Homo sapien
aggtcatcatcggacgccccaaagg

SEQ ID NO: 1588223 - DNA, 25 bp, Homo sapien
ggcaggctgttcatggggttgctct

SEQ ID NO: 1588224 - DNA, 25 bp, Homo sapien
ggctgttcatggggttgctctggaa

SEQ ID NO: 1588225 - DNA, 25 bp, Homo sapien
caggctgttcatggggttgctctgg

SEQ ID NO: 1588226 - DNA, 25 bp, Homo sapien
ggggcaggctgttcatggggttgct

SEQ ID NO: 1588227 - DNA, 25 bp, Homo sapien
tccttggcgcggaggaggttgcgct

SEQ ID NO: 1588228 - DNA, 25 bp, Homo sapien
cgcggaggaggttgcgctgatcaat

SEQ ID NO: 1588229 - DNA, 25 bp, Homo sapien
aggaggttgcgctgatcaatttgat

SEQ ID NO: 1588230 - DNA, 25 bp, Homo sapien
caatttgatctacaaggtccagctg

SEQ ID NO: 1588231 - DNA, 25 bp, Homo sapien
cctcggcgctgacgaagtcgatctc

SEQ ID NO: 1588232 - DNA, 25 bp, Homo sapien
gtcgatctcgtacacgttctgctgg

SEQ ID NO: 1588233 - DNA, 25 bp, Homo sapien
gctgaggatgtcacccacgttggct

SEQ ID NO: 1588234 - DNA, 25 bp, Homo sapien
gcgcccgacgtgaacagcttcttga

SEQ ID NO: 1588235 - DNA, 25 bp, Homo sapien
gatgccctgttctgtctcatcagcg

SEQ ID NO: 1588236 - DNA, 25 bp, Homo sapien
gtttccctagctgtgcccaagagca

SEQ ID NO: 1588237 - DNA, 25 bp, Homo sapien
aaagggcactttgaggcccggctcg

SEQ ID NO: 1588238 - DNA, 25 bp, Homo sapien
cccgggaatgcctgttgaaagggca

SEQ ID NO: 1588239 - DNA, 25 bp, Homo sapien
gaggcctgcttgtcacctggagata

SEQ ID NO: 1588240 - DNA, 25 bp, Homo sapien
acctgcttagctgagatgcctgtga

SEQ ID NO: 1588241 - DNA, 25 bp, Homo sapien
actctgagatgtcatgggccaggaa

SEQ ID NO: 1588242 - DNA, 25 bp, Homo sapien
cgagcccaggttccaagaggaagct

SEQ ID NO: 1588243 - DNA, 25 bp, Homo sapien
cttctctcaggcatcctgataggtg

SEQ ID NO: 1588244 - DNA, 25 bp, Homo sapien
aaccagaaaggcgtgggtggcgaca

SEQ ID NO: 1588245 - DNA, 25 bp, Homo sapien
tgggtggcgacacttccaccgagtg

SEQ ID NO: 1588246 - DNA, 25 bp, Homo sapien
agaatccggccagatccttctctca

SEQ ID NO: 1588247 - DNA, 25 bp, Homo sapien
cttgcaagggagctctcacacagga

SEQ ID NO: 1588248 - DNA, 25 bp, Homo sapien
ctgacctgggagtttccgccgcgga

SEQ ID NO: 1588249 - DNA, 25 bp, Homo sapien
ggtcgcagagcaagcgtgccagcat

SEQ ID NO: 1588250 - DNA, 25 bp, Homo sapien
gacaccacgggtggctttgcaggca

SEQ ID NO: 1588251 - DNA, 25 bp, Homo sapien
ccatgccctgagctgacctgggagt

SEQ ID NO: 1588252 - DNA, 25 bp, Homo sapien
ctccttcccggggcagcggcgaggg

SEQ ID NO: 1588253 - DNA, 25 bp, Homo sapien
ggggccgcgccgggcgctgacttac

SEQ ID NO: 1588254 - DNA, 25 bp, Homo sapien
cgtgccgggggccgcgccgggcgct

SEQ ID NO: 1588255 - DNA, 25 bp, Homo sapien
cgggggccgcgccgggcgctgactt

SEQ ID NO: 1588256 - DNA, 25 bp, Homo sapien
gccgggggccgcgccgggcgctgac

SEQ ID NO: 1588257 - DNA, 25 bp, Homo sapien
gcgtcactgcccctacagtaactgt

SEQ ID NO: 1588258 - DNA, 25 bp, Homo sapien
cagtacagccaaagccccgtatgat

SEQ ID NO: 1588259 - DNA, 25 bp, Homo sapien
tcccttgtcttaaaggtgccgcagc

SEQ ID NO: 1588260 - DNA, 25 bp, Homo sapien
tatgatgctcgcgactcccttcctg

SEQ ID NO: 1588261 - DNA, 25 bp, Homo sapien
aatgaaccatcgtgccagcgagacg

SEQ ID NO: 1588262 - DNA, 25 bp, Homo sapien
gacgcccaggctctaagctctacat

SEQ ID NO: 1588263 - DNA, 25 bp, Homo sapien
ggattctccatggtgagaacctgac

SEQ ID NO: 1588264 - DNA, 25 bp, Homo sapien
tgcaggaaaaggatcgagaaagccc

SEQ ID NO: 1588265 - DNA, 25 bp, Homo sapien
tttcactttggtatcaccggtttca

SEQ ID NO: 1588266 - DNA, 25 bp, Homo sapien
tggtatcaccggtttcactttcagg

SEQ ID NO: 1588267 - DNA, 25 bp, Homo sapien
cactttggtatcaccggtttcactt

SEQ ID NO: 1588268 - DNA, 25 bp, Homo sapien
cggagcttccgtttcactttggtat

SEQ ID NO: 1588269 - DNA, 25 bp, Homo sapien
cacactcagggggcccagtagggac

SEQ ID NO: 1588270 - DNA, 25 bp, Homo sapien
ccagtagggaccccgtgccttggag

SEQ ID NO: 1588271 - DNA, 25 bp, Homo sapien
ccaccagccacactcagggggccca

SEQ ID NO: 1588272 - DNA, 25 bp, Homo sapien
cccgtgccttggagggccctcagtg

SEQ ID NO: 1588273 - DNA, 25 bp, Homo sapien
aaaaaagccacacaagactagaagg

SEQ ID NO: 1588274 - DNA, 25 bp, Homo sapien
gcctcggactcccgaagtgtttaga

SEQ ID NO: 1588275 - DNA, 25 bp, Homo sapien
tcatgtgagactttagggcaaaaca

SEQ ID NO: 1588276 - DNA, 25 bp, Homo sapien
gactagaagggtcaccctaagaaga

SEQ ID NO: 1588277 - DNA, 25 bp, Homo sapien
gtccccagaggcaccccggccagga

SEQ ID NO: 1588278 - DNA, 25 bp, Homo sapien
gaggcaccccggccaggacgggcag

SEQ ID NO: 1588279 - DNA, 25 bp, Homo sapien
gacccccgttcctgcatgcgctgtc

SEQ ID NO: 1588280 - DNA, 25 bp, Homo sapien
ctgcatgcgctgtcgccccgccacg

SEQ ID NO: 1588281 - DNA, 25 bp, Homo sapien
aaccagccggcaaaatccacttctt

SEQ ID NO: 1588282 - DNA, 25 bp, Homo sapien
acaaccagccggcaaaatccacttc

SEQ ID NO: 1588283 - DNA, 25 bp, Homo sapien
acacaaccagccggcaaaatccact

SEQ ID NO: 1588284 - DNA, 25 bp, Homo sapien
ttacacaaccagccggcaaaatcca

SEQ ID NO: 1588285 - DNA, 25 bp, Homo sapien
cacagaaagtaacgggctgtctagg

SEQ ID NO: 1588286 - DNA, 25 bp, Homo sapien
tatgggaaagcactcgggatgcagg

SEQ ID NO: 1588287 - DNA, 25 bp, Homo sapien
caatccgccaatcagctgtcgaggg

SEQ ID NO: 1588288 - DNA, 25 bp, Homo sapien
tttgaaggtcgctgacggtggctgt

SEQ ID NO: 1588289 - DNA, 25 bp, Homo sapien
ttttggtgaacagctgggcttccga

SEQ ID NO: 1588290 - DNA, 25 bp, Homo sapien
gtctcatcctgtgggtgcgggacca

SEQ ID NO: 1588291 - DNA, 25 bp, Homo sapien
ggatggtcaccctctagtttgcagg

SEQ ID NO: 1588292 - DNA, 25 bp, Homo sapien
cagtgtgcagaacagggatggtcac

SEQ ID NO: 1588293 - DNA, 25 bp, Homo sapien
cgcccgctccgctgggttcttgatg

SEQ ID NO: 1588294 - DNA, 25 bp, Homo sapien
agcatcttcaggtccgcccgctccg

SEQ ID NO: 1588295 - DNA, 25 bp, Homo sapien
ttcaggtccgcccgctccgctgggt

SEQ ID NO: 1588296 - DNA, 25 bp, Homo sapien
aggtccgcccgctccgctgggttct

SEQ ID NO: 1588297 - DNA, 25 bp, Homo sapien
taacgctgcactgggattctggatg

SEQ ID NO: 1588298 - DNA, 25 bp, Homo sapien
ctcctggcagaggacgagggatcca

SEQ ID NO: 1588299 - DNA, 25 bp, Homo sapien
gggctgagtcctgcctaacgctgca

SEQ ID NO: 1588300 - DNA, 25 bp, Homo sapien
aggacccggaaggagtggcacatct

SEQ ID NO: 1588301 - DNA, 25 bp, Homo sapien
gaacacaccgttgggcagcttagga

SEQ ID NO: 1588302 - DNA, 25 bp, Homo sapien
tcctggaagtcgggggtgaacacac

SEQ ID NO: 1588303 - DNA, 25 bp, Homo sapien
tgaacacaccgttgggcagcttagg

SEQ ID NO: 1588304 - DNA, 25 bp, Homo sapien
gggtgaacacaccgttgggcagctt

SEQ ID NO: 1588305 - DNA, 25 bp, Homo sapien
ccatggcaggccggctatccatccc

SEQ ID NO: 1588306 - DNA, 25 bp, Homo sapien
atggcaggccggctatccatcccgt

SEQ ID NO: 1588307 - DNA, 25 bp, Homo sapien
tggcaggccggctatccatcccgtg

SEQ ID NO: 1588308 - DNA, 25 bp, Homo sapien
gcaggccggctatccatcccgtgac

SEQ ID NO: 1588309 - DNA, 25 bp, Homo sapien
gcctgagcctctagtgaattaaaaa

SEQ ID NO: 1588310 - DNA, 25 bp, Homo sapien
aattggaggcgggtgtgcagaggca

SEQ ID NO: 1588311 - DNA, 25 bp, Homo sapien
cacatgccagcctaaattggaggcg

SEQ ID NO: 1588312 - DNA, 25 bp, Homo sapien
gagatgggccgatggccacctcact

SEQ ID NO: 1588313 - DNA, 25 bp, Homo sapien
cttctgcccgtcctgaaatgggcag

SEQ ID NO: 1588314 - DNA, 25 bp, Homo sapien
ccctgggctggggatggtataccac

SEQ ID NO: 1588315 - DNA, 25 bp, Homo sapien
gggcttggcagctggactttcgcct

SEQ ID NO: 1588316 - DNA, 25 bp, Homo sapien
tgtctgagaaccagctggccaggcc

SEQ ID NO: 1588317 - DNA, 25 bp, Homo sapien
gaatgctttcgggataaaatgttgg

SEQ ID NO: 1588318 - DNA, 25 bp, Homo sapien
tccacttttctgtgcgtttgaatgc

SEQ ID NO: 1588319 - DNA, 25 bp, Homo sapien
cagtcggcaccatccagggggacag

SEQ ID NO: 1588320 - DNA, 25 bp, Homo sapien
gcagctgccccggacagaacaggtt

SEQ ID NO: 1588321 - DNA, 25 bp, Homo sapien
cgagtaatgtgtgccctgcaaccgc

SEQ ID NO: 1588322 - DNA, 25 bp, Homo sapien
caccgagtaatgtgtgccctgcaac

SEQ ID NO: 1588323 - DNA, 25 bp, Homo sapien
tgcaccgagtaatgtgtgccctgca

SEQ ID NO: 1588324 - DNA, 25 bp, Homo sapien
ccgactgcaccgagtaatgtgtgcc

SEQ ID NO: 1588325 - DNA, 25 bp, Homo sapien
tggtgttgaccgcagctcttgaaga

SEQ ID NO: 1588326 - DNA, 25 bp, Homo sapien
gaatccccagtcgtttcctgaaaga

SEQ ID NO: 1588327 - DNA, 25 bp, Homo sapien
gaaagaaacctggtaggcactgcta

SEQ ID NO: 1588328 - DNA, 25 bp, Homo sapien
gctgttacgcaattctacctcccgg

SEQ ID NO: 1588329 - DNA, 25 bp, Homo sapien
agccatgtaggagcgcgtgcccacg

SEQ ID NO: 1588330 - DNA, 25 bp, Homo sapien
tgagctggccgctcaccccgaagtc

SEQ ID NO: 1588331 - DNA, 25 bp, Homo sapien
tctagagttcacgaggatgttggag

SEQ ID NO: 1588332 - DNA, 25 bp, Homo sapien
tgatctcccctctagagttcacgag

SEQ ID NO: 1588333 - DNA, 25 bp, Homo sapien
tcggaggtacgccaagccccggaga

SEQ ID NO: 1588334 - DNA, 25 bp, Homo sapien
gcatgatctggtgcttctctcggag

SEQ ID NO: 1588335 - DNA, 25 bp, Homo sapien
tctcggaggtacgccaagccccgga

SEQ ID NO: 1588336 - DNA, 25 bp, Homo sapien
tgcttctctcggaggtacgccaagc

SEQ ID NO: 1588337 - DNA, 25 bp, Homo sapien
gcgatgctgactttccccaggatct

SEQ ID NO: 1588338 - DNA, 25 bp, Homo sapien
tcttggcctctttcagcacctggtc

SEQ ID NO: 1588339 - DNA, 25 bp, Homo sapien
agcacctggtccagggagccgccgt

SEQ ID NO: 1588340 - DNA, 25 bp, Homo sapien
gatctcctcgggaatcctcttggcc

SEQ ID NO: 1588341 - DNA, 25 bp, Homo sapien
caagggcagggcgtcttctgacagt

SEQ ID NO: 1588342 - DNA, 25 bp, Homo sapien
tcttcccagcacacgaagggaaggg

SEQ ID NO: 1588343 - DNA, 25 bp, Homo sapien
gtggtctgcctcctgacgggaagca

SEQ ID NO: 1588344 - DNA, 25 bp, Homo sapien
cgaatcagttgcgtgactcggccct

SEQ ID NO: 1588345 - DNA, 25 bp, Homo sapien
actgccaccgtctggcgtgcgtctc

SEQ ID NO: 1588346 - DNA, 25 bp, Homo sapien
cactgccaccgtctggcgtgcgtct

SEQ ID NO: 1588347 - DNA, 25 bp, Homo sapien
tgccaccgtctggcgtgcgtctctt

SEQ ID NO: 1588348 - DNA, 25 bp, Homo sapien
ccactgccaccgtctggcgtgcgtc

SEQ ID NO: 1588349 - DNA, 25 bp, Homo sapien
aaatgaggataaataacctggacgc

SEQ ID NO: 1588350 - DNA, 25 bp, Homo sapien
caaatgaggataaataacctggacg

SEQ ID NO: 1588351 - DNA, 25 bp, Homo sapien
aatagggagcaccacatgacagagg

SEQ ID NO: 1588352 - DNA, 25 bp, Homo sapien
gatcgcacgtttgcagggtgtcacc

SEQ ID NO: 1588353 - DNA, 25 bp, Homo sapien
ttttgcaaacgacgctgtgcggcag

SEQ ID NO: 1588354 - DNA, 25 bp, Homo sapien
tgagtcagccacacaaaacgaggat

SEQ ID NO: 1588355 - DNA, 25 bp, Homo sapien
agttgcattcgtgcaggacctgcag

SEQ ID NO: 1588356 - DNA, 25 bp, Homo sapien
ttctgctgctcgtcaagttccagct

SEQ ID NO: 1588357 - DNA, 25 bp, Homo sapien
gagttcgccgaccttggctttctgg

SEQ ID NO: 1588358 - DNA, 25 bp, Homo sapien
gtcatcgtctttgagttcgccgacc

SEQ ID NO: 1588359 - DNA, 25 bp, Homo sapien
cttctgctgctcgtcaagttccagc

SEQ ID NO: 1588360 - DNA, 25 bp, Homo sapien
actaagcgcaatgcacacaggaacc

SEQ ID NO: 1588361 - DNA, 25 bp, Homo sapien
cctggagtaacagacaactaagcgc

SEQ ID NO: 1588362 - DNA, 25 bp, Homo sapien
caaatgccttgactcagaaccagat

SEQ ID NO: 1588363 - DNA, 25 bp, Homo sapien
caggaacccattgctgtgcacaagc

SEQ ID NO: 1588364 - DNA, 25 bp, Homo sapien
cattattgcgcctatgctctcgtgg

SEQ ID NO: 1588365 - DNA, 25 bp, Homo sapien
gctgcaaagagctcgctggaaggca

SEQ ID NO: 1588366 - DNA, 25 bp, Homo sapien
ccaattcaggaaggagctaaagcca

SEQ ID NO: 1588367 - DNA, 25 bp, Homo sapien
tacagctggaagtggcgtaagccac

SEQ ID NO: 1588368 - DNA, 25 bp, Homo sapien
cggaggcgccctcgctggtagggga

SEQ ID NO: 1588369 - DNA, 25 bp, Homo sapien
tcggaggcgccctcgctggtagggg

SEQ ID NO: 1588370 - DNA, 25 bp, Homo sapien
ggccctcggcgatggtagggttgat

SEQ ID NO: 1588371 - DNA, 25 bp, Homo sapien
gggccctcggcgatggtagggttga

SEQ ID NO: 1588372 - DNA, 25 bp, Homo sapien
ccctcggcgatggtagggttgatgg

SEQ ID NO: 1588373 - DNA, 25 bp, Homo sapien
tcggcgatggtagggttgatggtga

SEQ ID NO: 1588374 - DNA, 25 bp, Homo sapien
ggcgcctctagccggggcccatagg

SEQ ID NO: 1588375 - DNA, 25 bp, Homo sapien
cgaggcccgaagaaggctgacgccg

SEQ ID NO: 1588376 - DNA, 25 bp, Homo sapien
gaggcccgaagaaggctgacgccgc

SEQ ID NO: 1588377 - DNA, 25 bp, Homo sapien
ccgaggcccgaagaaggctgacgcc

SEQ ID NO: 1588378 - DNA, 25 bp, Homo sapien
aggcccgaagaaggctgacgccgca

SEQ ID NO: 1588379 - DNA, 25 bp, Homo sapien
tggagcacagctctcagagccctga

SEQ ID NO: 1588380 - DNA, 25 bp, Homo sapien
actcctgtttaagctggagaccagg

SEQ ID NO: 1588381 - DNA, 25 bp, Homo sapien
gtgagaccacgagagaaaaagaatc

SEQ ID NO: 1588382 - DNA, 25 bp, Homo sapien
caaaggcagtgcaagcctctactga

SEQ ID NO: 1588383 - DNA, 25 bp, Homo sapien
gatagagccgttgatccgggtggga

SEQ ID NO: 1588384 - DNA, 25 bp, Homo sapien
agggctggtgggccgctcccgtttg

SEQ ID NO: 1588385 - DNA, 25 bp, Homo sapien
gttgatccgggtgggagattcctcc

SEQ ID NO: 1588386 - DNA, 25 bp, Homo sapien
gctctgagccgttgtgctgggcgca

SEQ ID NO: 1588387 - DNA, 25 bp, Homo sapien
ggtcatgacctcgtcaacgtagcca

SEQ ID NO: 1588388 - DNA, 25 bp, Homo sapien
ctcgtcaacgtagccatggatgcgg

SEQ ID NO: 1588389 - DNA, 25 bp, Homo sapien
tgagccgggtcatgacctcgtcaac

SEQ ID NO: 1588390 - DNA, 25 bp, Homo sapien
aacgtagccatggatgcggaggtca

SEQ ID NO: 1588391 - DNA, 25 bp, Homo sapien
gacgggtcaggcgtgggggacagag

SEQ ID NO: 1588392 - DNA, 25 bp, Homo sapien
ggacgggtcaggcgtgggggacaga

SEQ ID NO: 1588393 - DNA, 25 bp, Homo sapien
acgggtcaggcgtgggggacagagg

SEQ ID NO: 1588394 - DNA, 25 bp, Homo sapien
gcttggtagccagcggcaggttccc

SEQ ID NO: 1588395 - DNA, 25 bp, Homo sapien
ctccccggcgcttggtagccagcgg

SEQ ID NO: 1588396 - DNA, 25 bp, Homo sapien
tgggctgcaggttgacgatgaccag

SEQ ID NO: 1588397 - DNA, 25 bp, Homo sapien
cttggtgggctgcaggttgacgatg

SEQ ID NO: 1588398 - DNA, 25 bp, Homo sapien
agcgatgtacccagcgtgatggaca

SEQ ID NO: 1588399 - DNA, 25 bp, Homo sapien
cagcgatgtacccagcgtgatggac

SEQ ID NO: 1588400 - DNA, 25 bp, Homo sapien
tgcagcgatgtacccagcgtgatgg

SEQ ID NO: 1588401 - DNA, 25 bp, Homo sapien
ctgcagcgatgtacccagcgtgatg

SEQ ID NO: 1588402 - DNA, 25 bp, Homo sapien
tggtaagagcttggacacctagggt

SEQ ID NO: 1588403 - DNA, 25 bp, Homo sapien
cccagagccatgaggtgacgagtgt

SEQ ID NO: 1588404 - DNA, 25 bp, Homo sapien
gacacctggcggaagccttggtttc

SEQ ID NO: 1588405 - DNA, 25 bp, Homo sapien
ggtttccttgtgtagcacccaccca

SEQ ID NO: 1588406 - DNA, 25 bp, Homo sapien
ctcatcggcgagtgccaggtcccgg

SEQ ID NO: 1588407 - DNA, 25 bp, Homo sapien
ggcctcatcggcgagtgccaggtcc

SEQ ID NO: 1588408 - DNA, 25 bp, Homo sapien
ctgctggcctcatcggcgagtgcca

SEQ ID NO: 1588409 - DNA, 25 bp, Homo sapien
ctggcctcatcggcgagtgccaggt

SEQ ID NO: 1588410 - DNA, 25 bp, Homo sapien
ggcctcgcagcctcccctggagccc

SEQ ID NO: 1588411 - DNA, 25 bp, Homo sapien
gggcctcgcagcctcccctggagcc

SEQ ID NO: 1588412 - DNA, 25 bp, Homo sapien
tagccacggtgcagagccggcccgt

SEQ ID NO: 1588413 - DNA, 25 bp, Homo sapien
tgcccacgactgtgtctcggacgta

SEQ ID NO: 1588414 - DNA, 25 bp, Homo sapien
ccttgccttagccacggtgcagagc

SEQ ID NO: 1588415 - DNA, 25 bp, Homo sapien
ccggcccgtggccttcaggcccatg

SEQ ID NO: 1588416 - DNA, 25 bp, Homo sapien
cagagataagaaggcccctgtggct

SEQ ID NO: 1588417 - DNA, 25 bp, Homo sapien
gaaggcccctgtggctgtaggtcca

SEQ ID NO: 1588418 - DNA, 25 bp, Homo sapien
aagaaggcccctgtggctgtaggtc

SEQ ID NO: 1588419 - DNA, 25 bp, Homo sapien
ataagaaggcccctgtggctgtagg

SEQ ID NO: 1588420 - DNA, 25 bp, Homo sapien
tcttccacaaacatgttcccgtgga

SEQ ID NO: 1588421 - DNA, 25 bp, Homo sapien
cccgtggagctctgccagtttgtcc

SEQ ID NO: 1588422 - DNA, 25 bp, Homo sapien
tcttacacttggcacattcttccac

SEQ ID NO: 1588423 - DNA, 25 bp, Homo sapien
aacatgttcccgtggagctctgcca

SEQ ID NO: 1588424 - DNA, 25 bp, Homo sapien
ggaagcctgagcgcacatggagccc

SEQ ID NO: 1588425 - DNA, 25 bp, Homo sapien
gccgcgcgctctcaaaggtggtgtc

SEQ ID NO: 1588426 - DNA, 25 bp, Homo sapien
ccgtccacgttctggctgaccagga

SEQ ID NO: 1588427 - DNA, 25 bp, Homo sapien
gcaccagcgccatgtgggtctgcgt

SEQ ID NO: 1588428 - DNA, 25 bp, Homo sapien
caagcctggatcagaggaggtacct

SEQ ID NO: 1588429 - DNA, 25 bp, Homo sapien
ggaagagcccatgagtttaggagaa

SEQ ID NO: 1588430 - DNA, 25 bp, Homo sapien
tctggccccaagagtcaagcctgga

SEQ ID NO: 1588431 - DNA, 25 bp, Homo sapien
tattcagaactctacactgcctggc

SEQ ID NO: 1588432 - DNA, 25 bp, Homo sapien
ctggaagactgccagaccagcctcg

SEQ ID NO: 1588433 - DNA, 25 bp, Homo sapien
cacactggaagactgccagaccagc

SEQ ID NO: 1588434 - DNA, 25 bp, Homo sapien
atgccggcacccgtgtggaacacca

SEQ ID NO: 1588435 - DNA, 25 bp, Homo sapien
gctgatgccggcacccgtgtggaac

SEQ ID NO: 1588436 - DNA, 25 bp, Homo sapien
tccctttgcgcctgtcgtcccctct

SEQ ID NO: 1588437 - DNA, 25 bp, Homo sapien
ctctccccgatcagccccgacaggg

SEQ ID NO: 1588438 - DNA, 25 bp, Homo sapien
tcttcctggaactacatcccctctc

SEQ ID NO: 1588439 - DNA, 25 bp, Homo sapien
cccgacagggtgaccacagagttgg

SEQ ID NO: 1588440 - DNA, 25 bp, Homo sapien
acttgcccttgtccgcgtacggcga

SEQ ID NO: 1588441 - DNA, 25 bp, Homo sapien
gccccgccgcgtaattcaccgacat

SEQ ID NO: 1588442 - DNA, 25 bp, Homo sapien
gacagccccgccgcgtaattcaccg

SEQ ID NO: 1588443 - DNA, 25 bp, Homo sapien
tccgggaggccgcacttgcccttgt

SEQ ID NO: 1588444 - DNA, 25 bp, Homo sapien
tcgactgccccacgggaacaataaa

SEQ ID NO: 1588445 - DNA, 25 bp, Homo sapien
ctcgactgccccacgggaacaataa

SEQ ID NO: 1588446 - DNA, 25 bp, Homo sapien
cctcgactgccccacgggaacaata

SEQ ID NO: 1588447 - DNA, 25 bp, Homo sapien
cgactgccccacgggaacaataaag

SEQ ID NO: 1588448 - DNA, 25 bp, Homo sapien
ggcctcccacggcaaggcgcatgcg

SEQ ID NO: 1588449 - DNA, 25 bp, Homo sapien
cacggcaaggcgcatgcgcctcttg

SEQ ID NO: 1588450 - DNA, 25 bp, Homo sapien
aggcgcatgcgcctcttgctgacgc

SEQ ID NO: 1588451 - DNA, 25 bp, Homo sapien
ctcttgctgacgccgcaggcgacat

SEQ ID NO: 1588452 - DNA, 25 bp, Homo sapien
cagtgcagggctgactgaactgtca

SEQ ID NO: 1588453 - DNA, 25 bp, Homo sapien
cctgggcaagtagcaagggcttccc

SEQ ID NO: 1588454 - DNA, 25 bp, Homo sapien
tgagctgccgggcaacctcagatga

SEQ ID NO: 1588455 - DNA, 25 bp, Homo sapien
cctttacctttaccacagtgcaggg

SEQ ID NO: 1588456 - DNA, 25 bp, Homo sapien
ggagcttgcagtgagccttagatcg

SEQ ID NO: 1588457 - DNA, 25 bp, Homo sapien
caggcgcctgtagtgcccgctactt

SEQ ID NO: 1588458 - DNA, 25 bp, Homo sapien
tacttgggaggctgaggcaggagaa

SEQ ID NO: 1588459 - DNA, 25 bp, Homo sapien
tggcgtgaacctgggaggcggagct

SEQ ID NO: 1588460 - DNA, 25 bp, Homo sapien
ggagccacgcggaatttccaggctg

SEQ ID NO: 1588461 - DNA, 25 bp, Homo sapien
tggagcatggagccacgcggaattt

SEQ ID NO: 1588462 - DNA, 25 bp, Homo sapien
gaggacgaggagctgaacaacccca

SEQ ID NO: 1588463 - DNA, 25 bp, Homo sapien
gagcatggagccacgcggaatttcc

SEQ ID NO: 1588464 - DNA, 25 bp, Homo sapien
gacagagcgtcgtggagcagattaa

SEQ ID NO: 1588465 - DNA, 25 bp, Homo sapien
gattaaaaaccgcactccatagaaa

SEQ ID NO: 1588466 - DNA, 25 bp, Homo sapien
tggaacctgaatctcccatagggag

SEQ ID NO: 1588467 - DNA, 25 bp, Homo sapien
catagaaaccgacagatacaaagat

SEQ ID NO: 1588468 - DNA, 25 bp, Homo sapien
gggaaagtgggagcgagatccatca

SEQ ID NO: 1588469 - DNA, 25 bp, Homo sapien
cgtgtctggcctcgatccccccttt

SEQ ID NO: 1588470 - DNA, 25 bp, Homo sapien
agtgggagcgagatccatcattaca

SEQ ID NO: 1588471 - DNA, 25 bp, Homo sapien
tgtacctatgggtggggtcctgttg

SEQ ID NO: 1588472 - DNA, 25 bp, Homo sapien
ggtcttgacgccaggtgcggctggc

SEQ ID NO: 1588473 - DNA, 25 bp, Homo sapien
ctaggagagaccctgaccatagaga

SEQ ID NO: 1588474 - DNA, 25 bp, Homo sapien
gagagaccctgaccatagagacggg

SEQ ID NO: 1588475 - DNA, 25 bp, Homo sapien
aggagagaccctgaccatagagacg

SEQ ID NO: 1588476 - DNA, 25 bp, Homo sapien
gggccggtataggacgttgctgtag

SEQ ID NO: 1588477 - DNA, 25 bp, Homo sapien
ggtataggacgttgctgtagaatgc

SEQ ID NO: 1588478 - DNA, 25 bp, Homo sapien
gccggtataggacgttgctgtagaa

SEQ ID NO: 1588479 - DNA, 25 bp, Homo sapien
tataggacgttgctgtagaatgcat

SEQ ID NO: 1588480 - DNA, 25 bp, Homo sapien
acgatcgcagccacacccatgcttc

SEQ ID NO: 1588481 - DNA, 25 bp, Homo sapien
cagctgcggcggccccagaaccagg

SEQ ID NO: 1588482 - DNA, 25 bp, Homo sapien
cagaaccaggcaccccacacgatcg

SEQ ID NO: 1588483 - DNA, 25 bp, Homo sapien
aggcaccccacacgatcgcagccac

SEQ ID NO: 1588484 - DNA, 25 bp, Homo sapien
gaaggggtggtgatgcgggtggaag

SEQ ID NO: 1588485 - DNA, 25 bp, Homo sapien
aaggggtggtgatgcgggtggaaga

SEQ ID NO: 1588486 - DNA, 25 bp, Homo sapien
ggggtggtgatgcgggtggaagacg

SEQ ID NO: 1588487 - DNA, 25 bp, Homo sapien
gggaaggggtggtgatgcgggtgga

SEQ ID NO: 1588488 - DNA, 25 bp, Homo sapien
tgggaagcttgcgatccggtttctg

SEQ ID NO: 1588489 - DNA, 25 bp, Homo sapien
ttgcgatccggtttctgttctgtgt

SEQ ID NO: 1588490 - DNA, 25 bp, Homo sapien
gaagcttgcgatccggtttctgttc

SEQ ID NO: 1588491 - DNA, 25 bp, Homo sapien
gcttgcgatccggtttctgttctgt

SEQ ID NO: 1588492 - DNA, 25 bp, Homo sapien
gtttgatatgaagaatttagagttt

SEQ ID NO: 1588493 - DNA, 25 bp, Homo sapien
taagattctaggatcctccccactg

SEQ ID NO: 1588494 - DNA, 25 bp, Homo sapien
caaaagtcttaagattctaggatcc

SEQ ID NO: 1588495 - DNA, 25 bp, Homo sapien
gactcaaaagtcttaagattctagg

SEQ ID NO: 1588496 - DNA, 25 bp, Homo sapien
tggcagaccagggtcgcctgactgc

SEQ ID NO: 1588497 - DNA, 25 bp, Homo sapien
tgcctcacctgcagcaagttgggcc

SEQ ID NO: 1588498 - DNA, 25 bp, Homo sapien
ctgtggttgaggctcacagggtcca

SEQ ID NO: 1588499 - DNA, 25 bp, Homo sapien
gatgtacggttgacacaggatggcc

SEQ ID NO: 1588500 - DNA, 25 bp, Homo sapien
acctttctgactgtgcgcatgtgag

SEQ ID NO: 1588501 - DNA, 25 bp, Homo sapien
ggtagaggcgacctttctgactgtg

SEQ ID NO: 1588502 - DNA, 25 bp, Homo sapien
ggcgacctttctgactgtgcgcatg

SEQ ID NO: 1588503 - DNA, 25 bp, Homo sapien
tagaggcgacctttctgactgtgcg

SEQ ID NO: 1588504 - DNA, 25 bp, Homo sapien
ccagcaccatgcccggggaccccat

SEQ ID NO: 1588505 - DNA, 25 bp, Homo sapien
ccaggaggcccagcaccatgcccgg

SEQ ID NO: 1588506 - DNA, 25 bp, Homo sapien
aggcccagcaccatgcccggggacc

SEQ ID NO: 1588507 - DNA, 25 bp, Homo sapien
caggaggcccagcaccatgcccggg

SEQ ID NO: 1588508 - DNA, 25 bp, Homo sapien
tcctggcccatcacccccctctccc

SEQ ID NO: 1588509 - DNA, 25 bp, Homo sapien
tccccctcccagttgacagacttcc

SEQ ID NO: 1588510 - DNA, 25 bp, Homo sapien
tctccccctcccagttgacagactt

SEQ ID NO: 1588511 - DNA, 25 bp, Homo sapien
cctctccccctcccagttgacagac

SEQ ID NO: 1588512 - DNA, 25 bp, Homo sapien
gaacacgggctttggccgattctgg

SEQ ID NO: 1588513 - DNA, 25 bp, Homo sapien
ggaggacctcgaagcagagttccag

SEQ ID NO: 1588514 - DNA, 25 bp, Homo sapien
gattctggctgttccgacccaggcg

SEQ ID NO: 1588515 - DNA, 25 bp, Homo sapien
gaactggcccattgctgttgatgcc

SEQ ID NO: 1588516 - DNA, 25 bp, Homo sapien
ggccatgccctgggactagcccgct

SEQ ID NO: 1588517 - DNA, 25 bp, Homo sapien
catgccctgggactagcccgctggt

SEQ ID NO: 1588518 - DNA, 25 bp, Homo sapien
gaaaaagaatctggccgctgggcca

SEQ ID NO: 1588519 - DNA, 25 bp, Homo sapien
atgccctgggactagcccgctggtc

SEQ ID NO: 1588520 - DNA, 25 bp, Homo sapien
tagctctgccgtcatgtctgccagc

SEQ ID NO: 1588521 - DNA, 25 bp, Homo sapien
cttcttctgtagctctgccgtcatg

SEQ ID NO: 1588522 - DNA, 25 bp, Homo sapien
ttctgtagctctgccgtcatgtctg

SEQ ID NO: 1588523 - DNA, 25 bp, Homo sapien
tcagtgctccagtgcccgcctcttc

SEQ ID NO: 1588524 - DNA, 25 bp, Homo sapien
caagccaccattaaagactttgggc

SEQ ID NO: 1588525 - DNA, 25 bp, Homo sapien
ttcctgcccaagccaccattaaaga

SEQ ID NO: 1588526 - DNA, 25 bp, Homo sapien
ctgcccaagccaccattaaagactt

SEQ ID NO: 1588527 - DNA, 25 bp, Homo sapien
gcccaagccaccattaaagactttg

SEQ ID NO: 1588528 - DNA, 25 bp, Homo sapien
aagagaagacagatgaggccaggtg

SEQ ID NO: 1588529 - DNA, 25 bp, Homo sapien
aagcttggcaggaggctttggcaac

SEQ ID NO: 1588530 - DNA, 25 bp, Homo sapien
tccaacgggtggctttggaagcttg

SEQ ID NO: 1588531 - DNA, 25 bp, Homo sapien
acttctttggcttcaggatgactgg

SEQ ID NO: 1588532 - DNA, 25 bp, Homo sapien
ggatgactggccaactagaggaagc

SEQ ID NO: 1588533 - DNA, 25 bp, Homo sapien
tctcatagtcaacagctgggccatc

SEQ ID NO: 1588534 - DNA, 25 bp, Homo sapien
gccatctccaatgggggtcacgtag

SEQ ID NO: 1588535 - DNA, 25 bp, Homo sapien
ctccaatgggggtcacgtagttctc

SEQ ID NO: 1588536 - DNA, 25 bp, Homo sapien
cttcctggttcggtagtgggggcag

SEQ ID NO: 1588537 - DNA, 25 bp, Homo sapien
gcaggtgacagcggcttggggccac

SEQ ID NO: 1588538 - DNA, 25 bp, Homo sapien
tagacgcaggtgacagcggcttggg

SEQ ID NO: 1588539 - DNA, 25 bp, Homo sapien
ctagacgcaggtgacagcggcttgg

SEQ ID NO: 1588540 - DNA, 25 bp, Homo sapien
acgcaggtgacagcggcttggggcc

SEQ ID NO: 1588541 - DNA, 25 bp, Homo sapien
gccattctccttatcggcttccacg

SEQ ID NO: 1588542 - DNA, 25 bp, Homo sapien
cattctccttatcggcttccacgta

SEQ ID NO: 1588543 - DNA, 25 bp, Homo sapien
gccacccacacattctcgccattct

SEQ ID NO: 1588544 - DNA, 25 bp, Homo sapien
agggcgccacccacacattctcgcc

SEQ ID NO: 1588545 - DNA, 25 bp, Homo sapien
aaatagttgaccacggcgtccaggg

SEQ ID NO: 1588546 - DNA, 25 bp, Homo sapien
gcgcctttttggtatgcgacacgaa

SEQ ID NO: 1588547 - DNA, 25 bp, Homo sapien
ggaatggcaccagcgcctttttggt

SEQ ID NO: 1588548 - DNA, 25 bp, Homo sapien
tctcgtagtcctcgtctaacaggaa

SEQ ID NO: 1588549 - DNA, 25 bp, Homo sapien
tcccgcttcaccttgtaatgccgga

SEQ ID NO: 1588550 - DNA, 25 bp, Homo sapien
tcaccttgtaatgccggaccacgtg

SEQ ID NO: 1588551 - DNA, 25 bp, Homo sapien
cgcttcaccttgtaatgccggacca

SEQ ID NO: 1588552 - DNA, 25 bp, Homo sapien
gttccacatcgatcacgtacttggg

SEQ ID NO: 1588553 - DNA, 25 bp, Homo sapien
gagcagttgtgcctccagccggctc

SEQ ID NO: 1588554 - DNA, 25 bp, Homo sapien
ccgcactcggggtagcgctccagga

SEQ ID NO: 1588555 - DNA, 25 bp, Homo sapien
tgccgcgtggtgaccgacacgccgt

SEQ ID NO: 1588556 - DNA, 25 bp, Homo sapien
ttgtgcatctgccgcgtggtgaccg

SEQ ID NO: 1588557 - DNA, 25 bp, Homo sapien
caaacacctagaccttaccctggag

SEQ ID NO: 1588558 - DNA, 25 bp, Homo sapien
ccaagtccgctcttctgcacgtaaa

SEQ ID NO: 1588559 - DNA, 25 bp, Homo sapien
gatgggtctcgaactgggtaaaagc

SEQ ID NO: 1588560 - DNA, 25 bp, Homo sapien
gctcttaattctggccccggagatg

SEQ ID NO: 1588561 - DNA, 25 bp, Homo sapien
tctttggccaagacttcagacatca

SEQ ID NO: 1588562 - DNA, 25 bp, Homo sapien
ggtgtctccagtgcacggcgcgcct

SEQ ID NO: 1588563 - DNA, 25 bp, Homo sapien
tcagacatcatgtataggtgcccag

SEQ ID NO: 1588564 - DNA, 25 bp, Homo sapien
aagcagggtcaagtcggtcgggaca

SEQ ID NO: 1588565 - DNA, 25 bp, Homo sapien
cacgcctggccaatgtcagctaatt

SEQ ID NO: 1588566 - DNA, 25 bp, Homo sapien
cgcctggccaatgtcagctaatttt

SEQ ID NO: 1588567 - DNA, 25 bp, Homo sapien
atttttaaaaacttagcactctgtg

SEQ ID NO: 1588568 - DNA, 25 bp, Homo sapien
tggagtttagttctgtcaccaagct

SEQ ID NO: 1588569 - DNA, 25 bp, Homo sapien
cacatttcccgacactccaaggtct

SEQ ID NO: 1588570 - DNA, 25 bp, Homo sapien
tccaccaccgttaagatgaagcctt

SEQ ID NO: 1588571 - DNA, 25 bp, Homo sapien
ctccaccaccgttaagatgaagcct

SEQ ID NO: 1588572 - DNA, 25 bp, Homo sapien
tttccacatttcccgacactccaag

SEQ ID NO: 1588573 - DNA, 25 bp, Homo sapien
ttgaaaaacatagatcaggctggat

SEQ ID NO: 1588574 - DNA, 25 bp, Homo sapien
tgaaaaacatagatcaggctggatg

SEQ ID NO: 1588575 - DNA, 25 bp, Homo sapien
tgatctcctgatcccggagaatcag

SEQ ID NO: 1588576 - DNA, 25 bp, Homo sapien
cttgaacttgatctcctgatcccgg

SEQ ID NO: 1588577 - DNA, 25 bp, Homo sapien
cttgatctcctgatcccggagaatc

SEQ ID NO: 1588578 - DNA, 25 bp, Homo sapien
tgaacttgatctcctgatcccggag

SEQ ID NO: 1588579 - DNA, 25 bp, Homo sapien
gtgccagggtcacgtgagcttcccc

SEQ ID NO: 1588580 - DNA, 25 bp, Homo sapien
gggtcacgtgagcttccccagggaa

SEQ ID NO: 1588581 - DNA, 25 bp, Homo sapien
tcaaatgctcccaagttgagcttct

SEQ ID NO: 1588582 - DNA, 25 bp, Homo sapien
ctcaaatgctcccaagttgagcttc

SEQ ID NO: 1588583 - DNA, 25 bp, Homo sapien
tcccgattgctattgtagaaataaa

SEQ ID NO: 1588584 - DNA, 25 bp, Homo sapien
gaagtcccgattgctattgtagaaa

SEQ ID NO: 1588585 - DNA, 25 bp, Homo sapien
ctggaagtcccgattgctattgtag

SEQ ID NO: 1588586 - DNA, 25 bp, Homo sapien
ttgctattgtagaaataaatggtga

SEQ ID NO: 1588587 - DNA, 25 bp, Homo sapien
ctgtcctggccttcgccccagcagc

SEQ ID NO: 1588588 - DNA, 25 bp, Homo sapien
tgtcctggccttcgccccagcagct

SEQ ID NO: 1588589 - DNA, 25 bp, Homo sapien
cagcagctgaggttcacggagtttt

SEQ ID NO: 1588590 - DNA, 25 bp, Homo sapien
ggcttggggacacggggtggcctca

SEQ ID NO: 1588591 - DNA, 25 bp, Homo sapien
gaaagctctcatagtagtgtgaagg

SEQ ID NO: 1588592 - DNA, 25 bp, Homo sapien
ctagaaagctctcatagtagtgtga

SEQ ID NO: 1588593 - DNA, 25 bp, Homo sapien
cttggggacacggggtggcctcagg

SEQ ID NO: 1588594 - DNA, 25 bp, Homo sapien
caggtccagtgatcctagggaaatc

SEQ ID NO: 1588595 - DNA, 25 bp, Homo sapien
tgatcctagggaaatccccgcctct

SEQ ID NO: 1588596 - DNA, 25 bp, Homo sapien
tttcctgtgtcagcccgtcaactcc

SEQ ID NO: 1588597 - DNA, 25 bp, Homo sapien
tccagtgatcctagggaaatccccg

SEQ ID NO: 1588598 - DNA, 25 bp, Homo sapien
cacggcgtcccggagctttaggaag

SEQ ID NO: 1588599 - DNA, 25 bp, Homo sapien
ttcccgactgcggtctgggcaaagc

SEQ ID NO: 1588600 - DNA, 25 bp, Homo sapien
agaacattcccgagcaccctggaga

SEQ ID NO: 1588601 - DNA, 25 bp, Homo sapien
tcctgctccgcccaagggtatggag

SEQ ID NO: 1588602 - DNA, 25 bp, Homo sapien
catggagcctggtcaagagcaatgt

SEQ ID NO: 1588603 - DNA, 25 bp, Homo sapien
tcttgcctagctaagatgacacagg

SEQ ID NO: 1588604 - DNA, 25 bp, Homo sapien
ttagtggccaactgtgtgcaaggcc

SEQ ID NO: 1588605 - DNA, 25 bp, Homo sapien
caaatgccatcgcagtaatgcctag

SEQ ID NO: 1588606 - DNA, 25 bp, Homo sapien
tcttctttgtaaataagagtctcac

SEQ ID NO: 1588607 - DNA, 25 bp, Homo sapien
acagcctgagccagtcttttgctgt

SEQ ID NO: 1588608 - DNA, 25 bp, Homo sapien
gagccttcccttgtcggagccggct

SEQ ID NO: 1588609 - DNA, 25 bp, Homo sapien
ggacatagctgtcctggcgactgcc

SEQ ID NO: 1588610 - DNA, 25 bp, Homo sapien
ggccgctgggacgtcaacagccaga

SEQ ID NO: 1588611 - DNA, 25 bp, Homo sapien
tggtgaagggtgaagaacactgctt

SEQ ID NO: 1588612 - DNA, 25 bp, Homo sapien
tgaagggtgaagaacactgcttttt

SEQ ID NO: 1588613 - DNA, 25 bp, Homo sapien
catggtgaagggtgaagaacactgc

SEQ ID NO: 1588614 - DNA, 25 bp, Homo sapien
cccatggtgaagggtgaagaacact

SEQ ID NO: 1588615 - DNA, 25 bp, Homo sapien
cacacgatgcgttggtctgcttccc

SEQ ID NO: 1588616 - DNA, 25 bp, Homo sapien
gctgtccagtagagaaaccccaggg

SEQ ID NO: 1588617 - DNA, 25 bp, Homo sapien
tacacagcaggaattcgttcagggc

SEQ ID NO: 1588618 - DNA, 25 bp, Homo sapien
cattggctgctcagtacaaagaggg

SEQ ID NO: 1588619 - DNA, 25 bp, Homo sapien
gcccctcatgtacttctgacgaggg

SEQ ID NO: 1588620 - DNA, 25 bp, Homo sapien
tctctgcgcccctcatgtacttctg

SEQ ID NO: 1588621 - DNA, 25 bp, Homo sapien
tgtgctcatctctgcgcccctcatg

SEQ ID NO: 1588622 - DNA, 25 bp, Homo sapien
tgcgcccctcatgtacttctgacga

SEQ ID NO: 1588623 - DNA, 25 bp, Homo sapien
gaactccccatttcatcgattttgc

SEQ ID NO: 1588624 - DNA, 25 bp, Homo sapien
catcgattttgcattgggcgataga

SEQ ID NO: 1588625 - DNA, 25 bp, Homo sapien
tttcatcgattttgcattgggcgat

SEQ ID NO: 1588626 - DNA, 25 bp, Homo sapien
tccccatttcatcgattttgcattg

SEQ ID NO: 1588627 - DNA, 25 bp, Homo sapien
tctgtcctcaggcagatcccagctg

SEQ ID NO: 1588628 - DNA, 25 bp, Homo sapien
agccgtcaccgttgggagtcagcgc

SEQ ID NO: 1588629 - DNA, 25 bp, Homo sapien
gggaccctcgatcccatcctgttaa

SEQ ID NO: 1588630 - DNA, 25 bp, Homo sapien
tcctgttaaggctgcgggactcgag

SEQ ID NO: 1588631 - DNA, 25 bp, Homo sapien
tctcgggctcgaagtcgtacagcgc

SEQ ID NO: 1588632 - DNA, 25 bp, Homo sapien
tctcatcgatctggttggtcagcgt

SEQ ID NO: 1588633 - DNA, 25 bp, Homo sapien
cctccacgtagctgagcgggaagaa

SEQ ID NO: 1588634 - DNA, 25 bp, Homo sapien
tggtcagcgtgatgacgtcgccctc

SEQ ID NO: 1588635 - DNA, 25 bp, Homo sapien
taggggtccggatgggcttgtcgga

SEQ ID NO: 1588636 - DNA, 25 bp, Homo sapien
gcatgctccggctaggggtccggat

SEQ ID NO: 1588637 - DNA, 25 bp, Homo sapien
ggtccggatgggcttgtcggaagat

SEQ ID NO: 1588638 - DNA, 25 bp, Homo sapien
ccggctaggggtccggatgggcttg

SEQ ID NO: 1588639 - DNA, 25 bp, Homo sapien
tactcccgcttagggcgtgaggaag

SEQ ID NO: 1588640 - DNA, 25 bp, Homo sapien
aggctctccaaggtcaaagggctcc

SEQ ID NO: 1588641 - DNA, 25 bp, Homo sapien
ccgcttagggcgtgaggaagcttcc

SEQ ID NO: 1588642 - DNA, 25 bp, Homo sapien
cttatactcccgcttagggcgtgag

SEQ ID NO: 1588643 - DNA, 25 bp, Homo sapien
cggcctgccggtggtagtccagctg

SEQ ID NO: 1588644 - DNA, 25 bp, Homo sapien
tctgcacggcctgccggtggtagtc

SEQ ID NO: 1588645 - DNA, 25 bp, Homo sapien
agtcaaagtccaggcggcggccctc

SEQ ID NO: 1588646 - DNA, 25 bp, Homo sapien
tagtcaaagtccaggcggcggccct

SEQ ID NO: 1588647 - DNA, 25 bp, Homo sapien
tctccttcaggtctttctcgcacag

SEQ ID NO: 1588648 - DNA, 25 bp, Homo sapien
tccttcaggtctttctcgcacaggt

SEQ ID NO: 1588649 - DNA, 25 bp, Homo sapien
ccttcaggtctttctcgcacaggtt

SEQ ID NO: 1588650 - DNA, 25 bp, Homo sapien
ggatctccttcaggtctttctcgca

SEQ ID NO: 1588651 - DNA, 25 bp, Homo sapien
gggtcaatgaagttctgcttgacct

SEQ ID NO: 1588652 - DNA, 25 bp, Homo sapien
tctgcttgacctcgatgtccaggga

SEQ ID NO: 1588653 - DNA, 25 bp, Homo sapien
aatgaagttctgcttgacctcgatg

SEQ ID NO: 1588654 - DNA, 25 bp, Homo sapien
gcttgacctcgatgtccagggagtc

SEQ ID NO: 1588655 - DNA, 25 bp, Homo sapien
actcgccggcatccagcaatgcgtc

SEQ ID NO: 1588656 - DNA, 25 bp, Homo sapien
ggactcgccggcatccagcaatgcg

SEQ ID NO: 1588657 - DNA, 25 bp, Homo sapien
tcgccggcatccagcaatgcgtcac

SEQ ID NO: 1588658 - DNA, 25 bp, Homo sapien
gactcgccggcatccagcaatgcgt

SEQ ID NO: 1588659 - DNA, 25 bp, Homo sapien
aacgcagtggcgctgtaccagctca

SEQ ID NO: 1588660 - DNA, 25 bp, Homo sapien
cctgggaccactagactgagacact

SEQ ID NO: 1588661 - DNA, 25 bp, Homo sapien
ggtttcaccatatagaccacaccgg

SEQ ID NO: 1588662 - DNA, 25 bp, Homo sapien
ggaagccatcataccgggcctggga

SEQ ID NO: 1588663 - DNA, 25 bp, Homo sapien
cttcccgtggcggatcatgcactcg

SEQ ID NO: 1588664 - DNA, 25 bp, Homo sapien
ggcggatcatgcactcgcccagaag

SEQ ID NO: 1588665 - DNA, 25 bp, Homo sapien
caaagttggactcgccgcccagctc

SEQ ID NO: 1588666 - DNA, 25 bp, Homo sapien
cagctccttcccgtggcggatcatg

SEQ ID NO: 1588667 - DNA, 25 bp, Homo sapien
ccccggatcttggacaccgtgttga

SEQ ID NO: 1588668 - DNA, 25 bp, Homo sapien
cggatcttggacaccgtgttgagca

SEQ ID NO: 1588669 - DNA, 25 bp, Homo sapien
cccggatcttggacaccgtgttgag

SEQ ID NO: 1588670 - DNA, 25 bp, Homo sapien
gccccggatcttggacaccgtgttg

SEQ ID NO: 1588671 - DNA, 25 bp, Homo sapien
gcacttctgtcaccgccttgctggt

SEQ ID NO: 1588672 - DNA, 25 bp, Homo sapien
ggtactcgatggtcctggccagcac

SEQ ID NO: 1588673 - DNA, 25 bp, Homo sapien
agcacttctgtcaccgccttgctgg

SEQ ID NO: 1588674 - DNA, 25 bp, Homo sapien
atggtcctggccagcacttctgtca

SEQ ID NO: 1588675 - DNA, 25 bp, Homo sapien
tctttgaagtcatcatccagcttgg

SEQ ID NO: 1588676 - DNA, 25 bp, Homo sapien
cagcttggtcccctcggcccctccg

SEQ ID NO: 1588677 - DNA, 25 bp, Homo sapien
atcatccagcttggtcccctcggcc

SEQ ID NO: 1588678 - DNA, 25 bp, Homo sapien
ggcccctccgaccttctcactgacc

SEQ ID NO: 1588679 - DNA, 25 bp, Homo sapien
aggcactgccgtgggcaccccaggg

SEQ ID NO: 1588680 - DNA, 25 bp, Homo sapien
cacacgctgcctgcagagcagggtg

SEQ ID NO: 1588681 - DNA, 25 bp, Homo sapien
cagggccacacgctgcctgcagagc

SEQ ID NO: 1588682 - DNA, 25 bp, Homo sapien
caggcactgccgtgggcaccccagg

SEQ ID NO: 1588683 - DNA, 25 bp, Homo sapien
gggctgactctggcacaggtgagaa

SEQ ID NO: 1588684 - DNA, 25 bp, Homo sapien
ggctgactctggcacaggtgagaag

SEQ ID NO: 1588685 - DNA, 25 bp, Homo sapien
agaagcaggaactgtcccttgcggg

SEQ ID NO: 1588686 - DNA, 25 bp, Homo sapien
gtgagaagcaggaactgtcccttgc

SEQ ID NO: 1588687 - DNA, 25 bp, Homo sapien
cagggagggacgtaaggatccctgt

SEQ ID NO: 1588688 - DNA, 25 bp, Homo sapien
ggcaaaggatgtagggatgtatcat

SEQ ID NO: 1588689 - DNA, 25 bp, Homo sapien
cagagtccttatcagacctctgtgc

SEQ ID NO: 1588690 - DNA, 25 bp, Homo sapien
atctgcaacgcccttccctgctggc

SEQ ID NO: 1588691 - DNA, 25 bp, Homo sapien
tcgaagacgcgcacagcctggaggc

SEQ ID NO: 1588692 - DNA, 25 bp, Homo sapien
catgagtcaaaaagtcgaagacgcg

SEQ ID NO: 1588693 - DNA, 25 bp, Homo sapien
tgcccagcgacacaggaagccactg

SEQ ID NO: 1588694 - DNA, 25 bp, Homo sapien
acatggccacctcgagtccatcaca

SEQ ID NO: 1588695 - DNA, 25 bp, Homo sapien
cacacgctgtcccagcacatggtgg

SEQ ID NO: 1588696 - DNA, 25 bp, Homo sapien
tcggctctaatgaccggcagccctg

SEQ ID NO: 1588697 - DNA, 25 bp, Homo sapien
ggtggcagggcggtgacctgggctc

SEQ ID NO: 1588698 - DNA, 25 bp, Homo sapien
cacgctgtcccagcacatggtggca

SEQ ID NO: 1588699 - DNA, 25 bp, Homo sapien
ctcacagcacgggacatatttgtca

SEQ ID NO: 1588700 - DNA, 25 bp, Homo sapien
aataaagcagcaaaggaccaagaga

SEQ ID NO: 1588701 - DNA, 25 bp, Homo sapien
aattctgaggttctactggcggacg

SEQ ID NO: 1588702 - DNA, 25 bp, Homo sapien
tcttcctgccttcgagaacgtgcct

SEQ ID NO: 1588703 - DNA, 25 bp, Homo sapien
aacacgagacggcactgctgcatga

SEQ ID NO: 1588704 - DNA, 25 bp, Homo sapien
gaactcatggacacggagctatcac

SEQ ID NO: 1588705 - DNA, 25 bp, Homo sapien
gagctatcactcctgcctgagagaa

SEQ ID NO: 1588706 - DNA, 25 bp, Homo sapien
gctgcacctgtcctttatgcgtatt

SEQ ID NO: 1588707 - DNA, 25 bp, Homo sapien
ccagagtcagcaagaagcaagatac

SEQ ID NO: 1588708 - DNA, 25 bp, Homo sapien
tggaacgctgacttgaccagagtca

SEQ ID NO: 1588709 - DNA, 25 bp, Homo sapien
agatactctgcagttctgggggttg

SEQ ID NO: 1588710 - DNA, 25 bp, Homo sapien
agacacccacactacgctcagccag

SEQ ID NO: 1588711 - DNA, 25 bp, Homo sapien
aagatgatcttatgccagggtgggt

SEQ ID NO: 1588712 - DNA, 25 bp, Homo sapien
gatgaagatgatcttatgccagggt

SEQ ID NO: 1588713 - DNA, 25 bp, Homo sapien
tgaagatgatcttatgccagggtgg

SEQ ID NO: 1588714 - DNA, 25 bp, Homo sapien
aggatgaagatgatcttatgccagg

SEQ ID NO: 1588715 - DNA, 25 bp, Homo sapien
ttattctggcaagaaggaacttcca

SEQ ID NO: 1588716 - DNA, 25 bp, Homo sapien
tattctggcaagaaggaacttccag

SEQ ID NO: 1588717 - DNA, 25 bp, Homo sapien
ttctggcaagaaggaacttccaggt

SEQ ID NO: 1588718 - DNA, 25 bp, Homo sapien
cttattctggcaagaaggaacttcc

SEQ ID NO: 1588719 - DNA, 25 bp, Homo sapien
tatccagcaaaatttcactctattg

SEQ ID NO: 1588720 - DNA, 25 bp, Homo sapien
cccaaatgggcttgaacaactgggc

SEQ ID NO: 1588721 - DNA, 25 bp, Homo sapien
acgtccagcccgaacagctctttca

SEQ ID NO: 1588722 - DNA, 25 bp, Homo sapien
gggtggggtatccagcaaaatttca

SEQ ID NO: 1588723 - DNA, 25 bp, Homo sapien
ggaaaagtgcttgccaaatccagcc

SEQ ID NO: 1588724 - DNA, 25 bp, Homo sapien
ggaaatgagcagaaacgcaccaagc

SEQ ID NO: 1588725 - DNA, 25 bp, Homo sapien
tggaggaaactgtccgtctatcttc

SEQ ID NO: 1588726 - DNA, 25 bp, Homo sapien
ccagccctgcaaaaggcgagagata

SEQ ID NO: 1588727 - DNA, 25 bp, Homo sapien
aagctctgccccgggcagcgccgaa

SEQ ID NO: 1588728 - DNA, 25 bp, Homo sapien
ctaagctctgccccgggcagcgccg

SEQ ID NO: 1588729 - DNA, 25 bp, Homo sapien
taagctctgccccgggcagcgccga

SEQ ID NO: 1588730 - DNA, 25 bp, Homo sapien
gctctgccccgggcagcgccgaaac

SEQ ID NO: 1588731 - DNA, 25 bp, Homo sapien
aaacacgacgtttccccagatcaga

SEQ ID NO: 1588732 - DNA, 25 bp, Homo sapien
cgaaatcctactggggacgttggca

SEQ ID NO: 1588733 - DNA, 25 bp, Homo sapien
cccagatcagatcagttgcaaaaca

SEQ ID NO: 1588734 - DNA, 25 bp, Homo sapien
catgctccaaattaaacacgacgtt

SEQ ID NO: 1588735 - DNA, 25 bp, Homo sapien
tacatacaagttgtttaggccaggc

SEQ ID NO: 1588736 - DNA, 25 bp, Homo sapien
aaatgtttatggtggatctagctcc

SEQ ID NO: 1588737 - DNA, 25 bp, Homo sapien
ggcttattcatacatatggttgcca

SEQ ID NO: 1588738 - DNA, 25 bp, Homo sapien
gcggaggttggtctcagtaagccaa

SEQ ID NO: 1588739 - DNA, 25 bp, Homo sapien
aactgtgggcagagaaccctgtttg

SEQ ID NO: 1588740 - DNA, 25 bp, Homo sapien
caccttggcccaagcatttgctaag

SEQ ID NO: 1588741 - DNA, 25 bp, Homo sapien
accctgcagtacacggaccaatagg

SEQ ID NO: 1588742 - DNA, 25 bp, Homo sapien
gatcattgctcattcctcggtggac

SEQ ID NO: 1588743 - DNA, 25 bp, Homo sapien
gaactgcttcttcagccccgccacc

SEQ ID NO: 1588744 - DNA, 25 bp, Homo sapien
gcttcttcagccccgccaccgacat

SEQ ID NO: 1588745 - DNA, 25 bp, Homo sapien
actgcttcttcagccccgccaccga

SEQ ID NO: 1588746 - DNA, 25 bp, Homo sapien
ctggctcgccttgtagaactgcttc

SEQ ID NO: 1588747 - DNA, 25 bp, Homo sapien
ctcccgcccggaccgcgccagcgac

SEQ ID NO: 1588748 - DNA, 25 bp, Homo sapien
cgagcctcccgcccggaccgcgcca

SEQ ID NO: 1588749 - DNA, 25 bp, Homo sapien
gcctcccgcccggaccgcgccagcg

SEQ ID NO: 1588750 - DNA, 25 bp, Homo sapien
cgggcgccgccgaccctctgcgcgc

SEQ ID NO: 1588751 - DNA, 25 bp, Homo sapien
ccttgaccatgttggaccttgcagc

SEQ ID NO: 1588752 - DNA, 25 bp, Homo sapien
aagggcacccttgttgacgttattg

SEQ ID NO: 1588753 - DNA, 25 bp, Homo sapien
gacgttattgttgtagccgcgacca

SEQ ID NO: 1588754 - DNA, 25 bp, Homo sapien
ttttgcgtcagttcgtccctccagg

SEQ ID NO: 1588755 - DNA, 25 bp, Homo sapien
gaaaccagtattggccagagcacag

SEQ ID NO: 1588756 - DNA, 25 bp, Homo sapien
taaatggccagcgagaagacactgg

SEQ ID NO: 1588757 - DNA, 25 bp, Homo sapien
ttctgtgcaaagtaaaagccccgat

SEQ ID NO: 1588758 - DNA, 25 bp, Homo sapien
cctccagggaggcaataaatggcca

SEQ ID NO: 1588759 - DNA, 25 bp, Homo sapien
catgtgcatagttcccctggctctg

SEQ ID NO: 1588760 - DNA, 25 bp, Homo sapien
gtccctgtacagtgtgtcatgtgca

SEQ ID NO: 1588761 - DNA, 25 bp, Homo sapien
ggtccagggctacgactgaaactgt

SEQ ID NO: 1588762 - DNA, 25 bp, Homo sapien
tgttcaagccctgtgtgagcagtgc

SEQ ID NO: 1588763 - DNA, 25 bp, Homo sapien
ttgggcttatgatttactaactgca

SEQ ID NO: 1588764 - DNA, 25 bp, Homo sapien
gcttatgatttactaactgcaggtc

SEQ ID NO: 1588765 - DNA, 25 bp, Homo sapien
gatttactaactgcaggtctatgtg

SEQ ID NO: 1588766 - DNA, 25 bp, Homo sapien
ttactaactgcaggtctatgtgcag

SEQ ID NO: 1588767 - DNA, 25 bp, Homo sapien
tcatgacacagttaccaagcagcta

SEQ ID NO: 1588768 - DNA, 25 bp, Homo sapien
cacagagcagccctagtgccaggtg

SEQ ID NO: 1588769 - DNA, 25 bp, Homo sapien
ttagatttgttggtgtccccaggcc

SEQ ID NO: 1588770 - DNA, 25 bp, Homo sapien
gagatgccacgtgtgtctgtccggc

SEQ ID NO: 1588771 - DNA, 25 bp, Homo sapien
gagcttctcgatggctgacaggagc

SEQ ID NO: 1588772 - DNA, 25 bp, Homo sapien
agcacagccatgtcccacgagaagg

SEQ ID NO: 1588773 - DNA, 25 bp, Homo sapien
catgtcccacgagaaggtcaggagg

SEQ ID NO: 1588774 - DNA, 25 bp, Homo sapien
tttcaggatggagtccggctcggcc

SEQ ID NO: 1588775 - DNA, 25 bp, Homo sapien
taggggtaggccgtcactctgagac

SEQ ID NO: 1588776 - DNA, 25 bp, Homo sapien
taggccgtcactctgagaccgagag

SEQ ID NO: 1588777 - DNA, 25 bp, Homo sapien
gggtaggccgtcactctgagaccga

SEQ ID NO: 1588778 - DNA, 25 bp, Homo sapien
gtcactctgagaccgagagtcggcc

SEQ ID NO: 1588779 - DNA, 25 bp, Homo sapien
cagccgctcccgagcgtagaaagtg

SEQ ID NO: 1588780 - DNA, 25 bp, Homo sapien
ggttctcgtcctcggacagcttctg

SEQ ID NO: 1588781 - DNA, 25 bp, Homo sapien
aaaaggcagccagtcgctctgcagg

SEQ ID NO: 1588782 - DNA, 25 bp, Homo sapien
cagcccgcactcgttcaaggccagg

SEQ ID NO: 1588783 - DNA, 25 bp, Homo sapien
gagccgccctccacgggcatcgttg

SEQ ID NO: 1588784 - DNA, 25 bp, Homo sapien
agccgccctccacgggcatcgttgg

SEQ ID NO: 1588785 - DNA, 25 bp, Homo sapien
ctccacgggcatcgttggtgcccac

SEQ ID NO: 1588786 - DNA, 25 bp, Homo sapien
gccctccacgggcatcgttggtgcc

SEQ ID NO: 1588787 - DNA, 25 bp, Homo sapien
cgcagcacgctcagccgctccaccg

SEQ ID NO: 1588788 - DNA, 25 bp, Homo sapien
gcagccatcggggaggcgcacgcgc

SEQ ID NO: 1588789 - DNA, 25 bp, Homo sapien
gcagcgtgtagttgtacttgcgcag

SEQ ID NO: 1588790 - DNA, 25 bp, Homo sapien
gaggcgcacgcgcagcagcgtgtag

SEQ ID NO: 1588791 - DNA, 25 bp, Homo sapien
tggtctcgctcagcacgtagaactc

SEQ ID NO: 1588792 - DNA, 25 bp, Homo sapien
gtctcgctcagcacgtagaactcct

SEQ ID NO: 1588793 - DNA, 25 bp, Homo sapien
aggttgaagaagtccccaggcagtt

SEQ ID NO: 1588794 - DNA, 25 bp, Homo sapien
caggcagttcgaactgcgaggccag

SEQ ID NO: 1588795 - DNA, 25 bp, Homo sapien
ctacagcgtggcaggacatgggtgt

SEQ ID NO: 1588796 - DNA, 25 bp, Homo sapien
tacagcgtggcaggacatgggtgtc

SEQ ID NO: 1588797 - DNA, 25 bp, Homo sapien
gcccctcgtccccattccctactca

SEQ ID NO: 1588798 - DNA, 25 bp, Homo sapien
ctgtgcaatggagagacccccaagc

SEQ ID NO: 1588799 - DNA, 25 bp, Homo sapien
ctgccccgaggcccctcgtccccat

SEQ ID NO: 1588800 - DNA, 25 bp, Homo sapien
gtccccattccctactcagccaggc

SEQ ID NO: 1588801 - DNA, 25 bp, Homo sapien
aacaccttctggaacccaatggcct

SEQ ID NO: 1588802 - DNA, 25 bp, Homo sapien
gatcctgggcgggaagcaacacctt

SEQ ID NO: 1588803 - DNA, 25 bp, Homo sapien
ttctggaacccaatggcctcaaaaa

SEQ ID NO: 1588804 - DNA, 25 bp, Homo sapien
cctgggcgggaagcaacaccttctg

SEQ ID NO: 1588805 - DNA, 25 bp, Homo sapien
ttgatcttccggtacttctcctcct

SEQ ID NO: 1588806 - DNA, 25 bp, Homo sapien
ctgcagcttgatcttccggtacttc

SEQ ID NO: 1588807 - DNA, 25 bp, Homo sapien
gggtgcaggtggatgttgtccaggt

SEQ ID NO: 1588808 - DNA, 25 bp, Homo sapien
tgttctgcagcttgatcttccggta

SEQ ID NO: 1588809 - DNA, 25 bp, Homo sapien
accatctccgggtggaaggcacacc

SEQ ID NO: 1588810 - DNA, 25 bp, Homo sapien
ggcacacctcggacaccccatggag

SEQ ID NO: 1588811 - DNA, 25 bp, Homo sapien
gtgacgcgagggcagcagaccatct

SEQ ID NO: 1588812 - DNA, 25 bp, Homo sapien
gaagaagcggcccagtgacgcgagg

SEQ ID NO: 1588813 - DNA, 25 bp, Homo sapien
gggcacaattaaccacagcggtggg

SEQ ID NO: 1588814 - DNA, 25 bp, Homo sapien
ccctggaagggcacaattaaccaca

SEQ ID NO: 1588815 - DNA, 25 bp, Homo sapien
gggaagccacagtgccggaagagtg

SEQ ID NO: 1588816 - DNA, 25 bp, Homo sapien
tcctgcggggtgctccctcggcgtt

SEQ ID NO: 1588817 - DNA, 25 bp, Homo sapien
ctcctccacatgttccccaaggaag

SEQ ID NO: 1588818 - DNA, 25 bp, Homo sapien
gcctcctccacatgttccccaagga

SEQ ID NO: 1588819 - DNA, 25 bp, Homo sapien
tcctccacatgttccccaaggaagc

SEQ ID NO: 1588820 - DNA, 25 bp, Homo sapien
cctgcctcctccacatgttccccaa

SEQ ID NO: 1588821 - DNA, 25 bp, Homo sapien
ttggcaatggtgtccacacccagct

SEQ ID NO: 1588822 - DNA, 25 bp, Homo sapien
tggcaatggtgtccacacccagctt

SEQ ID NO: 1588823 - DNA, 25 bp, Homo sapien
caatggtgtccacacccagcttcac

SEQ ID NO: 1588824 - DNA, 25 bp, Homo sapien
gcaatggtgtccacacccagcttca

SEQ ID NO: 1588825 - DNA, 25 bp, Homo sapien
tgaacgtgtagatcttcatgatgga

SEQ ID NO: 1588826 - DNA, 25 bp, Homo sapien
ttgttgaacgtgtagatcttcatga

SEQ ID NO: 1588827 - DNA, 25 bp, Homo sapien
ccggtcctggtctttgttgaacgtg

SEQ ID NO: 1588828 - DNA, 25 bp, Homo sapien
ggcggccactgggtcggtggagaag

SEQ ID NO: 1588829 - DNA, 25 bp, Homo sapien
gggcacaaatccacgctcggcacag

SEQ ID NO: 1588830 - DNA, 25 bp, Homo sapien
ggaagcagggctgccacccgcacct

SEQ ID NO: 1588831 - DNA, 25 bp, Homo sapien
tggaaaagattggggcacaaatcca

SEQ ID NO: 1588832 - DNA, 25 bp, Homo sapien
tcggcacagccatcacacacggcca

SEQ ID NO: 1588833 - DNA, 25 bp, Homo sapien
tgatgcaggcgtcccgctggtcctt

SEQ ID NO: 1588834 - DNA, 25 bp, Homo sapien
tgaagtacacgccaggcacagccag

SEQ ID NO: 1588835 - DNA, 25 bp, Homo sapien
ccccagtgagcggacaggtgaagta

SEQ ID NO: 1588836 - DNA, 25 bp, Homo sapien
ctccttgatgcaggcgtcccgctgg

SEQ ID NO: 1588837 - DNA, 25 bp, Homo sapien
cggtggcttcggcttgaagttcctt

SEQ ID NO: 1588838 - DNA, 25 bp, Homo sapien
cccgctgacggtggcttcggcttga

SEQ ID NO: 1588839 - DNA, 25 bp, Homo sapien
gggctcccgctgacggtggcttcgg

SEQ ID NO: 1588840 - DNA, 25 bp, Homo sapien
ctgacggtggcttcggcttgaagtt

SEQ ID NO: 1588841 - DNA, 25 bp, Homo sapien
ctggtttcggatggtgtcctgcgat

SEQ ID NO: 1588842 - DNA, 25 bp, Homo sapien
cctggtttcggatggtgtcctgcga

SEQ ID NO: 1588843 - DNA, 25 bp, Homo sapien
tggtttcggatggtgtcctgcgatg

SEQ ID NO: 1588844 - DNA, 25 bp, Homo sapien
gtttcggatggtgtcctgcgatgtg

SEQ ID NO: 1588845 - DNA, 25 bp, Homo sapien
tggttgggcttctctttgtgggcct

SEQ ID NO: 1588846 - DNA, 25 bp, Homo sapien
ggctggctggttgggcttctctttg

SEQ ID NO: 1588847 - DNA, 25 bp, Homo sapien
tgggggctggctggttgggcttctc

SEQ ID NO: 1588848 - DNA, 25 bp, Homo sapien
ctgtgcctcattggtgggtccctgg

SEQ ID NO: 1588849 - DNA, 25 bp, Homo sapien
tctgtgccgtaggtctattaaaacc

SEQ ID NO: 1588850 - DNA, 25 bp, Homo sapien
tctattaaaaccttctgggaggcca

SEQ ID NO: 1588851 - DNA, 25 bp, Homo sapien
gctgtgtcaatttctgtgccgtagg

SEQ ID NO: 1588852 - DNA, 25 bp, Homo sapien
tgtcaatttctgtgccgtaggtcta

SEQ ID NO: 1588853 - DNA, 25 bp, Homo sapien
cgggtcccgcgctcttgaacttgat

SEQ ID NO: 1588854 - DNA, 25 bp, Homo sapien
cgcgctcttgaacttgatgtcggcc

SEQ ID NO: 1588855 - DNA, 25 bp, Homo sapien
tgaacttgatgtcggccttgaactc

SEQ ID NO: 1588856 - DNA, 25 bp, Homo sapien
ttctgaccgggtcccgcgctcttga

SEQ ID NO: 1588857 - DNA, 25 bp, Homo sapien
cggggccgccggagaccagccaccg

SEQ ID NO: 1588858 - DNA, 25 bp, Homo sapien
gggccgccggagaccagccaccgga

SEQ ID NO: 1588859 - DNA, 25 bp, Homo sapien
gccgccggagaccagccaccggaag

SEQ ID NO: 1588860 - DNA, 25 bp, Homo sapien
cgccggagaccagccaccggaagaa

SEQ ID NO: 1588861 - DNA, 25 bp, Homo sapien
gacttcggctaccccctcctcctct

SEQ ID NO: 1588862 - DNA, 25 bp, Homo sapien
agaggaggagggggtagccgaagtc

SEQ ID NO: 1588863 - DNA, 25 bp, Homo sapien
gacgagtgcacctctcgattggaga

SEQ ID NO: 1588864 - DNA, 25 bp, Homo sapien
tgctcaacctaaactaggcgcggtg

SEQ ID NO: 1588865 - DNA, 25 bp, Homo sapien
tgacaaacggtgataggacagggac

SEQ ID NO: 1588866 - DNA, 25 bp, Homo sapien
cactttggaggctcaagcggaagga

SEQ ID NO: 1588867 - DNA, 25 bp, Homo sapien
cctaggtaggagctgtttaagagga

SEQ ID NO: 1588868 - DNA, 25 bp, Homo sapien
aggtaggagctgtttaagaggatgc

SEQ ID NO: 1588869 - DNA, 25 bp, Homo sapien
taggtaggagctgtttaagaggatg

SEQ ID NO: 1588870 - DNA, 25 bp, Homo sapien
ctaggtaggagctgtttaagaggat

SEQ ID NO: 1588871 - DNA, 25 bp, Homo sapien
gagttgcctccgtcccagtaagaat

SEQ ID NO: 1588872 - DNA, 25 bp, Homo sapien
tctagggctttagggaaccgatcca

SEQ ID NO: 1588873 - DNA, 25 bp, Homo sapien
gacagtggtctccagcgttcaggga

SEQ ID NO: 1588874 - DNA, 25 bp, Homo sapien
gaagcgactaaaaggcactctgggc

SEQ ID NO: 1588875 - DNA, 25 bp, Homo sapien
cacgatgccatagagctcacagagg

SEQ ID NO: 1588876 - DNA, 25 bp, Homo sapien
tgaggccacgatgccatagagctca

SEQ ID NO: 1588877 - DNA, 25 bp, Homo sapien
aagcctggtgcacaccctcgcggct

SEQ ID NO: 1588878 - DNA, 25 bp, Homo sapien
gattgtgctgtaggccctccagcag

SEQ ID NO: 1588879 - DNA, 25 bp, Homo sapien
tggacagaaccccggcatcccgctc

SEQ ID NO: 1588880 - DNA, 25 bp, Homo sapien
ctggacagaaccccggcatcccgct

SEQ ID NO: 1588881 - DNA, 25 bp, Homo sapien
cctggacagaaccccggcatcccgc

SEQ ID NO: 1588882 - DNA, 25 bp, Homo sapien
ctgagccctggtccagacgtggctg

SEQ ID NO: 1588883 - DNA, 25 bp, Homo sapien
gcgtgttcaaatgcccgctggcgga

SEQ ID NO: 1588884 - DNA, 25 bp, Homo sapien
tccctggcttggaactggccgtgct

SEQ ID NO: 1588885 - DNA, 25 bp, Homo sapien
caggtcacctaaacgaacgaagtag

SEQ ID NO: 1588886 - DNA, 25 bp, Homo sapien
gcaggtggctcaccgcgtgttcaaa

SEQ ID NO: 1588887 - DNA, 25 bp, Homo sapien
gggccaggtgctctcacgtgtaatc

SEQ ID NO: 1588888 - DNA, 25 bp, Homo sapien
caggtgctctcacgtgtaatcccaa

SEQ ID NO: 1588889 - DNA, 25 bp, Homo sapien
gacactgcgtctttggttccggtca

SEQ ID NO: 1588890 - DNA, 25 bp, Homo sapien
cacgtcagtcgcaaggcccttggta

SEQ ID NO: 1588891 - DNA, 25 bp, Homo sapien
ttgggtgaacgtcgccacgtcagtc

SEQ ID NO: 1588892 - DNA, 25 bp, Homo sapien
tgtgtggtggccaaaagccccgtgt

SEQ ID NO: 1588893 - DNA, 25 bp, Homo sapien
taagcacagccttggaggcgtccac

SEQ ID NO: 1588894 - DNA, 25 bp, Homo sapien
cacatttacggcaccagtgactcca

SEQ ID NO: 1588895 - DNA, 25 bp, Homo sapien
tttgtacctatgaccacagacttgg

SEQ ID NO: 1588896 - DNA, 25 bp, Homo sapien
gtgtccttggtacccataagcacag

SEQ ID NO: 1588897 - DNA, 25 bp, Homo sapien
aacgatcttggtggtgtccacgcct

SEQ ID NO: 1588898 - DNA, 25 bp, Homo sapien
ccttggtaccagttagaacgatctt

SEQ ID NO: 1588899 - DNA, 25 bp, Homo sapien
tgttcagcccagtttgcatggcccc

SEQ ID NO: 1588900 - DNA, 25 bp, Homo sapien
ttcgtacccatgaccatagacttgg

SEQ ID NO: 1588901 - DNA, 25 bp, Homo sapien
gtggtgtccacaccggcctgtacgg

SEQ ID NO: 1588902 - DNA, 25 bp, Homo sapien
tgaccccagtagtcactgtgtcttt

SEQ ID NO: 1588903 - DNA, 25 bp, Homo sapien
cttggaggtttccacgccagtctgg

SEQ ID NO: 1588904 - DNA, 25 bp, Homo sapien
gtccacaccggtctgaatgcttcct

SEQ ID NO: 1588905 - DNA, 25 bp, Homo sapien
tcttggaacacaccaggtctttggc

SEQ ID NO: 1588906 - DNA, 25 bp, Homo sapien
cccgtaagtgcagaccgagtggtgt

SEQ ID NO: 1588907 - DNA, 25 bp, Homo sapien
gacagccttcgaggtgtccagaccc

SEQ ID NO: 1588908 - DNA, 25 bp, Homo sapien
cacctccttggtgcccgtaagtgca

SEQ ID NO: 1588909 - DNA, 25 bp, Homo sapien
tccatggggccgtctgctctgggtg

SEQ ID NO: 1588910 - DNA, 25 bp, Homo sapien
gctccttctccgtccatggggccgt

SEQ ID NO: 1588911 - DNA, 25 bp, Homo sapien
ccatggggccgtctgctctgggtgg

SEQ ID NO: 1588912 - DNA, 25 bp, Homo sapien
ttctccgtccatggggccgtctgct

SEQ ID NO: 1588913 - DNA, 25 bp, Homo sapien
cggccgggctctcgccgagctatgt

SEQ ID NO: 1588914 - DNA, 25 bp, Homo sapien
tcgccgagctatgtgcgttggccac

SEQ ID NO: 1588915 - DNA, 25 bp, Homo sapien
tggccaccaggttccgggcagagct

SEQ ID NO: 1588916 - DNA, 25 bp, Homo sapien
agcctcggcagcaggcgctcctgtg

SEQ ID NO: 1588917 - DNA, 25 bp, Homo sapien
atcccgtctcccttcgtctggagca

SEQ ID NO: 1588918 - DNA, 25 bp, Homo sapien
gtctcccttcgtctggagcagacat

SEQ ID NO: 1588919 - DNA, 25 bp, Homo sapien
cccgtctcccttcgtctggagcaga

SEQ ID NO: 1588920 - DNA, 25 bp, Homo sapien
cgtctcccttcgtctggagcagaca

SEQ ID NO: 1588921 - DNA, 25 bp, Homo sapien
tggattcgcttcatggagccaggga

SEQ ID NO: 1588922 - DNA, 25 bp, Homo sapien
caaaaaggtggtcagagatccggag

SEQ ID NO: 1588923 - DNA, 25 bp, Homo sapien
tgaatagggttcgaggccctgctcc

SEQ ID NO: 1588924 - DNA, 25 bp, Homo sapien
tgattccaaagaagggtcaaggcca

SEQ ID NO: 1588925 - DNA, 25 bp, Homo sapien
gaaggcggtctgcagggcatccaca

SEQ ID NO: 1588926 - DNA, 25 bp, Homo sapien
ggtctcgggttcctgctcgcagatg

SEQ ID NO: 1588927 - DNA, 25 bp, Homo sapien
agaagtccagctcgggcatcagggt

SEQ ID NO: 1588928 - DNA, 25 bp, Homo sapien
ggcacgtccctgaagcagcgggcat

SEQ ID NO: 1588929 - DNA, 25 bp, Homo sapien
cccacagctcgtgcaccttcccagg

SEQ ID NO: 1588930 - DNA, 25 bp, Homo sapien
gcggtgggggtcaccccacactgca

SEQ ID NO: 1588931 - DNA, 25 bp, Homo sapien
attccccccacagctcgtgcacctt

SEQ ID NO: 1588932 - DNA, 25 bp, Homo sapien
ccccattccccccacagctcgtgca

SEQ ID NO: 1588933 - DNA, 25 bp, Homo sapien
gtcctgggcacggtgtttgctctgc

SEQ ID NO: 1588934 - DNA, 25 bp, Homo sapien
tgctcgtaggccaggtggcggatcc

SEQ ID NO: 1588935 - DNA, 25 bp, Homo sapien
ccccacagagtgctcgtaggccagg

SEQ ID NO: 1588936 - DNA, 25 bp, Homo sapien
tcctgggcacggtgtttgctctgcc

SEQ ID NO: 1588937 - DNA, 25 bp, Homo sapien
ggcgcacaaagtagccctgctgtct

SEQ ID NO: 1588938 - DNA, 25 bp, Homo sapien
gagccgaggcgcacaaagtagccct

SEQ ID NO: 1588939 - DNA, 25 bp, Homo sapien
acagggagccgaggcgcacaaagta

SEQ ID NO: 1588940 - DNA, 25 bp, Homo sapien
atcctccaccgaacccacttcaggg

SEQ ID NO: 1588941 - DNA, 25 bp, Homo sapien
tgctcacccacctctgggtacagaa

SEQ ID NO: 1588942 - DNA, 25 bp, Homo sapien
cacattcacagttccccttgactga

SEQ ID NO: 1588943 - DNA, 25 bp, Homo sapien
gggtacagaagccacaggttcccac

SEQ ID NO: 1588944 - DNA, 25 bp, Homo sapien
cacagttccccttgactgacatcaa

SEQ ID NO: 1588945 - DNA, 25 bp, Homo sapien
gattactttgagactagcttaggca

SEQ ID NO: 1588946 - DNA, 25 bp, Homo sapien
attactttgagactagcttaggcaa

SEQ ID NO: 1588947 - DNA, 25 bp, Homo sapien
gaggattactttgagactagcttag

SEQ ID NO: 1588948 - DNA, 25 bp, Homo sapien
ggattactttgagactagcttaggc

SEQ ID NO: 1588949 - DNA, 25 bp, Homo sapien
cagtttgggacctcaagtctaaaag

SEQ ID NO: 1588950 - DNA, 25 bp, Homo sapien
tcgggacatgtaatgcaaaatctgg

SEQ ID NO: 1588951 - DNA, 25 bp, Homo sapien
aatatttaaaacacgctgcacaggc

SEQ ID NO: 1588952 - DNA, 25 bp, Homo sapien
aaaacaagccaagaatcgggacatg

SEQ ID NO: 1588953 - DNA, 25 bp, Homo sapien
ccgtcatgggcaggaagtgatccac

SEQ ID NO: 1588954 - DNA, 25 bp, Homo sapien
acatccacagcatggctcacggagc

SEQ ID NO: 1588955 - DNA, 25 bp, Homo sapien
catggctcacggagcgcttcagctc

SEQ ID NO: 1588956 - DNA, 25 bp, Homo sapien
cgagctcttcctccgtcatgggcag

SEQ ID NO: 1588957 - DNA, 25 bp, Homo sapien
gtgttgagggagttaactgccctta

SEQ ID NO: 1588958 - DNA, 25 bp, Homo sapien
gttaactgcccttactagcaataca

SEQ ID NO: 1588959 - DNA, 25 bp, Homo sapien
tggacttctacctggctccgtgcct

SEQ ID NO: 1588960 - DNA, 25 bp, Homo sapien
ccactccaggcaccgtgggactcca

SEQ ID NO: 1588961 - DNA, 25 bp, Homo sapien
aggtccccatgtctagtcgtccggg

SEQ ID NO: 1588962 - DNA, 25 bp, Homo sapien
ctcccgcctctaatctggcctgccc

SEQ ID NO: 1588963 - DNA, 25 bp, Homo sapien
actggaggtccccatgtctagtcgt

SEQ ID NO: 1588964 - DNA, 25 bp, Homo sapien
cacgttgcagttattttaacctggc

SEQ ID NO: 1588965 - DNA, 25 bp, Homo sapien
cgtctccgaaggttgctggagaaag

SEQ ID NO: 1588966 - DNA, 25 bp, Homo sapien
cttctcttccagcttgtccaggccc

SEQ ID NO: 1588967 - DNA, 25 bp, Homo sapien
ctggagaaagggaagcttctcttcc

SEQ ID NO: 1588968 - DNA, 25 bp, Homo sapien
gttgctggagaaagggaagcttctc

SEQ ID NO: 1588969 - DNA, 25 bp, Homo sapien
tgcaggcgaggctgttcatagtggc

SEQ ID NO: 1588970 - DNA, 25 bp, Homo sapien
gcaggcgaggctgttcatagtggcc

SEQ ID NO: 1588971 - DNA, 25 bp, Homo sapien
caggcgaggctgttcatagtggcca

SEQ ID NO: 1588972 - DNA, 25 bp, Homo sapien
accaagaagccgcttacaccaaaga

SEQ ID NO: 1588973 - DNA, 25 bp, Homo sapien
caagaagccgcttacaccaaagacg

SEQ ID NO: 1588974 - DNA, 25 bp, Homo sapien
agccgcttacaccaaagacgctggg

SEQ ID NO: 1588975 - DNA, 25 bp, Homo sapien
accaaagacgctggggcagacacct

SEQ ID NO: 1588976 - DNA, 25 bp, Homo sapien
ggctgcaggtgctcgagcagcggct

SEQ ID NO: 1588977 - DNA, 25 bp, Homo sapien
tgcactgtaaacatcgcagaccgcg

SEQ ID NO: 1588978 - DNA, 25 bp, Homo sapien
ctgggcgtggtccagggcacgggtg

SEQ ID NO: 1588979 - DNA, 25 bp, Homo sapien
gtgcctgtccttggctgcactgtaa

SEQ ID NO: 1588980 - DNA, 25 bp, Homo sapien
tagagggcagtgattcaagcacggc

SEQ ID NO: 1588981 - DNA, 25 bp, Homo sapien
catgttgttgaagggtccactgcga

SEQ ID NO: 1588982 - DNA, 25 bp, Homo sapien
ggatacctggcctgaaacgctccta

SEQ ID NO: 1588983 - DNA, 25 bp, Homo sapien
tactattgttgttactgagggcgcc

SEQ ID NO: 1588984 - DNA, 25 bp, Homo sapien
atctggggatctgagccgcctcttc

SEQ ID NO: 1588985 - DNA, 25 bp, Homo sapien
tgagccgcctcttcttcagacatcg

SEQ ID NO: 1588986 - DNA, 25 bp, Homo sapien
agccgcctcttcttcagacatcgtg

SEQ ID NO: 1588987 - DNA, 25 bp, Homo sapien
cccacacactggatctggggatctg

SEQ ID NO: 1588988 - DNA, 25 bp, Homo sapien
gatcctgtcaaattgggctctgtga

SEQ ID NO: 1588989 - DNA, 25 bp, Homo sapien
agacaatgcatgtccagagctctgt

SEQ ID NO: 1588990 - DNA, 25 bp, Homo sapien
cattctgtggagctcagacaatgca

SEQ ID NO: 1588991 - DNA, 25 bp, Homo sapien
ttgagcaactctcaaacctcttggg

SEQ ID NO: 1588992 - DNA, 25 bp, Homo sapien
ttcagacaccagctgtctccgccga

SEQ ID NO: 1588993 - DNA, 25 bp, Homo sapien
cttcagacaccagctgtctccgccg

SEQ ID NO: 1588994 - DNA, 25 bp, Homo sapien
gcgagcggcttcagacaccagctgt

SEQ ID NO: 1588995 - DNA, 25 bp, Homo sapien
cagggtcttccaaatccgattgcag

SEQ ID NO: 1588996 - DNA, 25 bp, Homo sapien
catgacaaatcgtttggagacctgg

SEQ ID NO: 1588997 - DNA, 25 bp, Homo sapien
cactggtaaaatgacacccgggcaa

SEQ ID NO: 1588998 - DNA, 25 bp, Homo sapien
tcgatgatctcaggtcagcatgaca

SEQ ID NO: 1588999 - DNA, 25 bp, Homo sapien
gaagtcacaggccattgatcccaac

SEQ ID NO: 1589000 - DNA, 25 bp, Homo sapien
ttatttccagttaggtcccaggatg

SEQ ID NO: 1589001 - DNA, 25 bp, Homo sapien
cctgggaagttgatttgagaagatg

SEQ ID NO: 1589002 - DNA, 25 bp, Homo sapien
tgagaagatgctaggaacacaatga

SEQ ID NO: 1589003 - DNA, 25 bp, Homo sapien
cagagagccccctgacttggggaag

SEQ ID NO: 1589004 - DNA, 25 bp, Homo sapien
agctaagtgggactcagcatcagac

SEQ ID NO: 1589005 - DNA, 25 bp, Homo sapien
cccaagctaagtgggactcagcatc

SEQ ID NO: 1589006 - DNA, 25 bp, Homo sapien
ctgaccccaagctaagtgggactca

SEQ ID NO: 1589007 - DNA, 25 bp, Homo sapien
ggaaagcccatcgtgtgttctagga

SEQ ID NO: 1589008 - DNA, 25 bp, Homo sapien
attccagacggagggcacaccttgg

SEQ ID NO: 1589009 - DNA, 25 bp, Homo sapien
tctaggaagcatggatggatgaaac

SEQ ID NO: 1589010 - DNA, 25 bp, Homo sapien
cagccccgagtttcacctgtaaaag

SEQ ID NO: 1589011 - DNA, 25 bp, Homo sapien
tggttctccccaaggtcaagggtgc

SEQ ID NO: 1589012 - DNA, 25 bp, Homo sapien
caattcttggagcttagaggcgccc

SEQ ID NO: 1589013 - DNA, 25 bp, Homo sapien
tctttcaataccagggtgtccaggg

SEQ ID NO: 1589014 - DNA, 25 bp, Homo sapien
cctgaagccaacgatagaggtcgct

SEQ ID NO: 1589015 - DNA, 25 bp, Homo sapien
ctgccatggtctgagcggaacacct

SEQ ID NO: 1589016 - DNA, 25 bp, Homo sapien
gccatggtctgagcggaacacctgg

SEQ ID NO: 1589017 - DNA, 25 bp, Homo sapien
agcggaacacctggcagtctttggg

SEQ ID NO: 1589018 - DNA, 25 bp, Homo sapien
aacacctggcagtctttggggctca

SEQ ID NO: 1589019 - DNA, 25 bp, Homo sapien
ctgccaacagcagcagcaggaacag

SEQ ID NO: 1589020 - DNA, 25 bp, Homo sapien
tgccaacagcagcagcaggaacaga

SEQ ID NO: 1589021 - DNA, 25 bp, Homo sapien
caacagcagcagcaggaacagagtt

SEQ ID NO: 1589022 - DNA, 25 bp, Homo sapien
ccaacagcagcagcaggaacagagt

SEQ ID NO: 1589023 - DNA, 25 bp, Homo sapien
ctagaaacatggggttgaatgcccc

SEQ ID NO: 1589024 - DNA, 25 bp, Homo sapien
gaaacatggggttgaatgccccctg

SEQ ID NO: 1589025 - DNA, 25 bp, Homo sapien
agaaacatggggttgaatgccccct

SEQ ID NO: 1589026 - DNA, 25 bp, Homo sapien
tagaaacatggggttgaatgccccc

SEQ ID NO: 1589027 - DNA, 25 bp, Homo sapien
ggcttccctggcccggcagccatca

SEQ ID NO: 1589028 - DNA, 25 bp, Homo sapien
ttccctggcccggcagccatcagac

SEQ ID NO: 1589029 - DNA, 25 bp, Homo sapien
ccctggcccggcagccatcagacat

SEQ ID NO: 1589030 - DNA, 25 bp, Homo sapien
cacaacccttggaagcctggggctt

SEQ ID NO: 1589031 - DNA, 25 bp, Homo sapien
tttggtcgctgtctgctccaagagg

SEQ ID NO: 1589032 - DNA, 25 bp, Homo sapien
tggtcgctgtctgctccaagaggac

SEQ ID NO: 1589033 - DNA, 25 bp, Homo sapien
ggtcgctgtctgctccaagaggaca

SEQ ID NO: 1589034 - DNA, 25 bp, Homo sapien
ctttttggtcgctgtctgctccaag

SEQ ID NO: 1589035 - DNA, 25 bp, Homo sapien
gttgtcctggcctgcggaggtggcc

SEQ ID NO: 1589036 - DNA, 25 bp, Homo sapien
ggttgtcctggcctgcggaggtggc

SEQ ID NO: 1589037 - DNA, 25 bp, Homo sapien
aggtcacaaggggacgggtggcatg

SEQ ID NO: 1589038 - DNA, 25 bp, Homo sapien
ggggacgggtggcatgggactctct

SEQ ID NO: 1589039 - DNA, 25 bp, Homo sapien
aaacagagttttattgatggggagg

SEQ ID NO: 1589040 - DNA, 25 bp, Homo sapien
caccctggggccgtatttacagagg

SEQ ID NO: 1589041 - DNA, 25 bp, Homo sapien
tgctgccgatgtgacttccgggcag

SEQ ID NO: 1589042 - DNA, 25 bp, Homo sapien
ccgatgtgacttccgggcaggccct

SEQ ID NO: 1589043 - DNA, 25 bp, Homo sapien
acagctgctgccgatgtgacttccg

SEQ ID NO: 1589044 - DNA, 25 bp, Homo sapien
tcctgcctgaaaccccggcattgtc

SEQ ID NO: 1589045 - DNA, 25 bp, Homo sapien
tcaaactcctaaccggcacctcgga

SEQ ID NO: 1589046 - DNA, 25 bp, Homo sapien
caaactcctaaccggcacctcggag

SEQ ID NO: 1589047 - DNA, 25 bp, Homo sapien
cacgatcgtcgctcgtggacacaca

SEQ ID NO: 1589048 - DNA, 25 bp, Homo sapien
tggggccaccacgatcgtcgctcgt

SEQ ID NO: 1589049 - DNA, 25 bp, Homo sapien
accctgcacgcgtggcccacttgac

SEQ ID NO: 1589050 - DNA, 25 bp, Homo sapien
gtggacacacaccctgcacgcgtgg

SEQ ID NO: 1589051 - DNA, 25 bp, Homo sapien
ccccgagaacggagttgtgcaattg

SEQ ID NO: 1589052 - DNA, 25 bp, Homo sapien
tgtgcaattggttagaaaaccgcaa

SEQ ID NO: 1589053 - DNA, 25 bp, Homo sapien
tcaaatccatagcaaagtcctcccg

SEQ ID NO: 1589054 - DNA, 25 bp, Homo sapien
tacgcgcataaggtcaacctcaaat

SEQ ID NO: 1589055 - DNA, 25 bp, Homo sapien
gtctctcgctcctggttcccgtggc

SEQ ID NO: 1589056 - DNA, 25 bp, Homo sapien
gacttgagcacccactcggagttgc

SEQ ID NO: 1589057 - DNA, 25 bp, Homo sapien
gagggcgagctggttgtgcttcctt

SEQ ID NO: 1589058 - DNA, 25 bp, Homo sapien
cggcgttctggcaccgtctctcgct

SEQ ID NO: 1589059 - DNA, 25 bp, Homo sapien
gggcagcatagaggcggccgtcggg

SEQ ID NO: 1589060 - DNA, 25 bp, Homo sapien
cgggaagtcgccgtgggaggcgcgg

SEQ ID NO: 1589061 - DNA, 25 bp, Homo sapien
ttggcccagccgttctgcatcaggg

SEQ ID NO: 1589062 - DNA, 25 bp, Homo sapien
cctcgccgctgttgaacgtgtgggt

SEQ ID NO: 1589063 - DNA, 25 bp, Homo sapien
cccggcgccaccgccaccgcctccg

SEQ ID NO: 1589064 - DNA, 25 bp, Homo sapien
cgccaccgccaccgcctccgccccg

SEQ ID NO: 1589065 - DNA, 25 bp, Homo sapien
cggcgccaccgccaccgcctccgcc

SEQ ID NO: 1589066 - DNA, 25 bp, Homo sapien
ggcgccaccgccaccgcctccgccc

SEQ ID NO: 1589067 - DNA, 25 bp, Homo sapien
ccctgcgctcgcccaggcggctgac

SEQ ID NO: 1589068 - DNA, 25 bp, Homo sapien
cccgggaccctgcgccctgcgctcg

SEQ ID NO: 1589069 - DNA, 25 bp, Homo sapien
ctgcgccctgcgctcgcccaggcgg

SEQ ID NO: 1589070 - DNA, 25 bp, Homo sapien
gcgccctgcgctcgcccaggcggct

SEQ ID NO: 1589071 - DNA, 25 bp, Homo sapien
tcgcccgccccgtgcgccaggatgg

SEQ ID NO: 1589072 - DNA, 25 bp, Homo sapien
gatggcctccttgtccttgcgccgg

SEQ ID NO: 1589073 - DNA, 25 bp, Homo sapien
ctccttgtccttgcgccgggccagc

SEQ ID NO: 1589074 - DNA, 25 bp, Homo sapien
gcctccttgtccttgcgccgggcca

SEQ ID NO: 1589075 - DNA, 25 bp, Homo sapien
cgctgaagccggacaccacggctcc

SEQ ID NO: 1589076 - DNA, 25 bp, Homo sapien
gacgacgttaccagcaggttcaccg

SEQ ID NO: 1589077 - DNA, 25 bp, Homo sapien
gccaccgacgacgttaccagcaggt

SEQ ID NO: 1589078 - DNA, 25 bp, Homo sapien
gttaccagcaggttcaccgacacca

SEQ ID NO: 1589079 - DNA, 25 bp, Homo sapien
gcagtcccctaagcctgaggtgctg

SEQ ID NO: 1589080 - DNA, 25 bp, Homo sapien
tggccccggacacgtcctgctcaaa

SEQ ID NO: 1589081 - DNA, 25 bp, Homo sapien
ctgtgcagtcccctaagcctgaggt

SEQ ID NO: 1589082 - DNA, 25 bp, Homo sapien
tgtgcagtcccctaagcctgaggtg

SEQ ID NO: 1589083 - DNA, 25 bp, Homo sapien
cccacccgcagtaggggtcctgact

SEQ ID NO: 1589084 - DNA, 25 bp, Homo sapien
cacccgcagtaggggtcctgactgc

SEQ ID NO: 1589085 - DNA, 25 bp, Homo sapien
ccgcagtaggggtcctgactgccga

SEQ ID NO: 1589086 - DNA, 25 bp, Homo sapien
cccgcagtaggggtcctgactgccg

SEQ ID NO: 1589087 - DNA, 25 bp, Homo sapien
cattgttgcaataacggcgggcagg

SEQ ID NO: 1589088 - DNA, 25 bp, Homo sapien
taagcaaactgacgctccagaaagt

SEQ ID NO: 1589089 - DNA, 25 bp, Homo sapien
ccttggactcggagctactgggtca

SEQ ID NO: 1589090 - DNA, 25 bp, Homo sapien
caggaagcagggtcctccgcattga

SEQ ID NO: 1589091 - DNA, 25 bp, Homo sapien
gcgagccacaggcactcggaccacg

SEQ ID NO: 1589092 - DNA, 25 bp, Homo sapien
ccgagtactgctggcagcgagccac

SEQ ID NO: 1589093 - DNA, 25 bp, Homo sapien
cccgaagctgcgtccagctccaagc

SEQ ID NO: 1589094 - DNA, 25 bp, Homo sapien
ttcatacaccccgagtactgctggc

SEQ ID NO: 1589095 - DNA, 25 bp, Homo sapien
ctgtccggccggtaggtctcaaact

SEQ ID NO: 1589096 - DNA, 25 bp, Homo sapien
ggaagacaacggtctggttgcccca

SEQ ID NO: 1589097 - DNA, 25 bp, Homo sapien
gaggtgctggcattgggccggacga

SEQ ID NO: 1589098 - DNA, 25 bp, Homo sapien
cacagccactcgagtcagctggtgc

SEQ ID NO: 1589099 - DNA, 25 bp, Homo sapien
tgggccggacgaggaacttgaggac

SEQ ID NO: 1589100 - DNA, 25 bp, Homo sapien
atgtcatccggcaaggcgctggagg

SEQ ID NO: 1589101 - DNA, 25 bp, Homo sapien
ccatcagagggtgggtcttgacaaa

SEQ ID NO: 1589102 - DNA, 25 bp, Homo sapien
gagggcaccgcctcgtccatcagag

SEQ ID NO: 1589103 - DNA, 25 bp, Homo sapien
tggaggcattgtactgcatcccggg

SEQ ID NO: 1589104 - DNA, 25 bp, Homo sapien
cggcaccggcgtccagatggactcg

SEQ ID NO: 1589105 - DNA, 25 bp, Homo sapien
tgtcaggtcaaaggcgcagacagcc

SEQ ID NO: 1589106 - DNA, 25 bp, Homo sapien
tcggaagcggccttcaaacacagct

SEQ ID NO: 1589107 - DNA, 25 bp, Homo sapien
ggtcgaggcacctgatcctccggca

SEQ ID NO: 1589108 - DNA, 25 bp, Homo sapien
ttgctgggcgtggaaaaaacggcca

SEQ ID NO: 1589109 - DNA, 25 bp, Homo sapien
tgctgggcgtggaaaaaacggccag

SEQ ID NO: 1589110 - DNA, 25 bp, Homo sapien
gagtctccgggtacagagcagttga

SEQ ID NO: 1589111 - DNA, 25 bp, Homo sapien
tgcagcacgttgaagtagaaatggg

SEQ ID NO: 1589112 - DNA, 25 bp, Homo sapien
gggagcctcccacgtcgttcttgca

SEQ ID NO: 1589113 - DNA, 25 bp, Homo sapien
tgaccacgcccgtgacagcctgcag

SEQ ID NO: 1589114 - DNA, 25 bp, Homo sapien
ggacggacgggggcctgagctctgt

SEQ ID NO: 1589115 - DNA, 25 bp, Homo sapien
gcgtgacagtggacggacgggggcc

SEQ ID NO: 1589116 - DNA, 25 bp, Homo sapien
ctgggcgtgacagtggacggacggg

SEQ ID NO: 1589117 - DNA, 25 bp, Homo sapien
tgggcgtgacagtggacggacgggg

SEQ ID NO: 1589118 - DNA, 25 bp, Homo sapien
tcgcatgatcagagcctctcaactt

SEQ ID NO: 1589119 - DNA, 25 bp, Homo sapien
acttcatgccccactgcaccggcct

SEQ ID NO: 1589120 - DNA, 25 bp, Homo sapien
ttcgcatgatcagagcctctcaact

SEQ ID NO: 1589121 - DNA, 25 bp, Homo sapien
gcctctcaacttcatgccccactgc

SEQ ID NO: 1589122 - DNA, 25 bp, Homo sapien
ttctccaggtagttaaactccatcg

SEQ ID NO: 1589123 - DNA, 25 bp, Homo sapien
actccatcgcaatctcccggaagaa

SEQ ID NO: 1589124 - DNA, 25 bp, Homo sapien
tccaccgcatggacaaagtaaggct

SEQ ID NO: 1589125 - DNA, 25 bp, Homo sapien
agaagtagacatggctgccccactc

SEQ ID NO: 1589126 - DNA, 25 bp, Homo sapien
ctgtccccgaggctgcggtagatga

SEQ ID NO: 1589127 - DNA, 25 bp, Homo sapien
taacagtagctgtgaagagcatccc

SEQ ID NO: 1589128 - DNA, 25 bp, Homo sapien
catcaatggctaggaagtcggtaac

SEQ ID NO: 1589129 - DNA, 25 bp, Homo sapien
aaccacttggagtcatgtttcacgg

SEQ ID NO: 1589130 - DNA, 25 bp, Homo sapien
gggtcgtacgggcagcgggccatac

SEQ ID NO: 1589131 - DNA, 25 bp, Homo sapien
cgggccataccgctgatgttgtctc

SEQ ID NO: 1589132 - DNA, 25 bp, Homo sapien
gctgatgttgtctccgacgggctgc

SEQ ID NO: 1589133 - DNA, 25 bp, Homo sapien
ggcagcgggccataccgctgatgtt

SEQ ID NO: 1589134 - DNA, 25 bp, Homo sapien
ggagcagcacctttacgaagtttcg

SEQ ID NO: 1589135 - DNA, 25 bp, Homo sapien
agcgtggactcgtcccgaaggagca

SEQ ID NO: 1589136 - DNA, 25 bp, Homo sapien
gttggaaccgcacacaaagagcgtg

SEQ ID NO: 1589137 - DNA, 25 bp, Homo sapien
ctgtagttggcgcacaccgggttga

SEQ ID NO: 1589138 - DNA, 25 bp, Homo sapien
tccgacacacgtttatgtcgctggg

SEQ ID NO: 1589139 - DNA, 25 bp, Homo sapien
ttcatccgacacacgtttatgtcgc

SEQ ID NO: 1589140 - DNA, 25 bp, Homo sapien
tgcccttcatccgacacacgtttat

SEQ ID NO: 1589141 - DNA, 25 bp, Homo sapien
tcgctggggttagatctccaggtca

SEQ ID NO: 1589142 - DNA, 25 bp, Homo sapien
ccgcagctccgtggacgtggggggc

SEQ ID NO: 1589143 - DNA, 25 bp, Homo sapien
ctggtaccgcagctccgtggacgtg

SEQ ID NO: 1589144 - DNA, 25 bp, Homo sapien
cctctggtaccgcagctccgtggac

SEQ ID NO: 1589145 - DNA, 25 bp, Homo sapien
taccgcagctccgtggacgtggggg

SEQ ID NO: 1589146 - DNA, 25 bp, Homo sapien
tgtccccaatgaacagcgtcctgtt

SEQ ID NO: 1589147 - DNA, 25 bp, Homo sapien
tgaggtcgtcagcaccttctgcggg

SEQ ID NO: 1589148 - DNA, 25 bp, Homo sapien
ctgttgacccgcaggactcgctgga

SEQ ID NO: 1589149 - DNA, 25 bp, Homo sapien
cacaaacacgggatagtggttcagg

SEQ ID NO: 1589150 - DNA, 25 bp, Homo sapien
gtgggcgccccccagtagcagcagc

SEQ ID NO: 1589151 - DNA, 25 bp, Homo sapien
gcggcggctcctcaggaaagaggcc

SEQ ID NO: 1589152 - DNA, 25 bp, Homo sapien
ggcgagggccaggcgacaggaggag

SEQ ID NO: 1589153 - DNA, 25 bp, Homo sapien
gggccaggcgacaggaggaggtgac

SEQ ID NO: 1589154 - DNA, 25 bp, Homo sapien
gagggccaggcgacaggaggaggtg

SEQ ID NO: 1589155 - DNA, 25 bp, Homo sapien
ggccaggcgacaggaggaggtgacg

SEQ ID NO: 1589156 - DNA, 25 bp, Homo sapien
agtcccgctcgtggccacaagacgg

SEQ ID NO: 1589157 - DNA, 25 bp, Homo sapien
aagacggcgggcgagagcagcagac

SEQ ID NO: 1589158 - DNA, 25 bp, Homo sapien
tcagaacaactttatggccacgtgt

SEQ ID NO: 1589159 - DNA, 25 bp, Homo sapien
caactttatggccacgtgtgcgtga

SEQ ID NO: 1589160 - DNA, 25 bp, Homo sapien
gcgttctaggcagagagacctcggg

SEQ ID NO: 1589161 - DNA, 25 bp, Homo sapien
tctgcgaccatgaatgggtctttca

SEQ ID NO: 1589162 - DNA, 25 bp, Homo sapien
tcatgtcctggaccggggcaaggtc

SEQ ID NO: 1589163 - DNA, 25 bp, Homo sapien
cacccaggcttctgcgaccatgaat

SEQ ID NO: 1589164 - DNA, 25 bp, Homo sapien
cttgaatgccacagtgtcccctgta

SEQ ID NO: 1589165 - DNA, 25 bp, Homo sapien
tgtgcttgttcctatctgcctcctg

SEQ ID NO: 1589166 - DNA, 25 bp, Homo sapien
cggtcccaaccgaagtgtatgtaat

SEQ ID NO: 1589167 - DNA, 25 bp, Homo sapien
gcaaacaactatgaagcacccactg

SEQ ID NO: 1589168 - DNA, 25 bp, Homo sapien
aagacagggataaaagtagattcaa

SEQ ID NO: 1589169 - DNA, 25 bp, Homo sapien
gagatcaaaagaggtagtcagagat

SEQ ID NO: 1589170 - DNA, 25 bp, Homo sapien
ccaatagagatcaaaagaggtagtc

SEQ ID NO: 1589171 - DNA, 25 bp, Homo sapien
agacagggataaaagtagattcaaa

SEQ ID NO: 1589172 - DNA, 25 bp, Homo sapien
caggaacggcccagttccacagcat

SEQ ID NO: 1589173 - DNA, 25 bp, Homo sapien
gcagagttcttgggatcttgtaaat

SEQ ID NO: 1589174 - DNA, 25 bp, Homo sapien
ctttgacgcagggacctctggcaga

SEQ ID NO: 1589175 - DNA, 25 bp, Homo sapien
gaatcacacccgctcgagctttgac

SEQ ID NO: 1589176 - DNA, 25 bp, Homo sapien
gctttctgcccttgtggacaggcct

SEQ ID NO: 1589177 - DNA, 25 bp, Homo sapien
cctggttcccaatttagcaatcgct

SEQ ID NO: 1589178 - DNA, 25 bp, Homo sapien
cctggccaatcattgttttaaagtg

SEQ ID NO: 1589179 - DNA, 25 bp, Homo sapien
taaccagaaagttatgtgaccatca

SEQ ID NO: 1589180 - DNA, 25 bp, Homo sapien
tgactcccgtccggaatcaacttct

SEQ ID NO: 1589181 - DNA, 25 bp, Homo sapien
ctgcctggggtcacggagctcccga

SEQ ID NO: 1589182 - DNA, 25 bp, Homo sapien
actcacagatgggaaagtcaaggcc

SEQ ID NO: 1589183 - DNA, 25 bp, Homo sapien
acggagctcccgagatgggcagaaa

SEQ ID NO: 1589184 - DNA, 25 bp, Homo sapien
tctcactgagatagaactaggtctg

SEQ ID NO: 1589185 - DNA, 25 bp, Homo sapien
cagggttgccctctaagactcacgg

SEQ ID NO: 1589186 - DNA, 25 bp, Homo sapien
agtggttgcagcctctcgtccagag

SEQ ID NO: 1589187 - DNA, 25 bp, Homo sapien
gactcacggccagttgagggcgtta

SEQ ID NO: 1589188 - DNA, 25 bp, Homo sapien
ggaaactgggcaggctacagggcag

SEQ ID NO: 1589189 - DNA, 25 bp, Homo sapien
gaaactgggcaggctacagggcagg

SEQ ID NO: 1589190 - DNA, 25 bp, Homo sapien
gggaaactgggcaggctacagggca

SEQ ID NO: 1589191 - DNA, 25 bp, Homo sapien
atggttctgcagtgagaggcctggc

SEQ ID NO: 1589192 - DNA, 25 bp, Homo sapien
caaagcttggctgtcgtcttggctc

SEQ ID NO: 1589193 - DNA, 25 bp, Homo sapien
caaggtcccatgactgttttgcaga

SEQ ID NO: 1589194 - DNA, 25 bp, Homo sapien
taccacccacgagatgcgggcgatt

SEQ ID NO: 1589195 - DNA, 25 bp, Homo sapien
gagaaggtaggtctagctggctcca

SEQ ID NO: 1589196 - DNA, 25 bp, Homo sapien
ttctcttgaaaactcgccagtccgg

SEQ ID NO: 1589197 - DNA, 25 bp, Homo sapien
cacacacctgtctggatttggagtt

SEQ ID NO: 1589198 - DNA, 25 bp, Homo sapien
taaaaccaagagatcacacacacct

SEQ ID NO: 1589199 - DNA, 25 bp, Homo sapien
ctgcactgacgcctggtgaagctgt

SEQ ID NO: 1589200 - DNA, 25 bp, Homo sapien
gatggaaccctgtgctgttgagaca

SEQ ID NO: 1589201 - DNA, 25 bp, Homo sapien
gattttctcacgaagtcccgatgga

SEQ ID NO: 1589202 - DNA, 25 bp, Homo sapien
tcttcaagaacgtacatggatcctg

SEQ ID NO: 1589203 - DNA, 25 bp, Homo sapien
tccacttatcttaggccgagagaca

SEQ ID NO: 1589204 - DNA, 25 bp, Homo sapien
tatagccagtcagggtggcatgcac

SEQ ID NO: 1589205 - DNA, 25 bp, Homo sapien
ataaaaaattatagccagtcagggt

SEQ ID NO: 1589206 - DNA, 25 bp, Homo sapien
agtggctcatgtcagttaaacctag

SEQ ID NO: 1589207 - DNA, 25 bp, Homo sapien
gctcatgtcagttaaacctagtgct

SEQ ID NO: 1589208 - DNA, 25 bp, Homo sapien
cagcttcaccggagatgagaaggtg

SEQ ID NO: 1589209 - DNA, 25 bp, Homo sapien
tcccctgggtaaacataggaaagca

SEQ ID NO: 1589210 - DNA, 25 bp, Homo sapien
tttgtgccccggatctgcgatcctg

SEQ ID NO: 1589211 - DNA, 25 bp, Homo sapien
caaggcaacgtcagcccaggtagaa

SEQ ID NO: 1589212 - DNA, 25 bp, Homo sapien
tgcgcgatgccttggccacaatcac

SEQ ID NO: 1589213 - DNA, 25 bp, Homo sapien
tcagctttgaatgccccgggcctgt

SEQ ID NO: 1589214 - DNA, 25 bp, Homo sapien
aatcaccagcttggacagctcagct

SEQ ID NO: 1589215 - DNA, 25 bp, Homo sapien
agctcagtgcgcgatgccttggcca

SEQ ID NO: 1589216 - DNA, 25 bp, Homo sapien
tggggctaacatagatggcaggcag

SEQ ID NO: 1589217 - DNA, 25 bp, Homo sapien
gggctaacatagatggcaggcagca

SEQ ID NO: 1589218 - DNA, 25 bp, Homo sapien
gtcggtggggctaacatagatggca

SEQ ID NO: 1589219 - DNA, 25 bp, Homo sapien
taaggtcggtggggctaacatagat

SEQ ID NO: 1589220 - DNA, 25 bp, Homo sapien
cagctcggcgcctccgattcctctt

SEQ ID NO: 1589221 - DNA, 25 bp, Homo sapien
tctgcttagcattggcgccatgcag

SEQ ID NO: 1589222 - DNA, 25 bp, Homo sapien
tcggcgcctccgattcctctttctg

SEQ ID NO: 1589223 - DNA, 25 bp, Homo sapien
ctttctgcttagcattggcgccatg

SEQ ID NO: 1589224 - DNA, 25 bp, Homo sapien
gcccagccctgtttattgtttttga

SEQ ID NO: 1589225 - DNA, 25 bp, Homo sapien
tcctgctcctaagttcaagagattc

SEQ ID NO: 1589226 - DNA, 25 bp, Homo sapien
aacctcctgctcctaagttcaagag

SEQ ID NO: 1589227 - DNA, 25 bp, Homo sapien
agaatcttgctgtcttccaggctag

SEQ ID NO: 1589228 - DNA, 25 bp, Homo sapien
agctctagacagaacccacagtgcc

SEQ ID NO: 1589229 - DNA, 25 bp, Homo sapien
tgtggatgcctggtctacagtctcc

SEQ ID NO: 1589230 - DNA, 25 bp, Homo sapien
tacagtctccaggacccctatggct

SEQ ID NO: 1589231 - DNA, 25 bp, Homo sapien
agctgaagatattgacgaggtggcc

SEQ ID NO: 1589232 - DNA, 25 bp, Homo sapien
cactttccctttcaaatgcggcttt

SEQ ID NO: 1589233 - DNA, 25 bp, Homo sapien
gttttcagagggacatcactttccc

SEQ ID NO: 1589234 - DNA, 25 bp, Homo sapien
tttccctttcaaatgcggctttaga

SEQ ID NO: 1589235 - DNA, 25 bp, Homo sapien
cctcagttttcagagggacatcact

SEQ ID NO: 1589236 - DNA, 25 bp, Homo sapien
gcgccccgcacctctgccttgaact

SEQ ID NO: 1589237 - DNA, 25 bp, Homo sapien
ccccgcacctctgccttgaactgtg

SEQ ID NO: 1589238 - DNA, 25 bp, Homo sapien
tcagcgccccgcacctctgccttga

SEQ ID NO: 1589239 - DNA, 25 bp, Homo sapien
cgcacctctgccttgaactgtgtga

SEQ ID NO: 1589240 - DNA, 25 bp, Homo sapien
acagcaatccaggtactacgacggg

SEQ ID NO: 1589241 - DNA, 25 bp, Homo sapien
ggacaggaccccatgtccattcact

SEQ ID NO: 1589242 - DNA, 25 bp, Homo sapien
tgtgccagaatgttcttccagctca

SEQ ID NO: 1589243 - DNA, 25 bp, Homo sapien
ttccagctcattcatagacacgcct

SEQ ID NO: 1589244 - DNA, 25 bp, Homo sapien
ggtggtcttcgctggtccccagact

SEQ ID NO: 1589245 - DNA, 25 bp, Homo sapien
tggtggtcttcgctggtccccagac

SEQ ID NO: 1589246 - DNA, 25 bp, Homo sapien
ggtccctccttgagaggcgtaagtg

SEQ ID NO: 1589247 - DNA, 25 bp, Homo sapien
tgagaggcgtaagtgaacatacacg

SEQ ID NO: 1589248 - DNA, 25 bp, Homo sapien
ccttgagaggcgtaagtgaacatac

SEQ ID NO: 1589249 - DNA, 25 bp, Homo sapien
gcgtaagtgaacatacacgtatatt

SEQ ID NO: 1589250 - DNA, 25 bp, Homo sapien
tgggcctaacatataaaggacttgg

SEQ ID NO: 1589251 - DNA, 25 bp, Homo sapien
tgggttttgccatgggacctggaca

SEQ ID NO: 1589252 - DNA, 25 bp, Homo sapien
aaggacttggcatcacacctaacta

SEQ ID NO: 1589253 - DNA, 25 bp, Homo sapien
aagtagtcaacaaactggcctggca

SEQ ID NO: 1589254 - DNA, 25 bp, Homo sapien
gtgggctcggacaccgcctccgccg

SEQ ID NO: 1589255 - DNA, 25 bp, Homo sapien
cccacgttatgggagaaggaatgca

SEQ ID NO: 1589256 - DNA, 25 bp, Homo sapien
ttatgggagaaggaatgcacgacgc

SEQ ID NO: 1589257 - DNA, 25 bp, Homo sapien
acgtcaaacgccaccgtcgtgggct

SEQ ID NO: 1589258 - DNA, 25 bp, Homo sapien
gccgacgccgttccaccctccgctg

SEQ ID NO: 1589259 - DNA, 25 bp, Homo sapien
caagctcgcgccgacgccgttccac

SEQ ID NO: 1589260 - DNA, 25 bp, Homo sapien
cgacgccgttccaccctccgctggg

SEQ ID NO: 1589261 - DNA, 25 bp, Homo sapien
agcagcgcggcccacaagctcgcgc

SEQ ID NO: 1589262 - DNA, 25 bp, Homo sapien
ctcagggcaggggcgggtagacggg

SEQ ID NO: 1589263 - DNA, 25 bp, Homo sapien
gtcctcagggcaggggcgggtagac

SEQ ID NO: 1589264 - DNA, 25 bp, Homo sapien
gttggactagggtcctcagggcagg

SEQ ID NO: 1589265 - DNA, 25 bp, Homo sapien
ttggactagggtcctcagggcaggg

SEQ ID NO: 1589266 - DNA, 25 bp, Homo sapien
tgtcaccatgaaggattcgatgcat

SEQ ID NO: 1589267 - DNA, 25 bp, Homo sapien
agcctgtcaccatgaaggattcgat

SEQ ID NO: 1589268 - DNA, 25 bp, Homo sapien
cacggtgttcaactttcagcctgtc

SEQ ID NO: 1589269 - DNA, 25 bp, Homo sapien
gtgttcaactttcagcctgtcacca

SEQ ID NO: 1589270 - DNA, 25 bp, Homo sapien
tataaaagaataagaatcgacaaaa

SEQ ID NO: 1589271 - DNA, 25 bp, Homo sapien
tccataatatgtagaggtggtttgt

SEQ ID NO: 1589272 - DNA, 25 bp, Homo sapien
tccaactggaatcgtttaatgtgtc

SEQ ID NO: 1589273 - DNA, 25 bp, Homo sapien
tgtctacttcttccacgcataatta

SEQ ID NO: 1589274 - DNA, 25 bp, Homo sapien
gcagcggacataaaacccaagagcg

SEQ ID NO: 1589275 - DNA, 25 bp, Homo sapien
tctgtctcggcaaccaagaagcagc

SEQ ID NO: 1589276 - DNA, 25 bp, Homo sapien
gaagttcggtgcgtttcagtgcctg

SEQ ID NO: 1589277 - DNA, 25 bp, Homo sapien
aaatggagcctaccaggtgctgggt

SEQ ID NO: 1589278 - DNA, 25 bp, Homo sapien
agcgaatactgtgtctctcgttggg

SEQ ID NO: 1589279 - DNA, 25 bp, Homo sapien
ctgtagaaagtgcagcaacgtgact

SEQ ID NO: 1589280 - DNA, 25 bp, Homo sapien
gggcagcgaatactgtgtctctcgt

SEQ ID NO: 1589281 - DNA, 25 bp, Homo sapien
cttcatagtgctcgcccgactcggg

SEQ ID NO: 1589282 - DNA, 25 bp, Homo sapien
tgaatgctgtcccagctacctggcc

SEQ ID NO: 1589283 - DNA, 25 bp, Homo sapien
ttcaaggaggccgagttatcatgac

SEQ ID NO: 1589284 - DNA, 25 bp, Homo sapien
ctgaagaccttgtttggccccagca

SEQ ID NO: 1589285 - DNA, 25 bp, Homo sapien
tcaaagacggagaaacgaggtgcaa

SEQ ID NO: 1589286 - DNA, 25 bp, Homo sapien
tgtggaaaaagtgcacgttttcgtc

SEQ ID NO: 1589287 - DNA, 25 bp, Homo sapien
agctggtaaggtttccctgctcgga

SEQ ID NO: 1589288 - DNA, 25 bp, Homo sapien
gaagccgtggaggataagcaagcgg

SEQ ID NO: 1589289 - DNA, 25 bp, Homo sapien
cctgctcggatcagttgggagacga

SEQ ID NO: 1589290 - DNA, 25 bp, Homo sapien
catagccgtgctggttgttctcagg

SEQ ID NO: 1589291 - DNA, 25 bp, Homo sapien
tgttctcagggacgtccatgtagcg

SEQ ID NO: 1589292 - DNA, 25 bp, Homo sapien
gtcgtaggccatccagacggtgacc

SEQ ID NO: 1589293 - DNA, 25 bp, Homo sapien
tcagtgtaccctgtgtcgtaggcca

SEQ ID NO: 1589294 - DNA, 25 bp, Homo sapien
cagccggatgccatcctgcggtcgg

SEQ ID NO: 1589295 - DNA, 25 bp, Homo sapien
cggggttttgtgcagccggatgcca

SEQ ID NO: 1589296 - DNA, 25 bp, Homo sapien
tggcgggcaatgaggaggggggctc

SEQ ID NO: 1589297 - DNA, 25 bp, Homo sapien
tgccatcctgcggtcggcggtggcg

SEQ ID NO: 1589298 - DNA, 25 bp, Homo sapien
gaagccatacttctcggccacgaac

SEQ ID NO: 1589299 - DNA, 25 bp, Homo sapien
gcaactcggctcaggtcgatgaagc

SEQ ID NO: 1589300 - DNA, 25 bp, Homo sapien
cccgtaggaccagccatggatggca

SEQ ID NO: 1589301 - DNA, 25 bp, Homo sapien
gattagccccatgagcgagaggaag

SEQ ID NO: 1589302 - DNA, 25 bp, Homo sapien
gaaccgaagccctcgctgacaggag

SEQ ID NO: 1589303 - DNA, 25 bp, Homo sapien
cccttcgaaccgaagccctcgctga

SEQ ID NO: 1589304 - DNA, 25 bp, Homo sapien
gttgagccgcaagtacttgatgcct

SEQ ID NO: 1589305 - DNA, 25 bp, Homo sapien
gccgtcaatcacaaccacggcgtag

SEQ ID NO: 1589306 - DNA, 25 bp, Homo sapien
tggaacaactactctggcatgatgg

SEQ ID NO: 1589307 - DNA, 25 bp, Homo sapien
ctgctctgggtaagatgtgcgccta

SEQ ID NO: 1589308 - DNA, 25 bp, Homo sapien
gactgttctacagctggcacttgag

SEQ ID NO: 1589309 - DNA, 25 bp, Homo sapien
taatgaaagcacctgtgccccggag

SEQ ID NO: 1589310 - DNA, 25 bp, Homo sapien
ctccatatacaaagaggacggtggg

SEQ ID NO: 1589311 - DNA, 25 bp, Homo sapien
catccgagcgcgtgtggaaatggaa

SEQ ID NO: 1589312 - DNA, 25 bp, Homo sapien
cttgtagatcatgccgtagagccgc

SEQ ID NO: 1589313 - DNA, 25 bp, Homo sapien
ttcttccctggctgcaaggcgtggg

SEQ ID NO: 1589314 - DNA, 25 bp, Homo sapien
ggaggaacataatccggggggcagc

SEQ ID NO: 1589315 - DNA, 25 bp, Homo sapien
ctggaggaacataatccggggggca

SEQ ID NO: 1589316 - DNA, 25 bp, Homo sapien
ccactgtgcccgctgatgaaaatgt

SEQ ID NO: 1589317 - DNA, 25 bp, Homo sapien
tgacgagttcccagatgcttggagg

SEQ ID NO: 1589318 - DNA, 25 bp, Homo sapien
gtccggccctttactgcagctcgaa

SEQ ID NO: 1589319 - DNA, 25 bp, Homo sapien
aaatgtttacttgtcacctgcccac

SEQ ID NO: 1589320 - DNA, 25 bp, Homo sapien
tgtagtggctgacgaacatgtcgaa

SEQ ID NO: 1589321 - DNA, 25 bp, Homo sapien
cagcttgtagacgtgcacgcagggc

SEQ ID NO: 1589322 - DNA, 25 bp, Homo sapien
tgcctccatcatgctagcccagaag

SEQ ID NO: 1589323 - DNA, 25 bp, Homo sapien
ggcggcgtgctcacgctgctgtagt

SEQ ID NO: 1589324 - DNA, 25 bp, Homo sapien
tcgccggccgcctcatagctgacca

SEQ ID NO: 1589325 - DNA, 25 bp, Homo sapien
cgcctcatagctgaccacgtagagg

SEQ ID NO: 1589326 - DNA, 25 bp, Homo sapien
tgaggcgtacgatctcgccggccgc

SEQ ID NO: 1589327 - DNA, 25 bp, Homo sapien
gcgtggtgaggcgtacgatctcgcc

SEQ ID NO: 1589328 - DNA, 25 bp, Homo sapien
ctggaagtacaccagcttggtctcc

SEQ ID NO: 1589329 - DNA, 25 bp, Homo sapien
ccagcttggtctcctcattgaccca

SEQ ID NO: 1589330 - DNA, 25 bp, Homo sapien
tggaagtacaccagcttggtctcct

SEQ ID NO: 1589331 - DNA, 25 bp, Homo sapien
gcttggtctcctcattgacccagat

SEQ ID NO: 1589332 - DNA, 25 bp, Homo sapien
tgggccccatgttcctcggactggg

SEQ ID NO: 1589333 - DNA, 25 bp, Homo sapien
tgtcctcgcccaagtctggctttag

SEQ ID NO: 1589334 - DNA, 25 bp, Homo sapien
gactggggacgcatgctgtcctcgc

SEQ ID NO: 1589335 - DNA, 25 bp, Homo sapien
aggagtgggccccatgttcctcgga

SEQ ID NO: 1589336 - DNA, 25 bp, Homo sapien
ccagtaggccccgaagtggtgtctc

SEQ ID NO: 1589337 - DNA, 25 bp, Homo sapien
agccccagtaggccccgaagtggtg

SEQ ID NO: 1589338 - DNA, 25 bp, Homo sapien
aggccccgaagtggtgtctcctgga

SEQ ID NO: 1589339 - DNA, 25 bp, Homo sapien
agtaggccccgaagtggtgtctcct

SEQ ID NO: 1589340 - DNA, 25 bp, Homo sapien
gatgctaatggtctcgaaacaactg

SEQ ID NO: 1589341 - DNA, 25 bp, Homo sapien
ctgtgctgggatgctaatggtctcg

SEQ ID NO: 1589342 - DNA, 25 bp, Homo sapien
ccaggagcgagcaggctttggctga

SEQ ID NO: 1589343 - DNA, 25 bp, Homo sapien
taatggtctcgaaacaactgctgct

SEQ ID NO: 1589344 - DNA, 25 bp, Homo sapien
tctcttccttaatggggcacttaaa

SEQ ID NO: 1589345 - DNA, 25 bp, Homo sapien
cccattcaccgctggtcagagcaat

SEQ ID NO: 1589346 - DNA, 25 bp, Homo sapien
aaaacctcccattcaccgctggtca

SEQ ID NO: 1589347 - DNA, 25 bp, Homo sapien
ttggagccgtgcctcgccaaaacct

SEQ ID NO: 1589348 - DNA, 25 bp, Homo sapien
tagacagtaaatcttggccttgcac

SEQ ID NO: 1589349 - DNA, 25 bp, Homo sapien
tgctgcagcacaaaagcgaccacag

SEQ ID NO: 1589350 - DNA, 25 bp, Homo sapien
cacaacagtttctgctgggactacc

SEQ ID NO: 1589351 - DNA, 25 bp, Homo sapien
cagacagtctctgtaaacaagtggc

SEQ ID NO: 1589352 - DNA, 25 bp, Homo sapien
tccttctcccgcagggtgtgctggc

SEQ ID NO: 1589353 - DNA, 25 bp, Homo sapien
tattgaaccacacgtgactaacgcg

SEQ ID NO: 1589354 - DNA, 25 bp, Homo sapien
gccaacagttgggtgctctaagccc

SEQ ID NO: 1589355 - DNA, 25 bp, Homo sapien
aacccctggttgtgctaagggcctg

SEQ ID NO: 1589356 - DNA, 25 bp, Homo sapien
gagaaagcagagctcgtcctctccc

SEQ ID NO: 1589357 - DNA, 25 bp, Homo sapien
caaatggcagaagccggtcttgcat

SEQ ID NO: 1589358 - DNA, 25 bp, Homo sapien
tgaagggctcactccaatcgtagcc

SEQ ID NO: 1589359 - DNA, 25 bp, Homo sapien
tcttgcattcattggcgcggagaaa

SEQ ID NO: 1589360 - DNA, 25 bp, Homo sapien
gaagatgcgtcagaaggtgtgggtg

SEQ ID NO: 1589361 - DNA, 25 bp, Homo sapien
agaagatgcgtcagaaggtgtgggt

SEQ ID NO: 1589362 - DNA, 25 bp, Homo sapien
accacatacggctggacattcctgg

SEQ ID NO: 1589363 - DNA, 25 bp, Homo sapien
cagacgttggtgacctcctcgtaca

SEQ ID NO: 1589364 - DNA, 25 bp, Homo sapien
tcattctctgtgctcgggatgaaca

SEQ ID NO: 1589365 - DNA, 25 bp, Homo sapien
ctctggcagaggctagccgctgctc

SEQ ID NO: 1589366 - DNA, 25 bp, Homo sapien
tggcgatgtactccaccttcgggaa

SEQ ID NO: 1589367 - DNA, 25 bp, Homo sapien
cctggcgatgtactccaccttcggg

SEQ ID NO: 1589368 - DNA, 25 bp, Homo sapien
caccttcgggaacagcgagctgaag

SEQ ID NO: 1589369 - DNA, 25 bp, Homo sapien
tgtactccaccttcgggaacagcga

SEQ ID NO: 1589370 - DNA, 25 bp, Homo sapien
cagtttcaaggcaatcttgggattc

SEQ ID NO: 1589371 - DNA, 25 bp, Homo sapien
gtcagtctggaactcagccagtttc

SEQ ID NO: 1589372 - DNA, 25 bp, Homo sapien
ctggaactcagccagtttcaaggca

SEQ ID NO: 1589373 - DNA, 25 bp, Homo sapien
tcagccagtttcaaggcaatcttgg

SEQ ID NO: 1589374 - DNA, 25 bp, Homo sapien
acaggattcgcagcgtcttgaggcc

SEQ ID NO: 1589375 - DNA, 25 bp, Homo sapien
cgatacgagtccgtcttcctttctt

SEQ ID NO: 1589376 - DNA, 25 bp, Homo sapien
ttcctttcttctagcgcaggagagg

SEQ ID NO: 1589377 - DNA, 25 bp, Homo sapien
tgaatgacctccacctcggactcat

SEQ ID NO: 1589378 - DNA, 25 bp, Homo sapien
tcttcctgtatgacgaaggtggcca

SEQ ID NO: 1589379 - DNA, 25 bp, Homo sapien
gaagcggtcgaactcttcctgtatg

SEQ ID NO: 1589380 - DNA, 25 bp, Homo sapien
cagtacccagtgaagcggtcgaact

SEQ ID NO: 1589381 - DNA, 25 bp, Homo sapien
aaggtggccacacccgcagacttgg

SEQ ID NO: 1589382 - DNA, 25 bp, Homo sapien
gggtcttgatttccagcggtttcat

SEQ ID NO: 1589383 - DNA, 25 bp, Homo sapien
tcctcgcctgtctcgatgttggcca

SEQ ID NO: 1589384 - DNA, 25 bp, Homo sapien
gcagggtcggcagggcagattttgg

SEQ ID NO: 1589385 - DNA, 25 bp, Homo sapien
atgttggccacccacaggtcgctgt

SEQ ID NO: 1589386 - DNA, 25 bp, Homo sapien
aggaagaggccactctcgctgtgga

SEQ ID NO: 1589387 - DNA, 25 bp, Homo sapien
tcccgagagtagaccccatggtggg

SEQ ID NO: 1589388 - DNA, 25 bp, Homo sapien
cactctcgctgtggaagtcgtagga

SEQ ID NO: 1589389 - DNA, 25 bp, Homo sapien
gaagccgttcttgccgccgtcgcgg

SEQ ID NO: 1589390 - DNA, 25 bp, Homo sapien
agtagaggagggagttctctcggct

SEQ ID NO: 1589391 - DNA, 25 bp, Homo sapien
aggagggagttctctcggctgccat

SEQ ID NO: 1589392 - DNA, 25 bp, Homo sapien
gagttctctcggctgccatatggca

SEQ ID NO: 1589393 - DNA, 25 bp, Homo sapien
agggagttctctcggctgccatatg

SEQ ID NO: 1589394 - DNA, 25 bp, Homo sapien
tcatgagtccttatcagagggaggc

SEQ ID NO: 1589395 - DNA, 25 bp, Homo sapien
tgccccgagaacctggatgtgacgt

SEQ ID NO: 1589396 - DNA, 25 bp, Homo sapien
gattacccaagtgacccagatggca

SEQ ID NO: 1589397 - DNA, 25 bp, Homo sapien
tctgctggtggctagaacctgaggc

SEQ ID NO: 1589398 - DNA, 25 bp, Homo sapien
gctgctggaggacatgcagcctaac

SEQ ID NO: 1589399 - DNA, 25 bp, Homo sapien
agcccagtcccgtgaggcactgcag

SEQ ID NO: 1589400 - DNA, 25 bp, Homo sapien
ccctgaaggcactcgtggtgcagag

SEQ ID NO: 1589401 - DNA, 25 bp, Homo sapien
tggaggacatgcagcctaacccgtg

SEQ ID NO: 1589402 - DNA, 25 bp, Homo sapien
ttccctgtagtcagagctgtctgtg

SEQ ID NO: 1589403 - DNA, 25 bp, Homo sapien
ggctgagcctcgaaggacagcatgc

SEQ ID NO: 1589404 - DNA, 25 bp, Homo sapien
gggcccagccatccgagcagatctt

SEQ ID NO: 1589405 - DNA, 25 bp, Homo sapien
ccgcggcagcccttccctgtagtca

SEQ ID NO: 1589406 - DNA, 25 bp, Homo sapien
catctgtggcggctgcgtcgcctcg

SEQ ID NO: 1589407 - DNA, 25 bp, Homo sapien
aatgaggcccgagtacttgcggctg

SEQ ID NO: 1589408 - DNA, 25 bp, Homo sapien
tgccgtggatgatgctccggagccc

SEQ ID NO: 1589409 - DNA, 25 bp, Homo sapien
ttctgcacaaactggaagtcgtggg

SEQ ID NO: 1589410 - DNA, 25 bp, Homo sapien
tcagccccctcggaattcagcgaga

SEQ ID NO: 1589411 - DNA, 25 bp, Homo sapien
cctctcagccccctcggaattcagc

SEQ ID NO: 1589412 - DNA, 25 bp, Homo sapien
agccccctcggaattcagcgagaag

SEQ ID NO: 1589413 - DNA, 25 bp, Homo sapien
tctcagccccctcggaattcagcga

SEQ ID NO: 1589414 - DNA, 25 bp, Homo sapien
cctgccaagcccttgaatctcatcc

SEQ ID NO: 1589415 - DNA, 25 bp, Homo sapien
cctcaaggctgctgtcgacccctgc

SEQ ID NO: 1589416 - DNA, 25 bp, Homo sapien
caagcccttgaatctcatccttctt

SEQ ID NO: 1589417 - DNA, 25 bp, Homo sapien
aaggctgctgtcgacccctgccaag

SEQ ID NO: 1589418 - DNA, 25 bp, Homo sapien
gaagcaaaaattcgatcccggagat

SEQ ID NO: 1589419 - DNA, 25 bp, Homo sapien
tgaaacatcgcgagaaacttccagg

SEQ ID NO: 1589420 - DNA, 25 bp, Homo sapien
tgatcaccactgatagcccaagaag

SEQ ID NO: 1589421 - DNA, 25 bp, Homo sapien
gcacagcccggattgcagagaggct

SEQ ID NO: 1589422 - DNA, 25 bp, Homo sapien
cctcggtctagcaaatagctgggat

SEQ ID NO: 1589423 - DNA, 25 bp, Homo sapien
gatcctgccacctcggtctagcaaa

SEQ ID NO: 1589424 - DNA, 25 bp, Homo sapien
agctccaaagctctgtgatgtctgt

SEQ ID NO: 1589425 - DNA, 25 bp, Homo sapien
gctccaaagctctgtgatgtctgtg

SEQ ID NO: 1589426 - DNA, 25 bp, Homo sapien
cttgtccaggcgcagtttcttaacc

SEQ ID NO: 1589427 - DNA, 25 bp, Homo sapien
gcagtttcttaaccttccgcattaa

SEQ ID NO: 1589428 - DNA, 25 bp, Homo sapien
ttaaccttccgcattaaccgctcag

SEQ ID NO: 1589429 - DNA, 25 bp, Homo sapien
ctccaacttccggtgttctccttgt

SEQ ID NO: 1589430 - DNA, 25 bp, Homo sapien
attccagctgcaggcgtgggacaca

SEQ ID NO: 1589431 - DNA, 25 bp, Homo sapien
tccattccagctgcaggcgtgggac

SEQ ID NO: 1589432 - DNA, 25 bp, Homo sapien
cttctaaagggtccagagagcctcc

SEQ ID NO: 1589433 - DNA, 25 bp, Homo sapien
tctaaagggtccagagagcctccat

SEQ ID NO: 1589434 - DNA, 25 bp, Homo sapien
tataggataaacatgtcatgaatgt

SEQ ID NO: 1589435 - DNA, 25 bp, Homo sapien
ggagctgcagactgtcaggcccgat

SEQ ID NO: 1589436 - DNA, 25 bp, Homo sapien
taggataaacatgtcatgaatgtgg

SEQ ID NO: 1589437 - DNA, 25 bp, Homo sapien
tgcagactgtcaggcccgattctac

SEQ ID NO: 1589438 - DNA, 25 bp, Homo sapien
tttgacccggaagttgagcgaccca

SEQ ID NO: 1589439 - DNA, 25 bp, Homo sapien
cggctcaggcacctttgacccggaa

SEQ ID NO: 1589440 - DNA, 25 bp, Homo sapien
atgcccgggactgcgaccccggaag

SEQ ID NO: 1589441 - DNA, 25 bp, Homo sapien
ggcgcctcacggtcgcggctccatg

SEQ ID NO: 1589442 - DNA, 25 bp, Homo sapien
tgaggcgaatgtgataaccgctaca

SEQ ID NO: 1589443 - DNA, 25 bp, Homo sapien
gcgtgtgaggcgaatgtgataaccg

SEQ ID NO: 1589444 - DNA, 25 bp, Homo sapien
cgtgtgaggcgaatgtgataaccgc

SEQ ID NO: 1589445 - DNA, 25 bp, Homo sapien
tgtgaggcgaatgtgataaccgcta

SEQ ID NO: 1589446 - DNA, 25 bp, Homo sapien
tgtccgatcacaccaggaaacttca

SEQ ID NO: 1589447 - DNA, 25 bp, Homo sapien
tcacaccaggaaacttcagcaaggg

SEQ ID NO: 1589448 - DNA, 25 bp, Homo sapien
ctggtgtccgatcacaccaggaaac

SEQ ID NO: 1589449 - DNA, 25 bp, Homo sapien
cgatcacaccaggaaacttcagcaa

SEQ ID NO: 1589450 - DNA, 25 bp, Homo sapien
gccattagggtaatgagccgcatgc

SEQ ID NO: 1589451 - DNA, 25 bp, Homo sapien
gggggcattgctcgctctgcagggc

SEQ ID NO: 1589452 - DNA, 25 bp, Homo sapien
ttagggtaatgagccgcatgctgtc

SEQ ID NO: 1589453 - DNA, 25 bp, Homo sapien
catccagcgccctggtaaccaagga

SEQ ID NO: 1589454 - DNA, 25 bp, Homo sapien
gggatggggagcagggagggagggc

SEQ ID NO: 1589455 - DNA, 25 bp, Homo sapien
atagggatggggagcagggagggag

SEQ ID NO: 1589456 - DNA, 25 bp, Homo sapien
ggatggggagcagggagggagggcc

SEQ ID NO: 1589457 - DNA, 25 bp, Homo sapien
ctggcagggatagggatggggagca

SEQ ID NO: 1589458 - DNA, 25 bp, Homo sapien
ccgcccctccccaacacagcgctgg

SEQ ID NO: 1589459 - DNA, 25 bp, Homo sapien
ttgtctttttctctatttatcccca

SEQ ID NO: 1589460 - DNA, 25 bp, Homo sapien
tattttgtctttttctctatttatc

SEQ ID NO: 1589461 - DNA, 25 bp, Homo sapien
accttaggatgaaagcgcctcccct

SEQ ID NO: 1589462 - DNA, 25 bp, Homo sapien
cccgagatgtgcctgcgcatggcat

SEQ ID NO: 1589463 - DNA, 25 bp, Homo sapien
gggacgtttgcaagcctggatcctg

SEQ ID NO: 1589464 - DNA, 25 bp, Homo sapien
tagttgcatccttggaaaccggcgg

SEQ ID NO: 1589465 - DNA, 25 bp, Homo sapien
tggacgagctgacgggcgaggtggc

SEQ ID NO: 1589466 - DNA, 25 bp, Homo sapien
tggcggaggcccgaaccatggacct

SEQ ID NO: 1589467 - DNA, 25 bp, Homo sapien
ggagccgggaggaactggacgagct

SEQ ID NO: 1589468 - DNA, 25 bp, Homo sapien
acaacgccgcccgtgatggcaagct

SEQ ID NO: 1589469 - DNA, 25 bp, Homo sapien
catcccggaagatctggaggcgttc

SEQ ID NO: 1589470 - DNA, 25 bp, Homo sapien
gcttgtggaagtacgccctggacat

SEQ ID NO: 1589471 - DNA, 25 bp, Homo sapien
ccttaaacactggaggcgggccatg

SEQ ID NO: 1589472 - DNA, 25 bp, Homo sapien
tcatgatctcgtgctacaagggcca

SEQ ID NO: 1589473 - DNA, 25 bp, Homo sapien
aaacaccgtatccagttctgaccac

SEQ ID NO: 1589474 - DNA, 25 bp, Homo sapien
gagagattggaattgtaaacaccgt

SEQ ID NO: 1589475 - DNA, 25 bp, Homo sapien
cgcgcccgttttgtcctaaatgaag

SEQ ID NO: 1589476 - DNA, 25 bp, Homo sapien
agggctcccggacaatgtcctgaaa

SEQ ID NO: 1589477 - DNA, 25 bp, Homo sapien
tcattctgcctcctgcgtcttgtcc

SEQ ID NO: 1589478 - DNA, 25 bp, Homo sapien
gcctcctgcgtcttgtcctcgggcg

SEQ ID NO: 1589479 - DNA, 25 bp, Homo sapien
tcctcgggcgcctgggaccctctct

SEQ ID NO: 1589480 - DNA, 25 bp, Homo sapien
ctgcgtcttgtcctcgggcgcctgg

SEQ ID NO: 1589481 - DNA, 25 bp, Homo sapien
tggttgttcagccccagctgtacca

SEQ ID NO: 1589482 - DNA, 25 bp, Homo sapien
ggttgttcagccccagctgtaccat

SEQ ID NO: 1589483 - DNA, 25 bp, Homo sapien
tgtggttgttcagccccagctgtac

SEQ ID NO: 1589484 - DNA, 25 bp, Homo sapien
catgtggttgttcagccccagctgt

SEQ ID NO: 1589485 - DNA, 25 bp, Homo sapien
gcgtggtggataatgaggggttgca

SEQ ID NO: 1589486 - DNA, 25 bp, Homo sapien
ctgtgcgtggtggataatgaggggt

SEQ ID NO: 1589487 - DNA, 25 bp, Homo sapien
ggtggataatgaggggttgcagccc

SEQ ID NO: 1589488 - DNA, 25 bp, Homo sapien
tggtggataatgaggggttgcagcc

SEQ ID NO: 1589489 - DNA, 25 bp, Homo sapien
cgggtgaggccgtagggaaggctgg

SEQ ID NO: 1589490 - DNA, 25 bp, Homo sapien
gtgcgggtgaggccgtagggaaggc

SEQ ID NO: 1589491 - DNA, 25 bp, Homo sapien
ctgagggggtgcgggtgaggccgta

SEQ ID NO: 1589492 - DNA, 25 bp, Homo sapien
tgagggggtgcgggtgaggccgtag

SEQ ID NO: 1589493 - DNA, 25 bp, Homo sapien
ggggtgccagcctgccatgcgtgca

SEQ ID NO: 1589494 - DNA, 25 bp, Homo sapien
ggtgggggggtgccagcctgccatg

SEQ ID NO: 1589495 - DNA, 25 bp, Homo sapien
tgactgtggaaaggctgctggctgt

SEQ ID NO: 1589496 - DNA, 25 bp, Homo sapien
tgcgggaagggcagtgactgtggaa

SEQ ID NO: 1589497 - DNA, 25 bp, Homo sapien
caaatgacatgtggctcccaaaagc

SEQ ID NO: 1589498 - DNA, 25 bp, Homo sapien
aagggcattcgagccccatagggcg

SEQ ID NO: 1589499 - DNA, 25 bp, Homo sapien
cccaaatgacatgtggctcccaaaa

SEQ ID NO: 1589500 - DNA, 25 bp, Homo sapien
ccaaagggcattcgagccccatagg

SEQ ID NO: 1589501 - DNA, 25 bp, Homo sapien
agtgccgccgcctgcatccgctcac

SEQ ID NO: 1589502 - DNA, 25 bp, Homo sapien
tagctctggaggtaggctgagtagg

SEQ ID NO: 1589503 - DNA, 25 bp, Homo sapien
ggctgcgttcagtgccgccgcctgc

SEQ ID NO: 1589504 - DNA, 25 bp, Homo sapien
tgtgcctggtaggacaagtagctct

SEQ ID NO: 1589505 - DNA, 25 bp, Homo sapien
gacccctgtcgcgtgaggttgctca

SEQ ID NO: 1589506 - DNA, 25 bp, Homo sapien
tcccgaacccgcagggcgatgtgtt

SEQ ID NO: 1589507 - DNA, 25 bp, Homo sapien
gaaagctgagtggtctatggcgtcc

SEQ ID NO: 1589508 - DNA, 25 bp, Homo sapien
cggcacctggaaatcctcgcagaag

SEQ ID NO: 1589509 - DNA, 25 bp, Homo sapien
ctgttccgatgatgattccagggag

SEQ ID NO: 1589510 - DNA, 25 bp, Homo sapien
gggtcaggtgagctgaacaaggagt

SEQ ID NO: 1589511 - DNA, 25 bp, Homo sapien
tcaggtgagctgaacaaggagtaga

SEQ ID NO: 1589512 - DNA, 25 bp, Homo sapien
ttccgatgatgattccagggaggaa

SEQ ID NO: 1589513 - DNA, 25 bp, Homo sapien
ccctcggtgcactccactgggtagt

SEQ ID NO: 1589514 - DNA, 25 bp, Homo sapien
caggctcgggcaccaagctggcctg

SEQ ID NO: 1589515 - DNA, 25 bp, Homo sapien
ttctacagaaagttggagtggcgtc

SEQ ID NO: 1589516 - DNA, 25 bp, Homo sapien
tttgaccggctccagaataggcaag

SEQ ID NO: 1589517 - DNA, 25 bp, Homo sapien
ccagagggcaaagccgaggatggtg

SEQ ID NO: 1589518 - DNA, 25 bp, Homo sapien
tggatcgcagggagcacccttggct

SEQ ID NO: 1589519 - DNA, 25 bp, Homo sapien
ttggactggagcgtccggatgctcc

SEQ ID NO: 1589520 - DNA, 25 bp, Homo sapien
tccagtccgaaacaccgtcaatggg

SEQ ID NO: 1589521 - DNA, 25 bp, Homo sapien
tctgggtcctcggtgctgtccacgc

SEQ ID NO: 1589522 - DNA, 25 bp, Homo sapien
cagcaggtggtacaagcgggccaca

SEQ ID NO: 1589523 - DNA, 25 bp, Homo sapien
cttcaatgcctctagagagatcctg

SEQ ID NO: 1589524 - DNA, 25 bp, Homo sapien
cggacggcttcctggtaggccacgt

SEQ ID NO: 1589525 - DNA, 25 bp, Homo sapien
gggcgtggggtcttcagtttgtgct

SEQ ID NO: 1589526 - DNA, 25 bp, Homo sapien
tagaatgtcgaaggcgctaggaagt

SEQ ID NO: 1589527 - DNA, 25 bp, Homo sapien
tcagatacaagagcttgtcctggcc

SEQ ID NO: 1589528 - DNA, 25 bp, Homo sapien
cctagaatgtcgaaggcgctaggaa

SEQ ID NO: 1589529 - DNA, 25 bp, Homo sapien
gtgggtgcagcctccggcagcagaa

SEQ ID NO: 1589530 - DNA, 25 bp, Homo sapien
aggtgggtgcagcctccggcagcag

SEQ ID NO: 1589531 - DNA, 25 bp, Homo sapien
ggtgggtgcagcctccggcagcaga

SEQ ID NO: 1589532 - DNA, 25 bp, Homo sapien
tgggtgcagcctccggcagcagaag

SEQ ID NO: 1589533 - DNA, 25 bp, Homo sapien
cctacccattcactgttccaggttc

SEQ ID NO: 1589534 - DNA, 25 bp, Homo sapien
ggtgaaggcatgttccacactgccc

SEQ ID NO: 1589535 - DNA, 25 bp, Homo sapien
tgcacgcccagtgtcccctacccat

SEQ ID NO: 1589536 - DNA, 25 bp, Homo sapien
tgccccccgccttctgcacgcccag

SEQ ID NO: 1589537 - DNA, 25 bp, Homo sapien
gtggctcatgctgctaatcctagca

SEQ ID NO: 1589538 - DNA, 25 bp, Homo sapien
tgggaagctaaggcggacagatcat

SEQ ID NO: 1589539 - DNA, 25 bp, Homo sapien
aagaagtaatttttagccaggtgtg

SEQ ID NO: 1589540 - DNA, 25 bp, Homo sapien
gaagctaaggcggacagatcatttg

SEQ ID NO: 1589541 - DNA, 25 bp, Homo sapien
gccacctgcccagccccatttcatt

SEQ ID NO: 1589542 - DNA, 25 bp, Homo sapien
caggtgatctgcctgggattacagg

SEQ ID NO: 1589543 - DNA, 25 bp, Homo sapien
cctgcccagccccatttcatttttt

SEQ ID NO: 1589544 - DNA, 25 bp, Homo sapien
cacctgcccagccccatttcatttt

SEQ ID NO: 1589545 - DNA, 25 bp, Homo sapien
tgccggctgcgccactgggtcctgg

SEQ ID NO: 1589546 - DNA, 25 bp, Homo sapien
agttgcccgcggaccgtagcgcgct

SEQ ID NO: 1589547 - DNA, 25 bp, Homo sapien
gtagcgcgctgagggcgctggctcc

SEQ ID NO: 1589548 - DNA, 25 bp, Homo sapien
gggcttctgcggagttgcccgcgga

SEQ ID NO: 1589549 - DNA, 25 bp, Homo sapien
gggccagaagaactcgcatctgctc

SEQ ID NO: 1589550 - DNA, 25 bp, Homo sapien
agaagaactcgcatctgctctcggg

SEQ ID NO: 1589551 - DNA, 25 bp, Homo sapien
gccagaagaactcgcatctgctctc

SEQ ID NO: 1589552 - DNA, 25 bp, Homo sapien
gcagggggccagaagaactcgcatc

SEQ ID NO: 1589553 - DNA, 25 bp, Homo sapien
ggcaatactgaataccagagcattt

SEQ ID NO: 1589554 - DNA, 25 bp, Homo sapien
ttaaggcaatactgaataccagagc

SEQ ID NO: 1589555 - DNA, 25 bp, Homo sapien
gagcatttcaacaaggcttaccaca

SEQ ID NO: 1589556 - DNA, 25 bp, Homo sapien
tattaaggcaatactgaataccaga

SEQ ID NO: 1589557 - DNA, 25 bp, Homo sapien
gtacctttctactctacaatgaggc

SEQ ID NO: 1589558 - DNA, 25 bp, Homo sapien
tcagaagctcagtgtaccaccccat

SEQ ID NO: 1589559 - DNA, 25 bp, Homo sapien
cccagtacctttctactctacaatg

SEQ ID NO: 1589560 - DNA, 25 bp, Homo sapien
tctactctacaatgaggctcagaag

SEQ ID NO: 1589561 - DNA, 25 bp, Homo sapien
tctactgactgatagggtgaggctc

SEQ ID NO: 1589562 - DNA, 25 bp, Homo sapien
tcctaactgggataacagacacctg

SEQ ID NO: 1589563 - DNA, 25 bp, Homo sapien
agtttgaaatgagccccgggttgag

SEQ ID NO: 1589564 - DNA, 25 bp, Homo sapien
tgatgcccgttttgagagccttagc

SEQ ID NO: 1589565 - DNA, 25 bp, Homo sapien
ctttctcagtgattccaggggcaaa

SEQ ID NO: 1589566 - DNA, 25 bp, Homo sapien
caggtgtgttctgggccacatattc

SEQ ID NO: 1589567 - DNA, 25 bp, Homo sapien
gctggcgacacgctcacggctctgg

SEQ ID NO: 1589568 - DNA, 25 bp, Homo sapien
gcaatgtcccggaacatggtgagcg

SEQ ID NO: 1589569 - DNA, 25 bp, Homo sapien
ggccctgaatgctggaccccaggga

SEQ ID NO: 1589570 - DNA, 25 bp, Homo sapien
tctggcttgggcggctccttctcgg

SEQ ID NO: 1589571 - DNA, 25 bp, Homo sapien
ttccaccagcttctgatcaacgcct

SEQ ID NO: 1589572 - DNA, 25 bp, Homo sapien
gatcaacgccttgcttgacagtttc

SEQ ID NO: 1589573 - DNA, 25 bp, Homo sapien
cagcttctgatcaacgccttgcttg

SEQ ID NO: 1589574 - DNA, 25 bp, Homo sapien
gcagatggaaccagcaaaggcttaa

SEQ ID NO: 1589575 - DNA, 25 bp, Homo sapien
ccagcaaaggcttaaaaagtgcttg

SEQ ID NO: 1589576 - DNA, 25 bp, Homo sapien
tgcaaagaagggctgcacatcccct

SEQ ID NO: 1589577 - DNA, 25 bp, Homo sapien
ttctcctgcgcttgcaagggagcct

SEQ ID NO: 1589578 - DNA, 25 bp, Homo sapien
caggcttaggacctgcgacagctgc

SEQ ID NO: 1589579 - DNA, 25 bp, Homo sapien
tgcttggtggctcgaagcttgccca

SEQ ID NO: 1589580 - DNA, 25 bp, Homo sapien
tgcccagcgagtgctcataggcgtg

SEQ ID NO: 1589581 - DNA, 25 bp, Homo sapien
gtgctcataggcgtgctgccgcagc

SEQ ID NO: 1589582 - DNA, 25 bp, Homo sapien
agtagctctgttcctgccgctgctg

SEQ ID NO: 1589583 - DNA, 25 bp, Homo sapien
cgctgctgctgcacggacgcgacgt

SEQ ID NO: 1589584 - DNA, 25 bp, Homo sapien
ggacgcgacgtcaaagccatccagg

SEQ ID NO: 1589585 - DNA, 25 bp, Homo sapien
gaagtagctctgttcctgccgctgc

SEQ ID NO: 1589586 - DNA, 25 bp, Homo sapien
ccagttcggcatccgtaaggggcag

SEQ ID NO: 1589587 - DNA, 25 bp, Homo sapien
agcaccgtgtcgaccccactcaaca

SEQ ID NO: 1589588 - DNA, 25 bp, Homo sapien
gttgtccgcccactcctccgacttc

SEQ ID NO: 1589589 - DNA, 25 bp, Homo sapien
caggtggttgtccgcccactcctcc

SEQ ID NO: 1589590 - DNA, 25 bp, Homo sapien
tccgacaattgggtggccaccgtgt

SEQ ID NO: 1589591 - DNA, 25 bp, Homo sapien
gccaccgtgtccttggcgctagaca

SEQ ID NO: 1589592 - DNA, 25 bp, Homo sapien
aagcgggagcccatgaccgattgga

SEQ ID NO: 1589593 - DNA, 25 bp, Homo sapien
tttgtcttgtccacgccgctctgca

SEQ ID NO: 1589594 - DNA, 25 bp, Homo sapien
tagacgacacaagctccttggtgtc

SEQ ID NO: 1589595 - DNA, 25 bp, Homo sapien
ttagacgacacaagctccttggtgt

SEQ ID NO: 1589596 - DNA, 25 bp, Homo sapien
atggaatcctttgactacgccccac

SEQ ID NO: 1589597 - DNA, 25 bp, Homo sapien
aatcctttgactacgccccacccag

SEQ ID NO: 1589598 - DNA, 25 bp, Homo sapien
ttgcatggaatcctttgactacgcc

SEQ ID NO: 1589599 - DNA, 25 bp, Homo sapien
gcatggaatcctttgactacgcccc

SEQ ID NO: 1589600 - DNA, 25 bp, Homo sapien
ccccctgtgggcgtattcgctggct

SEQ ID NO: 1589601 - DNA, 25 bp, Homo sapien
ccctgtgggcgtattcgctggctga

SEQ ID NO: 1589602 - DNA, 25 bp, Homo sapien
ttgtccagccccctgtgggcgtatt

SEQ ID NO: 1589603 - DNA, 25 bp, Homo sapien
tccaacttgtccagccccctgtggg

SEQ ID NO: 1589604 - DNA, 25 bp, Homo sapien
agaggatcggctgagccccgctgac

SEQ ID NO: 1589605 - DNA, 25 bp, Homo sapien
tgatgtgcgggtagctctccttggt

SEQ ID NO: 1589606 - DNA, 25 bp, Homo sapien
tgctgcgtcgcagacagtcttgatg

SEQ ID NO: 1589607 - DNA, 25 bp, Homo sapien
cataggctgcggacaccatgtcgca

SEQ ID NO: 1589608 - DNA, 25 bp, Homo sapien
ctgctgtaccggttcttccactgtc

SEQ ID NO: 1589609 - DNA, 25 bp, Homo sapien
cagcctctgccccgtcggcagacat

SEQ ID NO: 1589610 - DNA, 25 bp, Homo sapien
gctgtaccggttcttccactgtcac

SEQ ID NO: 1589611 - DNA, 25 bp, Homo sapien
catcagcctctgccccgtcggcaga

SEQ ID NO: 1589612 - DNA, 25 bp, Homo sapien
taatatgaggctaaagggtcgggca

SEQ ID NO: 1589613 - DNA, 25 bp, Homo sapien
tgcaccgcagagctatgaagtccag

SEQ ID NO: 1589614 - DNA, 25 bp, Homo sapien
tgtaagcgggatgaagccacaactc

SEQ ID NO: 1589615 - DNA, 25 bp, Homo sapien
taaaaagtgagataacatgcctgcc

SEQ ID NO: 1589616 - DNA, 25 bp, Homo sapien
gtgtataagtgtttcacaagagcct

SEQ ID NO: 1589617 - DNA, 25 bp, Homo sapien
catcccctaggagtcttgcttgcca

SEQ ID NO: 1589618 - DNA, 25 bp, Homo sapien
agtttgggaaggcagcatcccctag

SEQ ID NO: 1589619 - DNA, 25 bp, Homo sapien
ccagcccagaatgggttctaatccc

SEQ ID NO: 1589620 - DNA, 25 bp, Homo sapien
gtcaaccggacgtcccaggaacagc

SEQ ID NO: 1589621 - DNA, 25 bp, Homo sapien
acagctgccgcgacttcaaaaccag

SEQ ID NO: 1589622 - DNA, 25 bp, Homo sapien
cagcttggaaaccgtccgggccgag

SEQ ID NO: 1589623 - DNA, 25 bp, Homo sapien
gtggcttttactgcgtggtaggttg

SEQ ID NO: 1589624 - DNA, 25 bp, Homo sapien
cggcccaacccagctatatgagtga

SEQ ID NO: 1589625 - DNA, 25 bp, Homo sapien
gcccaacccagctatatgagtgact

SEQ ID NO: 1589626 - DNA, 25 bp, Homo sapien
ggcccaacccagctatatgagtgac

SEQ ID NO: 1589627 - DNA, 25 bp, Homo sapien
ccggcccaacccagctatatgagtg

SEQ ID NO: 1589628 - DNA, 25 bp, Homo sapien
ggcgggtactgctgccgctgcacag

SEQ ID NO: 1589629 - DNA, 25 bp, Homo sapien
ctggcgtggcgggtactgctgccgc

SEQ ID NO: 1589630 - DNA, 25 bp, Homo sapien
ctgtgtggtccactgagtctagggc

SEQ ID NO: 1589631 - DNA, 25 bp, Homo sapien
aagtgtccccaacgcccgcctgtgt

SEQ ID NO: 1589632 - DNA, 25 bp, Homo sapien
ggtactgttgacattcaggataaac

SEQ ID NO: 1589633 - DNA, 25 bp, Homo sapien
gatcccctgcagttgtgacagccaa

SEQ ID NO: 1589634 - DNA, 25 bp, Homo sapien
acactgcagggtgctgaacagcgtc

SEQ ID NO: 1589635 - DNA, 25 bp, Homo sapien
aatacaaccagacattagcagaggg

SEQ ID NO: 1589636 - DNA, 25 bp, Homo sapien
aaagttcgggcacttaattctggtg

SEQ ID NO: 1589637 - DNA, 25 bp, Homo sapien
gcacttaattctggtgatctgggtt

SEQ ID NO: 1589638 - DNA, 25 bp, Homo sapien
gggcacttaattctggtgatctggg

SEQ ID NO: 1589639 - DNA, 25 bp, Homo sapien
gttcgggcacttaattctggtgatc

SEQ ID NO: 1589640 - DNA, 25 bp, Homo sapien
ggtgatgatgatgggaactttggcc

SEQ ID NO: 1589641 - DNA, 25 bp, Homo sapien
gggtaacactccgtcctctgacagc

SEQ ID NO: 1589642 - DNA, 25 bp, Homo sapien
cagagtccactgaggcgctggtgat

SEQ ID NO: 1589643 - DNA, 25 bp, Homo sapien
gtaacactccgtcctctgacagctg

SEQ ID NO: 1589644 - DNA, 25 bp, Homo sapien
gagtgtgcatgatctcaccgtcctg

SEQ ID NO: 1589645 - DNA, 25 bp, Homo sapien
ggatttgcaaacagacagtgccctg

SEQ ID NO: 1589646 - DNA, 25 bp, Homo sapien
cgtgaagccctcgtactgtatgtgg

SEQ ID NO: 1589647 - DNA, 25 bp, Homo sapien
gcatacagggcgaatacgaccgtct

SEQ ID NO: 1589648 - DNA, 25 bp, Homo sapien
gacatggccaaatttgctggtgaag

SEQ ID NO: 1589649 - DNA, 25 bp, Homo sapien
gaagttccttgaaccaataagtaca

SEQ ID NO: 1589650 - DNA, 25 bp, Homo sapien
tggctgcctgcacttaaccaattat

SEQ ID NO: 1589651 - DNA, 25 bp, Homo sapien
cccatgcaggaagcttgtacgaaat

SEQ ID NO: 1589652 - DNA, 25 bp, Homo sapien
cgggcagcactaattcgatcgactt

SEQ ID NO: 1589653 - DNA, 25 bp, Homo sapien
ggtagattctatcctcgggcagcac

SEQ ID NO: 1589654 - DNA, 25 bp, Homo sapien
tgtcttatgcacgtagtctgccttg

SEQ ID NO: 1589655 - DNA, 25 bp, Homo sapien
tgctataatcacaggatgccccggc

SEQ ID NO: 1589656 - DNA, 25 bp, Homo sapien
tgcacccagctggacaattaacctg

SEQ ID NO: 1589657 - DNA, 25 bp, Homo sapien
tgatgttctcaagatgactagggaa

SEQ ID NO: 1589658 - DNA, 25 bp, Homo sapien
gccctcaatcaacagtcctcagtat

SEQ ID NO: 1589659 - DNA, 25 bp, Homo sapien
ctcccgggcgcaagagatcagcctt

SEQ ID NO: 1589660 - DNA, 25 bp, Homo sapien
gggtctgccatgtacaccgctgggt

SEQ ID NO: 1589661 - DNA, 25 bp, Homo sapien
ggctgcgaacggacttggacttaag

SEQ ID NO: 1589662 - DNA, 25 bp, Homo sapien
gacctactggtcaatgcgtgcgagt

SEQ ID NO: 1589663 - DNA, 25 bp, Homo sapien
gctgctggtcactctcctataagga

SEQ ID NO: 1589664 - DNA, 25 bp, Homo sapien
cagtagcttttaagagatcgtgtcg

SEQ ID NO: 1589665 - DNA, 25 bp, Homo sapien
ttagaggtgtgaaccgtcgcatccg

SEQ ID NO: 1589666 - DNA, 25 bp, Homo sapien
tgtcgttgcttctgtcttccgggcc

SEQ ID NO: 1589667 - DNA, 25 bp, Homo sapien
cacagagaggtgatgcagtttcccc

SEQ ID NO: 1589668 - DNA, 25 bp, Homo sapien
gagaccccagagcagaacagagttg

SEQ ID NO: 1589669 - DNA, 25 bp, Homo sapien
atgtcacttgatgggcgggaacgca

SEQ ID NO: 1589670 - DNA, 25 bp, Homo sapien
gcagtgaagttgatggagaccccag

SEQ ID NO: 1589671 - DNA, 25 bp, Homo sapien
taacctgctcgggtacaacgctctg

SEQ ID NO: 1589672 - DNA, 25 bp, Homo sapien
tccagaatgatccaatagccccagg

SEQ ID NO: 1589673 - DNA, 25 bp, Homo sapien
gctggaacagatccttacgtgcgct

SEQ ID NO: 1589674 - DNA, 25 bp, Homo sapien
caggccagaattgtccccgtggaca

SEQ ID NO: 1589675 - DNA, 25 bp, Homo sapien
tacgtgcgctgtgttggagtctttc

SEQ ID NO: 1589676 - DNA, 25 bp, Homo sapien
tccagtgacatggttccccgtggtg

SEQ ID NO: 1589677 - DNA, 25 bp, Homo sapien
tttaagaaggcgacaggatcagtcc

SEQ ID NO: 1589678 - DNA, 25 bp, Homo sapien
gaaaagaggaaacatctcgggccta

SEQ ID NO: 1589679 - DNA, 25 bp, Homo sapien
gagatccgcgtgaaaagtcctctgc

SEQ ID NO: 1589680 - DNA, 25 bp, Homo sapien
ttgggaaccgtttgagccttataga

SEQ ID NO: 1589681 - DNA, 25 bp, Homo sapien
ttcctgacaccggatgggtgcttgg

SEQ ID NO: 1589682 - DNA, 25 bp, Homo sapien
ttttaaatcacatacctgcagacaa

SEQ ID NO: 1589683 - DNA, 25 bp, Homo sapien
tgtaccaagaaagatataacgttag

SEQ ID NO: 1589684 - DNA, 25 bp, Homo sapien
gggtggcacttccacaccctcccag

SEQ ID NO: 1589685 - DNA, 25 bp, Homo sapien
gacctgtcgatttgccagacagttt

SEQ ID NO: 1589686 - DNA, 25 bp, Homo sapien
catagccctgacctgtcgatttgcc

SEQ ID NO: 1589687 - DNA, 25 bp, Homo sapien
cctcccagtcaccatagccctgacc

SEQ ID NO: 1589688 - DNA, 25 bp, Homo sapien
gaactctcctcgttaccagtgctag

SEQ ID NO: 1589689 - DNA, 25 bp, Homo sapien
ttaccagtgctagcgcccccgatgg

SEQ ID NO: 1589690 - DNA, 25 bp, Homo sapien
gcatcggaactctcctcgttaccag

SEQ ID NO: 1589691 - DNA, 25 bp, Homo sapien
tgttttgtaagcatcggaactctcc

SEQ ID NO: 1589692 - DNA, 25 bp, Homo sapien
gctccctgggatgcgagcaggaccc

SEQ ID NO: 1589693 - DNA, 25 bp, Homo sapien
ctgctggaccgggacagtcgcgtca

SEQ ID NO: 1589694 - DNA, 25 bp, Homo sapien
tgctggaccgggacagtcgcgtcat

SEQ ID NO: 1589695 - DNA, 25 bp, Homo sapien
ctgggatgcgagcaggacccaagcc

SEQ ID NO: 1589696 - DNA, 25 bp, Homo sapien
agtaaacgggtgatggccactgagc

SEQ ID NO: 1589697 - DNA, 25 bp, Homo sapien
tgggacccgagctcgtgaactctgt

SEQ ID NO: 1589698 - DNA, 25 bp, Homo sapien
tgatagcagaagacagcgaaggcac

SEQ ID NO: 1589699 - DNA, 25 bp, Homo sapien
tcctggctgccaagtagaagcttca

SEQ ID NO: 1589700 - DNA, 25 bp, Homo sapien
tctcctgcctgggtgcgtctggctc

SEQ ID NO: 1589701 - DNA, 25 bp, Homo sapien
cacagtctccgtatatgcctgagtc

SEQ ID NO: 1589702 - DNA, 25 bp, Homo sapien
gttaatacgtggcagtaaagctggc

SEQ ID NO: 1589703 - DNA, 25 bp, Homo sapien
atgctcagccgcttgagaatgctgt

SEQ ID NO: 1589704 - DNA, 25 bp, Homo sapien
ttaaggatgaggttaaggattctcc

SEQ ID NO: 1589705 - DNA, 25 bp, Homo sapien
tgtgctggcagagacttaaggatga

SEQ ID NO: 1589706 - DNA, 25 bp, Homo sapien
tcgtgggaacccctccagtgcaatg

SEQ ID NO: 1589707 - DNA, 25 bp, Homo sapien
cctggcactttccaccattcgtgtg

SEQ ID NO: 1589708 - DNA, 25 bp, Homo sapien
tgcaaagatagcacagagcgttcct

SEQ ID NO: 1589709 - DNA, 25 bp, Homo sapien
taccatgcaatttactcaactatag

SEQ ID NO: 1589710 - DNA, 25 bp, Homo sapien
tcagcccctaatgtgagcatcttat

SEQ ID NO: 1589711 - DNA, 25 bp, Homo sapien
agccaattccatactaccatgcaat

SEQ ID NO: 1589712 - DNA, 25 bp, Homo sapien
gttcatactcatagggtgccagagc

SEQ ID NO: 1589713 - DNA, 25 bp, Homo sapien
cgttcatgtcgtgggcccatctgag

SEQ ID NO: 1589714 - DNA, 25 bp, Homo sapien
tttccagagctcctgagttcatact

SEQ ID NO: 1589715 - DNA, 25 bp, Homo sapien
tagggtgccagagcgttcatgtcgt

SEQ ID NO: 1589716 - DNA, 25 bp, Homo sapien
cggctctgaattcccgggacgtcca

SEQ ID NO: 1589717 - DNA, 25 bp, Homo sapien
agctgtgcttagacgggagcctgcg

SEQ ID NO: 1589718 - DNA, 25 bp, Homo sapien
gcttagacgggagcctgcgggccat

SEQ ID NO: 1589719 - DNA, 25 bp, Homo sapien
ttcccgggacgtccaggcgcaagct

SEQ ID NO: 1589720 - DNA, 25 bp, Homo sapien
tttttaaaccgattctttgtcatca

SEQ ID NO: 1589721 - DNA, 25 bp, Homo sapien
tttcttgggtgtcccttgcgcccac

SEQ ID NO: 1589722 - DNA, 25 bp, Homo sapien
catcctgaacatctagccccaagtg

SEQ ID NO: 1589723 - DNA, 25 bp, Homo sapien
ccgctgagagccatcacctggctgt

SEQ ID NO: 1589724 - DNA, 25 bp, Homo sapien
gctcgcccctctgtgacgttgttaa

SEQ ID NO: 1589725 - DNA, 25 bp, Homo sapien
gtcttccagattgggccccgtctcg

SEQ ID NO: 1589726 - DNA, 25 bp, Homo sapien
tcctgagctcaatcgagtgtcccac

SEQ ID NO: 1589727 - DNA, 25 bp, Homo sapien
agaaccgaaactctgcctggcacgt

SEQ ID NO: 1589728 - DNA, 25 bp, Homo sapien
ccgcgcccaccagccttggcccatt

SEQ ID NO: 1589729 - DNA, 25 bp, Homo sapien
caccgcgcccaccagccttggccca

SEQ ID NO: 1589730 - DNA, 25 bp, Homo sapien
gcccaccagccttggcccattttta

SEQ ID NO: 1589731 - DNA, 25 bp, Homo sapien
gcgcccaccagccttggcccatttt

SEQ ID NO: 1589732 - DNA, 25 bp, Homo sapien
tgaacgcaaatactggaagaacctc

SEQ ID NO: 1589733 - DNA, 25 bp, Homo sapien
cagcggctctttgtatgatgacgta

SEQ ID NO: 1589734 - DNA, 25 bp, Homo sapien
tgatgacgtaagtatgaggctccgg

SEQ ID NO: 1589735 - DNA, 25 bp, Homo sapien
ggcctcgccctgtggtgacgaaaga

SEQ ID NO: 1589736 - DNA, 25 bp, Homo sapien
taaccctttgacttgtgcccctggc

SEQ ID NO: 1589737 - DNA, 25 bp, Homo sapien
tccttgttcacggacgaggcacaga

SEQ ID NO: 1589738 - DNA, 25 bp, Homo sapien
gaggcacagattgaagagacgtccg

SEQ ID NO: 1589739 - DNA, 25 bp, Homo sapien
agacgtccgatctgcccttgaagcg

SEQ ID NO: 1589740 - DNA, 25 bp, Homo sapien
cgctggcttggtctggcaggagcag

SEQ ID NO: 1589741 - DNA, 25 bp, Homo sapien
ttggtctggcaggagcagatggcct

SEQ ID NO: 1589742 - DNA, 25 bp, Homo sapien
gtctggcaggagcagatggccttca

SEQ ID NO: 1589743 - DNA, 25 bp, Homo sapien
ccgctggcttggtctggcaggagca

SEQ ID NO: 1589744 - DNA, 25 bp, Homo sapien
tgcaccatcacgccttacttagacg

SEQ ID NO: 1589745 - DNA, 25 bp, Homo sapien
cacgccttacttagacgtttatatt

SEQ ID NO: 1589746 - DNA, 25 bp, Homo sapien
ccatcacgccttacttagacgttta

SEQ ID NO: 1589747 - DNA, 25 bp, Homo sapien
ccttacttagacgtttatattatga

SEQ ID NO: 1589748 - DNA, 25 bp, Homo sapien
gaacttggccatttccgtggacgga

SEQ ID NO: 1589749 - DNA, 25 bp, Homo sapien
ccaccatagggctttgttgcgaggg

SEQ ID NO: 1589750 - DNA, 25 bp, Homo sapien
tcgggtacttccagcgtgacgtgca

SEQ ID NO: 1589751 - DNA, 25 bp, Homo sapien
tctttagctggctccgggactgcat

SEQ ID NO: 1589752 - DNA, 25 bp, Homo sapien
actgtgggtctctgccgtgcatctg

SEQ ID NO: 1589753 - DNA, 25 bp, Homo sapien
ggccgtgcattcttcgctctttggg

SEQ ID NO: 1589754 - DNA, 25 bp, Homo sapien
atctgcttcagtccgccagttccat

SEQ ID NO: 1589755 - DNA, 25 bp, Homo sapien
ccgtcctttggactgggcttttcag

SEQ ID NO: 1589756 - DNA, 25 bp, Homo sapien
ggctgctcctctgaacgctgggcct

SEQ ID NO: 1589757 - DNA, 25 bp, Homo sapien
gctttctgataacgccagagccacg

SEQ ID NO: 1589758 - DNA, 25 bp, Homo sapien
gctgggcctgcgtcccgcagtctgt

SEQ ID NO: 1589759 - DNA, 25 bp, Homo sapien
cagagccacgttccagtgtattaaa

SEQ ID NO: 1589760 - DNA, 25 bp, Homo sapien
ctcccagtgccgggaaagggtgacg

SEQ ID NO: 1589761 - DNA, 25 bp, Homo sapien
tgttggctcccagtgccgggaaagg

SEQ ID NO: 1589762 - DNA, 25 bp, Homo sapien
cagtgccgggaaagggtgacgtggg

SEQ ID NO: 1589763 - DNA, 25 bp, Homo sapien
tttttccctgttggctcccagtgcc

SEQ ID NO: 1589764 - DNA, 25 bp, Homo sapien
accagagcacggcaagcgcctggag

SEQ ID NO: 1589765 - DNA, 25 bp, Homo sapien
tcccttctctcgcaggtacgccatc

SEQ ID NO: 1589766 - DNA, 25 bp, Homo sapien
gagcggctggccatcggtaggtgcc

SEQ ID NO: 1589767 - DNA, 25 bp, Homo sapien
tgccaccgatcttgcctctgacgtg

SEQ ID NO: 1589768 - DNA, 25 bp, Homo sapien
tgatgccaccagctcgcgttcatgt

SEQ ID NO: 1589769 - DNA, 25 bp, Homo sapien
catggtggccgcacggcgtttgccc

SEQ ID NO: 1589770 - DNA, 25 bp, Homo sapien
cagctcgcgttcatgtgctccctgg

SEQ ID NO: 1589771 - DNA, 25 bp, Homo sapien
tctgctgggacccaacctggacacc

SEQ ID NO: 1589772 - DNA, 25 bp, Homo sapien
cattgaccgagcgactgtgtgggct

SEQ ID NO: 1589773 - DNA, 25 bp, Homo sapien
gatcgtgctctctcattgaccgagc

SEQ ID NO: 1589774 - DNA, 25 bp, Homo sapien
ggagaagtctctgcatagccgtgcc

SEQ ID NO: 1589775 - DNA, 25 bp, Homo sapien
tagaacatcagctccgagaggagag

SEQ ID NO: 1589776 - DNA, 25 bp, Homo sapien
tgcgacgccttcctgcggcataaga

SEQ ID NO: 1589777 - DNA, 25 bp, Homo sapien
ttcttccccgggagctcgcagggct

SEQ ID NO: 1589778 - DNA, 25 bp, Homo sapien
tgacgtctgtcttttcggccctagg

SEQ ID NO: 1589779 - DNA, 25 bp, Homo sapien
agaagtacgggatccccttcagccg

SEQ ID NO: 1589780 - DNA, 25 bp, Homo sapien
tccatgggagagtctaggcctgtgt

SEQ ID NO: 1589781 - DNA, 25 bp, Homo sapien
agcaactgcacccactcgaggcagt

SEQ ID NO: 1589782 - DNA, 25 bp, Homo sapien
ctgatttgatggacagctggggttt

SEQ ID NO: 1589783 - DNA, 25 bp, Homo sapien
gagaagcctttgtccatgggagagt

SEQ ID NO: 1589784 - DNA, 25 bp, Homo sapien
tctggttggaacatcattcagtacc

SEQ ID NO: 1589785 - DNA, 25 bp, Homo sapien
gatcacggcattgctcagggaagtg

SEQ ID NO: 1589786 - DNA, 25 bp, Homo sapien
ttcagtaccagcaaaaccagacaga

SEQ ID NO: 1589787 - DNA, 25 bp, Homo sapien
cacagatctcgctcggagaagtgcg

SEQ ID NO: 1589788 - DNA, 25 bp, Homo sapien
caccagcctcagagcggctgctggc

SEQ ID NO: 1589789 - DNA, 25 bp, Homo sapien
gcctcagagcggctgctggcaccat

SEQ ID NO: 1589790 - DNA, 25 bp, Homo sapien
cagagcggctgctggcaccatgcat

SEQ ID NO: 1589791 - DNA, 25 bp, Homo sapien
accagcctcagagcggctgctggca

SEQ ID NO: 1589792 - DNA, 25 bp, Homo sapien
tgtagccccgtttgttgtagtggaa

SEQ ID NO: 1589793 - DNA, 25 bp, Homo sapien
catgtctagggatatctgtagcccc

SEQ ID NO: 1589794 - DNA, 25 bp, Homo sapien
gagatgagcgcgacaactttaaggg

SEQ ID NO: 1589795 - DNA, 25 bp, Homo sapien
tgtctctggaacacgtgcataccgg

SEQ ID NO: 1589796 - DNA, 25 bp, Homo sapien
gggcctgtggttcatacctggagct

SEQ ID NO: 1589797 - DNA, 25 bp, Homo sapien
tcgtggatgagtcgtaacctggaga

SEQ ID NO: 1589798 - DNA, 25 bp, Homo sapien
catggaacagcacttgggtggtgcc

SEQ ID NO: 1589799 - DNA, 25 bp, Homo sapien
atcccggctcatggctgttcctcag

SEQ ID NO: 1589800 - DNA, 25 bp, Homo sapien
cacaggccagtcctggtgatggcct

SEQ ID NO: 1589801 - DNA, 25 bp, Homo sapien
tggggccggtgagtgtgcagagccc

SEQ ID NO: 1589802 - DNA, 25 bp, Homo sapien
ggtggagccatagtcgcctctcctg

SEQ ID NO: 1589803 - DNA, 25 bp, Homo sapien
cctctcctggcaacggccctgccca

SEQ ID NO: 1589804 - DNA, 25 bp, Homo sapien
taagtagcgcagaagtgtttactcc

SEQ ID NO: 1589805 - DNA, 25 bp, Homo sapien
cattgaaagcgtcctgtagaccgca

SEQ ID NO: 1589806 - DNA, 25 bp, Homo sapien
tactcctacaattgaaagaaccaca

SEQ ID NO: 1589807 - DNA, 25 bp, Homo sapien
cacatcctgaggacgtttctgtcat

SEQ ID NO: 1589808 - DNA, 25 bp, Homo sapien
gctatgatcgcgccgtgtgctccag

SEQ ID NO: 1589809 - DNA, 25 bp, Homo sapien
tgtaaaggacctgcgcgatggctca

SEQ ID NO: 1589810 - DNA, 25 bp, Homo sapien
ttaaaagccgatgtaaaggacctgc

SEQ ID NO: 1589811 - DNA, 25 bp, Homo sapien
gcagcgggagcctcaagggatgaaa

SEQ ID NO: 1589812 - DNA, 25 bp, Homo sapien
tctgcgcccacctttgcagaataaa

SEQ ID NO: 1589813 - DNA, 25 bp, Homo sapien
tgagagaaacgcaggtgttccagag

SEQ ID NO: 1589814 - DNA, 25 bp, Homo sapien
tgagaggtcagagcatctcgctgtt

SEQ ID NO: 1589815 - DNA, 25 bp, Homo sapien
atattatgatttggctacagaccag

SEQ ID NO: 1589816 - DNA, 25 bp, Homo sapien
gggctagagaggactaaggaaaaca

SEQ ID NO: 1589817 - DNA, 25 bp, Homo sapien
tatattataaaagagtgtcctaaca

SEQ ID NO: 1589818 - DNA, 25 bp, Homo sapien
tgtcctaacagtccccgggctagag

SEQ ID NO: 1589819 - DNA, 25 bp, Homo sapien
cagagagagtgttacgcaggagcaa

SEQ ID NO: 1589820 - DNA, 25 bp, Homo sapien
cacccgagatgaaggatacgctgta

SEQ ID NO: 1589821 - DNA, 25 bp, Homo sapien
ggtatctctgtgtcttactctgtgc

SEQ ID NO: 1589822 - DNA, 25 bp, Homo sapien
tccctgcctctaggttcataatgaa

SEQ ID NO: 1589823 - DNA, 25 bp, Homo sapien
tactctgtgcaaagacgcggcaaaa

SEQ ID NO: 1589824 - DNA, 25 bp, Homo sapien
gctggcagacgtgctaggcgctggg

SEQ ID NO: 1589825 - DNA, 25 bp, Homo sapien
agccccgagagcattgcttgtggtg

SEQ ID NO: 1589826 - DNA, 25 bp, Homo sapien
gtggtggtggctggcagacgtgcta

SEQ ID NO: 1589827 - DNA, 25 bp, Homo sapien
ctgagccccgagagcattgcttgtg

SEQ ID NO: 1589828 - DNA, 25 bp, Homo sapien
atcctctcaacaccaccaggactca

SEQ ID NO: 1589829 - DNA, 25 bp, Homo sapien
catcctctcaacaccaccaggactc

SEQ ID NO: 1589830 - DNA, 25 bp, Homo sapien
tgcccccagcaccgactctcctttc

SEQ ID NO: 1589831 - DNA, 25 bp, Homo sapien
tttctggggccctctcgcctccagc

SEQ ID NO: 1589832 - DNA, 25 bp, Homo sapien
aaggatatggtcttggtccccagga

SEQ ID NO: 1589833 - DNA, 25 bp, Homo sapien
gctctggaaggaccccggaggcgaa

SEQ ID NO: 1589834 - DNA, 25 bp, Homo sapien
tcccctgagagggtaaggatatggt

SEQ ID NO: 1589835 - DNA, 25 bp, Homo sapien
ctgtgagtcctggtgttggtggaag

SEQ ID NO: 1589836 - DNA, 25 bp, Homo sapien
ggtcactcgctactgcactgggcgg

SEQ ID NO: 1589837 - DNA, 25 bp, Homo sapien
caattagcccatgacggatggcgcc

SEQ ID NO: 1589838 - DNA, 25 bp, Homo sapien
tcagctgtgctggtcacgttgcctc

SEQ ID NO: 1589839 - DNA, 25 bp, Homo sapien
tcggcgcagtgaacatcagctgtgc

SEQ ID NO: 1589840 - DNA, 25 bp, Homo sapien
aaatggcacactcttgtcgctggtc

SEQ ID NO: 1589841 - DNA, 25 bp, Homo sapien
gtcttcaaatggcacactcttgtcg

SEQ ID NO: 1589842 - DNA, 25 bp, Homo sapien
tgagtttgtagccatctacactgtc

SEQ ID NO: 1589843 - DNA, 25 bp, Homo sapien
agtgagtttgtagccatctacactg

SEQ ID NO: 1589844 - DNA, 25 bp, Homo sapien
agaacacgaggcagcccctacagga

SEQ ID NO: 1589845 - DNA, 25 bp, Homo sapien
catggtcacttattagaatgagaac

SEQ ID NO: 1589846 - DNA, 25 bp, Homo sapien
tggtgaattctcagtcatggtcact

SEQ ID NO: 1589847 - DNA, 25 bp, Homo sapien
ggctggtaacttctatctcagagtg

SEQ ID NO: 1589848 - DNA, 25 bp, Homo sapien
tcgtcctcggaaatggtgcagaaac

SEQ ID NO: 1589849 - DNA, 25 bp, Homo sapien
tgttgaaagtaaccgcagacctgcc

SEQ ID NO: 1589850 - DNA, 25 bp, Homo sapien
tgccaagtatttgaaggcggcggcc

SEQ ID NO: 1589851 - DNA, 25 bp, Homo sapien
gaacaactcgcttgctcagggtagg

SEQ ID NO: 1589852 - DNA, 25 bp, Homo sapien
tgccgcctggtaacagaactggtac

SEQ ID NO: 1589853 - DNA, 25 bp, Homo sapien
ctccagtgccgcctggtaacagaac

SEQ ID NO: 1589854 - DNA, 25 bp, Homo sapien
cagtgccgcctggtaacagaactgg

SEQ ID NO: 1589855 - DNA, 25 bp, Homo sapien
ccgcctggtaacagaactggtactc

SEQ ID NO: 1589856 - DNA, 25 bp, Homo sapien
aagctcctcagccttgtgcgtgtct

SEQ ID NO: 1589857 - DNA, 25 bp, Homo sapien
gcgtgtctcttgcagaaggtctctt

SEQ ID NO: 1589858 - DNA, 25 bp, Homo sapien
gtgacctgttagtacctccgctgct

SEQ ID NO: 1589859 - DNA, 25 bp, Homo sapien
ctatcgccctcaggagcaggccaag

SEQ ID NO: 1589860 - DNA, 25 bp, Homo sapien
taagcgtgatgaagacgcccgtcct

SEQ ID NO: 1589861 - DNA, 25 bp, Homo sapien
gtctgaaagatgtccaccacgcctt

SEQ ID NO: 1589862 - DNA, 25 bp, Homo sapien
tccgctccagcacgatgctaagcgt

SEQ ID NO: 1589863 - DNA, 25 bp, Homo sapien
gctgggttcgtagcatcttcaccgt

SEQ ID NO: 1589864 - DNA, 25 bp, Homo sapien
ggccgtcctggccaaactgctcctt

SEQ ID NO: 1589865 - DNA, 25 bp, Homo sapien
gctccttagtcttatgcacttggcc

SEQ ID NO: 1589866 - DNA, 25 bp, Homo sapien
actgccggacagtccgggactggcc

SEQ ID NO: 1589867 - DNA, 25 bp, Homo sapien
ccgactttggcacaccctgttccgg

SEQ ID NO: 1589868 - DNA, 25 bp, Homo sapien
tactgaggcatgttgtattctgcca

SEQ ID NO: 1589869 - DNA, 25 bp, Homo sapien
gcatgttgtattctgccatcggatc

SEQ ID NO: 1589870 - DNA, 25 bp, Homo sapien
tgccatcggatctaccacaaagtac

SEQ ID NO: 1589871 - DNA, 25 bp, Homo sapien
gggcagagcgctcggccggccagta

SEQ ID NO: 1589872 - DNA, 25 bp, Homo sapien
tcagcatcaccacgatcgtcgaatt

SEQ ID NO: 1589873 - DNA, 25 bp, Homo sapien
gccagcggcccctgtgtcgcgatgt

SEQ ID NO: 1589874 - DNA, 25 bp, Homo sapien
gatcgtcgaattgttctcccacagc

SEQ ID NO: 1589875 - DNA, 25 bp, Homo sapien
agaagtcttccgtggtctccgccag

SEQ ID NO: 1589876 - DNA, 25 bp, Homo sapien
gattggcactgatgaagcgtgacgt

SEQ ID NO: 1589877 - DNA, 25 bp, Homo sapien
cccgtgtgctctcatagggcatgat

SEQ ID NO: 1589878 - DNA, 25 bp, Homo sapien
cacaccccggatgggttgcagacag

SEQ ID NO: 1589879 - DNA, 25 bp, Homo sapien
aacttgttacaaggcagattggcac

SEQ ID NO: 1589880 - DNA, 25 bp, Homo sapien
tgaactcgagttccatgccagtgac

SEQ ID NO: 1589881 - DNA, 25 bp, Homo sapien
cttgaactcgagttccatgccagtg

SEQ ID NO: 1589882 - DNA, 25 bp, Homo sapien
ttgaactcgagttccatgccagtga

SEQ ID NO: 1589883 - DNA, 25 bp, Homo sapien
caccatgtagttgcgctgggacctc

SEQ ID NO: 1589884 - DNA, 25 bp, Homo sapien
tcacgtggccatagacatcgactgt

SEQ ID NO: 1589885 - DNA, 25 bp, Homo sapien
cagggcctcgtggatgaagctgtac

SEQ ID NO: 1589886 - DNA, 25 bp, Homo sapien
cgtcgatgacgataaagcagcctgt

SEQ ID NO: 1589887 - DNA, 25 bp, Homo sapien
tgggtattcgggcacgccatggtcc

SEQ ID NO: 1589888 - DNA, 25 bp, Homo sapien
catctggcgggttgcaggtcttgac

SEQ ID NO: 1589889 - DNA, 25 bp, Homo sapien
cacgccgtaaactggaactggcgga

SEQ ID NO: 1589890 - DNA, 25 bp, Homo sapien
gacctcgcgtttctcactggagcca

SEQ ID NO: 1589891 - DNA, 25 bp, Homo sapien
gaatgtggccagctcgatggtatct

SEQ ID NO: 1589892 - DNA, 25 bp, Homo sapien
tagcaacgtgacctggatgaagccg

SEQ ID NO: 1589893 - DNA, 25 bp, Homo sapien
cagagagaatgtcctgacgcagaat

SEQ ID NO: 1589894 - DNA, 25 bp, Homo sapien
gatgaagccgtaggtctccgtgcct

SEQ ID NO: 1589895 - DNA, 25 bp, Homo sapien
tgtacgcgttctgacaccggtagcc

SEQ ID NO: 1589896 - DNA, 25 bp, Homo sapien
tcatcatgacgatggtcgccgaccg

SEQ ID NO: 1589897 - DNA, 25 bp, Homo sapien
cggtagccgtccacgtagttggcat

SEQ ID NO: 1589898 - DNA, 25 bp, Homo sapien
gcccctgcgtggcaatgtacgcgtt

SEQ ID NO: 1589899 - DNA, 25 bp, Homo sapien
ctgcagccagggcgagaggccaggg

SEQ ID NO: 1589900 - DNA, 25 bp, Homo sapien
gcagccagggcgagaggccagggat

SEQ ID NO: 1589901 - DNA, 25 bp, Homo sapien
tgcagccagggcgagaggccaggga

SEQ ID NO: 1589902 - DNA, 25 bp, Homo sapien
gttggcatagcggttcttcggcttg

SEQ ID NO: 1589903 - DNA, 25 bp, Homo sapien
ctggaggatgacacgggagtggtca

SEQ ID NO: 1589904 - DNA, 25 bp, Homo sapien
tggtcataggcgatgacgttggcat

SEQ ID NO: 1589905 - DNA, 25 bp, Homo sapien
atgacgttggcatagcggttcttcg

SEQ ID NO: 1589906 - DNA, 25 bp, Homo sapien
gccttgagccgctccgtgtgctccg

SEQ ID NO: 1589907 - DNA, 25 bp, Homo sapien
tgagccgctccgtgtgctccgccat

SEQ ID NO: 1589908 - DNA, 25 bp, Homo sapien
tgaggctgtcgttggccttgagccg

SEQ ID NO: 1589909 - DNA, 25 bp, Homo sapien
agccgctccgtgtgctccgccatgt

SEQ ID NO: 1589910 - DNA, 25 bp, Homo sapien
tgcgatgggaattggcgggtggcta

SEQ ID NO: 1589911 - DNA, 25 bp, Homo sapien
ggaattggcgggtggctaagcatgc

SEQ ID NO: 1589912 - DNA, 25 bp, Homo sapien
gcgatgggaattggcgggtggctaa

SEQ ID NO: 1589913 - DNA, 25 bp, Homo sapien
atgggaattggcgggtggctaagca

SEQ ID NO: 1589914 - DNA, 25 bp, Homo sapien
tcaaagtgaaaccccggctccctga

SEQ ID NO: 1589915 - DNA, 25 bp, Homo sapien
aggtatttgggaatccagaatgtgg

SEQ ID NO: 1589916 - DNA, 25 bp, Homo sapien
cagatccatgtagggttggaggtat

SEQ ID NO: 1589917 - DNA, 25 bp, Homo sapien
gaggtatttgggaatccagaatgtg

SEQ ID NO: 1589918 - DNA, 25 bp, Homo sapien
catgtagggttggaggtatttggga

SEQ ID NO: 1589919 - DNA, 25 bp, Homo sapien
tccctggtaccagggataagtacat

SEQ ID NO: 1589920 - DNA, 25 bp, Homo sapien
cctggtaccagggataagtacatac

SEQ ID NO: 1589921 - DNA, 25 bp, Homo sapien
ccctgttggtggcatccctggtacc

SEQ ID NO: 1589922 - DNA, 25 bp, Homo sapien
tgttggtggcatccctggtaccagg

SEQ ID NO: 1589923 - DNA, 25 bp, Homo sapien
agttaatgcgtctcatttccacagg

SEQ ID NO: 1589924 - DNA, 25 bp, Homo sapien
gcggggttctgagtccttgcgttta

SEQ ID NO: 1589925 - DNA, 25 bp, Homo sapien
cattgttcaggaggcatttggtgcg

SEQ ID NO: 1589926 - DNA, 25 bp, Homo sapien
ctggagtctggaagttaatgcgtct

SEQ ID NO: 1589927 - DNA, 25 bp, Homo sapien
cgtatgactagggtttccaggacca

SEQ ID NO: 1589928 - DNA, 25 bp, Homo sapien
tccaggaccaagtacagctacgtgt

SEQ ID NO: 1589929 - DNA, 25 bp, Homo sapien
catgtgtgaacacaattcaggcccc

SEQ ID NO: 1589930 - DNA, 25 bp, Homo sapien
gaacagtccagttagtagtggcaca

SEQ ID NO: 1589931 - DNA, 25 bp, Homo sapien
cttgcctgaagcctccacgggggag

SEQ ID NO: 1589932 - DNA, 25 bp, Homo sapien
tcttgcctgaagcctccacggggga

SEQ ID NO: 1589933 - DNA, 25 bp, Homo sapien
tatcgacaccacaaggaggcttatc

SEQ ID NO: 1589934 - DNA, 25 bp, Homo sapien
tcctcattgaactggacacaggcag

SEQ ID NO: 1589935 - DNA, 25 bp, Homo sapien
cctccctgctgtcaagtcaagtcgg

SEQ ID NO: 1589936 - DNA, 25 bp, Homo sapien
tgtgccggccatcaagggcttgttc

SEQ ID NO: 1589937 - DNA, 25 bp, Homo sapien
acaatgcagattatgaagaccacgg

SEQ ID NO: 1589938 - DNA, 25 bp, Homo sapien
cagattatgaagaccacggccagca

SEQ ID NO: 1589939 - DNA, 25 bp, Homo sapien
tcttgtagagcaggatagcaatgac

SEQ ID NO: 1589940 - DNA, 25 bp, Homo sapien
gcacaggcccgatcacccagataag

SEQ ID NO: 1589941 - DNA, 25 bp, Homo sapien
agaagcgagctgcaatatagggccg

SEQ ID NO: 1589942 - DNA, 25 bp, Homo sapien
tcttctgaagcacggcaagcacgaa

SEQ ID NO: 1589943 - DNA, 25 bp, Homo sapien
actgcttctggtcgccgggatggaa

SEQ ID NO: 1589944 - DNA, 25 bp, Homo sapien
tatcgaagccgccatactgcttctg

SEQ ID NO: 1589945 - DNA, 25 bp, Homo sapien
ctgcgggaacagagtcatgggtggc

SEQ ID NO: 1589946 - DNA, 25 bp, Homo sapien
tgcgggaacagagtcatgggtggct

SEQ ID NO: 1589947 - DNA, 25 bp, Homo sapien
cgggaacagagtcatgggtggctca

SEQ ID NO: 1589948 - DNA, 25 bp, Homo sapien
gcgggaacagagtcatgggtggctc

SEQ ID NO: 1589949 - DNA, 25 bp, Homo sapien
gtggcaccatcacaatgaaatagct

SEQ ID NO: 1589950 - DNA, 25 bp, Homo sapien
ggaattggcctccacgagacttgcg

SEQ ID NO: 1589951 - DNA, 25 bp, Homo sapien
tccacgagacttgcgcagtggcacc

SEQ ID NO: 1589952 - DNA, 25 bp, Homo sapien
cccagcggggtcaggaattggcctc

SEQ ID NO: 1589953 - DNA, 25 bp, Homo sapien
tctggccgtcaggaagatacaccat

SEQ ID NO: 1589954 - DNA, 25 bp, Homo sapien
ggtacggccatccacatccagtgtg

SEQ ID NO: 1589955 - DNA, 25 bp, Homo sapien
cagtccaggcggtgaccgtctgctg

SEQ ID NO: 1589956 - DNA, 25 bp, Homo sapien
gatgagcttcttggtggtacggcca

SEQ ID NO: 1589957 - DNA, 25 bp, Homo sapien
ttcaccttgaagttcttgggcgaga

SEQ ID NO: 1589958 - DNA, 25 bp, Homo sapien
cttgtagggtgtgggtgagttgtag

SEQ ID NO: 1589959 - DNA, 25 bp, Homo sapien
tcagggaactcccagctgagcagaa

SEQ ID NO: 1589960 - DNA, 25 bp, Homo sapien
gctgagcagaactgatgtcttcatg

SEQ ID NO: 1589961 - DNA, 25 bp, Homo sapien
ttgccaacgccggagcctcggggtc

SEQ ID NO: 1589962 - DNA, 25 bp, Homo sapien
ctttgccaacgccggagcctcgggg

SEQ ID NO: 1589963 - DNA, 25 bp, Homo sapien
gctcgcacttggaggtcataggccg

SEQ ID NO: 1589964 - DNA, 25 bp, Homo sapien
tcacggccaaactgcaggcggtagc

SEQ ID NO: 1589965 - DNA, 25 bp, Homo sapien
gcaagccggaacacatacgtggccc

SEQ ID NO: 1589966 - DNA, 25 bp, Homo sapien
caccgtgtatttgacgatggccccg

SEQ ID NO: 1589967 - DNA, 25 bp, Homo sapien
accgacagggttgggcggcccagca

SEQ ID NO: 1589968 - DNA, 25 bp, Homo sapien
tgcaccgacagggttgggcggccca

SEQ ID NO: 1589969 - DNA, 25 bp, Homo sapien
ctgcaccgacagggttgggcggccc

SEQ ID NO: 1589970 - DNA, 25 bp, Homo sapien
gcaccgacagggttgggcggcccag

SEQ ID NO: 1589971 - DNA, 25 bp, Homo sapien
tgggtttgctgcgagcgccatcgcc

SEQ ID NO: 1589972 - DNA, 25 bp, Homo sapien
ccttcatggtgtaggcggctaccgt

SEQ ID NO: 1589973 - DNA, 25 bp, Homo sapien
gctcccttggtcacaaccaccttgg

SEQ ID NO: 1589974 - DNA, 25 bp, Homo sapien
taccgtgatggagtacgcggtctca

SEQ ID NO: 1589975 - DNA, 25 bp, Homo sapien
gatcacagcatcatgtgtgcccatg

SEQ ID NO: 1589976 - DNA, 25 bp, Homo sapien
gccctgccgatgtgtgttttgttcc

SEQ ID NO: 1589977 - DNA, 25 bp, Homo sapien
aagtgagtgctcgtccaatgaatga

SEQ ID NO: 1589978 - DNA, 25 bp, Homo sapien
caatgaatgacagcacagaacactc

SEQ ID NO: 1589979 - DNA, 25 bp, Homo sapien
atattcggccgtgtcatccgtctcc

SEQ ID NO: 1589980 - DNA, 25 bp, Homo sapien
attcggccgtgtcatccgtctccca

SEQ ID NO: 1589981 - DNA, 25 bp, Homo sapien
tattcggccgtgtcatccgtctccc

SEQ ID NO: 1589982 - DNA, 25 bp, Homo sapien
ttgatgcgcggcggcccgcgggcct

SEQ ID NO: 1589983 - DNA, 25 bp, Homo sapien
cttgatgcgcggcggcccgcgggcc

SEQ ID NO: 1589984 - DNA, 25 bp, Homo sapien
cgcgggcctcggcgccctccatgcg

SEQ ID NO: 1589985 - DNA, 25 bp, Homo sapien
gggcctcggcgccctccatgcgcac

SEQ ID NO: 1589986 - DNA, 25 bp, Homo sapien
gccgtggcgttgagcgcctccgcct

SEQ ID NO: 1589987 - DNA, 25 bp, Homo sapien
acagcacgcggatggccgtggcgtt

SEQ ID NO: 1589988 - DNA, 25 bp, Homo sapien
tctggccgtgctgccggccgggcgc

SEQ ID NO: 1589989 - DNA, 25 bp, Homo sapien
gggcgcgggcgagcgccacagcacg

SEQ ID NO: 1589990 - DNA, 25 bp, Homo sapien
caacttaccaaaatggccgtggagc

SEQ ID NO: 1589991 - DNA, 25 bp, Homo sapien
ggagcgcacgctgacacatttaacg

SEQ ID NO: 1589992 - DNA, 25 bp, Homo sapien
tgagcgacagtcgtgatgcggtact

SEQ ID NO: 1589993 - DNA, 25 bp, Homo sapien
ggtactgggtccacttctccaaggc

SEQ ID NO: 1589994 - DNA, 25 bp, Homo sapien
tttgaccatcatgactgattctgga

SEQ ID NO: 1589995 - DNA, 25 bp, Homo sapien
cctggggtggctacgccgtgactga

SEQ ID NO: 1589996 - DNA, 25 bp, Homo sapien
gaaggtttgaccatcatgactgatt

SEQ ID NO: 1589997 - DNA, 25 bp, Homo sapien
ggccttgaaggtttgaccatcatga

SEQ ID NO: 1589998 - DNA, 25 bp, Homo sapien
gtactccgtgttgggcttcaggtcc

SEQ ID NO: 1589999 - DNA, 25 bp, Homo sapien
caccacgtaggaagtcgtcgggtcg

SEQ ID NO: 1590000 - DNA, 25 bp, Homo sapien
gagcgggccgccaggcggaaggcgt

SEQ ID NO: 1590001 - DNA, 25 bp, Homo sapien
tcctccaccacgtaggaagtcgtcg

SEQ ID NO: 1590002 - DNA, 25 bp, Homo sapien
gaggagctcgtacttgatgatactc

SEQ ID NO: 1590003 - DNA, 25 bp, Homo sapien
agaggagctcgtacttgatgatact

SEQ ID NO: 1590004 - DNA, 25 bp, Homo sapien
ggagctcgtacttgatgatactctc

SEQ ID NO: 1590005 - DNA, 25 bp, Homo sapien
aggagctcgtacttgatgatactct

SEQ ID NO: 1590006 - DNA, 25 bp, Homo sapien
cgtgatgctggtctccgacctggcc

SEQ ID NO: 1590007 - DNA, 25 bp, Homo sapien
ggacagcgtgatgctggtctccgac

SEQ ID NO: 1590008 - DNA, 25 bp, Homo sapien
gggctccaggacagcgtgatgctgg

SEQ ID NO: 1590009 - DNA, 25 bp, Homo sapien
gcctcggcccgcaggttcatgggct

SEQ ID NO: 1590010 - DNA, 25 bp, Homo sapien
gtgcataacccacaaaccgctctgc

SEQ ID NO: 1590011 - DNA, 25 bp, Homo sapien
ccgctctgcggcttccagggagcat

SEQ ID NO: 1590012 - DNA, 25 bp, Homo sapien
taaagcaccgtgcataacccacaaa

SEQ ID NO: 1590013 - DNA, 25 bp, Homo sapien
agcatgcaaagaaccaagccgcacg

SEQ ID NO: 1590014 - DNA, 25 bp, Homo sapien
tgtcgtccacgttgtgcttctgcca

SEQ ID NO: 1590015 - DNA, 25 bp, Homo sapien
tagtagacgcggtagccgcggatca

SEQ ID NO: 1590016 - DNA, 25 bp, Homo sapien
ggtgctccggttccatggtgtagta

SEQ ID NO: 1590017 - DNA, 25 bp, Homo sapien
caatcatggtggtcgcgctgagcat

SEQ ID NO: 1590018 - DNA, 25 bp, Homo sapien
gccggggcctgctcgcctgtgcggg

SEQ ID NO: 1590019 - DNA, 25 bp, Homo sapien
ccgggcttgcacgttccgcggcgcg

SEQ ID NO: 1590020 - DNA, 25 bp, Homo sapien
ggcttgcacgttccgcggcgcgctg

SEQ ID NO: 1590021 - DNA, 25 bp, Homo sapien
ccggggcctgctcgcctgtgcgggt

SEQ ID NO: 1590022 - DNA, 25 bp, Homo sapien
tgcccgagtcccacgtgatggtgat

SEQ ID NO: 1590023 - DNA, 25 bp, Homo sapien
tcaggccgccgatgctgtaacgtgt

SEQ ID NO: 1590024 - DNA, 25 bp, Homo sapien
tgacgtaataggacacaggatctgg

SEQ ID NO: 1590025 - DNA, 25 bp, Homo sapien
gatacggcccgtcttggctcttgga

SEQ ID NO: 1590026 - DNA, 25 bp, Homo sapien
tgtagttggccgagtccttgacatc

SEQ ID NO: 1590027 - DNA, 25 bp, Homo sapien
cacttcacgtatggcatgggcgagc

SEQ ID NO: 1590028 - DNA, 25 bp, Homo sapien
tgatctcgtggctcatgggcaggat

SEQ ID NO: 1590029 - DNA, 25 bp, Homo sapien
tttcaccgtgatctgagcaaccgcc

SEQ ID NO: 1590030 - DNA, 25 bp, Homo sapien
ggtttccagctcttctcgtcaccga

SEQ ID NO: 1590031 - DNA, 25 bp, Homo sapien
tagaaagtaaggtgggcacggtgcc

SEQ ID NO: 1590032 - DNA, 25 bp, Homo sapien
cccaattaccgacctgaatggaggg

SEQ ID NO: 1590033 - DNA, 25 bp, Homo sapien
tgttctgcccggtttggtgctggca

SEQ ID NO: 1590034 - DNA, 25 bp, Homo sapien
agaggtgttcagagctcagtgttcc

SEQ ID NO: 1590035 - DNA, 25 bp, Homo sapien
ggcgtggccaggtatagtaagcaca

SEQ ID NO: 1590036 - DNA, 25 bp, Homo sapien
taagcacaaactagggagctggcca

SEQ ID NO: 1590037 - DNA, 25 bp, Homo sapien
tctgggtctgatctaacactgcctg

SEQ ID NO: 1590038 - DNA, 25 bp, Homo sapien
gaaagtccaagtggtcttcagagac

SEQ ID NO: 1590039 - DNA, 25 bp, Homo sapien
gaaaaggtgattccaaagtctggct

SEQ ID NO: 1590040 - DNA, 25 bp, Homo sapien
ctgtcctcaacatcgtctaaacggg

SEQ ID NO: 1590041 - DNA, 25 bp, Homo sapien
tatgctctcatcactttctgggctg

SEQ ID NO: 1590042 - DNA, 25 bp, Homo sapien
aactagggcttggtacttcgcatgg

SEQ ID NO: 1590043 - DNA, 25 bp, Homo sapien
tgagccctgctggatttacaaaccc

SEQ ID NO: 1590044 - DNA, 25 bp, Homo sapien
gtgacagtggatcagacgtgcccct

SEQ ID NO: 1590045 - DNA, 25 bp, Homo sapien
gaacgcattacaactcaccagaggt

SEQ ID NO: 1590046 - DNA, 25 bp, Homo sapien
gaggtgaaagggaggaggaggagga

SEQ ID NO: 1590047 - DNA, 25 bp, Homo sapien
ctaggaggtgaaagggaggaggagg

SEQ ID NO: 1590048 - DNA, 25 bp, Homo sapien
taggaggtgaaagggaggaggagga

SEQ ID NO: 1590049 - DNA, 25 bp, Homo sapien
aggaggtgaaagggaggaggaggag

SEQ ID NO: 1590050 - DNA, 25 bp, Homo sapien
gagctacgaggccacaaagttggga

SEQ ID NO: 1590051 - DNA, 25 bp, Homo sapien
taacaagcttcgctgggtgccgtgc

SEQ ID NO: 1590052 - DNA, 25 bp, Homo sapien
tctcggagagtcattaggaagaggc

SEQ ID NO: 1590053 - DNA, 25 bp, Homo sapien
gcatgactgagtgggaattggaaac

SEQ ID NO: 1590054 - DNA, 25 bp, Homo sapien
cgcctcggccaaggtcccaccgcga

SEQ ID NO: 1590055 - DNA, 25 bp, Homo sapien
gcctcggccaaggtcccaccgcgac

SEQ ID NO: 1590056 - DNA, 25 bp, Homo sapien
ctcggccaaggtcccaccgcgaccg

SEQ ID NO: 1590057 - DNA, 25 bp, Homo sapien
ccgcctcggccaaggtcccaccgcg

SEQ ID NO: 1590058 - DNA, 25 bp, Homo sapien
acactcatatttgccctggtcggtt

SEQ ID NO: 1590059 - DNA, 25 bp, Homo sapien
gcgcacgccggcgctgttggtggcc

SEQ ID NO: 1590060 - DNA, 25 bp, Homo sapien
acacactcatatttgccctggtcgg

SEQ ID NO: 1590061 - DNA, 25 bp, Homo sapien
gcaggtgaggagtagcgcacgccgg

SEQ ID NO: 1590062 - DNA, 25 bp, Homo sapien
ctgtgggaagatgggaaaaagcttg

SEQ ID NO: 1590063 - DNA, 25 bp, Homo sapien
tgtgggaagatgggaaaaagcttgg

SEQ ID NO: 1590064 - DNA, 25 bp, Homo sapien
tgatctcagggtcagggttgccgct

SEQ ID NO: 1590065 - DNA, 25 bp, Homo sapien
agcatggtggctgtccgtgtccgct

SEQ ID NO: 1590066 - DNA, 25 bp, Homo sapien
tggcactaggatccacaggcaggaa

SEQ ID NO: 1590067 - DNA, 25 bp, Homo sapien
cagctgtttgatgcgtccattgctg

SEQ ID NO: 1590068 - DNA, 25 bp, Homo sapien
agggcagagacgtgagagaaatggg

SEQ ID NO: 1590069 - DNA, 25 bp, Homo sapien
gcagagacgtgagagaaatgggcat

SEQ ID NO: 1590070 - DNA, 25 bp, Homo sapien
ggcagagacgtgagagaaatgggca

SEQ ID NO: 1590071 - DNA, 25 bp, Homo sapien
ctgagggcagagacgtgagagaaat

SEQ ID NO: 1590072 - DNA, 25 bp, Homo sapien
ctggcccagaggacaccgtttttat

SEQ ID NO: 1590073 - DNA, 25 bp, Homo sapien
aaggcagtggcatgcactccacgcc

SEQ ID NO: 1590074 - DNA, 25 bp, Homo sapien
ttacaggtattttacaggtatgagc

SEQ ID NO: 1590075 - DNA, 25 bp, Homo sapien
ggaaggcagtggcatgcactccacg

SEQ ID NO: 1590076 - DNA, 25 bp, Homo sapien
tgggccctgagactgttactggttg

SEQ ID NO: 1590077 - DNA, 25 bp, Homo sapien
caattacctttctcgcttgaaccca

SEQ ID NO: 1590078 - DNA, 25 bp, Homo sapien
tgaacccatctgagttggatcagcc

SEQ ID NO: 1590079 - DNA, 25 bp, Homo sapien
ggcacaataaatccccaccagtagg

SEQ ID NO: 1590080 - DNA, 25 bp, Homo sapien
ttatcctccgcccgccctgaggagc

SEQ ID NO: 1590081 - DNA, 25 bp, Homo sapien
atcctccgcccgccctgaggagccc

SEQ ID NO: 1590082 - DNA, 25 bp, Homo sapien
ccgcccgccctgaggagcccaatac

SEQ ID NO: 1590083 - DNA, 25 bp, Homo sapien
ctccgcccgccctgaggagcccaat

SEQ ID NO: 1590084 - DNA, 25 bp, Homo sapien
ggccacacactcgtacacgttttca

SEQ ID NO: 1590085 - DNA, 25 bp, Homo sapien
ctgcactctcatcaaactcaatcgt

SEQ ID NO: 1590086 - DNA, 25 bp, Homo sapien
ccccaaccgagttctgggccacaca

SEQ ID NO: 1590087 - DNA, 25 bp, Homo sapien
gcggtgtcctcagcggctggatcct

SEQ ID NO: 1590088 - DNA, 25 bp, Homo sapien
ccgacacgccgatctggtccttggg

SEQ ID NO: 1590089 - DNA, 25 bp, Homo sapien
ttgttccaggtcactcgtggcttgg

SEQ ID NO: 1590090 - DNA, 25 bp, Homo sapien
ttggggtcacccgtggcctgacaca

SEQ ID NO: 1590091 - DNA, 25 bp, Homo sapien
gacacgccgatctggtccttgggtt

SEQ ID NO: 1590092 - DNA, 25 bp, Homo sapien
ccaggcatctggctaggataccaag

SEQ ID NO: 1590093 - DNA, 25 bp, Homo sapien
ggcatctggctaggataccaaggag

SEQ ID NO: 1590094 - DNA, 25 bp, Homo sapien
taggataccaaggagccacgaaaac

SEQ ID NO: 1590095 - DNA, 25 bp, Homo sapien
tctggctaggataccaaggagccac

SEQ ID NO: 1590096 - DNA, 25 bp, Homo sapien
gtggatacaacctcacctgggcaca

SEQ ID NO: 1590097 - DNA, 25 bp, Homo sapien
cacagtggatacaacctcacctggg

SEQ ID NO: 1590098 - DNA, 25 bp, Homo sapien
cagtggatacaacctcacctgggca

SEQ ID NO: 1590099 - DNA, 25 bp, Homo sapien
gacacagtggatacaacctcacctg

SEQ ID NO: 1590100 - DNA, 25 bp, Homo sapien
gctgcacagcctccaacgagcagga

SEQ ID NO: 1590101 - DNA, 25 bp, Homo sapien
cacagcctccaacgagcaggaccac

SEQ ID NO: 1590102 - DNA, 25 bp, Homo sapien
agcctccaacgagcaggaccacaag

SEQ ID NO: 1590103 - DNA, 25 bp, Homo sapien
tgcacagcctccaacgagcaggacc

SEQ ID NO: 1590104 - DNA, 25 bp, Homo sapien
gcttggcagcgacctccgatctccg

SEQ ID NO: 1590105 - DNA, 25 bp, Homo sapien
cttggcagcgacctccgatctccgc

SEQ ID NO: 1590106 - DNA, 25 bp, Homo sapien
ttggcagcgacctccgatctccgcc

SEQ ID NO: 1590107 - DNA, 25 bp, Homo sapien
ccctcacagagaggcctcgagccga

SEQ ID NO: 1590108 - DNA, 25 bp, Homo sapien
ggcctcgagccgagcgtcagatggg

SEQ ID NO: 1590109 - DNA, 25 bp, Homo sapien
tcacagagaggcctcgagccgagcg

SEQ ID NO: 1590110 - DNA, 25 bp, Homo sapien
cagagaggcctcgagccgagcgtca

SEQ ID NO: 1590111 - DNA, 25 bp, Homo sapien
agggctgtgagaggcgagtggggaa

SEQ ID NO: 1590112 - DNA, 25 bp, Homo sapien
tgtgagaggcgagtggggaaatcca

SEQ ID NO: 1590113 - DNA, 25 bp, Homo sapien
tgggacaatggggaaggatcatggg

SEQ ID NO: 1590114 - DNA, 25 bp, Homo sapien
aaatccaggagaccttcatggagga

SEQ ID NO: 1590115 - DNA, 25 bp, Homo sapien
agtcagactgcaagcggttgcatat

SEQ ID NO: 1590116 - DNA, 25 bp, Homo sapien
cagtcagactgcaagcggttgcata

SEQ ID NO: 1590117 - DNA, 25 bp, Homo sapien
ccagagcccggctctcagtcgagcc

SEQ ID NO: 1590118 - DNA, 25 bp, Homo sapien
aaattgcccgtcagtgtgtccccca

SEQ ID NO: 1590119 - DNA, 25 bp, Homo sapien
cggctctcagtcgagcccagagtcc

SEQ ID NO: 1590120 - DNA, 25 bp, Homo sapien
aattgcccgtcagtgtgtcccccat

SEQ ID NO: 1590121 - DNA, 25 bp, Homo sapien
ctgcggtcctgttgcctcctccgcc

SEQ ID NO: 1590122 - DNA, 25 bp, Homo sapien
gccccctctgcggtcctgttgcctc

SEQ ID NO: 1590123 - DNA, 25 bp, Homo sapien
ctgccccctctgcggtcctgttgcc

SEQ ID NO: 1590124 - DNA, 25 bp, Homo sapien
ctctgcggtcctgttgcctcctccg

SEQ ID NO: 1590125 - DNA, 25 bp, Homo sapien
cctgcggagcataacggtctggagt

SEQ ID NO: 1590126 - DNA, 25 bp, Homo sapien
agttttccaaagtgcaagcgacggg

SEQ ID NO: 1590127 - DNA, 25 bp, Homo sapien
aaagtgcaagcgacgggcctgaatg

SEQ ID NO: 1590128 - DNA, 25 bp, Homo sapien
ggagcataacggtctggagttttcc

SEQ ID NO: 1590129 - DNA, 25 bp, Homo sapien
tctgtaaagatcaaggaaaccgagg

SEQ ID NO: 1590130 - DNA, 25 bp, Homo sapien
ctgtgtgggcctgaaccagtcctca

SEQ ID NO: 1590131 - DNA, 25 bp, Homo sapien
gaggcacaaaccagggaggtctcca

SEQ ID NO: 1590132 - DNA, 25 bp, Homo sapien
gggacacagtacagatcaaggcaga

SEQ ID NO: 1590133 - DNA, 25 bp, Homo sapien
cgcgcctggcctaattttcgtattt

SEQ ID NO: 1590134 - DNA, 25 bp, Homo sapien
gttgggaccacagactcacgccacc

SEQ ID NO: 1590135 - DNA, 25 bp, Homo sapien
tagttgggaccacagactcacgcca

SEQ ID NO: 1590136 - DNA, 25 bp, Homo sapien
accgcgcctggcctaattttcgtat

SEQ ID NO: 1590137 - DNA, 25 bp, Homo sapien
tgatggaatgatgaccgtgaaatgc

SEQ ID NO: 1590138 - DNA, 25 bp, Homo sapien
aatgctgcgagacggaatgaggaca

SEQ ID NO: 1590139 - DNA, 25 bp, Homo sapien
acaggacagaacaggctgcacccca

SEQ ID NO: 1590140 - DNA, 25 bp, Homo sapien
tgcaccccagctaggtccaacagca

SEQ ID NO: 1590141 - DNA, 25 bp, Homo sapien
tcaaaccagcgcatctgagacattt

SEQ ID NO: 1590142 - DNA, 25 bp, Homo sapien
tgggtctcaaaccagcgcatctgag

SEQ ID NO: 1590143 - DNA, 25 bp, Homo sapien
caggtcttgggtctcaaaccagcgc

SEQ ID NO: 1590144 - DNA, 25 bp, Homo sapien
accagcgcatctgagacattttaac

SEQ ID NO: 1590145 - DNA, 25 bp, Homo sapien
tcccccggctctgccccgcttcaca

SEQ ID NO: 1590146 - DNA, 25 bp, Homo sapien
tgggctgggctcccccggctctgcc

SEQ ID NO: 1590147 - DNA, 25 bp, Homo sapien
gctcccccggctctgccccgcttca

SEQ ID NO: 1590148 - DNA, 25 bp, Homo sapien
cccggctctgccccgcttcacatcg

SEQ ID NO: 1590149 - DNA, 25 bp, Homo sapien
ccgagcgccagcggctcgcggcgtg

SEQ ID NO: 1590150 - DNA, 25 bp, Homo sapien
gcccgagcgccagcggctcgcggcg

SEQ ID NO: 1590151 - DNA, 25 bp, Homo sapien
gagcgccagcggctcgcggcgtgcg

SEQ ID NO: 1590152 - DNA, 25 bp, Homo sapien
gcggctcgcggcgtgcgcgcgccgg

SEQ ID NO: 1590153 - DNA, 25 bp, Homo sapien
gaggttgatattggcctctccaggg

SEQ ID NO: 1590154 - DNA, 25 bp, Homo sapien
ttaagtatccggcatgccgtagggt

SEQ ID NO: 1590155 - DNA, 25 bp, Homo sapien
cctcactgcagcccaaggtctgaag

SEQ ID NO: 1590156 - DNA, 25 bp, Homo sapien
ccgtagggttctgctgaggttgata

SEQ ID NO: 1590157 - DNA, 25 bp, Homo sapien
gacgcagggaccgtttggcttggaa

SEQ ID NO: 1590158 - DNA, 25 bp, Homo sapien
cgcagggaccgtttggcttggaact

SEQ ID NO: 1590159 - DNA, 25 bp, Homo sapien
cagggaccgtttggcttggaactct

SEQ ID NO: 1590160 - DNA, 25 bp, Homo sapien
atggacgcagggaccgtttggcttg

SEQ ID NO: 1590161 - DNA, 25 bp, Homo sapien
gtgtccccgcagctcccgggctgca

SEQ ID NO: 1590162 - DNA, 25 bp, Homo sapien
tgtgtccccgcagctcccgggctgc

SEQ ID NO: 1590163 - DNA, 25 bp, Homo sapien
gtccccgcagctcccgggctgcagc

SEQ ID NO: 1590164 - DNA, 25 bp, Homo sapien
ctgtgtccccgcagctcccgggctg

SEQ ID NO: 1590165 - DNA, 25 bp, Homo sapien
cctggagagttggactcaagcctct

SEQ ID NO: 1590166 - DNA, 25 bp, Homo sapien
tcctccttctgtcccgcattctcaa

SEQ ID NO: 1590167 - DNA, 25 bp, Homo sapien
cacttggctgtatcggggttcctcc

SEQ ID NO: 1590168 - DNA, 25 bp, Homo sapien
tctagtgaaaagatcccacacttgg

SEQ ID NO: 1590169 - DNA, 25 bp, Homo sapien
agttcaaaccctgcaatagctcctg

SEQ ID NO: 1590170 - DNA, 25 bp, Homo sapien
cccataggcagtgttgagaagtcat

SEQ ID NO: 1590171 - DNA, 25 bp, Homo sapien
taagctcaaaacctggagttgtctg

SEQ ID NO: 1590172 - DNA, 25 bp, Homo sapien
aatggcacccattgtctaagctcaa

SEQ ID NO: 1590173 - DNA, 25 bp, Homo sapien
aggaatccggactcccatagctgct

SEQ ID NO: 1590174 - DNA, 25 bp, Homo sapien
ctaggcaggaatccggactcccata

SEQ ID NO: 1590175 - DNA, 25 bp, Homo sapien
ggactcccatagctgctctgtgaat

SEQ ID NO: 1590176 - DNA, 25 bp, Homo sapien
ccatagctgctctgtgaattaagaa

SEQ ID NO: 1590177 - DNA, 25 bp, Homo sapien
tctgtggtaaattgcccatgaaagt

SEQ ID NO: 1590178 - DNA, 25 bp, Homo sapien
aaccttgctcggaggggagaagatc

SEQ ID NO: 1590179 - DNA, 25 bp, Homo sapien
taaattgcccatgaaagtaccagag

SEQ ID NO: 1590180 - DNA, 25 bp, Homo sapien
tccaataggttctgtggtaaattgc

SEQ ID NO: 1590181 - DNA, 25 bp, Homo sapien
agagaccacgggtgcctcctttgct

SEQ ID NO: 1590182 - DNA, 25 bp, Homo sapien
ctccagcggaggcatcccagacgat

SEQ ID NO: 1590183 - DNA, 25 bp, Homo sapien
acagatcccatctccagcaccgtgt

SEQ ID NO: 1590184 - DNA, 25 bp, Homo sapien
agccttctggccagagaccacgggt

SEQ ID NO: 1590185 - DNA, 25 bp, Homo sapien
gggaaggcccggcacagatgtcccc

SEQ ID NO: 1590186 - DNA, 25 bp, Homo sapien
ttttcaacttggatggtcagtttcc

SEQ ID NO: 1590187 - DNA, 25 bp, Homo sapien
tcaacttggatggtcagtttccttg

SEQ ID NO: 1590188 - DNA, 25 bp, Homo sapien
ccaaaccatccccttggcagtgccc

SEQ ID NO: 1590189 - DNA, 25 bp, Homo sapien
cccaaaccatccccttggcagtgcc

SEQ ID NO: 1590190 - DNA, 25 bp, Homo sapien
aagactgctggctgcggcaaaggat

SEQ ID NO: 1590191 - DNA, 25 bp, Homo sapien
gggaagactgctggctgcggcaaag

SEQ ID NO: 1590192 - DNA, 25 bp, Homo sapien
caccagggctgtgtcgctgtccgtg

SEQ ID NO: 1590193 - DNA, 25 bp, Homo sapien
tggctgcggcaaaggatgagtgaga

SEQ ID NO: 1590194 - DNA, 25 bp, Homo sapien
gcaatgggcccaactttctccagcc

SEQ ID NO: 1590195 - DNA, 25 bp, Homo sapien
tgcaatgggcccaactttctccagc

SEQ ID NO: 1590196 - DNA, 25 bp, Homo sapien
ctgcaatgggcccaactttctccag

SEQ ID NO: 1590197 - DNA, 25 bp, Homo sapien
catgtgactgaaggacgcagatggc

SEQ ID NO: 1590198 - DNA, 25 bp, Homo sapien
ccctgagagggaattggttccacct

SEQ ID NO: 1590199 - DNA, 25 bp, Homo sapien
tctaggcatcatagcttggagggcc

SEQ ID NO: 1590200 - DNA, 25 bp, Homo sapien
gacacagaactcgagaactgggctt

SEQ ID NO: 1590201 - DNA, 25 bp, Homo sapien
gggaggaatgctgcggtctcgggca

SEQ ID NO: 1590202 - DNA, 25 bp, Homo sapien
gaccatgcgcgctccctggaattct

SEQ ID NO: 1590203 - DNA, 25 bp, Homo sapien
tccacaaacggaggtgtgttctgag

SEQ ID NO: 1590204 - DNA, 25 bp, Homo sapien
cacttgtgggtgcttcgaggatgtc

SEQ ID NO: 1590205 - DNA, 25 bp, Homo sapien
atgtccacattggctttgtaaccta

SEQ ID NO: 1590206 - DNA, 25 bp, Homo sapien
tgtccacattggctttgtaacctac

SEQ ID NO: 1590207 - DNA, 25 bp, Homo sapien
gatgtccacattggctttgtaacct

SEQ ID NO: 1590208 - DNA, 25 bp, Homo sapien
acagatgtccacattggctttgtaa

SEQ ID NO: 1590209 - DNA, 25 bp, Homo sapien
ttgctgggggcttgaccctgcagcc

SEQ ID NO: 1590210 - DNA, 25 bp, Homo sapien
gtctttgcagccagcgggtatccag

SEQ ID NO: 1590211 - DNA, 25 bp, Homo sapien
aatcactgatctcgtctcccctgag

SEQ ID NO: 1590212 - DNA, 25 bp, Homo sapien
tgaccccagggctcgattgagtctt

SEQ ID NO: 1590213 - DNA, 25 bp, Homo sapien
gagcctgaccgctacatttgtccct

SEQ ID NO: 1590214 - DNA, 25 bp, Homo sapien
gccaacccgagcctgaccgctacat

SEQ ID NO: 1590215 - DNA, 25 bp, Homo sapien
acagccaacccgagcctgaccgcta

SEQ ID NO: 1590216 - DNA, 25 bp, Homo sapien
acccgagcctgaccgctacatttgt

SEQ ID NO: 1590217 - DNA, 25 bp, Homo sapien
ccaggactatggtctcatcagaggc

SEQ ID NO: 1590218 - DNA, 25 bp, Homo sapien
ttacagttttggtgtcaaccaggac

SEQ ID NO: 1590219 - DNA, 25 bp, Homo sapien
tctcgggttgctagcaggattcatt

SEQ ID NO: 1590220 - DNA, 25 bp, Homo sapien
gattgggaatctgagcatggcttag

SEQ ID NO: 1590221 - DNA, 25 bp, Homo sapien
tgattcaccgatcgcatctgccacg

SEQ ID NO: 1590222 - DNA, 25 bp, Homo sapien
tcagctattatgattcaccgatcgc

SEQ ID NO: 1590223 - DNA, 25 bp, Homo sapien
ccacgggacatcaggcctcggtggg

SEQ ID NO: 1590224 - DNA, 25 bp, Homo sapien
tattatgattcaccgatcgcatctg

SEQ ID NO: 1590225 - DNA, 25 bp, Homo sapien
agctggcctcatcccaggtctgagg

SEQ ID NO: 1590226 - DNA, 25 bp, Homo sapien
gctggcctcatcccaggtctgaggg

SEQ ID NO: 1590227 - DNA, 25 bp, Homo sapien
gagctggcctcatcccaggtctgag

SEQ ID NO: 1590228 - DNA, 25 bp, Homo sapien
gaaccccgggatgaaggtagcagcc

SEQ ID NO: 1590229 - DNA, 25 bp, Homo sapien
tgtggacgtctttggcaggtacacg

SEQ ID NO: 1590230 - DNA, 25 bp, Homo sapien
aggctcaaggctcaggaaccccggg

SEQ ID NO: 1590231 - DNA, 25 bp, Homo sapien
gtacacgcgtgtgcccgcatgcaca

SEQ ID NO: 1590232 - DNA, 25 bp, Homo sapien
cttcgtgggaagccaccattccaac

SEQ ID NO: 1590233 - DNA, 25 bp, Homo sapien
cactcgggcaccgtagctgtggttc

SEQ ID NO: 1590234 - DNA, 25 bp, Homo sapien
ccactgtcatgctgatgggaaccca

SEQ ID NO: 1590235 - DNA, 25 bp, Homo sapien
ctcccgtcacgaagtcccagactcc

SEQ ID NO: 1590236 - DNA, 25 bp, Homo sapien
atccacagcgctatcgggcactcgg

SEQ ID NO: 1590237 - DNA, 25 bp, Homo sapien
cccaggtgttaaggtcagaagtgaa

SEQ ID NO: 1590238 - DNA, 25 bp, Homo sapien
cccgacctagctcccaggtgttaag

SEQ ID NO: 1590239 - DNA, 25 bp, Homo sapien
tagctcccaggtgttaaggtcagaa

SEQ ID NO: 1590240 - DNA, 25 bp, Homo sapien
gtgttaaggtcagaagtgaatgcac

SEQ ID NO: 1590241 - DNA, 25 bp, Homo sapien
gaagagcgtgttgccccaagtggcc

SEQ ID NO: 1590242 - DNA, 25 bp, Homo sapien
gaggaagagcgtgttgccccaagtg

SEQ ID NO: 1590243 - DNA, 25 bp, Homo sapien
gttgccccaagtggcccagcagagc

SEQ ID NO: 1590244 - DNA, 25 bp, Homo sapien
agcgtgttgccccaagtggcccagc

SEQ ID NO: 1590245 - DNA, 25 bp, Homo sapien
tggcaaggtcagaaccagcactaac

SEQ ID NO: 1590246 - DNA, 25 bp, Homo sapien
gaaccagcactaacttgtatgggag

SEQ ID NO: 1590247 - DNA, 25 bp, Homo sapien
cctctgcagctgggtcctcttgtgc

SEQ ID NO: 1590248 - DNA, 25 bp, Homo sapien
cactaacttgtatgggagctgttgg

SEQ ID NO: 1590249 - DNA, 25 bp, Homo sapien
gggtcaactggagtaacagtgtcac

SEQ ID NO: 1590250 - DNA, 25 bp, Homo sapien
tttcacagcccagatatgggagggg

SEQ ID NO: 1590251 - DNA, 25 bp, Homo sapien
cctggggtcaactggagtaacagtg

SEQ ID NO: 1590252 - DNA, 25 bp, Homo sapien
caggattccctgagtttcacagccc

SEQ ID NO: 1590253 - DNA, 25 bp, Homo sapien
cacctggagtaacagcatgtgcaaa

SEQ ID NO: 1590254 - DNA, 25 bp, Homo sapien
gagtaacagcgtcacctggagtaac

SEQ ID NO: 1590255 - DNA, 25 bp, Homo sapien
tggagtaacagcgtcacctggagta

SEQ ID NO: 1590256 - DNA, 25 bp, Homo sapien
cagcgtcacctggagtaacagcatg

SEQ ID NO: 1590257 - DNA, 25 bp, Homo sapien
caggtcatcatcaagggacaggtcc

SEQ ID NO: 1590258 - DNA, 25 bp, Homo sapien
tgcggccccaaaggtagtgatgact

SEQ ID NO: 1590259 - DNA, 25 bp, Homo sapien
gtcaatcaagtgagacagggctcca

SEQ ID NO: 1590260 - DNA, 25 bp, Homo sapien
tctagatacacgcatgtggcccagc

SEQ ID NO: 1590261 - DNA, 25 bp, Homo sapien
gcagcagactctgctctaggaggag

SEQ ID NO: 1590262 - DNA, 25 bp, Homo sapien
agcagactctgctctaggaggagct

SEQ ID NO: 1590263 - DNA, 25 bp, Homo sapien
cagactctgctctaggaggagctcc

SEQ ID NO: 1590264 - DNA, 25 bp, Homo sapien
cagcagactctgctctaggaggagc

SEQ ID NO: 1590265 - DNA, 25 bp, Homo sapien
tagtcattggagagttcggacacga

SEQ ID NO: 1590266 - DNA, 25 bp, Homo sapien
gagctaagcaaacgcacagtctggg

SEQ ID NO: 1590267 - DNA, 25 bp, Homo sapien
tcagccaagcgggaattgcagggta

SEQ ID NO: 1590268 - DNA, 25 bp, Homo sapien
tgcctggagagtgtacacggccctc

SEQ ID NO: 1590269 - DNA, 25 bp, Homo sapien
ggaggagactgcaatcccaggtgta

SEQ ID NO: 1590270 - DNA, 25 bp, Homo sapien
cccaggtgtattggagctgcagaga

SEQ ID NO: 1590271 - DNA, 25 bp, Homo sapien
aaaatgtcctaggtccttgtcaggg

SEQ ID NO: 1590272 - DNA, 25 bp, Homo sapien
tcctgggcaagagcggaagtgcctc

SEQ ID NO: 1590273 - DNA, 25 bp, Homo sapien
caagcgattctcttggaacttggct

SEQ ID NO: 1590274 - DNA, 25 bp, Homo sapien
aagcgattctcttggaacttggctg

SEQ ID NO: 1590275 - DNA, 25 bp, Homo sapien
ttcaagcgattctcttggaacttgg

SEQ ID NO: 1590276 - DNA, 25 bp, Homo sapien
gcgattctcttggaacttggctgtt

SEQ ID NO: 1590277 - DNA, 25 bp, Homo sapien
ctctaccccagcctattccttcagc

SEQ ID NO: 1590278 - DNA, 25 bp, Homo sapien
tggagtgagatctaggctcccggga

SEQ ID NO: 1590279 - DNA, 25 bp, Homo sapien
tattccttcagccagtacccaggtc

SEQ ID NO: 1590280 - DNA, 25 bp, Homo sapien
gaagtgccttccaaaagtgccctct

SEQ ID NO: 1590281 - DNA, 25 bp, Homo sapien
aaaacatagcccttgccttggcgtt

SEQ ID NO: 1590282 - DNA, 25 bp, Homo sapien
catagcccttgccttggcgttcaag

SEQ ID NO: 1590283 - DNA, 25 bp, Homo sapien
caggttgcagaaaaaacatagccct

SEQ ID NO: 1590284 - DNA, 25 bp, Homo sapien
acacaggttgcagaaaaaacatagc

SEQ ID NO: 1590285 - DNA, 25 bp, Homo sapien
gggattgcgggtgtgagccgctgcg

SEQ ID NO: 1590286 - DNA, 25 bp, Homo sapien
acccagactagagtgtaatggcacg

SEQ ID NO: 1590287 - DNA, 25 bp, Homo sapien
atggcacgatctcagctcactgcaa

SEQ ID NO: 1590288 - DNA, 25 bp, Homo sapien
ttgcgggtgtgagccgctgcgcctc

SEQ ID NO: 1590289 - DNA, 25 bp, Homo sapien
ctttggggacccagatatccaagtg

SEQ ID NO: 1590290 - DNA, 25 bp, Homo sapien
tctcggccatcctcgacccatttcc

SEQ ID NO: 1590291 - DNA, 25 bp, Homo sapien
agaagacgccccacttgagggtcgt

SEQ ID NO: 1590292 - DNA, 25 bp, Homo sapien
tgagtgtgggtaacggacactggag

SEQ ID NO: 1590293 - DNA, 25 bp, Homo sapien
cagccgccgcgcgttgtagtagaag

SEQ ID NO: 1590294 - DNA, 25 bp, Homo sapien
tagtagaaggcgcgcttccaggagc

SEQ ID NO: 1590295 - DNA, 25 bp, Homo sapien
tgcaccttgatgtggtagcgcttcc

SEQ ID NO: 1590296 - DNA, 25 bp, Homo sapien
tcgcgcaccgtctggtggtcgtcca

SEQ ID NO: 1590297 - DNA, 25 bp, Homo sapien
gcgcacccgcccgactagcctggcc

SEQ ID NO: 1590298 - DNA, 25 bp, Homo sapien
gcacccgcccgactagcctggccgc

SEQ ID NO: 1590299 - DNA, 25 bp, Homo sapien
ccgcgcacccgcccgactagcctgg

SEQ ID NO: 1590300 - DNA, 25 bp, Homo sapien
cccgcccgactagcctggccgcccg

SEQ ID NO: 1590301 - DNA, 25 bp, Homo sapien
aatattaggagaaaacacaggagtt

SEQ ID NO: 1590302 - DNA, 25 bp, Homo sapien
aataaactatacaaatattaggaga

SEQ ID NO: 1590303 - DNA, 25 bp, Homo sapien
aattaatcttaactgtgttaaagca

SEQ ID NO: 1590304 - DNA, 25 bp, Homo sapien
taatcttaactgtgttaaagcatat

SEQ ID NO: 1590305 - DNA, 25 bp, Homo sapien
gaagtttgagaaccgctgagctgag

SEQ ID NO: 1590306 - DNA, 25 bp, Homo sapien
tttctgaagtttgagaaccgctgag

SEQ ID NO: 1590307 - DNA, 25 bp, Homo sapien
tctgaagtttgagaaccgctgagct

SEQ ID NO: 1590308 - DNA, 25 bp, Homo sapien
cagttttctgaagtttgagaaccgc

SEQ ID NO: 1590309 - DNA, 25 bp, Homo sapien
gtatccttctcaacaatttctcact

SEQ ID NO: 1590310 - DNA, 25 bp, Homo sapien
tgtatccttctcaacaatttctcac

SEQ ID NO: 1590311 - DNA, 25 bp, Homo sapien
ctgtatccttctcaacaatttctca

SEQ ID NO: 1590312 - DNA, 25 bp, Homo sapien
tagttggagacactttgcagcagag

SEQ ID NO: 1590313 - DNA, 25 bp, Homo sapien
acactttgcagcagagtaatattac

SEQ ID NO: 1590314 - DNA, 25 bp, Homo sapien
ctagttggagacactttgcagcaga

SEQ ID NO: 1590315 - DNA, 25 bp, Homo sapien
tggagacactttgcagcagagtaat

SEQ ID NO: 1590316 - DNA, 25 bp, Homo sapien
aagatgaggctgatgggctgcacca

SEQ ID NO: 1590317 - DNA, 25 bp, Homo sapien
gccacacctgaatccgcgatctatt

SEQ ID NO: 1590318 - DNA, 25 bp, Homo sapien
agcatgatccgacccagttgttttc

SEQ ID NO: 1590319 - DNA, 25 bp, Homo sapien
tccttttagcatgatccgacccagt

SEQ ID NO: 1590320 - DNA, 25 bp, Homo sapien
gggcagctgcatctcacgaggattt

SEQ ID NO: 1590321 - DNA, 25 bp, Homo sapien
tgtacacactcacgtacgcagcttg

SEQ ID NO: 1590322 - DNA, 25 bp, Homo sapien
gggtcaactctaaaggccaagcgca

SEQ ID NO: 1590323 - DNA, 25 bp, Homo sapien
tctctggaagcactgtaggacatgt

SEQ ID NO: 1590324 - DNA, 25 bp, Homo sapien
ctgaggagaagggacctcgggctgc

SEQ ID NO: 1590325 - DNA, 25 bp, Homo sapien
cctcgggctgcagcctcagctccat

SEQ ID NO: 1590326 - DNA, 25 bp, Homo sapien
gggacctcgggctgcagcctcagct

SEQ ID NO: 1590327 - DNA, 25 bp, Homo sapien
ggacctcgggctgcagcctcagctc

SEQ ID NO: 1590328 - DNA, 25 bp, Homo sapien
gctgggctggattttaacatggctt

SEQ ID NO: 1590329 - DNA, 25 bp, Homo sapien
tctggtgtctgtggcaagctgggct

SEQ ID NO: 1590330 - DNA, 25 bp, Homo sapien
gcaagctgggctggattttaacatg

SEQ ID NO: 1590331 - DNA, 25 bp, Homo sapien
ctgcctttcatgctctggtgtctgt

SEQ ID NO: 1590332 - DNA, 25 bp, Homo sapien
gaactccagcagaaccggcagttgg

SEQ ID NO: 1590333 - DNA, 25 bp, Homo sapien
gggaactccagcagaaccggcagtt

SEQ ID NO: 1590334 - DNA, 25 bp, Homo sapien
actccagcagaaccggcagttggag

SEQ ID NO: 1590335 - DNA, 25 bp, Homo sapien
cagcagaaccggcagttggaggagg

SEQ ID NO: 1590336 - DNA, 25 bp, Homo sapien
aatggaatgcctcgttaacagaaac

SEQ ID NO: 1590337 - DNA, 25 bp, Homo sapien
atggaaaatggaatgcctcgttaac

SEQ ID NO: 1590338 - DNA, 25 bp, Homo sapien
ggaaaatggaatgcctcgttaacag

SEQ ID NO: 1590339 - DNA, 25 bp, Homo sapien
gaatgcctcgttaacagaaaccttg

SEQ ID NO: 1590340 - DNA, 25 bp, Homo sapien
tggctaccagattcaacagtgcgtc

SEQ ID NO: 1590341 - DNA, 25 bp, Homo sapien
agttcgagggaaccctggctaccag

SEQ ID NO: 1590342 - DNA, 25 bp, Homo sapien
caacatggtggcaggatttactttg

SEQ ID NO: 1590343 - DNA, 25 bp, Homo sapien
ccacccgaaaactcgcagcgagtgg

SEQ ID NO: 1590344 - DNA, 25 bp, Homo sapien
tgagggactctgctgccccggtcct

SEQ ID NO: 1590345 - DNA, 25 bp, Homo sapien
gtgagggactctgctgccccggtcc

SEQ ID NO: 1590346 - DNA, 25 bp, Homo sapien
cttccagtccgccacctggcaccac

SEQ ID NO: 1590347 - DNA, 25 bp, Homo sapien
aatgtccaccttgtgcaaagccgcc

SEQ ID NO: 1590348 - DNA, 25 bp, Homo sapien
agtccgccacctggcaccacgtggc

SEQ ID NO: 1590349 - DNA, 25 bp, Homo sapien
atgtccaccttgtgcaaagccgcct

SEQ ID NO: 1590350 - DNA, 25 bp, Homo sapien
catcgcacattgtattccaggtaac

SEQ ID NO: 1590351 - DNA, 25 bp, Homo sapien
acatgggttcagtaacggtcccgca

SEQ ID NO: 1590352 - DNA, 25 bp, Homo sapien
ctcagcgttttcatcgtaacatggg

SEQ ID NO: 1590353 - DNA, 25 bp, Homo sapien
ggtcccgcagcctttagagcgcttg

SEQ ID NO: 1590354 - DNA, 25 bp, Homo sapien
actccaccgcggcttgccatgtgcc

SEQ ID NO: 1590355 - DNA, 25 bp, Homo sapien
ggcttgccatgtgccccggccccga

SEQ ID NO: 1590356 - DNA, 25 bp, Homo sapien
accgcggcttgccatgtgccccggc

SEQ ID NO: 1590357 - DNA, 25 bp, Homo sapien
gccactccaccgcggcttgccatgt

SEQ ID NO: 1590358 - DNA, 25 bp, Homo sapien
ttgtgctctccccagtcacggccac

SEQ ID NO: 1590359 - DNA, 25 bp, Homo sapien
ccgcgcctgcgtccatggcaccctg

SEQ ID NO: 1590360 - DNA, 25 bp, Homo sapien
ttgccacctggcgtgctcccggcta

SEQ ID NO: 1590361 - DNA, 25 bp, Homo sapien
aggcgcgtgcctggtgctcctctag

SEQ ID NO: 1590362 - DNA, 25 bp, Homo sapien
caagggctgcatgtcaagtgggcaa

SEQ ID NO: 1590363 - DNA, 25 bp, Homo sapien
gggtcatgccacacaacaagggctg

SEQ ID NO: 1590364 - DNA, 25 bp, Homo sapien
taagcgcagaattaccatgacccag

SEQ ID NO: 1590365 - DNA, 25 bp, Homo sapien
taacacacaccgtggagggtgcgag

SEQ ID NO: 1590366 - DNA, 25 bp, Homo sapien
cactgactgcacacgtgaaacggga

SEQ ID NO: 1590367 - DNA, 25 bp, Homo sapien
gagatgagccctgaatacccaaggc

SEQ ID NO: 1590368 - DNA, 25 bp, Homo sapien
tacccaaggcttagggagaagccag

SEQ ID NO: 1590369 - DNA, 25 bp, Homo sapien
caacacccatgaactgatgagcaga

SEQ ID NO: 1590370 - DNA, 25 bp, Homo sapien
gaaaatccgagtccagtgtcctgag

SEQ ID NO: 1590371 - DNA, 25 bp, Homo sapien
gagcggaaagctcccgtgtggaacc

SEQ ID NO: 1590372 - DNA, 25 bp, Homo sapien
tatttaccataacacccagcaagcg

SEQ ID NO: 1590373 - DNA, 25 bp, Homo sapien
tgtcctgagtcccaagtggccaagc

SEQ ID NO: 1590374 - DNA, 25 bp, Homo sapien
ttcactcagcctcttgtcggagccg

SEQ ID NO: 1590375 - DNA, 25 bp, Homo sapien
cttcactcagcctcttgtcggagcc

SEQ ID NO: 1590376 - DNA, 25 bp, Homo sapien
tcactcagcctcttgtcggagccgt

SEQ ID NO: 1590377 - DNA, 25 bp, Homo sapien
cactcagcctcttgtcggagccgta

SEQ ID NO: 1590378 - DNA, 25 bp, Homo sapien
tggccaaccaactctgcacggagca

SEQ ID NO: 1590379 - DNA, 25 bp, Homo sapien
gcacatgtgggctaaacgacaacca

SEQ ID NO: 1590380 - DNA, 25 bp, Homo sapien
gctgttacaggccattactctgccg

SEQ ID NO: 1590381 - DNA, 25 bp, Homo sapien
caccaagcacggacttgaaacatgg

SEQ ID NO: 1590382 - DNA, 25 bp, Homo sapien
cgcctggctagaaatggtccgctat

SEQ ID NO: 1590383 - DNA, 25 bp, Homo sapien
gctatgcctgcacagcagtacagtg

SEQ ID NO: 1590384 - DNA, 25 bp, Homo sapien
tctctgggatcaagcggccgcctgg

SEQ ID NO: 1590385 - DNA, 25 bp, Homo sapien
tgctgacttggttgccacctctctg

SEQ ID NO: 1590386 - DNA, 25 bp, Homo sapien
tgcccatcccggtggtctcccatca

SEQ ID NO: 1590387 - DNA, 25 bp, Homo sapien
tggtctcccatcattggcctcgaac

SEQ ID NO: 1590388 - DNA, 25 bp, Homo sapien
catcccggtggtctcccatcattgg

SEQ ID NO: 1590389 - DNA, 25 bp, Homo sapien
cggtggtctcccatcattggcctcg

SEQ ID NO: 1590390 - DNA, 25 bp, Homo sapien
tgcaggtcaggcaagtttcgcgact

SEQ ID NO: 1590391 - DNA, 25 bp, Homo sapien
tctgacattccgactgaaggagcca

SEQ ID NO: 1590392 - DNA, 25 bp, Homo sapien
tttggtctgacccaatgcgtgggac

SEQ ID NO: 1590393 - DNA, 25 bp, Homo sapien
ccagcagaattaagagtgtggcctc

SEQ ID NO: 1590394 - DNA, 25 bp, Homo sapien
gggaaagtctgcacgatatcggtcc

SEQ ID NO: 1590395 - DNA, 25 bp, Homo sapien
atcgaagtcgtgaaagcggtggtct

SEQ ID NO: 1590396 - DNA, 25 bp, Homo sapien
tggccccggtctcgatgatcgaagt

SEQ ID NO: 1590397 - DNA, 25 bp, Homo sapien
cacacgctttccttctggccaatag

SEQ ID NO: 1590398 - DNA, 25 bp, Homo sapien
tcaagtttcccagaataactcaagt

SEQ ID NO: 1590399 - DNA, 25 bp, Homo sapien
cagccatcaagtttcccagaataac

SEQ ID NO: 1590400 - DNA, 25 bp, Homo sapien
ccagaataactcaagttcaggaaga

SEQ ID NO: 1590401 - DNA, 25 bp, Homo sapien
gtttcccagaataactcaagttcag

SEQ ID NO: 1590402 - DNA, 25 bp, Homo sapien
gccgctcctgctcgtaacgcagctg

SEQ ID NO: 1590403 - DNA, 25 bp, Homo sapien
tggaaggcctcgaggcgttgctccc

SEQ ID NO: 1590404 - DNA, 25 bp, Homo sapien
gagctgcaggcgttcccgctgtagc

SEQ ID NO: 1590405 - DNA, 25 bp, Homo sapien
ctggcgctggcactcgagctgcagg

SEQ ID NO: 1590406 - DNA, 25 bp, Homo sapien
gggccaaggtccaacatcagaggag

SEQ ID NO: 1590407 - DNA, 25 bp, Homo sapien
gcatcccgacatgaaaaggccgaat

SEQ ID NO: 1590408 - DNA, 25 bp, Homo sapien
gaaaatagactttgagccagcagaa

SEQ ID NO: 1590409 - DNA, 25 bp, Homo sapien
gagccgcggcaaaatgacaactgga

SEQ ID NO: 1590410 - DNA, 25 bp, Homo sapien
tctgacttgcgatcctgactcttgg

SEQ ID NO: 1590411 - DNA, 25 bp, Homo sapien
tttcgcggatctcccgttcccgctg

SEQ ID NO: 1590412 - DNA, 25 bp, Homo sapien
cgccgcctctccgtttcgcggatct

SEQ ID NO: 1590413 - DNA, 25 bp, Homo sapien
tgattttatcaaacgacaagatgtc

SEQ ID NO: 1590414 - DNA, 25 bp, Homo sapien
ttttcacgctaatgacgggctctcc

SEQ ID NO: 1590415 - DNA, 25 bp, Homo sapien
gacctgcttgtggttttcacgctaa

SEQ ID NO: 1590416 - DNA, 25 bp, Homo sapien
acgggctctcctttcgatttatcca

SEQ ID NO: 1590417 - DNA, 25 bp, Homo sapien
gatttatccatcacgaccgtccgct

SEQ ID NO: 1590418 - DNA, 25 bp, Homo sapien
ctctagaccgatttgtaggtccggg

SEQ ID NO: 1590419 - DNA, 25 bp, Homo sapien
cgatttgtaggtccgggtttcagct

SEQ ID NO: 1590420 - DNA, 25 bp, Homo sapien
taggtccgggtttcagctcatcctg

SEQ ID NO: 1590421 - DNA, 25 bp, Homo sapien
tgatttggtgactctagaccgattt

SEQ ID NO: 1590422 - DNA, 25 bp, Homo sapien
ccgacccaggcagggttcccggcag

SEQ ID NO: 1590423 - DNA, 25 bp, Homo sapien
gcctctcctccaaccgacccaggca

SEQ ID NO: 1590424 - DNA, 25 bp, Homo sapien
gggttcccggcagagctccagccat

SEQ ID NO: 1590425 - DNA, 25 bp, Homo sapien
tgttggcctctcctccaaccgaccc

SEQ ID NO: 1590426 - DNA, 25 bp, Homo sapien
tgggattacccctgacatttacatg

SEQ ID NO: 1590427 - DNA, 25 bp, Homo sapien
catccaagatggcaaaggctagccc

SEQ ID NO: 1590428 - DNA, 25 bp, Homo sapien
ttcacaaggccaaccactaatctag

SEQ ID NO: 1590429 - DNA, 25 bp, Homo sapien
aaaaagcatcatccctaggtgttgg

SEQ ID NO: 1590430 - DNA, 25 bp, Homo sapien
gtcgacactcgataatttttccttc

SEQ ID NO: 1590431 - DNA, 25 bp, Homo sapien
ttccttcttcacttcgcactctttt

SEQ ID NO: 1590432 - DNA, 25 bp, Homo sapien
ttcacttcgcactcttttctgtcgg

SEQ ID NO: 1590433 - DNA, 25 bp, Homo sapien
cagaatgatgtctgtcgacactcga

SEQ ID NO: 1590434 - DNA, 25 bp, Homo sapien
ttgcaaactccatttgcgagttacc

SEQ ID NO: 1590435 - DNA, 25 bp, Homo sapien
catttgcgagttaccatagacgaga

SEQ ID NO: 1590436 - DNA, 25 bp, Homo sapien
gagttaccatagacgagaactgcct

SEQ ID NO: 1590437 - DNA, 25 bp, Homo sapien
ttaccatagacgagaactgcctcac

SEQ ID NO: 1590438 - DNA, 25 bp, Homo sapien
gatgcacttggtcgcctcgtcagat

SEQ ID NO: 1590439 - DNA, 25 bp, Homo sapien
gagatcattcgtccatgcagctcag

SEQ ID NO: 1590440 - DNA, 25 bp, Homo sapien
tgacgaatccatagcatcgagcccc

SEQ ID NO: 1590441 - DNA, 25 bp, Homo sapien
gctgcgggcgttcgttaccactttg

SEQ ID NO: 1590442 - DNA, 25 bp, Homo sapien
cttcatgaaaaagggcactcttact

SEQ ID NO: 1590443 - DNA, 25 bp, Homo sapien
gggcactcttactctctcatacaaa

SEQ ID NO: 1590444 - DNA, 25 bp, Homo sapien
gaaaaagggcactcttactctctca

SEQ ID NO: 1590445 - DNA, 25 bp, Homo sapien
aagggcactcttactctctcataca

SEQ ID NO: 1590446 - DNA, 25 bp, Homo sapien
acccagccactaaatacaactgctt

SEQ ID NO: 1590447 - DNA, 25 bp, Homo sapien
cccagccactaaatacaactgcttt

SEQ ID NO: 1590448 - DNA, 25 bp, Homo sapien
ccgcacccagccactaaatacaact

SEQ ID NO: 1590449 - DNA, 25 bp, Homo sapien
gcacccagccactaaatacaactgc

SEQ ID NO: 1590450 - DNA, 25 bp, Homo sapien
tggccccaactgtgaaatgacaagg

SEQ ID NO: 1590451 - DNA, 25 bp, Homo sapien
tcagggcatcaacctaagcaaggca

SEQ ID NO: 1590452 - DNA, 25 bp, Homo sapien
cactggcgcgcagagtaaacatttc

SEQ ID NO: 1590453 - DNA, 25 bp, Homo sapien
tgaggttcccatctgacgtccttgg

SEQ ID NO: 1590454 - DNA, 25 bp, Homo sapien
cccatacttgctgaaaaggttcttg

SEQ ID NO: 1590455 - DNA, 25 bp, Homo sapien
aggttccgaccagaaccgctgccga

SEQ ID NO: 1590456 - DNA, 25 bp, Homo sapien
cttgagatccgtagcgcgtgttgtg

SEQ ID NO: 1590457 - DNA, 25 bp, Homo sapien
tgttgtggaggacagcccgctgacc

SEQ ID NO: 1590458 - DNA, 25 bp, Homo sapien
cgcccaatcccaactgctgacttaa

SEQ ID NO: 1590459 - DNA, 25 bp, Homo sapien
gcatcaccccaaggcctaacaggaa

SEQ ID NO: 1590460 - DNA, 25 bp, Homo sapien
agggagattcttaggcatcacccca

SEQ ID NO: 1590461 - DNA, 25 bp, Homo sapien
acaggaagcacaaccattcttaaga

SEQ ID NO: 1590462 - DNA, 25 bp, Homo sapien
aatgattggctttatatctttttct

SEQ ID NO: 1590463 - DNA, 25 bp, Homo sapien
ctttttcatctttaatgattggctt

SEQ ID NO: 1590464 - DNA, 25 bp, Homo sapien
tcatctttaatgattggctttatat

SEQ ID NO: 1590465 - DNA, 25 bp, Homo sapien
taatgattggctttatatctttttc

SEQ ID NO: 1590466 - DNA, 25 bp, Homo sapien
aaagttaatgttactcatacaggaa

SEQ ID NO: 1590467 - DNA, 25 bp, Homo sapien
caattcgatttagctgaagataaca

SEQ ID NO: 1590468 - DNA, 25 bp, Homo sapien
aattttaacagacacctctgcaagc

SEQ ID NO: 1590469 - DNA, 25 bp, Homo sapien
gattatgtgctaaaactgaatacct

SEQ ID NO: 1590470 - DNA, 25 bp, Homo sapien
tgatcagcgccctcactggttgagg

SEQ ID NO: 1590471 - DNA, 25 bp, Homo sapien
ctttaggagccggagggacttcatt

SEQ ID NO: 1590472 - DNA, 25 bp, Homo sapien
gaggccgcactactctgctcaactg

SEQ ID NO: 1590473 - DNA, 25 bp, Homo sapien
tccgtgggtgcttctgcgagctcct

SEQ ID NO: 1590474 - DNA, 25 bp, Homo sapien
tgtctgccttgctcgactgagcgtg

SEQ ID NO: 1590475 - DNA, 25 bp, Homo sapien
taaatcaccctcttccggatgggcg

SEQ ID NO: 1590476 - DNA, 25 bp, Homo sapien
gatgggcgctgtcaaataggtcctc

SEQ ID NO: 1590477 - DNA, 25 bp, Homo sapien
tgtgctgttgactcgctggccaaat

SEQ ID NO: 1590478 - DNA, 25 bp, Homo sapien
cagaatctcttctgacggtgggaga

SEQ ID NO: 1590479 - DNA, 25 bp, Homo sapien
tagaaacacatggaggaatcacggg

SEQ ID NO: 1590480 - DNA, 25 bp, Homo sapien
caaggtgctgaaccgaatgcaatca

SEQ ID NO: 1590481 - DNA, 25 bp, Homo sapien
agatttaaacacctacaaccacgcg

SEQ ID NO: 1590482 - DNA, 25 bp, Homo sapien
ggctccaaaagggattcttcaatgt

SEQ ID NO: 1590483 - DNA, 25 bp, Homo sapien
ctggctccaaaagggattcttcaat

SEQ ID NO: 1590484 - DNA, 25 bp, Homo sapien
gctccaaaagggattcttcaatgtc

SEQ ID NO: 1590485 - DNA, 25 bp, Homo sapien
tggctccaaaagggattcttcaatg

SEQ ID NO: 1590486 - DNA, 25 bp, Homo sapien
actttgaagttcaacgatgaagttt

SEQ ID NO: 1590487 - DNA, 25 bp, Homo sapien
tttgaagttcaacgatgaagtttcc

SEQ ID NO: 1590488 - DNA, 25 bp, Homo sapien
agttcaacgatgaagtttccaaagt

SEQ ID NO: 1590489 - DNA, 25 bp, Homo sapien
gaagttcaacgatgaagtttccaaa

SEQ ID NO: 1590490 - DNA, 25 bp, Homo sapien
ggctgagccgggagctgtctcagct

SEQ ID NO: 1590491 - DNA, 25 bp, Homo sapien
tcagctgtgcagccacgtattcttt

SEQ ID NO: 1590492 - DNA, 25 bp, Homo sapien
cagctgtgcagccacgtattcttta

SEQ ID NO: 1590493 - DNA, 25 bp, Homo sapien
ggagcactgctattcgccacttcag

SEQ ID NO: 1590494 - DNA, 25 bp, Homo sapien
aaggaatcgagaaggccgtccgtgc

SEQ ID NO: 1590495 - DNA, 25 bp, Homo sapien
catgcccatattctgcaggttctcc

SEQ ID NO: 1590496 - DNA, 25 bp, Homo sapien
tcagtttcgtctagcacactcatgt

SEQ ID NO: 1590497 - DNA, 25 bp, Homo sapien
tctggaatcgtcttccaggccatta

SEQ ID NO: 1590498 - DNA, 25 bp, Homo sapien
tgcccgtctctggaatcgtcttcca

SEQ ID NO: 1590499 - DNA, 25 bp, Homo sapien
gaatcgtcttccaggccattatctt

SEQ ID NO: 1590500 - DNA, 25 bp, Homo sapien
gtctctggaatcgtcttccaggcca

SEQ ID NO: 1590501 - DNA, 25 bp, Homo sapien
atggtgcccggcctcaattggtgtt

SEQ ID NO: 1590502 - DNA, 25 bp, Homo sapien
ggtgttctaagtaagccatcaacag

SEQ ID NO: 1590503 - DNA, 25 bp, Homo sapien
cctcaattggtgttctaagtaagcc

SEQ ID NO: 1590504 - DNA, 25 bp, Homo sapien
ttctaagtaagccatcaacagggag

SEQ ID NO: 1590505 - DNA, 25 bp, Homo sapien
gcaaaggctgccataaagtcgagaa

SEQ ID NO: 1590506 - DNA, 25 bp, Homo sapien
cattcagatatggttcacaaccggg

SEQ ID NO: 1590507 - DNA, 25 bp, Homo sapien
gggaacgccattagcatcagtagct

SEQ ID NO: 1590508 - DNA, 25 bp, Homo sapien
tgctaggaattgcaaaaggaggcca

SEQ ID NO: 1590509 - DNA, 25 bp, Homo sapien
aacagttgtatgtaatcacaggccc

SEQ ID NO: 1590510 - DNA, 25 bp, Homo sapien
taggactcctaatcttggtgaagac

SEQ ID NO: 1590511 - DNA, 25 bp, Homo sapien
cagaaaagctaatgtggcgcagaca

SEQ ID NO: 1590512 - DNA, 25 bp, Homo sapien
cattggccaacgaaaagctgccgct

SEQ ID NO: 1590513 - DNA, 25 bp, Homo sapien
tcaagccccaagcagcatatgtaca

SEQ ID NO: 1590514 - DNA, 25 bp, Homo sapien
aagccccaagcagcatatgtacaat

SEQ ID NO: 1590515 - DNA, 25 bp, Homo sapien
caagccccaagcagcatatgtacaa

SEQ ID NO: 1590516 - DNA, 25 bp, Homo sapien
gccccaagcagcatatgtacaatac

SEQ ID NO: 1590517 - DNA, 25 bp, Homo sapien
tggcttctaactcgatgccaatttc

SEQ ID NO: 1590518 - DNA, 25 bp, Homo sapien
tgctggtggcttctaactcgatgcc

SEQ ID NO: 1590519 - DNA, 25 bp, Homo sapien
ttcatcaggatcttgcccctcttct

SEQ ID NO: 1590520 - DNA, 25 bp, Homo sapien
tttcatcaggatcttgcccctcttc

SEQ ID NO: 1590521 - DNA, 25 bp, Homo sapien
cgggtggacagcttcgtaaaggcca

SEQ ID NO: 1590522 - DNA, 25 bp, Homo sapien
caaaatgacaacaaggggccggcca

SEQ ID NO: 1590523 - DNA, 25 bp, Homo sapien
ggacagcttcgtaaaggccaaagcc

SEQ ID NO: 1590524 - DNA, 25 bp, Homo sapien
caaggggccggccacgagaagatct

SEQ ID NO: 1590525 - DNA, 25 bp, Homo sapien
atcgatcacccgcagctcgctgagc

SEQ ID NO: 1590526 - DNA, 25 bp, Homo sapien
tcttgttgccgcccgtgtccaggtt

SEQ ID NO: 1590527 - DNA, 25 bp, Homo sapien
tccgcaacgcccgggccgagagaag

SEQ ID NO: 1590528 - DNA, 25 bp, Homo sapien
gagtcgcccgacccgggcagagtct

SEQ ID NO: 1590529 - DNA, 25 bp, Homo sapien
agtcgcacaccgccggcagctatag

SEQ ID NO: 1590530 - DNA, 25 bp, Homo sapien
accgccggcagctatagcggctctg

SEQ ID NO: 1590531 - DNA, 25 bp, Homo sapien
gtcgcgttcccgtcttcgccaccga

SEQ ID NO: 1590532 - DNA, 25 bp, Homo sapien
cagctatagcggctctgaacacaaa

SEQ ID NO: 1590533 - DNA, 25 bp, Homo sapien
ctgtggaaagtgggcggcggagcca

SEQ ID NO: 1590534 - DNA, 25 bp, Homo sapien
tgccggtactcgctcggtgaagtaa

SEQ ID NO: 1590535 - DNA, 25 bp, Homo sapien
cacggtttgccggtactcgctcggt

SEQ ID NO: 1590536 - DNA, 25 bp, Homo sapien
ggtactcgctcggtgaagtaacgtg

SEQ ID NO: 1590537 - DNA, 25 bp, Homo sapien
ctcgctcggtgaagtaacgtggcag

SEQ ID NO: 1590538 - DNA, 25 bp, Homo sapien
ctcaagggtggatagttgtctcggc

SEQ ID NO: 1590539 - DNA, 25 bp, Homo sapien
gattctctttactcagataaggcag

SEQ ID NO: 1590540 - DNA, 25 bp, Homo sapien
ttcactatggattctctttactcag

SEQ ID NO: 1590541 - DNA, 25 bp, Homo sapien
ttgtctcggccagagtcacatgggc

SEQ ID NO: 1590542 - DNA, 25 bp, Homo sapien
aaaaaacccgtgatcttgctataca

SEQ ID NO: 1590543 - DNA, 25 bp, Homo sapien
caacattcagtgtttgcacgaacca

SEQ ID NO: 1590544 - DNA, 25 bp, Homo sapien
atcactcggtacttccaacattcag

SEQ ID NO: 1590545 - DNA, 25 bp, Homo sapien
ttctagactccaaggatatggccct

SEQ ID NO: 1590546 - DNA, 25 bp, Homo sapien
tagatttggccagcgagtcaacagc

SEQ ID NO: 1590547 - DNA, 25 bp, Homo sapien
gaagaggacctatttgacagcgccc

SEQ ID NO: 1590548 - DNA, 25 bp, Homo sapien
agttgagcagagtagtgcggcctcc

SEQ ID NO: 1590549 - DNA, 25 bp, Homo sapien
gaagaaagttccgagctggagcagc

SEQ ID NO: 1590550 - DNA, 25 bp, Homo sapien
tgtgtgtttaattattgaaggaaaa

SEQ ID NO: 1590551 - DNA, 25 bp, Homo sapien
tgggaactcattgtgtgtttaatta

SEQ ID NO: 1590552 - DNA, 25 bp, Homo sapien
ttgggaactcattgtgtgtttaatt

SEQ ID NO: 1590553 - DNA, 25 bp, Homo sapien
cattgtgtgtttaattattgaagga

SEQ ID NO: 1590554 - DNA, 25 bp, Homo sapien
aattatgataagcaaaatgtaaggc

SEQ ID NO: 1590555 - DNA, 25 bp, Homo sapien
cacatctgatggttaggcatggata

SEQ ID NO: 1590556 - DNA, 25 bp, Homo sapien
gtttggattaaacagctcatctgtt

SEQ ID NO: 1590557 - DNA, 25 bp, Homo sapien
agttattcatcacataggacctcca

SEQ ID NO: 1590558 - DNA, 25 bp, Homo sapien
cacctcatcctccaaagtaactgag

SEQ ID NO: 1590559 - DNA, 25 bp, Homo sapien
gacggagtctcagtcagtcactcag

SEQ ID NO: 1590560 - DNA, 25 bp, Homo sapien
gtgtagtggcgcgtcctcggttcac

SEQ ID NO: 1590561 - DNA, 25 bp, Homo sapien
gagtgtagtggcgcgtcctcggttc

SEQ ID NO: 1590562 - DNA, 25 bp, Homo sapien
gaagcggtccgtcgtgtcctttgat

SEQ ID NO: 1590563 - DNA, 25 bp, Homo sapien
tttgataaggtcaaggagcctcgga

SEQ ID NO: 1590564 - DNA, 25 bp, Homo sapien
caaaagccaggatcgcaaatcagcc

SEQ ID NO: 1590565 - DNA, 25 bp, Homo sapien
cataggtgagtagggatccaggaac

SEQ ID NO: 1590566 - DNA, 25 bp, Homo sapien
catccaccgtgagcgcgaggagctg

SEQ ID NO: 1590567 - DNA, 25 bp, Homo sapien
gcgcgagcaggagcgcatccaccgt

SEQ ID NO: 1590568 - DNA, 25 bp, Homo sapien
caggaactgcgctatgagcaggagc

SEQ ID NO: 1590569 - DNA, 25 bp, Homo sapien
gcgaacaacgcatgcaggcgcagtg

SEQ ID NO: 1590570 - DNA, 25 bp, Homo sapien
agatgatgcctattggccggaagcc

SEQ ID NO: 1590571 - DNA, 25 bp, Homo sapien
tgcctattggccggaagccaagcgg

SEQ ID NO: 1590572 - DNA, 25 bp, Homo sapien
ctattggccggaagccaagcgggcc

SEQ ID NO: 1590573 - DNA, 25 bp, Homo sapien
atgatgcctattggccggaagccaa

SEQ ID NO: 1590574 - DNA, 25 bp, Homo sapien
caatggttccatgtaaaggctccag

SEQ ID NO: 1590575 - DNA, 25 bp, Homo sapien
gaaccttgggatgtgacctggctct

SEQ ID NO: 1590576 - DNA, 25 bp, Homo sapien
caactagatctgtggtctgtgctca

SEQ ID NO: 1590577 - DNA, 25 bp, Homo sapien
tattcctcctacaaagggtgcggtg

SEQ ID NO: 1590578 - DNA, 25 bp, Homo sapien
gagggattcactctccagaagccgc

SEQ ID NO: 1590579 - DNA, 25 bp, Homo sapien
tgatgtccagcattacccagaacgc

SEQ ID NO: 1590580 - DNA, 25 bp, Homo sapien
tgtgtgaaccgatacagcctgccag

SEQ ID NO: 1590581 - DNA, 25 bp, Homo sapien
tactgttggctctgggaactaacca

SEQ ID NO: 1590582 - DNA, 25 bp, Homo sapien
gggcatgatggacagggatcacaag

SEQ ID NO: 1590583 - DNA, 25 bp, Homo sapien
ggggcatgatggacagggatcacaa

SEQ ID NO: 1590584 - DNA, 25 bp, Homo sapien
gggggcatgatggacagggatcaca

SEQ ID NO: 1590585 - DNA, 25 bp, Homo sapien
ccacatgatgaaccgaggaggaatg

SEQ ID NO: 1590586 - DNA, 25 bp, Homo sapien
atgatgaaccgaggaggaatgtcag

SEQ ID NO: 1590587 - DNA, 25 bp, Homo sapien
ggccacatgatgaaccgaggaggaa

SEQ ID NO: 1590588 - DNA, 25 bp, Homo sapien
acatgatgaaccgaggaggaatgtc

SEQ ID NO: 1590589 - DNA, 25 bp, Homo sapien
ccatcccacacggtggcatgcaggg

SEQ ID NO: 1590590 - DNA, 25 bp, Homo sapien
tcctgtctcgtggcaacaaggctat

SEQ ID NO: 1590591 - DNA, 25 bp, Homo sapien
cactcgccgctactgagtacttgga

SEQ ID NO: 1590592 - DNA, 25 bp, Homo sapien
catgcagggcgggtttggaggccag

SEQ ID NO: 1590593 - DNA, 25 bp, Homo sapien
tgcatcacctacatggacctacgaa

SEQ ID NO: 1590594 - DNA, 25 bp, Homo sapien
tatcagccccagttaacagaagaga

SEQ ID NO: 1590595 - DNA, 25 bp, Homo sapien
tgtacctgtaagaaccaaatgccca

SEQ ID NO: 1590596 - DNA, 25 bp, Homo sapien
gcaatgattctaaaccctaactgca

SEQ ID NO: 1590597 - DNA, 25 bp, Homo sapien
ctgggttcatgacattctcccgccc

SEQ ID NO: 1590598 - DNA, 25 bp, Homo sapien
cctgggttcatgacattctcccgcc

SEQ ID NO: 1590599 - DNA, 25 bp, Homo sapien
gggttcatgacattctcccgcccca

SEQ ID NO: 1590600 - DNA, 25 bp, Homo sapien
tgggttcatgacattctcccgcccc

SEQ ID NO: 1590601 - DNA, 25 bp, Homo sapien
cctccggtggcatcagtgccaccag

SEQ ID NO: 1590602 - DNA, 25 bp, Homo sapien
ccaggatgaggacgggaggggtctt

SEQ ID NO: 1590603 - DNA, 25 bp, Homo sapien
ggaggggtcttactctcctgcaagg

SEQ ID NO: 1590604 - DNA, 25 bp, Homo sapien
atgaaggacaccagccctccggtgg

SEQ ID NO: 1590605 - DNA, 25 bp, Homo sapien
acttctgaagtcctttattgggccg

SEQ ID NO: 1590606 - DNA, 25 bp, Homo sapien
cttctgaagtcctttattgggccgg

SEQ ID NO: 1590607 - DNA, 25 bp, Homo sapien
ggtcccagtccggagtcttcaggtc

SEQ ID NO: 1590608 - DNA, 25 bp, Homo sapien
cagtccggagtcttcaggtcagtgg

SEQ ID NO: 1590609 - DNA, 25 bp, Homo sapien
gtggggtcccagtccggagtcttca

SEQ ID NO: 1590610 - DNA, 25 bp, Homo sapien
cccagtccggagtcttcaggtcagt

SEQ ID NO: 1590611 - DNA, 25 bp, Homo sapien
tccttggagtactcgcgggccttgg

SEQ ID NO: 1590612 - DNA, 25 bp, Homo sapien
cgcgccttcacatactcccagccct

SEQ ID NO: 1590613 - DNA, 25 bp, Homo sapien
acagagctgacatcaccgtcatgat

SEQ ID NO: 1590614 - DNA, 25 bp, Homo sapien
ttggagtactcgcgggccttggagg

SEQ ID NO: 1590615 - DNA, 25 bp, Homo sapien
actacaagtgcgccaccataccagg

SEQ ID NO: 1590616 - DNA, 25 bp, Homo sapien
ccactgtgctcggcctcctttccct

SEQ ID NO: 1590617 - DNA, 25 bp, Homo sapien
tgtgctcggcctcctttccctttta

SEQ ID NO: 1590618 - DNA, 25 bp, Homo sapien
tgctcggcctcctttcccttttaga

SEQ ID NO: 1590619 - DNA, 25 bp, Homo sapien
actgtgctcggcctcctttcccttt

SEQ ID NO: 1590620 - DNA, 25 bp, Homo sapien
ctaagagacacgtgtcgggcaggaa

SEQ ID NO: 1590621 - DNA, 25 bp, Homo sapien
tagactggggtgtctccctccaagc

SEQ ID NO: 1590622 - DNA, 25 bp, Homo sapien
gacagaaaggaatggccaggaagtg

SEQ ID NO: 1590623 - DNA, 25 bp, Homo sapien
tctccctccaagcaaagaaactggg

SEQ ID NO: 1590624 - DNA, 25 bp, Homo sapien
ccaggagtcacggatgggaaagtaa

SEQ ID NO: 1590625 - DNA, 25 bp, Homo sapien
ggagtcacggatgggaaagtaaatc

SEQ ID NO: 1590626 - DNA, 25 bp, Homo sapien
agtcacggatgggaaagtaaatctt

SEQ ID NO: 1590627 - DNA, 25 bp, Homo sapien
cacggatgggaaagtaaatctttgg

SEQ ID NO: 1590628 - DNA, 25 bp, Homo sapien
tatggaggacaacatcgtgcagggc

SEQ ID NO: 1590629 - DNA, 25 bp, Homo sapien
gagaatcaggtcagcatcaatatgg

SEQ ID NO: 1590630 - DNA, 25 bp, Homo sapien
gacaggccggagaatcaggtcagca

SEQ ID NO: 1590631 - DNA, 25 bp, Homo sapien
cagaaagaactggtgaaaaggctca

SEQ ID NO: 1590632 - DNA, 25 bp, Homo sapien
aggcctgtctgctgacacacgtact

SEQ ID NO: 1590633 - DNA, 25 bp, Homo sapien
ctcctggtcgtacaccaggtagacg

SEQ ID NO: 1590634 - DNA, 25 bp, Homo sapien
gctgcctggctcttgtcgctgggcc

SEQ ID NO: 1590635 - DNA, 25 bp, Homo sapien
cctggtcgtacaccaggtagacggc

SEQ ID NO: 1590636 - DNA, 25 bp, Homo sapien
agaaaccaagtgtccctgggcgcct

SEQ ID NO: 1590637 - DNA, 25 bp, Homo sapien
actcgcagctccgagcacgcattca

SEQ ID NO: 1590638 - DNA, 25 bp, Homo sapien
cagccctggagaaaccaagtgtccc

SEQ ID NO: 1590639 - DNA, 25 bp, Homo sapien
cttctagaagccttccagccctgga

SEQ ID NO: 1590640 - DNA, 25 bp, Homo sapien
tcatccacgccagcggcaggattca

SEQ ID NO: 1590641 - DNA, 25 bp, Homo sapien
gcggcaggattcaccggcattccca

SEQ ID NO: 1590642 - DNA, 25 bp, Homo sapien
tctcatccacgccagcggcaggatt

SEQ ID NO: 1590643 - DNA, 25 bp, Homo sapien
acgccagcggcaggattcaccggca

SEQ ID NO: 1590644 - DNA, 25 bp, Homo sapien
gcggaggctgacaccgcgaactgaa

SEQ ID NO: 1590645 - DNA, 25 bp, Homo sapien
tgacaccgcgaactgaacgccaagg

SEQ ID NO: 1590646 - DNA, 25 bp, Homo sapien
ccgcgaactgaacgccaagggctcg

SEQ ID NO: 1590647 - DNA, 25 bp, Homo sapien
cggaggcggaggctgacaccgcgaa

SEQ ID NO: 1590648 - DNA, 25 bp, Homo sapien
tcatcagcgaccacacccgggccac

SEQ ID NO: 1590649 - DNA, 25 bp, Homo sapien
ctcatcagcgaccacacccgggcca

SEQ ID NO: 1590650 - DNA, 25 bp, Homo sapien
catcagcgaccacacccgggccacc

SEQ ID NO: 1590651 - DNA, 25 bp, Homo sapien
tcgtggtgtcttgcggctctgagac

SEQ ID NO: 1590652 - DNA, 25 bp, Homo sapien
gctgggaaatggacgctttaaggcc

SEQ ID NO: 1590653 - DNA, 25 bp, Homo sapien
ttgcccgacgcaaggtcctctggga

SEQ ID NO: 1590654 - DNA, 25 bp, Homo sapien
aaggtgtagtctttcttgcccgacg

SEQ ID NO: 1590655 - DNA, 25 bp, Homo sapien
gaagcctgaaggtgacccgaaaaca

SEQ ID NO: 1590656 - DNA, 25 bp, Homo sapien
aaacaagtcagagcccgagagatcc

SEQ ID NO: 1590657 - DNA, 25 bp, Homo sapien
tacaaggcggttgtcacggcaacga

SEQ ID NO: 1590658 - DNA, 25 bp, Homo sapien
tgggaaatgtagtcagcacggcgct

SEQ ID NO: 1590659 - DNA, 25 bp, Homo sapien
ggaagctaaggcccgccgaggtcaa

SEQ ID NO: 1590660 - DNA, 25 bp, Homo sapien
caagaaggggccgatgcgttctgca

SEQ ID NO: 1590661 - DNA, 25 bp, Homo sapien
cgctttgttcagaggggaagctaag

SEQ ID NO: 1590662 - DNA, 25 bp, Homo sapien
ctaaggcccgccgaggtcaagaagg

SEQ ID NO: 1590663 - DNA, 25 bp, Homo sapien
cacaggaccatgaaggtgcttctcc

SEQ ID NO: 1590664 - DNA, 25 bp, Homo sapien
ggaccatgaaggtgcttctcctcac

SEQ ID NO: 1590665 - DNA, 25 bp, Homo sapien
gcccacacaggaccatgaaggtgct

SEQ ID NO: 1590666 - DNA, 25 bp, Homo sapien
ccacacaggaccatgaaggtgcttc

SEQ ID NO: 1590667 - DNA, 25 bp, Homo sapien
taatcattaaatagcttctatgcca

SEQ ID NO: 1590668 - DNA, 25 bp, Homo sapien
attaaatagcttctatgccacactc

SEQ ID NO: 1590669 - DNA, 25 bp, Homo sapien
tcattaaatagcttctatgccacac

SEQ ID NO: 1590670 - DNA, 25 bp, Homo sapien
aatcattaaatagcttctatgccac

SEQ ID NO: 1590671 - DNA, 25 bp, Homo sapien
gagctgctcgctcggtggctccact

SEQ ID NO: 1590672 - DNA, 25 bp, Homo sapien
gatctgggtcactggaccgagctgc

SEQ ID NO: 1590673 - DNA, 25 bp, Homo sapien
ctccccacagcgctcagttctggcc

SEQ ID NO: 1590674 - DNA, 25 bp, Homo sapien
tccactgccaggtccgggcgcgctc

SEQ ID NO: 1590675 - DNA, 25 bp, Homo sapien
gctgccaggtcgtagaagtccttct

SEQ ID NO: 1590676 - DNA, 25 bp, Homo sapien
ggaaggcgatgtcgaagatctcccg

SEQ ID NO: 1590677 - DNA, 25 bp, Homo sapien
agatctcccggtagtgttccacgaa

SEQ ID NO: 1590678 - DNA, 25 bp, Homo sapien
caggccctcggtgatgaaggctgcc

SEQ ID NO: 1590679 - DNA, 25 bp, Homo sapien
cagagtcagggtcagccctgcctgg

SEQ ID NO: 1590680 - DNA, 25 bp, Homo sapien
gagtcagggtcagccctgcctgggc

SEQ ID NO: 1590681 - DNA, 25 bp, Homo sapien
ggcagagtcagggtcagccctgcct

SEQ ID NO: 1590682 - DNA, 25 bp, Homo sapien
gggggcagagtcagggtcagccctg

SEQ ID NO: 1590683 - DNA, 25 bp, Homo sapien
ggcttcctggggaccggcgatacac

SEQ ID NO: 1590684 - DNA, 25 bp, Homo sapien
gggaccggcgatacacagtgatgcc

SEQ ID NO: 1590685 - DNA, 25 bp, Homo sapien
aggtgtgctaacctccaggaacgaa

SEQ ID NO: 1590686 - DNA, 25 bp, Homo sapien
tgctaacctccaggaacgaaagggc

SEQ ID NO: 1590687 - DNA, 25 bp, Homo sapien
tgcagcctgcgcttgggccgtcctt

SEQ ID NO: 1590688 - DNA, 25 bp, Homo sapien
aggatcttgcccgtgagggagactt

SEQ ID NO: 1590689 - DNA, 25 bp, Homo sapien
gggagacttcgccagtcatggccag

SEQ ID NO: 1590690 - DNA, 25 bp, Homo sapien
tcatggccagattctgccggacagg

SEQ ID NO: 1590691 - DNA, 25 bp, Homo sapien
cgtctcagggatgtctccacaaaca

SEQ ID NO: 1590692 - DNA, 25 bp, Homo sapien
ctcgggcacatgcaggtggatgtgt

SEQ ID NO: 1590693 - DNA, 25 bp, Homo sapien
aggtgtaggctatgcgggcgctctc

SEQ ID NO: 1590694 - DNA, 25 bp, Homo sapien
ggctgccatccttgtcacccttggc

SEQ ID NO: 1590695 - DNA, 25 bp, Homo sapien
ttgctgcgttgcgggttcctggctc

SEQ ID NO: 1590696 - DNA, 25 bp, Homo sapien
tttgctgcgttgcgggttcctggct

SEQ ID NO: 1590697 - DNA, 25 bp, Homo sapien
gtttgctgcgttgcgggttcctggc

SEQ ID NO: 1590698 - DNA, 25 bp, Homo sapien
caaggcccatctggatgagcttgtc

SEQ ID NO: 1590699 - DNA, 25 bp, Homo sapien
agaggacacgcccagggctacaagg

SEQ ID NO: 1590700 - DNA, 25 bp, Homo sapien
cctttgccctctcgcctcctttgtg

SEQ ID NO: 1590701 - DNA, 25 bp, Homo sapien
tcgcctcctttgtgcgtggtggccc

SEQ ID NO: 1590702 - DNA, 25 bp, Homo sapien
cttccccacgaagtcctgcaggttc

SEQ ID NO: 1590703 - DNA, 25 bp, Homo sapien
gccgggcggtgtcacgtcatacatg

SEQ ID NO: 1590704 - DNA, 25 bp, Homo sapien
ggcctcgccgctgacaatcttgtag

SEQ ID NO: 1590705 - DNA, 25 bp, Homo sapien
tcatacatgcgctccacggtgaaca

SEQ ID NO: 1590706 - DNA, 25 bp, Homo sapien
caagccacacagggcgcgagcctgg

SEQ ID NO: 1590707 - DNA, 25 bp, Homo sapien
acgtccgatgacagcttggccttgc

SEQ ID NO: 1590708 - DNA, 25 bp, Homo sapien
cagtactgcttgatgagcagcgtca

SEQ ID NO: 1590709 - DNA, 25 bp, Homo sapien
tgcaggttgcggacaccgctctcgc

SEQ ID NO: 1590710 - DNA, 25 bp, Homo sapien
tgatcatctccatacggtctcgcag

SEQ ID NO: 1590711 - DNA, 25 bp, Homo sapien
ctgggccacgtagcccgacacgttg

SEQ ID NO: 1590712 - DNA, 25 bp, Homo sapien
tagcccgacacgttgatcatctcca

SEQ ID NO: 1590713 - DNA, 25 bp, Homo sapien
tgtccgtgacgttggccgtgcagat

SEQ ID NO: 1590714 - DNA, 25 bp, Homo sapien
acgggcacgtccaggtagtggtcca

SEQ ID NO: 1590715 - DNA, 25 bp, Homo sapien
gtccccctggtagcctcggccgatc

SEQ ID NO: 1590716 - DNA, 25 bp, Homo sapien
ccctggtagcctcggccgatcttgt

SEQ ID NO: 1590717 - DNA, 25 bp, Homo sapien
agctccagcagtgccgacgacgggt

SEQ ID NO: 1590718 - DNA, 25 bp, Homo sapien
gagaccccgagtgagagcggcaccc

SEQ ID NO: 1590719 - DNA, 25 bp, Homo sapien
taggacccggaaggctcggcttcat

SEQ ID NO: 1590720 - DNA, 25 bp, Homo sapien
tgggagggacccgtccgtgccatca

SEQ ID NO: 1590721 - DNA, 25 bp, Homo sapien
agggccagcatcacggcgatggccc

SEQ ID NO: 1590722 - DNA, 25 bp, Homo sapien
ctggatgatcttcccgggcatggcg

SEQ ID NO: 1590723 - DNA, 25 bp, Homo sapien
gatcagggggttctccgtcttggtc

SEQ ID NO: 1590724 - DNA, 25 bp, Homo sapien
tcaaacactggatgatcttcccggg

SEQ ID NO: 1590725 - DNA, 25 bp, Homo sapien
aaacactggatgatcttcccgggca

SEQ ID NO: 1590726 - DNA, 25 bp, Homo sapien
ggagaagacgaagcccggcagcaca

SEQ ID NO: 1590727 - DNA, 25 bp, Homo sapien
gtgaccggagaagacgaagcccggc

SEQ ID NO: 1590728 - DNA, 25 bp, Homo sapien
cagatgttaaagggtgaccggagaa

SEQ ID NO: 1590729 - DNA, 25 bp, Homo sapien
gatgttaaagggtgaccggagaaga

SEQ ID NO: 1590730 - DNA, 25 bp, Homo sapien
cggagctggctaacggcaatgaact

SEQ ID NO: 1590731 - DNA, 25 bp, Homo sapien
cggaagtactctcggttcagggcgc

SEQ ID NO: 1590732 - DNA, 25 bp, Homo sapien
cccgacgctgaagcggaagtactct

SEQ ID NO: 1590733 - DNA, 25 bp, Homo sapien
aatgctggtcttacccacgccaggg

SEQ ID NO: 1590734 - DNA, 25 bp, Homo sapien
tggacgtgagccagtctaggtagtt

SEQ ID NO: 1590735 - DNA, 25 bp, Homo sapien
tgccgtagtggtcttcctccagcac

SEQ ID NO: 1590736 - DNA, 25 bp, Homo sapien
tcttgacgtcctccatgccgtagtg

SEQ ID NO: 1590737 - DNA, 25 bp, Homo sapien
gttgctgtacttgccccaagggatg

SEQ ID NO: 1590738 - DNA, 25 bp, Homo sapien
tccacaacatccatgacgtgcttgg

SEQ ID NO: 1590739 - DNA, 25 bp, Homo sapien
gatggcatccttgtcgtccttctcc

SEQ ID NO: 1590740 - DNA, 25 bp, Homo sapien
tacggtgggtctgcttgatcttctc

SEQ ID NO: 1590741 - DNA, 25 bp, Homo sapien
aactccgaggagtggttgtccagca

SEQ ID NO: 1590742 - DNA, 25 bp, Homo sapien
gagagggccttgtacagccgcttag

SEQ ID NO: 1590743 - DNA, 25 bp, Homo sapien
gagggccttgtacagccgcttagga

SEQ ID NO: 1590744 - DNA, 25 bp, Homo sapien
ggagagggccttgtacagccgctta

SEQ ID NO: 1590745 - DNA, 25 bp, Homo sapien
gggccttgtacagccgcttaggaat

SEQ ID NO: 1590746 - DNA, 25 bp, Homo sapien
agctcatgggactcggccccggtga

SEQ ID NO: 1590747 - DNA, 25 bp, Homo sapien
tagatggggttgtccaccacccgct

SEQ ID NO: 1590748 - DNA, 25 bp, Homo sapien
gcgcccatgtcgctcaggtagatgg

SEQ ID NO: 1590749 - DNA, 25 bp, Homo sapien
agcgcggcgcccatgtcgctcaggt

SEQ ID NO: 1590750 - DNA, 25 bp, Homo sapien
gagctgcagagatgcccccgcctgg

SEQ ID NO: 1590751 - DNA, 25 bp, Homo sapien
ccacccagctgcagaaagagctgca

SEQ ID NO: 1590752 - DNA, 25 bp, Homo sapien
gcctggccagctgcccgcacagagg

SEQ ID NO: 1590753 - DNA, 25 bp, Homo sapien
ctggccagctgcccgcacagaggcc

SEQ ID NO: 1590754 - DNA, 25 bp, Homo sapien
ttcaaggcaatgatgtcccggatgg

SEQ ID NO: 1590755 - DNA, 25 bp, Homo sapien
ggttcaaggcaatgatgtcccggat

SEQ ID NO: 1590756 - DNA, 25 bp, Homo sapien
tcaaggcaatgatgtcccggatggt

SEQ ID NO: 1590757 - DNA, 25 bp, Homo sapien
gagggttcaaggcaatgatgtcccg

SEQ ID NO: 1590758 - DNA, 25 bp, Homo sapien
gacacaggaccaagagagtcaaaac

SEQ ID NO: 1590759 - DNA, 25 bp, Homo sapien
gtccttaggataagctatctcaggg

SEQ ID NO: 1590760 - DNA, 25 bp, Homo sapien
cagggacacaggaccaagagagtca

SEQ ID NO: 1590761 - DNA, 25 bp, Homo sapien
ggagtgcagtccctggtggactcac

SEQ ID NO: 1590762 - DNA, 25 bp, Homo sapien
cccgctcattttccggagtagctgg

SEQ ID NO: 1590763 - DNA, 25 bp, Homo sapien
ttaatcacctggtcttggccgggcg

SEQ ID NO: 1590764 - DNA, 25 bp, Homo sapien
tgggaccacgggcataagcaactgc

SEQ ID NO: 1590765 - DNA, 25 bp, Homo sapien
tagccaggtactttggtgggtgact

SEQ ID NO: 1590766 - DNA, 25 bp, Homo sapien
tgcctggcgctcagctcgtcctccg

SEQ ID NO: 1590767 - DNA, 25 bp, Homo sapien
accatgagcacctcagccgggagct

SEQ ID NO: 1590768 - DNA, 25 bp, Homo sapien
gacctggaagtcctcgtggacaacg

SEQ ID NO: 1590769 - DNA, 25 bp, Homo sapien
ttgccccgctttgacttcctgcggg

SEQ ID NO: 1590770 - DNA, 25 bp, Homo sapien
atggatctgggcaaacgtccccgtg

SEQ ID NO: 1590771 - DNA, 25 bp, Homo sapien
caaggtcctgcatctcatggatctg

SEQ ID NO: 1590772 - DNA, 25 bp, Homo sapien
ttctgtgtcccatgacgatcatgcg

SEQ ID NO: 1590773 - DNA, 25 bp, Homo sapien
tagatttcatccaggctctcgacca

SEQ ID NO: 1590774 - DNA, 25 bp, Homo sapien
catggctttcatgctaggcaggatg

SEQ ID NO: 1590775 - DNA, 25 bp, Homo sapien
tttcatgctaggcaggatgtctctg

SEQ ID NO: 1590776 - DNA, 25 bp, Homo sapien
gaacatggctttcatgctaggcagg

SEQ ID NO: 1590777 - DNA, 25 bp, Homo sapien
gaggaatgttggaacatggctttca

SEQ ID NO: 1590778 - DNA, 25 bp, Homo sapien
tagaaagacgccgacataaggctgg

SEQ ID NO: 1590779 - DNA, 25 bp, Homo sapien
gctgggcgagacgaactttccttct

SEQ ID NO: 1590780 - DNA, 25 bp, Homo sapien
acgccgacataaggctgggcgagac

SEQ ID NO: 1590781 - DNA, 25 bp, Homo sapien
ctctctttagaaagacgccgacata

SEQ ID NO: 1590782 - DNA, 25 bp, Homo sapien
tgacattttttgacagcagagccgc

SEQ ID NO: 1590783 - DNA, 25 bp, Homo sapien
gcagagccgctctaacgctgtgtag

SEQ ID NO: 1590784 - DNA, 25 bp, Homo sapien
cctcccagggtagcttttgtagctg

SEQ ID NO: 1590785 - DNA, 25 bp, Homo sapien
tctctggggacatgctgatccgcat

SEQ ID NO: 1590786 - DNA, 25 bp, Homo sapien
acgtgggccgtctgaactctcttag

SEQ ID NO: 1590787 - DNA, 25 bp, Homo sapien
catctgtcgctctgcagaacggagg

SEQ ID NO: 1590788 - DNA, 25 bp, Homo sapien
caagttggccagacaagtcaagtac

SEQ ID NO: 1590789 - DNA, 25 bp, Homo sapien
gggaccaggcctgatgaacaccatc

SEQ ID NO: 1590790 - DNA, 25 bp, Homo sapien
tggtttcaaattatgctcctgcctc

SEQ ID NO: 1590791 - DNA, 25 bp, Homo sapien
atcacgttattgctgaggcagggcc

SEQ ID NO: 1590792 - DNA, 25 bp, Homo sapien
tatgttgaccatactggtttcaaat

SEQ ID NO: 1590793 - DNA, 25 bp, Homo sapien
aacagcatcacgttattgctgaggc

SEQ ID NO: 1590794 - DNA, 25 bp, Homo sapien
gcggaaacacatcggggatcgtcat

SEQ ID NO: 1590795 - DNA, 25 bp, Homo sapien
cgggtgatggcgatgagcggcaggt

SEQ ID NO: 1590796 - DNA, 25 bp, Homo sapien
aatcttgataaagcgcgggaacacc

SEQ ID NO: 1590797 - DNA, 25 bp, Homo sapien
taatcttgataaagcgcgggaacac

SEQ ID NO: 1590798 - DNA, 25 bp, Homo sapien
gggcgtgagcgccgttatgaccggg

SEQ ID NO: 1590799 - DNA, 25 bp, Homo sapien
ggcgtgagcgccgttatgaccgggc

SEQ ID NO: 1590800 - DNA, 25 bp, Homo sapien
cgagaatgcgcctccgccgcggctg

SEQ ID NO: 1590801 - DNA, 25 bp, Homo sapien
tcggaggcgtcctcgccccccgaga

SEQ ID NO: 1590802 - DNA, 25 bp, Homo sapien
cgcggctgctcgcttcccaaaaccc

SEQ ID NO: 1590803 - DNA, 25 bp, Homo sapien
gcggctgctcgcttcccaaaacccc

SEQ ID NO: 1590804 - DNA, 25 bp, Homo sapien
ccaaggaggagaggcgtcgcaggtc

SEQ ID NO: 1590805 - DNA, 25 bp, Homo sapien
tcggagcaaccacgctcctgctgca

SEQ ID NO: 1590806 - DNA, 25 bp, Homo sapien
tccccacagtcgcacgtagccagtg

SEQ ID NO: 1590807 - DNA, 25 bp, Homo sapien
gagcaaccacgctcctgctgcagtg

SEQ ID NO: 1590808 - DNA, 25 bp, Homo sapien
acagtcgcacgtagccagtgctcgc

SEQ ID NO: 1590809 - DNA, 25 bp, Homo sapien
ctggcggctcacacaactcgcgtca

SEQ ID NO: 1590810 - DNA, 25 bp, Homo sapien
gcggctcacacaactcgcgtcattt

SEQ ID NO: 1590811 - DNA, 25 bp, Homo sapien
gtcatttccgctcgccgcgaaacgc

SEQ ID NO: 1590812 - DNA, 25 bp, Homo sapien
gcgtcatttccgctcgccgcgaaac

SEQ ID NO: 1590813 - DNA, 25 bp, Homo sapien
gtgacgcccggcgcgtgcctcggta

SEQ ID NO: 1590814 - DNA, 25 bp, Homo sapien
tgacgcccggcgcgtgcctcggtac

SEQ ID NO: 1590815 - DNA, 25 bp, Homo sapien
ggcgcgtggctcgaaacagccgctt

SEQ ID NO: 1590816 - DNA, 25 bp, Homo sapien
tggctcgaaacagccgcttcaggga

SEQ ID NO: 1590817 - DNA, 25 bp, Homo sapien
ccgatgggcgcgtggctcgaaacag

SEQ ID NO: 1590818 - DNA, 25 bp, Homo sapien
aaacagccgcttcagggagctgggc

SEQ ID NO: 1590819 - DNA, 25 bp, Homo sapien
caacgtttaggaactcatgagcagc

SEQ ID NO: 1590820 - DNA, 25 bp, Homo sapien
cagcgcccgtacaaaacactggtag

SEQ ID NO: 1590821 - DNA, 25 bp, Homo sapien
tgaaggccttttccggtcacgtgga

SEQ ID NO: 1590822 - DNA, 25 bp, Homo sapien
gagttcgagcatcggatcgtctccg

SEQ ID NO: 1590823 - DNA, 25 bp, Homo sapien
ttcccgggattcgtctgcgcatgct

SEQ ID NO: 1590824 - DNA, 25 bp, Homo sapien
tcagactctagactggccacgggtg

SEQ ID NO: 1590825 - DNA, 25 bp, Homo sapien
gctcccgggactcattgatgcgcat

SEQ ID NO: 1590826 - DNA, 25 bp, Homo sapien
tgctcaagattcaggcggagcgccg

SEQ ID NO: 1590827 - DNA, 25 bp, Homo sapien
gctgatgttgatgctggtggcggct

SEQ ID NO: 1590828 - DNA, 25 bp, Homo sapien
gtggcggcggaagcccaagtcgatg

SEQ ID NO: 1590829 - DNA, 25 bp, Homo sapien
tcggattgtgcagcgactccccgtg

SEQ ID NO: 1590830 - DNA, 25 bp, Homo sapien
gattgtgcagcgactccccgtggcg

SEQ ID NO: 1590831 - DNA, 25 bp, Homo sapien
tgtgttgctagttgctggcctgtag

SEQ ID NO: 1590832 - DNA, 25 bp, Homo sapien
tggcctgtagggagtccatagtcag

SEQ ID NO: 1590833 - DNA, 25 bp, Homo sapien
aacagtaaagaagatggctctgccg

SEQ ID NO: 1590834 - DNA, 25 bp, Homo sapien
gccgtgtgttgctagttgctggcct

SEQ ID NO: 1590835 - DNA, 25 bp, Homo sapien
caccctgagggtagtggaggatgtg

SEQ ID NO: 1590836 - DNA, 25 bp, Homo sapien
cctcaccctgagggtagtggaggat

SEQ ID NO: 1590837 - DNA, 25 bp, Homo sapien
ccctgagggtagtggaggatgtggg

SEQ ID NO: 1590838 - DNA, 25 bp, Homo sapien
tcaccctgagggtagtggaggatgt

SEQ ID NO: 1590839 - DNA, 25 bp, Homo sapien
tcttggtgatggactggtgtccggg

SEQ ID NO: 1590840 - DNA, 25 bp, Homo sapien
gattatgagcattgtccctcccaca

SEQ ID NO: 1590841 - DNA, 25 bp, Homo sapien
tgtctggtaaccaagctggattatg

SEQ ID NO: 1590842 - DNA, 25 bp, Homo sapien
aaactgaggatgaccagtagatgtc

SEQ ID NO: 1590843 - DNA, 25 bp, Homo sapien
agattggtactatcaggttcatcat

SEQ ID NO: 1590844 - DNA, 25 bp, Homo sapien
gaagattggtactatcaggttcatc

SEQ ID NO: 1590845 - DNA, 25 bp, Homo sapien
tgaagattggtactatcaggttcat

SEQ ID NO: 1590846 - DNA, 25 bp, Homo sapien
aagattggtactatcaggttcatca

SEQ ID NO: 1590847 - DNA, 25 bp, Homo sapien
ggctgctcctcgtcgagcgccttga

SEQ ID NO: 1590848 - DNA, 25 bp, Homo sapien
ttaatgcggggtggctcccaggtcc

SEQ ID NO: 1590849 - DNA, 25 bp, Homo sapien
tcttggccgtcgaggcctttctctt

SEQ ID NO: 1590850 - DNA, 25 bp, Homo sapien
ctcgtcgagcgccttgaagttgaag

SEQ ID NO: 1590851 - DNA, 25 bp, Homo sapien
tcaggcacgctgtagtcaaaggaca

SEQ ID NO: 1590852 - DNA, 25 bp, Homo sapien
gacacggtgtccaggatctcaggca

SEQ ID NO: 1590853 - DNA, 25 bp, Homo sapien
gcacagcgagcggatgtcatcggct

SEQ ID NO: 1590854 - DNA, 25 bp, Homo sapien
agaaccttgtcaggcagtgccaaag

SEQ ID NO: 1590855 - DNA, 25 bp, Homo sapien
acagggggcggcttgttctccttgg

SEQ ID NO: 1590856 - DNA, 25 bp, Homo sapien
tctaggggcggtaggggcagctcca

SEQ ID NO: 1590857 - DNA, 25 bp, Homo sapien
gcccagggaagtggccgaggtgacc

SEQ ID NO: 1590858 - DNA, 25 bp, Homo sapien
cagctccacgaaggcggcgggccct

SEQ ID NO: 1590859 - DNA, 25 bp, Homo sapien
gggtggtccactcgatccgatagat

SEQ ID NO: 1590860 - DNA, 25 bp, Homo sapien
ggccttgaggtagggctgaggctcc

SEQ ID NO: 1590861 - DNA, 25 bp, Homo sapien
tatacagggctgactggcccaggtc

SEQ ID NO: 1590862 - DNA, 25 bp, Homo sapien
aagcacccgcatggggccatctgga

SEQ ID NO: 1590863 - DNA, 25 bp, Homo sapien
cctgggggcctgtttgggagatgcc

SEQ ID NO: 1590864 - DNA, 25 bp, Homo sapien
ggcctgtttgggagatgccacaaga

SEQ ID NO: 1590865 - DNA, 25 bp, Homo sapien
ctgtgggcggcaggcgggtgccctg

SEQ ID NO: 1590866 - DNA, 25 bp, Homo sapien
gatgccacaagaaccttgccattgg

SEQ ID NO: 1590867 - DNA, 25 bp, Homo sapien
atagatattgctttggggccctggc

SEQ ID NO: 1590868 - DNA, 25 bp, Homo sapien
cgacatagatattgctttggggccc

SEQ ID NO: 1590869 - DNA, 25 bp, Homo sapien
gggggacgacatagatattgctttg

SEQ ID NO: 1590870 - DNA, 25 bp, Homo sapien
gggacgacatagatattgctttggg

SEQ ID NO: 1590871 - DNA, 25 bp, Homo sapien
tcaggctcccacttagggacggggc

SEQ ID NO: 1590872 - DNA, 25 bp, Homo sapien
actcccagcctcgtcaagggctcag

SEQ ID NO: 1590873 - DNA, 25 bp, Homo sapien
caggctcccacttagggacggggca

SEQ ID NO: 1590874 - DNA, 25 bp, Homo sapien
gcacactcaaacccactcccagcct

SEQ ID NO: 1590875 - DNA, 25 bp, Homo sapien
tgggtctgggggatgatacaggttc

SEQ ID NO: 1590876 - DNA, 25 bp, Homo sapien
ctctgggtctgggggatgatacagg

SEQ ID NO: 1590877 - DNA, 25 bp, Homo sapien
gggggatgatacaggttcaaggagc

SEQ ID NO: 1590878 - DNA, 25 bp, Homo sapien
tctgggggatgatacaggttcaagg

SEQ ID NO: 1590879 - DNA, 25 bp, Homo sapien
ggtgggcccctgaaccctctccagc

SEQ ID NO: 1590880 - DNA, 25 bp, Homo sapien
ctgtggacaaaggtgcccaggtggg

SEQ ID NO: 1590881 - DNA, 25 bp, Homo sapien
gtggacaaaggtgcccaggtgggta

SEQ ID NO: 1590882 - DNA, 25 bp, Homo sapien
tgggcccctgaaccctctccagcag

SEQ ID NO: 1590883 - DNA, 25 bp, Homo sapien
catagcgggaggaggctcggcacag

SEQ ID NO: 1590884 - DNA, 25 bp, Homo sapien
tagcgggaggaggctcggcacaggt

SEQ ID NO: 1590885 - DNA, 25 bp, Homo sapien
ccatagcgggaggaggctcggcaca

SEQ ID NO: 1590886 - DNA, 25 bp, Homo sapien
atagcgggaggaggctcggcacagg

SEQ ID NO: 1590887 - DNA, 25 bp, Homo sapien
agactctgcgggctgaaaccttcct

SEQ ID NO: 1590888 - DNA, 25 bp, Homo sapien
actctgcgggctgaaaccttcctgg

SEQ ID NO: 1590889 - DNA, 25 bp, Homo sapien
gactctgcgggctgaaaccttcctg

SEQ ID NO: 1590890 - DNA, 25 bp, Homo sapien
ccagactctgcgggctgaaaccttc

SEQ ID NO: 1590891 - DNA, 25 bp, Homo sapien
ctcttccagcaacacccccctaaca

SEQ ID NO: 1590892 - DNA, 25 bp, Homo sapien
tcttccagcaacacccccctaacag

SEQ ID NO: 1590893 - DNA, 25 bp, Homo sapien
cacccccctaacagctttgaggccg

SEQ ID NO: 1590894 - DNA, 25 bp, Homo sapien
ggcaggctgccctgatccacaccca

SEQ ID NO: 1590895 - DNA, 25 bp, Homo sapien
gggggtcaaggcctctctgggcacc

SEQ ID NO: 1590896 - DNA, 25 bp, Homo sapien
ttgggggtcaaggcctctctgggca

SEQ ID NO: 1590897 - DNA, 25 bp, Homo sapien
cagctaagaggtttggggaaggtgg

SEQ ID NO: 1590898 - DNA, 25 bp, Homo sapien
aggcagctaagaggtttggggaagg

SEQ ID NO: 1590899 - DNA, 25 bp, Homo sapien
ctcctcgccccagggtgcccctggg

SEQ ID NO: 1590900 - DNA, 25 bp, Homo sapien
gtactctcctcgccccagggtgccc

SEQ ID NO: 1590901 - DNA, 25 bp, Homo sapien
tattgtactctcctcgccccagggt

SEQ ID NO: 1590902 - DNA, 25 bp, Homo sapien
tctcctcgccccagggtgcccctgg

SEQ ID NO: 1590903 - DNA, 25 bp, Homo sapien
cttgtacgcgttggccttgtgcttc

SEQ ID NO: 1590904 - DNA, 25 bp, Homo sapien
tacgcgttggccttgtgcttcggca

SEQ ID NO: 1590905 - DNA, 25 bp, Homo sapien
ttggccttgtgcttcggcaagaagg

SEQ ID NO: 1590906 - DNA, 25 bp, Homo sapien
ctacttgtacgcgttggccttgtgc

SEQ ID NO: 1590907 - DNA, 25 bp, Homo sapien
caggacctgcaaagtaccctccgtg

SEQ ID NO: 1590908 - DNA, 25 bp, Homo sapien
gtggaaagcgaggtcaggcccagga

SEQ ID NO: 1590909 - DNA, 25 bp, Homo sapien
gagcaggtggaaagcgaggtcaggc

SEQ ID NO: 1590910 - DNA, 25 bp, Homo sapien
ggacctgcaaagtaccctccgtgac

SEQ ID NO: 1590911 - DNA, 25 bp, Homo sapien
tagtcgcggcccaggtagtagggcg

SEQ ID NO: 1590912 - DNA, 25 bp, Homo sapien
ctgatgcggatccagtcggctgcct

SEQ ID NO: 1590913 - DNA, 25 bp, Homo sapien
gctcgttgatcctctgtgggagccg

SEQ ID NO: 1590914 - DNA, 25 bp, Homo sapien
atcagcgtctccaggtagtcgcggc

SEQ ID NO: 1590915 - DNA, 25 bp, Homo sapien
aggcttgagtcagctctaaccagcc

SEQ ID NO: 1590916 - DNA, 25 bp, Homo sapien
tgagtcagctctaaccagccgcggc

SEQ ID NO: 1590917 - DNA, 25 bp, Homo sapien
gcttgagtcagctctaaccagccgc

SEQ ID NO: 1590918 - DNA, 25 bp, Homo sapien
cttgagtcagctctaaccagccgcg

SEQ ID NO: 1590919 - DNA, 25 bp, Homo sapien
aggccgtagttggtgaagtcccgca

SEQ ID NO: 1590920 - DNA, 25 bp, Homo sapien
tccgtgaagagccacggcttgagca

SEQ ID NO: 1590921 - DNA, 25 bp, Homo sapien
tccaggcgctcggacgacgagatgt

SEQ ID NO: 1590922 - DNA, 25 bp, Homo sapien
aaggacagccactcgagcagaaagc

SEQ ID NO: 1590923 - DNA, 25 bp, Homo sapien
gcctgcctgggatcgtgtggcctct

SEQ ID NO: 1590924 - DNA, 25 bp, Homo sapien
agctgcatgcacacaaccttcaaag

SEQ ID NO: 1590925 - DNA, 25 bp, Homo sapien
ccttcaaagcacaggactttctttt

SEQ ID NO: 1590926 - DNA, 25 bp, Homo sapien
tacaagcctagtaagcctcccagct

SEQ ID NO: 1590927 - DNA, 25 bp, Homo sapien
cgggcaatcatgatcccggtgacac

SEQ ID NO: 1590928 - DNA, 25 bp, Homo sapien
tcatgatcccggtgacaccagtctg

SEQ ID NO: 1590929 - DNA, 25 bp, Homo sapien
gatcccggtgacaccagtctgcatg

SEQ ID NO: 1590930 - DNA, 25 bp, Homo sapien
accagtctgcatggcgcggttggca

SEQ ID NO: 1590931 - DNA, 25 bp, Homo sapien
agtggctcccatcagggtggtacga

SEQ ID NO: 1590932 - DNA, 25 bp, Homo sapien
aggcgaacagcccagaggtgtgagt

SEQ ID NO: 1590933 - DNA, 25 bp, Homo sapien
cagcccagaggtgtgagtgaccaag

SEQ ID NO: 1590934 - DNA, 25 bp, Homo sapien
cgaacagcccagaggtgtgagtgac

SEQ ID NO: 1590935 - DNA, 25 bp, Homo sapien
cggctagcttggtgtagcgctgctc

SEQ ID NO: 1590936 - DNA, 25 bp, Homo sapien
ttggtgtagcgctgctcccgagagc

SEQ ID NO: 1590937 - DNA, 25 bp, Homo sapien
tgtactgccagtcggctagcttggt

SEQ ID NO: 1590938 - DNA, 25 bp, Homo sapien
gcactcctcgatgtactgccagtcg

SEQ ID NO: 1590939 - DNA, 25 bp, Homo sapien
cacgcagggtaggaggcagagagtg

SEQ ID NO: 1590940 - DNA, 25 bp, Homo sapien
tgagacgcagagaggaagagaccaa

SEQ ID NO: 1590941 - DNA, 25 bp, Homo sapien
aggcagagagtgagacgcagagagg

SEQ ID NO: 1590942 - DNA, 25 bp, Homo sapien
tgggggagaagccgccacgcagggt

SEQ ID NO: 1590943 - DNA, 25 bp, Homo sapien
aatgcccgaggcgtcccaagaccca

SEQ ID NO: 1590944 - DNA, 25 bp, Homo sapien
gggtcgaccgcgaggccccaatgcc

SEQ ID NO: 1590945 - DNA, 25 bp, Homo sapien
gccccaatgcccgaggcgtcccaag

SEQ ID NO: 1590946 - DNA, 25 bp, Homo sapien
accgcgaggccccaatgcccgaggc

SEQ ID NO: 1590947 - DNA, 25 bp, Homo sapien
aggcggtgcgccaggttcacacgct

SEQ ID NO: 1590948 - DNA, 25 bp, Homo sapien
ggtgcgccaggttcacacgctcctg

SEQ ID NO: 1590949 - DNA, 25 bp, Homo sapien
tcttcacagtcagcggcacatccag

SEQ ID NO: 1590950 - DNA, 25 bp, Homo sapien
cctggacgcctgtgcggatcttcac

SEQ ID NO: 1590951 - DNA, 25 bp, Homo sapien
ctacaggacggtggtgggaggtggt

SEQ ID NO: 1590952 - DNA, 25 bp, Homo sapien
tacaggacggtggtgggaggtggtg

SEQ ID NO: 1590953 - DNA, 25 bp, Homo sapien
gaggtggtgggagatggtgggaggt

SEQ ID NO: 1590954 - DNA, 25 bp, Homo sapien
tgggagatggtgggaggtggtggga

SEQ ID NO: 1590955 - DNA, 25 bp, Homo sapien
agtgcgaggatgtggctggccgtac

SEQ ID NO: 1590956 - DNA, 25 bp, Homo sapien
cagtgcgaggatgtggctggccgta

SEQ ID NO: 1590957 - DNA, 25 bp, Homo sapien
ctggttcatgccacggacgatctgc

SEQ ID NO: 1590958 - DNA, 25 bp, Homo sapien
gctggaacttggtggagcgattcat

SEQ ID NO: 1590959 - DNA, 25 bp, Homo sapien
cacggacgatctgctggaacttggt

SEQ ID NO: 1590960 - DNA, 25 bp, Homo sapien
tggaacttggtggagcgattcatga

SEQ ID NO: 1590961 - DNA, 25 bp, Homo sapien
aacccctgaccctccaccgagacat

SEQ ID NO: 1590962 - DNA, 25 bp, Homo sapien
ggactccagggccacacttgagccc

SEQ ID NO: 1590963 - DNA, 25 bp, Homo sapien
caggagacgccgacctgcaggaaag

SEQ ID NO: 1590964 - DNA, 25 bp, Homo sapien
acatcgccggctgggtcagtgcctc

SEQ ID NO: 1590965 - DNA, 25 bp, Homo sapien
gcagctcggcacacttggtcatggt

SEQ ID NO: 1590966 - DNA, 25 bp, Homo sapien
tcttgtacacgaggtcgatggggca

SEQ ID NO: 1590967 - DNA, 25 bp, Homo sapien
gggcagccgacgttgatgtccacaa

SEQ ID NO: 1590968 - DNA, 25 bp, Homo sapien
aaagtccacctccacggtgcggctc

SEQ ID NO: 1590969 - DNA, 25 bp, Homo sapien
cctcacactggtggcgtttgagtag

SEQ ID NO: 1590970 - DNA, 25 bp, Homo sapien
cgaagcgcttgcagatccgtcggaa

SEQ ID NO: 1590971 - DNA, 25 bp, Homo sapien
ctggacgccaaagatgtcctcacac

SEQ ID NO: 1590972 - DNA, 25 bp, Homo sapien
ttgagtagggcccactcggacatct

SEQ ID NO: 1590973 - DNA, 25 bp, Homo sapien
gccaggtaaagtttgccacggatgt

SEQ ID NO: 1590974 - DNA, 25 bp, Homo sapien
cagctagaacaggaacgtggacaca

SEQ ID NO: 1590975 - DNA, 25 bp, Homo sapien
gaacgtggacacagctggtatttaa

SEQ ID NO: 1590976 - DNA, 25 bp, Homo sapien
cagctggtatttaatagacgcacac

SEQ ID NO: 1590977 - DNA, 25 bp, Homo sapien
cccaggcagctagaacaggaacgtg

SEQ ID NO: 1590978 - DNA, 25 bp, Homo sapien
cagatggacagatctgctactgacg

SEQ ID NO: 1590979 - DNA, 25 bp, Homo sapien
gatctgctactgacgttgtcctcaa

SEQ ID NO: 1590980 - DNA, 25 bp, Homo sapien
tactgacgttgtcctcaacacgtac

SEQ ID NO: 1590981 - DNA, 25 bp, Homo sapien
gatggacagatctgctactgacgtt

SEQ ID NO: 1590982 - DNA, 25 bp, Homo sapien
gcctgctcagctcgctcgaagcgga

SEQ ID NO: 1590983 - DNA, 25 bp, Homo sapien
tcacagggccgcagcctgaccacgt

SEQ ID NO: 1590984 - DNA, 25 bp, Homo sapien
ctgggaggggtgctagtgcccggcc

SEQ ID NO: 1590985 - DNA, 25 bp, Homo sapien
cctggctgaaccggcgcagggcctg

SEQ ID NO: 1590986 - DNA, 25 bp, Homo sapien
gtagcgccccacgtcgtgcagaaag

SEQ ID NO: 1590987 - DNA, 25 bp, Homo sapien
aaagcggcagcgatcaccgaagaaa

SEQ ID NO: 1590988 - DNA, 25 bp, Homo sapien
aggttctgtccctcgggcctcaggt

SEQ ID NO: 1590989 - DNA, 25 bp, Homo sapien
cgaagaaacacttagcagccgactc

SEQ ID NO: 1590990 - DNA, 25 bp, Homo sapien
tgctcgttgctgaaggcccaggagc

SEQ ID NO: 1590991 - DNA, 25 bp, Homo sapien
gctcgttgctgaaggcccaggagct

SEQ ID NO: 1590992 - DNA, 25 bp, Homo sapien
ctcgttgctgaaggcccaggagctt

SEQ ID NO: 1590993 - DNA, 25 bp, Homo sapien
tcgttgctgaaggcccaggagcttt

SEQ ID NO: 1590994 - DNA, 25 bp, Homo sapien
tcttgtcgtagttcgtgggcttcac

SEQ ID NO: 1590995 - DNA, 25 bp, Homo sapien
gattagggagggacacagcctgttc

SEQ ID NO: 1590996 - DNA, 25 bp, Homo sapien
gggacacagcctgttcttgtcgtag

SEQ ID NO: 1590997 - DNA, 25 bp, Homo sapien
cctgttcttgtcgtagttcgtgggc

SEQ ID NO: 1590998 - DNA, 25 bp, Homo sapien
tgcccgtccgccgtctgtccatcct

SEQ ID NO: 1590999 - DNA, 25 bp, Homo sapien
tgtccatcctccagtcggatccgct

SEQ ID NO: 1591000 - DNA, 25 bp, Homo sapien
agtcggatccgcttagcctcaggct

SEQ ID NO: 1591001 - DNA, 25 bp, Homo sapien
gtccccgggccctcttctgagtctg

SEQ ID NO: 1591002 - DNA, 25 bp, Homo sapien
gcttccaggaattggtgaaactgct

SEQ ID NO: 1591003 - DNA, 25 bp, Homo sapien
ggtttcccggcaagtcttctcctgc

SEQ ID NO: 1591004 - DNA, 25 bp, Homo sapien
tttcccggcaagtcttctcctgccc

SEQ ID NO: 1591005 - DNA, 25 bp, Homo sapien
gtttcccggcaagtcttctcctgcc

SEQ ID NO: 1591006 - DNA, 25 bp, Homo sapien
gaaaaccctccgaacatagtcaata

SEQ ID NO: 1591007 - DNA, 25 bp, Homo sapien
aggccccaacgtgcacgatctcagg

SEQ ID NO: 1591008 - DNA, 25 bp, Homo sapien
tgtgacaggccccaacgtgcacgat

SEQ ID NO: 1591009 - DNA, 25 bp, Homo sapien
tgtccttcgcgcatgtgacaggccc

SEQ ID NO: 1591010 - DNA, 25 bp, Homo sapien
atgcacgtggtgtccttcgcgcatg

SEQ ID NO: 1591011 - DNA, 25 bp, Homo sapien
gcacagctcggaccgcgctatgggt

SEQ ID NO: 1591012 - DNA, 25 bp, Homo sapien
tatgggtgccggaaaaggcccttca

SEQ ID NO: 1591013 - DNA, 25 bp, Homo sapien
taatctcccggcatgcacagctcgg

SEQ ID NO: 1591014 - DNA, 25 bp, Homo sapien
aagaacggcccggaatgaagagccg

SEQ ID NO: 1591015 - DNA, 25 bp, Homo sapien
accattctctagaggagcctccgcc

SEQ ID NO: 1591016 - DNA, 25 bp, Homo sapien
tgacgcttaatgggcgccactcctc

SEQ ID NO: 1591017 - DNA, 25 bp, Homo sapien
cgttccaaagctccggctcccgagt

SEQ ID NO: 1591018 - DNA, 25 bp, Homo sapien
atgggcgccactcctcgttccaaag

SEQ ID NO: 1591019 - DNA, 25 bp, Homo sapien
gctctggagtgtggcgggaagacct

SEQ ID NO: 1591020 - DNA, 25 bp, Homo sapien
aagaccttccgggtcacgcgtgtct

SEQ ID NO: 1591021 - DNA, 25 bp, Homo sapien
gctcatgtcgttccaatgacgccat

SEQ ID NO: 1591022 - DNA, 25 bp, Homo sapien
cgcgtgtcttccctgattgtgctgg

SEQ ID NO: 1591023 - DNA, 25 bp, Homo sapien
tcactgtacagtgtgtggggacact

SEQ ID NO: 1591024 - DNA, 25 bp, Homo sapien
gaccaggcctggactgtccttgact

SEQ ID NO: 1591025 - DNA, 25 bp, Homo sapien
actgaggaatatgccccccgatcct

SEQ ID NO: 1591026 - DNA, 25 bp, Homo sapien
gggacactgaggaatatgccccccg

SEQ ID NO: 1591027 - DNA, 25 bp, Homo sapien
gccgccccggatttgtggctgcgac

SEQ ID NO: 1591028 - DNA, 25 bp, Homo sapien
gcggccgccccggatttgtggctgc

SEQ ID NO: 1591029 - DNA, 25 bp, Homo sapien
gccccggatttgtggctgcgactcc

SEQ ID NO: 1591030 - DNA, 25 bp, Homo sapien
ccccggatttgtggctgcgactcct

SEQ ID NO: 1591031 - DNA, 25 bp, Homo sapien
cttcctgccacccacaggccttgtg

SEQ ID NO: 1591032 - DNA, 25 bp, Homo sapien
ccacccacaggccttgtgggtccca

SEQ ID NO: 1591033 - DNA, 25 bp, Homo sapien
cacccacaggccttgtgggtcccat

SEQ ID NO: 1591034 - DNA, 25 bp, Homo sapien
ctgccacccacaggccttgtgggtc

SEQ ID NO: 1591035 - DNA, 25 bp, Homo sapien
aaaacctccaagtgtgcatctgagg

SEQ ID NO: 1591036 - DNA, 25 bp, Homo sapien
ccaagtgtgcatctgaggaacgcac

SEQ ID NO: 1591037 - DNA, 25 bp, Homo sapien
ctccaagtgtgcatctgaggaacgc

SEQ ID NO: 1591038 - DNA, 25 bp, Homo sapien
ctaaaacctccaagtgtgcatctga

SEQ ID NO: 1591039 - DNA, 25 bp, Homo sapien
aacatctgtcagtggcgcgttccct

SEQ ID NO: 1591040 - DNA, 25 bp, Homo sapien
caccagagggcgtgaaaccctttgg

SEQ ID NO: 1591041 - DNA, 25 bp, Homo sapien
cagaatccccttagcctctaggagg

SEQ ID NO: 1591042 - DNA, 25 bp, Homo sapien
ggtccagctgcgcacagaagtaaac

SEQ ID NO: 1591043 - DNA, 25 bp, Homo sapien
ggacctgtgccagctgcttagccat

SEQ ID NO: 1591044 - DNA, 25 bp, Homo sapien
atgtcgctcaagccacccgctggga

SEQ ID NO: 1591045 - DNA, 25 bp, Homo sapien
cggaggacccatgtcgctcaagcca

SEQ ID NO: 1591046 - DNA, 25 bp, Homo sapien
catcagatggccagcatcttgtggt

SEQ ID NO: 1591047 - DNA, 25 bp, Homo sapien
atctgcctcctgggttcaagcgatt

SEQ ID NO: 1591048 - DNA, 25 bp, Homo sapien
ctgggattacaggcaccggccaccg

SEQ ID NO: 1591049 - DNA, 25 bp, Homo sapien
gtgcgatcatggctccctacaacat

SEQ ID NO: 1591050 - DNA, 25 bp, Homo sapien
tcttgtgtctcagccacctgggtag

SEQ ID NO: 1591051 - DNA, 25 bp, Homo sapien
gaaacggtgcggtgattatctctct

SEQ ID NO: 1591052 - DNA, 25 bp, Homo sapien
aaatcccaggtaagggacatacctg

SEQ ID NO: 1591053 - DNA, 25 bp, Homo sapien
tagcaggtgagattcagtgtggaag

SEQ ID NO: 1591054 - DNA, 25 bp, Homo sapien
aagctgcaacaggtgaccgtcccag

SEQ ID NO: 1591055 - DNA, 25 bp, Homo sapien
ggtgaagcttcaggcaaacgagtcc

SEQ ID NO: 1591056 - DNA, 25 bp, Homo sapien
tcaggcaggtgaagcttcaggcaaa

SEQ ID NO: 1591057 - DNA, 25 bp, Homo sapien
cgagtccttaggtagatgaggcccc

SEQ ID NO: 1591058 - DNA, 25 bp, Homo sapien
caggcaaacgagtccttaggtagat

SEQ ID NO: 1591059 - DNA, 25 bp, Homo sapien
ctcaggtgaggccccaggaaaatga

SEQ ID NO: 1591060 - DNA, 25 bp, Homo sapien
gtgaggccccaggaaaatgaggttc

SEQ ID NO: 1591061 - DNA, 25 bp, Homo sapien
tcaggtgaggccccaggaaaatgag

SEQ ID NO: 1591062 - DNA, 25 bp, Homo sapien
aggtgaggccccaggaaaatgaggt

SEQ ID NO: 1591063 - DNA, 25 bp, Homo sapien
tggcagcccaggccccacaccagcc

SEQ ID NO: 1591064 - DNA, 25 bp, Homo sapien
gcagcccaggccccacaccagcctc

SEQ ID NO: 1591065 - DNA, 25 bp, Homo sapien
ctggcagcccaggccccacaccagc

SEQ ID NO: 1591066 - DNA, 25 bp, Homo sapien
ggcagcccaggccccacaccagcct

SEQ ID NO: 1591067 - DNA, 25 bp, Homo sapien
ccaagccgctatgccgcgtgtctgg

SEQ ID NO: 1591068 - DNA, 25 bp, Homo sapien
caggtgaaccaagccgctatgccgc

SEQ ID NO: 1591069 - DNA, 25 bp, Homo sapien
tgaaccaagccgctatgccgcgtgt

SEQ ID NO: 1591070 - DNA, 25 bp, Homo sapien
tcaggtgaaccaagccgctatgccg

SEQ ID NO: 1591071 - DNA, 25 bp, Homo sapien
tcgggtggcaggaacctctcgtagt

SEQ ID NO: 1591072 - DNA, 25 bp, Homo sapien
tcccgccagcgaaagtagctcaggt

SEQ ID NO: 1591073 - DNA, 25 bp, Homo sapien
caggtagcgggcgtggtccttgtcc

SEQ ID NO: 1591074 - DNA, 25 bp, Homo sapien
tcctgcaggtaccgggccaggtcct

SEQ ID NO: 1591075 - DNA, 25 bp, Homo sapien
ctgctggggcccagcaccacgggca

SEQ ID NO: 1591076 - DNA, 25 bp, Homo sapien
tggggcccagcaccacgggcacggc

SEQ ID NO: 1591077 - DNA, 25 bp, Homo sapien
ttctgctggggcccagcaccacggg

SEQ ID NO: 1591078 - DNA, 25 bp, Homo sapien
tgctggggcccagcaccacgggcac

SEQ ID NO: 1591079 - DNA, 25 bp, Homo sapien
acagcttctcggtgatgtagtcggg

SEQ ID NO: 1591080 - DNA, 25 bp, Homo sapien
gatagaacttgtaccgggacagcgt

SEQ ID NO: 1591081 - DNA, 25 bp, Homo sapien
ggcctccagggcgttcctccacagc

SEQ ID NO: 1591082 - DNA, 25 bp, Homo sapien
caaggagttctcgaaggccagatag

SEQ ID NO: 1591083 - DNA, 25 bp, Homo sapien
ggactccatgctgaaccagatccat

SEQ ID NO: 1591084 - DNA, 25 bp, Homo sapien
gtacatgacctctcggtggtgcacg

SEQ ID NO: 1591085 - DNA, 25 bp, Homo sapien
gagtttggcccccagttggacactg

SEQ ID NO: 1591086 - DNA, 25 bp, Homo sapien
gctctggtagtagcgcaccctggcg

SEQ ID NO: 1591087 - DNA, 25 bp, Homo sapien
tgaccgcgtctgcctgtggatacac

SEQ ID NO: 1591088 - DNA, 25 bp, Homo sapien
atgaccgcgtctgcctgtggataca

SEQ ID NO: 1591089 - DNA, 25 bp, Homo sapien
accgcgtctgcctgtggatacacct

SEQ ID NO: 1591090 - DNA, 25 bp, Homo sapien
cagagctatgggtttgttaaaaggc

SEQ ID NO: 1591091 - DNA, 25 bp, Homo sapien
tgagacacacgcagataggagaaga

SEQ ID NO: 1591092 - DNA, 25 bp, Homo sapien
gtgggatcgtcttgagacacacgca

SEQ ID NO: 1591093 - DNA, 25 bp, Homo sapien
gaagcgggacccattagggtacaca

SEQ ID NO: 1591094 - DNA, 25 bp, Homo sapien
cagcgccacgaccactgtggcttgg

SEQ ID NO: 1591095 - DNA, 25 bp, Homo sapien
gaccactgtggcttggccgggccca

SEQ ID NO: 1591096 - DNA, 25 bp, Homo sapien
gacagcagcgccacgaccactgtgg

SEQ ID NO: 1591097 - DNA, 25 bp, Homo sapien
gccacgaccactgtggcttggccgg

SEQ ID NO: 1591098 - DNA, 25 bp, Homo sapien
tggtgtgtccccagactcttcctca

SEQ ID NO: 1591099 - DNA, 25 bp, Homo sapien
ctgtccttttctggtgtgtccccag

SEQ ID NO: 1591100 - DNA, 25 bp, Homo sapien
cttgatcctgtccttttctggtgtg

SEQ ID NO: 1591101 - DNA, 25 bp, Homo sapien
ttttctggtgtgtccccagactctt

SEQ ID NO: 1591102 - DNA, 25 bp, Homo sapien
gagatacccagcagcggactggccc

SEQ ID NO: 1591103 - DNA, 25 bp, Homo sapien
caaatcccccggagtgtgggcactg

SEQ ID NO: 1591104 - DNA, 25 bp, Homo sapien
ggccacccagagacatggggaaccc

SEQ ID NO: 1591105 - DNA, 25 bp, Homo sapien
gcctggcccgtcctggagataccca

SEQ ID NO: 1591106 - DNA, 25 bp, Homo sapien
ggagggacccttggaccatgataag

SEQ ID NO: 1591107 - DNA, 25 bp, Homo sapien
gagggacccttggaccatgataagg

SEQ ID NO: 1591108 - DNA, 25 bp, Homo sapien
agggacccttggaccatgataagga

SEQ ID NO: 1591109 - DNA, 25 bp, Homo sapien
gggacccttggaccatgataaggac

SEQ ID NO: 1591110 - DNA, 25 bp, Homo sapien
gctgcgtctgacaccttctgggaga

SEQ ID NO: 1591111 - DNA, 25 bp, Homo sapien
gatgcactggatcccgtctggatgc

SEQ ID NO: 1591112 - DNA, 25 bp, Homo sapien
ctggacactgctgcgtctgacacct

SEQ ID NO: 1591113 - DNA, 25 bp, Homo sapien
tctgggagatgctagagggactcgg

SEQ ID NO: 1591114 - DNA, 25 bp, Homo sapien
aacatcttggatgggcaaatctact

SEQ ID NO: 1591115 - DNA, 25 bp, Homo sapien
tttgagtaccttcagaacatcttgg

SEQ ID NO: 1591116 - DNA, 25 bp, Homo sapien
gcttagacaatagaatgagaccgtg

SEQ ID NO: 1591117 - DNA, 25 bp, Homo sapien
tactggccgggagtaatggcttaca

SEQ ID NO: 1591118 - DNA, 25 bp, Homo sapien
gacagtgaagtctttgccggtgacc

SEQ ID NO: 1591119 - DNA, 25 bp, Homo sapien
aatatattatcatgtggcccctggg

SEQ ID NO: 1591120 - DNA, 25 bp, Homo sapien
ggaaaatgatcgatccacgccacaa

SEQ ID NO: 1591121 - DNA, 25 bp, Homo sapien
tatggcgacctcttcctaggagaca

SEQ ID NO: 1591122 - DNA, 25 bp, Homo sapien
taatccccgttgcagaaccaaacag

SEQ ID NO: 1591123 - DNA, 25 bp, Homo sapien
aagtgtacccggagctgaaaccagg

SEQ ID NO: 1591124 - DNA, 25 bp, Homo sapien
tggagcccggacatcctttgaaaac

SEQ ID NO: 1591125 - DNA, 25 bp, Homo sapien
cgcggacggagtaacagctggattc

SEQ ID NO: 1591126 - DNA, 25 bp, Homo sapien
caagggatcttgcaggaaaccggtg

SEQ ID NO: 1591127 - DNA, 25 bp, Homo sapien
caactcatgaaccttggaagggaac

SEQ ID NO: 1591128 - DNA, 25 bp, Homo sapien
ggtgggcaagtcaggcaactcatga

SEQ ID NO: 1591129 - DNA, 25 bp, Homo sapien
gaacaaccttcgcaaaggccctgag

SEQ ID NO: 1591130 - DNA, 25 bp, Homo sapien
agatgctctcttctggtaggctggg

SEQ ID NO: 1591131 - DNA, 25 bp, Homo sapien
gagctatgcaaacttcctggaatgg

SEQ ID NO: 1591132 - DNA, 25 bp, Homo sapien
tcagccatagggtgttcagcaccaa

SEQ ID NO: 1591133 - DNA, 25 bp, Homo sapien
ccatattggtggcagaagcttcctc

SEQ ID NO: 1591134 - DNA, 25 bp, Homo sapien
gtgacccattgcacctggcctatta

SEQ ID NO: 1591135 - DNA, 25 bp, Homo sapien
cattgcacctggcctattattattg

SEQ ID NO: 1591136 - DNA, 25 bp, Homo sapien
tcactgtgtcgcccaaaccggagtg

SEQ ID NO: 1591137 - DNA, 25 bp, Homo sapien
tgcacctggcctattattattgtta

SEQ ID NO: 1591138 - DNA, 25 bp, Homo sapien
taccctataagtggtggtcctgggc

SEQ ID NO: 1591139 - DNA, 25 bp, Homo sapien
ggtgagctcttaacccatgggacca

SEQ ID NO: 1591140 - DNA, 25 bp, Homo sapien
gcgaggtccctagcaggcaagtctt

SEQ ID NO: 1591141 - DNA, 25 bp, Homo sapien
gaaaccgtgccgtgatgatctctct

SEQ ID NO: 1591142 - DNA, 25 bp, Homo sapien
caggtgaaccaagccgctatgctgc

SEQ ID NO: 1591143 - DNA, 25 bp, Homo sapien
tcaggtgaaccaagccgctatgctg

SEQ ID NO: 1591144 - DNA, 25 bp, Homo sapien
ggtgaaccaagccgctatgctgcgc

SEQ ID NO: 1591145 - DNA, 25 bp, Homo sapien
tgaaccaagccgctatgctgcgcac

SEQ ID NO: 1591146 - DNA, 25 bp, Homo sapien
tcgggtggcaggaacctctcgtagt

SEQ ID NO: 1591147 - DNA, 25 bp, Homo sapien
tcccgccagcgaaagtagctcaggt

SEQ ID NO: 1591148 - DNA, 25 bp, Homo sapien
caggtagcgggcgtggtccttgtcc

SEQ ID NO: 1591149 - DNA, 25 bp, Homo sapien
tcctgcaggtaccgggccaggtcct

SEQ ID NO: 1591150 - DNA, 25 bp, Homo sapien
gtgcaaggagttctcgaaggccagg

SEQ ID NO: 1591151 - DNA, 25 bp, Homo sapien
aggagttctcgaaggccaggtagaa

SEQ ID NO: 1591152 - DNA, 25 bp, Homo sapien
ggggtggctccaagttgaaccagat

SEQ ID NO: 1591153 - DNA, 25 bp, Homo sapien
aggtgggaggcgtgacttagggttg

SEQ ID NO: 1591154 - DNA, 25 bp, Homo sapien
ggctccaagttgaaccagatccagc

SEQ ID NO: 1591155 - DNA, 25 bp, Homo sapien
cttagggttggacatgatatcccag

SEQ ID NO: 1591156 - DNA, 25 bp, Homo sapien
tcctgtcgggaggacccactgggag

SEQ ID NO: 1591157 - DNA, 25 bp, Homo sapien
atgtggaaaggccatgtccgtagca

SEQ ID NO: 1591158 - DNA, 25 bp, Homo sapien
gagtggtgtcctgtcgggaggaccc

SEQ ID NO: 1591159 - DNA, 25 bp, Homo sapien
ccatgtccgtagcaggatcaggagg

SEQ ID NO: 1591160 - DNA, 25 bp, Homo sapien
cagtgcggccagacagcggcgccat

SEQ ID NO: 1591161 - DNA, 25 bp, Homo sapien
ctgaaatagcagtgcggccagacag

SEQ ID NO: 1591162 - DNA, 25 bp, Homo sapien
cagcggcgccatggccattgtggct

SEQ ID NO: 1591163 - DNA, 25 bp, Homo sapien
agacagcggcgccatggccattgtg

SEQ ID NO: 1591164 - DNA, 25 bp, Homo sapien
tggtctaagccttgcagtgtcgagc

SEQ ID NO: 1591165 - DNA, 25 bp, Homo sapien
caaatgacatggtggttgcctgctt

SEQ ID NO: 1591166 - DNA, 25 bp, Homo sapien
tgtatgggttgcgaattatatcccg

SEQ ID NO: 1591167 - DNA, 25 bp, Homo sapien
tctgttggaccgaactggtctaagc

SEQ ID NO: 1591168 - DNA, 25 bp, Homo sapien
atcccgacgccaagacctaagttca

SEQ ID NO: 1591169 - DNA, 25 bp, Homo sapien
tgacgaaaagggatcccgacgccaa

SEQ ID NO: 1591170 - DNA, 25 bp, Homo sapien
agggatcccgacgccaagacctaag

SEQ ID NO: 1591171 - DNA, 25 bp, Homo sapien
tgtgacgaaaagggatcccgacgcc

SEQ ID NO: 1591172 - DNA, 25 bp, Homo sapien
caattactgctttgcacccttgggc

SEQ ID NO: 1591173 - DNA, 25 bp, Homo sapien
gaccggctcatatacgttcaaatgg

SEQ ID NO: 1591174 - DNA, 25 bp, Homo sapien
tggaaagagactcaaaacacaggcc

SEQ ID NO: 1591175 - DNA, 25 bp, Homo sapien
taagatggaattacgtcagccctgg

SEQ ID NO: 1591176 - DNA, 25 bp, Homo sapien
aagaagtgaaaatagccttagctga

SEQ ID NO: 1591177 - DNA, 25 bp, Homo sapien
aaaagaagtgaaaatagccttagct

SEQ ID NO: 1591178 - DNA, 25 bp, Homo sapien
gaagtgaaaatagccttagctgatg

SEQ ID NO: 1591179 - DNA, 25 bp, Homo sapien
ttagctgatgacattccaccattgt

SEQ ID NO: 1591180 - DNA, 25 bp, Homo sapien
ttttggaaatctggccaccgggcca

SEQ ID NO: 1591181 - DNA, 25 bp, Homo sapien
ccctgaaaggtcacaatgccgtctt

SEQ ID NO: 1591182 - DNA, 25 bp, Homo sapien
tagaggcagccacgtagcaatgtat

SEQ ID NO: 1591183 - DNA, 25 bp, Homo sapien
tgttttacagccctagaccctgaaa

SEQ ID NO: 1591184 - DNA, 25 bp, Homo sapien
gccatggcaggtttcctggggcggg

SEQ ID NO: 1591185 - DNA, 25 bp, Homo sapien
aggcagcgagcagtggatgaggaca

SEQ ID NO: 1591186 - DNA, 25 bp, Homo sapien
agcagtggatgaggacagctcacca

SEQ ID NO: 1591187 - DNA, 25 bp, Homo sapien
aggacagctcaccaggaggccatgg

SEQ ID NO: 1591188 - DNA, 25 bp, Homo sapien
cagtttccggggtgtcctaatctcg

SEQ ID NO: 1591189 - DNA, 25 bp, Homo sapien
ctgtcaccaggtgacctagggtgtt

SEQ ID NO: 1591190 - DNA, 25 bp, Homo sapien
tcaccaggtgacctagggtgttctc

SEQ ID NO: 1591191 - DNA, 25 bp, Homo sapien
caccaggtgacctagggtgttctcc

SEQ ID NO: 1591192 - DNA, 25 bp, Homo sapien
caggaacttggaggcccgggacgtg

SEQ ID NO: 1591193 - DNA, 25 bp, Homo sapien
ttgggtgcacagctggtccatccat

SEQ ID NO: 1591194 - DNA, 25 bp, Homo sapien
ctgtgagaccggataagggtgcagg

SEQ ID NO: 1591195 - DNA, 25 bp, Homo sapien
ggctttgggtgcacagctggtccat

SEQ ID NO: 1591196 - DNA, 25 bp, Homo sapien
gtgaagcccggcaagtgaaatccca

SEQ ID NO: 1591197 - DNA, 25 bp, Homo sapien
actatcagagtcacgccgaggtcac

SEQ ID NO: 1591198 - DNA, 25 bp, Homo sapien
aggtaaagtccccaacagccgagat

SEQ ID NO: 1591199 - DNA, 25 bp, Homo sapien
atttgtgacacccatccgctggcgg

SEQ ID NO: 1591200 - DNA, 25 bp, Homo sapien
caggtgaaccaagccgctatgctgc

SEQ ID NO: 1591201 - DNA, 25 bp, Homo sapien
tcaggtgaaccaagccgctatgctg

SEQ ID NO: 1591202 - DNA, 25 bp, Homo sapien
ggtgaaccaagccgctatgctgcgc

SEQ ID NO: 1591203 - DNA, 25 bp, Homo sapien
tgaaccaagccgctatgctgcgcac

SEQ ID NO: 1591204 - DNA, 25 bp, Homo sapien
tggatgaaggcgtcgggtggcagga

SEQ ID NO: 1591205 - DNA, 25 bp, Homo sapien
gaaagtagctcaggtagcgggcgtg

SEQ ID NO: 1591206 - DNA, 25 bp, Homo sapien
ggaacctctcgtagttgcttctgct

SEQ ID NO: 1591207 - DNA, 25 bp, Homo sapien
tcctgcaggtaccgggccaggtcct

SEQ ID NO: 1591208 - DNA, 25 bp, Homo sapien
acagcttctcggtgatgtagtcggg

SEQ ID NO: 1591209 - DNA, 25 bp, Homo sapien
caaggagttctcgaaggccagatag

SEQ ID NO: 1591210 - DNA, 25 bp, Homo sapien
ggcctccagggcgttcctccacagc

SEQ ID NO: 1591211 - DNA, 25 bp, Homo sapien
gatagaacttgtaccgggacagcgt

SEQ ID NO: 1591212 - DNA, 25 bp, Homo sapien
gacaggttccactgccataagccct

SEQ ID NO: 1591213 - DNA, 25 bp, Homo sapien
tggtagtagcgcaccctggccgagt

SEQ ID NO: 1591214 - DNA, 25 bp, Homo sapien
ggacccattgggagccccggtgaca

SEQ ID NO: 1591215 - DNA, 25 bp, Homo sapien
tgcctgtgggtacacactggagtcg

SEQ ID NO: 1591216 - DNA, 25 bp, Homo sapien
gccagacagcggcgccacagccact

SEQ ID NO: 1591217 - DNA, 25 bp, Homo sapien
cagcccggccagacagcggcgccac

SEQ ID NO: 1591218 - DNA, 25 bp, Homo sapien
cccggccagacagcggcgccacagc

SEQ ID NO: 1591219 - DNA, 25 bp, Homo sapien
ggccagacagcggcgccacagccac

SEQ ID NO: 1591220 - DNA, 25 bp, Homo sapien
cactcagccatgaaaaggctgggcg

SEQ ID NO: 1591221 - DNA, 25 bp, Homo sapien
gaatatcactcagccatgaaaaggc

SEQ ID NO: 1591222 - DNA, 25 bp, Homo sapien
ctagtgtgatccatccacacaatgg

SEQ ID NO: 1591223 - DNA, 25 bp, Homo sapien
cagccatgaaaaggctgggcgaggt

SEQ ID NO: 1591224 - DNA, 25 bp, Homo sapien
gtgaggtagtcctcacccccagtga

SEQ ID NO: 1591225 - DNA, 25 bp, Homo sapien
aggtgaggtagtcctcacccccagt

SEQ ID NO: 1591226 - DNA, 25 bp, Homo sapien
ggtgaggtagtcctcacccccagtg

SEQ ID NO: 1591227 - DNA, 25 bp, Homo sapien
ggatctagaacctcgtactcttcca

SEQ ID NO: 1591228 - DNA, 25 bp, Homo sapien
gatctagaacctcgtactcttccat

SEQ ID NO: 1591229 - DNA, 25 bp, Homo sapien
gaaggatctagaacctcgtactctt

SEQ ID NO: 1591230 - DNA, 25 bp, Homo sapien
aaggatctagaacctcgtactcttc

SEQ ID NO: 1591231 - DNA, 25 bp, Homo sapien
ttcaagctccactacccagggtggg

SEQ ID NO: 1591232 - DNA, 25 bp, Homo sapien
gcctcccgctgggtacacatggaaa

SEQ ID NO: 1591233 - DNA, 25 bp, Homo sapien
ccagggatggattctcgggaagcaa

SEQ ID NO: 1591234 - DNA, 25 bp, Homo sapien
ggcgtgcggcctttaaatttcaagc

SEQ ID NO: 1591235 - DNA, 25 bp, Homo sapien
tcctgtccagccttcggtgtccttg

SEQ ID NO: 1591236 - DNA, 25 bp, Homo sapien
ggaggcctgcgtggaaccagtccca

SEQ ID NO: 1591237 - DNA, 25 bp, Homo sapien
ggctgtattgcccattcctagaagc

SEQ ID NO: 1591238 - DNA, 25 bp, Homo sapien
aaccagtcccagaagcggccatggt

SEQ ID NO: 1591239 - DNA, 25 bp, Homo sapien
gacgtgaccctgagctgttgcatgc

SEQ ID NO: 1591240 - DNA, 25 bp, Homo sapien
tctattagggcttggacaggtgtca

SEQ ID NO: 1591241 - DNA, 25 bp, Homo sapien
cctcgagtggatgcgatgcccgtga

SEQ ID NO: 1591242 - DNA, 25 bp, Homo sapien
ccttgtgctggaacacgcgtggaca

SEQ ID NO: 1591243 - DNA, 25 bp, Homo sapien
ggcctgggcgtgttttccacatgtt

SEQ ID NO: 1591244 - DNA, 25 bp, Homo sapien
caggcccagagaaaggatggctcaa

SEQ ID NO: 1591245 - DNA, 25 bp, Homo sapien
tccagtgcccaggaatttggagaca

SEQ ID NO: 1591246 - DNA, 25 bp, Homo sapien
tgtccggggctctccgctccagtgc

SEQ ID NO: 1591247 - DNA, 25 bp, Homo sapien
ggctgctgtgtcgccgtcatcaagc

SEQ ID NO: 1591248 - DNA, 25 bp, Homo sapien
cggctgctgtgtcgccgtcatcaag

SEQ ID NO: 1591249 - DNA, 25 bp, Homo sapien
aatttatttctggacgcattctgca

SEQ ID NO: 1591250 - DNA, 25 bp, Homo sapien
atttatttctggacgcattctgcag

SEQ ID NO: 1591251 - DNA, 25 bp, Homo sapien
tttatttctggacgcattctgcagg

SEQ ID NO: 1591252 - DNA, 25 bp, Homo sapien
tatttctggacgcattctgcaggct

SEQ ID NO: 1591253 - DNA, 25 bp, Homo sapien
atgccaaagtacacgcaggcggcgg

SEQ ID NO: 1591254 - DNA, 25 bp, Homo sapien
ggaggccgctatgccaaagtacacg

SEQ ID NO: 1591255 - DNA, 25 bp, Homo sapien
agccggcccatcttgaccagggagg

SEQ ID NO: 1591256 - DNA, 25 bp, Homo sapien
ggcggcgccaatcccgtagttgtgc

SEQ ID NO: 1591257 - DNA, 25 bp, Homo sapien
ccaaggtcttgacgcagagacagca

SEQ ID NO: 1591258 - DNA, 25 bp, Homo sapien
ggagtccaggttgcttcccagcagg

SEQ ID NO: 1591259 - DNA, 25 bp, Homo sapien
caggacactctcttcagggattaag

SEQ ID NO: 1591260 - DNA, 25 bp, Homo sapien
catctgtcccgtggtctgtgtaccg

SEQ ID NO: 1591261 - DNA, 25 bp, Homo sapien
cttcttgtccgggatggaacagaga

SEQ ID NO: 1591262 - DNA, 25 bp, Homo sapien
cagctgtcgctatgactgaaatggc

SEQ ID NO: 1591263 - DNA, 25 bp, Homo sapien
tgctggcttgtacacagggtggtca

SEQ ID NO: 1591264 - DNA, 25 bp, Homo sapien
tgtcctctgacaaggcacacagaag

SEQ ID NO: 1591265 - DNA, 25 bp, Homo sapien
ctccggcgcagccaccgaggaagta

SEQ ID NO: 1591266 - DNA, 25 bp, Homo sapien
ctcccagagtcaggcctccggcgca

SEQ ID NO: 1591267 - DNA, 25 bp, Homo sapien
tcagggggtcgtcgggcttctcgcg

SEQ ID NO: 1591268 - DNA, 25 bp, Homo sapien
cagccaccgaggaagtagttcaggg

SEQ ID NO: 1591269 - DNA, 25 bp, Homo sapien
gcaggtggtgaggccaaacacggcc

SEQ ID NO: 1591270 - DNA, 25 bp, Homo sapien
gtgaggccaaacacggccccgacag

SEQ ID NO: 1591271 - DNA, 25 bp, Homo sapien
caggtggtgaggccaaacacggccc

SEQ ID NO: 1591272 - DNA, 25 bp, Homo sapien
gtggtgaggccaaacacggccccga

SEQ ID NO: 1591273 - DNA, 25 bp, Homo sapien
aagagcaagggcctcgagacgggca

SEQ ID NO: 1591274 - DNA, 25 bp, Homo sapien
caagggcctcgagacgggcacagca

SEQ ID NO: 1591275 - DNA, 25 bp, Homo sapien
agcaagggcctcgagacgggcacag

SEQ ID NO: 1591276 - DNA, 25 bp, Homo sapien
ctgcggggtagacgggaagagcaag

SEQ ID NO: 1591277 - DNA, 25 bp, Homo sapien
gctgctcgctgtgcatggcagcctc

SEQ ID NO: 1591278 - DNA, 25 bp, Homo sapien
aggaacaccccactttctccggatg

SEQ ID NO: 1591279 - DNA, 25 bp, Homo sapien
caccctacatgtattcctgataaag

SEQ ID NO: 1591280 - DNA, 25 bp, Homo sapien
agagagatgccacgagtcggctgct

SEQ ID NO: 1591281 - DNA, 25 bp, Homo sapien
gcagtgaacgtgtattgtccaacct

SEQ ID NO: 1591282 - DNA, 25 bp, Homo sapien
tgcagtgaacgtgtattgtccaacc

SEQ ID NO: 1591283 - DNA, 25 bp, Homo sapien
ctgcagtgaacgtgtattgtccaac

SEQ ID NO: 1591284 - DNA, 25 bp, Homo sapien
ccggaggattgagtgtgactctgta

SEQ ID NO: 1591285 - DNA, 25 bp, Homo sapien
ttcaaggaaggtgcccggaggattg

SEQ ID NO: 1591286 - DNA, 25 bp, Homo sapien
gaaggtgcccggaggattgagtgtg

SEQ ID NO: 1591287 - DNA, 25 bp, Homo sapien
tgcccggaggattgagtgtgactct

SEQ ID NO: 1591288 - DNA, 25 bp, Homo sapien
tgcagcccagcttcaaatgaccctg

SEQ ID NO: 1591289 - DNA, 25 bp, Homo sapien
aatgaccctggagcagttaatatgc

SEQ ID NO: 1591290 - DNA, 25 bp, Homo sapien
ttgcttcagagacccctaggagcag

SEQ ID NO: 1591291 - DNA, 25 bp, Homo sapien
taggagcaggtcagccgacctggac

SEQ ID NO: 1591292 - DNA, 25 bp, Homo sapien
gggacctgatgagtcccaacctgtg

SEQ ID NO: 1591293 - DNA, 25 bp, Homo sapien
gcctggcccagtttgtaaagattct

SEQ ID NO: 1591294 - DNA, 25 bp, Homo sapien
actttggcctcctgagcgccggatt

SEQ ID NO: 1591295 - DNA, 25 bp, Homo sapien
tttggcctcctgagcgccggattac

SEQ ID NO: 1591296 - DNA, 25 bp, Homo sapien
tgctgtaggctttgcggtggcaatc

SEQ ID NO: 1591297 - DNA, 25 bp, Homo sapien
gggatatcccagtactgacgaaaaa

SEQ ID NO: 1591298 - DNA, 25 bp, Homo sapien
tactgacgaaaaaccttcggcgcca

SEQ ID NO: 1591299 - DNA, 25 bp, Homo sapien
cagcgacgctggcaatactggtggt

SEQ ID NO: 1591300 - DNA, 25 bp, Homo sapien
agccgcggctggctatcgcgagact

SEQ ID NO: 1591301 - DNA, 25 bp, Homo sapien
cgcgcaacctttcgggctagcgggc

SEQ ID NO: 1591302 - DNA, 25 bp, Homo sapien
tatcgcgagacttctcgggctgcgc

SEQ ID NO: 1591303 - DNA, 25 bp, Homo sapien
ggctgcgcgcgcaacctttcgggct

SEQ ID NO: 1591304 - DNA, 25 bp, Homo sapien
ccaggccgattcctagagggtgaaa

SEQ ID NO: 1591305 - DNA, 25 bp, Homo sapien
gcaactttattgataggcgcggaca

SEQ ID NO: 1591306 - DNA, 25 bp, Homo sapien
ggtgaaactgaggacgactgcgatc

SEQ ID NO: 1591307 - DNA, 25 bp, Homo sapien
cagatttcgctagtcccagctcagg

SEQ ID NO: 1591308 - DNA, 25 bp, Homo sapien
cgtggccatgatgaccagtgcctgg

SEQ ID NO: 1591309 - DNA, 25 bp, Homo sapien
taacaggagtcactggctcaggacc

SEQ ID NO: 1591310 - DNA, 25 bp, Homo sapien
aagtttagacctgcccaggtgtgga

SEQ ID NO: 1591311 - DNA, 25 bp, Homo sapien
cagagatcttgcagcccctgtggat

SEQ ID NO: 1591312 - DNA, 25 bp, Homo sapien
cgttgtactcgtcactagctggcta

SEQ ID NO: 1591313 - DNA, 25 bp, Homo sapien
tcttaaccctccgagagtgggactg

SEQ ID NO: 1591314 - DNA, 25 bp, Homo sapien
caacagcgggaagcagtttgcgcct

SEQ ID NO: 1591315 - DNA, 25 bp, Homo sapien
tgctgcgtgcttgtgagactgcctg

SEQ ID NO: 1591316 - DNA, 25 bp, Homo sapien
tagtagttaacagcacgtccaatgg

SEQ ID NO: 1591317 - DNA, 25 bp, Homo sapien
atgaagatagtagttaacagcacgt

SEQ ID NO: 1591318 - DNA, 25 bp, Homo sapien
aatatacacccccaatcagagaggg

SEQ ID NO: 1591319 - DNA, 25 bp, Homo sapien
ttaacagcacgtccaatgggcccag

SEQ ID NO: 1591320 - DNA, 25 bp, Homo sapien
tcccaggcctatagttggggagccc

SEQ ID NO: 1591321 - DNA, 25 bp, Homo sapien
ggtcccaggcctatagttggggagc

SEQ ID NO: 1591322 - DNA, 25 bp, Homo sapien
tacactcgtacgagcagccccccaa

SEQ ID NO: 1591323 - DNA, 25 bp, Homo sapien
ccaggcctatagttggggagccctg

SEQ ID NO: 1591324 - DNA, 25 bp, Homo sapien
tcccagtgagaagccgtgacaagtc

SEQ ID NO: 1591325 - DNA, 25 bp, Homo sapien
tatgatgaggtctcgtgtcccaaac

SEQ ID NO: 1591326 - DNA, 25 bp, Homo sapien
gtggatagacggacaaagcagcagc

SEQ ID NO: 1591327 - DNA, 25 bp, Homo sapien
tgcttttgaacaggacgtgcgggtc

SEQ ID NO: 1591328 - DNA, 25 bp, Homo sapien
ggtcgtctgcccgtccccttcgtca

SEQ ID NO: 1591329 - DNA, 25 bp, Homo sapien
tcgtctgcccgtccccttcgtcacc

SEQ ID NO: 1591330 - DNA, 25 bp, Homo sapien
ctgcccgtccccttcgtcaccagca

SEQ ID NO: 1591331 - DNA, 25 bp, Homo sapien
gtctgcccgtccccttcgtcaccag

SEQ ID NO: 1591332 - DNA, 25 bp, Homo sapien
gctgtcgtcctcctcgttggatggg

SEQ ID NO: 1591333 - DNA, 25 bp, Homo sapien
aaggagccaggacatcgtcatcgtc

SEQ ID NO: 1591334 - DNA, 25 bp, Homo sapien
tgcatacaactgacctgtgtccttg

SEQ ID NO: 1591335 - DNA, 25 bp, Homo sapien
cagggccaggatgcggtggtgcagg

SEQ ID NO: 1591336 - DNA, 25 bp, Homo sapien
ctcggtgtccatggctgtgatgcga

SEQ ID NO: 1591337 - DNA, 25 bp, Homo sapien
gatgcgaatgctcttctcgctggcc

SEQ ID NO: 1591338 - DNA, 25 bp, Homo sapien
tgttgaggatcagtcgcaggctccc

SEQ ID NO: 1591339 - DNA, 25 bp, Homo sapien
atctgggcccacagcttggtgttga

SEQ ID NO: 1591340 - DNA, 25 bp, Homo sapien
caagcctggaccactgaaggccaca

SEQ ID NO: 1591341 - DNA, 25 bp, Homo sapien
tggaccactgaaggccacaactgca

SEQ ID NO: 1591342 - DNA, 25 bp, Homo sapien
ccactgaaggccacaactgcaggtg

SEQ ID NO: 1591343 - DNA, 25 bp, Homo sapien
ggccacaactgcaggtggctgcaca

SEQ ID NO: 1591344 - DNA, 25 bp, Homo sapien
agacggtcagaaacttgtccccctg

SEQ ID NO: 1591345 - DNA, 25 bp, Homo sapien
gcctggagacggtcagaaacttgtc

SEQ ID NO: 1591346 - DNA, 25 bp, Homo sapien
gacggtcagaaacttgtccccctgc

SEQ ID NO: 1591347 - DNA, 25 bp, Homo sapien
tggagacggtcagaaacttgtcccc

SEQ ID NO: 1591348 - DNA, 25 bp, Homo sapien
ctcacaagggtagggtcaggatctc

SEQ ID NO: 1591349 - DNA, 25 bp, Homo sapien
gacactaagagggtcacggacgagc

SEQ ID NO: 1591350 - DNA, 25 bp, Homo sapien
ttggaattgcatagtccccagccct

SEQ ID NO: 1591351 - DNA, 25 bp, Homo sapien
gggagaccgactctgtgccttgact

SEQ ID NO: 1591352 - DNA, 25 bp, Homo sapien
catgtcattgagtctgagcagcccc

SEQ ID NO: 1591353 - DNA, 25 bp, Homo sapien
tcggtggacgccatgtcattgagtc

SEQ ID NO: 1591354 - DNA, 25 bp, Homo sapien
tagtgtgccgtcatcggtggacgcc

SEQ ID NO: 1591355 - DNA, 25 bp, Homo sapien
tagtcgggactgtagtgtgccgtca

SEQ ID NO: 1591356 - DNA, 25 bp, Homo sapien
tgaggtcttgtcaaagacaaacagc

SEQ ID NO: 1591357 - DNA, 25 bp, Homo sapien
cagtggccgccggtaagcagggacc

SEQ ID NO: 1591358 - DNA, 25 bp, Homo sapien
acagtggccgccggtaagcagggac

SEQ ID NO: 1591359 - DNA, 25 bp, Homo sapien
ccgccggtaagcagggaccccagct

SEQ ID NO: 1591360 - DNA, 25 bp, Homo sapien
tggccgccggtaagcagggacccca

SEQ ID NO: 1591361 - DNA, 25 bp, Homo sapien
ctccccggtgatgacttccactttt

SEQ ID NO: 1591362 - DNA, 25 bp, Homo sapien
tttccaacaaacacttccgcgctgt

SEQ ID NO: 1591363 - DNA, 25 bp, Homo sapien
gttgccttggtgtaggcggctgccg

SEQ ID NO: 1591364 - DNA, 25 bp, Homo sapien
ctgtaacacattgctctccgcctcc

SEQ ID NO: 1591365 - DNA, 25 bp, Homo sapien
cagaccctgactcggcagctgcatt

SEQ ID NO: 1591366 - DNA, 25 bp, Homo sapien
cctgttggcatctgaactgacctcg

SEQ ID NO: 1591367 - DNA, 25 bp, Homo sapien
tcctgggacgaggactcagaccctg

SEQ ID NO: 1591368 - DNA, 25 bp, Homo sapien
ctgaactgacctcgtttaattttgg

SEQ ID NO: 1591369 - DNA, 25 bp, Homo sapien
ggctggcgccgagagcctctggtcc

SEQ ID NO: 1591370 - DNA, 25 bp, Homo sapien
tggcgccgagagcctctggtccctg

SEQ ID NO: 1591371 - DNA, 25 bp, Homo sapien
cctgtggctggcgccgagagcctct

SEQ ID NO: 1591372 - DNA, 25 bp, Homo sapien
gacctgtggctggcgccgagagcct

SEQ ID NO: 1591373 - DNA, 25 bp, Homo sapien
tggaggcgtcggcactattggttga

SEQ ID NO: 1591374 - DNA, 25 bp, Homo sapien
acaaatttgttgctggaggcgtcgg

SEQ ID NO: 1591375 - DNA, 25 bp, Homo sapien
gcgtcggcactattggttgagttct

SEQ ID NO: 1591376 - DNA, 25 bp, Homo sapien
atacaaatttgttgctggaggcgtc

SEQ ID NO: 1591377 - DNA, 25 bp, Homo sapien
tgaagagaagatgtgcaatgagtgt

SEQ ID NO: 1591378 - DNA, 25 bp, Homo sapien
ggtacccatggagcacacactgaca

SEQ ID NO: 1591379 - DNA, 25 bp, Homo sapien
cacactgacacagagggcacagtgg

SEQ ID NO: 1591380 - DNA, 25 bp, Homo sapien
ccaggcaaatgtatgggtacccatg

SEQ ID NO: 1591381 - DNA, 25 bp, Homo sapien
tgtctcaggcgtccagtgaatccca

SEQ ID NO: 1591382 - DNA, 25 bp, Homo sapien
tcgggacacgctttcttctgagaca

SEQ ID NO: 1591383 - DNA, 25 bp, Homo sapien
taacccttagctcgccctgatggag

SEQ ID NO: 1591384 - DNA, 25 bp, Homo sapien
tgatgaggtctttgccccaggtgcc

SEQ ID NO: 1591385 - DNA, 25 bp, Homo sapien
gttggcgtgtctgcgctggggtgtc

SEQ ID NO: 1591386 - DNA, 25 bp, Homo sapien
atatactggaggaaatagttcgttg

SEQ ID NO: 1591387 - DNA, 25 bp, Homo sapien
ctggaggaaatagttcgttgcggtt

SEQ ID NO: 1591388 - DNA, 25 bp, Homo sapien
aaatagttcgttgcggttggcgtgt

SEQ ID NO: 1591389 - DNA, 25 bp, Homo sapien
cttcgtccacgctctcatttatcag

SEQ ID NO: 1591390 - DNA, 25 bp, Homo sapien
ctgtgtggcggggtcttttttctca

SEQ ID NO: 1591391 - DNA, 25 bp, Homo sapien
tggcggggtcttttttctcacaggc

SEQ ID NO: 1591392 - DNA, 25 bp, Homo sapien
taactctgtccctcaagttctgccc

SEQ ID NO: 1591393 - DNA, 25 bp, Homo sapien
gttctgcccaaatacaaaggcttgc

SEQ ID NO: 1591394 - DNA, 25 bp, Homo sapien
ggcagcttcggaaggacttctccat

SEQ ID NO: 1591395 - DNA, 25 bp, Homo sapien
gaggctgaccccgttggtgccactg

SEQ ID NO: 1591396 - DNA, 25 bp, Homo sapien
tccatgcagcagtgtcaggggatgc

SEQ ID NO: 1591397 - DNA, 25 bp, Homo sapien
ctcatcggcagcttcggaaggactt

SEQ ID NO: 1591398 - DNA, 25 bp, Homo sapien
cagtctgggacagcgcctttggctg

SEQ ID NO: 1591399 - DNA, 25 bp, Homo sapien
gcttgtaacactgccgggcgaagca

SEQ ID NO: 1591400 - DNA, 25 bp, Homo sapien
gggcgaagcacgctccgctgctgct

SEQ ID NO: 1591401 - DNA, 25 bp, Homo sapien
tttggctgcggagcttgtaacactg

SEQ ID NO: 1591402 - DNA, 25 bp, Homo sapien
gaccgacgcctgtgaattaatccag

SEQ ID NO: 1591403 - DNA, 25 bp, Homo sapien
ttacatgaaactcccagtgaccgac

SEQ ID NO: 1591404 - DNA, 25 bp, Homo sapien
gccccttgcaggctagactttgcag

SEQ ID NO: 1591405 - DNA, 25 bp, Homo sapien
tccagttagcacagtaacgtggcgg

SEQ ID NO: 1591406 - DNA, 25 bp, Homo sapien
gggtcacgtacaggcacattttgca

SEQ ID NO: 1591407 - DNA, 25 bp, Homo sapien
gctcaggactcggtgtggggtcacg

SEQ ID NO: 1591408 - DNA, 25 bp, Homo sapien
gtgtggggtcacgtacaggcacatt

SEQ ID NO: 1591409 - DNA, 25 bp, Homo sapien
caggactcggtgtggggtcacgtac

SEQ ID NO: 1591410 - DNA, 25 bp, Homo sapien
gacaaggacccttgcatgtgccctg

SEQ ID NO: 1591411 - DNA, 25 bp, Homo sapien
ttttctgaacacacgacgctcacag

SEQ ID NO: 1591412 - DNA, 25 bp, Homo sapien
gaaccaagtgcgctactgctgggca

SEQ ID NO: 1591413 - DNA, 25 bp, Homo sapien
cagggctcgtgggtcaagttacaag

SEQ ID NO: 1591414 - DNA, 25 bp, Homo sapien
tggccgtggatcagcgttggtggct

SEQ ID NO: 1591415 - DNA, 25 bp, Homo sapien
gggcttggccgtggatcagcgttgg

SEQ ID NO: 1591416 - DNA, 25 bp, Homo sapien
gcgttggtggcttcaaccggaagcc

SEQ ID NO: 1591417 - DNA, 25 bp, Homo sapien
tggcttcaaccggaagccactgctc

SEQ ID NO: 1591418 - DNA, 25 bp, Homo sapien
acaaaatatcaacagcaggcctgcc

SEQ ID NO: 1591419 - DNA, 25 bp, Homo sapien
gacaaaatatcaacagcaggcctgc

SEQ ID NO: 1591420 - DNA, 25 bp, Homo sapien
ccagagtccgggctgacaaattcac

SEQ ID NO: 1591421 - DNA, 25 bp, Homo sapien
gaagaaccttggcaccactacagat

SEQ ID NO: 1591422 - DNA, 25 bp, Homo sapien
cagaagtctcgtccgatcagcaggc

SEQ ID NO: 1591423 - DNA, 25 bp, Homo sapien
ggaaaggtgaatgcccacgagctcc

SEQ ID NO: 1591424 - DNA, 25 bp, Homo sapien
cggaattgcctgcagatggctcgca

SEQ ID NO: 1591425 - DNA, 25 bp, Homo sapien
cctgcagatggctcgcagaagcttg

SEQ ID NO: 1591426 - DNA, 25 bp, Homo sapien
ttggctctgagtcggaattgcctgc

SEQ ID NO: 1591427 - DNA, 25 bp, Homo sapien
agatggctcgcagaagcttgatggc

SEQ ID NO: 1591428 - DNA, 25 bp, Homo sapien
ctgggttaaagaggatgttctttct

SEQ ID NO: 1591429 - DNA, 25 bp, Homo sapien
aggatgttctttctcgcttgacagg

SEQ ID NO: 1591430 - DNA, 25 bp, Homo sapien
gatgttctttctcgcttgacaggag

SEQ ID NO: 1591431 - DNA, 25 bp, Homo sapien
ggatgttctttctcgcttgacagga

SEQ ID NO: 1591432 - DNA, 25 bp, Homo sapien
ttcaggactggagccgccagctgac

SEQ ID NO: 1591433 - DNA, 25 bp, Homo sapien
caggactggagccgccagctgacct

SEQ ID NO: 1591434 - DNA, 25 bp, Homo sapien
ccttcaggactggagccgccagctg

SEQ ID NO: 1591435 - DNA, 25 bp, Homo sapien
cttcaggactggagccgccagctga

SEQ ID NO: 1591436 - DNA, 25 bp, Homo sapien
cttgcccagccttcggtctcctcac

SEQ ID NO: 1591437 - DNA, 25 bp, Homo sapien
caggcagctgtgagaaacaacacct

SEQ ID NO: 1591438 - DNA, 25 bp, Homo sapien
aggcagctgtgagaaacaacacctg

SEQ ID NO: 1591439 - DNA, 25 bp, Homo sapien
acaggcagctgtgagaaacaacacc

SEQ ID NO: 1591440 - DNA, 25 bp, Homo sapien
cacctctagggtaagttcatgctca

SEQ ID NO: 1591441 - DNA, 25 bp, Homo sapien
gagatgctgtgagcaccacctctag

SEQ ID NO: 1591442 - DNA, 25 bp, Homo sapien
tcagaggtgtctcctacaacacagt

SEQ ID NO: 1591443 - DNA, 25 bp, Homo sapien
ggagctaccctgttttgttctatca

SEQ ID NO: 1591444 - DNA, 25 bp, Homo sapien
gtgggtggagtccgtgtcctccacc

SEQ ID NO: 1591445 - DNA, 25 bp, Homo sapien
cacttgctgaggacttgctgcgtgg

SEQ ID NO: 1591446 - DNA, 25 bp, Homo sapien
tgcgtgggtggagtccgtgtcctcc

SEQ ID NO: 1591447 - DNA, 25 bp, Homo sapien
cgtgggtggagtccgtgtcctccac

SEQ ID NO: 1591448 - DNA, 25 bp, Homo sapien
cagagaacttaatcgggatgtggtt

SEQ ID NO: 1591449 - DNA, 25 bp, Homo sapien
gccaggaagtctgatatatagagac

SEQ ID NO: 1591450 - DNA, 25 bp, Homo sapien
aattccaccaggctcgcagtgagtg

SEQ ID NO: 1591451 - DNA, 25 bp, Homo sapien
gggagcttcagtccagtacaattcc

SEQ ID NO: 1591452 - DNA, 25 bp, Homo sapien
ttcaaaaggcttcttaatacaaaga

SEQ ID NO: 1591453 - DNA, 25 bp, Homo sapien
caaaaggcttcttaatacaaagata

SEQ ID NO: 1591454 - DNA, 25 bp, Homo sapien
atacaaagataaagggctcagggga

SEQ ID NO: 1591455 - DNA, 25 bp, Homo sapien
acaaagataaagggctcaggggatt

SEQ ID NO: 1591456 - DNA, 25 bp, Homo sapien
ggaggcggaggagtgctggctgagg

SEQ ID NO: 1591457 - DNA, 25 bp, Homo sapien
gctcctctcccgaatccgacaagtt

SEQ ID NO: 1591458 - DNA, 25 bp, Homo sapien
ccctgccagttctcgcggaaaagga

SEQ ID NO: 1591459 - DNA, 25 bp, Homo sapien
ttctagggcatgctcgccagctgac

SEQ ID NO: 1591460 - DNA, 25 bp, Homo sapien
gacccagacaccctgaatccaaggg

SEQ ID NO: 1591461 - DNA, 25 bp, Homo sapien
caattactctaaatgcacgtacgcc

SEQ ID NO: 1591462 - DNA, 25 bp, Homo sapien
cccagctcgttagggccaataaatc

SEQ ID NO: 1591463 - DNA, 25 bp, Homo sapien
gcagcctcatggacacgggataaat

SEQ ID NO: 1591464 - DNA, 25 bp, Homo sapien
gaaacacaaagacgggcggagcaat

SEQ ID NO: 1591465 - DNA, 25 bp, Homo sapien
tctgaaacacaaagacgggcggagc

SEQ ID NO: 1591466 - DNA, 25 bp, Homo sapien
caaagacgggcggagcaatggcagg

SEQ ID NO: 1591467 - DNA, 25 bp, Homo sapien
cacaaagacgggcggagcaatggca

SEQ ID NO: 1591468 - DNA, 25 bp, Homo sapien
gcactggtgcctccgcgttgagcag

SEQ ID NO: 1591469 - DNA, 25 bp, Homo sapien
tgggaagagccctgccttcgcaggc

SEQ ID NO: 1591470 - DNA, 25 bp, Homo sapien
tagcgtggaggccaagcaagagcag

SEQ ID NO: 1591471 - DNA, 25 bp, Homo sapien
ctgcgggctgcgcactggtgcctcc

SEQ ID NO: 1591472 - DNA, 25 bp, Homo sapien
gctgcccatgatcacgacgaaggca

SEQ ID NO: 1591473 - DNA, 25 bp, Homo sapien
catgatcacgacgaaggcactctgc

SEQ ID NO: 1591474 - DNA, 25 bp, Homo sapien
tgcttgggcattgacctggtctgct

SEQ ID NO: 1591475 - DNA, 25 bp, Homo sapien
tgacctggtctgctctggagtccag

SEQ ID NO: 1591476 - DNA, 25 bp, Homo sapien
tccccgaagcctcggcacaccaggg

SEQ ID NO: 1591477 - DNA, 25 bp, Homo sapien
tgattcaccgtgtacagccaaggca

SEQ ID NO: 1591478 - DNA, 25 bp, Homo sapien
ctgatggtgacattccccccaccat

SEQ ID NO: 1591479 - DNA, 25 bp, Homo sapien
gtctgattcaccgtgtacagccaag

SEQ ID NO: 1591480 - DNA, 25 bp, Homo sapien
tcaggggcactgtgcaccaagtccc

SEQ ID NO: 1591481 - DNA, 25 bp, Homo sapien
caggggcactgtgcaccaagtccca

SEQ ID NO: 1591482 - DNA, 25 bp, Homo sapien
cttcaggggcactgtgcaccaagtc

SEQ ID NO: 1591483 - DNA, 25 bp, Homo sapien
gggcactgtgcaccaagtcccacat

SEQ ID NO: 1591484 - DNA, 25 bp, Homo sapien
aatgggaccagctgggattccccag

SEQ ID NO: 1591485 - DNA, 25 bp, Homo sapien
gacaggctaagaagcaagccagccc

SEQ ID NO: 1591486 - DNA, 25 bp, Homo sapien
agcacagacaggctaagaagcaagc

SEQ ID NO: 1591487 - DNA, 25 bp, Homo sapien
tgtgaggctccgatgcaaaatggga

SEQ ID NO: 1591488 - DNA, 25 bp, Homo sapien
tcagagtggacagcggagttaaaac

SEQ ID NO: 1591489 - DNA, 25 bp, Homo sapien
taggtccaaggatgctaccgtgctg

SEQ ID NO: 1591490 - DNA, 25 bp, Homo sapien
taccgtgctgctaaggatcctgcaa

SEQ ID NO: 1591491 - DNA, 25 bp, Homo sapien
gagagccatcaaaacgtcaactgca

SEQ ID NO: 1591492 - DNA, 25 bp, Homo sapien
tgcgcgctgaatgccgcgcggaggc

SEQ ID NO: 1591493 - DNA, 25 bp, Homo sapien
cgcgcgtgcgcacttaacaagccga

SEQ ID NO: 1591494 - DNA, 25 bp, Homo sapien
tctgccagaaactcccgcgcgtgcg

SEQ ID NO: 1591495 - DNA, 25 bp, Homo sapien
ccgactccgtgtgaggcggccagct

SEQ ID NO: 1591496 - DNA, 25 bp, Homo sapien
cggtaagctccgcatctgctggggt

SEQ ID NO: 1591497 - DNA, 25 bp, Homo sapien
ggtaagctccgcatctgctggggtt

SEQ ID NO: 1591498 - DNA, 25 bp, Homo sapien
tcagttggcggccattttgaggagc

SEQ ID NO: 1591499 - DNA, 25 bp, Homo sapien
gaggaggtctggacggccagatgcc

SEQ ID NO: 1591500 - DNA, 25 bp, Homo sapien
ggagggtgtttccattgtgggagtg

SEQ ID NO: 1591501 - DNA, 25 bp, Homo sapien
tgctgtcttgctctgccgagggcca

SEQ ID NO: 1591502 - DNA, 25 bp, Homo sapien
atggcctgcggacctcaagcgggct

SEQ ID NO: 1591503 - DNA, 25 bp, Homo sapien
tgcggacctcaagcgggctcctctt

SEQ ID NO: 1591504 - DNA, 25 bp, Homo sapien
gaggcacatgatggcctgcggacct

SEQ ID NO: 1591505 - DNA, 25 bp, Homo sapien
ccagagggctttggaggcacatgat

SEQ ID NO: 1591506 - DNA, 25 bp, Homo sapien
tgtcacctgagacagagaggcctgg

SEQ ID NO: 1591507 - DNA, 25 bp, Homo sapien
tggcactcgggaaactggcctggct

SEQ ID NO: 1591508 - DNA, 25 bp, Homo sapien
tgttggcaccgtcaggacacagtgg

SEQ ID NO: 1591509 - DNA, 25 bp, Homo sapien
tgtctgaaattgtgacccagcaggg

SEQ ID NO: 1591510 - DNA, 25 bp, Homo sapien
ttttcgtttctaaagtgagcacgcg

SEQ ID NO: 1591511 - DNA, 25 bp, Homo sapien
gggcattacaatccgttaactgtga

SEQ ID NO: 1591512 - DNA, 25 bp, Homo sapien
tttttaaaggccacgtgagctgaca

SEQ ID NO: 1591513 - DNA, 25 bp, Homo sapien
taaggtttgggctatacgaccagac

SEQ ID NO: 1591514 - DNA, 25 bp, Homo sapien
aactccagcacgcagctgtccaact

SEQ ID NO: 1591515 - DNA, 25 bp, Homo sapien
ttagaaatcgcgtcctgggccgagg

SEQ ID NO: 1591516 - DNA, 25 bp, Homo sapien
actccagcacgcagctgtccaactg

SEQ ID NO: 1591517 - DNA, 25 bp, Homo sapien
ctccagcacgcagctgtccaactgc

SEQ ID NO: 1591518 - DNA, 25 bp, Homo sapien
tgtttgtcccgagagaagagttttg

SEQ ID NO: 1591519 - DNA, 25 bp, Homo sapien
tttccatggagacaaacttggtgtc

SEQ ID NO: 1591520 - DNA, 25 bp, Homo sapien
gacggtgaacttggacagagtccca

SEQ ID NO: 1591521 - DNA, 25 bp, Homo sapien
caagttcagggcttcgaaagtcccg

SEQ ID NO: 1591522 - DNA, 25 bp, Homo sapien
cactaatttggtggagccggtgaaa

SEQ ID NO: 1591523 - DNA, 25 bp, Homo sapien
ctggatctaaaaggccacagggcgc

SEQ ID NO: 1591524 - DNA, 25 bp, Homo sapien
gaataaggaacccatggtctggtgg

SEQ ID NO: 1591525 - DNA, 25 bp, Homo sapien
tgccgggacacagcgattgtcagct

SEQ ID NO: 1591526 - DNA, 25 bp, Homo sapien
ctcgaggaggcgccggccggggctg

SEQ ID NO: 1591527 - DNA, 25 bp, Homo sapien
actgcgctcccgctttaccaggggc

SEQ ID NO: 1591528 - DNA, 25 bp, Homo sapien
tcactgcgctcccgctttaccaggg

SEQ ID NO: 1591529 - DNA, 25 bp, Homo sapien
tgcgctcccgctttaccaggggctc

SEQ ID NO: 1591530 - DNA, 25 bp, Homo sapien
gtcactgcgctcccgctttaccagg

SEQ ID NO: 1591531 - DNA, 25 bp, Homo sapien
aggctgcgggcgtctgggcccgcct

SEQ ID NO: 1591532 - DNA, 25 bp, Homo sapien
ccacgctgctcatcgcccatgtcat

SEQ ID NO: 1591533 - DNA, 25 bp, Homo sapien
ctcgctgccacgctgctcatcgccc

SEQ ID NO: 1591534 - DNA, 25 bp, Homo sapien
gctgccacgctgctcatcgcccatg

SEQ ID NO: 1591535 - DNA, 25 bp, Homo sapien
tcagcgacagagaggcgagatcgtt

SEQ ID NO: 1591536 - DNA, 25 bp, Homo sapien
tgtcgagcagcgtcagcgacagaga

SEQ ID NO: 1591537 - DNA, 25 bp, Homo sapien
ctttgtcgagcagcgtcagcgacag

SEQ ID NO: 1591538 - DNA, 25 bp, Homo sapien
agcgtcagcgacagagaggcgagat

SEQ ID NO: 1591539 - DNA, 25 bp, Homo sapien
tctcccatcacagcgatcggcgtct

SEQ ID NO: 1591540 - DNA, 25 bp, Homo sapien
tctccggtggcctccgcgacgcggt

SEQ ID NO: 1591541 - DNA, 25 bp, Homo sapien
ccaccaggtagaacatgtactcgtc

SEQ ID NO: 1591542 - DNA, 25 bp, Homo sapien
caccaggtagaacatgtactcgtcg

SEQ ID NO: 1591543 - DNA, 25 bp, Homo sapien
gaccctcaggggagcatggaacccg

SEQ ID NO: 1591544 - DNA, 25 bp, Homo sapien
ctgagtgatcctaagacgtgcaggc

SEQ ID NO: 1591545 - DNA, 25 bp, Homo sapien
agaggctgagtgatcctaagacgtg

SEQ ID NO: 1591546 - DNA, 25 bp, Homo sapien
aggctgagtgatcctaagacgtgca

SEQ ID NO: 1591547 - DNA, 25 bp, Homo sapien
cttgccacctcccgccattcctcag

SEQ ID NO: 1591548 - DNA, 25 bp, Homo sapien
ccgtatccttgccacctcccgccat

SEQ ID NO: 1591549 - DNA, 25 bp, Homo sapien
ccacctcccgccattcctcagcctg

SEQ ID NO: 1591550 - DNA, 25 bp, Homo sapien
tccccgtatccttgccacctcccgc

SEQ ID NO: 1591551 - DNA, 25 bp, Homo sapien
aaactttggcctacaagccaggcgg

SEQ ID NO: 1591552 - DNA, 25 bp, Homo sapien
tgttacgtctaatcggtatcgagcg

SEQ ID NO: 1591553 - DNA, 25 bp, Homo sapien
tcgagcgataaaaagaagacacagg

SEQ ID NO: 1591554 - DNA, 25 bp, Homo sapien
tgccccggctcgaagtatactttca

SEQ ID NO: 1591555 - DNA, 25 bp, Homo sapien
ctctcggaggtctggtgggactaac

SEQ ID NO: 1591556 - DNA, 25 bp, Homo sapien
ccagaattctctcggaggtctggtg

SEQ ID NO: 1591557 - DNA, 25 bp, Homo sapien
ccgccagaattctctcggaggtctg

SEQ ID NO: 1591558 - DNA, 25 bp, Homo sapien
tctctcggaggtctggtgggactaa

SEQ ID NO: 1591559 - DNA, 25 bp, Homo sapien
tgccggcatgctgcttcaggacctg

SEQ ID NO: 1591560 - DNA, 25 bp, Homo sapien
ggctgccggcatgctgcttcaggac

SEQ ID NO: 1591561 - DNA, 25 bp, Homo sapien
tcagcaagaactgccgggcggcctt

SEQ ID NO: 1591562 - DNA, 25 bp, Homo sapien
aggacctgggtgaccacactgtcca

SEQ ID NO: 1591563 - DNA, 25 bp, Homo sapien
gggcgaaggcactgacgacgcccac

SEQ ID NO: 1591564 - DNA, 25 bp, Homo sapien
cagcgtctgggcgaaggcactgacg

SEQ ID NO: 1591565 - DNA, 25 bp, Homo sapien
gacgtgttctgcagcaccgcccggg

SEQ ID NO: 1591566 - DNA, 25 bp, Homo sapien
tggttgatctgggacgtgttctgca

SEQ ID NO: 1591567 - DNA, 25 bp, Homo sapien
tgtaagccagggctcgtggtgagca

SEQ ID NO: 1591568 - DNA, 25 bp, Homo sapien
ggagagcctgttccgctgcgctcct

SEQ ID NO: 1591569 - DNA, 25 bp, Homo sapien
cagggagagcctgttccgctgcgct

SEQ ID NO: 1591570 - DNA, 25 bp, Homo sapien
gttcgcagggagagcctgttccgct

SEQ ID NO: 1591571 - DNA, 25 bp, Homo sapien
aaagttacggatggcctgtgtcaag

SEQ ID NO: 1591572 - DNA, 25 bp, Homo sapien
ttggtctggatgacctgttgtggga

SEQ ID NO: 1591573 - DNA, 25 bp, Homo sapien
tgtgggaagtcactcatggcatttg

SEQ ID NO: 1591574 - DNA, 25 bp, Homo sapien
aagctcttggcaaagttacggatgg

SEQ ID NO: 1591575 - DNA, 25 bp, Homo sapien
aatgaccaccatgaagaacgagcca

SEQ ID NO: 1591576 - DNA, 25 bp, Homo sapien
tggaaatcagcattcagtgtaagag

SEQ ID NO: 1591577 - DNA, 25 bp, Homo sapien
aaggcagtgactggaccctggaaat

SEQ ID NO: 1591578 - DNA, 25 bp, Homo sapien
agctggcccaagtgcgatgaaaatg

SEQ ID NO: 1591579 - DNA, 25 bp, Homo sapien
accggcctcagcacgtcggggatga

SEQ ID NO: 1591580 - DNA, 25 bp, Homo sapien
agggagataagcttgtccttgggca

SEQ ID NO: 1591581 - DNA, 25 bp, Homo sapien
gatgtggtcgcagctcctcatccac

SEQ ID NO: 1591582 - DNA, 25 bp, Homo sapien
ccaccagcgcctggtagaggatgtg

SEQ ID NO: 1591583 - DNA, 25 bp, Homo sapien
ggaggaggccttagagttccagaag

SEQ ID NO: 1591584 - DNA, 25 bp, Homo sapien
ggaggttcatcaccacatctacagt

SEQ ID NO: 1591585 - DNA, 25 bp, Homo sapien
ctcgatgtagtggaactggaggttc

SEQ ID NO: 1591586 - DNA, 25 bp, Homo sapien
cacagcttctcgatgtagtggaact

SEQ ID NO: 1591587 - DNA, 25 bp, Homo sapien
gagcaggcgatggacatggatgcgg

SEQ ID NO: 1591588 - DNA, 25 bp, Homo sapien
ggcgatggacatggatgcggagggg

SEQ ID NO: 1591589 - DNA, 25 bp, Homo sapien
aggagcaggcgatggacatggatgc

SEQ ID NO: 1591590 - DNA, 25 bp, Homo sapien
caggcgatggacatggatgcggagg

SEQ ID NO: 1591591 - DNA, 25 bp, Homo sapien
cctgagcgctggcggttcccgggag

SEQ ID NO: 1591592 - DNA, 25 bp, Homo sapien
ctgcagggccttgacgtcgtgcagt

SEQ ID NO: 1591593 - DNA, 25 bp, Homo sapien
cagtgtgacgccgtcctgcagcagg

SEQ ID NO: 1591594 - DNA, 25 bp, Homo sapien
aagctgcccaggtcgggcgctggga

SEQ ID NO: 1591595 - DNA, 25 bp, Homo sapien
tcgcagtgccgtctgtacaccagct

SEQ ID NO: 1591596 - DNA, 25 bp, Homo sapien
ggttggagagtagtggcgtgatcat

SEQ ID NO: 1591597 - DNA, 25 bp, Homo sapien
gttggagagtagtggcgtgatcatg

SEQ ID NO: 1591598 - DNA, 25 bp, Homo sapien
gtgctggctctgcacggccatggtc

SEQ ID NO: 1591599 - DNA, 25 bp, Homo sapien
cggccatggtctgttccggagtgct

SEQ ID NO: 1591600 - DNA, 25 bp, Homo sapien
tccccgaggctgtccgtcttctggg

SEQ ID NO: 1591601 - DNA, 25 bp, Homo sapien
tgtccccgaggctgtccgtcttctg

SEQ ID NO: 1591602 - DNA, 25 bp, Homo sapien
caaattgaacaacagcagtgagctc

SEQ ID NO: 1591603 - DNA, 25 bp, Homo sapien
tgtgtgtaaaccacctggctcaggg

SEQ ID NO: 1591604 - DNA, 25 bp, Homo sapien
tcctaaaatgacacactgcctggag

SEQ ID NO: 1591605 - DNA, 25 bp, Homo sapien
caatgggttacgcagagcagctgga

SEQ ID NO: 1591606 - DNA, 25 bp, Homo sapien
tggtgagtccggcttcagacgaatc

SEQ ID NO: 1591607 - DNA, 25 bp, Homo sapien
cggttcagtggtgagtccggcttca

SEQ ID NO: 1591608 - DNA, 25 bp, Homo sapien
tcctgcagccggttcagtggtgagt

SEQ ID NO: 1591609 - DNA, 25 bp, Homo sapien
cagacgaatcccatagtaatggtac

SEQ ID NO: 1591610 - DNA, 25 bp, Homo sapien
aattgcctgtgataagtctgtggcc

SEQ ID NO: 1591611 - DNA, 25 bp, Homo sapien
ggagagttggcataattgcctgtga

SEQ ID NO: 1591612 - DNA, 25 bp, Homo sapien
tctctgggccaccagctttgggttg

SEQ ID NO: 1591613 - DNA, 25 bp, Homo sapien
tctgggccaccagctttgggttgga

SEQ ID NO: 1591614 - DNA, 25 bp, Homo sapien
ttggtccaggtacagcaaaagacac

SEQ ID NO: 1591615 - DNA, 25 bp, Homo sapien
caaaagacaccaagaggccgggcac

SEQ ID NO: 1591616 - DNA, 25 bp, Homo sapien
ctgccataggccaagagaaggcggg

SEQ ID NO: 1591617 - DNA, 25 bp, Homo sapien
ggtggattggtccaggtacagcaaa

SEQ ID NO: 1591618 - DNA, 25 bp, Homo sapien
ggctgccgccaattgaaagtaactg

SEQ ID NO: 1591619 - DNA, 25 bp, Homo sapien
acagccaaggctgccgccaattgaa

SEQ ID NO: 1591620 - DNA, 25 bp, Homo sapien
tccagaggtggctgcgaatcaggcc

SEQ ID NO: 1591621 - DNA, 25 bp, Homo sapien
agtaactgcaagcactccagaggtg

SEQ ID NO: 1591622 - DNA, 25 bp, Homo sapien
ggaggaggaagcctcgcattttccc

SEQ ID NO: 1591623 - DNA, 25 bp, Homo sapien
aggaggaagcctcgcattttcccaa

SEQ ID NO: 1591624 - DNA, 25 bp, Homo sapien
aggaagcctcgcattttcccaaaag

SEQ ID NO: 1591625 - DNA, 25 bp, Homo sapien
tcgcattttcccaaaagctccattt

SEQ ID NO: 1591626 - DNA, 25 bp, Homo sapien
gggagactcacaccttccgctgttt

SEQ ID NO: 1591627 - DNA, 25 bp, Homo sapien
acggatcagtttcccgaaggaggcg

SEQ ID NO: 1591628 - DNA, 25 bp, Homo sapien
cactgggtctagcttgtgctcctgg

SEQ ID NO: 1591629 - DNA, 25 bp, Homo sapien
tcagccccataaacacagaacggat

SEQ ID NO: 1591630 - DNA, 25 bp, Homo sapien
agaaagacacgtctgcgtttgtcag

SEQ ID NO: 1591631 - DNA, 25 bp, Homo sapien
aaaagaaagacacgtctgcgtttgt

SEQ ID NO: 1591632 - DNA, 25 bp, Homo sapien
gaaagacacgtctgcgtttgtcaga

SEQ ID NO: 1591633 - DNA, 25 bp, Homo sapien
aaagaaagacacgtctgcgtttgtc

SEQ ID NO: 1591634 - DNA, 25 bp, Homo sapien
cactgatttgagttctctaagcaga

SEQ ID NO: 1591635 - DNA, 25 bp, Homo sapien
ttcatgtttagcctggttttcaggt

SEQ ID NO: 1591636 - DNA, 25 bp, Homo sapien
tctaagcagattaatgaatccctca

SEQ ID NO: 1591637 - DNA, 25 bp, Homo sapien
cagaaatccatctttatggtcactg

SEQ ID NO: 1591638 - DNA, 25 bp, Homo sapien
acaggaagattgaagaagactcggg

SEQ ID NO: 1591639 - DNA, 25 bp, Homo sapien
ggagagaaattctgttgctgaacag

SEQ ID NO: 1591640 - DNA, 25 bp, Homo sapien
gaacaggaagattgaagaagactcg

SEQ ID NO: 1591641 - DNA, 25 bp, Homo sapien
tttaacaccaaatcgctccccaaca

SEQ ID NO: 1591642 - DNA, 25 bp, Homo sapien
tggagatgtctcaagcctggcagca

SEQ ID NO: 1591643 - DNA, 25 bp, Homo sapien
cgcagactatgctctccctgagggt

SEQ ID NO: 1591644 - DNA, 25 bp, Homo sapien
cccagtggcttcaccgtccggattt

SEQ ID NO: 1591645 - DNA, 25 bp, Homo sapien
tgatttatcgcctgttccccgcaga

SEQ ID NO: 1591646 - DNA, 25 bp, Homo sapien
ctggcggcacgtcagactgcggcaa

SEQ ID NO: 1591647 - DNA, 25 bp, Homo sapien
gtcagactgcggcaagcatcacagg

SEQ ID NO: 1591648 - DNA, 25 bp, Homo sapien
cgtgaaaccgaccacgagggtccag

SEQ ID NO: 1591649 - DNA, 25 bp, Homo sapien
cacaggtcagttccgtgaaaccgac

SEQ ID NO: 1591650 - DNA, 25 bp, Homo sapien
cctgggaagctcctgttgaccggct

SEQ ID NO: 1591651 - DNA, 25 bp, Homo sapien
ccggctgggtctggacaatgctgtc

SEQ ID NO: 1591652 - DNA, 25 bp, Homo sapien
ggaaggttcttccaatgtgcagacc

SEQ ID NO: 1591653 - DNA, 25 bp, Homo sapien
gacaatgctgtctcgttttaccagg

SEQ ID NO: 1591654 - DNA, 25 bp, Homo sapien
ccctgcacacggtagacggtggtct

SEQ ID NO: 1591655 - DNA, 25 bp, Homo sapien
cacggtagacggtggtctgacgtca

SEQ ID NO: 1591656 - DNA, 25 bp, Homo sapien
ggccagaaccctgcacacggtagac

SEQ ID NO: 1591657 - DNA, 25 bp, Homo sapien
agaaccctgcacacggtagacggtg

SEQ ID NO: 1591658 - DNA, 25 bp, Homo sapien
ttcagctcgggaatacgaatcttca

SEQ ID NO: 1591659 - DNA, 25 bp, Homo sapien
tcagctcgggaatacgaatcttcat

SEQ ID NO: 1591660 - DNA, 25 bp, Homo sapien
cttcagctcgggaatacgaatcttc

SEQ ID NO: 1591661 - DNA, 25 bp, Homo sapien
agccagagacaagcggctcatgcat

SEQ ID NO: 1591662 - DNA, 25 bp, Homo sapien
atgaagtgttagaaagcaggaagga

SEQ ID NO: 1591663 - DNA, 25 bp, Homo sapien
gtctgcctttcggatgaagtgttag

SEQ ID NO: 1591664 - DNA, 25 bp, Homo sapien
agcagccagagacaagcggctcatg

SEQ ID NO: 1591665 - DNA, 25 bp, Homo sapien
atggctgttgagtaaaccgcttttg

SEQ ID NO: 1591666 - DNA, 25 bp, Homo sapien
tgatgtgattccttcgcttttttgg

SEQ ID NO: 1591667 - DNA, 25 bp, Homo sapien
ttggaggttttcaatcgccatttca

SEQ ID NO: 1591668 - DNA, 25 bp, Homo sapien
gagtaaaccgcttttgtgtgatgtg

SEQ ID NO: 1591669 - DNA, 25 bp, Homo sapien
tggcgaatgtttacccagtgggagc

SEQ ID NO: 1591670 - DNA, 25 bp, Homo sapien
acagctgtgcgtggccactaaggca

SEQ ID NO: 1591671 - DNA, 25 bp, Homo sapien
catatgtgtgtgcacgccgtagcat

SEQ ID NO: 1591672 - DNA, 25 bp, Homo sapien
ataaaaatgaggctccacgcaggca

SEQ ID NO: 1591673 - DNA, 25 bp, Homo sapien
gatgaacttgaagtatatgcttcct

SEQ ID NO: 1591674 - DNA, 25 bp, Homo sapien
ctagactcgcacacggaaaacagcg

SEQ ID NO: 1591675 - DNA, 25 bp, Homo sapien
cctgacgaccagaggactgaagcgg

SEQ ID NO: 1591676 - DNA, 25 bp, Homo sapien
ggaaaacagcgacgtaaaatctgct

SEQ ID NO: 1591677 - DNA, 25 bp, Homo sapien
ggcaatcgccacctctatgatagaa

SEQ ID NO: 1591678 - DNA, 25 bp, Homo sapien
aaagtaggatggtgagacctctccc

SEQ ID NO: 1591679 - DNA, 25 bp, Homo sapien
tgtgggacatcgctcacctatgggt

SEQ ID NO: 1591680 - DNA, 25 bp, Homo sapien
ttcaagccaaggaggacgtcagggt

SEQ ID NO: 1591681 - DNA, 25 bp, Homo sapien
ttctacatcttcactgaagagccag

SEQ ID NO: 1591682 - DNA, 25 bp, Homo sapien
tcattctacatcttcactgaagagc

SEQ ID NO: 1591683 - DNA, 25 bp, Homo sapien
tctacatcttcactgaagagccagg

SEQ ID NO: 1591684 - DNA, 25 bp, Homo sapien
cattctacatcttcactgaagagcc

SEQ ID NO: 1591685 - DNA, 25 bp, Homo sapien
catggttgttcttggctcttggaaa

SEQ ID NO: 1591686 - DNA, 25 bp, Homo sapien
tctgttgcaatttcagggccatggt

SEQ ID NO: 1591687 - DNA, 25 bp, Homo sapien
ccaatgttgggtccagcagctgtat

SEQ ID NO: 1591688 - DNA, 25 bp, Homo sapien
caaaactctgacatgaacgaactgg

SEQ ID NO: 1591689 - DNA, 25 bp, Homo sapien
atgaaaagacacactaaagactggg

SEQ ID NO: 1591690 - DNA, 25 bp, Homo sapien
catatctgacaggagacttgtatcc

SEQ ID NO: 1591691 - DNA, 25 bp, Homo sapien
aaatgctgctgacggagaggagcaa

SEQ ID NO: 1591692 - DNA, 25 bp, Homo sapien
tgaccagagcatctacactcacatg

SEQ ID NO: 1591693 - DNA, 25 bp, Homo sapien
aaaagcagataagtcgttattttgc

SEQ ID NO: 1591694 - DNA, 25 bp, Homo sapien
aaagcagataagtcgttattttgca

SEQ ID NO: 1591695 - DNA, 25 bp, Homo sapien
gaaaagcagataagtcgttattttg

SEQ ID NO: 1591696 - DNA, 25 bp, Homo sapien
cgctgcttcgagaatactcatggcc

SEQ ID NO: 1591697 - DNA, 25 bp, Homo sapien
ccgctgcttcgagaatactcatggc

SEQ ID NO: 1591698 - DNA, 25 bp, Homo sapien
ctggtcccaagagcctcctacatac

SEQ ID NO: 1591699 - DNA, 25 bp, Homo sapien
tgctggtcccaagagcctcctacat

SEQ ID NO: 1591700 - DNA, 25 bp, Homo sapien
gctggtcccaagagcctcctacata

SEQ ID NO: 1591701 - DNA, 25 bp, Homo sapien
cctgctggtcccaagagcctcctac

SEQ ID NO: 1591702 - DNA, 25 bp, Homo sapien
cagggagtgtctggtgctgtccatc

SEQ ID NO: 1591703 - DNA, 25 bp, Homo sapien
atgagataggctcccgcgctggaga

SEQ ID NO: 1591704 - DNA, 25 bp, Homo sapien
tcgaagtaagaagccgtgctgctgg

SEQ ID NO: 1591705 - DNA, 25 bp, Homo sapien
gcgatgagcgggaggtgtgggccag

SEQ ID NO: 1591706 - DNA, 25 bp, Homo sapien
cttccacgtactgcacctgggcagg

SEQ ID NO: 1591707 - DNA, 25 bp, Homo sapien
gcgtctcccccttccacgtactgca

SEQ ID NO: 1591708 - DNA, 25 bp, Homo sapien
actgcacctgggcaggatacacgtg

SEQ ID NO: 1591709 - DNA, 25 bp, Homo sapien
tggtgtagacggcgtctcccccttc

SEQ ID NO: 1591710 - DNA, 25 bp, Homo sapien
taccgccagtcacgccctcgtgagt

SEQ ID NO: 1591711 - DNA, 25 bp, Homo sapien
gttaccgccagtcacgccctcgtga

SEQ ID NO: 1591712 - DNA, 25 bp, Homo sapien
gcgttaccgccagtcacgccctcgt

SEQ ID NO: 1591713 - DNA, 25 bp, Homo sapien
ctgcgttaccgccagtcacgccctc

SEQ ID NO: 1591714 - DNA, 25 bp, Homo sapien
ttcaagctagacgtgtcttctattg

SEQ ID NO: 1591715 - DNA, 25 bp, Homo sapien
tcaagctagacgtgtcttctattgc

SEQ ID NO: 1591716 - DNA, 25 bp, Homo sapien
aaatgacaatgttcccgcccacagt

SEQ ID NO: 1591717 - DNA, 25 bp, Homo sapien
tcggcacgcctagaaagacactgag

SEQ ID NO: 1591718 - DNA, 25 bp, Homo sapien
tacagacgacatattccaaacgggc

SEQ ID NO: 1591719 - DNA, 25 bp, Homo sapien
tctgctagcgtgtctgtgcgccctg

SEQ ID NO: 1591720 - DNA, 25 bp, Homo sapien
tagcagatggttcctccagtccaga

SEQ ID NO: 1591721 - DNA, 25 bp, Homo sapien
ggtgctcactggttccccaaatgct

SEQ ID NO: 1591722 - DNA, 25 bp, Homo sapien
ctgagctccacccagcaggtgcggg

SEQ ID NO: 1591723 - DNA, 25 bp, Homo sapien
actggttccccaaatgcttgctgaa

SEQ ID NO: 1591724 - DNA, 25 bp, Homo sapien
gcaggtgcggggtgctcactggttc

SEQ ID NO: 1591725 - DNA, 25 bp, Homo sapien
tgcgccccggtttgcacggtgctgc

SEQ ID NO: 1591726 - DNA, 25 bp, Homo sapien
tgttctggattgctgagtgctaact

SEQ ID NO: 1591727 - DNA, 25 bp, Homo sapien
tgagtgctaactgcgccccggtttg

SEQ ID NO: 1591728 - DNA, 25 bp, Homo sapien
agccacagaaaaggatgcatccttc

SEQ ID NO: 1591729 - DNA, 25 bp, Homo sapien
ctgctggggtacctgctgaactctg

SEQ ID NO: 1591730 - DNA, 25 bp, Homo sapien
tgctggggtacctgctgaactctgg

SEQ ID NO: 1591731 - DNA, 25 bp, Homo sapien
ttaattcttaataaagcatttctgt

SEQ ID NO: 1591732 - DNA, 25 bp, Homo sapien
ctgtgtaaaagggtcatttccaagt

SEQ ID NO: 1591733 - DNA, 25 bp, Homo sapien
agccacggacgctggcgaatccgct

SEQ ID NO: 1591734 - DNA, 25 bp, Homo sapien
gccgagggacgcagagccacggacg

SEQ ID NO: 1591735 - DNA, 25 bp, Homo sapien
tccgctccaccctcggaattctgca

SEQ ID NO: 1591736 - DNA, 25 bp, Homo sapien
cgcagagccacggacgctggcgaat

SEQ ID NO: 1591737 - DNA, 25 bp, Homo sapien
cctcacgaattttggcagtaagtaa

SEQ ID NO: 1591738 - DNA, 25 bp, Homo sapien
aacagtacattttatcctgggctgg

SEQ ID NO: 1591739 - DNA, 25 bp, Homo sapien
ttatcctgggctggataaaagtcct

SEQ ID NO: 1591740 - DNA, 25 bp, Homo sapien
gataaaagtcctcacgaattttggc

SEQ ID NO: 1591741 - DNA, 25 bp, Homo sapien
ccgtcctggcaccagctttgagcat

SEQ ID NO: 1591742 - DNA, 25 bp, Homo sapien
ctggcaccagctttgagcatgtcac

SEQ ID NO: 1591743 - DNA, 25 bp, Homo sapien
gcaccagctttgagcatgtcaccct

SEQ ID NO: 1591744 - DNA, 25 bp, Homo sapien
gtcctggcaccagctttgagcatgt

SEQ ID NO: 1591745 - DNA, 25 bp, Homo sapien
taaatcagtcatttgcacaccatcc

SEQ ID NO: 1591746 - DNA, 25 bp, Homo sapien
tttttctgttacaagctgcttgtat

SEQ ID NO: 1591747 - DNA, 25 bp, Homo sapien
gatgcccaaaagtacatgaatagtg

SEQ ID NO: 1591748 - DNA, 25 bp, Homo sapien
ctccctcaggataaagtacagtggc

SEQ ID NO: 1591749 - DNA, 25 bp, Homo sapien
gaatagtggtcagcctcattagtca

SEQ ID NO: 1591750 - DNA, 25 bp, Homo sapien
tagaatggctaaacctgacaagtct

SEQ ID NO: 1591751 - DNA, 25 bp, Homo sapien
ggtgcttccaggtaagcgcagtagc

SEQ ID NO: 1591752 - DNA, 25 bp, Homo sapien
ctggcggtgcttccaggtaagcgca

SEQ ID NO: 1591753 - DNA, 25 bp, Homo sapien
gcttccaggtaagcgcagtagctca

SEQ ID NO: 1591754 - DNA, 25 bp, Homo sapien
atcctggcggtgcttccaggtaagc

SEQ ID NO: 1591755 - DNA, 25 bp, Homo sapien
gaacttggacccattcagtgactgc

SEQ ID NO: 1591756 - DNA, 25 bp, Homo sapien
ctgtgggaacttggacccattcagt

SEQ ID NO: 1591757 - DNA, 25 bp, Homo sapien
gctttctcgcgttcctttgtcctct

SEQ ID NO: 1591758 - DNA, 25 bp, Homo sapien
agtgactgccctgccgtccttgctt

SEQ ID NO: 1591759 - DNA, 25 bp, Homo sapien
ggtggaaccatgtcctttctggcac

SEQ ID NO: 1591760 - DNA, 25 bp, Homo sapien
tgatggtggaaccatgtcctttctg

SEQ ID NO: 1591761 - DNA, 25 bp, Homo sapien
cacagggaggacacctccaagccat

SEQ ID NO: 1591762 - DNA, 25 bp, Homo sapien
cagggaggacacctccaagccatct

SEQ ID NO: 1591763 - DNA, 25 bp, Homo sapien
ttctcaggagccaaactttccctcc

SEQ ID NO: 1591764 - DNA, 25 bp, Homo sapien
tctcaggagccaaactttccctcct

SEQ ID NO: 1591765 - DNA, 25 bp, Homo sapien
ttcgtaagaattgggcttctgttcc

SEQ ID NO: 1591766 - DNA, 25 bp, Homo sapien
tcttttcgtaagaattgggcttctg

SEQ ID NO: 1591767 - DNA, 25 bp, Homo sapien
aagactgtccgtaggcaggcagaga

SEQ ID NO: 1591768 - DNA, 25 bp, Homo sapien
gatcaagaccttgtcacctgaagac

SEQ ID NO: 1591769 - DNA, 25 bp, Homo sapien
aagtctggctgatcaagaccttgtc

SEQ ID NO: 1591770 - DNA, 25 bp, Homo sapien
tcacctgaagactgtccgtaggcag

SEQ ID NO: 1591771 - DNA, 25 bp, Homo sapien
gcagtggccttggtttcttcatctg

SEQ ID NO: 1591772 - DNA, 25 bp, Homo sapien
cagtggccttggtttcttcatctga

SEQ ID NO: 1591773 - DNA, 25 bp, Homo sapien
agtggccttggtttcttcatctgag

SEQ ID NO: 1591774 - DNA, 25 bp, Homo sapien
caagagaatgagcagcccgcctgct

SEQ ID NO: 1591775 - DNA, 25 bp, Homo sapien
gacgtgttttgcaatgaacaagaga

SEQ ID NO: 1591776 - DNA, 25 bp, Homo sapien
gcctgcaaagatgctcaagacgtgt

SEQ ID NO: 1591777 - DNA, 25 bp, Homo sapien
tgctcacctgttctagccaccttca

SEQ ID NO: 1591778 - DNA, 25 bp, Homo sapien
gatgcccaacactggtcatgggagc

SEQ ID NO: 1591779 - DNA, 25 bp, Homo sapien
ccaacactggtcatgggagcaacaa

SEQ ID NO: 1591780 - DNA, 25 bp, Homo sapien
aacactggtcatgggagcaacaaaa

SEQ ID NO: 1591781 - DNA, 25 bp, Homo sapien
accgcgcctgcaagggccagatctt

SEQ ID NO: 1591782 - DNA, 25 bp, Homo sapien
cggtatgtaaaacagatctcagcac

SEQ ID NO: 1591783 - DNA, 25 bp, Homo sapien
gaagatagtatactaagacccactg

SEQ ID NO: 1591784 - DNA, 25 bp, Homo sapien
gcaagtggctgttcatggcaggttc

SEQ ID NO: 1591785 - DNA, 25 bp, Homo sapien
caaatgggtgagctttacggtatgt

SEQ ID NO: 1591786 - DNA, 25 bp, Homo sapien
cctgccagaggcgagtaaagggact

SEQ ID NO: 1591787 - DNA, 25 bp, Homo sapien
cgagcttcgttgtataaaccaggca

SEQ ID NO: 1591788 - DNA, 25 bp, Homo sapien
gagacagactcatgatagacagggc

SEQ ID NO: 1591789 - DNA, 25 bp, Homo sapien
tagacagggcgacaggcataacctt

SEQ ID NO: 1591790 - DNA, 25 bp, Homo sapien
tagaaaatggacaacgctgaggtca

SEQ ID NO: 1591791 - DNA, 25 bp, Homo sapien
tcacggctatgaagtatctgcacgc

SEQ ID NO: 1591792 - DNA, 25 bp, Homo sapien
tgcagtcggtatagaagccagggcc

SEQ ID NO: 1591793 - DNA, 25 bp, Homo sapien
gtggacccacgctactcagactttg

SEQ ID NO: 1591794 - DNA, 25 bp, Homo sapien
tgatgttccaccatatcatgtggtc

SEQ ID NO: 1591795 - DNA, 25 bp, Homo sapien
tcacatgatttaattcaacgcactc

SEQ ID NO: 1591796 - DNA, 25 bp, Homo sapien
aattcaacgcactcctggtattcca

SEQ ID NO: 1591797 - DNA, 25 bp, Homo sapien
ctggcctcgtttcttataatttaat

SEQ ID NO: 1591798 - DNA, 25 bp, Homo sapien
gcagctggaagcaccagatttggaa

SEQ ID NO: 1591799 - DNA, 25 bp, Homo sapien
agggcagctggaagcaccagatttg

SEQ ID NO: 1591800 - DNA, 25 bp, Homo sapien
gaagcaccagatttggaagaacaca

SEQ ID NO: 1591801 - DNA, 25 bp, Homo sapien
aacaagaggaccagcaccataccct

SEQ ID NO: 1591802 - DNA, 25 bp, Homo sapien
tggaacagtataatcagaaacagaa

SEQ ID NO: 1591803 - DNA, 25 bp, Homo sapien
gcatgagagggtctgaactggaaca

SEQ ID NO: 1591804 - DNA, 25 bp, Homo sapien
ggaagtttactttaacagtcctgca

SEQ ID NO: 1591805 - DNA, 25 bp, Homo sapien
agggaagaatcaatacaagaccagt

SEQ ID NO: 1591806 - DNA, 25 bp, Homo sapien
aggccttgccgtcctgaagagcact

SEQ ID NO: 1591807 - DNA, 25 bp, Homo sapien
tgccgtcctgaagagcactcgggct

SEQ ID NO: 1591808 - DNA, 25 bp, Homo sapien
cgtcctgaagagcactcgggctcat

SEQ ID NO: 1591809 - DNA, 25 bp, Homo sapien
cttgccgtcctgaagagcactcggg

SEQ ID NO: 1591810 - DNA, 25 bp, Homo sapien
tcttgttgattagtccagcagcccc

SEQ ID NO: 1591811 - DNA, 25 bp, Homo sapien
cagtgctaaatctaagtgctgaggc

SEQ ID NO: 1591812 - DNA, 25 bp, Homo sapien
gaaatgagacgcacaaatcactacc

SEQ ID NO: 1591813 - DNA, 25 bp, Homo sapien
acccgtttaaagtatggcaagctca

SEQ ID NO: 1591814 - DNA, 25 bp, Homo sapien
gagacatatcctgcttttaacttag

SEQ ID NO: 1591815 - DNA, 25 bp, Homo sapien
taaatttgtctagtgccttctcccc

SEQ ID NO: 1591816 - DNA, 25 bp, Homo sapien
tcacccgcgtctgtcattttaaagg

SEQ ID NO: 1591817 - DNA, 25 bp, Homo sapien
taaaggtctgcagtaaaaataccag

SEQ ID NO: 1591818 - DNA, 25 bp, Homo sapien
ggtaagtaacagtctccacggctac

SEQ ID NO: 1591819 - DNA, 25 bp, Homo sapien
ccgttggtaagtaacagtctccacg

SEQ ID NO: 1591820 - DNA, 25 bp, Homo sapien
gctgcgtgttggtccccgttggtaa

SEQ ID NO: 1591821 - DNA, 25 bp, Homo sapien
tcgggccgggagttcgggcagcggc

SEQ ID NO: 1591822 - DNA, 25 bp, Homo sapien
gcggcggcggccgctcctcctccgg

SEQ ID NO: 1591823 - DNA, 25 bp, Homo sapien
cgccgccagccagcctcgcgcagcc

SEQ ID NO: 1591824 - DNA, 25 bp, Homo sapien
cccgccgccagccagcctcgcgcag

SEQ ID NO: 1591825 - DNA, 25 bp, Homo sapien
gcctcgcgcagcccgcccgcccgac

SEQ ID NO: 1591826 - DNA, 25 bp, Homo sapien
ctcccgccgccagccagcctcgcgc

SEQ ID NO: 1591827 - DNA, 25 bp, Homo sapien
cagaagaatctgatacacgtgaaga

SEQ ID NO: 1591828 - DNA, 25 bp, Homo sapien
ccttggcacctggaacatggactcc

SEQ ID NO: 1591829 - DNA, 25 bp, Homo sapien
tgctggcttgatccctgctaaaaga

SEQ ID NO: 1591830 - DNA, 25 bp, Homo sapien
tgctaaaagagcataccagctgcaa

SEQ ID NO: 1591831 - DNA, 25 bp, Homo sapien
cacaggatgttcgtggtggacagcg

SEQ ID NO: 1591832 - DNA, 25 bp, Homo sapien
cagcgagtgtcagacgtagggatca

SEQ ID NO: 1591833 - DNA, 25 bp, Homo sapien
tcaaagacacacctccagacctcac

SEQ ID NO: 1591834 - DNA, 25 bp, Homo sapien
caccccgacaggagccttggatgag

SEQ ID NO: 1591835 - DNA, 25 bp, Homo sapien
gttttaaagcaagcaccagacagtg

SEQ ID NO: 1591836 - DNA, 25 bp, Homo sapien
catgcatgaatcctttggcaacaag

SEQ ID NO: 1591837 - DNA, 25 bp, Homo sapien
cacaaaagtagagctgatcataaca

SEQ ID NO: 1591838 - DNA, 25 bp, Homo sapien
cctatcactcggctccaacttaaag

SEQ ID NO: 1591839 - DNA, 25 bp, Homo sapien
tggaccatgcaactacagttcaggg

SEQ ID NO: 1591840 - DNA, 25 bp, Homo sapien
cacatagtcctgagatggttcagca

SEQ ID NO: 1591841 - DNA, 25 bp, Homo sapien
cagttcagggcgtggatttcaggca

SEQ ID NO: 1591842 - DNA, 25 bp, Homo sapien
gacaaaagtctgaccccaaatggct

SEQ ID NO: 1591843 - DNA, 25 bp, Homo sapien
acagtgacactatcgcggcacactg

SEQ ID NO: 1591844 - DNA, 25 bp, Homo sapien
gtacagtgacactatcgcggcacac

SEQ ID NO: 1591845 - DNA, 25 bp, Homo sapien
ggagtacagtgacactatcgcggca

SEQ ID NO: 1591846 - DNA, 25 bp, Homo sapien
gagtacagtgacactatcgcggcac

SEQ ID NO: 1591847 - DNA, 25 bp, Homo sapien
ggccccaggtccttactcgatctta

SEQ ID NO: 1591848 - DNA, 25 bp, Homo sapien
tgagttctgtcgttggacccaagga

SEQ ID NO: 1591849 - DNA, 25 bp, Homo sapien
tactcacctgggctacccaagaggc

SEQ ID NO: 1591850 - DNA, 25 bp, Homo sapien
gaggcaataaaagccacgagggatt

SEQ ID NO: 1591851 - DNA, 25 bp, Homo sapien
gcaaagtatgtgagcgccccaatct

SEQ ID NO: 1591852 - DNA, 25 bp, Homo sapien
caatctttatgggtacccagatgtc

SEQ ID NO: 1591853 - DNA, 25 bp, Homo sapien
tgagagcatctgcttgagcaaagta

SEQ ID NO: 1591854 - DNA, 25 bp, Homo sapien
tgtgagcgccccaatctttatgggt

SEQ ID NO: 1591855 - DNA, 25 bp, Homo sapien
gatgatatccctcctccattgggtg

SEQ ID NO: 1591856 - DNA, 25 bp, Homo sapien
tcatgctgtctctactctaccaggg

SEQ ID NO: 1591857 - DNA, 25 bp, Homo sapien
gcttcaatgcccctggtgactcaga

SEQ ID NO: 1591858 - DNA, 25 bp, Homo sapien
caaggaatgaggtgtgttggcccat

SEQ ID NO: 1591859 - DNA, 25 bp, Homo sapien
cattgtcctttgttcaacgttaact

SEQ ID NO: 1591860 - DNA, 25 bp, Homo sapien
gacaggttagtaagattagggccca

SEQ ID NO: 1591861 - DNA, 25 bp, Homo sapien
tgtggagggatacaactcagcttgt

SEQ ID NO: 1591862 - DNA, 25 bp, Homo sapien
caaataagttacaccctgaagtact

SEQ ID NO: 1591863 - DNA, 25 bp, Homo sapien
tgtggtctgtccaaaccaagatgtg

SEQ ID NO: 1591864 - DNA, 25 bp, Homo sapien
gatggaccctcttacaccagtgctg

SEQ ID NO: 1591865 - DNA, 25 bp, Homo sapien
ccattggacattgatgtgggagtga

SEQ ID NO: 1591866 - DNA, 25 bp, Homo sapien
ttgaatgagaaaccattggacattg

SEQ ID NO: 1591867 - DNA, 25 bp, Homo sapien
taataaagcacttcagggtcccatg

SEQ ID NO: 1591868 - DNA, 25 bp, Homo sapien
aaagacctgaacttgtgggctccca

SEQ ID NO: 1591869 - DNA, 25 bp, Homo sapien
tggaaagtagatccccatctcggag

SEQ ID NO: 1591870 - DNA, 25 bp, Homo sapien
tgcctggaagcaactgggaaaccct

SEQ ID NO: 1591871 - DNA, 25 bp, Homo sapien
tgtttctactgtccatgtgatctcc

SEQ ID NO: 1591872 - DNA, 25 bp, Homo sapien
gaatctactaatgtcaggaaggctt

SEQ ID NO: 1591873 - DNA, 25 bp, Homo sapien
ttttgagaaacgacaagaatctact

SEQ ID NO: 1591874 - DNA, 25 bp, Homo sapien
tgatcatgtcaagtgagggaagctc

SEQ ID NO: 1591875 - DNA, 25 bp, Homo sapien
gtctttcttcaaagtaccgccaggc

SEQ ID NO: 1591876 - DNA, 25 bp, Homo sapien
tctttcttcaaagtaccgccaggcg

SEQ ID NO: 1591877 - DNA, 25 bp, Homo sapien
caccagcagtgtctcggcgtcgaga

SEQ ID NO: 1591878 - DNA, 25 bp, Homo sapien
tctcggcgtcgagaagtctttcttc

SEQ ID NO: 1591879 - DNA, 25 bp, Homo sapien
gggcaggcggcttaacaggaaacac

SEQ ID NO: 1591880 - DNA, 25 bp, Homo sapien
tcctagttcctagtgagacacgttc

SEQ ID NO: 1591881 - DNA, 25 bp, Homo sapien
tgttcaggagagagcaaaacacaga

SEQ ID NO: 1591882 - DNA, 25 bp, Homo sapien
tcgggccgatgagtgtcctagttcc

SEQ ID NO: 1591883 - DNA, 25 bp, Homo sapien
ttggtgcttccggaggccttggaaa

SEQ ID NO: 1591884 - DNA, 25 bp, Homo sapien
aacgtgaggccttccggccagagga

SEQ ID NO: 1591885 - DNA, 25 bp, Homo sapien
gcacgtccatcaggtggtcacggag

SEQ ID NO: 1591886 - DNA, 25 bp, Homo sapien
tcctatggaagtgtccccagagccc

SEQ ID NO: 1591887 - DNA, 25 bp, Homo sapien
cctcttgtgcgtagagctcccagca

SEQ ID NO: 1591888 - DNA, 25 bp, Homo sapien
tgaggttcctgtccgtgaccccggc

SEQ ID NO: 1591889 - DNA, 25 bp, Homo sapien
tggagtattgttggccgccctggga

SEQ ID NO: 1591890 - DNA, 25 bp, Homo sapien
gcggcctcttgtgcgtagagctccc

SEQ ID NO: 1591891 - DNA, 25 bp, Homo sapien
cttggaggcatgggtccccaccaag

SEQ ID NO: 1591892 - DNA, 25 bp, Homo sapien
gcaggtggcgaggagtcccggaggc

SEQ ID NO: 1591893 - DNA, 25 bp, Homo sapien
gtggcgaggagtcccggaggcttcc

SEQ ID NO: 1591894 - DNA, 25 bp, Homo sapien
aggtggcgaggagtcccggaggctt

SEQ ID NO: 1591895 - DNA, 25 bp, Homo sapien
gaatctcaggcataccaggagtggg

SEQ ID NO: 1591896 - DNA, 25 bp, Homo sapien
gcgctagtctgagtagagcccgaga

SEQ ID NO: 1591897 - DNA, 25 bp, Homo sapien
tgaccagagttcaatgcgcctcaga

SEQ ID NO: 1591898 - DNA, 25 bp, Homo sapien
tggaggcgcctcgagtcaatgtctg

SEQ ID NO: 1591899 - DNA, 25 bp, Homo sapien
ggcatccttggaacggcaaagggag

SEQ ID NO: 1591900 - DNA, 25 bp, Homo sapien
cggcggcatccttggaacggcaaag

SEQ ID NO: 1591901 - DNA, 25 bp, Homo sapien
gcggcggcatccttggaacggcaaa

SEQ ID NO: 1591902 - DNA, 25 bp, Homo sapien
gcggcatccttggaacggcaaaggg

SEQ ID NO: 1591903 - DNA, 25 bp, Homo sapien
catcttaacctacaagccccaccgt

SEQ ID NO: 1591904 - DNA, 25 bp, Homo sapien
gccacagaaacgcacatggacactg

SEQ ID NO: 1591905 - DNA, 25 bp, Homo sapien
tggagagggccagctgccgtgcctg

SEQ ID NO: 1591906 - DNA, 25 bp, Homo sapien
ccacaccaccgcagagacatcttaa

SEQ ID NO: 1591907 - DNA, 25 bp, Homo sapien
gccgtcgatccgctgctcagaaagg

SEQ ID NO: 1591908 - DNA, 25 bp, Homo sapien
taggtctacacggaggacgacgcag

SEQ ID NO: 1591909 - DNA, 25 bp, Homo sapien
gagagaactatacagcacagacccc

SEQ ID NO: 1591910 - DNA, 25 bp, Homo sapien
tgtgttctgaaccattcgggaggct

SEQ ID NO: 1591911 - DNA, 25 bp, Homo sapien
gcaggcgagacgggagaggagggca

SEQ ID NO: 1591912 - DNA, 25 bp, Homo sapien
tttgcgcacggtggtctcgtccagg

SEQ ID NO: 1591913 - DNA, 25 bp, Homo sapien
gcagctctgcagtttgcgcacggtg

SEQ ID NO: 1591914 - DNA, 25 bp, Homo sapien
ggtgttggtgacattgaagtggcca

SEQ ID NO: 1591915 - DNA, 25 bp, Homo sapien
tccagggagaagaggtcgaagtcga

SEQ ID NO: 1591916 - DNA, 25 bp, Homo sapien
cgcagcgccatcagcctccggtgta

SEQ ID NO: 1591917 - DNA, 25 bp, Homo sapien
gttgcgctcccgcagcgccatcagc

SEQ ID NO: 1591918 - DNA, 25 bp, Homo sapien
cctccggtgtagctccaccagctca

SEQ ID NO: 1591919 - DNA, 25 bp, Homo sapien
gcacgttgcgctcccgcagcgccat

SEQ ID NO: 1591920 - DNA, 25 bp, Homo sapien
ttgctgcaggactcggggctcctcc

SEQ ID NO: 1591921 - DNA, 25 bp, Homo sapien
tgaggatcttctcaggcttgctgca

SEQ ID NO: 1591922 - DNA, 25 bp, Homo sapien
cttgtcgtaggtgcccttcttgagg

SEQ ID NO: 1591923 - DNA, 25 bp, Homo sapien
aggactcggggctcctccggcctga

SEQ ID NO: 1591924 - DNA, 25 bp, Homo sapien
ggcgctgttgtcactctcgctgtcg

SEQ ID NO: 1591925 - DNA, 25 bp, Homo sapien
ggagtcggcgctgttgtcactctcg

SEQ ID NO: 1591926 - DNA, 25 bp, Homo sapien
gaggagtcggcgctgttgtcactct

SEQ ID NO: 1591927 - DNA, 25 bp, Homo sapien
agtcggcgctgttgtcactctcgct

SEQ ID NO: 1591928 - DNA, 25 bp, Homo sapien
ctaagtccctgtcggagtcgtgggc

SEQ ID NO: 1591929 - DNA, 25 bp, Homo sapien
agaatccaccctgaatgtcaccgaa

SEQ ID NO: 1591930 - DNA, 25 bp, Homo sapien
cagccctcctcgtgtctagagtcta

SEQ ID NO: 1591931 - DNA, 25 bp, Homo sapien
gctcttggcgcaagcagaatccacc

SEQ ID NO: 1591932 - DNA, 25 bp, Homo sapien
cgggttggtcttgccggcagcctcc

SEQ ID NO: 1591933 - DNA, 25 bp, Homo sapien
tccccgggttggtcttgccggcagc

SEQ ID NO: 1591934 - DNA, 25 bp, Homo sapien
gaagagtcgtcctcgtcggactcct

SEQ ID NO: 1591935 - DNA, 25 bp, Homo sapien
agcctcctcgcctgacgaagagtcg

SEQ ID NO: 1591936 - DNA, 25 bp, Homo sapien
actggccggcagtgggcgcgcaggg

SEQ ID NO: 1591937 - DNA, 25 bp, Homo sapien
ttcctggccctgctcgcaggcctca

SEQ ID NO: 1591938 - DNA, 25 bp, Homo sapien
ctggccggcagtgggcgcgcagggc

SEQ ID NO: 1591939 - DNA, 25 bp, Homo sapien
ctgcagccggaggagaacccctcct

SEQ ID NO: 1591940 - DNA, 25 bp, Homo sapien
tctgagtctgagctggagtctgagc

SEQ ID NO: 1591941 - DNA, 25 bp, Homo sapien
agttggacgggcttgactgggcaga

SEQ ID NO: 1591942 - DNA, 25 bp, Homo sapien
cgaagtctgagtctgagctggagtc

SEQ ID NO: 1591943 - DNA, 25 bp, Homo sapien
gagctggagttggacgggcttgact

SEQ ID NO: 1591944 - DNA, 25 bp, Homo sapien
aagccatgggagcaccgggcactca

SEQ ID NO: 1591945 - DNA, 25 bp, Homo sapien
ctgccaagccatgggagcaccgggc

SEQ ID NO: 1591946 - DNA, 25 bp, Homo sapien
cgcctcagggtcatagcagatggtg

SEQ ID NO: 1591947 - DNA, 25 bp, Homo sapien
agatggtgccgtcttcagccactgc

SEQ ID NO: 1591948 - DNA, 25 bp, Homo sapien
agtcctctgagaatgtccggacgct

SEQ ID NO: 1591949 - DNA, 25 bp, Homo sapien
cggctcaagtcatgtctgatgcagt

SEQ ID NO: 1591950 - DNA, 25 bp, Homo sapien
ctaccagctcttgcggctcaagtca

SEQ ID NO: 1591951 - DNA, 25 bp, Homo sapien
cctctgagaatgtccggacgctgtg

SEQ ID NO: 1591952 - DNA, 25 bp, Homo sapien
ggggctcactctcggccttcacctt

SEQ ID NO: 1591953 - DNA, 25 bp, Homo sapien
tgaaggaggcctcgtcctctgagtt

SEQ ID NO: 1591954 - DNA, 25 bp, Homo sapien
tcctctgagttggactcctccacct

SEQ ID NO: 1591955 - DNA, 25 bp, Homo sapien
accttctcccctctggtgctgctct

SEQ ID NO: 1591956 - DNA, 25 bp, Homo sapien
agcactccgggaccccttcgagctg

SEQ ID NO: 1591957 - DNA, 25 bp, Homo sapien
tgggctttggcgagtcggcggtggc

SEQ ID NO: 1591958 - DNA, 25 bp, Homo sapien
cttctgcttcttggcgctgggcttt

SEQ ID NO: 1591959 - DNA, 25 bp, Homo sapien
aggtgcctggagcactccgggaccc

SEQ ID NO: 1591960 - DNA, 25 bp, Homo sapien
agccttgggcggtggcgccttctcc

SEQ ID NO: 1591961 - DNA, 25 bp, Homo sapien
gagcttttggcctgctcacgctcca

SEQ ID NO: 1591962 - DNA, 25 bp, Homo sapien
ccagcttccgcgaggtgtccttgga

SEQ ID NO: 1591963 - DNA, 25 bp, Homo sapien
tggaggagctcttgctctcggagtc

SEQ ID NO: 1591964 - DNA, 25 bp, Homo sapien
tcttgctgctctccttgttggcgtc

SEQ ID NO: 1591965 - DNA, 25 bp, Homo sapien
cttgtgtggcttggaggtcttgctg

SEQ ID NO: 1591966 - DNA, 25 bp, Homo sapien
tgtgtggcttggaggtcttgctgct

SEQ ID NO: 1591967 - DNA, 25 bp, Homo sapien
ggtcttgctgctctccttgttggcg

SEQ ID NO: 1591968 - DNA, 25 bp, Homo sapien
caccacctcactgggcaatggcaca

SEQ ID NO: 1591969 - DNA, 25 bp, Homo sapien
caggcagaaaaccgaagccatctgt

SEQ ID NO: 1591970 - DNA, 25 bp, Homo sapien
ggcagaaaaccgaagccatctgtgc

SEQ ID NO: 1591971 - DNA, 25 bp, Homo sapien
tgcttcctcgaggaagggcaaggcc

SEQ ID NO: 1591972 - DNA, 25 bp, Homo sapien
cttgctaggaaaggagcagcggcca

SEQ ID NO: 1591973 - DNA, 25 bp, Homo sapien
agacaattgtgtacctggcctcccg

SEQ ID NO: 1591974 - DNA, 25 bp, Homo sapien
gagcctgtccagacaattgtgtacc

SEQ ID NO: 1591975 - DNA, 25 bp, Homo sapien
gggctccacccttgctaggaaagga

SEQ ID NO: 1591976 - DNA, 25 bp, Homo sapien
caagaagtcctttctacgcagggtt

SEQ ID NO: 1591977 - DNA, 25 bp, Homo sapien
gggtctcagagacactccggcaaaa

SEQ ID NO: 1591978 - DNA, 25 bp, Homo sapien
aagtgacccgtacagaagaaatctt

SEQ ID NO: 1591979 - DNA, 25 bp, Homo sapien
tacgcagggttttaggtggcttgaa

SEQ ID NO: 1591980 - DNA, 25 bp, Homo sapien
tggcctcaagatgaacagggcaaag

SEQ ID NO: 1591981 - DNA, 25 bp, Homo sapien
aatcctagggaagcggcagtgcgca

SEQ ID NO: 1591982 - DNA, 25 bp, Homo sapien
tgatcacgggcttattcctgaaatc

SEQ ID NO: 1591983 - DNA, 25 bp, Homo sapien
cacttggcagaacgggagaggacta

SEQ ID NO: 1591984 - DNA, 25 bp, Homo sapien
agccgtgggatggtttggtcttctt

SEQ ID NO: 1591985 - DNA, 25 bp, Homo sapien
tggacaccgtgtctgctccttcggg

SEQ ID NO: 1591986 - DNA, 25 bp, Homo sapien
taacatggggtagtcgggactgggc

SEQ ID NO: 1591987 - DNA, 25 bp, Homo sapien
tgtctgctccttcgggcattaccat

SEQ ID NO: 1591988 - DNA, 25 bp, Homo sapien
ccacagggtccggagggctcgactc

SEQ ID NO: 1591989 - DNA, 25 bp, Homo sapien
ctgttgccaagagccctcgtgggga

SEQ ID NO: 1591990 - DNA, 25 bp, Homo sapien
agagctggcactgtcgtctggcctc

SEQ ID NO: 1591991 - DNA, 25 bp, Homo sapien
cctggagagccctggtcccagagct

SEQ ID NO: 1591992 - DNA, 25 bp, Homo sapien
acagacggccgcagcaaagtagcct

SEQ ID NO: 1591993 - DNA, 25 bp, Homo sapien
cgcagcaaagtagcctcggtggagc

SEQ ID NO: 1591994 - DNA, 25 bp, Homo sapien
ccggcacaggttgtggagctcccag

SEQ ID NO: 1591995 - DNA, 25 bp, Homo sapien
accacgccccggcacaggttgtgga

SEQ ID NO: 1591996 - DNA, 25 bp, Homo sapien
tcaggaacaggtcgtaggtgaagca

SEQ ID NO: 1591997 - DNA, 25 bp, Homo sapien
tgaaggtgagcttctcgcagcgcag

SEQ ID NO: 1591998 - DNA, 25 bp, Homo sapien
ggcccgcaggagcttgtaccggaac

SEQ ID NO: 1591999 - DNA, 25 bp, Homo sapien
gagcttgtaccggaactccgtggtg

SEQ ID NO: 1592000 - DNA, 25 bp, Homo sapien
ggcaggcgctgatggattttccgca

SEQ ID NO: 1592001 - DNA, 25 bp, Homo sapien
gctgatggattttccgcacgaaggt

SEQ ID NO: 1592002 - DNA, 25 bp, Homo sapien
tttccgcacgaaggtgtgaggagtt

SEQ ID NO: 1592003 - DNA, 25 bp, Homo sapien
ccagaagacagggacgctcgcctgg

SEQ ID NO: 1592004 - DNA, 25 bp, Homo sapien
tacgagggggtttgttgcatctgcc

SEQ ID NO: 1592005 - DNA, 25 bp, Homo sapien
ctcaggttcctcacgggcagcatgg

SEQ ID NO: 1592006 - DNA, 25 bp, Homo sapien
catggggggattcgctgcaatgcca

SEQ ID NO: 1592007 - DNA, 25 bp, Homo sapien
ctttgggtgggtgacggctacgagg

SEQ ID NO: 1592008 - DNA, 25 bp, Homo sapien
acatcctcggtgcagccagagggac

SEQ ID NO: 1592009 - DNA, 25 bp, Homo sapien
atcctcggtgcagccagagggacat

SEQ ID NO: 1592010 - DNA, 25 bp, Homo sapien
accaatggcctcgatgagcctggag

SEQ ID NO: 1592011 - DNA, 25 bp, Homo sapien
catcctcggtgcagccagagggaca

SEQ ID NO: 1592012 - DNA, 25 bp, Homo sapien
gaagaaagcaaaccacgagactgag

SEQ ID NO: 1592013 - DNA, 25 bp, Homo sapien
ccatgtgaaacagcgaaagccagcc

SEQ ID NO: 1592014 - DNA, 25 bp, Homo sapien
gaatcaattcctgcatcgatgagca

SEQ ID NO: 1592015 - DNA, 25 bp, Homo sapien
ggagctcgacagacacagcaggtga

SEQ ID NO: 1592016 - DNA, 25 bp, Homo sapien
caaacagtcggaaagatggcctcag

SEQ ID NO: 1592017 - DNA, 25 bp, Homo sapien
ggcagatgccttcgtcctgtacagg

SEQ ID NO: 1592018 - DNA, 25 bp, Homo sapien
tctaggaaacacagatgcatctggg

SEQ ID NO: 1592019 - DNA, 25 bp, Homo sapien
cacttcagggaacagaaggatgctc

SEQ ID NO: 1592020 - DNA, 25 bp, Homo sapien
ccagcaagcgctttactgtcaatgc

SEQ ID NO: 1592021 - DNA, 25 bp, Homo sapien
cggtcaagcaaagtggctcgcgcct

SEQ ID NO: 1592022 - DNA, 25 bp, Homo sapien
aagttcccatcacacatccagtctg

SEQ ID NO: 1592023 - DNA, 25 bp, Homo sapien
taaaaataggcacttatccagaaga

SEQ ID NO: 1592024 - DNA, 25 bp, Homo sapien
caatgactccttctacaccctaagg

SEQ ID NO: 1592025 - DNA, 25 bp, Homo sapien
aatacgcaataaaaggcatagagtg

SEQ ID NO: 1592026 - DNA, 25 bp, Homo sapien
gagatcaactaaattgacaaacctt

SEQ ID NO: 1592027 - DNA, 25 bp, Homo sapien
gaactaaactcaaagctaacagaag

SEQ ID NO: 1592028 - DNA, 25 bp, Homo sapien
ccaagtgactcgggatccaggatct

SEQ ID NO: 1592029 - DNA, 25 bp, Homo sapien
caagtgactcgggatccaggatctc

SEQ ID NO: 1592030 - DNA, 25 bp, Homo sapien
gaccaagtgactcgggatccaggat

SEQ ID NO: 1592031 - DNA, 25 bp, Homo sapien
aagtgactcgggatccaggatctcc

SEQ ID NO: 1592032 - DNA, 25 bp, Homo sapien
ctgtgaggaggacctgcatccctgg

SEQ ID NO: 1592033 - DNA, 25 bp, Homo sapien
agagggttcccaggcaatcgggcac

SEQ ID NO: 1592034 - DNA, 25 bp, Homo sapien
tactcccggtgtaggaccctctaca

SEQ ID NO: 1592035 - DNA, 25 bp, Homo sapien
tggtacactgaagcggctggcctct

SEQ ID NO: 1592036 - DNA, 25 bp, Homo sapien
gtagaatggatgccaccagtcccca

SEQ ID NO: 1592037 - DNA, 25 bp, Homo sapien
cagccggagccccttgcctgagggc

SEQ ID NO: 1592038 - DNA, 25 bp, Homo sapien
gaatccacgggcagcccacggcgga

SEQ ID NO: 1592039 - DNA, 25 bp, Homo sapien
agcagccggagccccttgcctgagg

SEQ ID NO: 1592040 - DNA, 25 bp, Homo sapien
ctgtgcatgggcagcggccagttct

SEQ ID NO: 1592041 - DNA, 25 bp, Homo sapien
gtgaactgccgtggcacccggagca

SEQ ID NO: 1592042 - DNA, 25 bp, Homo sapien
agagaggcatcctgcttgctcccct

SEQ ID NO: 1592043 - DNA, 25 bp, Homo sapien
tgttttgtgaactgccgtggcaccc

SEQ ID NO: 1592044 - DNA, 25 bp, Homo sapien
atgatgaagccagcgtaccccgact

SEQ ID NO: 1592045 - DNA, 25 bp, Homo sapien
ctctactttgtaggggggctccttg

SEQ ID NO: 1592046 - DNA, 25 bp, Homo sapien
cttgtttttgaagtgcacctcgatg

SEQ ID NO: 1592047 - DNA, 25 bp, Homo sapien
gtgcacctcgatgggcatgatgaag

SEQ ID NO: 1592048 - DNA, 25 bp, Homo sapien
ccagcacgggggctgagcacctgct

SEQ ID NO: 1592049 - DNA, 25 bp, Homo sapien
gcacctgctgcaccacggacacatg

SEQ ID NO: 1592050 - DNA, 25 bp, Homo sapien
ctccagcacgggggctgagcacctg

SEQ ID NO: 1592051 - DNA, 25 bp, Homo sapien
acctgctgcaccacggacacatgca

SEQ ID NO: 1592052 - DNA, 25 bp, Homo sapien
aaaggcagaagtcggacgaggacac

SEQ ID NO: 1592053 - DNA, 25 bp, Homo sapien
gtcctggactggctgagcggagggc

SEQ ID NO: 1592054 - DNA, 25 bp, Homo sapien
aggaggcgacggctcagagtctgcc

SEQ ID NO: 1592055 - DNA, 25 bp, Homo sapien
aggctgaaggtcctggactggctga

SEQ ID NO: 1592056 - DNA, 25 bp, Homo sapien
ctccgtggtgggcttcttgcgcagt

SEQ ID NO: 1592057 - DNA, 25 bp, Homo sapien
atccagtcgtgagtgaacccctccg

SEQ ID NO: 1592058 - DNA, 25 bp, Homo sapien
agtgctggatgtcacattgctcggg

SEQ ID NO: 1592059 - DNA, 25 bp, Homo sapien
gttgggcgcgatgccccagctctaa

SEQ ID NO: 1592060 - DNA, 25 bp, Homo sapien
acagctcccatctgcgcctttccac

SEQ ID NO: 1592061 - DNA, 25 bp, Homo sapien
ctcccctgacagagccgccctcccg

SEQ ID NO: 1592062 - DNA, 25 bp, Homo sapien
cctcccctgacagagccgccctccc

SEQ ID NO: 1592063 - DNA, 25 bp, Homo sapien
tcccctgacagagccgccctcccgg

SEQ ID NO: 1592064 - DNA, 25 bp, Homo sapien
gagaacactgaggagtcgtttcccc

SEQ ID NO: 1592065 - DNA, 25 bp, Homo sapien
atggagcgacggcaacatgagaccc

SEQ ID NO: 1592066 - DNA, 25 bp, Homo sapien
tacacctggagttcggctactgcat

SEQ ID NO: 1592067 - DNA, 25 bp, Homo sapien
tactgcatctaattccctcggaggc

SEQ ID NO: 1592068 - DNA, 25 bp, Homo sapien
tcattgtctgtcaagcgccgccgcc

SEQ ID NO: 1592069 - DNA, 25 bp, Homo sapien
cctcattgtctgtcaagcgccgccg

SEQ ID NO: 1592070 - DNA, 25 bp, Homo sapien
cgccctcattgtctgtcaagcgccg

SEQ ID NO: 1592071 - DNA, 25 bp, Homo sapien
cccgccgccctcattgtctgtcaag

SEQ ID NO: 1592072 - DNA, 25 bp, Homo sapien
actccaggccccgtgctcttaacca

SEQ ID NO: 1592073 - DNA, 25 bp, Homo sapien
gaattctaacttaggtctgcctgac

SEQ ID NO: 1592074 - DNA, 25 bp, Homo sapien
caagattgtacaactagaaaatggt

SEQ ID NO: 1592075 - DNA, 25 bp, Homo sapien
tttacagacaatgtccttgagcttc

SEQ ID NO: 1592076 - DNA, 25 bp, Homo sapien
tgctgttctcagctgtgaacctgag

SEQ ID NO: 1592077 - DNA, 25 bp, Homo sapien
acatgtggatgtagaatgaggtgcc

SEQ ID NO: 1592078 - DNA, 25 bp, Homo sapien
ctcacaagtccgtgggaggagatga

SEQ ID NO: 1592079 - DNA, 25 bp, Homo sapien
ccaagagccagggacattgccatgg

SEQ ID NO: 1592080 - DNA, 25 bp, Homo sapien
gggctatcttctcaagacacaggca

SEQ ID NO: 1592081 - DNA, 25 bp, Homo sapien
cagaggaaggaaccacgagtgtccc

SEQ ID NO: 1592082 - DNA, 25 bp, Homo sapien
gagtgtcccgcaggtgcaagtcctg

SEQ ID NO: 1592083 - DNA, 25 bp, Homo sapien
aagtccatcatctgcctcaaggcag

SEQ ID NO: 1592084 - DNA, 25 bp, Homo sapien
tcccgaggccagtagcggactttga

SEQ ID NO: 1592085 - DNA, 25 bp, Homo sapien
tctcatagttggcatccaccaaggc

SEQ ID NO: 1592086 - DNA, 25 bp, Homo sapien
actttgagggtttcacctggcatct

SEQ ID NO: 1592087 - DNA, 25 bp, Homo sapien
caccccggatttccacgtagggcag

SEQ ID NO: 1592088 - DNA, 25 bp, Homo sapien
acctcaatcaggtgccgaagctcct

SEQ ID NO: 1592089 - DNA, 25 bp, Homo sapien
ataaaaccacggagacctcaatcag

SEQ ID NO: 1592090 - DNA, 25 bp, Homo sapien
cacggagacctcaatcaggtgccga

SEQ ID NO: 1592091 - DNA, 25 bp, Homo sapien
gagacctcaatcaggtgccgaagct

SEQ ID NO: 1592092 - DNA, 25 bp, Homo sapien
tgttgagggcgtaggcgttgaccgt

SEQ ID NO: 1592093 - DNA, 25 bp, Homo sapien
tgcagggcaatgctgttgagggcgt

SEQ ID NO: 1592094 - DNA, 25 bp, Homo sapien
accgtgggccgcaggaaggacagaa

SEQ ID NO: 1592095 - DNA, 25 bp, Homo sapien
gtactcctggcacacgatgtagaga

SEQ ID NO: 1592096 - DNA, 25 bp, Homo sapien
gatgaagaccaggcggatgaactgg

SEQ ID NO: 1592097 - DNA, 25 bp, Homo sapien
tgaagaccaggcggatgaactggga

SEQ ID NO: 1592098 - DNA, 25 bp, Homo sapien
atgaagaccaggcggatgaactggg

SEQ ID NO: 1592099 - DNA, 25 bp, Homo sapien
tgatgaagaccaggcggatgaactg

SEQ ID NO: 1592100 - DNA, 25 bp, Homo sapien
ggagccacaggatggcgatctcgtc

SEQ ID NO: 1592101 - DNA, 25 bp, Homo sapien
aagctgagcgtcatgtggaaataca

SEQ ID NO: 1592102 - DNA, 25 bp, Homo sapien
ggcatccatatgctatagccactgc

SEQ ID NO: 1592103 - DNA, 25 bp, Homo sapien
ggatggcgatctcgtccagcagctg

SEQ ID NO: 1592104 - DNA, 25 bp, Homo sapien
tgatcatgaagaggacccagacaac

SEQ ID NO: 1592105 - DNA, 25 bp, Homo sapien
ggagcatcatcagtggcccgaagat

SEQ ID NO: 1592106 - DNA, 25 bp, Homo sapien
caacgtaaatgtagcgggagcgctt

SEQ ID NO: 1592107 - DNA, 25 bp, Homo sapien
gcatacgggtgcatcaggagcatca

SEQ ID NO: 1592108 - DNA, 25 bp, Homo sapien
acctcggagctctgataggcgaaga

SEQ ID NO: 1592109 - DNA, 25 bp, Homo sapien
ggaagttgctctcacaccagtccac

SEQ ID NO: 1592110 - DNA, 25 bp, Homo sapien
tctgataggcgaagatgctaggcat

SEQ ID NO: 1592111 - DNA, 25 bp, Homo sapien
tcggccaccagctccgagtactgga

SEQ ID NO: 1592112 - DNA, 25 bp, Homo sapien
ggaatgtggcagaagagctaccatg

SEQ ID NO: 1592113 - DNA, 25 bp, Homo sapien
tgctaacgtggccatgagagactat

SEQ ID NO: 1592114 - DNA, 25 bp, Homo sapien
gaataaagaccaccataccatgagg

SEQ ID NO: 1592115 - DNA, 25 bp, Homo sapien
gggctatgtgacttgctctgaccaa

SEQ ID NO: 1592116 - DNA, 25 bp, Homo sapien
aataaggaataagtggggtgtggtg

SEQ ID NO: 1592117 - DNA, 25 bp, Homo sapien
gctcatgcctgtagtcccagcactt

SEQ ID NO: 1592118 - DNA, 25 bp, Homo sapien
tgtgcccggccctgcagctattttt

SEQ ID NO: 1592119 - DNA, 25 bp, Homo sapien
agaccccatctctaatacatatata

SEQ ID NO: 1592120 - DNA, 25 bp, Homo sapien
cacgctggtgcagaaggagcctgta

SEQ ID NO: 1592121 - DNA, 25 bp, Homo sapien
ctccccaggacggtgaggatgagcc

SEQ ID NO: 1592122 - DNA, 25 bp, Homo sapien
tgtcccagctagcacctgagagctg

SEQ ID NO: 1592123 - DNA, 25 bp, Homo sapien
caccccttgttgctgggcttggagg

SEQ ID NO: 1592124 - DNA, 25 bp, Homo sapien
tctcccagcgttatgcggctggtgc

SEQ ID NO: 1592125 - DNA, 25 bp, Homo sapien
agtggctggaactcttgctggagcc

SEQ ID NO: 1592126 - DNA, 25 bp, Homo sapien
tggaactcttgctggagccgggctc

SEQ ID NO: 1592127 - DNA, 25 bp, Homo sapien
ctgtctcccagcgttatgcggctgg

SEQ ID NO: 1592128 - DNA, 25 bp, Homo sapien
tacagacaccagatttgtgaataaa

SEQ ID NO: 1592129 - DNA, 25 bp, Homo sapien
gatccttcgggatgaagagtccttc

SEQ ID NO: 1592130 - DNA, 25 bp, Homo sapien
gggccggcgcatctccgtgatctgc

SEQ ID NO: 1592131 - DNA, 25 bp, Homo sapien
gggctcagcccgttatgacttctcc

SEQ ID NO: 1592132 - DNA, 25 bp, Homo sapien
ataaataagtcagccgagctccccc

SEQ ID NO: 1592133 - DNA, 25 bp, Homo sapien
tcctcgttgtctctgcatccaggtc

SEQ ID NO: 1592134 - DNA, 25 bp, Homo sapien
cagcactgcagcttctgggtgccag

SEQ ID NO: 1592135 - DNA, 25 bp, Homo sapien
tgcatccaggtctccaataaataag

SEQ ID NO: 1592136 - DNA, 25 bp, Homo sapien
ctctgccacggacagggtcaggctc

SEQ ID NO: 1592137 - DNA, 25 bp, Homo sapien
ggaaggccacgtcggtgtagcgagt

SEQ ID NO: 1592138 - DNA, 25 bp, Homo sapien
cgcagtagcggaagatgaccttctc

SEQ ID NO: 1592139 - DNA, 25 bp, Homo sapien
acagctggcatggaccagacagggc

SEQ ID NO: 1592140 - DNA, 25 bp, Homo sapien
gctggggaaagttgggaagtcacag

SEQ ID NO: 1592141 - DNA, 25 bp, Homo sapien
agggcgctgacagtgagcagggtca

SEQ ID NO: 1592142 - DNA, 25 bp, Homo sapien
gtgggagggaagggcgctgacagtg

SEQ ID NO: 1592143 - DNA, 25 bp, Homo sapien
agttgggaagtcacagagggtccct

SEQ ID NO: 1592144 - DNA, 25 bp, Homo sapien
ctgttcagacgagaactctccatcg

SEQ ID NO: 1592145 - DNA, 25 bp, Homo sapien
gcctttgccacctgttcagacgaga

SEQ ID NO: 1592146 - DNA, 25 bp, Homo sapien
cagcctttgccacctgttcagacga

SEQ ID NO: 1592147 - DNA, 25 bp, Homo sapien
ttcagacgagaactctccatcggcc

SEQ ID NO: 1592148 - DNA, 25 bp, Homo sapien
ggagctgtgccccaaatttatgccc

SEQ ID NO: 1592149 - DNA, 25 bp, Homo sapien
tctaagagttaagggctcaccccca

SEQ ID NO: 1592150 - DNA, 25 bp, Homo sapien
tgggagctaacctcttcactgccgg

SEQ ID NO: 1592151 - DNA, 25 bp, Homo sapien
cgggcaggtcctgagagtgggagct

SEQ ID NO: 1592152 - DNA, 25 bp, Homo sapien
acacagccatttccgacgccccaga

SEQ ID NO: 1592153 - DNA, 25 bp, Homo sapien
agggcaggcaactggtgttcccccg

SEQ ID NO: 1592154 - DNA, 25 bp, Homo sapien
atttacgagtgctgtgctggcggcc

SEQ ID NO: 1592155 - DNA, 25 bp, Homo sapien
ccagacaccccctgatttacgagtg

SEQ ID NO: 1592156 - DNA, 25 bp, Homo sapien
tccacgggaaccctccatggtggct

SEQ ID NO: 1592157 - DNA, 25 bp, Homo sapien
ctgtctcgggaaggccaacctgaga

SEQ ID NO: 1592158 - DNA, 25 bp, Homo sapien
caggtcatggtaacgtctagcacga

SEQ ID NO: 1592159 - DNA, 25 bp, Homo sapien
tcccgcctggaggattaggacatca

SEQ ID NO: 1592160 - DNA, 25 bp, Homo sapien
gaagtcacccagaattaagcaacgg

SEQ ID NO: 1592161 - DNA, 25 bp, Homo sapien
tcctgggtagctagcgaaagccaag

SEQ ID NO: 1592162 - DNA, 25 bp, Homo sapien
taggattgtcagacctcagtcagga

SEQ ID NO: 1592163 - DNA, 25 bp, Homo sapien
tactgtctcaaaaaagcctggcggg

SEQ ID NO: 1592164 - DNA, 25 bp, Homo sapien
tgcactacttgaaaggttaaggtgg

SEQ ID NO: 1592165 - DNA, 25 bp, Homo sapien
ggtggtgtgcactacttgaaaggtt

SEQ ID NO: 1592166 - DNA, 25 bp, Homo sapien
agccaggcatttaatggtacacgcc

SEQ ID NO: 1592167 - DNA, 25 bp, Homo sapien
caagacggtggacactgcaatccag

SEQ ID NO: 1592168 - DNA, 25 bp, Homo sapien
acagagtagcagatctaaaaaggaa

SEQ ID NO: 1592169 - DNA, 25 bp, Homo sapien
caaacagagtagcagatctaaaaag

SEQ ID NO: 1592170 - DNA, 25 bp, Homo sapien
taaggaataagacattatccaaaca

SEQ ID NO: 1592171 - DNA, 25 bp, Homo sapien
caaaacataaggaataagacattat

SEQ ID NO: 1592172 - DNA, 25 bp, Homo sapien
agtggcgtggtgtcagctcacagca

SEQ ID NO: 1592173 - DNA, 25 bp, Homo sapien
gtgcagtggcgtggtgtcagctcac

SEQ ID NO: 1592174 - DNA, 25 bp, Homo sapien
gcagtggcgtggtgtcagctcacag

SEQ ID NO: 1592175 - DNA, 25 bp, Homo sapien
agtgcagtggcgtggtgtcagctca

SEQ ID NO: 1592176 - DNA, 25 bp, Homo sapien
gaggagatggcttaacttttccaga

SEQ ID NO: 1592177 - DNA, 25 bp, Homo sapien
ctgggctatgtggtggataagtcac

SEQ ID NO: 1592178 - DNA, 25 bp, Homo sapien
gagcctcactctaggatggcgaagg

SEQ ID NO: 1592179 - DNA, 25 bp, Homo sapien
tagaagttacccagtgggcagcaca

SEQ ID NO: 1592180 - DNA, 25 bp, Homo sapien
atctgggccaacacgttcactgtct

SEQ ID NO: 1592181 - DNA, 25 bp, Homo sapien
tgtcgttgatcatcttgcgctcggg

SEQ ID NO: 1592182 - DNA, 25 bp, Homo sapien
tcatgggcttccgtgtcaggtagcg

SEQ ID NO: 1592183 - DNA, 25 bp, Homo sapien
ggtccttagtggtcatgggcttccg

SEQ ID NO: 1592184 - DNA, 25 bp, Homo sapien
gccgcaaccgcttggctgcaggcat

SEQ ID NO: 1592185 - DNA, 25 bp, Homo sapien
tctggggtcccgtgtccagccgcaa

SEQ ID NO: 1592186 - DNA, 25 bp, Homo sapien
cgctgttgggtgttgtcttgcctga

SEQ ID NO: 1592187 - DNA, 25 bp, Homo sapien
tgtcgacttcccagacaggctctgg

SEQ ID NO: 1592188 - DNA, 25 bp, Homo sapien
cttgctcgagtttgctggcagccgc

SEQ ID NO: 1592189 - DNA, 25 bp, Homo sapien
cgagtttgctggcagccgcccgcag

SEQ ID NO: 1592190 - DNA, 25 bp, Homo sapien
gctcgagtttgctggcagccgcccg

SEQ ID NO: 1592191 - DNA, 25 bp, Homo sapien
ttgctcgagtttgctggcagccgcc

SEQ ID NO: 1592192 - DNA, 25 bp, Homo sapien
cttgagctccctcccgacggcttcc

SEQ ID NO: 1592193 - DNA, 25 bp, Homo sapien
gcttccgctctctcttgggtggcgt

SEQ ID NO: 1592194 - DNA, 25 bp, Homo sapien
gctctctcttgggtggcgtcttctt

SEQ ID NO: 1592195 - DNA, 25 bp, Homo sapien
cgacggcttccgctctctcttgggt

SEQ ID NO: 1592196 - DNA, 25 bp, Homo sapien
ctcctctgagctgtccgactcctcg

SEQ ID NO: 1592197 - DNA, 25 bp, Homo sapien
aggcctcgctgtcaatgtcgctctc

SEQ ID NO: 1592198 - DNA, 25 bp, Homo sapien
aggaggcctcgctgtcaatgtcgct

SEQ ID NO: 1592199 - DNA, 25 bp, Homo sapien
gaggaggcctcgctgtcaatgtcgc

SEQ ID NO: 1592200 - DNA, 25 bp, Homo sapien
gacccggtgcccactggtgcctcca

SEQ ID NO: 1592201 - DNA, 25 bp, Homo sapien
cgggacccggtgcccactggtgcct

SEQ ID NO: 1592202 - DNA, 25 bp, Homo sapien
ggacccggtgcccactggtgcctcc

SEQ ID NO: 1592203 - DNA, 25 bp, Homo sapien
ccggtgcccactggtgcctccactg

SEQ ID NO: 1592204 - DNA, 25 bp, Homo sapien
ctgcggggtgggtgccttcttctcc

SEQ ID NO: 1592205 - DNA, 25 bp, Homo sapien
tttcctgcgcttcttctcctgcggg

SEQ ID NO: 1592206 - DNA, 25 bp, Homo sapien
tccttgtcctcctcaggcggcttct

SEQ ID NO: 1592207 - DNA, 25 bp, Homo sapien
ccttgtcctcctcaggcggcttctc

SEQ ID NO: 1592208 - DNA, 25 bp, Homo sapien
gcagggaagcaccgcccccatctcc

SEQ ID NO: 1592209 - DNA, 25 bp, Homo sapien
agcagggaagcaccgcccccatctc

SEQ ID NO: 1592210 - DNA, 25 bp, Homo sapien
cagggaagcaccgcccccatctccc

SEQ ID NO: 1592211 - DNA, 25 bp, Homo sapien
gagcagggaagcaccgcccccatct

SEQ ID NO: 1592212 - DNA, 25 bp, Homo sapien
cctcctgctgcggcgccttggcctt

SEQ ID NO: 1592213 - DNA, 25 bp, Homo sapien
ttgctctcaggctcttcttgggagc

SEQ ID NO: 1592214 - DNA, 25 bp, Homo sapien
cttggccttgctctcaggctcttct

SEQ ID NO: 1592215 - DNA, 25 bp, Homo sapien
tcctgctgcggcgccttggccttgc

SEQ ID NO: 1592216 - DNA, 25 bp, Homo sapien
acctcttggccctcgaagtccccat

SEQ ID NO: 1592217 - DNA, 25 bp, Homo sapien
gccgtctgacatgtagtccacctct

SEQ ID NO: 1592218 - DNA, 25 bp, Homo sapien
tctgacatgtagtccacctcttggc

SEQ ID NO: 1592219 - DNA, 25 bp, Homo sapien
tcgaaggcctcgtcgtctgaaccct

SEQ ID NO: 1592220 - DNA, 25 bp, Homo sapien
tccaggtcgtggatgcgcagctcgc

SEQ ID NO: 1592221 - DNA, 25 bp, Homo sapien
tggtcctgatccttgagccgccgct

SEQ ID NO: 1592222 - DNA, 25 bp, Homo sapien
tggcatcggacgacatctccaggtc

SEQ ID NO: 1592223 - DNA, 25 bp, Homo sapien
actggcatcactggcatcggacgac

SEQ ID NO: 1592224 - DNA, 25 bp, Homo sapien
ccgggccagcggtgtgaaattgtac

SEQ ID NO: 1592225 - DNA, 25 bp, Homo sapien
tcctcggcagtgagcgtgcgatgcc

SEQ ID NO: 1592226 - DNA, 25 bp, Homo sapien
gaagatgtagtaggacgtgttctct

SEQ ID NO: 1592227 - DNA, 25 bp, Homo sapien
tctgttacgcctcccttcttgatgc

SEQ ID NO: 1592228 - DNA, 25 bp, Homo sapien
tcctgcctgatttgccgttgacccg

SEQ ID NO: 1592229 - DNA, 25 bp, Homo sapien
gaactccttgaggacgatgccgtac

SEQ ID NO: 1592230 - DNA, 25 bp, Homo sapien
tgatttgccgttgacccggagcagc

SEQ ID NO: 1592231 - DNA, 25 bp, Homo sapien
acgatgccgtacttcttcctccgag

SEQ ID NO: 1592232 - DNA, 25 bp, Homo sapien
tgcccgcgcccgattcgggcatctc

SEQ ID NO: 1592233 - DNA, 25 bp, Homo sapien
ttggtagattttcttgttgctcaag

SEQ ID NO: 1592234 - DNA, 25 bp, Homo sapien
gcccgcgcccgattcgggcatctcc

SEQ ID NO: 1592235 - DNA, 25 bp, Homo sapien
tcttgttgctcaagtcccgctccag

SEQ ID NO: 1592236 - DNA, 25 bp, Homo sapien
agcaaagttgactttgtcggctgca

SEQ ID NO: 1592237 - DNA, 25 bp, Homo sapien
tgactttgtcggctgcattaaaagc

SEQ ID NO: 1592238 - DNA, 25 bp, Homo sapien
tttgtcggctgcattaaaagccatg

SEQ ID NO: 1592239 - DNA, 25 bp, Homo sapien
agttgactttgtcggctgcattaaa

SEQ ID NO: 1592240 - DNA, 25 bp, Homo sapien
gcctgttttgcctggcaacactgga

SEQ ID NO: 1592241 - DNA, 25 bp, Homo sapien
ttttgcctggcaacactggatacgg

SEQ ID NO: 1592242 - DNA, 25 bp, Homo sapien
tggatacggaagactccaaggattc

SEQ ID NO: 1592243 - DNA, 25 bp, Homo sapien
tggcaacactggatacggaagactc

SEQ ID NO: 1592244 - DNA, 25 bp, Homo sapien
ggaactcgaacgacgtattcagtga

SEQ ID NO: 1592245 - DNA, 25 bp, Homo sapien
tcgaacgacgtattcagtgacattc

SEQ ID NO: 1592246 - DNA, 25 bp, Homo sapien
ttaggaactcgaacgacgtattcag

SEQ ID NO: 1592247 - DNA, 25 bp, Homo sapien
gacgtattcagtgacattctggctg

SEQ ID NO: 1592248 - DNA, 25 bp, Homo sapien
aagaggaagcggtgagtgaggggtc

SEQ ID NO: 1592249 - DNA, 25 bp, Homo sapien
gaagcggtgagtgaggggtcgccga

SEQ ID NO: 1592250 - DNA, 25 bp, Homo sapien
ccgaaccccgccaaatccacactca

SEQ ID NO: 1592251 - DNA, 25 bp, Homo sapien
tgagtgaggggtcgccgaggtcgcc

SEQ ID NO: 1592252 - DNA, 25 bp, Homo sapien
ctcggtgtcgggtctctgtgcctga

SEQ ID NO: 1592253 - DNA, 25 bp, Homo sapien
tgcgcgtccctcgatcccggggaag

SEQ ID NO: 1592254 - DNA, 25 bp, Homo sapien
ggttcctttcgtctcctctggcgtg

SEQ ID NO: 1592255 - DNA, 25 bp, Homo sapien
gggcaatggtcagtggttccgatct

SEQ ID NO: 1592256 - DNA, 25 bp, Homo sapien
gatggcaaccttcttagcgactgtg

SEQ ID NO: 1592257 - DNA, 25 bp, Homo sapien
gaagaggcgctcaagctactcggtc

SEQ ID NO: 1592258 - DNA, 25 bp, Homo sapien
tttagactcagcaaacctaggccga

SEQ ID NO: 1592259 - DNA, 25 bp, Homo sapien
tcggcggctatggtcacctcaaaag

SEQ ID NO: 1592260 - DNA, 25 bp, Homo sapien
gggctcccaggcactttgcgcatgc

SEQ ID NO: 1592261 - DNA, 25 bp, Homo sapien
gcgtcaccatagcaaccgaggccta

SEQ ID NO: 1592262 - DNA, 25 bp, Homo sapien
aacgcggttaacttcatcaaatggg

SEQ ID NO: 1592263 - DNA, 25 bp, Homo sapien
gctggcgctcttgtatataacgcgg

SEQ ID NO: 1592264 - DNA, 25 bp, Homo sapien
gtcgaaccgccgcttggctccccat

SEQ ID NO: 1592265 - DNA, 25 bp, Homo sapien
gccgcttggctccccatgggtctgt

SEQ ID NO: 1592266 - DNA, 25 bp, Homo sapien
gaaccgccgcttggctccccatggg

SEQ ID NO: 1592267 - DNA, 25 bp, Homo sapien
gtcgggtcgaaccgccgcttggctc

SEQ ID NO: 1592268 - DNA, 25 bp, Homo sapien
ccgtcattcccgcaaaatgaccggg

SEQ ID NO: 1592269 - DNA, 25 bp, Homo sapien
cttgtgacgttgagccgagccagga

SEQ ID NO: 1592270 - DNA, 25 bp, Homo sapien
tggaccccgtcattcccgcaaaatg

SEQ ID NO: 1592271 - DNA, 25 bp, Homo sapien
ggacccttgtgacgttgagccgagc

SEQ ID NO: 1592272 - DNA, 25 bp, Homo sapien
tctttgcaagtccaagctgcccgag

SEQ ID NO: 1592273 - DNA, 25 bp, Homo sapien
ctgctggccggatgggtctttgcaa

SEQ ID NO: 1592274 - DNA, 25 bp, Homo sapien
gcaagtccaagctgcccgagatggg

SEQ ID NO: 1592275 - DNA, 25 bp, Homo sapien
gccggatgggtctttgcaagtccaa

SEQ ID NO: 1592276 - DNA, 25 bp, Homo sapien
cgaatcatggcagtaacacaactgc

SEQ ID NO: 1592277 - DNA, 25 bp, Homo sapien
atcatggcagtaacacaactgcgca

SEQ ID NO: 1592278 - DNA, 25 bp, Homo sapien
gcatgcacacatcccccgaatcatg

SEQ ID NO: 1592279 - DNA, 25 bp, Homo sapien
aggcatgcacacatcccccgaatca

SEQ ID NO: 1592280 - DNA, 25 bp, Homo sapien
catctataaagaacaaacatccgct

SEQ ID NO: 1592281 - DNA, 25 bp, Homo sapien
tccgcttcaaaactacagggaggga

SEQ ID NO: 1592282 - DNA, 25 bp, Homo sapien
taaatttcaatcaccattatcaggc

SEQ ID NO: 1592283 - DNA, 25 bp, Homo sapien
cggttaggaaagcacattgagcctg

SEQ ID NO: 1592284 - DNA, 25 bp, Homo sapien
aaagacaacagaccagtcctgggag

SEQ ID NO: 1592285 - DNA, 25 bp, Homo sapien
tctcctcttgaacagatgaaaagac

SEQ ID NO: 1592286 - DNA, 25 bp, Homo sapien
aagacaacagaccagtcctgggagg

SEQ ID NO: 1592287 - DNA, 25 bp, Homo sapien
ttcaatctcctcttgaacagatgaa

SEQ ID NO: 1592288 - DNA, 25 bp, Homo sapien
gggtcctgcaatacaacacctggtc

SEQ ID NO: 1592289 - DNA, 25 bp, Homo sapien
tacaacacctggtccaaggaatgtt

SEQ ID NO: 1592290 - DNA, 25 bp, Homo sapien
gtcctgcaatacaacacctggtcca

SEQ ID NO: 1592291 - DNA, 25 bp, Homo sapien
tgcaatacaacacctggtccaagga

SEQ ID NO: 1592292 - DNA, 25 bp, Homo sapien
aaaatgaattgctttatcctcagag

SEQ ID NO: 1592293 - DNA, 25 bp, Homo sapien
aatgaattgctttatcctcagagag

SEQ ID NO: 1592294 - DNA, 25 bp, Homo sapien
gagggccgagggtgggagaaaatga

SEQ ID NO: 1592295 - DNA, 25 bp, Homo sapien
agaaaatgaattgctttatcctcag

SEQ ID NO: 1592296 - DNA, 25 bp, Homo sapien
tctggctggctcaacatggaaggat

SEQ ID NO: 1592297 - DNA, 25 bp, Homo sapien
atttagatctcgctatcttctctgg

SEQ ID NO: 1592298 - DNA, 25 bp, Homo sapien
tcgctctctcgccaaacaaaacaga

SEQ ID NO: 1592299 - DNA, 25 bp, Homo sapien
tggaaggatcccaattttgaaagaa

SEQ ID NO: 1592300 - DNA, 25 bp, Homo sapien
cccaagtggccagattgtgagcgag

SEQ ID NO: 1592301 - DNA, 25 bp, Homo sapien
ggcgcagcacgacgacatgaacaat

SEQ ID NO: 1592302 - DNA, 25 bp, Homo sapien
aaggtggcaacgatcttcacgccca

SEQ ID NO: 1592303 - DNA, 25 bp, Homo sapien
caggctggaaggacgtgcttgttaa

SEQ ID NO: 1592304 - DNA, 25 bp, Homo sapien
caggatggacggtggccgggggttg

SEQ ID NO: 1592305 - DNA, 25 bp, Homo sapien
ctgtaatattccgcccaggcggcac

SEQ ID NO: 1592306 - DNA, 25 bp, Homo sapien
tgtccctgctgcgtgggcggcggct

SEQ ID NO: 1592307 - DNA, 25 bp, Homo sapien
gcccaggcggcactgtagtctggct

SEQ ID NO: 1592308 - DNA, 25 bp, Homo sapien
atattccgcccaggcggcactgtag

SEQ ID NO: 1592309 - DNA, 25 bp, Homo sapien
tgcttcttgtagtactcctcccaag

SEQ ID NO: 1592310 - DNA, 25 bp, Homo sapien
tcccaagccttcgtgtagtcctgct

SEQ ID NO: 1592311 - DNA, 25 bp, Homo sapien
caagccttcgtgtagtcctgctgtg

SEQ ID NO: 1592312 - DNA, 25 bp, Homo sapien
tagtactcctcccaagccttcgtgt

SEQ ID NO: 1592313 - DNA, 25 bp, Homo sapien
ctgtgcgggcgccgagacaggtcag

SEQ ID NO: 1592314 - DNA, 25 bp, Homo sapien
gcgccgagacaggtcagaaaccact

SEQ ID NO: 1592315 - DNA, 25 bp, Homo sapien
aggtcagaaaccactcccccggcag

SEQ ID NO: 1592316 - DNA, 25 bp, Homo sapien
cggcagggctggagcccccccgcca

SEQ ID NO: 1592317 - DNA, 25 bp, Homo sapien
tcccaggccttagtgtagtccgact

SEQ ID NO: 1592318 - DNA, 25 bp, Homo sapien
tagtgtagtccgactggccggtggg

SEQ ID NO: 1592319 - DNA, 25 bp, Homo sapien
ccttagtgtagtccgactggccggt

SEQ ID NO: 1592320 - DNA, 25 bp, Homo sapien
cttcccaggccttagtgtagtccga

SEQ ID NO: 1592321 - DNA, 25 bp, Homo sapien
tagtgtgagtagtaggcggcccacg

SEQ ID NO: 1592322 - DNA, 25 bp, Homo sapien
cggcgttggggtccgcggccgctgc

SEQ ID NO: 1592323 - DNA, 25 bp, Homo sapien
cccgggggctgctggtagtagtgtg

SEQ ID NO: 1592324 - DNA, 25 bp, Homo sapien
tagtaggcggcccacgcggcgttgg

SEQ ID NO: 1592325 - DNA, 25 bp, Homo sapien
cctccgccaggtggcccatcactta

SEQ ID NO: 1592326 - DNA, 25 bp, Homo sapien
ctgcaggagatacctcgggtgagac

SEQ ID NO: 1592327 - DNA, 25 bp, Homo sapien
gtgagacggggggacagaacagggc

SEQ ID NO: 1592328 - DNA, 25 bp, Homo sapien
ccctccgccaggtggcccatcactt

SEQ ID NO: 1592329 - DNA, 25 bp, Homo sapien
ctggggtgggtactggtgaggaggg

SEQ ID NO: 1592330 - DNA, 25 bp, Homo sapien
cctggggtgggtactggtgaggagg

SEQ ID NO: 1592331 - DNA, 25 bp, Homo sapien
gagggcctgttgatggtatccacaa

SEQ ID NO: 1592332 - DNA, 25 bp, Homo sapien
tagacaagaagcaactcgaaggacg

SEQ ID NO: 1592333 - DNA, 25 bp, Homo sapien
gaaagaagccgcgaaacttgcacgt

SEQ ID NO: 1592334 - DNA, 25 bp, Homo sapien
gaaaggcacatgctctaccagtaga

SEQ ID NO: 1592335 - DNA, 25 bp, Homo sapien
ttgaagggccccattgggccagcag

SEQ ID NO: 1592336 - DNA, 25 bp, Homo sapien
acctgggcctggtccaactgggcag

SEQ ID NO: 1592337 - DNA, 25 bp, Homo sapien
tggttgaagggcccaggattgaagg

SEQ ID NO: 1592338 - DNA, 25 bp, Homo sapien
cccaggattgaagggccccattggg

SEQ ID NO: 1592339 - DNA, 25 bp, Homo sapien
ggtaagtgggctgggatccgggctg

SEQ ID NO: 1592340 - DNA, 25 bp, Homo sapien
atccgggctgtgagaccaaatcccc

SEQ ID NO: 1592341 - DNA, 25 bp, Homo sapien
ccaaggtaagtgggctgggatccgg

SEQ ID NO: 1592342 - DNA, 25 bp, Homo sapien
ctagaaggaaggagagtaaccaagg

SEQ ID NO: 1592343 - DNA, 25 bp, Homo sapien
tgaaccccggatgatgaacaacttg

SEQ ID NO: 1592344 - DNA, 25 bp, Homo sapien
gggtgaaccccggatgatgaacaac

SEQ ID NO: 1592345 - DNA, 25 bp, Homo sapien
ctgcttggcgtggtcaatctgctgg

SEQ ID NO: 1592346 - DNA, 25 bp, Homo sapien
ctcgatcttttcctcgataagctgc

SEQ ID NO: 1592347 - DNA, 25 bp, Homo sapien
atagggtgcagggggccacactcac

SEQ ID NO: 1592348 - DNA, 25 bp, Homo sapien
gcaagggatagggtgcagggggcca

SEQ ID NO: 1592349 - DNA, 25 bp, Homo sapien
aagggatagggtgcagggggccaca

SEQ ID NO: 1592350 - DNA, 25 bp, Homo sapien
gggatagggtgcagggggccacact

SEQ ID NO: 1592351 - DNA, 25 bp, Homo sapien
atgaccagcccacacttgtgagtgg

SEQ ID NO: 1592352 - DNA, 25 bp, Homo sapien
gatggagaaggtcatctccccgcca

SEQ ID NO: 1592353 - DNA, 25 bp, Homo sapien
cgccagggggaccccaattgccttg

SEQ ID NO: 1592354 - DNA, 25 bp, Homo sapien
ggccgatgaccagcccacacttgtg

SEQ ID NO: 1592355 - DNA, 25 bp, Homo sapien
ggatgatgaaccctggaagccggtc

SEQ ID NO: 1592356 - DNA, 25 bp, Homo sapien
tgaaccctggaagccggtctggtct

SEQ ID NO: 1592357 - DNA, 25 bp, Homo sapien
ggaagccggtctggtcttgcactcc

SEQ ID NO: 1592358 - DNA, 25 bp, Homo sapien
tggtcttgcactcccctggaggccc

SEQ ID NO: 1592359 - DNA, 25 bp, Homo sapien
tctggaggaggtcgttgatgatccg

SEQ ID NO: 1592360 - DNA, 25 bp, Homo sapien
aggctctggaggaggtcgttgatga

SEQ ID NO: 1592361 - DNA, 25 bp, Homo sapien
gaggtcgttgatgatccgggctgcg

SEQ ID NO: 1592362 - DNA, 25 bp, Homo sapien
gatgatccgggctgcgtgctcgcac

SEQ ID NO: 1592363 - DNA, 25 bp, Homo sapien
atatgagcaatcttctcgggccctg

SEQ ID NO: 1592364 - DNA, 25 bp, Homo sapien
cattatatgagcaatcttctcgggc

SEQ ID NO: 1592365 - DNA, 25 bp, Homo sapien
ccccattatatgagcaatcttctcg

SEQ ID NO: 1592366 - DNA, 25 bp, Homo sapien
ttatatgagcaatcttctcgggccc

SEQ ID NO: 1592367 - DNA, 25 bp, Homo sapien
gccagcaccgagagagcagagacac

SEQ ID NO: 1592368 - DNA, 25 bp, Homo sapien
gacacaagtttaaaagaagagccca

SEQ ID NO: 1592369 - DNA, 25 bp, Homo sapien
ctgaggccagcaccgagagagcaga

SEQ ID NO: 1592370 - DNA, 25 bp, Homo sapien
agagacacaagtttaaaagaagagc

SEQ ID NO: 1592371 - DNA, 25 bp, Homo sapien
ggatcttcttgatcatctctccact

SEQ ID NO: 1592372 - DNA, 25 bp, Homo sapien
tgcttgaactgtatccgcacgccag

SEQ ID NO: 1592373 - DNA, 25 bp, Homo sapien
cacgccaacagaatgcctgggcact

SEQ ID NO: 1592374 - DNA, 25 bp, Homo sapien
ggccaatgaccacgccaacagaatg

SEQ ID NO: 1592375 - DNA, 25 bp, Homo sapien
tcacgttcccggaggatgtccatca

SEQ ID NO: 1592376 - DNA, 25 bp, Homo sapien
tcccggaggatgtccatcaccatct

SEQ ID NO: 1592377 - DNA, 25 bp, Homo sapien
cttggtcacgttcccggaggatgtc

SEQ ID NO: 1592378 - DNA, 25 bp, Homo sapien
agccgccttggtcacgttcccggag

SEQ ID NO: 1592379 - DNA, 25 bp, Homo sapien
cccaatgatgcggagaggtttgtcc

SEQ ID NO: 1592380 - DNA, 25 bp, Homo sapien
tgtaaggatccccaatgatgcggag

SEQ ID NO: 1592381 - DNA, 25 bp, Homo sapien
cattcgtattctgagatccgtcctg

SEQ ID NO: 1592382 - DNA, 25 bp, Homo sapien
gagatccgtcctgaattaagatcat

SEQ ID NO: 1592383 - DNA, 25 bp, Homo sapien
ttgccaatgaccaggccggccttgc

SEQ ID NO: 1592384 - DNA, 25 bp, Homo sapien
cttgccaatgaccaggccggccttg

SEQ ID NO: 1592385 - DNA, 25 bp, Homo sapien
tgatctcctgcacggtgccgttctg

SEQ ID NO: 1592386 - DNA, 25 bp, Homo sapien
cttgcccgcggggatcatgatctcc

SEQ ID NO: 1592387 - DNA, 25 bp, Homo sapien
ctgcgctcgggtaggccaccgctgt

SEQ ID NO: 1592388 - DNA, 25 bp, Homo sapien
cacactgcgctcgggtaggccaccg

SEQ ID NO: 1592389 - DNA, 25 bp, Homo sapien
cactgcgctcgggtaggccaccgct

SEQ ID NO: 1592390 - DNA, 25 bp, Homo sapien
acacactgcgctcgggtaggccacc

SEQ ID NO: 1592391 - DNA, 25 bp, Homo sapien
tgttaatttgttcacctcctctgcc

SEQ ID NO: 1592392 - DNA, 25 bp, Homo sapien
tttgttaatttgttcacctcctctg

SEQ ID NO: 1592393 - DNA, 25 bp, Homo sapien
tggagaaatctgtactttgcagcct

SEQ ID NO: 1592394 - DNA, 25 bp, Homo sapien
aatctgtactttgcagcctgaatcc

SEQ ID NO: 1592395 - DNA, 25 bp, Homo sapien
cccaccatgccgtctgggaccctgt

SEQ ID NO: 1592396 - DNA, 25 bp, Homo sapien
gaccctgtactcttctgtcattgaa

SEQ ID NO: 1592397 - DNA, 25 bp, Homo sapien
accatgccgtctgggaccctgtact

SEQ ID NO: 1592398 - DNA, 25 bp, Homo sapien
tgccgtctgggaccctgtactcttc

SEQ ID NO: 1592399 - DNA, 25 bp, Homo sapien
gatgggtccaagttgagaactgatt

SEQ ID NO: 1592400 - DNA, 25 bp, Homo sapien
ggatgggtccaagttgagaactgat

SEQ ID NO: 1592401 - DNA, 25 bp, Homo sapien
atgggtccaagttgagaactgattg

SEQ ID NO: 1592402 - DNA, 25 bp, Homo sapien
gccagcttcttgctctccggttgat

SEQ ID NO: 1592403 - DNA, 25 bp, Homo sapien
agtctccctgggaagccagcttctt

SEQ ID NO: 1592404 - DNA, 25 bp, Homo sapien
tctccctgggaagccagcttcttgc

SEQ ID NO: 1592405 - DNA, 25 bp, Homo sapien
ggaagccagcttcttgctctccggt

SEQ ID NO: 1592406 - DNA, 25 bp, Homo sapien
agcatcgcctccaattttggctgca

SEQ ID NO: 1592407 - DNA, 25 bp, Homo sapien
ggcagcatcgcctccaattttggct

SEQ ID NO: 1592408 - DNA, 25 bp, Homo sapien
actgtcgtggcagcatcgcctccaa

SEQ ID NO: 1592409 - DNA, 25 bp, Homo sapien
tcgtggcagcatcgcctccaatttt

SEQ ID NO: 1592410 - DNA, 25 bp, Homo sapien
gaatcagacggttccatgggcaata

SEQ ID NO: 1592411 - DNA, 25 bp, Homo sapien
tctagccccggaggcattgggacag

SEQ ID NO: 1592412 - DNA, 25 bp, Homo sapien
caaatggagctggagaggtcagtcc

SEQ ID NO: 1592413 - DNA, 25 bp, Homo sapien
cccgactgaagaggaaggactgtcc

SEQ ID NO: 1592414 - DNA, 25 bp, Homo sapien
tgcaggggggtcacccgttgggatc

SEQ ID NO: 1592415 - DNA, 25 bp, Homo sapien
gatcccactcgaggcgcagcgggag

SEQ ID NO: 1592416 - DNA, 25 bp, Homo sapien
gcgccgctcctggtgacccccagtg

SEQ ID NO: 1592417 - DNA, 25 bp, Homo sapien
tcacccgttgggatcccactcgagg

SEQ ID NO: 1592418 - DNA, 25 bp, Homo sapien
gcgaaagcgtccttgcggattcccg

SEQ ID NO: 1592419 - DNA, 25 bp, Homo sapien
cacggcgtcggcgaaagcgtccttg

SEQ ID NO: 1592420 - DNA, 25 bp, Homo sapien
agcgtccttgcggattcccgggccg

SEQ ID NO: 1592421 - DNA, 25 bp, Homo sapien
gtcggcgaaagcgtccttgcggatt

SEQ ID NO: 1592422 - DNA, 25 bp, Homo sapien
ggtcctcccgtgctgtagtccgaca

SEQ ID NO: 1592423 - DNA, 25 bp, Homo sapien
gtcctcccgtgctgtagtccgacat

SEQ ID NO: 1592424 - DNA, 25 bp, Homo sapien
gggtcctcccgtgctgtagtccgac

SEQ ID NO: 1592425 - DNA, 25 bp, Homo sapien
gcggcggcggctcaacgcgggaaca

SEQ ID NO: 1592426 - DNA, 25 bp, Homo sapien
gcggcggctcaacgcgggaacaagg

SEQ ID NO: 1592427 - DNA, 25 bp, Homo sapien
ggctcaacgcgggaacaaggcctcg

SEQ ID NO: 1592428 - DNA, 25 bp, Homo sapien
aacgcgggaacaaggcctcgctcca

SEQ ID NO: 1592429 - DNA, 25 bp, Homo sapien
ctgacactggtctggacaaatggga

SEQ ID NO: 1592430 - DNA, 25 bp, Homo sapien
ttctaagccaatggctgagcgacat

SEQ ID NO: 1592431 - DNA, 25 bp, Homo sapien
taagccaatggctgagcgacatggg

SEQ ID NO: 1592432 - DNA, 25 bp, Homo sapien
catgggtgggtgttcggtgactgac

SEQ ID NO: 1592433 - DNA, 25 bp, Homo sapien
ggagccagtggaagcgccgctgcat

SEQ ID NO: 1592434 - DNA, 25 bp, Homo sapien
ttggtgggagccagtggaagcgccg

SEQ ID NO: 1592435 - DNA, 25 bp, Homo sapien
gtgggagccagtggaagcgccgctg

SEQ ID NO: 1592436 - DNA, 25 bp, Homo sapien
tttggtgggagccagtggaagcgcc

SEQ ID NO: 1592437 - DNA, 25 bp, Homo sapien
cctggttgggtaggcccggcacgtg

SEQ ID NO: 1592438 - DNA, 25 bp, Homo sapien
tggttgggtaggcccggcacgtggc

SEQ ID NO: 1592439 - DNA, 25 bp, Homo sapien
gcagcctggttgggtaggcccggca

SEQ ID NO: 1592440 - DNA, 25 bp, Homo sapien
agcctggttgggtaggcccggcacg

SEQ ID NO: 1592441 - DNA, 25 bp, Homo sapien
ggagtccacgtttcttgtctcaggc

SEQ ID NO: 1592442 - DNA, 25 bp, Homo sapien
ccttgttgtgtgacatgttcaccat

SEQ ID NO: 1592443 - DNA, 25 bp, Homo sapien
aggacgacccacaaggggccagact

SEQ ID NO: 1592444 - DNA, 25 bp, Homo sapien
tgttcaccatttcgccctggagcca

SEQ ID NO: 1592445 - DNA, 25 bp, Homo sapien
gaatcttctgacccagagccccacc

SEQ ID NO: 1592446 - DNA, 25 bp, Homo sapien
gtcccaggagttttctgacccagca

SEQ ID NO: 1592447 - DNA, 25 bp, Homo sapien
agtcccaggagttttctgacccagc

SEQ ID NO: 1592448 - DNA, 25 bp, Homo sapien
tctgcctaggctgtgtcgtccagct

SEQ ID NO: 1592449 - DNA, 25 bp, Homo sapien
tcccatttctgcctaggctgtgtcg

SEQ ID NO: 1592450 - DNA, 25 bp, Homo sapien
catttctgcctaggctgtgtcgtcc

SEQ ID NO: 1592451 - DNA, 25 bp, Homo sapien
gcctaggctgtgtcgtccagctcac

SEQ ID NO: 1592452 - DNA, 25 bp, Homo sapien
gcccagggttttcttcatggcttcg

SEQ ID NO: 1592453 - DNA, 25 bp, Homo sapien
tatatgcccagggttttcttcatgg

SEQ ID NO: 1592454 - DNA, 25 bp, Homo sapien
tatgcccagggttttcttcatggct

SEQ ID NO: 1592455 - DNA, 25 bp, Homo sapien
cagggttttcttcatggcttcgtac

SEQ ID NO: 1592456 - DNA, 25 bp, Homo sapien
ggtcatgcctcggtacagccctagc

SEQ ID NO: 1592457 - DNA, 25 bp, Homo sapien
gccaggatccgctggaggactccgc

SEQ ID NO: 1592458 - DNA, 25 bp, Homo sapien
ggtgggatttgagccctccacggta

SEQ ID NO: 1592459 - DNA, 25 bp, Homo sapien
ccttcagtagcgtgggggtcatgcc

SEQ ID NO: 1592460 - DNA, 25 bp, Homo sapien
cacaggtcgtggatagcgtcacaga

SEQ ID NO: 1592461 - DNA, 25 bp, Homo sapien
gcgtcacagacgacagactgaccag

SEQ ID NO: 1592462 - DNA, 25 bp, Homo sapien
gcctgcatcctggtgcgcaccagag

SEQ ID NO: 1592463 - DNA, 25 bp, Homo sapien
cagagtcagtgggtagctggccatc

SEQ ID NO: 1592464 - DNA, 25 bp, Homo sapien
catattgggcaggtagccgcggtaa

SEQ ID NO: 1592465 - DNA, 25 bp, Homo sapien
atgatgccgagcatattgggcaggt

SEQ ID NO: 1592466 - DNA, 25 bp, Homo sapien
tgcaagatctgcctggcgcagtcca

SEQ ID NO: 1592467 - DNA, 25 bp, Homo sapien
cgggtgccctctcgctgcaagatct

SEQ ID NO: 1592468 - DNA, 25 bp, Homo sapien
ccagggagccagcaaggagacgctc

SEQ ID NO: 1592469 - DNA, 25 bp, Homo sapien
ctccatggggttgatgagggtctgg

SEQ ID NO: 1592470 - DNA, 25 bp, Homo sapien
ggtctgggagatggccacagccagg

SEQ ID NO: 1592471 - DNA, 25 bp, Homo sapien
agccagggagccagcaaggagacgc

SEQ ID NO: 1592472 - DNA, 25 bp, Homo sapien
ccttgtattccacagaagtaattct

SEQ ID NO: 1592473 - DNA, 25 bp, Homo sapien
gtattccacagaagtaattcttgca

SEQ ID NO: 1592474 - DNA, 25 bp, Homo sapien
ggacccttgtattccacagaagtaa

SEQ ID NO: 1592475 - DNA, 25 bp, Homo sapien
ggcggggacccttgtattccacaga

SEQ ID NO: 1592476 - DNA, 25 bp, Homo sapien
tgctcgaatacggagaacttgatgg

SEQ ID NO: 1592477 - DNA, 25 bp, Homo sapien
cccgccacagggagcggaagccgcc

SEQ ID NO: 1592478 - DNA, 25 bp, Homo sapien
ttgatggcatactcaggagcaatct

SEQ ID NO: 1592479 - DNA, 25 bp, Homo sapien
aacttgatggcatactcaggagcaa

SEQ ID NO: 1592480 - DNA, 25 bp, Homo sapien
gcaggttggtgaagttcgtcttgga

SEQ ID NO: 1592481 - DNA, 25 bp, Homo sapien
tgaagttcgtcttggaggagtagac

SEQ ID NO: 1592482 - DNA, 25 bp, Homo sapien
tggtgaagttcgtcttggaggagta

SEQ ID NO: 1592483 - DNA, 25 bp, Homo sapien
ccccagcaggttggtgaagttcgtc

SEQ ID NO: 1592484 - DNA, 25 bp, Homo sapien
ggctggagtgcggtcgggggatctc

SEQ ID NO: 1592485 - DNA, 25 bp, Homo sapien
tggagtgcggtcgggggatctcggc

SEQ ID NO: 1592486 - DNA, 25 bp, Homo sapien
caggctggagtgcggtcgggggatc

SEQ ID NO: 1592487 - DNA, 25 bp, Homo sapien
gtgcggtcgggggatctcggctcac

SEQ ID NO: 1592488 - DNA, 25 bp, Homo sapien
ccgtgcgagacaccgccccggccat

SEQ ID NO: 1592489 - DNA, 25 bp, Homo sapien
tccttgttatccacttccaggactt

SEQ ID NO: 1592490 - DNA, 25 bp, Homo sapien
gacttccacggggaccatcagctgc

SEQ ID NO: 1592491 - DNA, 25 bp, Homo sapien
tccagaggtgccgtgcccgtgcgag

SEQ ID NO: 1592492 - DNA, 25 bp, Homo sapien
ttgctgctccagctaccatgcggga

SEQ ID NO: 1592493 - DNA, 25 bp, Homo sapien
caagtgttctgaggttccccaggct

SEQ ID NO: 1592494 - DNA, 25 bp, Homo sapien
cgcccatggaggaagttaggacacc

SEQ ID NO: 1592495 - DNA, 25 bp, Homo sapien
tgtcatgcatgtggccaaacgcgta

SEQ ID NO: 1592496 - DNA, 25 bp, Homo sapien
ggtcctctccataaggctgctcatg

SEQ ID NO: 1592497 - DNA, 25 bp, Homo sapien
taggaactcaggagccgctgagccg

SEQ ID NO: 1592498 - DNA, 25 bp, Homo sapien
taagattcaggattcaggtactggg

SEQ ID NO: 1592499 - DNA, 25 bp, Homo sapien
tccacaaagcttggactatccaggg

SEQ ID NO: 1592500 - DNA, 25 bp, Homo sapien
cctgggaaacagagcgaaactgcat

SEQ ID NO: 1592501 - DNA, 25 bp, Homo sapien
aggctggcgaattccttgaccccac

SEQ ID NO: 1592502 - DNA, 25 bp, Homo sapien
tggcgaattccttgaccccacgagt

SEQ ID NO: 1592503 - DNA, 25 bp, Homo sapien
gctggcgaattccttgaccccacga

SEQ ID NO: 1592504 - DNA, 25 bp, Homo sapien
cgaattccttgaccccacgagttcg

SEQ ID NO: 1592505 - DNA, 25 bp, Homo sapien
gtgatctgaaatcgagccactgtac

SEQ ID NO: 1592506 - DNA, 25 bp, Homo sapien
tcatgtcatgagaagccggctctgg

SEQ ID NO: 1592507 - DNA, 25 bp, Homo sapien
gaatatcaggatctgccttcaagag

SEQ ID NO: 1592508 - DNA, 25 bp, Homo sapien
tggaagattcagatcagaaaccggg

SEQ ID NO: 1592509 - DNA, 25 bp, Homo sapien
ggcctgaacatttgggacccggcgc

SEQ ID NO: 1592510 - DNA, 25 bp, Homo sapien
ccccgcacttgttttaggagccaga

SEQ ID NO: 1592511 - DNA, 25 bp, Homo sapien
cgcacttgttttaggagccagaatc

SEQ ID NO: 1592512 - DNA, 25 bp, Homo sapien
gcccccgcacttgttttaggagcca

SEQ ID NO: 1592513 - DNA, 25 bp, Homo sapien
cccgcacttgttttaggagccagaa

SEQ ID NO: 1592514 - DNA, 25 bp, Homo sapien
caaaaaccaatgcaggaatccagtg

SEQ ID NO: 1592515 - DNA, 25 bp, Homo sapien
taggatccagcgtttcactaggaca

SEQ ID NO: 1592516 - DNA, 25 bp, Homo sapien
cagtcagcagaaggatctgagaccc

SEQ ID NO: 1592517 - DNA, 25 bp, Homo sapien
cttggagatccagggctcgaggcat

SEQ ID NO: 1592518 - DNA, 25 bp, Homo sapien
gttgaggtacagggaatccgtgctc

SEQ ID NO: 1592519 - DNA, 25 bp, Homo sapien
taagacgtagaggtccaggatccag

SEQ ID NO: 1592520 - DNA, 25 bp, Homo sapien
gagttgctgaagtaagggatccaca

SEQ ID NO: 1592521 - DNA, 25 bp, Homo sapien
cattcactgatttgtgtgggatcca

SEQ ID NO: 1592522 - DNA, 25 bp, Homo sapien
tactgggatctcgtggccaaagagt

SEQ ID NO: 1592523 - DNA, 25 bp, Homo sapien
tgacgtagcagacccagcatggaca

SEQ ID NO: 1592524 - DNA, 25 bp, Homo sapien
ggacaggatgtgacgtagcagaccc

SEQ ID NO: 1592525 - DNA, 25 bp, Homo sapien
tgttctcgtagaccacataggagat

SEQ ID NO: 1592526 - DNA, 25 bp, Homo sapien
tgcttcatgttctcgtagaccacat

SEQ ID NO: 1592527 - DNA, 25 bp, Homo sapien
ctggctcccacccacttttttgaga

SEQ ID NO: 1592528 - DNA, 25 bp, Homo sapien
cctggctcccacccacttttttgag

SEQ ID NO: 1592529 - DNA, 25 bp, Homo sapien
gtggggaccgtgtccgtcttgtaca

SEQ ID NO: 1592530 - DNA, 25 bp, Homo sapien
tgagctctatgagggtggggaccgt

SEQ ID NO: 1592531 - DNA, 25 bp, Homo sapien
gggaccgtgtccgtcttgtacactg

SEQ ID NO: 1592532 - DNA, 25 bp, Homo sapien
gtgtccgtcttgtacactgacacat

SEQ ID NO: 1592533 - DNA, 25 bp, Homo sapien
gggagaatgggagggtagtggtgga

SEQ ID NO: 1592534 - DNA, 25 bp, Homo sapien
acacaaacactaaaattctcaagaa

SEQ ID NO: 1592535 - DNA, 25 bp, Homo sapien
ctcaaaacagattcagggagaatgg

SEQ ID NO: 1592536 - DNA, 25 bp, Homo sapien
ttctcaagaaaattctcaaaacaga

SEQ ID NO: 1592537 - DNA, 25 bp, Homo sapien
taactggctatctggccgcaggtgc

SEQ ID NO: 1592538 - DNA, 25 bp, Homo sapien
ccgcaggtgctggatatggtaccgc

SEQ ID NO: 1592539 - DNA, 25 bp, Homo sapien
tctgccgagtcgtggctgtactgct

SEQ ID NO: 1592540 - DNA, 25 bp, Homo sapien
cctgcatgcgggtccggaccagggc

SEQ ID NO: 1592541 - DNA, 25 bp, Homo sapien
ctcgtagacggccaggtcgatgccc

SEQ ID NO: 1592542 - DNA, 25 bp, Homo sapien
acggccaggtcgatgcccgcatagg

SEQ ID NO: 1592543 - DNA, 25 bp, Homo sapien
tccaggatacgcctggcgcagtcca

SEQ ID NO: 1592544 - DNA, 25 bp, Homo sapien
aggtagccgcggtagaaggcacggg

SEQ ID NO: 1592545 - DNA, 25 bp, Homo sapien
acatgcagtgtctcctgctgcccca

SEQ ID NO: 1592546 - DNA, 25 bp, Homo sapien
ctccatagggtaaatgatggtttgg

SEQ ID NO: 1592547 - DNA, 25 bp, Homo sapien
agggagccagccacgaagcgctcct

SEQ ID NO: 1592548 - DNA, 25 bp, Homo sapien
aaatgatggtttgggctgtggcacc

SEQ ID NO: 1592549 - DNA, 25 bp, Homo sapien
tccctcaaggaccatgcttcgaagc

SEQ ID NO: 1592550 - DNA, 25 bp, Homo sapien
cattgccgcgccacagggagcggat

SEQ ID NO: 1592551 - DNA, 25 bp, Homo sapien
tgagtacattaataccattgccgcg

SEQ ID NO: 1592552 - DNA, 25 bp, Homo sapien
tcagccggttggtctttgaggcatg

SEQ ID NO: 1592553 - DNA, 25 bp, Homo sapien
ctgcatgaagaccttgaggcggtcc

SEQ ID NO: 1592554 - DNA, 25 bp, Homo sapien
ggcactgtcaggcactcgccaatgt

SEQ ID NO: 1592555 - DNA, 25 bp, Homo sapien
gtgcctgtccgtgacacggcacctg

SEQ ID NO: 1592556 - DNA, 25 bp, Homo sapien
ttgctttgagaactcgtccggcact

SEQ ID NO: 1592557 - DNA, 25 bp, Homo sapien
cgtggtttttgaacgattctgttca

SEQ ID NO: 1592558 - DNA, 25 bp, Homo sapien
ttctgttcagccgtagaatctttta

SEQ ID NO: 1592559 - DNA, 25 bp, Homo sapien
cgcctggccaagaccgtggtttttg

SEQ ID NO: 1592560 - DNA, 25 bp, Homo sapien
tgttcagccgtagaatcttttatcc

SEQ ID NO: 1592561 - DNA, 25 bp, Homo sapien
tggggagatcggagcaaggcccccc

SEQ ID NO: 1592562 - DNA, 25 bp, Homo sapien
ccctggggagatcggagcaaggccc

SEQ ID NO: 1592563 - DNA, 25 bp, Homo sapien
caagccctggggagatcggagcaag

SEQ ID NO: 1592564 - DNA, 25 bp, Homo sapien
cctggggagatcggagcaaggcccc

SEQ ID NO: 1592565 - DNA, 25 bp, Homo sapien
gtggaatgcttccagaaatacagca

SEQ ID NO: 1592566 - DNA, 25 bp, Homo sapien
aatgcttccagaaatacagcacgtc

SEQ ID NO: 1592567 - DNA, 25 bp, Homo sapien
ttccagaaatacagcacgtcctcca

SEQ ID NO: 1592568 - DNA, 25 bp, Homo sapien
tgcttccagaaatacagcacgtcct

SEQ ID NO: 1592569 - DNA, 25 bp, Homo sapien
caacaggaagtggtcgcgccattct

SEQ ID NO: 1592570 - DNA, 25 bp, Homo sapien
aatggtcattgtgccgtctcggtcc

SEQ ID NO: 1592571 - DNA, 25 bp, Homo sapien
ggtcgcgccattcttgccagtcaat

SEQ ID NO: 1592572 - DNA, 25 bp, Homo sapien
ttttccagcgaatgcaacaggaagt

SEQ ID NO: 1592573 - DNA, 25 bp, Homo sapien
gctcggaaactctgttggatctcag

SEQ ID NO: 1592574 - DNA, 25 bp, Homo sapien
tcagcctgctccagcgagatggaaa

SEQ ID NO: 1592575 - DNA, 25 bp, Homo sapien
gaaatgcccagagctcggaaactct

SEQ ID NO: 1592576 - DNA, 25 bp, Homo sapien
tggatctcagagacatcaatgtgac

SEQ ID NO: 1592577 - DNA, 25 bp, Homo sapien
ggggaaggatgtgcgtgtgaggaca

SEQ ID NO: 1592578 - DNA, 25 bp, Homo sapien
tggggaaggatgtgcgtgtgaggac

SEQ ID NO: 1592579 - DNA, 25 bp, Homo sapien
tcagagaggtggaactgggaaatac

SEQ ID NO: 1592580 - DNA, 25 bp, Homo sapien
cagagaggtggaactgggaaatact

SEQ ID NO: 1592581 - DNA, 25 bp, Homo sapien
gggtcagagaggtggaactgggaaa

SEQ ID NO: 1592582 - DNA, 25 bp, Homo sapien
agaggtggaactgggaaatactggg

SEQ ID NO: 1592583 - DNA, 25 bp, Homo sapien
aggtcgagcccgccatctgggtcag

SEQ ID NO: 1592584 - DNA, 25 bp, Homo sapien
tgcagatagcgggaaaattcctcca

SEQ ID NO: 1592585 - DNA, 25 bp, Homo sapien
agcagcagacgctgttcccgctcct

SEQ ID NO: 1592586 - DNA, 25 bp, Homo sapien
tcctggttccggtcaagactgtgaa

SEQ ID NO: 1592587 - DNA, 25 bp, Homo sapien
cagctcctcgaacaggcgaccccag

SEQ ID NO: 1592588 - DNA, 25 bp, Homo sapien
gcgcaactcgtgcacgtccacgcgg

SEQ ID NO: 1592589 - DNA, 25 bp, Homo sapien
gtccacgcggccatccttgttactg

SEQ ID NO: 1592590 - DNA, 25 bp, Homo sapien
tggccagcccctggcgcaactcgtg

SEQ ID NO: 1592591 - DNA, 25 bp, Homo sapien
ctcagtgggggcttcgcggctcccc

SEQ ID NO: 1592592 - DNA, 25 bp, Homo sapien
agcctccgcgcagtccgctcggctc

SEQ ID NO: 1592593 - DNA, 25 bp, Homo sapien
cagtgggggcttcgcggctccccct

SEQ ID NO: 1592594 - DNA, 25 bp, Homo sapien
gcctccgcgcagtccgctcggctct

SEQ ID NO: 1592595 - DNA, 25 bp, Homo sapien
gcagtttctcgatccaccattaggg

SEQ ID NO: 1592596 - DNA, 25 bp, Homo sapien
gtcgcactcgctgcacctgcggaat

SEQ ID NO: 1592597 - DNA, 25 bp, Homo sapien
gaatgtccctactgctagtttcggg

SEQ ID NO: 1592598 - DNA, 25 bp, Homo sapien
ttgaggatcccagtggtcgagcgct

SEQ ID NO: 1592599 - DNA, 25 bp, Homo sapien
ggctctgtgcagcatgttgcctctg

SEQ ID NO: 1592600 - DNA, 25 bp, Homo sapien
tcaggactccaaggagacggtgcag

SEQ ID NO: 1592601 - DNA, 25 bp, Homo sapien
gactgcgggttgctggcttgtacac

SEQ ID NO: 1592602 - DNA, 25 bp, Homo sapien
tttcagttctcccatgcagccgagg

SEQ ID NO: 1592603 - DNA, 25 bp, Homo sapien
gctttattggtgtgtttgagctggt

SEQ ID NO: 1592604 - DNA, 25 bp, Homo sapien
gattctagaagaccaggaggcttcc

SEQ ID NO: 1592605 - DNA, 25 bp, Homo sapien
cattagctgagatggaagtgacaaa

SEQ ID NO: 1592606 - DNA, 25 bp, Homo sapien
gccgagaggaattgtaaggttgcca

SEQ ID NO: 1592607 - DNA, 25 bp, Homo sapien
gctttattgagggactggggtctct

SEQ ID NO: 1592608 - DNA, 25 bp, Homo sapien
ggggtctctcttggacccctgattc

SEQ ID NO: 1592609 - DNA, 25 bp, Homo sapien
tggggtctctcttggacccctgatt

SEQ ID NO: 1592610 - DNA, 25 bp, Homo sapien
gtggctttattgagggactggggtc

SEQ ID NO: 1592611 - DNA, 25 bp, Homo sapien
ttaaccctcaaagcacttcttaaga

SEQ ID NO: 1592612 - DNA, 25 bp, Homo sapien
tcccgtggctggaggtgagcgcgct

SEQ ID NO: 1592613 - DNA, 25 bp, Homo sapien
gctgggacgtccaggctatatcaaa

SEQ ID NO: 1592614 - DNA, 25 bp, Homo sapien
aattcagggctcctggttcctcccg

SEQ ID NO: 1592615 - DNA, 25 bp, Homo sapien
cttttgacagttgctggtgggtgta

SEQ ID NO: 1592616 - DNA, 25 bp, Homo sapien
tggagacgtgacttcttggtcggac

SEQ ID NO: 1592617 - DNA, 25 bp, Homo sapien
gactgggatggagacgtgacttctt

SEQ ID NO: 1592618 - DNA, 25 bp, Homo sapien
tgacttcttggtcggactctgaggg

SEQ ID NO: 1592619 - DNA, 25 bp, Homo sapien
tggtcggactctgagggtatcagct

SEQ ID NO: 1592620 - DNA, 25 bp, Homo sapien
ctggttgccatcttggtatgttggg

SEQ ID NO: 1592621 - DNA, 25 bp, Homo sapien
ggcatccaaagacgaggcattttgc

SEQ ID NO: 1592622 - DNA, 25 bp, Homo sapien
aaagacgaggcattttgcagggatg

SEQ ID NO: 1592623 - DNA, 25 bp, Homo sapien
gggctccggctctggtagtttctta

SEQ ID NO: 1592624 - DNA, 25 bp, Homo sapien
cttggctcccatgctaagactgtcc

SEQ ID NO: 1592625 - DNA, 25 bp, Homo sapien
taaactctggctcggtctcaggctg

SEQ ID NO: 1592626 - DNA, 25 bp, Homo sapien
gctcccatgctaagactgtccagaa

SEQ ID NO: 1592627 - DNA, 25 bp, Homo sapien
tgtgacagcagtctaaactctggct

SEQ ID NO: 1592628 - DNA, 25 bp, Homo sapien
cccacgggcacccctcatcctcagg

SEQ ID NO: 1592629 - DNA, 25 bp, Homo sapien
tgcccacgggcacccctcatcctca

SEQ ID NO: 1592630 - DNA, 25 bp, Homo sapien
gcccacgggcacccctcatcctcag

SEQ ID NO: 1592631 - DNA, 25 bp, Homo sapien
gggtgaggatgggcagcctcagata

SEQ ID NO: 1592632 - DNA, 25 bp, Homo sapien
ctgggtgaggatgggcagcctcaga

SEQ ID NO: 1592633 - DNA, 25 bp, Homo sapien
gtgaggatgggcagcctcagatatt

SEQ ID NO: 1592634 - DNA, 25 bp, Homo sapien
tgaggatgggcagcctcagatattt

SEQ ID NO: 1592635 - DNA, 25 bp, Homo sapien
ccactttcaacactgctgttccctt

SEQ ID NO: 1592636 - DNA, 25 bp, Homo sapien
cactttcaacactgctgttcccttt

SEQ ID NO: 1592637 - DNA, 25 bp, Homo sapien
cccactttcaacactgctgttccct

SEQ ID NO: 1592638 - DNA, 25 bp, Homo sapien
tcccactttcaacactgctgttccc

SEQ ID NO: 1592639 - DNA, 25 bp, Homo sapien
tccctcttccagctggcgtctcctg

SEQ ID NO: 1592640 - DNA, 25 bp, Homo sapien
aagttccctcttccagctggcgtct

SEQ ID NO: 1592641 - DNA, 25 bp, Homo sapien
gggctcggaagttccctcttccagc

SEQ ID NO: 1592642 - DNA, 25 bp, Homo sapien
ctcctgctggggcgaaggggccggt

SEQ ID NO: 1592643 - DNA, 25 bp, Homo sapien
aggcgttgctgcaggcggtctgagc

SEQ ID NO: 1592644 - DNA, 25 bp, Homo sapien
gctgcaggcggtctgagcggctggg

SEQ ID NO: 1592645 - DNA, 25 bp, Homo sapien
agccccccctctgcaggacagagtc

SEQ ID NO: 1592646 - DNA, 25 bp, Homo sapien
ccctctgcaggacagagtccccatc

SEQ ID NO: 1592647 - DNA, 25 bp, Homo sapien
ctcaagcaatccatattcagataat

SEQ ID NO: 1592648 - DNA, 25 bp, Homo sapien
caagcaatccatattcagataattt

SEQ ID NO: 1592649 - DNA, 25 bp, Homo sapien
actcaagcaatccatattcagataa

SEQ ID NO: 1592650 - DNA, 25 bp, Homo sapien
tcaagcaatccatattcagataatt

SEQ ID NO: 1592651 - DNA, 25 bp, Homo sapien
tatacattagaaggctctgcacccc

SEQ ID NO: 1592652 - DNA, 25 bp, Homo sapien
ttagaaggctctgcacccccttcaa

SEQ ID NO: 1592653 - DNA, 25 bp, Homo sapien
acattagaaggctctgcaccccctt

SEQ ID NO: 1592654 - DNA, 25 bp, Homo sapien
cttatacattagaaggctctgcacc

SEQ ID NO: 1592655 - DNA, 25 bp, Homo sapien
ccaggaaacttctgagcttgggaga

SEQ ID NO: 1592656 - DNA, 25 bp, Homo sapien
cagaacctggaattgtagcatccaa

SEQ ID NO: 1592657 - DNA, 25 bp, Homo sapien
gggcaaggtgttcctgtttcaaagc

SEQ ID NO: 1592658 - DNA, 25 bp, Homo sapien
aatcgcacggacaattttgagctgc

SEQ ID NO: 1592659 - DNA, 25 bp, Homo sapien
tacatgttcttgacggctggttggg

SEQ ID NO: 1592660 - DNA, 25 bp, Homo sapien
gcggtacatgttcttgacggctggt

SEQ ID NO: 1592661 - DNA, 25 bp, Homo sapien
tgttcttgacggctggttgggtctt

SEQ ID NO: 1592662 - DNA, 25 bp, Homo sapien
cgagcggtacatgttcttgacggct

SEQ ID NO: 1592663 - DNA, 25 bp, Homo sapien
agtgcaggagggcgccaccaccttt

SEQ ID NO: 1592664 - DNA, 25 bp, Homo sapien
tgagtgcaggagggcgccaccacct

SEQ ID NO: 1592665 - DNA, 25 bp, Homo sapien
gagtgcaggagggcgccaccacctt

SEQ ID NO: 1592666 - DNA, 25 bp, Homo sapien
ctgagtgcaggagggcgccaccacc

SEQ ID NO: 1592667 - DNA, 25 bp, Homo sapien
tgtgtgatgccaatcaagccccttt

SEQ ID NO: 1592668 - DNA, 25 bp, Homo sapien
tgtgatgccaatcaagcccctttcc

SEQ ID NO: 1592669 - DNA, 25 bp, Homo sapien
gttgtgtgatgccaatcaagcccct

SEQ ID NO: 1592670 - DNA, 25 bp, Homo sapien
ctgcgggagagaagataccaagggg

SEQ ID NO: 1592671 - DNA, 25 bp, Homo sapien
caggcaacaaagtggtttttgagac

SEQ ID NO: 1592672 - DNA, 25 bp, Homo sapien
cgtgcccaggcaacaaagtggtttt

SEQ ID NO: 1592673 - DNA, 25 bp, Homo sapien
accgtgcccaggcaacaaagtggtt

SEQ ID NO: 1592674 - DNA, 25 bp, Homo sapien
cccaggcaacaaagtggtttttgag

SEQ ID NO: 1592675 - DNA, 25 bp, Homo sapien
cggcctattgttctggtggtcttac

SEQ ID NO: 1592676 - DNA, 25 bp, Homo sapien
ggtcgcagcaatccttctatctcca

SEQ ID NO: 1592677 - DNA, 25 bp, Homo sapien
cttctggtcgcagcaatccttctat

SEQ ID NO: 1592678 - DNA, 25 bp, Homo sapien
taagccaacgcccacggcctattgt

SEQ ID NO: 1592679 - DNA, 25 bp, Homo sapien
cagagctgataggatcgaagggccc

SEQ ID NO: 1592680 - DNA, 25 bp, Homo sapien
ttagattgtcggcccagagctgata

SEQ ID NO: 1592681 - DNA, 25 bp, Homo sapien
ctttagattgtcggcccagagctga

SEQ ID NO: 1592682 - DNA, 25 bp, Homo sapien
cccagagctgataggatcgaagggc

SEQ ID NO: 1592683 - DNA, 25 bp, Homo sapien
tggtcaccgaaggctggctgaggct

SEQ ID NO: 1592684 - DNA, 25 bp, Homo sapien
aggagagagtgtggtggtcaccgaa

SEQ ID NO: 1592685 - DNA, 25 bp, Homo sapien
gtaaggagagagtgtggtggtcacc

SEQ ID NO: 1592686 - DNA, 25 bp, Homo sapien
gagagagtgtggtggtcaccgaagg

SEQ ID NO: 1592687 - DNA, 25 bp, Homo sapien
cgaattgatctgagaagccctcccc

SEQ ID NO: 1592688 - DNA, 25 bp, Homo sapien
tgctcgaattgatctgagaagccct

SEQ ID NO: 1592689 - DNA, 25 bp, Homo sapien
aggccccgcagccagtgatctcctg

SEQ ID NO: 1592690 - DNA, 25 bp, Homo sapien
tctcctgctcgaattgatctgagaa

SEQ ID NO: 1592691 - DNA, 25 bp, Homo sapien
aatgccagcacttcgaagcctgcct

SEQ ID NO: 1592692 - DNA, 25 bp, Homo sapien
ttcgaagcctgcctgctgtcaagat

SEQ ID NO: 1592693 - DNA, 25 bp, Homo sapien
atcagaaacagcaggagacacatct

SEQ ID NO: 1592694 - DNA, 25 bp, Homo sapien
agtaaatcagaaacagcaggagaca

SEQ ID NO: 1592695 - DNA, 25 bp, Homo sapien
tgggccaagaagacttcctcactga

SEQ ID NO: 1592696 - DNA, 25 bp, Homo sapien
gcctgcagaggtgccccaggcttct

SEQ ID NO: 1592697 - DNA, 25 bp, Homo sapien
gtgcacagcccgccggtggaaggcc

SEQ ID NO: 1592698 - DNA, 25 bp, Homo sapien
tctgggccaagaagacttcctcact

SEQ ID NO: 1592699 - DNA, 25 bp, Homo sapien
gcaatccacacaccttggcctctca

SEQ ID NO: 1592700 - DNA, 25 bp, Homo sapien
caagcaatccacacaccttggcctc

SEQ ID NO: 1592701 - DNA, 25 bp, Homo sapien
ggaccacaggtgcacgccactgcgc

SEQ ID NO: 1592702 - DNA, 25 bp, Homo sapien
gaccacaggtgcacgccactgcgcc

SEQ ID NO: 1592703 - DNA, 25 bp, Homo sapien
cgggctgcagacgagtgcgtcgcgg

SEQ ID NO: 1592704 - DNA, 25 bp, Homo sapien
gccagggcgaccttcctgagccgga

SEQ ID NO: 1592705 - DNA, 25 bp, Homo sapien
tgaggaagagacgggacaccccttc

SEQ ID NO: 1592706 - DNA, 25 bp, Homo sapien
ctgcagacgagtgcgtcgcggtacc

SEQ ID NO: 1592707 - DNA, 25 bp, Homo sapien
tgagtgggcaggtgtgggcccctcg

SEQ ID NO: 1592708 - DNA, 25 bp, Homo sapien
gtgggcaggtgtgggcccctcgcct

SEQ ID NO: 1592709 - DNA, 25 bp, Homo sapien
ctcgcctcccggggcaggaaggtgg

SEQ ID NO: 1592710 - DNA, 25 bp, Homo sapien
ctgaagcacaagggagtggccctga

SEQ ID NO: 1592711 - DNA, 25 bp, Homo sapien
gcacgtcgttaaaggtcgtctccaa

SEQ ID NO: 1592712 - DNA, 25 bp, Homo sapien
aggcagcgcctgcacgtcgttaaag

SEQ ID NO: 1592713 - DNA, 25 bp, Homo sapien
gtattggcgtccacgttcagcacca

SEQ ID NO: 1592714 - DNA, 25 bp, Homo sapien
taaaggtcgtctccaaggtattggc

SEQ ID NO: 1592715 - DNA, 25 bp, Homo sapien
gaaaagcggggtcggccgctcagag

SEQ ID NO: 1592716 - DNA, 25 bp, Homo sapien
ctcagagcccgggagtccttggcag

SEQ ID NO: 1592717 - DNA, 25 bp, Homo sapien
cagagcccgggagtccttggcagag

SEQ ID NO: 1592718 - DNA, 25 bp, Homo sapien
aaagcggggtcggccgctcagagcc

SEQ ID NO: 1592719 - DNA, 25 bp, Homo sapien
gatgtagaggaagggggaaccctca

SEQ ID NO: 1592720 - DNA, 25 bp, Homo sapien
cctcacgtccccgtcgtctgggtag

SEQ ID NO: 1592721 - DNA, 25 bp, Homo sapien
cgtccccgtcgtctgggtagatcca

SEQ ID NO: 1592722 - DNA, 25 bp, Homo sapien
tcacgtccccgtcgtctgggtagat

SEQ ID NO: 1592723 - DNA, 25 bp, Homo sapien
ctcggcgagactggcgtgcactcca

SEQ ID NO: 1592724 - DNA, 25 bp, Homo sapien
ggcgagactggcgtgcactccaatg

SEQ ID NO: 1592725 - DNA, 25 bp, Homo sapien
gactggcgtgcactccaatgaggta

SEQ ID NO: 1592726 - DNA, 25 bp, Homo sapien
cgtgcactccaatgaggtagggcat

SEQ ID NO: 1592727 - DNA, 25 bp, Homo sapien
aggacgcgtggacgcacgaggtcag

SEQ ID NO: 1592728 - DNA, 25 bp, Homo sapien
agcgtggggatcagcacgtgctccc

SEQ ID NO: 1592729 - DNA, 25 bp, Homo sapien
ggagcgcgcaggacgcgtggacgca

SEQ ID NO: 1592730 - DNA, 25 bp, Homo sapien
atggggtacaggagcgcgcaggacg

SEQ ID NO: 1592731 - DNA, 25 bp, Homo sapien
ccctttagaaatcatgtggagacca

SEQ ID NO: 1592732 - DNA, 25 bp, Homo sapien
tacagtgctttaagcgggtgaagcc

SEQ ID NO: 1592733 - DNA, 25 bp, Homo sapien
ccactgctggataatgagtgacaac

SEQ ID NO: 1592734 - DNA, 25 bp, Homo sapien
gagtgacaactcgaacccctttaga

SEQ ID NO: 1592735 - DNA, 25 bp, Homo sapien
ccacgatgttctcgtcagtcacggc

SEQ ID NO: 1592736 - DNA, 25 bp, Homo sapien
atgttctcgtcagtcacggccacca

SEQ ID NO: 1592737 - DNA, 25 bp, Homo sapien
tctcggccaggagcgccgcgaacag

SEQ ID NO: 1592738 - DNA, 25 bp, Homo sapien
tgctgagtttgctggcggtgagcag

SEQ ID NO: 1592739 - DNA, 25 bp, Homo sapien
gtcgctctgggcgtggacgggcccc

SEQ ID NO: 1592740 - DNA, 25 bp, Homo sapien
gagagtcgctctgggcgtggacggg

SEQ ID NO: 1592741 - DNA, 25 bp, Homo sapien
agagagtcgctctgggcgtggacgg

SEQ ID NO: 1592742 - DNA, 25 bp, Homo sapien
tctgggcgtggacgggcccctggat

SEQ ID NO: 1592743 - DNA, 25 bp, Homo sapien
agggatggatggcaggcggccggag

SEQ ID NO: 1592744 - DNA, 25 bp, Homo sapien
gggatggatggcaggcggccggagt

SEQ ID NO: 1592745 - DNA, 25 bp, Homo sapien
ccctgcccgctggagaccgtcactc

SEQ ID NO: 1592746 - DNA, 25 bp, Homo sapien
ctgcccgctggagaccgtcactccg

SEQ ID NO: 1592747 - DNA, 25 bp, Homo sapien
cgctggagaccgtcactccgctgcc

SEQ ID NO: 1592748 - DNA, 25 bp, Homo sapien
gcccgctggagaccgtcactccgct

SEQ ID NO: 1592749 - DNA, 25 bp, Homo sapien
tgaagaagttcctctgcctcggtga

SEQ ID NO: 1592750 - DNA, 25 bp, Homo sapien
ggcccagacagggactgctgaaaca

SEQ ID NO: 1592751 - DNA, 25 bp, Homo sapien
agctcaagccccactgaggcctggg

SEQ ID NO: 1592752 - DNA, 25 bp, Homo sapien
cagggactgctgaaacagattttga

SEQ ID NO: 1592753 - DNA, 25 bp, Homo sapien
gccacagcacttggccaattatttt

SEQ ID NO: 1592754 - DNA, 25 bp, Homo sapien
caattattttttatattttgtagag

SEQ ID NO: 1592755 - DNA, 25 bp, Homo sapien
gtgagccacagcacttggccaatta

SEQ ID NO: 1592756 - DNA, 25 bp, Homo sapien
gagccacagcacttggccaattatt

SEQ ID NO: 1592757 - DNA, 25 bp, Homo sapien
agcttgtaaaacacctcgaaccaag

SEQ ID NO: 1592758 - DNA, 25 bp, Homo sapien
cctgggctaggaggtctcccactgt

SEQ ID NO: 1592759 - DNA, 25 bp, Homo sapien
tgtaaaacacctcgaaccaaggcag

SEQ ID NO: 1592760 - DNA, 25 bp, Homo sapien
aaacacctcgaaccaaggcaggtgg

SEQ ID NO: 1592761 - DNA, 25 bp, Homo sapien
ccaaatctgcggttgccggcaaggt

SEQ ID NO: 1592762 - DNA, 25 bp, Homo sapien
cagaaaccaaatctgcggttgccgg

SEQ ID NO: 1592763 - DNA, 25 bp, Homo sapien
ggcggcagaaaccaaatctgcggtt

SEQ ID NO: 1592764 - DNA, 25 bp, Homo sapien
gcccgcaggcggcagaaaccaaatc

SEQ ID NO: 1592765 - DNA, 25 bp, Homo sapien
ctgcacggcggggctggggggctcc

SEQ ID NO: 1592766 - DNA, 25 bp, Homo sapien
ggctgttagagagacctggacatcc

SEQ ID NO: 1592767 - DNA, 25 bp, Homo sapien
agagacctggacatcccagctgtct

SEQ ID NO: 1592768 - DNA, 25 bp, Homo sapien
tgttagagagacctggacatcccag

SEQ ID NO: 1592769 - DNA, 25 bp, Homo sapien
gctgtctgaggatgtccccgctccc

SEQ ID NO: 1592770 - DNA, 25 bp, Homo sapien
ctttccacatcaaaagggaagcaga

SEQ ID NO: 1592771 - DNA, 25 bp, Homo sapien
atttaggcaccatctgcatagcttc

SEQ ID NO: 1592772 - DNA, 25 bp, Homo sapien
gaatttaggcaccatctgcatagct

SEQ ID NO: 1592773 - DNA, 25 bp, Homo sapien
cagaatttaggcaccatctgcatag

SEQ ID NO: 1592774 - DNA, 25 bp, Homo sapien
tggaggtgaagaaaagcgcagactg

SEQ ID NO: 1592775 - DNA, 25 bp, Homo sapien
tgaagaaaagcgcagactgcttggc

SEQ ID NO: 1592776 - DNA, 25 bp, Homo sapien
gctccaggtccaagaaaccaagtcc

SEQ ID NO: 1592777 - DNA, 25 bp, Homo sapien
ttggccactgaggtcgggcaccacc

SEQ ID NO: 1592778 - DNA, 25 bp, Homo sapien
agtctggagggaactgccgcaggat

SEQ ID NO: 1592779 - DNA, 25 bp, Homo sapien
aagtctggagggaactgccgcagga

SEQ ID NO: 1592780 - DNA, 25 bp, Homo sapien
gaagtctggagggaactgccgcagg

SEQ ID NO: 1592781 - DNA, 25 bp, Homo sapien
gcttcgaagaaccaatcaaacacag

SEQ ID NO: 1592782 - DNA, 25 bp, Homo sapien
gaagaaccaatcaaacacagcaggg

SEQ ID NO: 1592783 - DNA, 25 bp, Homo sapien
gcaggccgcttcgaagaaccaatca

SEQ ID NO: 1592784 - DNA, 25 bp, Homo sapien
cagggcaggccgcttcgaagaacca

SEQ ID NO: 1592785 - DNA, 25 bp, Homo sapien
tgcgtcggcatgtgcatgactctgg

SEQ ID NO: 1592786 - DNA, 25 bp, Homo sapien
ttgaacacacaagtacaggatggag

SEQ ID NO: 1592787 - DNA, 25 bp, Homo sapien
tgcatgtgccacaaggtgcgtcggc

SEQ ID NO: 1592788 - DNA, 25 bp, Homo sapien
gggtccagagacttgcttctatgca

SEQ ID NO: 1592789 - DNA, 25 bp, Homo sapien
gagaatgagggatggggtggctctt

SEQ ID NO: 1592790 - DNA, 25 bp, Homo sapien
agaatgagggatggggtggctctta

SEQ ID NO: 1592791 - DNA, 25 bp, Homo sapien
cagagaatgagggatggggtggctc

SEQ ID NO: 1592792 - DNA, 25 bp, Homo sapien
gaatgagggatggggtggctcttac

SEQ ID NO: 1592793 - DNA, 25 bp, Homo sapien
tgtgtatgctgggccccaagccggc

SEQ ID NO: 1592794 - DNA, 25 bp, Homo sapien
tgtatgctgggccccaagccggctc

SEQ ID NO: 1592795 - DNA, 25 bp, Homo sapien
ctgtgtatgctgggccccaagccgg

SEQ ID NO: 1592796 - DNA, 25 bp, Homo sapien
gtgtatgctgggccccaagccggct

SEQ ID NO: 1592797 - DNA, 25 bp, Homo sapien
catcctcacacagtctgatggacat

SEQ ID NO: 1592798 - DNA, 25 bp, Homo sapien
ccacagtcactggacacatacagag

SEQ ID NO: 1592799 - DNA, 25 bp, Homo sapien
cacatcctcacacagtctgatggac

SEQ ID NO: 1592800 - DNA, 25 bp, Homo sapien
atacagagtcagaatcccgtcagcc

SEQ ID NO: 1592801 - DNA, 25 bp, Homo sapien
caattaatttatttattgagggtga

SEQ ID NO: 1592802 - DNA, 25 bp, Homo sapien
acaattaatttatttattgagggtg

SEQ ID NO: 1592803 - DNA, 25 bp, Homo sapien
ataagctaaggtcggcaggggctga

SEQ ID NO: 1592804 - DNA, 25 bp, Homo sapien
tctcccagataagctaaggtcggca

SEQ ID NO: 1592805 - DNA, 25 bp, Homo sapien
ctctcccagataagctaaggtcggc

SEQ ID NO: 1592806 - DNA, 25 bp, Homo sapien
cccagataagctaaggtcggcaggg

SEQ ID NO: 1592807 - DNA, 25 bp, Homo sapien
ggaatcagagagaagctggggtcag

SEQ ID NO: 1592808 - DNA, 25 bp, Homo sapien
tgggaatcagagagaagctggggtc

SEQ ID NO: 1592809 - DNA, 25 bp, Homo sapien
ctgtgggaatcagagagaagctggg

SEQ ID NO: 1592810 - DNA, 25 bp, Homo sapien
tgtgggaatcagagagaagctgggg

SEQ ID NO: 1592811 - DNA, 25 bp, Homo sapien
ggtcaaaggtgaactgcagctcgga

SEQ ID NO: 1592812 - DNA, 25 bp, Homo sapien
gtaggagctgacgctgtggggggtg

SEQ ID NO: 1592813 - DNA, 25 bp, Homo sapien
tcaaaggtgaactgcagctcggagg

SEQ ID NO: 1592814 - DNA, 25 bp, Homo sapien
aggagctgacgctgtggggggtggg

SEQ ID NO: 1592815 - DNA, 25 bp, Homo sapien
gattcagagatcaaagagaagttgg

SEQ ID NO: 1592816 - DNA, 25 bp, Homo sapien
attcagagatcaaagagaagttggg

SEQ ID NO: 1592817 - DNA, 25 bp, Homo sapien
ggattcagagatcaaagagaagttg

SEQ ID NO: 1592818 - DNA, 25 bp, Homo sapien
ggggattcagagatcaaagagaagt

SEQ ID NO: 1592819 - DNA, 25 bp, Homo sapien
taaaggtgcggtttccagagtcaga

SEQ ID NO: 1592820 - DNA, 25 bp, Homo sapien
caaggtcagcggtgaagtgcagctc

SEQ ID NO: 1592821 - DNA, 25 bp, Homo sapien
cgagctccaaaggtattgttagggt

SEQ ID NO: 1592822 - DNA, 25 bp, Homo sapien
tagccagaggtaaagcgagctccaa

SEQ ID NO: 1592823 - DNA, 25 bp, Homo sapien
ggaaagcggggctctagggttcaga

SEQ ID NO: 1592824 - DNA, 25 bp, Homo sapien
gggagtcagccttggagggaaagcg

SEQ ID NO: 1592825 - DNA, 25 bp, Homo sapien
aaagcggggctctagggttcagaga

SEQ ID NO: 1592826 - DNA, 25 bp, Homo sapien
gagtcagccttggagggaaagcggg

SEQ ID NO: 1592827 - DNA, 25 bp, Homo sapien
gggggcctagcggatcaaaggtcag

SEQ ID NO: 1592828 - DNA, 25 bp, Homo sapien
cctagcggatcaaaggtcagaagcc

SEQ ID NO: 1592829 - DNA, 25 bp, Homo sapien
gggcctagcggatcaaaggtcagaa

SEQ ID NO: 1592830 - DNA, 25 bp, Homo sapien
tcagaagcctcgaggggacaggtgg

SEQ ID NO: 1592831 - DNA, 25 bp, Homo sapien
tcgcacacggccgtcttcacgttgt

SEQ ID NO: 1592832 - DNA, 25 bp, Homo sapien
gttgccgatgaaggtcgcggccatc

SEQ ID NO: 1592833 - DNA, 25 bp, Homo sapien
aaggtcgcggccatcttcaggccgc

SEQ ID NO: 1592834 - DNA, 25 bp, Homo sapien
tgaaggtcgcggccatcttcaggcc

SEQ ID NO: 1592835 - DNA, 25 bp, Homo sapien
tctcggcctccttccggactacgtc

SEQ ID NO: 1592836 - DNA, 25 bp, Homo sapien
gagccccaacccttgactctgtctc

SEQ ID NO: 1592837 - DNA, 25 bp, Homo sapien
agccccaacccttgactctgtctct

SEQ ID NO: 1592838 - DNA, 25 bp, Homo sapien
caccagcaccgctctggggacataa

SEQ ID NO: 1592839 - DNA, 25 bp, Homo sapien
ccaccagcaccgctctggggacata

SEQ ID NO: 1592840 - DNA, 25 bp, Homo sapien
aggtccaccagcaccgctctgggga

SEQ ID NO: 1592841 - DNA, 25 bp, Homo sapien
accagcaccgctctggggacataat

SEQ ID NO: 1592842 - DNA, 25 bp, Homo sapien
gtagtacacgttgatcctctccagt

SEQ ID NO: 1592843 - DNA, 25 bp, Homo sapien
cagttgcaggtcactgtccccatgg

SEQ ID NO: 1592844 - DNA, 25 bp, Homo sapien
tcctctccagttgcaggtcactgtc

SEQ ID NO: 1592845 - DNA, 25 bp, Homo sapien
agtacacgttgatcctctccagttg

SEQ ID NO: 1592846 - DNA, 25 bp, Homo sapien
tcgatgccatgttcgtcactgataa

SEQ ID NO: 1592847 - DNA, 25 bp, Homo sapien
tgttcgtcactgataacctcccaaa

SEQ ID NO: 1592848 - DNA, 25 bp, Homo sapien
gccatgttcgtcactgataacctcc

SEQ ID NO: 1592849 - DNA, 25 bp, Homo sapien
tgtggggtcgatgccatgttcgtca

SEQ ID NO: 1592850 - DNA, 25 bp, Homo sapien
aactagctccctagctgccacctct

SEQ ID NO: 1592851 - DNA, 25 bp, Homo sapien
agaggtggtcggaagagttgagaga

SEQ ID NO: 1592852 - DNA, 25 bp, Homo sapien
ggtgcagccgagtcagcacccagcg

SEQ ID NO: 1592853 - DNA, 25 bp, Homo sapien
gcccagctgtgacaggcggacagaa

SEQ ID NO: 1592854 - DNA, 25 bp, Homo sapien
ttgccgcactggccggcctgcaggt

SEQ ID NO: 1592855 - DNA, 25 bp, Homo sapien
cctgcaggtgcacgatctcccgcat

SEQ ID NO: 1592856 - DNA, 25 bp, Homo sapien
cggcctgcaggtgcacgatctcccg

SEQ ID NO: 1592857 - DNA, 25 bp, Homo sapien
ggccggcctgcaggtgcacgatctc

SEQ ID NO: 1592858 - DNA, 25 bp, Homo sapien
cggcgagggtggaagatgcggcgga

SEQ ID NO: 1592859 - DNA, 25 bp, Homo sapien
gcggagacggcggagcacggtccct

SEQ ID NO: 1592860 - DNA, 25 bp, Homo sapien
cccgggagccgctatatgagcgggc

SEQ ID NO: 1592861 - DNA, 25 bp, Homo sapien
cttggtcccgccccgggatgatgga

SEQ ID NO: 1592862 - DNA, 25 bp, Homo sapien
tgggcattgacacagccagcatggg

SEQ ID NO: 1592863 - DNA, 25 bp, Homo sapien
cacccagacggtagagtctgatttc

SEQ ID NO: 1592864 - DNA, 25 bp, Homo sapien
gactgtcacgtgctccgtggcctgg

SEQ ID NO: 1592865 - DNA, 25 bp, Homo sapien
tgggcctctccgtgtcatgtgtctg

SEQ ID NO: 1592866 - DNA, 25 bp, Homo sapien
tgtcaccagagatgaaggtgccccg

SEQ ID NO: 1592867 - DNA, 25 bp, Homo sapien
ttgcctagcagtgaggacctcgtct

SEQ ID NO: 1592868 - DNA, 25 bp, Homo sapien
tgctctcacagtttaaggaggccgg

SEQ ID NO: 1592869 - DNA, 25 bp, Homo sapien
caggctatccatggtcatcttggag

SEQ ID NO: 1592870 - DNA, 25 bp, Homo sapien
tcccaagtcctagagcaccggaact

SEQ ID NO: 1592871 - DNA, 25 bp, Homo sapien
aatgccctgcccgatccagttccgg

SEQ ID NO: 1592872 - DNA, 25 bp, Homo sapien
ggcgcccgctgcccaagctgggtat

SEQ ID NO: 1592873 - DNA, 25 bp, Homo sapien
tccttccccggttctgccgtgaatg

SEQ ID NO: 1592874 - DNA, 25 bp, Homo sapien
tgggctttgcaaacgttggcagctg

SEQ ID NO: 1592875 - DNA, 25 bp, Homo sapien
cagctgggctttgcaaacgttggca

SEQ ID NO: 1592876 - DNA, 25 bp, Homo sapien
cgacaatgccaaggccaggtcagct

SEQ ID NO: 1592877 - DNA, 25 bp, Homo sapien
tcagtggcatcgacaatgccaaggc

SEQ ID NO: 1592878 - DNA, 25 bp, Homo sapien
ttagttgtaaacaccactgcacttg

SEQ ID NO: 1592879 - DNA, 25 bp, Homo sapien
aagaaatatgtaactggttgtgaac

SEQ ID NO: 1592880 - DNA, 25 bp, Homo sapien
gaaatatgtaactggttgtgaacaa

SEQ ID NO: 1592881 - DNA, 25 bp, Homo sapien
aaacaccactgcacttggaccagcc

SEQ ID NO: 1592882 - DNA, 25 bp, Homo sapien
gagacaaggcacgtcccttctgtga

SEQ ID NO: 1592883 - DNA, 25 bp, Homo sapien
gctgaaggtcccctgcaattccaaa

SEQ ID NO: 1592884 - DNA, 25 bp, Homo sapien
taatgtcctcaaactagtcatgcct

SEQ ID NO: 1592885 - DNA, 25 bp, Homo sapien
tacaggcgttggatatacccattcc

SEQ ID NO: 1592886 - DNA, 25 bp, Homo sapien
tgtagggcttgcatgaacacgagct

SEQ ID NO: 1592887 - DNA, 25 bp, Homo sapien
tactatgtagatgaattgcctcggg

SEQ ID NO: 1592888 - DNA, 25 bp, Homo sapien
gaagcacttgactttgagtccccag

SEQ ID NO: 1592889 - DNA, 25 bp, Homo sapien
taactttggacagatgactcaacgg

SEQ ID NO: 1592890 - DNA, 25 bp, Homo sapien
ttttggtgaattgtttggcagcaat

SEQ ID NO: 1592891 - DNA, 25 bp, Homo sapien
gttttggtgaattgtttggcagcaa

SEQ ID NO: 1592892 - DNA, 25 bp, Homo sapien
tttggtgaattgtttggcagcaatc

SEQ ID NO: 1592893 - DNA, 25 bp, Homo sapien
tgttttggtgaattgtttggcagca

SEQ ID NO: 1592894 - DNA, 25 bp, Homo sapien
cagattggtaactgtggtcttgatt

SEQ ID NO: 1592895 - DNA, 25 bp, Homo sapien
cctagtagcatggattagaggtgcc

SEQ ID NO: 1592896 - DNA, 25 bp, Homo sapien
ctagtagcatggattagaggtgccc

SEQ ID NO: 1592897 - DNA, 25 bp, Homo sapien
tccctagtagcatggattagaggtg

SEQ ID NO: 1592898 - DNA, 25 bp, Homo sapien
caaacatccctaaccaagaacattt

SEQ ID NO: 1592899 - DNA, 25 bp, Homo sapien
cttcaaacatccctaaccaagaaca

SEQ ID NO: 1592900 - DNA, 25 bp, Homo sapien
gggctctacccaatctcccacttca

SEQ ID NO: 1592901 - DNA, 25 bp, Homo sapien
tgggctctacccaatctcccacttc

SEQ ID NO: 1592902 - DNA, 25 bp, Homo sapien
gaaaaagctcaatgccttctcttgt

SEQ ID NO: 1592903 - DNA, 25 bp, Homo sapien
aagaaaaagctcaatgccttctctt

SEQ ID NO: 1592904 - DNA, 25 bp, Homo sapien
cttgtcctgccaccactacgcccca

SEQ ID NO: 1592905 - DNA, 25 bp, Homo sapien
ctgccaccactacgccccaccacac

SEQ ID NO: 1592906 - DNA, 25 bp, Homo sapien
gaaggcaaaagtgtcccagtgaggt

SEQ ID NO: 1592907 - DNA, 25 bp, Homo sapien
tcatcagtgtttcgggaaggcaaaa

SEQ ID NO: 1592908 - DNA, 25 bp, Homo sapien
tgcagagtgtgtcccctcgggccag

SEQ ID NO: 1592909 - DNA, 25 bp, Homo sapien
actgcactccaaagaaggtctcatc

SEQ ID NO: 1592910 - DNA, 25 bp, Homo sapien
tgtagatgccatcacgatggatacg

SEQ ID NO: 1592911 - DNA, 25 bp, Homo sapien
agagcagattcccacggccagggtg

SEQ ID NO: 1592912 - DNA, 25 bp, Homo sapien
ggatacgtagctgccccttgtccag

SEQ ID NO: 1592913 - DNA, 25 bp, Homo sapien
gcgggagagcagattcccacggcca

SEQ ID NO: 1592914 - DNA, 25 bp, Homo sapien
ccccctgccagtatagcctggggtc

SEQ ID NO: 1592915 - DNA, 25 bp, Homo sapien
cccccctgccagtatagcctggggt

SEQ ID NO: 1592916 - DNA, 25 bp, Homo sapien
gggcccccctgccagtatagcctgg

SEQ ID NO: 1592917 - DNA, 25 bp, Homo sapien
ggcccccctgccagtatagcctggg

SEQ ID NO: 1592918 - DNA, 25 bp, Homo sapien
ctgtgtgattcagctgcagctcagc

SEQ ID NO: 1592919 - DNA, 25 bp, Homo sapien
tgattcagctgcagctcagctacgt

SEQ ID NO: 1592920 - DNA, 25 bp, Homo sapien
attcagctgcagctcagctacgtcc

SEQ ID NO: 1592921 - DNA, 25 bp, Homo sapien
tcagctgcagctcagctacgtccca

SEQ ID NO: 1592922 - DNA, 25 bp, Homo sapien
aagcccgcgaccaatgggaccaaag

SEQ ID NO: 1592923 - DNA, 25 bp, Homo sapien
caagtgactcgagcggcagctgctg

SEQ ID NO: 1592924 - DNA, 25 bp, Homo sapien
tggatgcacaccacgaggcagatca

SEQ ID NO: 1592925 - DNA, 25 bp, Homo sapien
agcctgtgcgaagcgctggatgcac

SEQ ID NO: 1592926 - DNA, 25 bp, Homo sapien
gagcagcccgaaccctcctccggca

SEQ ID NO: 1592927 - DNA, 25 bp, Homo sapien
agcagcccgaaccctcctccggcat

SEQ ID NO: 1592928 - DNA, 25 bp, Homo sapien
cgagcagcccgaaccctcctccggc

SEQ ID NO: 1592929 - DNA, 25 bp, Homo sapien
cgcggcgatcacctccgctagcgca

SEQ ID NO: 1592930 - DNA, 25 bp, Homo sapien
ggcgatcacctccgctagcgcagga

SEQ ID NO: 1592931 - DNA, 25 bp, Homo sapien
gatcacctccgctagcgcaggaggg

SEQ ID NO: 1592932 - DNA, 25 bp, Homo sapien
cgatcacctccgctagcgcaggagg

SEQ ID NO: 1592933 - DNA, 25 bp, Homo sapien
gggctcctgggcgtctacttgcttc

SEQ ID NO: 1592934 - DNA, 25 bp, Homo sapien
tgggcgtctacttgcttcaacctgt

SEQ ID NO: 1592935 - DNA, 25 bp, Homo sapien
gcgtctacttgcttcaacctgtcag

SEQ ID NO: 1592936 - DNA, 25 bp, Homo sapien
gagcaattggcgaggggaaattccc

SEQ ID NO: 1592937 - DNA, 25 bp, Homo sapien
tttgtgaaggccaattaacatgctg

SEQ ID NO: 1592938 - DNA, 25 bp, Homo sapien
ctttgtgaaggccaattaacatgct

SEQ ID NO: 1592939 - DNA, 25 bp, Homo sapien
cctgctacactatctctctaaaaat

SEQ ID NO: 1592940 - DNA, 25 bp, Homo sapien
tcgtcctgctacactatctctctaa

SEQ ID NO: 1592941 - DNA, 25 bp, Homo sapien
gctcgtcctgctacactatctctct

SEQ ID NO: 1592942 - DNA, 25 bp, Homo sapien
gtcctgctacactatctctctaaaa

SEQ ID NO: 1592943 - DNA, 25 bp, Homo sapien
ctaggtgaccccaccaggtgagcca

SEQ ID NO: 1592944 - DNA, 25 bp, Homo sapien
tacaccaacagaagggccacctgaa

SEQ ID NO: 1592945 - DNA, 25 bp, Homo sapien
ccaggtgagccacctacaccaacag

SEQ ID NO: 1592946 - DNA, 25 bp, Homo sapien
cagaagggccacctgaagatgaagg

SEQ ID NO: 1592947 - DNA, 25 bp, Homo sapien
ctccctggaactttgacagtcttgg

SEQ ID NO: 1592948 - DNA, 25 bp, Homo sapien
aaagaaggtctcataggccaggagc

SEQ ID NO: 1592949 - DNA, 25 bp, Homo sapien
gttctcagcattctggtacaaaggg

SEQ ID NO: 1592950 - DNA, 25 bp, Homo sapien
taatgcctccgcaattccaaagctc

SEQ ID NO: 1592951 - DNA, 25 bp, Homo sapien
tgtaggggaccccagaataactcat

SEQ ID NO: 1592952 - DNA, 25 bp, Homo sapien
gtgtaggggaccccagaataactca

SEQ ID NO: 1592953 - DNA, 25 bp, Homo sapien
tgaatccactgcgtacccttggcag

SEQ ID NO: 1592954 - DNA, 25 bp, Homo sapien
ctgccctgaatccactgcgtaccct

SEQ ID NO: 1592955 - DNA, 25 bp, Homo sapien
cctgaatccactgcgtacccttggc

SEQ ID NO: 1592956 - DNA, 25 bp, Homo sapien
aatccactgcgtacccttggcagag

SEQ ID NO: 1592957 - DNA, 25 bp, Homo sapien
gggagtcagcttaagtccttgagga

SEQ ID NO: 1592958 - DNA, 25 bp, Homo sapien
gctgggagtcagcttaagtccttga

SEQ ID NO: 1592959 - DNA, 25 bp, Homo sapien
atcttatcagtaatcgcattcttgg

SEQ ID NO: 1592960 - DNA, 25 bp, Homo sapien
tatcagtaatcgcattcttggatgt

SEQ ID NO: 1592961 - DNA, 25 bp, Homo sapien
gcatctacttgttgagacagggaca

SEQ ID NO: 1592962 - DNA, 25 bp, Homo sapien
gacattagtccggtctctccttgaa

SEQ ID NO: 1592963 - DNA, 25 bp, Homo sapien
tggcccactgtacgtgtagacctgg

SEQ ID NO: 1592964 - DNA, 25 bp, Homo sapien
tgctgatccagctatgctaaggccg

SEQ ID NO: 1592965 - DNA, 25 bp, Homo sapien
gagccgggtgcggacgcgccggtag

SEQ ID NO: 1592966 - DNA, 25 bp, Homo sapien
agcagtccgggcccctgcgttctga

SEQ ID NO: 1592967 - DNA, 25 bp, Homo sapien
cgcgccggtagtcggggaagtcagg

SEQ ID NO: 1592968 - DNA, 25 bp, Homo sapien
gggcccctgcgttctgagccgggtg

SEQ ID NO: 1592969 - DNA, 25 bp, Homo sapien
tgagagactgcaagcgaagaagcca

SEQ ID NO: 1592970 - DNA, 25 bp, Homo sapien
gggtcgaaacccatatcctagaatc

SEQ ID NO: 1592971 - DNA, 25 bp, Homo sapien
gagatacctatctggcatgtgagaa

SEQ ID NO: 1592972 - DNA, 25 bp, Homo sapien
agtaaacttcgtggtgtgtgcctgc

SEQ ID NO: 1592973 - DNA, 25 bp, Homo sapien
tccctgtgttttatgcttccagctg

SEQ ID NO: 1592974 - DNA, 25 bp, Homo sapien
ctgtgttttatgcttccagctggct

SEQ ID NO: 1592975 - DNA, 25 bp, Homo sapien
cagctccctgtgttttatgcttcca

SEQ ID NO: 1592976 - DNA, 25 bp, Homo sapien
tccagctggcttggcggattgtcat

SEQ ID NO: 1592977 - DNA, 25 bp, Homo sapien
tatgaacaaggtctggtcctcaccc

SEQ ID NO: 1592978 - DNA, 25 bp, Homo sapien
gcgtcttgcgggatgtagcctctac

SEQ ID NO: 1592979 - DNA, 25 bp, Homo sapien
taggagccaccacttgttgctgatg

SEQ ID NO: 1592980 - DNA, 25 bp, Homo sapien
caccccgagatgtgttagtctgggc

SEQ ID NO: 1592981 - DNA, 25 bp, Homo sapien
gtgtatttgtcatggtgatattgtg

SEQ ID NO: 1592982 - DNA, 25 bp, Homo sapien
caccctgtccgtactcatgatgaga

SEQ ID NO: 1592983 - DNA, 25 bp, Homo sapien
gaatctggcacttcgcgtgtatgag

SEQ ID NO: 1592984 - DNA, 25 bp, Homo sapien
gagttctccacgtgtcagacccatg

SEQ ID NO: 1592985 - DNA, 25 bp, Homo sapien
cagggtctgcagtctacgtgggtct

SEQ ID NO: 1592986 - DNA, 25 bp, Homo sapien
catgaaagccccgaagtaagaccgg

SEQ ID NO: 1592987 - DNA, 25 bp, Homo sapien
ggtaccatcacgcagtcgaaccagg

SEQ ID NO: 1592988 - DNA, 25 bp, Homo sapien
tcgaaccaggcgttcatccagcaca

SEQ ID NO: 1592989 - DNA, 25 bp, Homo sapien
tgctgtcccaccagacccgggagct

SEQ ID NO: 1592990 - DNA, 25 bp, Homo sapien
tgtagtagtagccagctttggtgac

SEQ ID NO: 1592991 - DNA, 25 bp, Homo sapien
ccacaagggccccatcgtggtagct

SEQ ID NO: 1592992 - DNA, 25 bp, Homo sapien
ttggagtagatgtagtagtagccag

SEQ ID NO: 1592993 - DNA, 25 bp, Homo sapien
ttgtagaggccgtgggtgatggtgc

SEQ ID NO: 1592994 - DNA, 25 bp, Homo sapien
gctgctgggttgacctcgtgagacc

SEQ ID NO: 1592995 - DNA, 25 bp, Homo sapien
gggttgacctcgtgagaccttcgct

SEQ ID NO: 1592996 - DNA, 25 bp, Homo sapien
atgcgctgctgggttgacctcgtga

SEQ ID NO: 1592997 - DNA, 25 bp, Homo sapien
tgagatgcgctgctgggttgacctc

SEQ ID NO: 1592998 - DNA, 25 bp, Homo sapien
cttgtatcagctgctcccaggagcc

SEQ ID NO: 1592999 - DNA, 25 bp, Homo sapien
gtatcagctgctcccaggagcctgc

SEQ ID NO: 1593000 - DNA, 25 bp, Homo sapien
ctgctcccaggagcctgcaggtccg

SEQ ID NO: 1593001 - DNA, 25 bp, Homo sapien
gctcccaggagcctgcaggtccgtc

SEQ ID NO: 1593002 - DNA, 25 bp, Homo sapien
cagaaggggcctgcggtaagaacct

SEQ ID NO: 1593003 - DNA, 25 bp, Homo sapien
gcctgcggtaagaacctgcagcggg

SEQ ID NO: 1593004 - DNA, 25 bp, Homo sapien
gggccacgccctcgcattgctcaca

SEQ ID NO: 1593005 - DNA, 25 bp, Homo sapien
acgccctcgcattgctcacacatgg

SEQ ID NO: 1593006 - DNA, 25 bp, Homo sapien
ctctcagccccccggtcccactcac

SEQ ID NO: 1593007 - DNA, 25 bp, Homo sapien
gctctcagccccccggtcccactca

SEQ ID NO: 1593008 - DNA, 25 bp, Homo sapien
ggaggaaccagccttggacggccag

SEQ ID NO: 1593009 - DNA, 25 bp, Homo sapien
aggaaccagccttggacggccagcc

SEQ ID NO: 1593010 - DNA, 25 bp, Homo sapien
atctctcctagacgccagtgcagct

SEQ ID NO: 1593011 - DNA, 25 bp, Homo sapien
gaccatctctcctagacgccagtgc

SEQ ID NO: 1593012 - DNA, 25 bp, Homo sapien
gtggcttcgtcccagcctcgtgaat

SEQ ID NO: 1593013 - DNA, 25 bp, Homo sapien
tgcacgactgtctccggtggcttcg

SEQ ID NO: 1593014 - DNA, 25 bp, Homo sapien
acactgagggccgtacgacactctc

SEQ ID NO: 1593015 - DNA, 25 bp, Homo sapien
tgggatgtcggtctgtccatccacc

SEQ ID NO: 1593016 - DNA, 25 bp, Homo sapien
gggctgacacgcctgggtccttcaa

SEQ ID NO: 1593017 - DNA, 25 bp, Homo sapien
ggctgacacgcctgggtccttcaac

SEQ ID NO: 1593018 - DNA, 25 bp, Homo sapien
agcagggctgacacgcctgggtcct

SEQ ID NO: 1593019 - DNA, 25 bp, Homo sapien
cagggctgacacgcctgggtccttc

SEQ ID NO: 1593020 - DNA, 25 bp, Homo sapien
accgaaattgctcaacactcctggg

SEQ ID NO: 1593021 - DNA, 25 bp, Homo sapien
gaaaccgaaattgctcaacactcct

SEQ ID NO: 1593022 - DNA, 25 bp, Homo sapien
aaccgaaattgctcaacactcctgg

SEQ ID NO: 1593023 - DNA, 25 bp, Homo sapien
gaggaaaccgaaattgctcaacact

SEQ ID NO: 1593024 - DNA, 25 bp, Homo sapien
gagacaagaaacctcgtaaacaaga

SEQ ID NO: 1593025 - DNA, 25 bp, Homo sapien
aatgtgactcaggtggcaagtgcag

SEQ ID NO: 1593026 - DNA, 25 bp, Homo sapien
cgactgaggactttctgcccatgcc

SEQ ID NO: 1593027 - DNA, 25 bp, Homo sapien
ccagaggcttctgaaaatgtgactc

SEQ ID NO: 1593028 - DNA, 25 bp, Homo sapien
tatatgttggccattatatatgttg

SEQ ID NO: 1593029 - DNA, 25 bp, Homo sapien
tttgtattatatgttggccattata

SEQ ID NO: 1593030 - DNA, 25 bp, Homo sapien
tgtattatatgttggccattatata

SEQ ID NO: 1593031 - DNA, 25 bp, Homo sapien
tttttgtattatatgttggccatta

SEQ ID NO: 1593032 - DNA, 25 bp, Homo sapien
tgaggcaggtccatgctccttggct

SEQ ID NO: 1593033 - DNA, 25 bp, Homo sapien
aaagaagtcagcacactagcaggcg

SEQ ID NO: 1593034 - DNA, 25 bp, Homo sapien
caggcgaacgccaggagaaaatgcg

SEQ ID NO: 1593035 - DNA, 25 bp, Homo sapien
cagacacgtgagatataactgaagc

SEQ ID NO: 1593036 - DNA, 25 bp, Homo sapien
gtttctggttctcttcgtcttggca

SEQ ID NO: 1593037 - DNA, 25 bp, Homo sapien
aaggcgccgaggtcctggcattgtt

SEQ ID NO: 1593038 - DNA, 25 bp, Homo sapien
gtcttggcattcgtcctcctcgggc

SEQ ID NO: 1593039 - DNA, 25 bp, Homo sapien
ccaagtgtccttcccgatgatgtag

SEQ ID NO: 1593040 - DNA, 25 bp, Homo sapien
cgcgcacgcgcagggaaagcactca

SEQ ID NO: 1593041 - DNA, 25 bp, Homo sapien
ggcagtcgggcggtcgcgcgcacgc

SEQ ID NO: 1593042 - DNA, 25 bp, Homo sapien
ggcgcaggggcgtgacaatggtgtg

SEQ ID NO: 1593043 - DNA, 25 bp, Homo sapien
tgacaatggtgtgggcgtggcatgg

SEQ ID NO: 1593044 - DNA, 25 bp, Homo sapien
ccagaaatcggaggagagaccccac

SEQ ID NO: 1593045 - DNA, 25 bp, Homo sapien
ggctgatgaacgtgcgctgctgtcc

SEQ ID NO: 1593046 - DNA, 25 bp, Homo sapien
ctctccccagaaatcggaggagaga

SEQ ID NO: 1593047 - DNA, 25 bp, Homo sapien
atgaacgtgcgctgctgtccaacct

SEQ ID NO: 1593048 - DNA, 25 bp, Homo sapien
ctgctcaatggccatgatgtactcg

SEQ ID NO: 1593049 - DNA, 25 bp, Homo sapien
ctgacttgatggtctgctcaatggc

SEQ ID NO: 1593050 - DNA, 25 bp, Homo sapien
tggccatgatgtactcgtcaaagtc

SEQ ID NO: 1593051 - DNA, 25 bp, Homo sapien
tcgtcaaagtcattggacagctgaa

SEQ ID NO: 1593052 - DNA, 25 bp, Homo sapien
gtcatccgacttttgtatgaagcaa

SEQ ID NO: 1593053 - DNA, 25 bp, Homo sapien
ctggctcacaggccttgtccagccg

SEQ ID NO: 1593054 - DNA, 25 bp, Homo sapien
tccgacttttgtatgaagcaattct

SEQ ID NO: 1593055 - DNA, 25 bp, Homo sapien
accttgtcatccgacttttgtatga

SEQ ID NO: 1593056 - DNA, 25 bp, Homo sapien
ctgttcccggctccagggaactcac

SEQ ID NO: 1593057 - DNA, 25 bp, Homo sapien
tcatcacggcagagcttgttcagct

SEQ ID NO: 1593058 - DNA, 25 bp, Homo sapien
agcacagcggcacagttcatcacgg

SEQ ID NO: 1593059 - DNA, 25 bp, Homo sapien
cggatggtagaaccgggtacagctt

SEQ ID NO: 1593060 - DNA, 25 bp, Homo sapien
tccggatggtagaaccgggtacagc

SEQ ID NO: 1593061 - DNA, 25 bp, Homo sapien
ctgggactctcaggcccctggaacc

SEQ ID NO: 1593062 - DNA, 25 bp, Homo sapien
gggactctcaggcccctggaaccat

SEQ ID NO: 1593063 - DNA, 25 bp, Homo sapien
gactctcaggcccctggaaccatca

SEQ ID NO: 1593064 - DNA, 25 bp, Homo sapien
ctctcaggcccctggaaccatcaga

SEQ ID NO: 1593065 - DNA, 25 bp, Homo sapien
caggttgtaataggcgtagaccttg

SEQ ID NO: 1593066 - DNA, 25 bp, Homo sapien
aataggcgtagaccttgactgctcc

SEQ ID NO: 1593067 - DNA, 25 bp, Homo sapien
agtattggtgaactttgaaagctag

SEQ ID NO: 1593068 - DNA, 25 bp, Homo sapien
tagacagtcatcctcagagtgtgag

SEQ ID NO: 1593069 - DNA, 25 bp, Homo sapien
aacaatcagctgggtacttacacag

SEQ ID NO: 1593070 - DNA, 25 bp, Homo sapien
caatcagctgggtacttacacagaa

SEQ ID NO: 1593071 - DNA, 25 bp, Homo sapien
tcagctgggtacttacacagaatat

SEQ ID NO: 1593072 - DNA, 25 bp, Homo sapien
cagctgggtacttacacagaatatt

SEQ ID NO: 1593073 - DNA, 25 bp, Homo sapien
ttgtccaggtagatgatgagggtgt

SEQ ID NO: 1593074 - DNA, 25 bp, Homo sapien
tgtatctgtcaacaccattggccag

SEQ ID NO: 1593075 - DNA, 25 bp, Homo sapien
ttcctatcggagaaggctttgtcca

SEQ ID NO: 1593076 - DNA, 25 bp, Homo sapien
gctttgtccagctcatacttggaga

SEQ ID NO: 1593077 - DNA, 25 bp, Homo sapien
catcatggatatgtccaatatagac

SEQ ID NO: 1593078 - DNA, 25 bp, Homo sapien
gagcaaagccagtcatcatggatat

SEQ ID NO: 1593079 - DNA, 25 bp, Homo sapien
gccagtcatcatggatatgtccaat

SEQ ID NO: 1593080 - DNA, 25 bp, Homo sapien
catggatatgtccaatatagacata

SEQ ID NO: 1593081 - DNA, 25 bp, Homo sapien
caatgtatcacgaaaagagggaact

SEQ ID NO: 1593082 - DNA, 25 bp, Homo sapien
gacaaggaggtctgatcaggcactg

SEQ ID NO: 1593083 - DNA, 25 bp, Homo sapien
tcaaggtgattaagagctcagactc

SEQ ID NO: 1593084 - DNA, 25 bp, Homo sapien
cagactatggtgatgttgaccctgc

SEQ ID NO: 1593085 - DNA, 25 bp, Homo sapien
agggatggccaagatgaaccccggt

SEQ ID NO: 1593086 - DNA, 25 bp, Homo sapien
aacagtatcagatacacagtgtact

SEQ ID NO: 1593087 - DNA, 25 bp, Homo sapien
ggccaagatgaaccccggtgaccta

SEQ ID NO: 1593088 - DNA, 25 bp, Homo sapien
tgaaccccggtgacctagcttctta

SEQ ID NO: 1593089 - DNA, 25 bp, Homo sapien
catagtgttcttggcatcctgaggc

SEQ ID NO: 1593090 - DNA, 25 bp, Homo sapien
caaggatcatagtgttcttggcatc

SEQ ID NO: 1593091 - DNA, 25 bp, Homo sapien
gttcttggcatcctgaggcctcttt

SEQ ID NO: 1593092 - DNA, 25 bp, Homo sapien
ctggtacagatctcaaggatcatag

SEQ ID NO: 1593093 - DNA, 25 bp, Homo sapien
aagagagaaagatgggagagggtat

SEQ ID NO: 1593094 - DNA, 25 bp, Homo sapien
gaagagagaaagatgggagagggta

SEQ ID NO: 1593095 - DNA, 25 bp, Homo sapien
gagagaaagatgggagagggtatac

SEQ ID NO: 1593096 - DNA, 25 bp, Homo sapien
agagagaaagatgggagagggtata

SEQ ID NO: 1593097 - DNA, 25 bp, Homo sapien
cgaatttattacaggtgagttgatc

SEQ ID NO: 1593098 - DNA, 25 bp, Homo sapien
ggttttatggtgaccttgaggtcga

SEQ ID NO: 1593099 - DNA, 25 bp, Homo sapien
tgtttccggtgctggttttatggtg

SEQ ID NO: 1593100 - DNA, 25 bp, Homo sapien
tgagttgatctttggccttagcatg

SEQ ID NO: 1593101 - DNA, 25 bp, Homo sapien
ctggtaagatgggagaggagacaca

SEQ ID NO: 1593102 - DNA, 25 bp, Homo sapien
cgacaaggtgccttggccttttcct

SEQ ID NO: 1593103 - DNA, 25 bp, Homo sapien
gcatgttgggaattaagccttctgc

SEQ ID NO: 1593104 - DNA, 25 bp, Homo sapien
agcatgttgggaattaagccttctg

SEQ ID NO: 1593105 - DNA, 25 bp, Homo sapien
ccagtaaaccctggctagtgtaggg

SEQ ID NO: 1593106 - DNA, 25 bp, Homo sapien
tcttgcttcccagtaaaccctggct

SEQ ID NO: 1593107 - DNA, 25 bp, Homo sapien
ccaaggcttggaacaccatgaaggt

SEQ ID NO: 1593108 - DNA, 25 bp, Homo sapien
gggcgtccttttggtattgagccaa

SEQ ID NO: 1593109 - DNA, 25 bp, Homo sapien
tggcagattcccagtggatacggtg

SEQ ID NO: 1593110 - DNA, 25 bp, Homo sapien
ctcttctgatcgcaggaggctggca

SEQ ID NO: 1593111 - DNA, 25 bp, Homo sapien
caggacttggagatgctgagaacat

SEQ ID NO: 1593112 - DNA, 25 bp, Homo sapien
ccaggacttggagatgctgagaaca

SEQ ID NO: 1593113 - DNA, 25 bp, Homo sapien
accaggacttggagatgctgagaac

SEQ ID NO: 1593114 - DNA, 25 bp, Homo sapien
ggacttggagatgctgagaacatgt

SEQ ID NO: 1593115 - DNA, 25 bp, Homo sapien
taagattgtgagatagaactgggaa

SEQ ID NO: 1593116 - DNA, 25 bp, Homo sapien
cagcaagacagggtaagattgtgag

SEQ ID NO: 1593117 - DNA, 25 bp, Homo sapien
cagggtaagattgtgagatagaact

SEQ ID NO: 1593118 - DNA, 25 bp, Homo sapien
tgtgagatagaactgggaacctggt

SEQ ID NO: 1593119 - DNA, 25 bp, Homo sapien
agtgtcttctctaggaggccagtgg

SEQ ID NO: 1593120 - DNA, 25 bp, Homo sapien
gtcttctctaggaggccagtgggaa

SEQ ID NO: 1593121 - DNA, 25 bp, Homo sapien
tgcatgtgcctaggggctgtgggcc

SEQ ID NO: 1593122 - DNA, 25 bp, Homo sapien
ctcagtgtcttctctaggaggccag

SEQ ID NO: 1593123 - DNA, 25 bp, Homo sapien
agtatctctgttcattgagccaacg

SEQ ID NO: 1593124 - DNA, 25 bp, Homo sapien
ccaccgtagtatctctgttcattga

SEQ ID NO: 1593125 - DNA, 25 bp, Homo sapien
gccaccaccgtagtatctctgttca

SEQ ID NO: 1593126 - DNA, 25 bp, Homo sapien
gccatagccaccaccgtagtatctc

SEQ ID NO: 1593127 - DNA, 25 bp, Homo sapien
gggcataggatgtggcctccacgtt

SEQ ID NO: 1593128 - DNA, 25 bp, Homo sapien
ccagggtcctcccagcggttcttat

SEQ ID NO: 1593129 - DNA, 25 bp, Homo sapien
ttttagctgcagtagggccaagagg

SEQ ID NO: 1593130 - DNA, 25 bp, Homo sapien
gcctccacgttgtagagctgcttac

SEQ ID NO: 1593131 - DNA, 25 bp, Homo sapien
gagatgcatgctagacttcctggtg

SEQ ID NO: 1593132 - DNA, 25 bp, Homo sapien
ttaggactatccatctcagcttggc

SEQ ID NO: 1593133 - DNA, 25 bp, Homo sapien
tcctggctgacattcgaggctctca

SEQ ID NO: 1593134 - DNA, 25 bp, Homo sapien
gaggacctgcgaaaacttagagccg

SEQ ID NO: 1593135 - DNA, 25 bp, Homo sapien
taggttcatgtagttggcttcaagg

SEQ ID NO: 1593136 - DNA, 25 bp, Homo sapien
ttgttaagaagaggccccttcagcc

SEQ ID NO: 1593137 - DNA, 25 bp, Homo sapien
tggccacagtgtaggatctctgtag

SEQ ID NO: 1593138 - DNA, 25 bp, Homo sapien
gctgtggtcagaaatttgttaagaa

SEQ ID NO: 1593139 - DNA, 25 bp, Homo sapien
cagcctgtgctatactctgctacaa

SEQ ID NO: 1593140 - DNA, 25 bp, Homo sapien
attacagcacactcttgaccccagg

SEQ ID NO: 1593141 - DNA, 25 bp, Homo sapien
ttcctgtccttagctgattggtcca

SEQ ID NO: 1593142 - DNA, 25 bp, Homo sapien
ttcacgtggccacagtggaaacagc

SEQ ID NO: 1593143 - DNA, 25 bp, Homo sapien
ttatatctgggacaactcagaggcc

SEQ ID NO: 1593144 - DNA, 25 bp, Homo sapien
gccaagaacggaatgaagatcacgg

SEQ ID NO: 1593145 - DNA, 25 bp, Homo sapien
tcaagggtggaagtgcccatgagtc

SEQ ID NO: 1593146 - DNA, 25 bp, Homo sapien
cagatgcacatcctgagtgaggctc

SEQ ID NO: 1593147 - DNA, 25 bp, Homo sapien
aatagtcttagctctgtatcccaag

SEQ ID NO: 1593148 - DNA, 25 bp, Homo sapien
tctttaaggaagtagcaagtacgca

SEQ ID NO: 1593149 - DNA, 25 bp, Homo sapien
catgtagcactgatgtagaaagcac

SEQ ID NO: 1593150 - DNA, 25 bp, Homo sapien
tgatgagccaacagtgttcaccgtt

SEQ ID NO: 1593151 - DNA, 25 bp, Homo sapien
tgctcctcgcaaatatctttagcct

SEQ ID NO: 1593152 - DNA, 25 bp, Homo sapien
tctcgttgttgttccgtaatccacc

SEQ ID NO: 1593153 - DNA, 25 bp, Homo sapien
tagcctcctgcagcgagatgagaac

SEQ ID NO: 1593154 - DNA, 25 bp, Homo sapien
caaaggccgtgagggccatgtcttt

SEQ ID NO: 1593155 - DNA, 25 bp, Homo sapien
gggtccggtctcagaatatgttttg

SEQ ID NO: 1593156 - DNA, 25 bp, Homo sapien
tccggtctcagaatatgttttgttt

SEQ ID NO: 1593157 - DNA, 25 bp, Homo sapien
cactcacacccctcagattcctggg

SEQ ID NO: 1593158 - DNA, 25 bp, Homo sapien
tctggggtccggtctcagaatatgt

SEQ ID NO: 1593159 - DNA, 25 bp, Homo sapien
tcgatggcgatgaggttgacagcca

SEQ ID NO: 1593160 - DNA, 25 bp, Homo sapien
catttcttggtgtatcacgggcgca

SEQ ID NO: 1593161 - DNA, 25 bp, Homo sapien
gagaagaccttgaccacgtaggcgg

SEQ ID NO: 1593162 - DNA, 25 bp, Homo sapien
cagccccgcagaggacttgggagtc

SEQ ID NO: 1593163 - DNA, 25 bp, Homo sapien
tcacgaaggccgcaaaggcagagct

SEQ ID NO: 1593164 - DNA, 25 bp, Homo sapien
gggtgcccgtttcacgaaggccgca

SEQ ID NO: 1593165 - DNA, 25 bp, Homo sapien
ccgtttcacgaaggccgcaaaggca

SEQ ID NO: 1593166 - DNA, 25 bp, Homo sapien
caggtgctgggtgcccgtttcacga

SEQ ID NO: 1593167 - DNA, 25 bp, Homo sapien
gtaatgcacagcgatgaccgtgggc

SEQ ID NO: 1593168 - DNA, 25 bp, Homo sapien
ccactgctccgtttcatccaggtaa

SEQ ID NO: 1593169 - DNA, 25 bp, Homo sapien
gaccgtgggcgtcatgccgatcatg

SEQ ID NO: 1593170 - DNA, 25 bp, Homo sapien
aatgaggtgcttcagccgttccgcg

SEQ ID NO: 1593171 - DNA, 25 bp, Homo sapien
aggagaattctggtctcagactcgg

SEQ ID NO: 1593172 - DNA, 25 bp, Homo sapien
cgggacttggtcactgaggtctgca

SEQ ID NO: 1593173 - DNA, 25 bp, Homo sapien
tctggtctcagactcggtgtccggg

SEQ ID NO: 1593174 - DNA, 25 bp, Homo sapien
tcggtgtccgggacttggtcactga

SEQ ID NO: 1593175 - DNA, 25 bp, Homo sapien
gcgttctggatccagggtgcgaaca

SEQ ID NO: 1593176 - DNA, 25 bp, Homo sapien
tccagggtgcgaacagccacagttt

SEQ ID NO: 1593177 - DNA, 25 bp, Homo sapien
agggtgcgaacagccacagttttgt

SEQ ID NO: 1593178 - DNA, 25 bp, Homo sapien
tctggatccagggtgcgaacagcca

SEQ ID NO: 1593179 - DNA, 25 bp, Homo sapien
tccaacctgagtcaatagtacgaag

SEQ ID NO: 1593180 - DNA, 25 bp, Homo sapien
tatgattcttagtgtctcagagcct

SEQ ID NO: 1593181 - DNA, 25 bp, Homo sapien
aatagtacgaagaccaggagccctc

SEQ ID NO: 1593182 - DNA, 25 bp, Homo sapien
tcctaagctggacactatgattctt

SEQ ID NO: 1593183 - DNA, 25 bp, Homo sapien
tctttagcggcacgatgacatatgg

SEQ ID NO: 1593184 - DNA, 25 bp, Homo sapien
aaatgatggtagacagcagccttga

SEQ ID NO: 1593185 - DNA, 25 bp, Homo sapien
gacaccgtcactgatgaaatgatgg

SEQ ID NO: 1593186 - DNA, 25 bp, Homo sapien
tacggtctgctggtgacgcctcttg

SEQ ID NO: 1593187 - DNA, 25 bp, Homo sapien
gagagaaaggatccgggcaagtgtg

SEQ ID NO: 1593188 - DNA, 25 bp, Homo sapien
gatccgggcaagtgtgtgtgcaaca

SEQ ID NO: 1593189 - DNA, 25 bp, Homo sapien
tgtgtgtgcaacaggctacctaccc

SEQ ID NO: 1593190 - DNA, 25 bp, Homo sapien
ggcaagtgtgtgtgcaacaggctac

SEQ ID NO: 1593191 - DNA, 25 bp, Homo sapien
ggttctgccggtaattgtagagaac

SEQ ID NO: 1593192 - DNA, 25 bp, Homo sapien
cggtaattgtagagaacggctcgga

SEQ ID NO: 1593193 - DNA, 25 bp, Homo sapien
tctgccggtaattgtagagaacggc

SEQ ID NO: 1593194 - DNA, 25 bp, Homo sapien
tgtagagaacggctcggatttccac

SEQ ID NO: 1593195 - DNA, 25 bp, Homo sapien
gacctcgaaggggtctgccacacag

SEQ ID NO: 1593196 - DNA, 25 bp, Homo sapien
aagtcctgcattactgtgacctcga

SEQ ID NO: 1593197 - DNA, 25 bp, Homo sapien
tagccgcaggtcgatgaagaagtcc

SEQ ID NO: 1593198 - DNA, 25 bp, Homo sapien
gctcgtttcgaacaacagagtaggg

SEQ ID NO: 1593199 - DNA, 25 bp, Homo sapien
tatattcatgagcttcgtagagatt

SEQ ID NO: 1593200 - DNA, 25 bp, Homo sapien
aaaaatatattcatgagcttcgtag

SEQ ID NO: 1593201 - DNA, 25 bp, Homo sapien
tttcttgtccgacatgctcacagcc

SEQ ID NO: 1593202 - DNA, 25 bp, Homo sapien
gccagaatctcccacgtggtgatgg

SEQ ID NO: 1593203 - DNA, 25 bp, Homo sapien
agctctctgggaactcacttcggga

SEQ ID NO: 1593204 - DNA, 25 bp, Homo sapien
ccatttttcggtggctctttcaagt

SEQ ID NO: 1593205 - DNA, 25 bp, Homo sapien
tgggaactcacttcgggaaacgatg

SEQ ID NO: 1593206 - DNA, 25 bp, Homo sapien
cgggaaacgatgttctcttctgcaa

SEQ ID NO: 1593207 - DNA, 25 bp, Homo sapien
ttcctagcagtgaaatacatcccgg

SEQ ID NO: 1593208 - DNA, 25 bp, Homo sapien
aaatacatcccggacatggaggact

SEQ ID NO: 1593209 - DNA, 25 bp, Homo sapien
agagccgacctacttcctcagcggt

SEQ ID NO: 1593210 - DNA, 25 bp, Homo sapien
ggtcacacctttagatcctacctct

SEQ ID NO: 1593211 - DNA, 25 bp, Homo sapien
ttttggctcattgacgcctccatct

SEQ ID NO: 1593212 - DNA, 25 bp, Homo sapien
tttggctcattgacgcctccatctc

SEQ ID NO: 1593213 - DNA, 25 bp, Homo sapien
attttggctcattgacgcctccatc

SEQ ID NO: 1593214 - DNA, 25 bp, Homo sapien
ccagggagatgaaacgggtccggcg

SEQ ID NO: 1593215 - DNA, 25 bp, Homo sapien
cggcgctggcacgagaacctcatgg

SEQ ID NO: 1593216 - DNA, 25 bp, Homo sapien
aggaagaccttcttgcacgcctcgc

SEQ ID NO: 1593217 - DNA, 25 bp, Homo sapien
tcatggggttctcccgcatgccgtc

SEQ ID NO: 1593218 - DNA, 25 bp, Homo sapien
tccgtgagctgcacggaacggcgtc

SEQ ID NO: 1593219 - DNA, 25 bp, Homo sapien
tgtccattcgcttctccgtgagctg

SEQ ID NO: 1593220 - DNA, 25 bp, Homo sapien
ttctccgtgagctgcacggaacggc

SEQ ID NO: 1593221 - DNA, 25 bp, Homo sapien
tttgtccattcgcttctccgtgagc

SEQ ID NO: 1593222 - DNA, 25 bp, Homo sapien
tctgctggccactgctgctcgtgaa

SEQ ID NO: 1593223 - DNA, 25 bp, Homo sapien
aaggtcagccctgcgtcggagaaga

SEQ ID NO: 1593224 - DNA, 25 bp, Homo sapien
gctcgtgaaggtcagccctgcgtcg

SEQ ID NO: 1593225 - DNA, 25 bp, Homo sapien
tcggagaagacaccggcgtaatcct

SEQ ID NO: 1593226 - DNA, 25 bp, Homo sapien
atctccatcttcgtccctactccgg

SEQ ID NO: 1593227 - DNA, 25 bp, Homo sapien
aaagtgtccaattctcagccgggcg

SEQ ID NO: 1593228 - DNA, 25 bp, Homo sapien
ccagttgaaagtgtccaattctcag

SEQ ID NO: 1593229 - DNA, 25 bp, Homo sapien
ggcctccattccaaatcttatctcc

SEQ ID NO: 1593230 - DNA, 25 bp, Homo sapien
tacaggctgccggtcttctgactgg

SEQ ID NO: 1593231 - DNA, 25 bp, Homo sapien
cagggtcatctgctgcccaggtaca

SEQ ID NO: 1593232 - DNA, 25 bp, Homo sapien
ttattcagcacgaacacgcccttgt

SEQ ID NO: 1593233 - DNA, 25 bp, Homo sapien
cttactctgcgtcagtttgttcttc

SEQ ID NO: 1593234 - DNA, 25 bp, Homo sapien
tagtacgccaccaggcggaaggaag

SEQ ID NO: 1593235 - DNA, 25 bp, Homo sapien
ccgccttcaacagcctgcccttgtt

SEQ ID NO: 1593236 - DNA, 25 bp, Homo sapien
aggagtccttgacgtccacccacac

SEQ ID NO: 1593237 - DNA, 25 bp, Homo sapien
tctggccgctggcaccgatcagcgt

SEQ ID NO: 1593238 - DNA, 25 bp, Homo sapien
gcagggaacgcagggagggatccgg

SEQ ID NO: 1593239 - DNA, 25 bp, Homo sapien
ggaacgcagggagggatccgggatg

SEQ ID NO: 1593240 - DNA, 25 bp, Homo sapien
gtggcagggaacgcagggagggatc

SEQ ID NO: 1593241 - DNA, 25 bp, Homo sapien
gagtggcagggaacgcagggaggga

SEQ ID NO: 1593242 - DNA, 25 bp, Homo sapien
agagcctgcatggtcctggtagcct

SEQ ID NO: 1593243 - DNA, 25 bp, Homo sapien
atcttggcctcgtgggcgcggtcca

SEQ ID NO: 1593244 - DNA, 25 bp, Homo sapien
gagctctgtacgtagcactgagaga

SEQ ID NO: 1593245 - DNA, 25 bp, Homo sapien
tccattcgcaggaggaagttgacgt

SEQ ID NO: 1593246 - DNA, 25 bp, Homo sapien
gagccatcagggttcgtcacgaaca

SEQ ID NO: 1593247 - DNA, 25 bp, Homo sapien
tccctgggttagagactgcacagtg

SEQ ID NO: 1593248 - DNA, 25 bp, Homo sapien
gactcggtaggctggagagccatca

SEQ ID NO: 1593249 - DNA, 25 bp, Homo sapien
tggccacgccatctccctgggttag

SEQ ID NO: 1593250 - DNA, 25 bp, Homo sapien
cctggtttgaagtacttgggtgtct

SEQ ID NO: 1593251 - DNA, 25 bp, Homo sapien
aagtggatctggtagggagaggtca

SEQ ID NO: 1593252 - DNA, 25 bp, Homo sapien
tctggtagggagaggtcacgatggg

SEQ ID NO: 1593253 - DNA, 25 bp, Homo sapien
aggtcaaagggcattcctggtttga

SEQ ID NO: 1593254 - DNA, 25 bp, Homo sapien
agcagtaccttccggctcagcacaa

SEQ ID NO: 1593255 - DNA, 25 bp, Homo sapien
ttctgcaccccgtccagcagtacct

SEQ ID NO: 1593256 - DNA, 25 bp, Homo sapien
ggcagacacgtacaaagacttcccc

SEQ ID NO: 1593257 - DNA, 25 bp, Homo sapien
tgagtgcaagatgacggtggcagac

SEQ ID NO: 1593258 - DNA, 25 bp, Homo sapien
ctggatcccgaagatgacaaaggca

SEQ ID NO: 1593259 - DNA, 25 bp, Homo sapien
acaaaggcagttccctccactttct

SEQ ID NO: 1593260 - DNA, 25 bp, Homo sapien
ggcagggaaatcctctgttcgccat

SEQ ID NO: 1593261 - DNA, 25 bp, Homo sapien
cttgagggattcaggcagggaaatc

SEQ ID NO: 1593262 - DNA, 25 bp, Homo sapien
tctctgtaggctccactatgacctc

SEQ ID NO: 1593263 - DNA, 25 bp, Homo sapien
taggctccactatgacctcgaaact

SEQ ID NO: 1593264 - DNA, 25 bp, Homo sapien
caggcccttctcgttatagatgtag

SEQ ID NO: 1593265 - DNA, 25 bp, Homo sapien
ctggcggtgatggtgacctccaggc

SEQ ID NO: 1593266 - DNA, 25 bp, Homo sapien
ctgtggtgagttttcatagtaggct

SEQ ID NO: 1593267 - DNA, 25 bp, Homo sapien
agtaggctcggatcttccactggcc

SEQ ID NO: 1593268 - DNA, 25 bp, Homo sapien
tttcatagtaggctcggatcttcca

SEQ ID NO: 1593269 - DNA, 25 bp, Homo sapien
agtggagaagacctgctgtggtgag

SEQ ID NO: 1593270 - DNA, 25 bp, Homo sapien
tgagaagacaaggagtcctgcttga

SEQ ID NO: 1593271 - DNA, 25 bp, Homo sapien
tccggaatgtcccaagacaagggca

SEQ ID NO: 1593272 - DNA, 25 bp, Homo sapien
gagaagacaaggagtcctgcttgac

SEQ ID NO: 1593273 - DNA, 25 bp, Homo sapien
agggcaagacgccaagctggttctg

SEQ ID NO: 1593274 - DNA, 25 bp, Homo sapien
aataatgtattagggcgagcgcaat

SEQ ID NO: 1593275 - DNA, 25 bp, Homo sapien
agattgctcaaggtcaagggttcaa

SEQ ID NO: 1593276 - DNA, 25 bp, Homo sapien
ggaagattgctcaaggtcaagggtt

SEQ ID NO: 1593277 - DNA, 25 bp, Homo sapien
atgtattagggcgagcgcaatggct

SEQ ID NO: 1593278 - DNA, 25 bp, Homo sapien
gacttgggctttgacgcataggaag

SEQ ID NO: 1593279 - DNA, 25 bp, Homo sapien
gctgccgtcggtagaatagatgaca

SEQ ID NO: 1593280 - DNA, 25 bp, Homo sapien
gctgagttcaggtgacaaaaccctc

SEQ ID NO: 1593281 - DNA, 25 bp, Homo sapien
ttaactgaaagcagaatccacggac

SEQ ID NO: 1593282 - DNA, 25 bp, Homo sapien
tgtgctgtgtgtattgtgttgtgtg

SEQ ID NO: 1593283 - DNA, 25 bp, Homo sapien
tttgtgtgtgttgcattgtgtgtgt

SEQ ID NO: 1593284 - DNA, 25 bp, Homo sapien
tgtgtttgtgtgtgttgcattgtgt

SEQ ID NO: 1593285 - DNA, 25 bp, Homo sapien
tgtgttgcattgtgtgtgtgcattg

SEQ ID NO: 1593286 - DNA, 25 bp, Homo sapien
tgttgcattgtgtgtgtgcattgtg

SEQ ID NO: 1593287 - DNA, 25 bp, Homo sapien
ctgtgtgtgtattgtgtgctgtgtg

SEQ ID NO: 1593288 - DNA, 25 bp, Homo sapien
gtgctgtgtgtgtgcatgttgtgtg

SEQ ID NO: 1593289 - DNA, 25 bp, Homo sapien
tgtgtgtattgtgtgctgtgtgtgt

SEQ ID NO: 1593290 - DNA, 25 bp, Homo sapien
tgtgctgtgtgtgtgcatgttgtgt

SEQ ID NO: 1593291 - DNA, 25 bp, Homo sapien
ccctggggccccctctggctggcac

SEQ ID NO: 1593292 - DNA, 25 bp, Homo sapien
tcccctggggccccctctggctggc

SEQ ID NO: 1593293 - DNA, 25 bp, Homo sapien
tgtgcccctgcttcccctggggccc

SEQ ID NO: 1593294 - DNA, 25 bp, Homo sapien
tgcttcccctggggccccctctggc

SEQ ID NO: 1593295 - DNA, 25 bp, Homo sapien
tgttgaccatgaccgtccggcccac

SEQ ID NO: 1593296 - DNA, 25 bp, Homo sapien
ttgacggtgaagatccgatagagaa

SEQ ID NO: 1593297 - DNA, 25 bp, Homo sapien
tccggcccacgggtagcagcttgtg

SEQ ID NO: 1593298 - DNA, 25 bp, Homo sapien
cagcttgtggttgacggtgaagatc

SEQ ID NO: 1593299 - DNA, 25 bp, Homo sapien
ggcctgcacggtcacgaacttgttg

SEQ ID NO: 1593300 - DNA, 25 bp, Homo sapien
ctggatgaagaggtacccgctctgc

SEQ ID NO: 1593301 - DNA, 25 bp, Homo sapien
acttgggtcccgaaggtggcctgca

SEQ ID NO: 1593302 - DNA, 25 bp, Homo sapien
ttttctgacttgaactccctgttgg

SEQ ID NO: 1593303 - DNA, 25 bp, Homo sapien
gcacagtcttctcactggacagcac

SEQ ID NO: 1593304 - DNA, 25 bp, Homo sapien
tggacagcactagttttttgcctgg

SEQ ID NO: 1593305 - DNA, 25 bp, Homo sapien
ggaacatccccttgcgcgtcgtggg

SEQ ID NO: 1593306 - DNA, 25 bp, Homo sapien
cctgggaagtcgtggacagtaacag

SEQ ID NO: 1593307 - DNA, 25 bp, Homo sapien
gggaggtgggttagtagcaggagca

SEQ ID NO: 1593308 - DNA, 25 bp, Homo sapien
gaggtgggttagtagcaggagcagc

SEQ ID NO: 1593309 - DNA, 25 bp, Homo sapien
ggaggtgggttagtagcaggagcag

SEQ ID NO: 1593310 - DNA, 25 bp, Homo sapien
ggtgctgggacagtgcagggtcaga

SEQ ID NO: 1593311 - DNA, 25 bp, Homo sapien
tgggacagtgcagggtcagagggac

SEQ ID NO: 1593312 - DNA, 25 bp, Homo sapien
ctgggacagtgcagggtcagaggga

SEQ ID NO: 1593313 - DNA, 25 bp, Homo sapien
tgctgggacagtgcagggtcagagg

SEQ ID NO: 1593314 - DNA, 25 bp, Homo sapien
tgaaactgcatccccttgccaggcg

SEQ ID NO: 1593315 - DNA, 25 bp, Homo sapien
aaactgcatccccttgccaggcgca

SEQ ID NO: 1593316 - DNA, 25 bp, Homo sapien
gaaactgcatccccttgccaggcgc

SEQ ID NO: 1593317 - DNA, 25 bp, Homo sapien
gaaggcttctccgagctccaaaagg

SEQ ID NO: 1593318 - DNA, 25 bp, Homo sapien
cagcgaggaaggcttctccgagctc

SEQ ID NO: 1593319 - DNA, 25 bp, Homo sapien
gcttgtgtctccagcgaggaaggct

SEQ ID NO: 1593320 - DNA, 25 bp, Homo sapien
tctccgagctccaaaaggcattctg

SEQ ID NO: 1593321 - DNA, 25 bp, Homo sapien
tattgtacacatagctggaagggag

SEQ ID NO: 1593322 - DNA, 25 bp, Homo sapien
aacggcgtagccaaacagattggtc

SEQ ID NO: 1593323 - DNA, 25 bp, Homo sapien
ccaaaaaggcaagacaacggcgtag

SEQ ID NO: 1593324 - DNA, 25 bp, Homo sapien
tatacaaagacacggaccctgtgcc

SEQ ID NO: 1593325 - DNA, 25 bp, Homo sapien
aatgctgggggaggacgaccctttg

SEQ ID NO: 1593326 - DNA, 25 bp, Homo sapien
atgctgggggaggacgaccctttgg

SEQ ID NO: 1593327 - DNA, 25 bp, Homo sapien
gggaggacgaccctttggtctgaga

SEQ ID NO: 1593328 - DNA, 25 bp, Homo sapien
ggaggacgaccctttggtctgagat

SEQ ID NO: 1593329 - DNA, 25 bp, Homo sapien
ataacagttcccgcccgctggctgt

SEQ ID NO: 1593330 - DNA, 25 bp, Homo sapien
agttcccgcccgctggctgttttgt

SEQ ID NO: 1593331 - DNA, 25 bp, Homo sapien
tcataacagttcccgcccgctggct

SEQ ID NO: 1593332 - DNA, 25 bp, Homo sapien
acagttcccgcccgctggctgtttt

SEQ ID NO: 1593333 - DNA, 25 bp, Homo sapien
cactctacccggaaccactcaggcc

SEQ ID NO: 1593334 - DNA, 25 bp, Homo sapien
cacccactctacccggaaccactca

SEQ ID NO: 1593335 - DNA, 25 bp, Homo sapien
cagacagcgaggaggcgtctagcgt

SEQ ID NO: 1593336 - DNA, 25 bp, Homo sapien
ccactctacccggaaccactcaggc

SEQ ID NO: 1593337 - DNA, 25 bp, Homo sapien
gctccatctgaacatcctcctcgtc

SEQ ID NO: 1593338 - DNA, 25 bp, Homo sapien
tgcaggtacgggttgtttcctgtgg

SEQ ID NO: 1593339 - DNA, 25 bp, Homo sapien
tggaacttgtagcccgtgagcacga

SEQ ID NO: 1593340 - DNA, 25 bp, Homo sapien
ggaacttgtagcccgtgagcacgaa

SEQ ID NO: 1593341 - DNA, 25 bp, Homo sapien
ctggaacttgtagcccgtgagcacg

SEQ ID NO: 1593342 - DNA, 25 bp, Homo sapien
gaacttgtagcccgtgagcacgaag

SEQ ID NO: 1593343 - DNA, 25 bp, Homo sapien
cgatgatgcgggtgaagtagacgta

SEQ ID NO: 1593344 - DNA, 25 bp, Homo sapien
gccactgaaagggcacagccacctg

SEQ ID NO: 1593345 - DNA, 25 bp, Homo sapien
ggatggcgatgatgcgggtgaagta

SEQ ID NO: 1593346 - DNA, 25 bp, Homo sapien
gggtgaagtagacgtagcagatgac

SEQ ID NO: 1593347 - DNA, 25 bp, Homo sapien
gggccaggactgtaggggcacgggc

SEQ ID NO: 1593348 - DNA, 25 bp, Homo sapien
caggggcgcgagcaggcgtggggcc

SEQ ID NO: 1593349 - DNA, 25 bp, Homo sapien
ctgcaggggcgcgagcaggcgtggg

SEQ ID NO: 1593350 - DNA, 25 bp, Homo sapien
gccaggactgtaggggcacgggcag

SEQ ID NO: 1593351 - DNA, 25 bp, Homo sapien
acatagtaatgccggaacagcttca

SEQ ID NO: 1593352 - DNA, 25 bp, Homo sapien
catagtaatgccggaacagcttcag

SEQ ID NO: 1593353 - DNA, 25 bp, Homo sapien
gacatagtaatgccggaacagcttc

SEQ ID NO: 1593354 - DNA, 25 bp, Homo sapien
ctgtgccagacgcatcctggagatg

SEQ ID NO: 1593355 - DNA, 25 bp, Homo sapien
tgtgccagacgcatcctggagatgc

SEQ ID NO: 1593356 - DNA, 25 bp, Homo sapien
ccgtctgtgccagacgcatcctgga

SEQ ID NO: 1593357 - DNA, 25 bp, Homo sapien
cgggactcgatgatgatgtaggcca

SEQ ID NO: 1593358 - DNA, 25 bp, Homo sapien
tgaggtccaccaggaacaaaatctc

SEQ ID NO: 1593359 - DNA, 25 bp, Homo sapien
tccttccacagcacgtagtcgctgg

SEQ ID NO: 1593360 - DNA, 25 bp, Homo sapien
tggcgccttcctcgcgggactcgat

SEQ ID NO: 1593361 - DNA, 25 bp, Homo sapien
tgatgaagaggagggcgcccttcag

SEQ ID NO: 1593362 - DNA, 25 bp, Homo sapien
cttatccgacaggacgtacttgatg

SEQ ID NO: 1593363 - DNA, 25 bp, Homo sapien
caggacgtacttgatgaaggcccag

SEQ ID NO: 1593364 - DNA, 25 bp, Homo sapien
ctgagccaatcagggcgatggtgat

SEQ ID NO: 1593365 - DNA, 25 bp, Homo sapien
tacatgacggcaaggccttcgatgg

SEQ ID NO: 1593366 - DNA, 25 bp, Homo sapien
gccctggctgttgatgaagtagtag

SEQ ID NO: 1593367 - DNA, 25 bp, Homo sapien
tgtagtacatgacggcaaggccttc

SEQ ID NO: 1593368 - DNA, 25 bp, Homo sapien
gtgtgcgatgtagtacatgacggca

SEQ ID NO: 1593369 - DNA, 25 bp, Homo sapien
acagacggacagtgaggcgcacaga

SEQ ID NO: 1593370 - DNA, 25 bp, Homo sapien
accgtcaccatcagatgggtggtca

SEQ ID NO: 1593371 - DNA, 25 bp, Homo sapien
ggattaggaacacggaccgtcacca

SEQ ID NO: 1593372 - DNA, 25 bp, Homo sapien
agaaagttgaataatgaggacggtg

SEQ ID NO: 1593373 - DNA, 25 bp, Homo sapien
ctgaaaaaatggagggaacagtcac

SEQ ID NO: 1593374 - DNA, 25 bp, Homo sapien
aaaatggagggaacagtcacagctg

SEQ ID NO: 1593375 - DNA, 25 bp, Homo sapien
aatggagggaacagtcacagctgaa

SEQ ID NO: 1593376 - DNA, 25 bp, Homo sapien
aaaaaatggagggaacagtcacagc

SEQ ID NO: 1593377 - DNA, 25 bp, Homo sapien
ccccgctgctccccggtccaaggct

SEQ ID NO: 1593378 - DNA, 25 bp, Homo sapien
ccgctgctccccggtccaaggctct

SEQ ID NO: 1593379 - DNA, 25 bp, Homo sapien
gctgctccccggtccaaggctctca

SEQ ID NO: 1593380 - DNA, 25 bp, Homo sapien
ctgctccccggtccaaggctctcac

SEQ ID NO: 1593381 - DNA, 25 bp, Homo sapien
ttggtgaaggccaaggccgccatga

SEQ ID NO: 1593382 - DNA, 25 bp, Homo sapien
atgagccagtggatcttgaagacgc

SEQ ID NO: 1593383 - DNA, 25 bp, Homo sapien
ccagtggatcttgaagacgctgtac

SEQ ID NO: 1593384 - DNA, 25 bp, Homo sapien
tgctcttggtgaaggccaaggccgc

SEQ ID NO: 1593385 - DNA, 25 bp, Homo sapien
cggggttcttctcccggatcatcac

SEQ ID NO: 1593386 - DNA, 25 bp, Homo sapien
gatggacacccagaagatgccagcg

SEQ ID NO: 1593387 - DNA, 25 bp, Homo sapien
aggaagcaggcggacatgaccatgt

SEQ ID NO: 1593388 - DNA, 25 bp, Homo sapien
gggcatctccgctgccgacaggaag

SEQ ID NO: 1593389 - DNA, 25 bp, Homo sapien
gggtgaggcactctgggcccgcagt

SEQ ID NO: 1593390 - DNA, 25 bp, Homo sapien
ggtgaggcactctgggcccgcagtg

SEQ ID NO: 1593391 - DNA, 25 bp, Homo sapien
gtgaggcactctgggcccgcagtgg

SEQ ID NO: 1593392 - DNA, 25 bp, Homo sapien
ttgtggaagttcaggctgtactggc

SEQ ID NO: 1593393 - DNA, 25 bp, Homo sapien
cctgagagccgatcaccacgtggaa

SEQ ID NO: 1593394 - DNA, 25 bp, Homo sapien
ggccttcttccgcctgagagccgat

SEQ ID NO: 1593395 - DNA, 25 bp, Homo sapien
cgtgatgtcgaatggatgctccttt

SEQ ID NO: 1593396 - DNA, 25 bp, Homo sapien
gttgtaggagttgttgaggtggctc

SEQ ID NO: 1593397 - DNA, 25 bp, Homo sapien
aagttgtaggagttgttgaggtggc

SEQ ID NO: 1593398 - DNA, 25 bp, Homo sapien
ttgtaggagttgttgaggtggctca

SEQ ID NO: 1593399 - DNA, 25 bp, Homo sapien
tgaagttgtaggagttgttgaggtg

SEQ ID NO: 1593400 - DNA, 25 bp, Homo sapien
gagcccctccatcagctggttctgg

SEQ ID NO: 1593401 - DNA, 25 bp, Homo sapien
gcccctccatcagctggttctgggt

SEQ ID NO: 1593402 - DNA, 25 bp, Homo sapien
gacagagcccctccatcagctggtt

SEQ ID NO: 1593403 - DNA, 25 bp, Homo sapien
gaagggacagagcccctccatcagc

SEQ ID NO: 1593404 - DNA, 25 bp, Homo sapien
ggtgtgcatcttccctcctgccccg

SEQ ID NO: 1593405 - DNA, 25 bp, Homo sapien
gtgtgcatcttccctcctgccccgc

SEQ ID NO: 1593406 - DNA, 25 bp, Homo sapien
tgtgcatcttccctcctgccccgcc

SEQ ID NO: 1593407 - DNA, 25 bp, Homo sapien
gtgcatcttccctcctgccccgcct

SEQ ID NO: 1593408 - DNA, 25 bp, Homo sapien
aatcactgcgggtgttgacttgggc

SEQ ID NO: 1593409 - DNA, 25 bp, Homo sapien
ctgaatcactgcgggtgttgacttg

SEQ ID NO: 1593410 - DNA, 25 bp, Homo sapien
tcactgcgggtgttgacttgggctt

SEQ ID NO: 1593411 - DNA, 25 bp, Homo sapien
gaatcactgcgggtgttgacttggg

SEQ ID NO: 1593412 - DNA, 25 bp, Homo sapien
agccctggtttggagggtgcttccg

SEQ ID NO: 1593413 - DNA, 25 bp, Homo sapien
cgggaaagataaacaacgtcttctg

SEQ ID NO: 1593414 - DNA, 25 bp, Homo sapien
tggcctgtggcttcgggagccctgg

SEQ ID NO: 1593415 - DNA, 25 bp, Homo sapien
ctctccatacttccgcacctggacc

SEQ ID NO: 1593416 - DNA, 25 bp, Homo sapien
gtgcagcagtgcaaacttggttcac

SEQ ID NO: 1593417 - DNA, 25 bp, Homo sapien
gagacaggctcttgatctgtcgtcc

SEQ ID NO: 1593418 - DNA, 25 bp, Homo sapien
gacaggctcttgatctgtcgtccag

SEQ ID NO: 1593419 - DNA, 25 bp, Homo sapien
tccccagctcaggagatcctctcac

SEQ ID NO: 1593420 - DNA, 25 bp, Homo sapien
aaccctctgtatccgggtcttctgc

SEQ ID NO: 1593421 - DNA, 25 bp, Homo sapien
gccctgagacaccaacacccgcgga

SEQ ID NO: 1593422 - DNA, 25 bp, Homo sapien
caacacccgcggagtccctctctcc

SEQ ID NO: 1593423 - DNA, 25 bp, Homo sapien
tccttccttccaacaatcagaagac

SEQ ID NO: 1593424 - DNA, 25 bp, Homo sapien
gcagacgaaggatctgagcgagccc

SEQ ID NO: 1593425 - DNA, 25 bp, Homo sapien
gtgtgggcatcacaccagggaaacg

SEQ ID NO: 1593426 - DNA, 25 bp, Homo sapien
atcagcccaggtgcgtgtgggcatc

SEQ ID NO: 1593427 - DNA, 25 bp, Homo sapien
ggaaacgcagacgaaggatctgagc

SEQ ID NO: 1593428 - DNA, 25 bp, Homo sapien
aggaaactgctactgtttttctgga

SEQ ID NO: 1593429 - DNA, 25 bp, Homo sapien
gaaactgctactgtttttctggaga

SEQ ID NO: 1593430 - DNA, 25 bp, Homo sapien
ggaaactgctactgtttttctggag

SEQ ID NO: 1593431 - DNA, 25 bp, Homo sapien
caggaaactgctactgtttttctgg

SEQ ID NO: 1593432 - DNA, 25 bp, Homo sapien
aggagcgaactctgccagaccgaac

SEQ ID NO: 1593433 - DNA, 25 bp, Homo sapien
gaccgaacccggctgagactgaacc

SEQ ID NO: 1593434 - DNA, 25 bp, Homo sapien
tgaataggagcgaactctgccagac

SEQ ID NO: 1593435 - DNA, 25 bp, Homo sapien
aataggagcgaactctgccagaccg

SEQ ID NO: 1593436 - DNA, 25 bp, Homo sapien
agaaaccgaagctgttcagctggat

SEQ ID NO: 1593437 - DNA, 25 bp, Homo sapien
gagccattggtgtagaaaccgaagc

SEQ ID NO: 1593438 - DNA, 25 bp, Homo sapien
gttcagctggatgtccgctcgcttc

SEQ ID NO: 1593439 - DNA, 25 bp, Homo sapien
agccgcaggacgctcaactccacct

SEQ ID NO: 1593440 - DNA, 25 bp, Homo sapien
gaggcagttcagacctctttccgcc

SEQ ID NO: 1593441 - DNA, 25 bp, Homo sapien
agaggcagttcagacctctttccgc

SEQ ID NO: 1593442 - DNA, 25 bp, Homo sapien
gcagttcagacctctttccgcctgc

SEQ ID NO: 1593443 - DNA, 25 bp, Homo sapien
ggcagttcagacctctttccgcctg

SEQ ID NO: 1593444 - DNA, 25 bp, Homo sapien
cagttgagctcccagcaatatttca

SEQ ID NO: 1593445 - DNA, 25 bp, Homo sapien
tgattccaagaatttaaaggactaa

SEQ ID NO: 1593446 - DNA, 25 bp, Homo sapien
aatcccattaagtgcccagaggacc

SEQ ID NO: 1593447 - DNA, 25 bp, Homo sapien
ccagggtctctagcgccccaaaagt

SEQ ID NO: 1593448 - DNA, 25 bp, Homo sapien
agcagcaccagaagtagccgctgcc

SEQ ID NO: 1593449 - DNA, 25 bp, Homo sapien
cagcaccagaagtagccgctgcccc

SEQ ID NO: 1593450 - DNA, 25 bp, Homo sapien
agctggtggatgcgcccggagcagc

SEQ ID NO: 1593451 - DNA, 25 bp, Homo sapien
tccgcggggctcccgcggccgagcc

SEQ ID NO: 1593452 - DNA, 25 bp, Homo sapien
tgagaacctcagtgtccgtgtatgt

SEQ ID NO: 1593453 - DNA, 25 bp, Homo sapien
cagaatttgtcatcgcttcagggat

SEQ ID NO: 1593454 - DNA, 25 bp, Homo sapien
tgaatgactttgcaggccagcggga

SEQ ID NO: 1593455 - DNA, 25 bp, Homo sapien
gagctgaccaagtactcacaagaga

SEQ ID NO: 1593456 - DNA, 25 bp, Homo sapien
tgaaatatctcagacgggtgcagag

SEQ ID NO: 1593457 - DNA, 25 bp, Homo sapien
gagatcagtaagtcggtcaaaccga

SEQ ID NO: 1593458 - DNA, 25 bp, Homo sapien
cccttggccatactgagcgagatca

SEQ ID NO: 1593459 - DNA, 25 bp, Homo sapien
tgtgcatggcttcgctgtcaagaac

SEQ ID NO: 1593460 - DNA, 25 bp, Homo sapien
tattagaactggaatgaagttggca

SEQ ID NO: 1593461 - DNA, 25 bp, Homo sapien
agttcctgagtttctacggtggagg

SEQ ID NO: 1593462 - DNA, 25 bp, Homo sapien
cattcagaactctctagttcctgag

SEQ ID NO: 1593463 - DNA, 25 bp, Homo sapien
tgcatgttctagagtcacgacaaac

SEQ ID NO: 1593464 - DNA, 25 bp, Homo sapien
agagatgaggtctcaccatgttgcc

SEQ ID NO: 1593465 - DNA, 25 bp, Homo sapien
atgaggtctcaccatgttgccctgg

SEQ ID NO: 1593466 - DNA, 25 bp, Homo sapien
agatgaggtctcaccatgttgccct

SEQ ID NO: 1593467 - DNA, 25 bp, Homo sapien
tatttttcagtttttgtagagatga

SEQ ID NO: 1593468 - DNA, 25 bp, Homo sapien
tgttaaaggccgacacagaggtgaa

SEQ ID NO: 1593469 - DNA, 25 bp, Homo sapien
caggattccacctgaggcgcgagga

SEQ ID NO: 1593470 - DNA, 25 bp, Homo sapien
caactgctagaaatcacggctttta

SEQ ID NO: 1593471 - DNA, 25 bp, Homo sapien
gatgccagatctgcaggtcacatgt

SEQ ID NO: 1593472 - DNA, 25 bp, Homo sapien
agcctccgcacgaagccggtggtca

SEQ ID NO: 1593473 - DNA, 25 bp, Homo sapien
tccaggcgctgcgacaggacgccga

SEQ ID NO: 1593474 - DNA, 25 bp, Homo sapien
ttctcaaagcgttcagcgcgcggag

SEQ ID NO: 1593475 - DNA, 25 bp, Homo sapien
cctcagctccgggttaggccggaat

SEQ ID NO: 1593476 - DNA, 25 bp, Homo sapien
tgggctgccaccttgcggaatttgg

SEQ ID NO: 1593477 - DNA, 25 bp, Homo sapien
gtgcgtcccggaccatgtgacgcgc

SEQ ID NO: 1593478 - DNA, 25 bp, Homo sapien
gtgcagggtgcgcaacagccgctca

SEQ ID NO: 1593479 - DNA, 25 bp, Homo sapien
tccagtaggcgaaccatgggtgcca

SEQ ID NO: 1593480 - DNA, 25 bp, Homo sapien
ctccttcggagctggcgccacgtgt

SEQ ID NO: 1593481 - DNA, 25 bp, Homo sapien
tggcgccacgtgtgctccaaccggg

SEQ ID NO: 1593482 - DNA, 25 bp, Homo sapien
agcgcagcctccgtgtggctccttc

SEQ ID NO: 1593483 - DNA, 25 bp, Homo sapien
agagcccgcatcagcggcttcagct

SEQ ID NO: 1593484 - DNA, 25 bp, Homo sapien
agagatctgagcacgcctcctctcc

SEQ ID NO: 1593485 - DNA, 25 bp, Homo sapien
gagatctgagcacgcctcctctcca

SEQ ID NO: 1593486 - DNA, 25 bp, Homo sapien
agcagggcgcccatgactgcagcca

SEQ ID NO: 1593487 - DNA, 25 bp, Homo sapien
cccggccagcgccagtgtctgatgc

SEQ ID NO: 1593488 - DNA, 25 bp, Homo sapien
gcatgagcagggcgcccatgactgc

SEQ ID NO: 1593489 - DNA, 25 bp, Homo sapien
agtcccctcagtgcggctgcgcgct

SEQ ID NO: 1593490 - DNA, 25 bp, Homo sapien
ccaacctcaagtggtgtccatgggg

SEQ ID NO: 1593491 - DNA, 25 bp, Homo sapien
tccaacctcaagtggtgtccatggg

SEQ ID NO: 1593492 - DNA, 25 bp, Homo sapien
tctctggtcactcccaggaggcctg

SEQ ID NO: 1593493 - DNA, 25 bp, Homo sapien
tctggtcactcccaggaggcctgtg

SEQ ID NO: 1593494 - DNA, 25 bp, Homo sapien
ctggtcactcccaggaggcctgtgg

SEQ ID NO: 1593495 - DNA, 25 bp, Homo sapien
tgatctctggtcactcccaggaggc

SEQ ID NO: 1593496 - DNA, 25 bp, Homo sapien
caggaacaggccacggagggtatgc

SEQ ID NO: 1593497 - DNA, 25 bp, Homo sapien
ccacggagggtatgcaggacttggg

SEQ ID NO: 1593498 - DNA, 25 bp, Homo sapien
ggcagtctaccaatagcaggtgaag

SEQ ID NO: 1593499 - DNA, 25 bp, Homo sapien
aacaggccacggagggtatgcagga

SEQ ID NO: 1593500 - DNA, 25 bp, Homo sapien
ttgaagctgcccatcggaggccctg

SEQ ID NO: 1593501 - DNA, 25 bp, Homo sapien
ggcttcgttggtgccttggcttgaa

SEQ ID NO: 1593502 - DNA, 25 bp, Homo sapien
cgttcagaggcatcaggcagttcga

SEQ ID NO: 1593503 - DNA, 25 bp, Homo sapien
gagactgtcggcaacagttcccagg

SEQ ID NO: 1593504 - DNA, 25 bp, Homo sapien
aagcctgagggttcgaacaactgca

SEQ ID NO: 1593505 - DNA, 25 bp, Homo sapien
gagaatgttcccgtcactggtggaa

SEQ ID NO: 1593506 - DNA, 25 bp, Homo sapien
tgtggtcagaacaggtacagctcct

SEQ ID NO: 1593507 - DNA, 25 bp, Homo sapien
tgatgtatcctagcactccgtgcag

SEQ ID NO: 1593508 - DNA, 25 bp, Homo sapien
gaccgccccatatgtgccaaatctg

SEQ ID NO: 1593509 - DNA, 25 bp, Homo sapien
gggtcttctcttgaccgccccatat

SEQ ID NO: 1593510 - DNA, 25 bp, Homo sapien
gtcttctcttgaccgccccatatgt

SEQ ID NO: 1593511 - DNA, 25 bp, Homo sapien
tcttgaccgccccatatgtgccaaa

SEQ ID NO: 1593512 - DNA, 25 bp, Homo sapien
tgggcgcctgcctgtcatataactg

SEQ ID NO: 1593513 - DNA, 25 bp, Homo sapien
gagaggctctatccgagctgggcca

SEQ ID NO: 1593514 - DNA, 25 bp, Homo sapien
taactgtgaaccagagccggtatgc

SEQ ID NO: 1593515 - DNA, 25 bp, Homo sapien
cctcaaaatggagggctgagccccg

SEQ ID NO: 1593516 - DNA, 25 bp, Homo sapien
gggaactttcacaccaagttctgtc

SEQ ID NO: 1593517 - DNA, 25 bp, Homo sapien
cggggaactttcacaccaagttctg

SEQ ID NO: 1593518 - DNA, 25 bp, Homo sapien
gagaggtcaaatgtcctgcccaagg

SEQ ID NO: 1593519 - DNA, 25 bp, Homo sapien
tgctcagggtcccagaatttttggg

SEQ ID NO: 1593520 - DNA, 25 bp, Homo sapien
tgaacctagggtgtctgggtctcaa

SEQ ID NO: 1593521 - DNA, 25 bp, Homo sapien
cctatgttaaagatcgggagactga

SEQ ID NO: 1593522 - DNA, 25 bp, Homo sapien
gcctcacatttagagggaaatacca

SEQ ID NO: 1593523 - DNA, 25 bp, Homo sapien
ggacccaggaatcctcagcaagggt

SEQ ID NO: 1593524 - DNA, 25 bp, Homo sapien
gacggccagagccaagagtagtttg

SEQ ID NO: 1593525 - DNA, 25 bp, Homo sapien
ttggcactaagtccctcatccaggg

SEQ ID NO: 1593526 - DNA, 25 bp, Homo sapien
ctggcgggacaggaggccgtggtac

SEQ ID NO: 1593527 - DNA, 25 bp, Homo sapien
aaggttggccagcaaggtcttctcc

SEQ ID NO: 1593528 - DNA, 25 bp, Homo sapien
ggttggccagcaaggtcttctccat

SEQ ID NO: 1593529 - DNA, 25 bp, Homo sapien
caaggttggccagcaaggtcttctc

SEQ ID NO: 1593530 - DNA, 25 bp, Homo sapien
aggttggccagcaaggtcttctcca

SEQ ID NO: 1593531 - DNA, 25 bp, Homo sapien
tgcactttcaacaggcctcagtctt

SEQ ID NO: 1593532 - DNA, 25 bp, Homo sapien
ctcttgggaacagagggtgccaggg

SEQ ID NO: 1593533 - DNA, 25 bp, Homo sapien
gccagggctgagctctgcactttca

SEQ ID NO: 1593534 - DNA, 25 bp, Homo sapien
ggagctcttgggaacagagggtgcc

SEQ ID NO: 1593535 - DNA, 25 bp, Homo sapien
gatgtcaccatcgtgcctgttccaa

SEQ ID NO: 1593536 - DNA, 25 bp, Homo sapien
aaagagagaggtcttatgtgttgcc

SEQ ID NO: 1593537 - DNA, 25 bp, Homo sapien
taggccctagagacatagcattgaa

SEQ ID NO: 1593538 - DNA, 25 bp, Homo sapien
taattagccctgcttgagtgtctgg

SEQ ID NO: 1593539 - DNA, 25 bp, Homo sapien
ccaggcggaagctgaggctccgcgg

SEQ ID NO: 1593540 - DNA, 25 bp, Homo sapien
gtccaggcggaagctgaggctccgc

SEQ ID NO: 1593541 - DNA, 25 bp, Homo sapien
tgggtccaggcggaagctgaggctc

SEQ ID NO: 1593542 - DNA, 25 bp, Homo sapien
aggctgggtccaggcggaagctgag

SEQ ID NO: 1593543 - DNA, 25 bp, Homo sapien
cggtctggtattggtacagtcagag

SEQ ID NO: 1593544 - DNA, 25 bp, Homo sapien
tggtacagtcagagggtaggggcat

SEQ ID NO: 1593545 - DNA, 25 bp, Homo sapien
tctggtattggtacagtcagagggt

SEQ ID NO: 1593546 - DNA, 25 bp, Homo sapien
ctggtattggtacagtcagagggta

SEQ ID NO: 1593547 - DNA, 25 bp, Homo sapien
ggtattccgcatattcagaaaaact

SEQ ID NO: 1593548 - DNA, 25 bp, Homo sapien
tttggtattccgcatattcagaaaa

SEQ ID NO: 1593549 - DNA, 25 bp, Homo sapien
atttttggtattccgcatattcaga

SEQ ID NO: 1593550 - DNA, 25 bp, Homo sapien
tctctagtaacaatctatataaaaa

SEQ ID NO: 1593551 - DNA, 25 bp, Homo sapien
tggggaggacaatcctgtcttttcc

SEQ ID NO: 1593552 - DNA, 25 bp, Homo sapien
tgttgggcgtgtggacatcatccat

SEQ ID NO: 1593553 - DNA, 25 bp, Homo sapien
atggggaggacaatcctgtcttttc

SEQ ID NO: 1593554 - DNA, 25 bp, Homo sapien
gggtgttgggcgtgtggacatcatc

SEQ ID NO: 1593555 - DNA, 25 bp, Homo sapien
ccctgatctgatctatgcatacgat

SEQ ID NO: 1593556 - DNA, 25 bp, Homo sapien
tgacaaccagattggcccataggcc

SEQ ID NO: 1593557 - DNA, 25 bp, Homo sapien
ggacagtgctaatctgtgtcaggga

SEQ ID NO: 1593558 - DNA, 25 bp, Homo sapien
tctgtagagggctcgttagtaacta

SEQ ID NO: 1593559 - DNA, 25 bp, Homo sapien
acccttgtggtctcatatgtctccg

SEQ ID NO: 1593560 - DNA, 25 bp, Homo sapien
ttacccttgtggtctcatatgtctc

SEQ ID NO: 1593561 - DNA, 25 bp, Homo sapien
tacccttgtggtctcatatgtctcc

SEQ ID NO: 1593562 - DNA, 25 bp, Homo sapien
tgttgaattatgtgaatgtggagtg

SEQ ID NO: 1593563 - DNA, 25 bp, Homo sapien
aaattgttgaattatgtgaatgtgg

SEQ ID NO: 1593564 - DNA, 25 bp, Homo sapien
acaccctctttaatactgatccata

SEQ ID NO: 1593565 - DNA, 25 bp, Homo sapien
tgcaacaccctctttaatactgatc

SEQ ID NO: 1593566 - DNA, 25 bp, Homo sapien
tgtagacaaacggaaaggagcggta

SEQ ID NO: 1593567 - DNA, 25 bp, Homo sapien
gcagagacgagatgaacctgtggct

SEQ ID NO: 1593568 - DNA, 25 bp, Homo sapien
gaactatgagctgaatccagatgcc

SEQ ID NO: 1593569 - DNA, 25 bp, Homo sapien
gaatgagcctagacttttcacagga

SEQ ID NO: 1593570 - DNA, 25 bp, Homo sapien
taatacaggaacctaatgcaatttc

SEQ ID NO: 1593571 - DNA, 25 bp, Homo sapien
tgtcggattccaataaagcactcag

SEQ ID NO: 1593572 - DNA, 25 bp, Homo sapien
ccagaaacttcagctgcataataca

SEQ ID NO: 1593573 - DNA, 25 bp, Homo sapien
aaccagaaagcttctagaggcatga

SEQ ID NO: 1593574 - DNA, 25 bp, Homo sapien
tttgggtagtagagcgagacatctc

SEQ ID NO: 1593575 - DNA, 25 bp, Homo sapien
tcagtttctacccctttccgcatcc

SEQ ID NO: 1593576 - DNA, 25 bp, Homo sapien
tttggtttgggtagtagagcgagac

SEQ ID NO: 1593577 - DNA, 25 bp, Homo sapien
ctttccgcatcccactaaaccactt

SEQ ID NO: 1593578 - DNA, 25 bp, Homo sapien
ggactaggctgatgacagacaaaat

SEQ ID NO: 1593579 - DNA, 25 bp, Homo sapien
tcaattagactttgggactaggctg

SEQ ID NO: 1593580 - DNA, 25 bp, Homo sapien
actttgggactaggctgatgacaga

SEQ ID NO: 1593581 - DNA, 25 bp, Homo sapien
tagactttgggactaggctgatgac

SEQ ID NO: 1593582 - DNA, 25 bp, Homo sapien
gattgatccaatcgtcttccctact

SEQ ID NO: 1593583 - DNA, 25 bp, Homo sapien
ctggcgattaaggagacagtgtacc

SEQ ID NO: 1593584 - DNA, 25 bp, Homo sapien
aaagagcaacactccctgaagggtg

SEQ ID NO: 1593585 - DNA, 25 bp, Homo sapien
tgaatgagtatgcaatgattgatcc

SEQ ID NO: 1593586 - DNA, 25 bp, Homo sapien
cttggaagtagaacaccaggtttat

SEQ ID NO: 1593587 - DNA, 25 bp, Homo sapien
tggtggaaacttctttattgaggga

SEQ ID NO: 1593588 - DNA, 25 bp, Homo sapien
tggaaacttctttattgagggagga

SEQ ID NO: 1593589 - DNA, 25 bp, Homo sapien
cctgaatggtggaaacttctttatt

SEQ ID NO: 1593590 - DNA, 25 bp, Homo sapien
ccatgaagctccagatgaatccttt

SEQ ID NO: 1593591 - DNA, 25 bp, Homo sapien
taatgactgctactggccccatgaa

SEQ ID NO: 1593592 - DNA, 25 bp, Homo sapien
ccagatgaatcctttatcaagcttg

SEQ ID NO: 1593593 - DNA, 25 bp, Homo sapien
gaatcctttatcaagcttgagccaa

SEQ ID NO: 1593594 - DNA, 25 bp, Homo sapien
tctgcccgtgctggtgtagttggcc

SEQ ID NO: 1593595 - DNA, 25 bp, Homo sapien
gggtccaactattgctgacacagca

SEQ ID NO: 1593596 - DNA, 25 bp, Homo sapien
tacagggtacatgaacctcttcttg

SEQ ID NO: 1593597 - DNA, 25 bp, Homo sapien
tgggatcccgtagcctacagggtac

SEQ ID NO: 1593598 - DNA, 25 bp, Homo sapien
ttctggatgggccggcacaggagga

SEQ ID NO: 1593599 - DNA, 25 bp, Homo sapien
cctgggtgatcacggtcagcacagg

SEQ ID NO: 1593600 - DNA, 25 bp, Homo sapien
tcagttctgttgatgcccgtcagga

SEQ ID NO: 1593601 - DNA, 25 bp, Homo sapien
tcagccccacctgggtgatcacggt

SEQ ID NO: 1593602 - DNA, 25 bp, Homo sapien
tctgatccctcccagtagacacaga

SEQ ID NO: 1593603 - DNA, 25 bp, Homo sapien
gctggacagatggaagcacttgcat

SEQ ID NO: 1593604 - DNA, 25 bp, Homo sapien
taagaaccgttgctgtgcacatgag

SEQ ID NO: 1593605 - DNA, 25 bp, Homo sapien
catgagagcagccctccgtggacca

SEQ ID NO: 1593606 - DNA, 25 bp, Homo sapien
tatggcgaaaagtcaggaacacagg

SEQ ID NO: 1593607 - DNA, 25 bp, Homo sapien
tgccgctcacaacgtaagagttcag

SEQ ID NO: 1593608 - DNA, 25 bp, Homo sapien
tgataagtgatagggcaactgcagt

SEQ ID NO: 1593609 - DNA, 25 bp, Homo sapien
tcctgcatcccttttcgtttactaa

SEQ ID NO: 1593610 - DNA, 25 bp, Homo sapien
tcattgcacctcttggtttcataga

SEQ ID NO: 1593611 - DNA, 25 bp, Homo sapien
ttaaagcatcagcacagttgatatc

SEQ ID NO: 1593612 - DNA, 25 bp, Homo sapien
tccttttaaagcatcagcacagttg

SEQ ID NO: 1593613 - DNA, 25 bp, Homo sapien
tgtctcattgcacctcttggtttca

SEQ ID NO: 1593614 - DNA, 25 bp, Homo sapien
tgagtagcccttcttgcaaagtcct

SEQ ID NO: 1593615 - DNA, 25 bp, Homo sapien
ggagaagcaaaactcgcattccaga

SEQ ID NO: 1593616 - DNA, 25 bp, Homo sapien
cagatgctcaactccacgctttgaa

SEQ ID NO: 1593617 - DNA, 25 bp, Homo sapien
gcaaaactcgcattccagatgctca

SEQ ID NO: 1593618 - DNA, 25 bp, Homo sapien
caaatccaggcttcaccccactcac

SEQ ID NO: 1593619 - DNA, 25 bp, Homo sapien
gctgtttcccaaatccaggcttcac

SEQ ID NO: 1593620 - DNA, 25 bp, Homo sapien
cccaaatccaggcttcaccccactc

SEQ ID NO: 1593621 - DNA, 25 bp, Homo sapien
cagctgtttcccaaatccaggcttc

SEQ ID NO: 1593622 - DNA, 25 bp, Homo sapien
tgactgtgtcgtcccttgactattg

SEQ ID NO: 1593623 - DNA, 25 bp, Homo sapien
gtttgactgtgtcgtcccttgacta

SEQ ID NO: 1593624 - DNA, 25 bp, Homo sapien
tgtgtcgtcccttgactattgttct

SEQ ID NO: 1593625 - DNA, 25 bp, Homo sapien
cacgtttgactgtgtcgtcccttga

SEQ ID NO: 1593626 - DNA, 25 bp, Homo sapien
tttattcctacaatatgctttatac

SEQ ID NO: 1593627 - DNA, 25 bp, Homo sapien
tgccagcccggtttcacattcatta

SEQ ID NO: 1593628 - DNA, 25 bp, Homo sapien
tatattttaccaaacagctacagat

SEQ ID NO: 1593629 - DNA, 25 bp, Homo sapien
taataccagccagaaagttgaataa

SEQ ID NO: 1593630 - DNA, 25 bp, Homo sapien
aaagtatgtcctgccagacctggcc

SEQ ID NO: 1593631 - DNA, 25 bp, Homo sapien
cttcacacttctcagaggaatcatg

SEQ ID NO: 1593632 - DNA, 25 bp, Homo sapien
cagctggcatatttagggcatggag

SEQ ID NO: 1593633 - DNA, 25 bp, Homo sapien
agacctggcccgaaagccatcttca

SEQ ID NO: 1593634 - DNA, 25 bp, Homo sapien
ggcagagccagtaagacagtgagac

SEQ ID NO: 1593635 - DNA, 25 bp, Homo sapien
ctggcagagccagtaagacagtgag

SEQ ID NO: 1593636 - DNA, 25 bp, Homo sapien
tggcagagccagtaagacagtgaga

SEQ ID NO: 1593637 - DNA, 25 bp, Homo sapien
cctggcagagccagtaagacagtga

SEQ ID NO: 1593638 - DNA, 25 bp, Homo sapien
gcaggaccaggaggaacctgctccc

SEQ ID NO: 1593639 - DNA, 25 bp, Homo sapien
agagcaggaccaggaggaacctgct

SEQ ID NO: 1593640 - DNA, 25 bp, Homo sapien
ctgagagcaggaccaggaggaacct

SEQ ID NO: 1593641 - DNA, 25 bp, Homo sapien
agcaggaccaggaggaacctgctcc

SEQ ID NO: 1593642 - DNA, 25 bp, Homo sapien
cactgagacgccgggaacaatctct

SEQ ID NO: 1593643 - DNA, 25 bp, Homo sapien
ctgagacgccgggaacaatctctct

SEQ ID NO: 1593644 - DNA, 25 bp, Homo sapien
gcactgagacgccgggaacaatctc

SEQ ID NO: 1593645 - DNA, 25 bp, Homo sapien
agcactgagacgccgggaacaatct

SEQ ID NO: 1593646 - DNA, 25 bp, Homo sapien
ccagtacaagtttaatattcattag

SEQ ID NO: 1593647 - DNA, 25 bp, Homo sapien
ttttccagtacaagtttaatattca

SEQ ID NO: 1593648 - DNA, 25 bp, Homo sapien
catgtgatgggggagaatggcggca

SEQ ID NO: 1593649 - DNA, 25 bp, Homo sapien
agaatggcggcaagtagtaggatct

SEQ ID NO: 1593650 - DNA, 25 bp, Homo sapien
gagcgctttccagactccgggtgat

SEQ ID NO: 1593651 - DNA, 25 bp, Homo sapien
tttttcaacaacgatgggacatggt

SEQ ID NO: 1593652 - DNA, 25 bp, Homo sapien
cagtatggccttagttagcgtctcc

SEQ ID NO: 1593653 - DNA, 25 bp, Homo sapien
tgttaatccataggcgccccatgat

SEQ ID NO: 1593654 - DNA, 25 bp, Homo sapien
tctggaagcctcactgcatggaata

SEQ ID NO: 1593655 - DNA, 25 bp, Homo sapien
gctgtataagaggagctcccaccga

SEQ ID NO: 1593656 - DNA, 25 bp, Homo sapien
caaggaatgggatcgcctgtcacca

SEQ ID NO: 1593657 - DNA, 25 bp, Homo sapien
acagtattagtgtcgtcctcagccc

SEQ ID NO: 1593658 - DNA, 25 bp, Homo sapien
ccagtgagaatgtgctgggccagct

SEQ ID NO: 1593659 - DNA, 25 bp, Homo sapien
gatgaccttgaggagcctatgatca

SEQ ID NO: 1593660 - DNA, 25 bp, Homo sapien
cacagccatcttggtcccagtgaga

SEQ ID NO: 1593661 - DNA, 25 bp, Homo sapien
tgatcatcagtaagggactcctcgg

SEQ ID NO: 1593662 - DNA, 25 bp, Homo sapien
gaacacgaatgacacggctggaggt

SEQ ID NO: 1593663 - DNA, 25 bp, Homo sapien
tcttcctccaacgtggcaagatggc

SEQ ID NO: 1593664 - DNA, 25 bp, Homo sapien
tgcacccaggaaccggatgatgtca

SEQ ID NO: 1593665 - DNA, 25 bp, Homo sapien
tccatgccagggacaacgttcgagg

SEQ ID NO: 1593666 - DNA, 25 bp, Homo sapien
tgatgatcataggctcctcaaggtc

SEQ ID NO: 1593667 - DNA, 25 bp, Homo sapien
cagccagggcagctttgcagaagtc

SEQ ID NO: 1593668 - DNA, 25 bp, Homo sapien
tgatcataggctcctcaaggtcatc

SEQ ID NO: 1593669 - DNA, 25 bp, Homo sapien
gccagggcagctttgcagaagtcaa

SEQ ID NO: 1593670 - DNA, 25 bp, Homo sapien
gagctgacaacccattcctggggtt

SEQ ID NO: 1593671 - DNA, 25 bp, Homo sapien
tcctggcctgtctccggatatctgc

SEQ ID NO: 1593672 - DNA, 25 bp, Homo sapien
tgccacagctggaaaccgcccaggg

SEQ ID NO: 1593673 - DNA, 25 bp, Homo sapien
tggctttcttcaccctcctggcctg

SEQ ID NO: 1593674 - DNA, 25 bp, Homo sapien
tgcagtctccggtaggcgcagagtt

SEQ ID NO: 1593675 - DNA, 25 bp, Homo sapien
gccgtccccggtgcaaggatactta

SEQ ID NO: 1593676 - DNA, 25 bp, Homo sapien
aatgcagtggacttgaaccttctcc

SEQ ID NO: 1593677 - DNA, 25 bp, Homo sapien
ttaagacgctctccaaatgcagtgg

SEQ ID NO: 1593678 - DNA, 25 bp, Homo sapien
tcgtttcttctgtaaagcccagggc

SEQ ID NO: 1593679 - DNA, 25 bp, Homo sapien
tggatttctcgtttcttctgtaaag

SEQ ID NO: 1593680 - DNA, 25 bp, Homo sapien
gtggatttctcgtttcttctgtaaa

SEQ ID NO: 1593681 - DNA, 25 bp, Homo sapien
ttctcgtttcttctgtaaagcccag

SEQ ID NO: 1593682 - DNA, 25 bp, Homo sapien
aggcaggcttggaaaagaggtgaac

SEQ ID NO: 1593683 - DNA, 25 bp, Homo sapien
cttggaaaagaggtgaacgcaggtt

SEQ ID NO: 1593684 - DNA, 25 bp, Homo sapien
tggaaaagaggtgaacgcaggttct

SEQ ID NO: 1593685 - DNA, 25 bp, Homo sapien
gaaaagaggtgaacgcaggttctcc

SEQ ID NO: 1593686 - DNA, 25 bp, Homo sapien
tgcagtctccggtaggcgcagagtt

SEQ ID NO: 1593687 - DNA, 25 bp, Homo sapien
gccgtccccggtgcaaggatactta

SEQ ID NO: 1593688 - DNA, 25 bp, Homo sapien
aatgcagtggacttgaaccttctcc

SEQ ID NO: 1593689 - DNA, 25 bp, Homo sapien
ttaagacgctctccaaatgcagtgg

SEQ ID NO: 1593690 - DNA, 25 bp, Homo sapien
gtggatttctcgtttcttctgtaaa

SEQ ID NO: 1593691 - DNA, 25 bp, Homo sapien
tcgtttcttctgtaaagcccagggc

SEQ ID NO: 1593692 - DNA, 25 bp, Homo sapien
tggatttctcgtttcttctgtaaag

SEQ ID NO: 1593693 - DNA, 25 bp, Homo sapien
ttctcgtttcttctgtaaagcccag

SEQ ID NO: 1593694 - DNA, 25 bp, Homo sapien
ttccggaggccggtgacaaggatca

SEQ ID NO: 1593695 - DNA, 25 bp, Homo sapien
actctgcgcctaccggagactgcag

SEQ ID NO: 1593696 - DNA, 25 bp, Homo sapien
tcagacgcagaaaaggggacgagca

SEQ ID NO: 1593697 - DNA, 25 bp, Homo sapien
tggagaagccgcagcaactctgcgc

SEQ ID NO: 1593698 - DNA, 25 bp, Homo sapien
taggaatgaggatgggcattaaaag

SEQ ID NO: 1593699 - DNA, 25 bp, Homo sapien
caattcagagtaggaatgaggatgg

SEQ ID NO: 1593700 - DNA, 25 bp, Homo sapien
atgaggatgggcattaaaagaaagg

SEQ ID NO: 1593701 - DNA, 25 bp, Homo sapien
gggaaaagtgtgacaattcagagta

SEQ ID NO: 1593702 - DNA, 25 bp, Homo sapien
tggctttcttcaccctcctggcctg

SEQ ID NO: 1593703 - DNA, 25 bp, Homo sapien
gagctgacaacccattcctggggtt

SEQ ID NO: 1593704 - DNA, 25 bp, Homo sapien
tcctggcctgtctccggatatctgc

SEQ ID NO: 1593705 - DNA, 25 bp, Homo sapien
tgccacagctggaaaccgcccaggg

SEQ ID NO: 1593706 - DNA, 25 bp, Homo sapien
tgcagtctccggtaggcgcagagtt

SEQ ID NO: 1593707 - DNA, 25 bp, Homo sapien
gccgtccccggtgcaaggatactta

SEQ ID NO: 1593708 - DNA, 25 bp, Homo sapien
aatgcagtggacttgaaccttctcc

SEQ ID NO: 1593709 - DNA, 25 bp, Homo sapien
ttaagacgctctccaaatgcagtgg

SEQ ID NO: 1593710 - DNA, 25 bp, Homo sapien
gtggatttctcgtttcttctgtaaa

SEQ ID NO: 1593711 - DNA, 25 bp, Homo sapien
tcgtttcttctgtaaagcccagggc

SEQ ID NO: 1593712 - DNA, 25 bp, Homo sapien
tggatttctcgtttcttctgtaaag

SEQ ID NO: 1593713 - DNA, 25 bp, Homo sapien
ttctcgtttcttctgtaaagcccag

SEQ ID NO: 1593714 - DNA, 25 bp, Homo sapien
agaacaggtgggctcggaaaagagg

SEQ ID NO: 1593715 - DNA, 25 bp, Homo sapien
caggtgggctcggaaaagaggtgaa

SEQ ID NO: 1593716 - DNA, 25 bp, Homo sapien
cagaacaggtgggctcggaaaagag

SEQ ID NO: 1593717 - DNA, 25 bp, Homo sapien
aacaggtgggctcggaaaagaggtg

SEQ ID NO: 1593718 - DNA, 25 bp, Homo sapien
agccgtagagtttctcttgctgacc

SEQ ID NO: 1593719 - DNA, 25 bp, Homo sapien
agagtttctcttgctgaccccactc

SEQ ID NO: 1593720 - DNA, 25 bp, Homo sapien
tttctcttgctgaccccactcttga

SEQ ID NO: 1593721 - DNA, 25 bp, Homo sapien
gtttctcttgctgaccccactcttg

SEQ ID NO: 1593722 - DNA, 25 bp, Homo sapien
gagaatacataatggagagaaatcc

SEQ ID NO: 1593723 - DNA, 25 bp, Homo sapien
aattcacaggagaatacataatgga

SEQ ID NO: 1593724 - DNA, 25 bp, Homo sapien
acataatggagagaaatcctatgag

SEQ ID NO: 1593725 - DNA, 25 bp, Homo sapien
cacaggagaatacataatggagaga

SEQ ID NO: 1593726 - DNA, 25 bp, Homo sapien
tacctttctgtgcatacgagaatgc

SEQ ID NO: 1593727 - DNA, 25 bp, Homo sapien
tctctcatccgttaagaaacacatg

SEQ ID NO: 1593728 - DNA, 25 bp, Homo sapien
gatatctcaagaggttacagtccag

SEQ ID NO: 1593729 - DNA, 25 bp, Homo sapien
agtccagatgtcagcagaactgtaa

SEQ ID NO: 1593730 - DNA, 25 bp, Homo sapien
ccacaggaggtatgaacagtagaca

SEQ ID NO: 1593731 - DNA, 25 bp, Homo sapien
catttcggagatcatacaacagagg

SEQ ID NO: 1593732 - DNA, 25 bp, Homo sapien
cacaggttaactcactctagagaga

SEQ ID NO: 1593733 - DNA, 25 bp, Homo sapien
gagtagcattcaatcacccacaggt

SEQ ID NO: 1593734 - DNA, 25 bp, Homo sapien
ctgtatttgtttctctcgacctgac

SEQ ID NO: 1593735 - DNA, 25 bp, Homo sapien
gatggacatacgtactcaaactgtg

SEQ ID NO: 1593736 - DNA, 25 bp, Homo sapien
tagtgatagaggtatattaaagtct

SEQ ID NO: 1593737 - DNA, 25 bp, Homo sapien
tacaggatggacatacgtactcaaa

SEQ ID NO: 1593738 - DNA, 25 bp, Homo sapien
ccgatgaagcctaacatagttgcca

SEQ ID NO: 1593739 - DNA, 25 bp, Homo sapien
catgcactgatactccccgatgaag

SEQ ID NO: 1593740 - DNA, 25 bp, Homo sapien
gggtggtgtccatgcactgatactc

SEQ ID NO: 1593741 - DNA, 25 bp, Homo sapien
acatagttgccaacaccagtgtttc

SEQ ID NO: 1593742 - DNA, 25 bp, Homo sapien
tgggttctcacagattttaggcagt

SEQ ID NO: 1593743 - DNA, 25 bp, Homo sapien
caagtggaggcagtttcagcgtttt

SEQ ID NO: 1593744 - DNA, 25 bp, Homo sapien
tgtagctaggattgtaaaccgcacc

SEQ ID NO: 1593745 - DNA, 25 bp, Homo sapien
tatgaaacacgtggaaatttgcact

SEQ ID NO: 1593746 - DNA, 25 bp, Homo sapien
taagactagagattatggaagcccc

SEQ ID NO: 1593747 - DNA, 25 bp, Homo sapien
taatacaggaggtgatacagcccag

SEQ ID NO: 1593748 - DNA, 25 bp, Homo sapien
caagttgttctaaacccggccatga

SEQ ID NO: 1593749 - DNA, 25 bp, Homo sapien
gatgcccctcaacactaaagaatgg

SEQ ID NO: 1593750 - DNA, 25 bp, Homo sapien
tgtttgctttttggaggacttgcat

SEQ ID NO: 1593751 - DNA, 25 bp, Homo sapien
tggtgtttgctttttggaggacttg

SEQ ID NO: 1593752 - DNA, 25 bp, Homo sapien
ctgtttatcctcacattggaattct

SEQ ID NO: 1593753 - DNA, 25 bp, Homo sapien
gtttatcctcacattggaattctgt

SEQ ID NO: 1593754 - DNA, 25 bp, Homo sapien
atggaagtttcataatcgatggcct

SEQ ID NO: 1593755 - DNA, 25 bp, Homo sapien
tcacagattacagtgagcaatggaa

SEQ ID NO: 1593756 - DNA, 25 bp, Homo sapien
cttctctggaatgtaaagttgactc

SEQ ID NO: 1593757 - DNA, 25 bp, Homo sapien
ataatcgatggccttcactttcttc

SEQ ID NO: 1593758 - DNA, 25 bp, Homo sapien
gaatccaagtggctcctctgcacag

SEQ ID NO: 1593759 - DNA, 25 bp, Homo sapien
gggctttcaaggaatccaagtggct

SEQ ID NO: 1593760 - DNA, 25 bp, Homo sapien
tggccagggctttcaaggaatccaa

SEQ ID NO: 1593761 - DNA, 25 bp, Homo sapien
tttcaaggaatccaagtggctcctc

SEQ ID NO: 1593762 - DNA, 25 bp, Homo sapien
gctgccaccacagccgataagcagt

SEQ ID NO: 1593763 - DNA, 25 bp, Homo sapien
gggaagcagaatttacgctgccacc

SEQ ID NO: 1593764 - DNA, 25 bp, Homo sapien
gcagtagcatcaatttcttggagaa

SEQ ID NO: 1593765 - DNA, 25 bp, Homo sapien
tcttggagaacagggaacttggagg

SEQ ID NO: 1593766 - DNA, 25 bp, Homo sapien
tcccaggatgacattgaaaatactt

SEQ ID NO: 1593767 - DNA, 25 bp, Homo sapien
aaatacttaacatatgagtttcccg

SEQ ID NO: 1593768 - DNA, 25 bp, Homo sapien
tgggacaggtctccactcccaggat

SEQ ID NO: 1593769 - DNA, 25 bp, Homo sapien
tacttaacatatgagtttcccgcat

SEQ ID NO: 1593770 - DNA, 25 bp, Homo sapien
tgtttctgaagagcctaaggtgtca

SEQ ID NO: 1593771 - DNA, 25 bp, Homo sapien
gaccaagagccccagatttgtgatc

SEQ ID NO: 1593772 - DNA, 25 bp, Homo sapien
tggcccgcacccagatagaaatttg

SEQ ID NO: 1593773 - DNA, 25 bp, Homo sapien
cacatttgatcctgcgttgccaacg

SEQ ID NO: 1593774 - DNA, 25 bp, Homo sapien
ggtgacattcaaaggacatttaacc

SEQ ID NO: 1593775 - DNA, 25 bp, Homo sapien
gacattcaaaggacatttaacccta

SEQ ID NO: 1593776 - DNA, 25 bp, Homo sapien
caggtgacattcaaaggacatttaa

SEQ ID NO: 1593777 - DNA, 25 bp, Homo sapien
tgacattcaaaggacatttaaccct

SEQ ID NO: 1593778 - DNA, 25 bp, Homo sapien
aggatgacctatgcagacccttgtg

SEQ ID NO: 1593779 - DNA, 25 bp, Homo sapien
gttggtaacatagtccccagggtca

SEQ ID NO: 1593780 - DNA, 25 bp, Homo sapien
ggtggactacctgccctgctaggat

SEQ ID NO: 1593781 - DNA, 25 bp, Homo sapien
catttaccggatgaccagcgcaagt

SEQ ID NO: 1593782 - DNA, 25 bp, Homo sapien
agaaaggtgagtctgcaagggcagt

SEQ ID NO: 1593783 - DNA, 25 bp, Homo sapien
ctttctccagggcaggtggagaaag

SEQ ID NO: 1593784 - DNA, 25 bp, Homo sapien
ttctccagggcaggtggagaaaggt

SEQ ID NO: 1593785 - DNA, 25 bp, Homo sapien
gtggagaaaggtgagtctgcaaggg

SEQ ID NO: 1593786 - DNA, 25 bp, Homo sapien
caagagcagcaagatttgggcccca

SEQ ID NO: 1593787 - DNA, 25 bp, Homo sapien
gagtgggcataaaccatcagggagc

SEQ ID NO: 1593788 - DNA, 25 bp, Homo sapien
tcacatgggttatcaaagctgcaca

SEQ ID NO: 1593789 - DNA, 25 bp, Homo sapien
tcaaaattcttactggtccctggca

SEQ ID NO: 1593790 - DNA, 25 bp, Homo sapien
cactcaggaataacgcatgggcgat

SEQ ID NO: 1593791 - DNA, 25 bp, Homo sapien
gaagaaacggtggattcacgcccat

SEQ ID NO: 1593792 - DNA, 25 bp, Homo sapien
gatgagctcgcacccttgagaagaa

SEQ ID NO: 1593793 - DNA, 25 bp, Homo sapien
tagctaccagcttatccgaacagga

SEQ ID NO: 1593794 - DNA, 25 bp, Homo sapien
gcaggttgacaatctccaggaaggt

SEQ ID NO: 1593795 - DNA, 25 bp, Homo sapien
ctctgacagtgcgaggaacggtcca

SEQ ID NO: 1593796 - DNA, 25 bp, Homo sapien
gctgtggaagaacgacacctctgga

SEQ ID NO: 1593797 - DNA, 25 bp, Homo sapien
tagctccgcttgaaacccagcgagg

SEQ ID NO: 1593798 - DNA, 25 bp, Homo sapien
ctctctctggacagttgtcgggttg

SEQ ID NO: 1593799 - DNA, 25 bp, Homo sapien
gggttgatccagataccctccatcc

SEQ ID NO: 1593800 - DNA, 25 bp, Homo sapien
tagacaggccttggtaaggctgttc

SEQ ID NO: 1593801 - DNA, 25 bp, Homo sapien
tcaacacctgttcattagacaggcc

SEQ ID NO: 1593802 - DNA, 25 bp, Homo sapien
catccttcagggactccggtgccat

SEQ ID NO: 1593803 - DNA, 25 bp, Homo sapien
ggtagtaatccgtttcatagatgtc

SEQ ID NO: 1593804 - DNA, 25 bp, Homo sapien
gaagaagtggtgaagaccccatcct

SEQ ID NO: 1593805 - DNA, 25 bp, Homo sapien
gtgccatccaccgtacagggagcag

SEQ ID NO: 1593806 - DNA, 25 bp, Homo sapien
tggtggccaaatccagtaagaatgg

SEQ ID NO: 1593807 - DNA, 25 bp, Homo sapien
ctgggtggtggccaaatccagtaag

SEQ ID NO: 1593808 - DNA, 25 bp, Homo sapien
ggtggtggccaaatccagtaagaat

SEQ ID NO: 1593809 - DNA, 25 bp, Homo sapien
tggccaaatccagtaagaatggatt

SEQ ID NO: 1593810 - DNA, 25 bp, Homo sapien
ttttgacagtaaaatcatgggcgac

SEQ ID NO: 1593811 - DNA, 25 bp, Homo sapien
tgcacaaacttcttggcgttcaggt

SEQ ID NO: 1593812 - DNA, 25 bp, Homo sapien
gcacaaacttcttggcgttcaggta

SEQ ID NO: 1593813 - DNA, 25 bp, Homo sapien
catgggcgaccatgcagtttctcgc

SEQ ID NO: 1593814 - DNA, 25 bp, Homo sapien
tctgccgccatctgaatcatctctt

SEQ ID NO: 1593815 - DNA, 25 bp, Homo sapien
ctgaatcatctcttgaagggtaggg

SEQ ID NO: 1593816 - DNA, 25 bp, Homo sapien
gtcagcaatctctgccgccatctga

SEQ ID NO: 1593817 - DNA, 25 bp, Homo sapien
ccatctgaatcatctcttgaagggt

SEQ ID NO: 1593818 - DNA, 25 bp, Homo sapien
agcgtgggctggcccttggacacca

SEQ ID NO: 1593819 - DNA, 25 bp, Homo sapien
cagagaacggaggtagctcttcagg

SEQ ID NO: 1593820 - DNA, 25 bp, Homo sapien
tggccgcagagaacggaggtagctc

SEQ ID NO: 1593821 - DNA, 25 bp, Homo sapien
ttcaggtctccgtgagccatcagct

SEQ ID NO: 1593822 - DNA, 25 bp, Homo sapien
gaggagggtccgtgattcgactcac

SEQ ID NO: 1593823 - DNA, 25 bp, Homo sapien
tggatgcagcgtgctcagccctggt

SEQ ID NO: 1593824 - DNA, 25 bp, Homo sapien
tgcagagcaagcaaccagggttctt

SEQ ID NO: 1593825 - DNA, 25 bp, Homo sapien
cctggtctaggagagcagacatacc

SEQ ID NO: 1593826 - DNA, 25 bp, Homo sapien
ttgccctcatacaccatgccgaagg

SEQ ID NO: 1593827 - DNA, 25 bp, Homo sapien
cacgtgatggcaggtgaagcccttc

SEQ ID NO: 1593828 - DNA, 25 bp, Homo sapien
gctctcggagactggctgactcgtt

SEQ ID NO: 1593829 - DNA, 25 bp, Homo sapien
catgaccgaggcctcattgaggaac

SEQ ID NO: 1593830 - DNA, 25 bp, Homo sapien
cgaaggagggtgatcttctctcgag

SEQ ID NO: 1593831 - DNA, 25 bp, Homo sapien
aaggagggtgatcttctctcgagac

SEQ ID NO: 1593832 - DNA, 25 bp, Homo sapien
ggagggtgatcttctctcgagacac

SEQ ID NO: 1593833 - DNA, 25 bp, Homo sapien
ctcgaaggagggtgatcttctctcg

SEQ ID NO: 1593834 - DNA, 25 bp, Homo sapien
gtccggcacgtacacagagcatgga

SEQ ID NO: 1593835 - DNA, 25 bp, Homo sapien
ctcgtccggcacgtacacagagcat

SEQ ID NO: 1593836 - DNA, 25 bp, Homo sapien
ggcacgtacacagagcatggaaaca

SEQ ID NO: 1593837 - DNA, 25 bp, Homo sapien
ccggcacgtacacagagcatggaaa

SEQ ID NO: 1593838 - DNA, 25 bp, Homo sapien
aagaagcgtaaagcggtcccagcgg

SEQ ID NO: 1593839 - DNA, 25 bp, Homo sapien
tcagggtttgaagaagcgtaaagcg

SEQ ID NO: 1593840 - DNA, 25 bp, Homo sapien
cactgagatactcagggtttgaaga

SEQ ID NO: 1593841 - DNA, 25 bp, Homo sapien
aaagcggtcccagcggcccatctgg

SEQ ID NO: 1593842 - DNA, 25 bp, Homo sapien
ctctttctcaggaatagataaatac

SEQ ID NO: 1593843 - DNA, 25 bp, Homo sapien
atttttgcaatatttgacgggacgt

SEQ ID NO: 1593844 - DNA, 25 bp, Homo sapien
gacaaagatgagggggccgatgata

SEQ ID NO: 1593845 - DNA, 25 bp, Homo sapien
tgctcagtgctaagcacagccccag

SEQ ID NO: 1593846 - DNA, 25 bp, Homo sapien
catgctcagtgctaagcacagcccc

SEQ ID NO: 1593847 - DNA, 25 bp, Homo sapien
atgctcagtgctaagcacagcccca

SEQ ID NO: 1593848 - DNA, 25 bp, Homo sapien
tgtcacgtagaaataggtgggttcc

SEQ ID NO: 1593849 - DNA, 25 bp, Homo sapien
gtgggttccgtccaagagccgttgc

SEQ ID NO: 1593850 - DNA, 25 bp, Homo sapien
ggcccggattcgcacgctgtagttc

SEQ ID NO: 1593851 - DNA, 25 bp, Homo sapien
gccccgttccagagcgaagtgcttg

SEQ ID NO: 1593852 - DNA, 25 bp, Homo sapien
tgcaccctttggttcacgtctctcc

SEQ ID NO: 1593853 - DNA, 25 bp, Homo sapien
ttaaaatgcaaaagtgggcagggcg

SEQ ID NO: 1593854 - DNA, 25 bp, Homo sapien
cctttggttcacgtctctccttgtt

SEQ ID NO: 1593855 - DNA, 25 bp, Homo sapien
taaaatgcaaaagtgggcagggcgt

SEQ ID NO: 1593856 - DNA, 25 bp, Homo sapien
tcctggctaaacctagacaactggt

SEQ ID NO: 1593857 - DNA, 25 bp, Homo sapien
gaccaactgtgttcaccctagagag

SEQ ID NO: 1593858 - DNA, 25 bp, Homo sapien
ttcccatgcctttgactggcccgtg

SEQ ID NO: 1593859 - DNA, 25 bp, Homo sapien
aactggtcaccctgttggcactgga

SEQ ID NO: 1593860 - DNA, 25 bp, Homo sapien
ccaggacaaaggaatcacccagtga

SEQ ID NO: 1593861 - DNA, 25 bp, Homo sapien
caaatgtgatgcaaacagagtccta

SEQ ID NO: 1593862 - DNA, 25 bp, Homo sapien
tcactttgccaaagggacactagca

SEQ ID NO: 1593863 - DNA, 25 bp, Homo sapien
catgaggacaaagctccaagtgccc

SEQ ID NO: 1593864 - DNA, 25 bp, Homo sapien
tgacccatcttcctgcgaagtcagg

SEQ ID NO: 1593865 - DNA, 25 bp, Homo sapien
gggcatgcccaagagtcaagggcct

SEQ ID NO: 1593866 - DNA, 25 bp, Homo sapien
tcattcaacttagaggacacagctg

SEQ ID NO: 1593867 - DNA, 25 bp, Homo sapien
agtacctgatgagagaagcactgga

SEQ ID NO: 1593868 - DNA, 25 bp, Homo sapien
tcatcaccatatcgccgataactca

SEQ ID NO: 1593869 - DNA, 25 bp, Homo sapien
ctcatcaccatatcgccgataactc

SEQ ID NO: 1593870 - DNA, 25 bp, Homo sapien
gcacgatcagaccattgggctcctt

SEQ ID NO: 1593871 - DNA, 25 bp, Homo sapien
cttcatacagcacgatcagaccatt

SEQ ID NO: 1593872 - DNA, 25 bp, Homo sapien
tacagcacgatcagaccattgggct

SEQ ID NO: 1593873 - DNA, 25 bp, Homo sapien
gatcagaccattgggctccttcggc

SEQ ID NO: 1593874 - DNA, 25 bp, Homo sapien
catcaagtggacgacgttgttctca

SEQ ID NO: 1593875 - DNA, 25 bp, Homo sapien
tgccacatcaagtggacgacgttgt

SEQ ID NO: 1593876 - DNA, 25 bp, Homo sapien
ctcaaagatttcatgcgtcacaggg

SEQ ID NO: 1593877 - DNA, 25 bp, Homo sapien
gtcacagggccaacaatgtcatcag

SEQ ID NO: 1593878 - DNA, 25 bp, Homo sapien
cttcaggcatggtcctcgcactgac

SEQ ID NO: 1593879 - DNA, 25 bp, Homo sapien
aagggacctgcgtttccgagatggc

SEQ ID NO: 1593880 - DNA, 25 bp, Homo sapien
gaagtgtcgcaagccggagatgacc

SEQ ID NO: 1593881 - DNA, 25 bp, Homo sapien
gagatgaccagcgactccttgttca

SEQ ID NO: 1593882 - DNA, 25 bp, Homo sapien
gcagctcgatgcgatagcccgtgaa

SEQ ID NO: 1593883 - DNA, 25 bp, Homo sapien
agccgagcctgatggtgcacagctt

SEQ ID NO: 1593884 - DNA, 25 bp, Homo sapien
catgatgaggatcaagcctgtttta

SEQ ID NO: 1593885 - DNA, 25 bp, Homo sapien
cctgatggtgcacagctttaatccc

SEQ ID NO: 1593886 - DNA, 25 bp, Homo sapien
tgtctacttattatattggaagcat

SEQ ID NO: 1593887 - DNA, 25 bp, Homo sapien
tacctacagctaaatggttgtccag

SEQ ID NO: 1593888 - DNA, 25 bp, Homo sapien
tatcactcgactacgttatttgcgg

SEQ ID NO: 1593889 - DNA, 25 bp, Homo sapien
tgacttgtggttgcaccagcaggcc

SEQ ID NO: 1593890 - DNA, 25 bp, Homo sapien
gcattccaggacaatctcagcaacc

SEQ ID NO: 1593891 - DNA, 25 bp, Homo sapien
ttattacattggctggatgcccaga

SEQ ID NO: 1593892 - DNA, 25 bp, Homo sapien
gagataaacaatattgccagtgcag

SEQ ID NO: 1593893 - DNA, 25 bp, Homo sapien
gtttgcctacccttgagctagacgc

SEQ ID NO: 1593894 - DNA, 25 bp, Homo sapien
taacatcacatattagcttggcctg

SEQ ID NO: 1593895 - DNA, 25 bp, Homo sapien
ggtgtgagtcactgcgcccagcctg

SEQ ID NO: 1593896 - DNA, 25 bp, Homo sapien
tacaggcgcacgttaccacatctgg

SEQ ID NO: 1593897 - DNA, 25 bp, Homo sapien
caggtgtgagtcactgcgcccagcc

SEQ ID NO: 1593898 - DNA, 25 bp, Homo sapien
actacaggcgcacgttaccacatct

SEQ ID NO: 1593899 - DNA, 25 bp, Homo sapien
tctgcaaatgcacgcgggaggtgca

SEQ ID NO: 1593900 - DNA, 25 bp, Homo sapien
ctctgcaaatgcacgcgggaggtgc

SEQ ID NO: 1593901 - DNA, 25 bp, Homo sapien
ggtgcagagatgtttagtgagcaaa

SEQ ID NO: 1593902 - DNA, 25 bp, Homo sapien
tgcagagatgtttagtgagcaaaca

SEQ ID NO: 1593903 - DNA, 25 bp, Homo sapien
ggtcctcggcaccagtgcctgaaga

SEQ ID NO: 1593904 - DNA, 25 bp, Homo sapien
ctagggtcctcggcaccagtgcctg

SEQ ID NO: 1593905 - DNA, 25 bp, Homo sapien
ggcaccagtgcctgaagaggttttt

SEQ ID NO: 1593906 - DNA, 25 bp, Homo sapien
cggcaccagtgcctgaagaggtttt

SEQ ID NO: 1593907 - DNA, 25 bp, Homo sapien
cacatgtgtccgagtaagggcaccc

SEQ ID NO: 1593908 - DNA, 25 bp, Homo sapien
caaacgtgactacatgtggacatca

SEQ ID NO: 1593909 - DNA, 25 bp, Homo sapien
gtggccctgggatgtcaaacgtgac

SEQ ID NO: 1593910 - DNA, 25 bp, Homo sapien
aaaccaacgcctttgaggacagagg

SEQ ID NO: 1593911 - DNA, 25 bp, Homo sapien
gtggcgccatcatcgcttatcgtag

SEQ ID NO: 1593912 - DNA, 25 bp, Homo sapien
gaacattcttttggactcagggtca

SEQ ID NO: 1593913 - DNA, 25 bp, Homo sapien
gctcggatgaatagcattggtaaac

SEQ ID NO: 1593914 - DNA, 25 bp, Homo sapien
ctgggagaaaagtctgctcggatga

SEQ ID NO: 1593915 - DNA, 25 bp, Homo sapien
cccggaaagggtgagctgaaatcgc

SEQ ID NO: 1593916 - DNA, 25 bp, Homo sapien
agccaattggcacccactaagagag

SEQ ID NO: 1593917 - DNA, 25 bp, Homo sapien
tgttttggaactcacgtggagacca

SEQ ID NO: 1593918 - DNA, 25 bp, Homo sapien
taaagcctcaataatcacggccagg

SEQ ID NO: 1593919 - DNA, 25 bp, Homo sapien
cacgttgtgcaggtaatcctcaaac

SEQ ID NO: 1593920 - DNA, 25 bp, Homo sapien
ctggggacgaaaaccacgttgtgca

SEQ ID NO: 1593921 - DNA, 25 bp, Homo sapien
gaaaaccacgttgtgcaggtaatcc

SEQ ID NO: 1593922 - DNA, 25 bp, Homo sapien
tgtgcaggtaatcctcaaacgtctt

SEQ ID NO: 1593923 - DNA, 25 bp, Homo sapien
gacaggagcagcattcgccggccga

SEQ ID NO: 1593924 - DNA, 25 bp, Homo sapien
cattcgccggccgaatcctcatact

SEQ ID NO: 1593925 - DNA, 25 bp, Homo sapien
aggagcagcattcgccggccgaatc

SEQ ID NO: 1593926 - DNA, 25 bp, Homo sapien
cgccggccgaatcctcatactcact

SEQ ID NO: 1593927 - DNA, 25 bp, Homo sapien
ggagaccaggtcctcgagggcagct

SEQ ID NO: 1593928 - DNA, 25 bp, Homo sapien
gagaccaggtcctcgagggcagctt

SEQ ID NO: 1593929 - DNA, 25 bp, Homo sapien
tggagaccaggtcctcgagggcagc

SEQ ID NO: 1593930 - DNA, 25 bp, Homo sapien
atgcagggccaacagcttacagcgg

SEQ ID NO: 1593931 - DNA, 25 bp, Homo sapien
ctctcacgggtggttctggttactt

SEQ ID NO: 1593932 - DNA, 25 bp, Homo sapien
gacattactggtggcagctctcacg

SEQ ID NO: 1593933 - DNA, 25 bp, Homo sapien
tacagcggagctgatgactggactc

SEQ ID NO: 1593934 - DNA, 25 bp, Homo sapien
gagttagacactgagattggatcca

SEQ ID NO: 1593935 - DNA, 25 bp, Homo sapien
cccagaaaaccaggtagtgggtgat

SEQ ID NO: 1593936 - DNA, 25 bp, Homo sapien
tcggagggtggtttccacttcagaa

SEQ ID NO: 1593937 - DNA, 25 bp, Homo sapien
gaggcaataatccagctcgaacagc

SEQ ID NO: 1593938 - DNA, 25 bp, Homo sapien
tccgaaaaggtgaccagggtcttca

SEQ ID NO: 1593939 - DNA, 25 bp, Homo sapien
ggtcttcacaaagatggcatactgg

SEQ ID NO: 1593940 - DNA, 25 bp, Homo sapien
tgggtcaatgtctaccaccgtccaa

SEQ ID NO: 1593941 - DNA, 25 bp, Homo sapien
cataggtccggcgttcatccgaaaa

SEQ ID NO: 1593942 - DNA, 25 bp, Homo sapien
cctttgagtatcaagtcggcccaca

SEQ ID NO: 1593943 - DNA, 25 bp, Homo sapien
taatattactactggtcaggtgcgg

SEQ ID NO: 1593944 - DNA, 25 bp, Homo sapien
gagctccctcacaagttactgataa

SEQ ID NO: 1593945 - DNA, 25 bp, Homo sapien
taatagtaatagcaggagctccctc

SEQ ID NO: 1593946 - DNA, 25 bp, Homo sapien
agcatgaaccccaagaggtctcgga

SEQ ID NO: 1593947 - DNA, 25 bp, Homo sapien
gcctctttgtagaacagcatgaacc

SEQ ID NO: 1593948 - DNA, 25 bp, Homo sapien
ggctcccatctcagcaagatcttgt

SEQ ID NO: 1593949 - DNA, 25 bp, Homo sapien
cttgtcaaaagatgtccgaatgtaa

SEQ ID NO: 1593950 - DNA, 25 bp, Homo sapien
tctttctgggtttggccaagactca

SEQ ID NO: 1593951 - DNA, 25 bp, Homo sapien
cctggccgtccctttgcaatgcaga

SEQ ID NO: 1593952 - DNA, 25 bp, Homo sapien
tgagcttggtagatgcctggccgtc

SEQ ID NO: 1593953 - DNA, 25 bp, Homo sapien
gaggtcagacacacgctattgtcaa

SEQ ID NO: 1593954 - DNA, 25 bp, Homo sapien
tttcccctgagtgatggtgaggttg

SEQ ID NO: 1593955 - DNA, 25 bp, Homo sapien
ggcaatgtcgtttctctcctggcgc

SEQ ID NO: 1593956 - DNA, 25 bp, Homo sapien
ggtcttcagggcaatgtcgtttctc

SEQ ID NO: 1593957 - DNA, 25 bp, Homo sapien
tccagtcccagagctgccttaggtt

SEQ ID NO: 1593958 - DNA, 25 bp, Homo sapien
gccatacacacaatcaggcccacgt

SEQ ID NO: 1593959 - DNA, 25 bp, Homo sapien
catacacacaatcaggcccacgtac

SEQ ID NO: 1593960 - DNA, 25 bp, Homo sapien
ggccatacacacaatcaggcccacg

SEQ ID NO: 1593961 - DNA, 25 bp, Homo sapien
tcaggccatacacacaatcaggccc

SEQ ID NO: 1593962 - DNA, 25 bp, Homo sapien
ttcaatgaggccgaggttggcttct

SEQ ID NO: 1593963 - DNA, 25 bp, Homo sapien
gatcggcggatttttagataccctg

SEQ ID NO: 1593964 - DNA, 25 bp, Homo sapien
aagtgacaccagagcgtaggatcgg

SEQ ID NO: 1593965 - DNA, 25 bp, Homo sapien
gaatcagacgtaacttccggaagaa

SEQ ID NO: 1593966 - DNA, 25 bp, Homo sapien
gcctcctcgaatgttgatgatcaga

SEQ ID NO: 1593967 - DNA, 25 bp, Homo sapien
gtggcacaccttgggacagggaccc

SEQ ID NO: 1593968 - DNA, 25 bp, Homo sapien
gacgtcaccgagtcgatggtcttct

SEQ ID NO: 1593969 - DNA, 25 bp, Homo sapien
gatgatcagactcccgttgatgacg

SEQ ID NO: 1593970 - DNA, 25 bp, Homo sapien
gcctgatatggtatttctttgtgtg

SEQ ID NO: 1593971 - DNA, 25 bp, Homo sapien
tcaggcatctttctgcctgatatgg

SEQ ID NO: 1593972 - DNA, 25 bp, Homo sapien
tgtcacggtatccaaggtccttcag

SEQ ID NO: 1593973 - DNA, 25 bp, Homo sapien
ggtgtcacggtatccaaggtccttc

SEQ ID NO: 1593974 - DNA, 25 bp, Homo sapien
tgggactcatagcattatcgtggcg

SEQ ID NO: 1593975 - DNA, 25 bp, Homo sapien
gcaccataccccttggcagtgtata

SEQ ID NO: 1593976 - DNA, 25 bp, Homo sapien
ggaccatgatctaccctgtgcgtga

SEQ ID NO: 1593977 - DNA, 25 bp, Homo sapien
caaacaaaactatgtagcaccttcc

SEQ ID NO: 1593978 - DNA, 25 bp, Homo sapien
aagatgtgcctacctcccctttgct

SEQ ID NO: 1593979 - DNA, 25 bp, Homo sapien
agatgtgcctacctcccctttgctt

SEQ ID NO: 1593980 - DNA, 25 bp, Homo sapien
gatgtgcctacctcccctttgcttt

SEQ ID NO: 1593981 - DNA, 25 bp, Homo sapien
tgaatgacgtactggtggcagccct

SEQ ID NO: 1593982 - DNA, 25 bp, Homo sapien
tcgtcgggctgagaacagttgccca

SEQ ID NO: 1593983 - DNA, 25 bp, Homo sapien
gaattcatcgtgtacccggagggac

SEQ ID NO: 1593984 - DNA, 25 bp, Homo sapien
tccaggtagaagttgcggcaggcca

SEQ ID NO: 1593985 - DNA, 25 bp, Homo sapien
tatgcatgtcttgggtactgagcct

SEQ ID NO: 1593986 - DNA, 25 bp, Homo sapien
cacaatagtgggacaaggcaacaac

SEQ ID NO: 1593987 - DNA, 25 bp, Homo sapien
caacacgtacttcccattatgaggc

SEQ ID NO: 1593988 - DNA, 25 bp, Homo sapien
taaccctagcttgaggtcattcgat

SEQ ID NO: 1593989 - DNA, 25 bp, Homo sapien
ttgacaacggcaccagtaccatcat

SEQ ID NO: 1593990 - DNA, 25 bp, Homo sapien
tgacaacggcaccagtaccatcatt

SEQ ID NO: 1593991 - DNA, 25 bp, Homo sapien
atttcctgattttgacaacggcacc

SEQ ID NO: 1593992 - DNA, 25 bp, Homo sapien
cattaaatgattcgatagctccaca

SEQ ID NO: 1593993 - DNA, 25 bp, Homo sapien
cagaaatttccaaacggaacagttg

SEQ ID NO: 1593994 - DNA, 25 bp, Homo sapien
ggaacagttgcgtcatgggcctgct

SEQ ID NO: 1593995 - DNA, 25 bp, Homo sapien
tgctggtacattgaccacagggccc

SEQ ID NO: 1593996 - DNA, 25 bp, Homo sapien
aaatgatttaatggcaaaggggcag

SEQ ID NO: 1593997 - DNA, 25 bp, Homo sapien
taaatgatttaatggcaaaggggca

SEQ ID NO: 1593998 - DNA, 25 bp, Homo sapien
tgatttaatggcaaaggggcagggg

SEQ ID NO: 1593999 - DNA, 25 bp, Homo sapien
aatgatttaatggcaaaggggcagg

SEQ ID NO: 1594000 - DNA, 25 bp, Homo sapien
tcagcagcgacgaccgcaggagcgc

SEQ ID NO: 1594001 - DNA, 25 bp, Homo sapien
agcttcgtggtcagcagcgacgacc

SEQ ID NO: 1594002 - DNA, 25 bp, Homo sapien
ccgcaggagcgcgtgtccttgaagc

SEQ ID NO: 1594003 - DNA, 25 bp, Homo sapien
cgacgaccgcaggagcgcgtgtcct

SEQ ID NO: 1594004 - DNA, 25 bp, Homo sapien
cccacacgcgatgacgcctttggaa

SEQ ID NO: 1594005 - DNA, 25 bp, Homo sapien
tctttggagacatacggcgcatata

SEQ ID NO: 1594006 - DNA, 25 bp, Homo sapien
aatagaactgcgcagctctttggag

SEQ ID NO: 1594007 - DNA, 25 bp, Homo sapien
gatgacgcctttggaatagaactgc

SEQ ID NO: 1594008 - DNA, 25 bp, Homo sapien
ctgggagggcccctcgtggctgcag

SEQ ID NO: 1594009 - DNA, 25 bp, Homo sapien
tgcagaccccgcaggtcgagtctgc

SEQ ID NO: 1594010 - DNA, 25 bp, Homo sapien
gtctgccacggatggaactttggaa

SEQ ID NO: 1594011 - DNA, 25 bp, Homo sapien
cagactggcgctcgggcagtggccg

SEQ ID NO: 1594012 - DNA, 25 bp, Homo sapien
tgacaccctcttggcattggaatgc

SEQ ID NO: 1594013 - DNA, 25 bp, Homo sapien
cacatacgccccgtgaagggaaaga

SEQ ID NO: 1594014 - DNA, 25 bp, Homo sapien
tgtaacacggcatcacactgtgagt

SEQ ID NO: 1594015 - DNA, 25 bp, Homo sapien
ggcagaaagaacaccatcggattca

SEQ ID NO: 1594016 - DNA, 25 bp, Homo sapien
ctgctggatgacgcccaactttcca

SEQ ID NO: 1594017 - DNA, 25 bp, Homo sapien
atgacgcccaactttccaccttggg

SEQ ID NO: 1594018 - DNA, 25 bp, Homo sapien
tgctggatgacgcccaactttccac

SEQ ID NO: 1594019 - DNA, 25 bp, Homo sapien
tggatgacgcccaactttccacctt

SEQ ID NO: 1594020 - DNA, 25 bp, Homo sapien
tatagaggctgcactttggaggctg

SEQ ID NO: 1594021 - DNA, 25 bp, Homo sapien
tggatacaactcacgagagaaacag

SEQ ID NO: 1594022 - DNA, 25 bp, Homo sapien
tcacatgtggacaatctgggtttga

SEQ ID NO: 1594023 - DNA, 25 bp, Homo sapien
gtggagttcaagatatagaggctgc

SEQ ID NO: 1594024 - DNA, 25 bp, Homo sapien
tgcttacttgcagccagagattaga

SEQ ID NO: 1594025 - DNA, 25 bp, Homo sapien
gagtctctcttacatgcttgttcag

SEQ ID NO: 1594026 - DNA, 25 bp, Homo sapien
aattatcaagtggtaggagtctctc

SEQ ID NO: 1594027 - DNA, 25 bp, Homo sapien
gattagaacccgtacaatgtctgct

SEQ ID NO: 1594028 - DNA, 25 bp, Homo sapien
tatgacaatctgtaagcggcacaga

SEQ ID NO: 1594029 - DNA, 25 bp, Homo sapien
tctgaattgcaaggcgggtttccct

SEQ ID NO: 1594030 - DNA, 25 bp, Homo sapien
tctgttcaaatttagccacacgttg

SEQ ID NO: 1594031 - DNA, 25 bp, Homo sapien
gaatcgatctccgtggaaggtctga

SEQ ID NO: 1594032 - DNA, 25 bp, Homo sapien
tatggcggtcttgaatgtgcacagg

SEQ ID NO: 1594033 - DNA, 25 bp, Homo sapien
caggttgacagttttcccgggagct

SEQ ID NO: 1594034 - DNA, 25 bp, Homo sapien
tttcaataacaagtatatggcggtc

SEQ ID NO: 1594035 - DNA, 25 bp, Homo sapien
gagcttctacatgcacgagctggca

SEQ ID NO: 1594036 - DNA, 25 bp, Homo sapien
ttcctcaactcctgaaggacacagg

SEQ ID NO: 1594037 - DNA, 25 bp, Homo sapien
ctcctgaaggacacaggtgcccatg

SEQ ID NO: 1594038 - DNA, 25 bp, Homo sapien
gaaaatttcctcaactcctgaagga

SEQ ID NO: 1594039 - DNA, 25 bp, Homo sapien
gtgcccatggggacgtactgaattt

SEQ ID NO: 1594040 - DNA, 25 bp, Homo sapien
tctacctggatttatgctactgagc

SEQ ID NO: 1594041 - DNA, 25 bp, Homo sapien
tggaacttcccagttctacctggat

SEQ ID NO: 1594042 - DNA, 25 bp, Homo sapien
gatttatgctactgagccctggcac

SEQ ID NO: 1594043 - DNA, 25 bp, Homo sapien
gagcaaacagcccagatacctggaa

SEQ ID NO: 1594044 - DNA, 25 bp, Homo sapien
cggagaaggaagctgtccccgtcaa

SEQ ID NO: 1594045 - DNA, 25 bp, Homo sapien
aagaaaagtgcaccatcaatgaccc

SEQ ID NO: 1594046 - DNA, 25 bp, Homo sapien
ccgtcaacacggtctggaacaatcc

SEQ ID NO: 1594047 - DNA, 25 bp, Homo sapien
catgcacaatcccattgacacaggg

SEQ ID NO: 1594048 - DNA, 25 bp, Homo sapien
caacacctggtaatgccggggccgt

SEQ ID NO: 1594049 - DNA, 25 bp, Homo sapien
cagactctggggtggataattcccc

SEQ ID NO: 1594050 - DNA, 25 bp, Homo sapien
caagtcacagactcagactctgggg

SEQ ID NO: 1594051 - DNA, 25 bp, Homo sapien
gaattcaacacctggtaatgccggg

SEQ ID NO: 1594052 - DNA, 25 bp, Homo sapien
cagagagaatccagcttttaaggca

SEQ ID NO: 1594053 - DNA, 25 bp, Homo sapien
gaggtaccaaattcacaggtgacag

SEQ ID NO: 1594054 - DNA, 25 bp, Homo sapien
gagaggcatcattcaaccgaccaca

SEQ ID NO: 1594055 - DNA, 25 bp, Homo sapien
tgaaaaggatccctgcgatggcatt

SEQ ID NO: 1594056 - DNA, 25 bp, Homo sapien
tcctcagtactgtggttgaataggc

SEQ ID NO: 1594057 - DNA, 25 bp, Homo sapien
gaagagagattgcaaaacggtgagc

SEQ ID NO: 1594058 - DNA, 25 bp, Homo sapien
tagaagagtccctgccttgtggcgg

SEQ ID NO: 1594059 - DNA, 25 bp, Homo sapien
tggaacagaatgtggcacccaagaa

SEQ ID NO: 1594060 - DNA, 25 bp, Homo sapien
cattcatgggcaactcaaaggtgtc

SEQ ID NO: 1594061 - DNA, 25 bp, Homo sapien
cgtcccgaggaaatgcaccgtggtt

SEQ ID NO: 1594062 - DNA, 25 bp, Homo sapien
caaacagaggcgtgcagcgaagtaa

SEQ ID NO: 1594063 - DNA, 25 bp, Homo sapien
caagaagccgtaagatgtgcgtccc

SEQ ID NO: 1594064 - DNA, 25 bp, Homo sapien
tcattaaatgactatcatcatattc

SEQ ID NO: 1594065 - DNA, 25 bp, Homo sapien
ttaaatgactatcatcatattcctc

SEQ ID NO: 1594066 - DNA, 25 bp, Homo sapien
cttcattaaatgactatcatcatat

SEQ ID NO: 1594067 - DNA, 25 bp, Homo sapien
cattaaatgactatcatcatattcc

SEQ ID NO: 1594068 - DNA, 25 bp, Homo sapien
catggcagtgtcaaaccacagagcc

SEQ ID NO: 1594069 - DNA, 25 bp, Homo sapien
aataattgcagagtgcccctcaccc

SEQ ID NO: 1594070 - DNA, 25 bp, Homo sapien
acatttgtgtttgccatgcctcggg

SEQ ID NO: 1594071 - DNA, 25 bp, Homo sapien
gggatgctgctagcaccctcagtgc

SEQ ID NO: 1594072 - DNA, 25 bp, Homo sapien
gacctatagtccagcagactttcca

SEQ ID NO: 1594073 - DNA, 25 bp, Homo sapien
gatgacacagggtccggcaagtatc

SEQ ID NO: 1594074 - DNA, 25 bp, Homo sapien
tagtgatgacacagggtccggcaag

SEQ ID NO: 1594075 - DNA, 25 bp, Homo sapien
tccggcaagtatccagacctatagt

SEQ ID NO: 1594076 - DNA, 25 bp, Homo sapien
cacaggtcaatgaatgggcagctta

SEQ ID NO: 1594077 - DNA, 25 bp, Homo sapien
gattcccagctctagactgaggtca

SEQ ID NO: 1594078 - DNA, 25 bp, Homo sapien
gcgtacccggctcagaacttttatc

SEQ ID NO: 1594079 - DNA, 25 bp, Homo sapien
attgttctcggccacattctcagag

SEQ ID NO: 1594080 - DNA, 25 bp, Homo sapien
caagagatatgaaggcattggtcca

SEQ ID NO: 1594081 - DNA, 25 bp, Homo sapien
tgctccaggatataacctcaagaga

SEQ ID NO: 1594082 - DNA, 25 bp, Homo sapien
tctcccaccatagcttggattatag

SEQ ID NO: 1594083 - DNA, 25 bp, Homo sapien
tggtgaaactaaatgtcgtctctcc

SEQ ID NO: 1594084 - DNA, 25 bp, Homo sapien
ctacaagaacatgccgccacccccg

SEQ ID NO: 1594085 - DNA, 25 bp, Homo sapien
actttagcctcgtgagtagccagaa

SEQ ID NO: 1594086 - DNA, 25 bp, Homo sapien
aggcaacacagtgagcccccattct

SEQ ID NO: 1594087 - DNA, 25 bp, Homo sapien
atttatagtagcggggtttcactgt

SEQ ID NO: 1594088 - DNA, 25 bp, Homo sapien
caactctcctgtctcaggttcccaa

SEQ ID NO: 1594089 - DNA, 25 bp, Homo sapien
ccattctttttttgaagacagaatc

SEQ ID NO: 1594090 - DNA, 25 bp, Homo sapien
cctttcagaggttcagctatcgctc

SEQ ID NO: 1594091 - DNA, 25 bp, Homo sapien
aggttcagctatcgctctccccgtg

SEQ ID NO: 1594092 - DNA, 25 bp, Homo sapien
catctgtgatgacgtcttctgccca

SEQ ID NO: 1594093 - DNA, 25 bp, Homo sapien
atcaaattcatccttccctgggaac

SEQ ID NO: 1594094 - DNA, 25 bp, Homo sapien
gaagtgaaaatagcccaggtgcggt

SEQ ID NO: 1594095 - DNA, 25 bp, Homo sapien
gacgttagagtgaaccattaggcta

SEQ ID NO: 1594096 - DNA, 25 bp, Homo sapien
gcaaagtactatttctcaaccagag

SEQ ID NO: 1594097 - DNA, 25 bp, Homo sapien
ccactcctaggtataacttcgaaag

SEQ ID NO: 1594098 - DNA, 25 bp, Homo sapien
gccatggagtcattaaagatccaag

SEQ ID NO: 1594099 - DNA, 25 bp, Homo sapien
gctacactcaataagccatggagtc

SEQ ID NO: 1594100 - DNA, 25 bp, Homo sapien
taagccatggagtcattaaagatcc

SEQ ID NO: 1594101 - DNA, 25 bp, Homo sapien
attctttctgggctacactcaataa

SEQ ID NO: 1594102 - DNA, 25 bp, Homo sapien
ttttacaaaggccaacggcaattca

SEQ ID NO: 1594103 - DNA, 25 bp, Homo sapien
tcctgctctacaaaatccaatcatc

SEQ ID NO: 1594104 - DNA, 25 bp, Homo sapien
gggagcccagaaacatactctctag

SEQ ID NO: 1594105 - DNA, 25 bp, Homo sapien
tctctgccactccaatctggaacaa

SEQ ID NO: 1594106 - DNA, 25 bp, Homo sapien
atttcaccaacttcccgcaatgaca

SEQ ID NO: 1594107 - DNA, 25 bp, Homo sapien
cactacttactacccatgtgtgtgg

SEQ ID NO: 1594108 - DNA, 25 bp, Homo sapien
aacttcccgcaatgacatctataag

SEQ ID NO: 1594109 - DNA, 25 bp, Homo sapien
tctgagccagaatccccagcttcaa

SEQ ID NO: 1594110 - DNA, 25 bp, Homo sapien
ccagaacatgacacctagtaggcag

SEQ ID NO: 1594111 - DNA, 25 bp, Homo sapien
ggcttcgtgcattggacctctcctg

SEQ ID NO: 1594112 - DNA, 25 bp, Homo sapien
ccagctggctgaactaatgtagatc

SEQ ID NO: 1594113 - DNA, 25 bp, Homo sapien
caataaacgaactgcatagaccccg

SEQ ID NO: 1594114 - DNA, 25 bp, Homo sapien
tctagaacaaggcacgagacactgc

SEQ ID NO: 1594115 - DNA, 25 bp, Homo sapien
ctgggctagtgaatgccaccaccca

SEQ ID NO: 1594116 - DNA, 25 bp, Homo sapien
tctgaagtatctactatctgagtct

SEQ ID NO: 1594117 - DNA, 25 bp, Homo sapien
catatggcctgcaaaatctgaagta

SEQ ID NO: 1594118 - DNA, 25 bp, Homo sapien
tacgggaccagtcgatagtggccaa

SEQ ID NO: 1594119 - DNA, 25 bp, Homo sapien
catcaggttgtagaggccgagttcc

SEQ ID NO: 1594120 - DNA, 25 bp, Homo sapien
tgaccagcgcgtagttaaagaacag

SEQ ID NO: 1594121 - DNA, 25 bp, Homo sapien
taaagaacagtcgtgatccccggat

SEQ ID NO: 1594122 - DNA, 25 bp, Homo sapien
cacggtggatgcatcagaaggatca

SEQ ID NO: 1594123 - DNA, 25 bp, Homo sapien
agcaagacaggtgagcagacgcacg

SEQ ID NO: 1594124 - DNA, 25 bp, Homo sapien
tgagcagacgcacggtggatgcatc

SEQ ID NO: 1594125 - DNA, 25 bp, Homo sapien
caagacaggtgagcagacgcacggt

SEQ ID NO: 1594126 - DNA, 25 bp, Homo sapien
ctgggtgtggtgagggcttcccagg

SEQ ID NO: 1594127 - DNA, 25 bp, Homo sapien
gtgtggtgagggcttcccagggagc

SEQ ID NO: 1594128 - DNA, 25 bp, Homo sapien
gggcttcccagggagcccgatctcc

SEQ ID NO: 1594129 - DNA, 25 bp, Homo sapien
gcttcccagggagcccgatctccat

SEQ ID NO: 1594130 - DNA, 25 bp, Homo sapien
gtccttccagaaacttatcatgtca

SEQ ID NO: 1594131 - DNA, 25 bp, Homo sapien
taccgaggacatctttggaacaaac

SEQ ID NO: 1594132 - DNA, 25 bp, Homo sapien
tagtctcagaagatgtaccgaggac

SEQ ID NO: 1594133 - DNA, 25 bp, Homo sapien
agaatgcagatggaaacagtgaacc

SEQ ID NO: 1594134 - DNA, 25 bp, Homo sapien
catcggtaaagcagcggagatgcaa

SEQ ID NO: 1594135 - DNA, 25 bp, Homo sapien
gtaaagcagcggagatgcaagccag

SEQ ID NO: 1594136 - DNA, 25 bp, Homo sapien
aagcagcggagatgcaagccagatg

SEQ ID NO: 1594137 - DNA, 25 bp, Homo sapien
ttaacttcgagagccatcggtaaag

SEQ ID NO: 1594138 - DNA, 25 bp, Homo sapien
agatgctgcccacacgtgggagagg

SEQ ID NO: 1594139 - DNA, 25 bp, Homo sapien
atgctgcccacacgtgggagagggg

SEQ ID NO: 1594140 - DNA, 25 bp, Homo sapien
gatgctgcccacacgtgggagaggg

SEQ ID NO: 1594141 - DNA, 25 bp, Homo sapien
caaggtcaaaggctccttcatgaag

SEQ ID NO: 1594142 - DNA, 25 bp, Homo sapien
tcaaggtcaaaggctccttcatgaa

SEQ ID NO: 1594143 - DNA, 25 bp, Homo sapien
gcactcagggcgcttggctctacct

SEQ ID NO: 1594144 - DNA, 25 bp, Homo sapien
tctacctacaccatatgcgctcggg

SEQ ID NO: 1594145 - DNA, 25 bp, Homo sapien
tcgtgtctccggagcgacttgggct

SEQ ID NO: 1594146 - DNA, 25 bp, Homo sapien
caaagatgacgcgtgtcgtgtctcc

SEQ ID NO: 1594147 - DNA, 25 bp, Homo sapien
gcccagtagcagcgcggccaccgcc

SEQ ID NO: 1594148 - DNA, 25 bp, Homo sapien
gcccgcggcgcccagtagcagcgcg

SEQ ID NO: 1594149 - DNA, 25 bp, Homo sapien
cgcccagtagcagcgcggccaccgc

SEQ ID NO: 1594150 - DNA, 25 bp, Homo sapien
ccgcggcgcccagtagcagcgcggc

SEQ ID NO: 1594151 - DNA, 25 bp, Homo sapien
cggaccgacggactagctgactggc

SEQ ID NO: 1594152 - DNA, 25 bp, Homo sapien
gtctcctcggatcagagcgcgcggc

SEQ ID NO: 1594153 - DNA, 25 bp, Homo sapien
gctacaaatactgagcggaggccct

SEQ ID NO: 1594154 - DNA, 25 bp, Homo sapien
tctgggtcgcgatctgcgggctccg

SEQ ID NO: 1594155 - DNA, 25 bp, Homo sapien
gatgtgattttgagcttaagtctga

SEQ ID NO: 1594156 - DNA, 25 bp, Homo sapien
ggagccatcctagggaagccatagg

SEQ ID NO: 1594157 - DNA, 25 bp, Homo sapien
aagccatagggatgtgtttcaggtg

SEQ ID NO: 1594158 - DNA, 25 bp, Homo sapien
tgcacctgactgaggatgtgatttt

SEQ ID NO: 1594159 - DNA, 25 bp, Homo sapien
tgtgcccaaataaacccatgctttt

SEQ ID NO: 1594160 - DNA, 25 bp, Homo sapien
tgtgaaagtgcaaaccacgatagtc

SEQ ID NO: 1594161 - DNA, 25 bp, Homo sapien
gcaaaccacgatagtcaataataat

SEQ ID NO: 1594162 - DNA, 25 bp, Homo sapien
tgaagcctgcaatgtgaaagtgcaa

SEQ ID NO: 1594163 - DNA, 25 bp, Homo sapien
tactttggagcggacttcacctgtg

SEQ ID NO: 1594164 - DNA, 25 bp, Homo sapien
ttgacattggacacccatactttgg

SEQ ID NO: 1594165 - DNA, 25 bp, Homo sapien
tgatgagatggtgcctcgtagaaga

SEQ ID NO: 1594166 - DNA, 25 bp, Homo sapien
gattgtgatgctgttgacattggac

SEQ ID NO: 1594167 - DNA, 25 bp, Homo sapien
tttccttggagtcattttttagcac

SEQ ID NO: 1594168 - DNA, 25 bp, Homo sapien
ggagtcattttttagcacggcctgt

SEQ ID NO: 1594169 - DNA, 25 bp, Homo sapien
tcttctgaggccactgcatcaagag

SEQ ID NO: 1594170 - DNA, 25 bp, Homo sapien
cctgttggagagtacgacagcccag

SEQ ID NO: 1594171 - DNA, 25 bp, Homo sapien
ccgttctccagttctgaaaggacag

SEQ ID NO: 1594172 - DNA, 25 bp, Homo sapien
tccgttctccagttctgaaaggaca

SEQ ID NO: 1594173 - DNA, 25 bp, Homo sapien
gttctccagttctgaaaggacagac

SEQ ID NO: 1594174 - DNA, 25 bp, Homo sapien
gtctccgttctccagttctgaaagg

SEQ ID NO: 1594175 - DNA, 25 bp, Homo sapien
cgtgggtaataggtcatggtgcaca

SEQ ID NO: 1594176 - DNA, 25 bp, Homo sapien
atgggacaggcgtgggtaataggtc

SEQ ID NO: 1594177 - DNA, 25 bp, Homo sapien
gacaggcgtgggtaataggtcatgg

SEQ ID NO: 1594178 - DNA, 25 bp, Homo sapien
ggcgtgggtaataggtcatggtgca

SEQ ID NO: 1594179 - DNA, 25 bp, Homo sapien
gcctcctttcctaggaggtgtccag

SEQ ID NO: 1594180 - DNA, 25 bp, Homo sapien
gtccagggggtgctaatatggcccc

SEQ ID NO: 1594181 - DNA, 25 bp, Homo sapien
cagggtggtccccattgctccacta

SEQ ID NO: 1594182 - DNA, 25 bp, Homo sapien
tccactattgaagcccacggagaag

SEQ ID NO: 1594183 - DNA, 25 bp, Homo sapien
gaaattcggaggcacaaaggcatag

SEQ ID NO: 1594184 - DNA, 25 bp, Homo sapien
acagatgaaattcggaggcacaaag

SEQ ID NO: 1594185 - DNA, 25 bp, Homo sapien
ctatttgacagatgaaattcggagg

SEQ ID NO: 1594186 - DNA, 25 bp, Homo sapien
tcggaggcacaaaggcatagaccat

SEQ ID NO: 1594187 - DNA, 25 bp, Homo sapien
tttagcctcgggcactgtcttgctc

SEQ ID NO: 1594188 - DNA, 25 bp, Homo sapien
gcttccacagctgagatagtggcgt

SEQ ID NO: 1594189 - DNA, 25 bp, Homo sapien
agatagtggcgtctgttctttagcc

SEQ ID NO: 1594190 - DNA, 25 bp, Homo sapien
catctccttttcgtagagtctcagg

SEQ ID NO: 1594191 - DNA, 25 bp, Homo sapien
aactccactccttcccgagcatgta

SEQ ID NO: 1594192 - DNA, 25 bp, Homo sapien
aatgtgtttgtcagaactggagtgg

SEQ ID NO: 1594193 - DNA, 25 bp, Homo sapien
agcatgtactgatgtgggatttgat

SEQ ID NO: 1594194 - DNA, 25 bp, Homo sapien
gaatgtgtttgtcagaactggagtg

SEQ ID NO: 1594195 - DNA, 25 bp, Homo sapien
aggaggagcaagtggctgaactgcc

SEQ ID NO: 1594196 - DNA, 25 bp, Homo sapien
tccaggaggagcaagtggctgaact

SEQ ID NO: 1594197 - DNA, 25 bp, Homo sapien
gctgaactgccacctggagcttcat

SEQ ID NO: 1594198 - DNA, 25 bp, Homo sapien
tgtccaggaggagcaagtggctgaa

SEQ ID NO: 1594199 - DNA, 25 bp, Homo sapien
gcatcaacatttccaacaatcacca

SEQ ID NO: 1594200 - DNA, 25 bp, Homo sapien
tccagcatcaacatttccaacaatc

SEQ ID NO: 1594201 - DNA, 25 bp, Homo sapien
ttctccagcatcaacatttccaaca

SEQ ID NO: 1594202 - DNA, 25 bp, Homo sapien
cagcatcaacatttccaacaatcac

SEQ ID NO: 1594203 - DNA, 25 bp, Homo sapien
aaggctctgtgaaaggtaccctggg

SEQ ID NO: 1594204 - DNA, 25 bp, Homo sapien
ggagtttacgagatgttttcaaatc

SEQ ID NO: 1594205 - DNA, 25 bp, Homo sapien
ctgggccccaagacacccagactgc

SEQ ID NO: 1594206 - DNA, 25 bp, Homo sapien
caaagagtggaatcaaggctctgtg

SEQ ID NO: 1594207 - DNA, 25 bp, Homo sapien
tatgattcataaccagtgccagaag

SEQ ID NO: 1594208 - DNA, 25 bp, Homo sapien
tgtggacatctcattacgagaatgt

SEQ ID NO: 1594209 - DNA, 25 bp, Homo sapien
tattaagatgcggttttcctgttga

SEQ ID NO: 1594210 - DNA, 25 bp, Homo sapien
caggacacatcttgccattggaagt

SEQ ID NO: 1594211 - DNA, 25 bp, Homo sapien
agctcgaaacgctggccgtaggtca

SEQ ID NO: 1594212 - DNA, 25 bp, Homo sapien
gctcgaaacgctggccgtaggtcat

SEQ ID NO: 1594213 - DNA, 25 bp, Homo sapien
caggagctgttagccaggctaggtg

SEQ ID NO: 1594214 - DNA, 25 bp, Homo sapien
gagctctatctggtaagtacttatc

SEQ ID NO: 1594215 - DNA, 25 bp, Homo sapien
actgagctctatctggtaagtactt

SEQ ID NO: 1594216 - DNA, 25 bp, Homo sapien
aggctaggtgcctgcaggttgaaga

SEQ ID NO: 1594217 - DNA, 25 bp, Homo sapien
caccatcttctgaaatgttctgggt

SEQ ID NO: 1594218 - DNA, 25 bp, Homo sapien
tctgaaatgttctgggtcataccca

SEQ ID NO: 1594219 - DNA, 25 bp, Homo sapien
ttccttcctgagcagtcccaccatc

SEQ ID NO: 1594220 - DNA, 25 bp, Homo sapien
gagcagtcccaccatcttctgaaat

SEQ ID NO: 1594221 - DNA, 25 bp, Homo sapien
ttatattacgttgtaatacataatg

SEQ ID NO: 1594222 - DNA, 25 bp, Homo sapien
cctgcactagacagtccattctggg

SEQ ID NO: 1594223 - DNA, 25 bp, Homo sapien
tcatcaggcactagattctcttgtt

SEQ ID NO: 1594224 - DNA, 25 bp, Homo sapien
ataattatacaattcatcatcatgt

SEQ ID NO: 1594225 - DNA, 25 bp, Homo sapien
aaaatcttcctgtagctggatgtgg

SEQ ID NO: 1594226 - DNA, 25 bp, Homo sapien
ggttccttggagcaaacaggtgaag

SEQ ID NO: 1594227 - DNA, 25 bp, Homo sapien
gaaggtgcctcctgcctaagacact

SEQ ID NO: 1594228 - DNA, 25 bp, Homo sapien
ggatcatttggaggccacgagtttg

SEQ ID NO: 1594229 - DNA, 25 bp, Homo sapien
tcccttgagttcaggagtctgggca

SEQ ID NO: 1594230 - DNA, 25 bp, Homo sapien
aatgtttaaaagttagccaggtgtg

SEQ ID NO: 1594231 - DNA, 25 bp, Homo sapien
ttgagttcaggagtctgggcaatat

SEQ ID NO: 1594232 - DNA, 25 bp, Homo sapien
gatcccttgagttcaggagtctggg

SEQ ID NO: 1594233 - DNA, 25 bp, Homo sapien
cccaggatagaggaatcacagctca

SEQ ID NO: 1594234 - DNA, 25 bp, Homo sapien
tcccgctttgtcctcctaagtagct

SEQ ID NO: 1594235 - DNA, 25 bp, Homo sapien
aatcctcccgctttgtcctcctaag

SEQ ID NO: 1594236 - DNA, 25 bp, Homo sapien
aagccttgacgtcctgggcgcaagc

SEQ ID NO: 1594237 - DNA, 25 bp, Homo sapien
accagtcataggctctagggcccac

SEQ ID NO: 1594238 - DNA, 25 bp, Homo sapien
gattcctcggcttgtagccatgtca

SEQ ID NO: 1594239 - DNA, 25 bp, Homo sapien
caaagaagtccatattccagggttc

SEQ ID NO: 1594240 - DNA, 25 bp, Homo sapien
ttaactaatgacctctgccccaggc

SEQ ID NO: 1594241 - DNA, 25 bp, Homo sapien
gtgggggttgaagcgagccgagatt

SEQ ID NO: 1594242 - DNA, 25 bp, Homo sapien
atcgctggaacccaagaggtggggg

SEQ ID NO: 1594243 - DNA, 25 bp, Homo sapien
gggttgaagcgagccgagattgagc

SEQ ID NO: 1594244 - DNA, 25 bp, Homo sapien
cccaagaggtgggggttgaagcgag

SEQ ID NO: 1594245 - DNA, 25 bp, Homo sapien
gtaatgactttgcacagcgaatcca

SEQ ID NO: 1594246 - DNA, 25 bp, Homo sapien
attcagtaatgactttgcacagcga

SEQ ID NO: 1594247 - DNA, 25 bp, Homo sapien
caagcgtctggaattcagtaatgac

SEQ ID NO: 1594248 - DNA, 25 bp, Homo sapien
tgggcaatttcaagcgtctggaatt

SEQ ID NO: 1594249 - DNA, 25 bp, Homo sapien
tatctataggtgatattgaaggtcc

SEQ ID NO: 1594250 - DNA, 25 bp, Homo sapien
tataggtgatattgaaggtccctcc

SEQ ID NO: 1594251 - DNA, 25 bp, Homo sapien
gctttttcagcatctgcaatatcta

SEQ ID NO: 1594252 - DNA, 25 bp, Homo sapien
cagcatctgcaatatctataggtga

SEQ ID NO: 1594253 - DNA, 25 bp, Homo sapien
tctggcctttttgctgtcgcagaac

SEQ ID NO: 1594254 - DNA, 25 bp, Homo sapien
ttccctctcgtaagctcgaggtggg

SEQ ID NO: 1594255 - DNA, 25 bp, Homo sapien
tcctttttccctctcgtaagctcga

SEQ ID NO: 1594256 - DNA, 25 bp, Homo sapien
gaatgtggttccatctggccttttt

SEQ ID NO: 1594257 - DNA, 25 bp, Homo sapien
caacggcaagtgtgtctacccagta

SEQ ID NO: 1594258 - DNA, 25 bp, Homo sapien
tgggcccaacggcaagtgtgtctac

SEQ ID NO: 1594259 - DNA, 25 bp, Homo sapien
tttcgcaaggtgggcccaacggcaa

SEQ ID NO: 1594260 - DNA, 25 bp, Homo sapien
tgtgtctacccagtaccctggaggg

SEQ ID NO: 1594261 - DNA, 25 bp, Homo sapien
ctgtcacagcctcgctcaaggagca

SEQ ID NO: 1594262 - DNA, 25 bp, Homo sapien
atggcagcccggccctgtccaggaa

SEQ ID NO: 1594263 - DNA, 25 bp, Homo sapien
cggtatgacggtctctcagaaaggg

SEQ ID NO: 1594264 - DNA, 25 bp, Homo sapien
ctgtccaggaatgtcggtatgacgg

SEQ ID NO: 1594265 - DNA, 25 bp, Homo sapien
ggacgccagcaaagaagacgtcatc

SEQ ID NO: 1594266 - DNA, 25 bp, Homo sapien
acagcccctccgagggcttctctct

SEQ ID NO: 1594267 - DNA, 25 bp, Homo sapien
acaccactcagcgccaaggaggacg

SEQ ID NO: 1594268 - DNA, 25 bp, Homo sapien
tctctctcaaggccgggggcacagc

SEQ ID NO: 1594269 - DNA, 25 bp, Homo sapien
tgaaatcatagcaccccatccgggt

SEQ ID NO: 1594270 - DNA, 25 bp, Homo sapien
tcaaggaatttctgctcggccacgc

SEQ ID NO: 1594271 - DNA, 25 bp, Homo sapien
ttgagccagaactaaaccagggagc

SEQ ID NO: 1594272 - DNA, 25 bp, Homo sapien
gattctagcaataaacgtgtccgag

SEQ ID NO: 1594273 - DNA, 25 bp, Homo sapien
tgaaaactgtcacggctcaggagct

SEQ ID NO: 1594274 - DNA, 25 bp, Homo sapien
tctgctttgcgggaagggccctccg

SEQ ID NO: 1594275 - DNA, 25 bp, Homo sapien
tgcccatgggtttcaccacaggcag

SEQ ID NO: 1594276 - DNA, 25 bp, Homo sapien
gatttggatacaagacgccagctgg

SEQ ID NO: 1594277 - DNA, 25 bp, Homo sapien
ggggtagtggcctcggcctggccgc

SEQ ID NO: 1594278 - DNA, 25 bp, Homo sapien
cgccggcccgggccgcctggtacat

SEQ ID NO: 1594279 - DNA, 25 bp, Homo sapien
cctggccgccggcccgggccgcctg

SEQ ID NO: 1594280 - DNA, 25 bp, Homo sapien
tggcctcggcctggccgccggcccg

SEQ ID NO: 1594281 - DNA, 25 bp, Homo sapien
atgaggcccactagccacggcggga

SEQ ID NO: 1594282 - DNA, 25 bp, Homo sapien
tcggccaggttgctgagaagtgaca

SEQ ID NO: 1594283 - DNA, 25 bp, Homo sapien
agtgcacggcgttggccaggtcggc

SEQ ID NO: 1594284 - DNA, 25 bp, Homo sapien
tgaggagatggtgcccatgaggccc

SEQ ID NO: 1594285 - DNA, 25 bp, Homo sapien
tcccaagcccctgaatgccctgtgt

SEQ ID NO: 1594286 - DNA, 25 bp, Homo sapien
cttcccaagcccctgaatgccctgt

SEQ ID NO: 1594287 - DNA, 25 bp, Homo sapien
caagcccctgaatgccctgtgtggc

SEQ ID NO: 1594288 - DNA, 25 bp, Homo sapien
agcccctgaatgccctgtgtggcct

SEQ ID NO: 1594289 - DNA, 25 bp, Homo sapien
ggtgaagggcgccgtggggctccgc

SEQ ID NO: 1594290 - DNA, 25 bp, Homo sapien
tggtgaagggcgccgtggggctccg

SEQ ID NO: 1594291 - DNA, 25 bp, Homo sapien
gtgaagggcgccgtggggctccgca

SEQ ID NO: 1594292 - DNA, 25 bp, Homo sapien
acaacgctggccccggacatacagt

SEQ ID NO: 1594293 - DNA, 25 bp, Homo sapien
accagagcccgagggaggatgcccc

SEQ ID NO: 1594294 - DNA, 25 bp, Homo sapien
ggagggttagctccacaacgctggc

SEQ ID NO: 1594295 - DNA, 25 bp, Homo sapien
ggagcaggagggttagctccacaac

SEQ ID NO: 1594296 - DNA, 25 bp, Homo sapien
gagagggcccacagggttgtactca

SEQ ID NO: 1594297 - DNA, 25 bp, Homo sapien
caggttccctaggacggagacacag

SEQ ID NO: 1594298 - DNA, 25 bp, Homo sapien
gagacacagcggacaaaggcgtcct

SEQ ID NO: 1594299 - DNA, 25 bp, Homo sapien
caccgagaagagtccacgtggagga

SEQ ID NO: 1594300 - DNA, 25 bp, Homo sapien
ccctccgggctctgaacctcactcc

SEQ ID NO: 1594301 - DNA, 25 bp, Homo sapien
ctccgggctctgaacctcactccag

SEQ ID NO: 1594302 - DNA, 25 bp, Homo sapien
cctccgggctctgaacctcactcca

SEQ ID NO: 1594303 - DNA, 25 bp, Homo sapien
tgaggatggcggaccccgccccaat

SEQ ID NO: 1594304 - DNA, 25 bp, Homo sapien
tcattccgcccggatttcctgagaa

SEQ ID NO: 1594305 - DNA, 25 bp, Homo sapien
cccggatttcctgagaagcggcagg

SEQ ID NO: 1594306 - DNA, 25 bp, Homo sapien
ccaatgtgctcattccgcccggatt

SEQ ID NO: 1594307 - DNA, 25 bp, Homo sapien
caaagagtcgcaagatggtcctgca

SEQ ID NO: 1594308 - DNA, 25 bp, Homo sapien
gcttagtgtagacaaacatggccag

SEQ ID NO: 1594309 - DNA, 25 bp, Homo sapien
gggacactgttcaaccagaactcca

SEQ ID NO: 1594310 - DNA, 25 bp, Homo sapien
tgagttgggtggacaccaccaacag

SEQ ID NO: 1594311 - DNA, 25 bp, Homo sapien
cagtggcccggtcagatcctaaatg

SEQ ID NO: 1594312 - DNA, 25 bp, Homo sapien
cacatgagattgtttgggacaaccc

SEQ ID NO: 1594313 - DNA, 25 bp, Homo sapien
tacaccgcctggtacaacctgaatg

SEQ ID NO: 1594314 - DNA, 25 bp, Homo sapien
tgtccagccatagggagagtcttgc

SEQ ID NO: 1594315 - DNA, 25 bp, Homo sapien
gacgccaggccgctcagcgacgcca

SEQ ID NO: 1594316 - DNA, 25 bp, Homo sapien
tgtacgactccagcgccgacgccag

SEQ ID NO: 1594317 - DNA, 25 bp, Homo sapien
gtcccggcccctgtacgactccagc

SEQ ID NO: 1594318 - DNA, 25 bp, Homo sapien
agcgccgacgccaggccgctcagcg

SEQ ID NO: 1594319 - DNA, 25 bp, Homo sapien
tgccccacggcggtttggccaacta

SEQ ID NO: 1594320 - DNA, 25 bp, Homo sapien
tcggagtttgctgcattctgcccca

SEQ ID NO: 1594321 - DNA, 25 bp, Homo sapien
ggccgacacgtgtgtgctctccagg

SEQ ID NO: 1594322 - DNA, 25 bp, Homo sapien
tggccaactacccacgcacaaaaaa

SEQ ID NO: 1594323 - DNA, 25 bp, Homo sapien
ctgttcgcagtggttcaaggagaga

SEQ ID NO: 1594324 - DNA, 25 bp, Homo sapien
gactgctgtaatatcacaacaaggc

SEQ ID NO: 1594325 - DNA, 25 bp, Homo sapien
caaggcatctttcgacgttaaggaa

SEQ ID NO: 1594326 - DNA, 25 bp, Homo sapien
ccgtagtgagcaggaatgactgctg

SEQ ID NO: 1594327 - DNA, 25 bp, Homo sapien
caccgcacccgcccttcttaattct

SEQ ID NO: 1594328 - DNA, 25 bp, Homo sapien
attgcaaggatccatcacagctaag

SEQ ID NO: 1594329 - DNA, 25 bp, Homo sapien
aagcaatcttcccacgtcgaccttc

SEQ ID NO: 1594330 - DNA, 25 bp, Homo sapien
tcattgcaaggatccatcacagcta

SEQ ID NO: 1594331 - DNA, 25 bp, Homo sapien
gactacacgagacaagatgggactt

SEQ ID NO: 1594332 - DNA, 25 bp, Homo sapien
gtttgggccttcctatccctgtctg

SEQ ID NO: 1594333 - DNA, 25 bp, Homo sapien
cagctatggatcaacgtgttcggag

SEQ ID NO: 1594334 - DNA, 25 bp, Homo sapien
aacaccctcaagtgggactacacga

SEQ ID NO: 1594335 - DNA, 25 bp, Homo sapien
ggaagacgtggaccccagctatgaa

SEQ ID NO: 1594336 - DNA, 25 bp, Homo sapien
gatccagatgtgattggccccgtac

SEQ ID NO: 1594337 - DNA, 25 bp, Homo sapien
cagctatgaagatctggagcccgtc

SEQ ID NO: 1594338 - DNA, 25 bp, Homo sapien
gaagacctcaacactgtcccggaag

SEQ ID NO: 1594339 - DNA, 25 bp, Homo sapien
gaagttgtgtgttgtgcagtcagta

SEQ ID NO: 1594340 - DNA, 25 bp, Homo sapien
tccctaccggcgagagtccagagtg

SEQ ID NO: 1594341 - DNA, 25 bp, Homo sapien
tgttctcccactcgtggcactgtca

SEQ ID NO: 1594342 - DNA, 25 bp, Homo sapien
atggctgaaggagacgccggcatcc

SEQ ID NO: 1594343 - DNA, 25 bp, Homo sapien
ggaccagcccctgtgatcaatgctt

SEQ ID NO: 1594344 - DNA, 25 bp, Homo sapien
tgatgggccaggttataatgaaccc

SEQ ID NO: 1594345 - DNA, 25 bp, Homo sapien
cttgaacgcccagtgaaaagccagt

SEQ ID NO: 1594346 - DNA, 25 bp, Homo sapien
cagtccttagcgttcccatgagaca

SEQ ID NO: 1594347 - DNA, 25 bp, Homo sapien
aagtgaaatccgtgtttgtggccca

SEQ ID NO: 1594348 - DNA, 25 bp, Homo sapien
ccctgcagtgagatagatgagtccc

SEQ ID NO: 1594349 - DNA, 25 bp, Homo sapien
gaagagaacaccatcgccttccgac

SEQ ID NO: 1594350 - DNA, 25 bp, Homo sapien
aatcagctggctgtgacattccggg

SEQ ID NO: 1594351 - DNA, 25 bp, Homo sapien
ttaaaatcaacagctgtggctgggc

SEQ ID NO: 1594352 - DNA, 25 bp, Homo sapien
ggtgacccttggaccaatggctcag

SEQ ID NO: 1594353 - DNA, 25 bp, Homo sapien
cggccaacgacacatttgacattga

SEQ ID NO: 1594354 - DNA, 25 bp, Homo sapien
gacattgatccgatggtggttactg

SEQ ID NO: 1594355 - DNA, 25 bp, Homo sapien
ctaagtcatacagtttcaatgacct

SEQ ID NO: 1594356 - DNA, 25 bp, Homo sapien
cattgaccctgggacgttgccatta

SEQ ID NO: 1594357 - DNA, 25 bp, Homo sapien
catacagtttcaatgaccttgtcat

SEQ ID NO: 1594358 - DNA, 25 bp, Homo sapien
accttgtcattgaccctgggacgtt

SEQ ID NO: 1594359 - DNA, 25 bp, Homo sapien
tccaacgtgggcgagagaccgagac

SEQ ID NO: 1594360 - DNA, 25 bp, Homo sapien
aacgtgggcgagagaccgagactct

SEQ ID NO: 1594361 - DNA, 25 bp, Homo sapien
gggcgagagaccgagactctgcttc

SEQ ID NO: 1594362 - DNA, 25 bp, Homo sapien
gcgagagaccgagactctgcttcaa

SEQ ID NO: 1594363 - DNA, 25 bp, Homo sapien
gacacattgactcaggcccttggaa

SEQ ID NO: 1594364 - DNA, 25 bp, Homo sapien
tgagcatcgaggtcatgtcagccct

SEQ ID NO: 1594365 - DNA, 25 bp, Homo sapien
caaactgtggaacaacgggtggagc

SEQ ID NO: 1594366 - DNA, 25 bp, Homo sapien
caatgtcaccggcagatgggtacac

SEQ ID NO: 1594367 - DNA, 25 bp, Homo sapien
ttcgctgctggtgaattgattcgac

SEQ ID NO: 1594368 - DNA, 25 bp, Homo sapien
gccagagaaaactgacgcccctctt

SEQ ID NO: 1594369 - DNA, 25 bp, Homo sapien
cacattcagattggaggttagggaa

SEQ ID NO: 1594370 - DNA, 25 bp, Homo sapien
gaggagcattcgctgctggtgaatt

SEQ ID NO: 1594371 - DNA, 25 bp, Homo sapien
tttaaggatcggctccctgtcgcgc

SEQ ID NO: 1594372 - DNA, 25 bp, Homo sapien
ctgactgccgttggaccgtaggccc

SEQ ID NO: 1594373 - DNA, 25 bp, Homo sapien
ctggacctttcgtgtcggacccttg

SEQ ID NO: 1594374 - DNA, 25 bp, Homo sapien
ccgaggagggcctggacctttcgtg

SEQ ID NO: 1594375 - DNA, 25 bp, Homo sapien
tccagggagtggtgaatgcagctcc

SEQ ID NO: 1594376 - DNA, 25 bp, Homo sapien
acatcatcccgggtaatccagggag

SEQ ID NO: 1594377 - DNA, 25 bp, Homo sapien
acttacatcgtgctcaatgggcggc

SEQ ID NO: 1594378 - DNA, 25 bp, Homo sapien
ggacttcgccatcgactggactgca

SEQ ID NO: 1594379 - DNA, 25 bp, Homo sapien
tcctgcaccgtgtagtcttggtaca

SEQ ID NO: 1594380 - DNA, 25 bp, Homo sapien
gtacacggaggtatcatgaaacccc

SEQ ID NO: 1594381 - DNA, 25 bp, Homo sapien
ttgaccatgacttggagggtctgga

SEQ ID NO: 1594382 - DNA, 25 bp, Homo sapien
accccaaagtttgtatgtgatttgc

SEQ ID NO: 1594383 - DNA, 25 bp, Homo sapien
tgaacgaaccgcagaagaatcgcat

SEQ ID NO: 1594384 - DNA, 25 bp, Homo sapien
tgtccatgagcgtcgatgccttcac

SEQ ID NO: 1594385 - DNA, 25 bp, Homo sapien
gaaggcatctacaagtacaactcgg

SEQ ID NO: 1594386 - DNA, 25 bp, Homo sapien
gaatcgcattctggaggtgagcccg

SEQ ID NO: 1594387 - DNA, 25 bp, Homo sapien
ctctgactttgagtccagtcctgct

SEQ ID NO: 1594388 - DNA, 25 bp, Homo sapien
tccaccctctgactttgagtccagt

SEQ ID NO: 1594389 - DNA, 25 bp, Homo sapien
gacagtcagtcggtattcctgggtc

SEQ ID NO: 1594390 - DNA, 25 bp, Homo sapien
ctgtctgtccccaaccgtgtctggg

SEQ ID NO: 1594391 - DNA, 25 bp, Homo sapien
ctctgaactgatctctcaggctcga

SEQ ID NO: 1594392 - DNA, 25 bp, Homo sapien
gggctgtttcgaagctgcctctgaa

SEQ ID NO: 1594393 - DNA, 25 bp, Homo sapien
actgatctctcaggctcgaggtgtc

SEQ ID NO: 1594394 - DNA, 25 bp, Homo sapien
agccagggctgtttcgaagctgcct

SEQ ID NO: 1594395 - DNA, 25 bp, Homo sapien
tgtttgacaatccagttgccccctg

SEQ ID NO: 1594396 - DNA, 25 bp, Homo sapien
tgccgcccagttctacacagctcag

SEQ ID NO: 1594397 - DNA, 25 bp, Homo sapien
cttgatcttgtctcccctggccagc

SEQ ID NO: 1594398 - DNA, 25 bp, Homo sapien
gcgtttggcatggggccaacttcta

SEQ ID NO: 1594399 - DNA, 25 bp, Homo sapien
tgacccgttcgaagcacaaatctga

SEQ ID NO: 1594400 - DNA, 25 bp, Homo sapien
taatagcctacagcccgctaatggc

SEQ ID NO: 1594401 - DNA, 25 bp, Homo sapien
taggactaaggaccacgccctggtc

SEQ ID NO: 1594402 - DNA, 25 bp, Homo sapien
taatggcttcccaggcttaggacta

SEQ ID NO: 1594403 - DNA, 25 bp, Homo sapien
agaccatgatgtacaaacgtagctg

SEQ ID NO: 1594404 - DNA, 25 bp, Homo sapien
gagggactggcctctcgagtccaga

SEQ ID NO: 1594405 - DNA, 25 bp, Homo sapien
tgaggccgggcagtatctggcctgg

SEQ ID NO: 1594406 - DNA, 25 bp, Homo sapien
gcactcctgagctgtactccctcgg

SEQ ID NO: 1594407 - DNA, 25 bp, Homo sapien
aacactgcggctggcacgctctgct

SEQ ID NO: 1594408 - DNA, 25 bp, Homo sapien
gctcccaaacactgcggctggcacg

SEQ ID NO: 1594409 - DNA, 25 bp, Homo sapien
ctcccaaacactgcggctggcacgc

SEQ ID NO: 1594410 - DNA, 25 bp, Homo sapien
ccaaacactgcggctggcacgctct

SEQ ID NO: 1594411 - DNA, 25 bp, Homo sapien
ggcccaccctggtaatgccaccgtc

SEQ ID NO: 1594412 - DNA, 25 bp, Homo sapien
caccctggtaatgccaccgtccccg

SEQ ID NO: 1594413 - DNA, 25 bp, Homo sapien
ctgtggggaaggcgggagccagtca

SEQ ID NO: 1594414 - DNA, 25 bp, Homo sapien
ctggcgttggcctgtcccccgaggc

SEQ ID NO: 1594415 - DNA, 25 bp, Homo sapien
ctcggggttgacctgctgtgccagc

SEQ ID NO: 1594416 - DNA, 25 bp, Homo sapien
ctgggcgcgcaagggctggtcacgc

SEQ ID NO: 1594417 - DNA, 25 bp, Homo sapien
atcttgctctgggcgcgcaagggct

SEQ ID NO: 1594418 - DNA, 25 bp, Homo sapien
gctctgggcgcgcaagggctggtca

SEQ ID NO: 1594419 - DNA, 25 bp, Homo sapien
cgcaagggctggtcacgctccgcct

SEQ ID NO: 1594420 - DNA, 25 bp, Homo sapien
tcaaagtccttccacgtctgccaga

SEQ ID NO: 1594421 - DNA, 25 bp, Homo sapien
cactgcccgagaccttgagcatctg

SEQ ID NO: 1594422 - DNA, 25 bp, Homo sapien
gccggatacgcagcatttccttgat

SEQ ID NO: 1594423 - DNA, 25 bp, Homo sapien
ttgacctgcgtgttgtacgtggcct

SEQ ID NO: 1594424 - DNA, 25 bp, Homo sapien
gtgagctggctgactccgccgcagc

SEQ ID NO: 1594425 - DNA, 25 bp, Homo sapien
gtgtgcccgtgagctggctgactcc

SEQ ID NO: 1594426 - DNA, 25 bp, Homo sapien
ccgtgagctggctgactccgccgca

SEQ ID NO: 1594427 - DNA, 25 bp, Homo sapien
gtgcccgtgagctggctgactccgc

SEQ ID NO: 1594428 - DNA, 25 bp, Homo sapien
ggcgcggtcaatctccccgagcttg

SEQ ID NO: 1594429 - DNA, 25 bp, Homo sapien
cgagcttgcactccatgtctgcaaa

SEQ ID NO: 1594430 - DNA, 25 bp, Homo sapien
gtctgcaaaccgcaggcacatctca

SEQ ID NO: 1594431 - DNA, 25 bp, Homo sapien
aggcacatctcacgcgcgtgctcgt

SEQ ID NO: 1594432 - DNA, 25 bp, Homo sapien
ccagctgtgcgtacagcaggtacaa

SEQ ID NO: 1594433 - DNA, 25 bp, Homo sapien
cggccgcccgcttgatgtagatgtt

SEQ ID NO: 1594434 - DNA, 25 bp, Homo sapien
gaacatgtcatactgctgggcgggc

SEQ ID NO: 1594435 - DNA, 25 bp, Homo sapien
tcgtacacggccatggcatgccggg

SEQ ID NO: 1594436 - DNA, 25 bp, Homo sapien
gggagcacggtcagccggggccagt

SEQ ID NO: 1594437 - DNA, 25 bp, Homo sapien
gggagaggggagcacggtcagccgg

SEQ ID NO: 1594438 - DNA, 25 bp, Homo sapien
agtcagaaacccagcccgcccgcca

SEQ ID NO: 1594439 - DNA, 25 bp, Homo sapien
gtcagccggggccagtcagaaaccc

SEQ ID NO: 1594440 - DNA, 25 bp, Homo sapien
cccatagcgggcaatgaatttggtc

SEQ ID NO: 1594441 - DNA, 25 bp, Homo sapien
gacacgttgggccacttgaacagcg

SEQ ID NO: 1594442 - DNA, 25 bp, Homo sapien
ttgaacagcgagatgccgcgctcgt

SEQ ID NO: 1594443 - DNA, 25 bp, Homo sapien
gaatttggtcaggtaggtgctccag

SEQ ID NO: 1594444 - DNA, 25 bp, Homo sapien
tggccccataggaggtgacatgatg

SEQ ID NO: 1594445 - DNA, 25 bp, Homo sapien
cacaaagacatagggagaaggcggc

SEQ ID NO: 1594446 - DNA, 25 bp, Homo sapien
tgtataatgcccacacgatccatag

SEQ ID NO: 1594447 - DNA, 25 bp, Homo sapien
ttcgtaagttgctgaggacccctgg

SEQ ID NO: 1594448 - DNA, 25 bp, Homo sapien
tgaagctctcctcgaagtacttgtg

SEQ ID NO: 1594449 - DNA, 25 bp, Homo sapien
catggcatagttgatgacgatctgg

SEQ ID NO: 1594450 - DNA, 25 bp, Homo sapien
ccaggatgcggtcgtacacggcctt

SEQ ID NO: 1594451 - DNA, 25 bp, Homo sapien
gttgcgatacgcaggtccaggatgc

SEQ ID NO: 1594452 - DNA, 25 bp, Homo sapien
tctgaaccatcaaagtactcggccc

SEQ ID NO: 1594453 - DNA, 25 bp, Homo sapien
cagtgacttgtacacgcggttctgc

SEQ ID NO: 1594454 - DNA, 25 bp, Homo sapien
cgcggttctgcacgggctctgaacc

SEQ ID NO: 1594455 - DNA, 25 bp, Homo sapien
ggtcggcgagcatggaccagacctt

SEQ ID NO: 1594456 - DNA, 25 bp, Homo sapien
ctggcccttgccctacaacctgcag

SEQ ID NO: 1594457 - DNA, 25 bp, Homo sapien
tggcccttgccctacaacctgcagc

SEQ ID NO: 1594458 - DNA, 25 bp, Homo sapien
cccttgccctacaacctgcagcccc

SEQ ID NO: 1594459 - DNA, 25 bp, Homo sapien
ggcccttgccctacaacctgcagcc

SEQ ID NO: 1594460 - DNA, 25 bp, Homo sapien
tgacaccacacgcttgccaggtcat

SEQ ID NO: 1594461 - DNA, 25 bp, Homo sapien
agccgcaaggcctcatcgtagttct

SEQ ID NO: 1594462 - DNA, 25 bp, Homo sapien
tcatcgtagttctcgtgtcggagct

SEQ ID NO: 1594463 - DNA, 25 bp, Homo sapien
ttctcgtgtcggagctccagctctc

SEQ ID NO: 1594464 - DNA, 25 bp, Homo sapien
gaggcgaggctgagaccctgcccac

SEQ ID NO: 1594465 - DNA, 25 bp, Homo sapien
agaggcgaggctgagaccctgccca

SEQ ID NO: 1594466 - DNA, 25 bp, Homo sapien
ggcagaggcgaggctgagaccctgc

SEQ ID NO: 1594467 - DNA, 25 bp, Homo sapien
aacacacaggcacacgcaacagggt

SEQ ID NO: 1594468 - DNA, 25 bp, Homo sapien
cacacaggcacacgcaacagggtgc

SEQ ID NO: 1594469 - DNA, 25 bp, Homo sapien
cacaggcacacgcaacagggtgctc

SEQ ID NO: 1594470 - DNA, 25 bp, Homo sapien
caggcacacgcaacagggtgctcac

SEQ ID NO: 1594471 - DNA, 25 bp, Homo sapien
atcgtccagctgtccgttgtcctca

SEQ ID NO: 1594472 - DNA, 25 bp, Homo sapien
accgtctgcacagcctctgtgtagg

SEQ ID NO: 1594473 - DNA, 25 bp, Homo sapien
cagcctctgtgtaggtgttgatgat

SEQ ID NO: 1594474 - DNA, 25 bp, Homo sapien
taaaacttggcaaacgccacccaca

SEQ ID NO: 1594475 - DNA, 25 bp, Homo sapien
ctggggacaggagggaggaggtcat

SEQ ID NO: 1594476 - DNA, 25 bp, Homo sapien
tggggacaggagggaggaggtcata

SEQ ID NO: 1594477 - DNA, 25 bp, Homo sapien
gggtggaattggacctactaagcaa

SEQ ID NO: 1594478 - DNA, 25 bp, Homo sapien
caggggtggaattggacctactaag

SEQ ID NO: 1594479 - DNA, 25 bp, Homo sapien
ggggtggaattggacctactaagca

SEQ ID NO: 1594480 - DNA, 25 bp, Homo sapien
cactcgtgcacgtggtgtgggtttt

SEQ ID NO: 1594481 - DNA, 25 bp, Homo sapien
gtgcagggcgacacgcttgtgccac

SEQ ID NO: 1594482 - DNA, 25 bp, Homo sapien
cgcagcaagacgctgttgaggagca

SEQ ID NO: 1594483 - DNA, 25 bp, Homo sapien
ctgatgagctgctcgaagcgggcca

SEQ ID NO: 1594484 - DNA, 25 bp, Homo sapien
tccatctttgcagcgatcatgctct

SEQ ID NO: 1594485 - DNA, 25 bp, Homo sapien
aaacacctgtgtgaagtcccgcacg

SEQ ID NO: 1594486 - DNA, 25 bp, Homo sapien
ggtcatcactgtccggatggcctcc

SEQ ID NO: 1594487 - DNA, 25 bp, Homo sapien
ctcgaactgggcgtagctgtcaaac

SEQ ID NO: 1594488 - DNA, 25 bp, Homo sapien
cattgagggactgtaccttgtccgg

SEQ ID NO: 1594489 - DNA, 25 bp, Homo sapien
gtcggcgagagaacaccagagcttg

SEQ ID NO: 1594490 - DNA, 25 bp, Homo sapien
ccccgcggatgatggcgtccacatt

SEQ ID NO: 1594491 - DNA, 25 bp, Homo sapien
tcgaaatggccgctgcggatgtagt

SEQ ID NO: 1594492 - DNA, 25 bp, Homo sapien
aggctcagtcatggagggggtggcc

SEQ ID NO: 1594493 - DNA, 25 bp, Homo sapien
gcagtgggggagagtctcaggctca

SEQ ID NO: 1594494 - DNA, 25 bp, Homo sapien
ggggagagtctcaggctcagtcatg

SEQ ID NO: 1594495 - DNA, 25 bp, Homo sapien
gctcagtcatggagggggtggccct

SEQ ID NO: 1594496 - DNA, 25 bp, Homo sapien
cagttgccggctcccggcaggccca

SEQ ID NO: 1594497 - DNA, 25 bp, Homo sapien
ccagttgccggctcccggcaggccc

SEQ ID NO: 1594498 - DNA, 25 bp, Homo sapien
agttgccggctcccggcaggcccac

SEQ ID NO: 1594499 - DNA, 25 bp, Homo sapien
tccagccggtcacttgacttgaggt

SEQ ID NO: 1594500 - DNA, 25 bp, Homo sapien
gaggtactcaatgtactcctctgca

SEQ ID NO: 1594501 - DNA, 25 bp, Homo sapien
tggtagttggacttgccggccttag

SEQ ID NO: 1594502 - DNA, 25 bp, Homo sapien
gaaacgctcgtcgttcaccacggtg

SEQ ID NO: 1594503 - DNA, 25 bp, Homo sapien
ctggggaaccagcgcacctgctagg

SEQ ID NO: 1594504 - DNA, 25 bp, Homo sapien
ggggaaccagcgcacctgctaggct

SEQ ID NO: 1594505 - DNA, 25 bp, Homo sapien
ggaaccagcgcacctgctaggctca

SEQ ID NO: 1594506 - DNA, 25 bp, Homo sapien
gaaccagcgcacctgctaggctcac

SEQ ID NO: 1594507 - DNA, 25 bp, Homo sapien
gccaaattcgagagtgctgcgtgat

SEQ ID NO: 1594508 - DNA, 25 bp, Homo sapien
agtaatctagccacagacgaggcat

SEQ ID NO: 1594509 - DNA, 25 bp, Homo sapien
tagcctcgcacagctgtctcaggca

SEQ ID NO: 1594510 - DNA, 25 bp, Homo sapien
tgtgagcgcaggaagcgcagataca

SEQ ID NO: 1594511 - DNA, 25 bp, Homo sapien
ggctaagccacggactccatggcct

SEQ ID NO: 1594512 - DNA, 25 bp, Homo sapien
caccaccatggactgagctccactt

SEQ ID NO: 1594513 - DNA, 25 bp, Homo sapien
gccaccacataaatgcggcgggacc

SEQ ID NO: 1594514 - DNA, 25 bp, Homo sapien
acagacactcgatgtcctgtggctg

SEQ ID NO: 1594515 - DNA, 25 bp, Homo sapien
aaaggccctctcatgacagttgttg

SEQ ID NO: 1594516 - DNA, 25 bp, Homo sapien
gccttcaggtatcggtaccagagtt

SEQ ID NO: 1594517 - DNA, 25 bp, Homo sapien
catcttcataggcagggtcggtcac

SEQ ID NO: 1594518 - DNA, 25 bp, Homo sapien
tgcccgacgcgccttcaggtatcgg

SEQ ID NO: 1594519 - DNA, 25 bp, Homo sapien
aaggtgtgctgacccatcaagggat

SEQ ID NO: 1594520 - DNA, 25 bp, Homo sapien
gatcggtcagctttatggacacccc

SEQ ID NO: 1594521 - DNA, 25 bp, Homo sapien
tttgccctgccccagttggcaaatg

SEQ ID NO: 1594522 - DNA, 25 bp, Homo sapien
gaggggtgacatgtctcagcaatga

SEQ ID NO: 1594523 - DNA, 25 bp, Homo sapien
agttttgttataactggaccaggtg

SEQ ID NO: 1594524 - DNA, 25 bp, Homo sapien
atgaaacacgaagcaatcacccggg

SEQ ID NO: 1594525 - DNA, 25 bp, Homo sapien
cttggcagttttgttataactggac

SEQ ID NO: 1594526 - DNA, 25 bp, Homo sapien
aggtcagtgatgaaacacgaagcaa

SEQ ID NO: 1594527 - DNA, 25 bp, Homo sapien
tttgaactcgatgtagcgaagccag

SEQ ID NO: 1594528 - DNA, 25 bp, Homo sapien
agcagcttgagtgcccgctcgtata

SEQ ID NO: 1594529 - DNA, 25 bp, Homo sapien
catttgacagagaattggttccgca

SEQ ID NO: 1594530 - DNA, 25 bp, Homo sapien
ctcgtatagctgattgagcctgggc

SEQ ID NO: 1594531 - DNA, 25 bp, Homo sapien
gatttcctcctcataggggaggtcc

SEQ ID NO: 1594532 - DNA, 25 bp, Homo sapien
tcctcataggggaggtcctcttcct

SEQ ID NO: 1594533 - DNA, 25 bp, Homo sapien
ctcctcataggggaggtcctcttcc

SEQ ID NO: 1594534 - DNA, 25 bp, Homo sapien
ttcctcctcataggggaggtcctct

SEQ ID NO: 1594535 - DNA, 25 bp, Homo sapien
gaagacaaggtccggccgctcgggc

SEQ ID NO: 1594536 - DNA, 25 bp, Homo sapien
ttttctggatgcccaggtacaggag

SEQ ID NO: 1594537 - DNA, 25 bp, Homo sapien
tttctggatgcccaggtacaggaga

SEQ ID NO: 1594538 - DNA, 25 bp, Homo sapien
tctggatgcccaggtacaggagaga

SEQ ID NO: 1594539 - DNA, 25 bp, Homo sapien
ggatgcccaggtacaggagagagtc

SEQ ID NO: 1594540 - DNA, 25 bp, Homo sapien
tatcagtttttgggggccgagtgag

SEQ ID NO: 1594541 - DNA, 25 bp, Homo sapien
atcagtttttgggggccgagtgaga

SEQ ID NO: 1594542 - DNA, 25 bp, Homo sapien
tcagtttttgggggccgagtgagac

SEQ ID NO: 1594543 - DNA, 25 bp, Homo sapien
ttatcagtttttgggggccgagtga

SEQ ID NO: 1594544 - DNA, 25 bp, Homo sapien
gtcccagctcgtttctgtgctccgt

SEQ ID NO: 1594545 - DNA, 25 bp, Homo sapien
gccgagagcggtcgggtcctgaggg

SEQ ID NO: 1594546 - DNA, 25 bp, Homo sapien
tgagggtcccagctcgtttctgtgc

SEQ ID NO: 1594547 - DNA, 25 bp, Homo sapien
ggctgctgttccgacggaagccgag

SEQ ID NO: 1594548 - DNA, 25 bp, Homo sapien
cacgggctggaagccgggcaggctg

SEQ ID NO: 1594549 - DNA, 25 bp, Homo sapien
gactgtcacacgttggtcatccatg

SEQ ID NO: 1594550 - DNA, 25 bp, Homo sapien
ttggtcatccatgcggcggccctgg

SEQ ID NO: 1594551 - DNA, 25 bp, Homo sapien
gcaggctgctgactgtcacacgttg

SEQ ID NO: 1594552 - DNA, 25 bp, Homo sapien
ttgcagtgaacagcgctgtccctcc

SEQ ID NO: 1594553 - DNA, 25 bp, Homo sapien
ccggcccggcttgcagtgaacagcg

SEQ ID NO: 1594554 - DNA, 25 bp, Homo sapien
ggcccggcccggcttgcagtgaaca

SEQ ID NO: 1594555 - DNA, 25 bp, Homo sapien
cccggcttgcagtgaacagcgctgt

SEQ ID NO: 1594556 - DNA, 25 bp, Homo sapien
ccctgcacgtggctcagcagattga

SEQ ID NO: 1594557 - DNA, 25 bp, Homo sapien
tgcacgtggctcagcagattgaaga

SEQ ID NO: 1594558 - DNA, 25 bp, Homo sapien
ggctcagcagattgaagaagccctc

SEQ ID NO: 1594559 - DNA, 25 bp, Homo sapien
ggtcgccctgcacgtggctcagcag

SEQ ID NO: 1594560 - DNA, 25 bp, Homo sapien
catggcccaggagctacccccaggt

SEQ ID NO: 1594561 - DNA, 25 bp, Homo sapien
atggcccaggagctacccccaggtc

SEQ ID NO: 1594562 - DNA, 25 bp, Homo sapien
ggaaacatggcccaggagctacccc

SEQ ID NO: 1594563 - DNA, 25 bp, Homo sapien
cagggaaacatggcccaggagctac

SEQ ID NO: 1594564 - DNA, 25 bp, Homo sapien
gggcctgagccttcctccgtcttct

SEQ ID NO: 1594565 - DNA, 25 bp, Homo sapien
ctgagccttcctccgtcttctcctc

SEQ ID NO: 1594566 - DNA, 25 bp, Homo sapien
caggggcctgagccttcctccgtct

SEQ ID NO: 1594567 - DNA, 25 bp, Homo sapien
ggcctgagccttcctccgtcttctc

SEQ ID NO: 1594568 - DNA, 25 bp, Homo sapien
gacctgagcttggacctcgctgtgc

SEQ ID NO: 1594569 - DNA, 25 bp, Homo sapien
tggactccagtcacttttctgctgg

SEQ ID NO: 1594570 - DNA, 25 bp, Homo sapien
cagagagggccttttaaacgtccag

SEQ ID NO: 1594571 - DNA, 25 bp, Homo sapien
attgtttgcccacaacgatgctgga

SEQ ID NO: 1594572 - DNA, 25 bp, Homo sapien
tcagtacgtgtatccctttcctagg

SEQ ID NO: 1594573 - DNA, 25 bp, Homo sapien
gccagaacaaagtgtcatagaccag

SEQ ID NO: 1594574 - DNA, 25 bp, Homo sapien
tccctctatgccaatgaagtgtccc

SEQ ID NO: 1594575 - DNA, 25 bp, Homo sapien
gaccagatggcttaaaacacataag

SEQ ID NO: 1594576 - DNA, 25 bp, Homo sapien
tgaaaattatgtccaggtgcctgca

SEQ ID NO: 1594577 - DNA, 25 bp, Homo sapien
taattcgattgttggtccacgaggg

SEQ ID NO: 1594578 - DNA, 25 bp, Homo sapien
tacagaaggcaagtgggtcaagatc

SEQ ID NO: 1594579 - DNA, 25 bp, Homo sapien
tccaggtcggaacattgggcaggac

SEQ ID NO: 1594580 - DNA, 25 bp, Homo sapien
tgggtaaaacaagatcccggatcca

SEQ ID NO: 1594581 - DNA, 25 bp, Homo sapien
cgctccacttaaccaaaaagcagat

SEQ ID NO: 1594582 - DNA, 25 bp, Homo sapien
tattgagtgcaaagggttgggtaaa

SEQ ID NO: 1594583 - DNA, 25 bp, Homo sapien
gcagattttagcttctcactcctta

SEQ ID NO: 1594584 - DNA, 25 bp, Homo sapien
cactgctgttctccgagctggtaca

SEQ ID NO: 1594585 - DNA, 25 bp, Homo sapien
gcaccttctacatcatcgagcgcga

SEQ ID NO: 1594586 - DNA, 25 bp, Homo sapien
taggcgcgttgctcttcgtcaaggg

SEQ ID NO: 1594587 - DNA, 25 bp, Homo sapien
catgatcaagttcgaggaggcagtc

SEQ ID NO: 1594588 - DNA, 25 bp, Homo sapien
gtcggtgtcacctctagatttgttt

SEQ ID NO: 1594589 - DNA, 25 bp, Homo sapien
tcacctctagatttgtttaggatgc

SEQ ID NO: 1594590 - DNA, 25 bp, Homo sapien
ccaaaggggtcggtgtcacctctag

SEQ ID NO: 1594591 - DNA, 25 bp, Homo sapien
gatttgtttaggatgctctgttgga

SEQ ID NO: 1594592 - DNA, 25 bp, Homo sapien
acctgagctggggatactcaggtcc

SEQ ID NO: 1594593 - DNA, 25 bp, Homo sapien
ctcaccacctgagctggggatactc

SEQ ID NO: 1594594 - DNA, 25 bp, Homo sapien
ctgagctggggatactcaggtcctg

SEQ ID NO: 1594595 - DNA, 25 bp, Homo sapien
caccacctgagctggggatactcag

SEQ ID NO: 1594596 - DNA, 25 bp, Homo sapien
tggggtgtactctcatctggagagg

SEQ ID NO: 1594597 - DNA, 25 bp, Homo sapien
ggggtgtactctcatctggagaggg

SEQ ID NO: 1594598 - DNA, 25 bp, Homo sapien
gagagggtgctgttggggtgtactc

SEQ ID NO: 1594599 - DNA, 25 bp, Homo sapien
gagggtgctgttggggtgtactctc

SEQ ID NO: 1594600 - DNA, 25 bp, Homo sapien
gcactcccatctggagagggtgctg

SEQ ID NO: 1594601 - DNA, 25 bp, Homo sapien
gtactctcatctggagagggtgctg

SEQ ID NO: 1594602 - DNA, 25 bp, Homo sapien
ggtgctgttggggtgtactctcatc

SEQ ID NO: 1594603 - DNA, 25 bp, Homo sapien
tgttgggggcactcccatctggaga

SEQ ID NO: 1594604 - DNA, 25 bp, Homo sapien
tagaggagcgggagatgtgtcagct

SEQ ID NO: 1594605 - DNA, 25 bp, Homo sapien
ttgggtggcagaaaatgtcacaggg

SEQ ID NO: 1594606 - DNA, 25 bp, Homo sapien
ctttcagccacaaagaggcttttag

SEQ ID NO: 1594607 - DNA, 25 bp, Homo sapien
aaatgtcacagggacctttcagcca

SEQ ID NO: 1594608 - DNA, 25 bp, Homo sapien
gtgcatgtggccagccggtcgcaca

SEQ ID NO: 1594609 - DNA, 25 bp, Homo sapien
aatcaggtcccatggactccgcgga

SEQ ID NO: 1594610 - DNA, 25 bp, Homo sapien
tccgcggaaccttcgctggctggcg

SEQ ID NO: 1594611 - DNA, 25 bp, Homo sapien
cagggtctggtcttgaatcaggtcc

SEQ ID NO: 1594612 - DNA, 25 bp, Homo sapien
tcgcagaaggcgtcgttccagcgac

SEQ ID NO: 1594613 - DNA, 25 bp, Homo sapien
agcttacggtcgcagaaggcgtcgt

SEQ ID NO: 1594614 - DNA, 25 bp, Homo sapien
aaggcgtcgttccagcgaccggagc

SEQ ID NO: 1594615 - DNA, 25 bp, Homo sapien
gcatcatcacgcagtcctcgccctg

SEQ ID NO: 1594616 - DNA, 25 bp, Homo sapien
tgtggctggcatgcttggtcaggaa

SEQ ID NO: 1594617 - DNA, 25 bp, Homo sapien
ggctggcatgcttggtcaggaagtc

SEQ ID NO: 1594618 - DNA, 25 bp, Homo sapien
ctcccatccacccagataaactccc

SEQ ID NO: 1594619 - DNA, 25 bp, Homo sapien
gtgtggctggcatgcttggtcagga

SEQ ID NO: 1594620 - DNA, 25 bp, Homo sapien
gcccaccacctctgcagagccccag

SEQ ID NO: 1594621 - DNA, 25 bp, Homo sapien
cctcgccatgctgcccaccacctct

SEQ ID NO: 1594622 - DNA, 25 bp, Homo sapien
gctgcccaccacctctgcagagccc

SEQ ID NO: 1594623 - DNA, 25 bp, Homo sapien
atgctgcccaccacctctgcagagc

SEQ ID NO: 1594624 - DNA, 25 bp, Homo sapien
gcttggtgcccttgccgaagtagta

SEQ ID NO: 1594625 - DNA, 25 bp, Homo sapien
ggatgctgaccagctgcccttccat

SEQ ID NO: 1594626 - DNA, 25 bp, Homo sapien
ttccatgtcgtcacaggcataccgg

SEQ ID NO: 1594627 - DNA, 25 bp, Homo sapien
ataccgggcgtggacccactgcttg

SEQ ID NO: 1594628 - DNA, 25 bp, Homo sapien
tcagggcacgtgttgcacacaaagc

SEQ ID NO: 1594629 - DNA, 25 bp, Homo sapien
gatccacttttcagggcacgtgttg

SEQ ID NO: 1594630 - DNA, 25 bp, Homo sapien
aaattgatccacttttcagggcacg

SEQ ID NO: 1594631 - DNA, 25 bp, Homo sapien
ttttcagggcacgtgttgcacacaa

SEQ ID NO: 1594632 - DNA, 25 bp, Homo sapien
tggcaccgacagcaaaaccagtgct

SEQ ID NO: 1594633 - DNA, 25 bp, Homo sapien
catcattaacagaggtacccaccac

SEQ ID NO: 1594634 - DNA, 25 bp, Homo sapien
tcatcaccgacatcattaacagagg

SEQ ID NO: 1594635 - DNA, 25 bp, Homo sapien
gccaacaccatctttaccaaccaca

SEQ ID NO: 1594636 - DNA, 25 bp, Homo sapien
caaacgtatagacatgctgcctcac

SEQ ID NO: 1594637 - DNA, 25 bp, Homo sapien
tcacgcgtcgtcctgagcagagact

SEQ ID NO: 1594638 - DNA, 25 bp, Homo sapien
cacgtgcgtgccgtcacatttgcca

SEQ ID NO: 1594639 - DNA, 25 bp, Homo sapien
tatatctttgtgtcctcccgatgac

SEQ ID NO: 1594640 - DNA, 25 bp, Homo sapien
tgcaactccatccttagctttgtca

SEQ ID NO: 1594641 - DNA, 25 bp, Homo sapien
acctgcaactccatccttagctttg

SEQ ID NO: 1594642 - DNA, 25 bp, Homo sapien
cgctggacacctgcaactccatcct

SEQ ID NO: 1594643 - DNA, 25 bp, Homo sapien
gcaactccatccttagctttgtcac

SEQ ID NO: 1594644 - DNA, 25 bp, Homo sapien
aaatctgaagcttcgttcctctcgt

SEQ ID NO: 1594645 - DNA, 25 bp, Homo sapien
ttccagcaaatctgaagcttcgttc

SEQ ID NO: 1594646 - DNA, 25 bp, Homo sapien
cagcaaatctgaagcttcgttcctc

SEQ ID NO: 1594647 - DNA, 25 bp, Homo sapien
tcctcccggagtctttccagcaaat

SEQ ID NO: 1594648 - DNA, 25 bp, Homo sapien
ggtgctcagagaccaactggcaggc

SEQ ID NO: 1594649 - DNA, 25 bp, Homo sapien
ggcggtgctcagagaccaactggca

SEQ ID NO: 1594650 - DNA, 25 bp, Homo sapien
caacaaggggcggtgctcagagacc

SEQ ID NO: 1594651 - DNA, 25 bp, Homo sapien
gtgctcagagaccaactggcaggcc

SEQ ID NO: 1594652 - DNA, 25 bp, Homo sapien
tgcttgaagcccgttcaggttccag

SEQ ID NO: 1594653 - DNA, 25 bp, Homo sapien
cagatctgcttgaagcccgttcagg

SEQ ID NO: 1594654 - DNA, 25 bp, Homo sapien
tgaagctgctcagatctgcttgaag

SEQ ID NO: 1594655 - DNA, 25 bp, Homo sapien
tgaagcccgttcaggttccaggaca

SEQ ID NO: 1594656 - DNA, 25 bp, Homo sapien
aggatgtgtacaggccgagggtgcc

SEQ ID NO: 1594657 - DNA, 25 bp, Homo sapien
gaggatgtgtacaggccgagggtgc

SEQ ID NO: 1594658 - DNA, 25 bp, Homo sapien
agggaggatgtgtacaggccgaggg

SEQ ID NO: 1594659 - DNA, 25 bp, Homo sapien
ggaggatgtgtacaggccgagggtg

SEQ ID NO: 1594660 - DNA, 25 bp, Homo sapien
agttcctccagttcctgtgaaatct

SEQ ID NO: 1594661 - DNA, 25 bp, Homo sapien
tcaatctctgctgttcagctcgaag

SEQ ID NO: 1594662 - DNA, 25 bp, Homo sapien
gagatttcaatctctgctgttcagc

SEQ ID NO: 1594663 - DNA, 25 bp, Homo sapien
tgttcagctcgaagttcctccagtt

SEQ ID NO: 1594664 - DNA, 25 bp, Homo sapien
gtaagcaggtcctcattgtctcccc

SEQ ID NO: 1594665 - DNA, 25 bp, Homo sapien
gggcttcatggtaagcaggtcctca

SEQ ID NO: 1594666 - DNA, 25 bp, Homo sapien
ccatcccttggtctctttgcctggg

SEQ ID NO: 1594667 - DNA, 25 bp, Homo sapien
ctctttgcctgggttcttggaacca

SEQ ID NO: 1594668 - DNA, 25 bp, Homo sapien
actgggatttctgcgccatctggtc

SEQ ID NO: 1594669 - DNA, 25 bp, Homo sapien
tctgcgccatctggtcaccgtggtg

SEQ ID NO: 1594670 - DNA, 25 bp, Homo sapien
ggatttctgcgccatctggtcaccg

SEQ ID NO: 1594671 - DNA, 25 bp, Homo sapien
tctggtcaccgtggtggctttccaa

SEQ ID NO: 1594672 - DNA, 25 bp, Homo sapien
tccagctgttttagactctgtgtgg

SEQ ID NO: 1594673 - DNA, 25 bp, Homo sapien
tgttttagactctgtgtggtgtccc

SEQ ID NO: 1594674 - DNA, 25 bp, Homo sapien
tcttccagctgttttagactctgtg

SEQ ID NO: 1594675 - DNA, 25 bp, Homo sapien
cagctgttttagactctgtgtggtg

SEQ ID NO: 1594676 - DNA, 25 bp, Homo sapien
agtggagaggggggattgtcagtgc

SEQ ID NO: 1594677 - DNA, 25 bp, Homo sapien
aggagtggagaggggggattgtcag

SEQ ID NO: 1594678 - DNA, 25 bp, Homo sapien
gagtggagaggggggattgtcagtg

SEQ ID NO: 1594679 - DNA, 25 bp, Homo sapien
ggagtggagaggggggattgtcagt

SEQ ID NO: 1594680 - DNA, 25 bp, Homo sapien
ggatggaggtcttgggtataagcca

SEQ ID NO: 1594681 - DNA, 25 bp, Homo sapien
gatggaggtcttgggtataagccat

SEQ ID NO: 1594682 - DNA, 25 bp, Homo sapien
ctggggatggaggtcttgggtataa

SEQ ID NO: 1594683 - DNA, 25 bp, Homo sapien
ggggatggaggtcttgggtataagc

SEQ ID NO: 1594684 - DNA, 25 bp, Homo sapien
ttttgagaggatgcgttgggctccc

SEQ ID NO: 1594685 - DNA, 25 bp, Homo sapien
ggttttgagaggatgcgttgggctc

SEQ ID NO: 1594686 - DNA, 25 bp, Homo sapien
gccccatgagttggggggaccacat

SEQ ID NO: 1594687 - DNA, 25 bp, Homo sapien
gaacacagaagggccccatgagttg

SEQ ID NO: 1594688 - DNA, 25 bp, Homo sapien
gatctgagtcccacgcctgcaacac

SEQ ID NO: 1594689 - DNA, 25 bp, Homo sapien
ccagcagcacgatctgagtcccacg

SEQ ID NO: 1594690 - DNA, 25 bp, Homo sapien
cagccccagcagcacgatctgagtc

SEQ ID NO: 1594691 - DNA, 25 bp, Homo sapien
cagagcggcggtcaccagccccagc

SEQ ID NO: 1594692 - DNA, 25 bp, Homo sapien
aaattctgcttgttccaagttcctg

SEQ ID NO: 1594693 - DNA, 25 bp, Homo sapien
aattctgcttgttccaagttcctgt

SEQ ID NO: 1594694 - DNA, 25 bp, Homo sapien
gctaaattctgcttgttccaagttc

SEQ ID NO: 1594695 - DNA, 25 bp, Homo sapien
tctgcttgttccaagttcctgttct

SEQ ID NO: 1594696 - DNA, 25 bp, Homo sapien
gcttggattctcccgatgatggagc

SEQ ID NO: 1594697 - DNA, 25 bp, Homo sapien
gcatctgggacttggtggcactcag

SEQ ID NO: 1594698 - DNA, 25 bp, Homo sapien
tggttagggtgagccatcaaatcct

SEQ ID NO: 1594699 - DNA, 25 bp, Homo sapien
tgtttagtctacaatctggactcac

SEQ ID NO: 1594700 - DNA, 25 bp, Homo sapien
tagttaccagcacaggatagcatct

SEQ ID NO: 1594701 - DNA, 25 bp, Homo sapien
gggcactccagagcccatcacactt

SEQ ID NO: 1594702 - DNA, 25 bp, Homo sapien
ggcactccagagcccatcacacttg

SEQ ID NO: 1594703 - DNA, 25 bp, Homo sapien
gcccatcacacttgagctacacagc

SEQ ID NO: 1594704 - DNA, 25 bp, Homo sapien
cccatcacacttgagctacacagca

SEQ ID NO: 1594705 - DNA, 25 bp, Homo sapien
cagggaccgtcagagacagaggttt

SEQ ID NO: 1594706 - DNA, 25 bp, Homo sapien
cagagacagaggtttaagcaggaag

SEQ ID NO: 1594707 - DNA, 25 bp, Homo sapien
tcgaccagagcgattggcagggacc

SEQ ID NO: 1594708 - DNA, 25 bp, Homo sapien
cctcctagtgtgttggggtcgacca

SEQ ID NO: 1594709 - DNA, 25 bp, Homo sapien
tcttctcaaggactgcagtatctca

SEQ ID NO: 1594710 - DNA, 25 bp, Homo sapien
ctccacgaagacgtgacagtcttct

SEQ ID NO: 1594711 - DNA, 25 bp, Homo sapien
cagtatctcaggatggtccctctcc

SEQ ID NO: 1594712 - DNA, 25 bp, Homo sapien
aatgcttcaggtgtcctctccacac

SEQ ID NO: 1594713 - DNA, 25 bp, Homo sapien
ctaaccttggttagggagagaagtg

SEQ ID NO: 1594714 - DNA, 25 bp, Homo sapien
attgatgcttcctcaggctgcaaaa

SEQ ID NO: 1594715 - DNA, 25 bp, Homo sapien
ttggtggaaaatgcgagaaaaccaa

SEQ ID NO: 1594716 - DNA, 25 bp, Homo sapien
cctcagtcacctaaccttggttagg

SEQ ID NO: 1594717 - DNA, 25 bp, Homo sapien
acgacatgctgcaatgggcgcggct

SEQ ID NO: 1594718 - DNA, 25 bp, Homo sapien
acagggctatgttgggccaagtgtt

SEQ ID NO: 1594719 - DNA, 25 bp, Homo sapien
tgagtggagttaggatgaggtcggc

SEQ ID NO: 1594720 - DNA, 25 bp, Homo sapien
ggccaagtgtttctgagactcagca

SEQ ID NO: 1594721 - DNA, 25 bp, Homo sapien
gcagcatcatgacacagttctcgcg

SEQ ID NO: 1594722 - DNA, 25 bp, Homo sapien
gtccttctcgctgtcacacggtgcg

SEQ ID NO: 1594723 - DNA, 25 bp, Homo sapien
gtgcgtcgttccacagccccgtgtg

SEQ ID NO: 1594724 - DNA, 25 bp, Homo sapien
cccaagcgtcattgggctctccctg

SEQ ID NO: 1594725 - DNA, 25 bp, Homo sapien
cacggccacgcgtgttccgagtgag

SEQ ID NO: 1594726 - DNA, 25 bp, Homo sapien
agagactccgtccacccactggtag

SEQ ID NO: 1594727 - DNA, 25 bp, Homo sapien
ctgaaccttgcccagatggcgcaca

SEQ ID NO: 1594728 - DNA, 25 bp, Homo sapien
agccagtaaccacggccacgcgtgt

SEQ ID NO: 1594729 - DNA, 25 bp, Homo sapien
ccgcccacgtcgtctttggcacaga

SEQ ID NO: 1594730 - DNA, 25 bp, Homo sapien
gcatctgcgcagtgatcctgcgccg

SEQ ID NO: 1594731 - DNA, 25 bp, Homo sapien
ccaacgatcaccaggtgcgcgctgg

SEQ ID NO: 1594732 - DNA, 25 bp, Homo sapien
aaagtagcaggagccctcgaaggac

SEQ ID NO: 1594733 - DNA, 25 bp, Homo sapien
cggaacagctcagtgcggacgtcct

SEQ ID NO: 1594734 - DNA, 25 bp, Homo sapien
agctcagtgcggacgtcctcacggc

SEQ ID NO: 1594735 - DNA, 25 bp, Homo sapien
cgcccggaacagctcagtgcggacg

SEQ ID NO: 1594736 - DNA, 25 bp, Homo sapien
gaacagctcagtgcggacgtcctca

SEQ ID NO: 1594737 - DNA, 25 bp, Homo sapien
cgcgctcacgcagttcccgcagggc

SEQ ID NO: 1594738 - DNA, 25 bp, Homo sapien
cagcttcgcctgcgcctccccaagc

SEQ ID NO: 1594739 - DNA, 25 bp, Homo sapien
agcttcgcctgcgcctccccaagct

SEQ ID NO: 1594740 - DNA, 25 bp, Homo sapien
gcttcgcctgcgcctccccaagctc

SEQ ID NO: 1594741 - DNA, 25 bp, Homo sapien
gcgcccacagcctcgaccgcgcccc

SEQ ID NO: 1594742 - DNA, 25 bp, Homo sapien
gcccacagcctcgaccgcgccccct

SEQ ID NO: 1594743 - DNA, 25 bp, Homo sapien
tgcgcccacagcctcgaccgcgccc

SEQ ID NO: 1594744 - DNA, 25 bp, Homo sapien
ccacagcctcgaccgcgccccctca

SEQ ID NO: 1594745 - DNA, 25 bp, Homo sapien
tgtggcagtctccgacctcctcctt

SEQ ID NO: 1594746 - DNA, 25 bp, Homo sapien
tggcagtctccgacctcctccttca

SEQ ID NO: 1594747 - DNA, 25 bp, Homo sapien
gtggcagtctccgacctcctccttc

SEQ ID NO: 1594748 - DNA, 25 bp, Homo sapien
ggcagtctccgacctcctccttcag

SEQ ID NO: 1594749 - DNA, 25 bp, Homo sapien
gagactccatctccggggtctcaga

SEQ ID NO: 1594750 - DNA, 25 bp, Homo sapien
cttccagcctcagggaccatagggc

SEQ ID NO: 1594751 - DNA, 25 bp, Homo sapien
aaatgcatgcccctcgggtcacttg

SEQ ID NO: 1594752 - DNA, 25 bp, Homo sapien
gccccaaaatgcatgcccctcgggt

SEQ ID NO: 1594753 - DNA, 25 bp, Homo sapien
ctcagcaggtcgtggccgtcaagca

SEQ ID NO: 1594754 - DNA, 25 bp, Homo sapien
tcagcaggtcgtggccgtcaagcag

SEQ ID NO: 1594755 - DNA, 25 bp, Homo sapien
tcgtggccgtcaagcagcgccgcgc

SEQ ID NO: 1594756 - DNA, 25 bp, Homo sapien
caggtcgtggccgtcaagcagcgcc

SEQ ID NO: 1594757 - DNA, 25 bp, Homo sapien
cagaatcacagcccaaaggactgtg

SEQ ID NO: 1594758 - DNA, 25 bp, Homo sapien
gggccaagaagaggggtctcctgct

SEQ ID NO: 1594759 - DNA, 25 bp, Homo sapien
ctgtggtgaccaggacagccagggc

SEQ ID NO: 1594760 - DNA, 25 bp, Homo sapien
ccttggacaataggatactcagaat

SEQ ID NO: 1594761 - DNA, 25 bp, Homo sapien
cggagctgccgccccacttgctgta

SEQ ID NO: 1594762 - DNA, 25 bp, Homo sapien
tcggagctgccgccccacttgctgt

SEQ ID NO: 1594763 - DNA, 25 bp, Homo sapien
ggagctgccgccccacttgctgtac

SEQ ID NO: 1594764 - DNA, 25 bp, Homo sapien
gagctgccgccccacttgctgtacc

SEQ ID NO: 1594765 - DNA, 25 bp, Homo sapien
catgcccagggtatgtaacttgcaa

SEQ ID NO: 1594766 - DNA, 25 bp, Homo sapien
tgattggatcaaggatcatgccacg

SEQ ID NO: 1594767 - DNA, 25 bp, Homo sapien
tgcacgcttcgttcatctggacatg

SEQ ID NO: 1594768 - DNA, 25 bp, Homo sapien
cacttaggttccacgtggatttgca

SEQ ID NO: 1594769 - DNA, 25 bp, Homo sapien
actatgactccgaagcaagcctgga

SEQ ID NO: 1594770 - DNA, 25 bp, Homo sapien
atggctgcgcccgaaaaggtgacat

SEQ ID NO: 1594771 - DNA, 25 bp, Homo sapien
gaggtggctagaaaacggcaagaac

SEQ ID NO: 1594772 - DNA, 25 bp, Homo sapien
caaaaaccggaagctgtccagaaga

SEQ ID NO: 1594773 - DNA, 25 bp, Homo sapien
tgcaacttggaacctcacctgaggg

SEQ ID NO: 1594774 - DNA, 25 bp, Homo sapien
gatgtgctgcccgagttcaagaacg

SEQ ID NO: 1594775 - DNA, 25 bp, Homo sapien
tatgtacgcaggacgacagcttcag

SEQ ID NO: 1594776 - DNA, 25 bp, Homo sapien
gctcctctagatcccaaagtcgtgg

SEQ ID NO: 1594777 - DNA, 25 bp, Homo sapien
cagatccagaatttggcaagattac

SEQ ID NO: 1594778 - DNA, 25 bp, Homo sapien
caggaggctgcggactttttgcaga

SEQ ID NO: 1594779 - DNA, 25 bp, Homo sapien
gcaggaggctgcggactttttgcag

SEQ ID NO: 1594780 - DNA, 25 bp, Homo sapien
atttgtcgtcgttccagccattgcc

SEQ ID NO: 1594781 - DNA, 25 bp, Homo sapien
tttgtcgtcgttccagccattgcca

SEQ ID NO: 1594782 - DNA, 25 bp, Homo sapien
aacgttgttgggctctcctctgttc

SEQ ID NO: 1594783 - DNA, 25 bp, Homo sapien
cagtcttcctccccaacgttgttgg

SEQ ID NO: 1594784 - DNA, 25 bp, Homo sapien
tcctctgttccaatactgcttgaag

SEQ ID NO: 1594785 - DNA, 25 bp, Homo sapien
gctctcctctgttccaatactgctt

SEQ ID NO: 1594786 - DNA, 25 bp, Homo sapien
acagaggtgagccgtccacccattg

SEQ ID NO: 1594787 - DNA, 25 bp, Homo sapien
tccacccattgccacgtgccttcct

SEQ ID NO: 1594788 - DNA, 25 bp, Homo sapien
acccattgccacgtgccttcctgat

SEQ ID NO: 1594789 - DNA, 25 bp, Homo sapien
attgccacgtgccttcctgatttag

SEQ ID NO: 1594790 - DNA, 25 bp, Homo sapien
ctggagggtacaggaggagtcagga

SEQ ID NO: 1594791 - DNA, 25 bp, Homo sapien
tggagggtacaggaggagtcaggag

SEQ ID NO: 1594792 - DNA, 25 bp, Homo sapien
agggtacaggaggagtcaggaggga

SEQ ID NO: 1594793 - DNA, 25 bp, Homo sapien
gtacaggaggagtcaggagggagct

SEQ ID NO: 1594794 - DNA, 25 bp, Homo sapien
cagttccgctgggagttagacatga

SEQ ID NO: 1594795 - DNA, 25 bp, Homo sapien
ccgctgggagttagacatgaagtaa

SEQ ID NO: 1594796 - DNA, 25 bp, Homo sapien
agtcgtgccagttccgctgggagtt

SEQ ID NO: 1594797 - DNA, 25 bp, Homo sapien
ggagttagacatgaagtaacagttt

SEQ ID NO: 1594798 - DNA, 25 bp, Homo sapien
cttggaagaatgtccattcccaggg

SEQ ID NO: 1594799 - DNA, 25 bp, Homo sapien
tggaagaatgtccattcccagggac

SEQ ID NO: 1594800 - DNA, 25 bp, Homo sapien
tcccagggacaggggtggcacaggc

SEQ ID NO: 1594801 - DNA, 25 bp, Homo sapien
cagggacaggggtggcacaggcgtt

SEQ ID NO: 1594802 - DNA, 25 bp, Homo sapien
tcctgctgcttagatttctctggaa

SEQ ID NO: 1594803 - DNA, 25 bp, Homo sapien
gccgggtcagctcctggtagatctc

SEQ ID NO: 1594804 - DNA, 25 bp, Homo sapien
tagatttctctggaagctcacccac

SEQ ID NO: 1594805 - DNA, 25 bp, Homo sapien
ctggtagatctcctgctgcttagat

SEQ ID NO: 1594806 - DNA, 25 bp, Homo sapien
gtcagctcctggtagatctcctgca

SEQ ID NO: 1594807 - DNA, 25 bp, Homo sapien
gtcagctcctggtagatctcctgca

SEQ ID NO: 1594808 - DNA, 25 bp, Homo sapien
cctgacttatggagctggggacctt

SEQ ID NO: 1594809 - DNA, 25 bp, Homo sapien
ctggattgttcctgacttatggagc

SEQ ID NO: 1594810 - DNA, 25 bp, Homo sapien
acttatggagctggggaccttggac

SEQ ID NO: 1594811 - DNA, 25 bp, Homo sapien
tggattgttcctgacttatggagct

SEQ ID NO: 1594812 - DNA, 25 bp, Homo sapien
aagagcgtgaaggagaggagttgca

SEQ ID NO: 1594813 - DNA, 25 bp, Homo sapien
aaggagcccagccaagagcgtgaag

SEQ ID NO: 1594814 - DNA, 25 bp, Homo sapien
cttggacaaggagcccagccaagag

SEQ ID NO: 1594815 - DNA, 25 bp, Homo sapien
agcccagccaagagcgtgaaggaga

SEQ ID NO: 1594816 - DNA, 25 bp, Homo sapien
tcttgtatcctcgagtctgtcggaa

SEQ ID NO: 1594817 - DNA, 25 bp, Homo sapien
gtctgtcggaatccaaggcctctca

SEQ ID NO: 1594818 - DNA, 25 bp, Homo sapien
ctgctaagctcttgtatcctcgagt

SEQ ID NO: 1594819 - DNA, 25 bp, Homo sapien
tatcctcgagtctgtcggaatccaa

SEQ ID NO: 1594820 - DNA, 25 bp, Homo sapien
aatggatagacgtgaaatcagagcc

SEQ ID NO: 1594821 - DNA, 25 bp, Homo sapien
ctgaatggatagacgtgaaatcaga

SEQ ID NO: 1594822 - DNA, 25 bp, Homo sapien
gaatggatagacgtgaaatcagagc

SEQ ID NO: 1594823 - DNA, 25 bp, Homo sapien
atggatagacgtgaaatcagagcct

SEQ ID NO: 1594824 - DNA, 25 bp, Homo sapien
gaatcccagcgtcccaacccagcct

SEQ ID NO: 1594825 - DNA, 25 bp, Homo sapien
ttcccagaatcccagcgtcccaacc

SEQ ID NO: 1594826 - DNA, 25 bp, Homo sapien
ccttcccagaatcccagcgtcccaa

SEQ ID NO: 1594827 - DNA, 25 bp, Homo sapien
cagaatcccagcgtcccaacccagc

SEQ ID NO: 1594828 - DNA, 25 bp, Homo sapien
tgcagtcttggttccttggagtcac

SEQ ID NO: 1594829 - DNA, 25 bp, Homo sapien
gctgctgcagtcttggttccttgga

SEQ ID NO: 1594830 - DNA, 25 bp, Homo sapien
cagtcttggttccttggagtcactc

SEQ ID NO: 1594831 - DNA, 25 bp, Homo sapien
gtcttggttccttggagtcactcat

SEQ ID NO: 1594832 - DNA, 25 bp, Homo sapien
tatttcccaccctgtgatctttact

SEQ ID NO: 1594833 - DNA, 25 bp, Homo sapien
gcttttatttcccaccctgtgatct

SEQ ID NO: 1594834 - DNA, 25 bp, Homo sapien
ctcccccagtgtccagaactcctgg

SEQ ID NO: 1594835 - DNA, 25 bp, Homo sapien
tctcccccagtgtccagaactcctg

SEQ ID NO: 1594836 - DNA, 25 bp, Homo sapien
tgccgccactgtcccaaggactgga

SEQ ID NO: 1594837 - DNA, 25 bp, Homo sapien
tacttcatgtctaactcccagcgga

SEQ ID NO: 1594838 - DNA, 25 bp, Homo sapien
tatggacaacctaatctgagcccag

SEQ ID NO: 1594839 - DNA, 25 bp, Homo sapien
tggacagtcaaggaagggccctgat

SEQ ID NO: 1594840 - DNA, 25 bp, Homo sapien
gatgggactttcagacctaaatcag

SEQ ID NO: 1594841 - DNA, 25 bp, Homo sapien
ttcagacctaaatcaggaaggcacg

SEQ ID NO: 1594842 - DNA, 25 bp, Homo sapien
tcctggatgggactttcagacctaa

SEQ ID NO: 1594843 - DNA, 25 bp, Homo sapien
cctaaatcaggaaggcacgtggcaa

SEQ ID NO: 1594844 - DNA, 25 bp, Homo sapien
tggattcaaagggtccatcctccct

SEQ ID NO: 1594845 - DNA, 25 bp, Homo sapien
accccaaataagagagtcaggacca

SEQ ID NO: 1594846 - DNA, 25 bp, Homo sapien
tgcacaggtcccagcttgcagtctc

SEQ ID NO: 1594847 - DNA, 25 bp, Homo sapien
caggcatacctgatcaatgcacagg

SEQ ID NO: 1594848 - DNA, 25 bp, Homo sapien
cagtggcgcaatctttggcagtctc

SEQ ID NO: 1594849 - DNA, 25 bp, Homo sapien
caacctgctgggcttgagggattct

SEQ ID NO: 1594850 - DNA, 25 bp, Homo sapien
tggcgcaatctttggcagtctcagc

SEQ ID NO: 1594851 - DNA, 25 bp, Homo sapien
ggcgcaatctttggcagtctcagct

SEQ ID NO: 1594852 - DNA, 25 bp, Homo sapien
taaccttctagaccaaaggttggca

SEQ ID NO: 1594853 - DNA, 25 bp, Homo sapien
gatgtggagattgtgttgcctttca

SEQ ID NO: 1594854 - DNA, 25 bp, Homo sapien
tatctgtctatgatctgtttgctcc

SEQ ID NO: 1594855 - DNA, 25 bp, Homo sapien
gtttgctccagaatgtaaccttcta

SEQ ID NO: 1594856 - DNA, 25 bp, Homo sapien
gaaacccatagtttcttggctcaac

SEQ ID NO: 1594857 - DNA, 25 bp, Homo sapien
aaaaatacatcatgattctgcatga

SEQ ID NO: 1594858 - DNA, 25 bp, Homo sapien
gtacattcataccttgtctcctgag

SEQ ID NO: 1594859 - DNA, 25 bp, Homo sapien
tttaggactctaataagataatatg

SEQ ID NO: 1594860 - DNA, 25 bp, Homo sapien
aaatactatctccagggaataaagt

SEQ ID NO: 1594861 - DNA, 25 bp, Homo sapien
atactatctccagggaataaagttt

SEQ ID NO: 1594862 - DNA, 25 bp, Homo sapien
aatactatctccagggaataaagtt

SEQ ID NO: 1594863 - DNA, 25 bp, Homo sapien
ttaatagctttctaactaagcccaa

SEQ ID NO: 1594864 - DNA, 25 bp, Homo sapien
ctggagttaatagctttctaactaa

SEQ ID NO: 1594865 - DNA, 25 bp, Homo sapien
gagttaatagctttctaactaagcc

SEQ ID NO: 1594866 - DNA, 25 bp, Homo sapien
atagctttctaactaagcccaaagt

SEQ ID NO: 1594867 - DNA, 25 bp, Homo sapien
gtcctcagctgtcaatacacaccat

SEQ ID NO: 1594868 - DNA, 25 bp, Homo sapien
tgagatctccaacctacacatatgg

SEQ ID NO: 1594869 - DNA, 25 bp, Homo sapien
caaagtggccatagatgagatctcc

SEQ ID NO: 1594870 - DNA, 25 bp, Homo sapien
acccattccattggctcgtcctcag

SEQ ID NO: 1594871 - DNA, 25 bp, Homo sapien
ctgcccaccctcgttgccgatccct

SEQ ID NO: 1594872 - DNA, 25 bp, Homo sapien
gaacccgcgctgggagcctcggcat

SEQ ID NO: 1594873 - DNA, 25 bp, Homo sapien
aggaccgcaactcgggccgtcgtgc

SEQ ID NO: 1594874 - DNA, 25 bp, Homo sapien
aggccggcggctccgtgatgcggcc

SEQ ID NO: 1594875 - DNA, 25 bp, Homo sapien
cgctggctttcgatgggctgagcct

SEQ ID NO: 1594876 - DNA, 25 bp, Homo sapien
cgcccttcgaggacccgctggcttt

SEQ ID NO: 1594877 - DNA, 25 bp, Homo sapien
ttcgaggacccgctggctttcgatg

SEQ ID NO: 1594878 - DNA, 25 bp, Homo sapien
ctggcgcggcacttggacgaggact

SEQ ID NO: 1594879 - DNA, 25 bp, Homo sapien
cccctatcctggccagtgatggagg

SEQ ID NO: 1594880 - DNA, 25 bp, Homo sapien
gccagtgatggaggggtatctctac

SEQ ID NO: 1594881 - DNA, 25 bp, Homo sapien
atctctacaggggtcctcggtctcc

SEQ ID NO: 1594882 - DNA, 25 bp, Homo sapien
tctgggagacactcgcgccccctat

SEQ ID NO: 1594883 - DNA, 25 bp, Homo sapien
aggagtcggccttgggcttgtccca

SEQ ID NO: 1594884 - DNA, 25 bp, Homo sapien
tcaggagtcggccttgggcttgtcc

SEQ ID NO: 1594885 - DNA, 25 bp, Homo sapien
gtcggccttgggcttgtcccagagt

SEQ ID NO: 1594886 - DNA, 25 bp, Homo sapien
agtcggccttgggcttgtcccagag

SEQ ID NO: 1594887 - DNA, 25 bp, Homo sapien
cgaaggactgtgctggcgtcctcct

SEQ ID NO: 1594888 - DNA, 25 bp, Homo sapien
gtggcagtgcccctccaggccagag

SEQ ID NO: 1594889 - DNA, 25 bp, Homo sapien
tgcaggtggcagtgcccctccaggc

SEQ ID NO: 1594890 - DNA, 25 bp, Homo sapien
aaggactgtgctggcgtcctcctcc

SEQ ID NO: 1594891 - DNA, 25 bp, Homo sapien
aggtcccgagcctccgaggccaaag

SEQ ID NO: 1594892 - DNA, 25 bp, Homo sapien
gggtgggcaatacactgcacacggg

SEQ ID NO: 1594893 - DNA, 25 bp, Homo sapien
taggtcaaagctgtgggtaggtccc

SEQ ID NO: 1594894 - DNA, 25 bp, Homo sapien
caaaggctcaggctctagggagcta

SEQ ID NO: 1594895 - DNA, 25 bp, Homo sapien
agttcggcgtcgctgagtgcagccc

SEQ ID NO: 1594896 - DNA, 25 bp, Homo sapien
ccacgtcgtccggagagaagctggt

SEQ ID NO: 1594897 - DNA, 25 bp, Homo sapien
gtgatgctggcacgggactcgtcca

SEQ ID NO: 1594898 - DNA, 25 bp, Homo sapien
agtagttcggcccagcggccgagtt

SEQ ID NO: 1594899 - DNA, 25 bp, Homo sapien
tgacgccaccaccctccgcacctcc

SEQ ID NO: 1594900 - DNA, 25 bp, Homo sapien
agcagcgtccggctcagcaggtgct

SEQ ID NO: 1594901 - DNA, 25 bp, Homo sapien
cagcagcgtccggctcagcaggtgc

SEQ ID NO: 1594902 - DNA, 25 bp, Homo sapien
ctgtgacgccaccaccctccgcacc

SEQ ID NO: 1594903 - DNA, 25 bp, Homo sapien
agcgcccccagtggcagctcgccca

SEQ ID NO: 1594904 - DNA, 25 bp, Homo sapien
ccagtggcagctcgcccaggcgcgc

SEQ ID NO: 1594905 - DNA, 25 bp, Homo sapien
ctgcagcgcccccagtggcagctcg

SEQ ID NO: 1594906 - DNA, 25 bp, Homo sapien
gcccccagtggcagctcgcccaggc

SEQ ID NO: 1594907 - DNA, 25 bp, Homo sapien
gggccccggatccagtgcgccaggg

SEQ ID NO: 1594908 - DNA, 25 bp, Homo sapien
gggactgggccccggatccagtgcg

SEQ ID NO: 1594909 - DNA, 25 bp, Homo sapien
actgggccccggatccagtgcgcca

SEQ ID NO: 1594910 - DNA, 25 bp, Homo sapien
tgggccccggatccagtgcgccagg

SEQ ID NO: 1594911 - DNA, 25 bp, Homo sapien
tctcgtagatggtgcacagaccgtc

SEQ ID NO: 1594912 - DNA, 25 bp, Homo sapien
tcgggcccttcagtctcgtagatgg

SEQ ID NO: 1594913 - DNA, 25 bp, Homo sapien
accgtcagcagagcccggtccggta

SEQ ID NO: 1594914 - DNA, 25 bp, Homo sapien
atggtgcacagaccgtcagcagagc

SEQ ID NO: 1594915 - DNA, 25 bp, Homo sapien
tcgactccaggcagccgggtggcaa

SEQ ID NO: 1594916 - DNA, 25 bp, Homo sapien
agctcctctggcgtgctcgtggcgc

SEQ ID NO: 1594917 - DNA, 25 bp, Homo sapien
gtggcaagcggcgagctctgcgtcg

SEQ ID NO: 1594918 - DNA, 25 bp, Homo sapien
ctgtcgtagccacgcagctcctctg

SEQ ID NO: 1594919 - DNA, 25 bp, Homo sapien
ggtctgggccgctcagcgtgctgga

SEQ ID NO: 1594920 - DNA, 25 bp, Homo sapien
tctgggccgctcagcgtgctggacg

SEQ ID NO: 1594921 - DNA, 25 bp, Homo sapien
aggtctgggccgctcagcgtgctgg

SEQ ID NO: 1594922 - DNA, 25 bp, Homo sapien
gccaggtctgggccgctcagcgtgc

SEQ ID NO: 1594923 - DNA, 25 bp, Homo sapien
gccaacgccagggtcagccgtgggc

SEQ ID NO: 1594924 - DNA, 25 bp, Homo sapien
gccgggggccaacgccagggtcagc

SEQ ID NO: 1594925 - DNA, 25 bp, Homo sapien
cgtgggcccgagacggaggtatccg

SEQ ID NO: 1594926 - DNA, 25 bp, Homo sapien
agccgtgggcccgagacggaggtat

SEQ ID NO: 1594927 - DNA, 25 bp, Homo sapien
ggggcgctgccagaacaggtggggc

SEQ ID NO: 1594928 - DNA, 25 bp, Homo sapien
gaggaggcgtggccaaaggagacat

SEQ ID NO: 1594929 - DNA, 25 bp, Homo sapien
aaggagacattgggagtgaggcaga

SEQ ID NO: 1594930 - DNA, 25 bp, Homo sapien
ccaaaggagacattgggagtgaggc

SEQ ID NO: 1594931 - DNA, 25 bp, Homo sapien
gggagtgaggcagagggtgagaaag

SEQ ID NO: 1594932 - DNA, 25 bp, Homo sapien
cgtggctatggaagagggcgtctcc

SEQ ID NO: 1594933 - DNA, 25 bp, Homo sapien
tgcagaaggtgcactgccagagcat

SEQ ID NO: 1594934 - DNA, 25 bp, Homo sapien
tgcagaggaggtgcggctagagagg

SEQ ID NO: 1594935 - DNA, 25 bp, Homo sapien
ctggacaaggtggagtctccagatg

SEQ ID NO: 1594936 - DNA, 25 bp, Homo sapien
ctgtctgcagaggaggcggggctag

SEQ ID NO: 1594937 - DNA, 25 bp, Homo sapien
tgcagaggaggcggggctagagaag

SEQ ID NO: 1594938 - DNA, 25 bp, Homo sapien
tgtctgcagaggaggcggggctaga

SEQ ID NO: 1594939 - DNA, 25 bp, Homo sapien
tctgcagaggaggcggggctagaga

SEQ ID NO: 1594940 - DNA, 25 bp, Homo sapien
cagagggggtgtggtcaggggagca

SEQ ID NO: 1594941 - DNA, 25 bp, Homo sapien
gagggggtgtggtcaggggagcaga

SEQ ID NO: 1594942 - DNA, 25 bp, Homo sapien
taggttctccagagggggtgtggtc

SEQ ID NO: 1594943 - DNA, 25 bp, Homo sapien
gggggtgtggtcaggggagcagaag

SEQ ID NO: 1594944 - DNA, 25 bp, Homo sapien
ctgtctgcagaggaggcggggctag

SEQ ID NO: 1594945 - DNA, 25 bp, Homo sapien
tgcagaggaggcggggctagagaag

SEQ ID NO: 1594946 - DNA, 25 bp, Homo sapien
tgtctgcagaggaggcggggctaga

SEQ ID NO: 1594947 - DNA, 25 bp, Homo sapien
tctgcagaggaggcggggctagaga

SEQ ID NO: 1594948 - DNA, 25 bp, Homo sapien
cgcctgcagagggtgtatggtcagg

SEQ ID NO: 1594949 - DNA, 25 bp, Homo sapien
agagggggcatgatcagggaagaga

SEQ ID NO: 1594950 - DNA, 25 bp, Homo sapien
ctagggaagattgggtctccagagg

SEQ ID NO: 1594951 - DNA, 25 bp, Homo sapien
ccagagaagatagcgcctgcagagg

SEQ ID NO: 1594952 - DNA, 25 bp, Homo sapien
tgaatcagggggagtagaggccggc

SEQ ID NO: 1594953 - DNA, 25 bp, Homo sapien
tcaaagaagcttgggtttgcctagg

SEQ ID NO: 1594954 - DNA, 25 bp, Homo sapien
gcctaggggacattgtcaggaaaga

SEQ ID NO: 1594955 - DNA, 25 bp, Homo sapien
aggccggccgagaaggtgagatcaa

SEQ ID NO: 1594956 - DNA, 25 bp, Homo sapien
tgggtgagcccaaagaagttgtggc

SEQ ID NO: 1594957 - DNA, 25 bp, Homo sapien
gtgggtgagcccaaagaagttgtgg

SEQ ID NO: 1594958 - DNA, 25 bp, Homo sapien
ctgcagagtgggtgagcccaaagaa

SEQ ID NO: 1594959 - DNA, 25 bp, Homo sapien
cagagtgggtgagcccaaagaagtt

SEQ ID NO: 1594960 - DNA, 25 bp, Homo sapien
acggtgaggtcagagaatgtgggac

SEQ ID NO: 1594961 - DNA, 25 bp, Homo sapien
ctgcagagaggacaaagccagagga

SEQ ID NO: 1594962 - DNA, 25 bp, Homo sapien
gggaggtgcctgcagagacggtgag

SEQ ID NO: 1594963 - DNA, 25 bp, Homo sapien
cagagacggtgaggtcagagaatgt

SEQ ID NO: 1594964 - DNA, 25 bp, Homo sapien
gcagaggcggtgaggccaaaagaga

SEQ ID NO: 1594965 - DNA, 25 bp, Homo sapien
agcctgcagaggcggtgaggccaaa

SEQ ID NO: 1594966 - DNA, 25 bp, Homo sapien
catagggggcgtagtcatagaaggt

SEQ ID NO: 1594967 - DNA, 25 bp, Homo sapien
cctgcatagggggcgtagtcataga

SEQ ID NO: 1594968 - DNA, 25 bp, Homo sapien
aggcaatgtggccagaagaggagag

SEQ ID NO: 1594969 - DNA, 25 bp, Homo sapien
ctgcagaggcaatgtggccagaaga

SEQ ID NO: 1594970 - DNA, 25 bp, Homo sapien
gcaatgtggccagaagaggagagtc

SEQ ID NO: 1594971 - DNA, 25 bp, Homo sapien
gcagaggcaatgtggccagaagagg

SEQ ID NO: 1594972 - DNA, 25 bp, Homo sapien
agagggcggagacggggaaggactg

SEQ ID NO: 1594973 - DNA, 25 bp, Homo sapien
gagagagggcggagacggggaagga

SEQ ID NO: 1594974 - DNA, 25 bp, Homo sapien
caggggagtggctgcattgtcggga

SEQ ID NO: 1594975 - DNA, 25 bp, Homo sapien
tgtcgggaggcggtacgggtcttgc

SEQ ID NO: 1594976 - DNA, 25 bp, Homo sapien
tgcattgtcgggaggcggtacgggt

SEQ ID NO: 1594977 - DNA, 25 bp, Homo sapien
aggggagtggctgcattgtcgggag

SEQ ID NO: 1594978 - DNA, 25 bp, Homo sapien
ccttccttgggggtgtgacctgagg

SEQ ID NO: 1594979 - DNA, 25 bp, Homo sapien
tcctttcggcttgggctgcgaggga

SEQ ID NO: 1594980 - DNA, 25 bp, Homo sapien
ggaagaaagcggtcctagtgctggg

SEQ ID NO: 1594981 - DNA, 25 bp, Homo sapien
tgagggggtcgcagagcctgcagtc

SEQ ID NO: 1594982 - DNA, 25 bp, Homo sapien
gagagaggggtggcgctggagctca

SEQ ID NO: 1594983 - DNA, 25 bp, Homo sapien
ggagagaggggtggcgctggagctc

SEQ ID NO: 1594984 - DNA, 25 bp, Homo sapien
agcgcgaggccggcctctggagacc

SEQ ID NO: 1594985 - DNA, 25 bp, Homo sapien
gaggcgctgctcactgatttccggg

SEQ ID NO: 1594986 - DNA, 25 bp, Homo sapien
gtggccgggcactcggagctggccg

SEQ ID NO: 1594987 - DNA, 25 bp, Homo sapien
gggcttggctcggtggtactgtgct

SEQ ID NO: 1594988 - DNA, 25 bp, Homo sapien
gccgggcttggctcggtggtactgt

SEQ ID NO: 1594989 - DNA, 25 bp, Homo sapien
caggaaccccactcttctccaggtc

SEQ ID NO: 1594990 - DNA, 25 bp, Homo sapien
cttgctgcccaggaaccccactctt

SEQ ID NO: 1594991 - DNA, 25 bp, Homo sapien
gcccaggaaccccactcttctccag

SEQ ID NO: 1594992 - DNA, 25 bp, Homo sapien
ctctgaggcggctccccttgctgcc

SEQ ID NO: 1594993 - DNA, 25 bp, Homo sapien
cgtgccccagcgctgagggcactcc

SEQ ID NO: 1594994 - DNA, 25 bp, Homo sapien
agcgctgagggcactccttttggga

SEQ ID NO: 1594995 - DNA, 25 bp, Homo sapien
gccccagcgctgagggcactccttt

SEQ ID NO: 1594996 - DNA, 25 bp, Homo sapien
ctctccgtgccccagcgctgagggc

SEQ ID NO: 1594997 - DNA, 25 bp, Homo sapien
agtttcctccgctgagatccggagt

SEQ ID NO: 1594998 - DNA, 25 bp, Homo sapien
tcccttctggccaagagggcctggc

SEQ ID NO: 1594999 - DNA, 25 bp, Homo sapien
cgctgagatccggagtcccttctgg

SEQ ID NO: 1595000 - DNA, 25 bp, Homo sapien
atccggagtcccttctggccaagag

SEQ ID NO: 1595001 - DNA, 25 bp, Homo sapien
cacgccctgggctagaaacagggcc

SEQ ID NO: 1595002 - DNA, 25 bp, Homo sapien
cgctggcacgccctgggctagaaac

SEQ ID NO: 1595003 - DNA, 25 bp, Homo sapien
ctggcacgccctgggctagaaacag

SEQ ID NO: 1595004 - DNA, 25 bp, Homo sapien
tggtggtcccgctggcacgccctgg

SEQ ID NO: 1595005 - DNA, 25 bp, Homo sapien
tgccagaggctttcgccccactgct

SEQ ID NO: 1595006 - DNA, 25 bp, Homo sapien
acttgtcccagcactccgcgttggt

SEQ ID NO: 1595007 - DNA, 25 bp, Homo sapien
actcgggaatagtggccccgccgat

SEQ ID NO: 1595008 - DNA, 25 bp, Homo sapien
ccgctcggggagcagactcgggaat

SEQ ID NO: 1595009 - DNA, 25 bp, Homo sapien
gcggcccctgccttcgccttgtctc

SEQ ID NO: 1595010 - DNA, 25 bp, Homo sapien
ctgccttcgccttgtctctcttgtt

SEQ ID NO: 1595011 - DNA, 25 bp, Homo sapien
aggagcgcgagcagccggcgtccgc

SEQ ID NO: 1595012 - DNA, 25 bp, Homo sapien
ggagcgcgagcagccggcgtccgcg

SEQ ID NO: 1595013 - DNA, 25 bp, Homo sapien
cacgggctcaggatgtcgcatccct

SEQ ID NO: 1595014 - DNA, 25 bp, Homo sapien
gggctcaggatgtcgcatccctcca

SEQ ID NO: 1595015 - DNA, 25 bp, Homo sapien
gccagcctcgagagcgggggactgc

SEQ ID NO: 1595016 - DNA, 25 bp, Homo sapien
agagcgggggactgccacgggctca

SEQ ID NO: 1595017 - DNA, 25 bp, Homo sapien
ctcctcacagagtcgcctggggtgg

SEQ ID NO: 1595018 - DNA, 25 bp, Homo sapien
gggccggagcgacgcggtggccgcc

SEQ ID NO: 1595019 - DNA, 25 bp, Homo sapien
cggccgctcctcacagagtcgcctg

SEQ ID NO: 1595020 - DNA, 25 bp, Homo sapien
gccgccagcggcgaggaggcgaggg

SEQ ID NO: 1595021 - DNA, 25 bp, Homo sapien
tgcgggctgcggcgccgggggagcc

SEQ ID NO: 1595022 - DNA, 25 bp, Homo sapien
tgcggcgccgggggagccgagccgg

SEQ ID NO: 1595023 - DNA, 25 bp, Homo sapien
ggctgcggcgccgggggagccgagc

SEQ ID NO: 1595024 - DNA, 25 bp, Homo sapien
gggctgcggcgccgggggagccgag

SEQ ID NO: 1595025 - DNA, 25 bp, Homo sapien
tcatgaaggacgcagaagatccttt

SEQ ID NO: 1595026 - DNA, 25 bp, Homo sapien
ggcctcggtggagagcggtgctcca

SEQ ID NO: 1595027 - DNA, 25 bp, Homo sapien
gaagatcctttacaagggtcccagc

SEQ ID NO: 1595028 - DNA, 25 bp, Homo sapien
cagccggagcgagtgggaggtgtcc

SEQ ID NO: 1595029 - DNA, 25 bp, Homo sapien
tgcttgctgagtcccccatgagctg

SEQ ID NO: 1595030 - DNA, 25 bp, Homo sapien
cccagaggcctgtgggaaaaggaca

SEQ ID NO: 1595031 - DNA, 25 bp, Homo sapien
actggctcagatccaagatggtgcc

SEQ ID NO: 1595032 - DNA, 25 bp, Homo sapien
gatggtgccacgcttgcttgctgag

SEQ ID NO: 1595033 - DNA, 25 bp, Homo sapien
ttagacagaaggcagcaacttctcc

SEQ ID NO: 1595034 - DNA, 25 bp, Homo sapien
gaaggcagcaacttctccaagaaat

SEQ ID NO: 1595035 - DNA, 25 bp, Homo sapien
gggccagcgactagttagacagaag

SEQ ID NO: 1595036 - DNA, 25 bp, Homo sapien
ctccaagaaattccttcacagctgc

SEQ ID NO: 1595037 - DNA, 25 bp, Homo sapien
caggtgtgacaacagccgtcagggt

SEQ ID NO: 1595038 - DNA, 25 bp, Homo sapien
gacaacagccgtcagggtcccaaac

SEQ ID NO: 1595039 - DNA, 25 bp, Homo sapien
gtgacaacagccgtcagggtcccaa

SEQ ID NO: 1595040 - DNA, 25 bp, Homo sapien
ggtgtgacaacagccgtcagggtcc

SEQ ID NO: 1595041 - DNA, 25 bp, Homo sapien
gcagctcgatgctacgataccagcc

SEQ ID NO: 1595042 - DNA, 25 bp, Homo sapien
cagctcgatgctacgataccagcca

SEQ ID NO: 1595043 - DNA, 25 bp, Homo sapien
agccagcagctcgatgctacgatac

SEQ ID NO: 1595044 - DNA, 25 bp, Homo sapien
cagcagctcgatgctacgataccag

SEQ ID NO: 1595045 - DNA, 25 bp, Homo sapien
gacagatggaattgacgtgagggag

SEQ ID NO: 1595046 - DNA, 25 bp, Homo sapien
tcatgttgagagtcacagggatcct

SEQ ID NO: 1595047 - DNA, 25 bp, Homo sapien
acagggatcctaggcacatggggac

SEQ ID NO: 1595048 - DNA, 25 bp, Homo sapien
caggaaggtgtcaccatcttcatgt

SEQ ID NO: 1595049 - DNA, 25 bp, Homo sapien
actgcttagcttgcgaggtgagacg

SEQ ID NO: 1595050 - DNA, 25 bp, Homo sapien
gacactgcttagcttgcgaggtgag

SEQ ID NO: 1595051 - DNA, 25 bp, Homo sapien
tgcgaggtgagacgaggatcagatg

SEQ ID NO: 1595052 - DNA, 25 bp, Homo sapien
cttgcgaggtgagacgaggatcaga

SEQ ID NO: 1595053 - DNA, 25 bp, Homo sapien
tctcgacggagcctaattacggtga

SEQ ID NO: 1595054 - DNA, 25 bp, Homo sapien
taacaccgtccattagggccagaca

SEQ ID NO: 1595055 - DNA, 25 bp, Homo sapien
taaccagctgtgttatgagacggcc

SEQ ID NO: 1595056 - DNA, 25 bp, Homo sapien
tgcgcgtcaaatgcgaggagctccg

SEQ ID NO: 1595057 - DNA, 25 bp, Homo sapien
cattaaaaatactagagattaggcc

SEQ ID NO: 1595058 - DNA, 25 bp, Homo sapien
taaaaatactagagattaggccagg

SEQ ID NO: 1595059 - DNA, 25 bp, Homo sapien
ctgcattaaaaatactagagattag

SEQ ID NO: 1595060 - DNA, 25 bp, Homo sapien
aaatactagagattaggccaggcac

SEQ ID NO: 1595061 - DNA, 25 bp, Homo sapien
caccaagccggactatgacatccgg

SEQ ID NO: 1595062 - DNA, 25 bp, Homo sapien
ccagccttggagatacgtcttctcc

SEQ ID NO: 1595063 - DNA, 25 bp, Homo sapien
cggactatgacatccgggccgacgt

SEQ ID NO: 1595064 - DNA, 25 bp, Homo sapien
catccgggccgacgtatggagcctg

SEQ ID NO: 1595065 - DNA, 25 bp, Homo sapien
ttgaggacgtgtgacaagctccagc

SEQ ID NO: 1595066 - DNA, 25 bp, Homo sapien
gcccagtccacgttgaggtccagga

SEQ ID NO: 1595067 - DNA, 25 bp, Homo sapien
tgatattcacaaaacgccgcatgtt

SEQ ID NO: 1595068 - DNA, 25 bp, Homo sapien
gaaaatccaacaccaaaggcgcaga

SEQ ID NO: 1595069 - DNA, 25 bp, Homo sapien
gacagcacctatctccccttagaaa

SEQ ID NO: 1595070 - DNA, 25 bp, Homo sapien
gacatcagcgtgtgtttaggggcac

SEQ ID NO: 1595071 - DNA, 25 bp, Homo sapien
tgcctcagcctggacaagtggaagc

SEQ ID NO: 1595072 - DNA, 25 bp, Homo sapien
tctcagatcttggtggcctggctgg

SEQ ID NO: 1595073 - DNA, 25 bp, Homo sapien
catcccttttccaaaggcggcggcg

SEQ ID NO: 1595074 - DNA, 25 bp, Homo sapien
gcagcgcgcgttttctctcctttgg

SEQ ID NO: 1595075 - DNA, 25 bp, Homo sapien
ctggctgcgcagacccctcttcagc

SEQ ID NO: 1595076 - DNA, 25 bp, Homo sapien
ggtgaatcggccgccgcaaccgcat

SEQ ID NO: 1595077 - DNA, 25 bp, Homo sapien
ttcgaactcaggcagtgggtcaccc

SEQ ID NO: 1595078 - DNA, 25 bp, Homo sapien
gatacacccagctaccaattcggga

SEQ ID NO: 1595079 - DNA, 25 bp, Homo sapien
aaataaacctctggactgaccggct

SEQ ID NO: 1595080 - DNA, 25 bp, Homo sapien
gcatgcagaccgatggaagaggcta

SEQ ID NO: 1595081 - DNA, 25 bp, Homo sapien
ttcagaaagtgcatccgggtggcct

SEQ ID NO: 1595082 - DNA, 25 bp, Homo sapien
gcttcactcaggtctggacggatct

SEQ ID NO: 1595083 - DNA, 25 bp, Homo sapien
cagtggctttctcgcaggtaccgcc

SEQ ID NO: 1595084 - DNA, 25 bp, Homo sapien
gctgagaagataacagggccactgg

SEQ ID NO: 1595085 - DNA, 25 bp, Homo sapien
cagggaggagtggaacggcatggga

SEQ ID NO: 1595086 - DNA, 25 bp, Homo sapien
gagtggaacggcatgggagggctgc

SEQ ID NO: 1595087 - DNA, 25 bp, Homo sapien
gcttttattatcatgttcggctcag

SEQ ID NO: 1595088 - DNA, 25 bp, Homo sapien
ttattatcatgttcggctcagaggc

SEQ ID NO: 1595089 - DNA, 25 bp, Homo sapien
atcctcgacacagccgccatggcag

SEQ ID NO: 1595090 - DNA, 25 bp, Homo sapien
agaaatgagcctgcccacgctgtcc

SEQ ID NO: 1595091 - DNA, 25 bp, Homo sapien
ctccgtctccgggacaggcggtgca

SEQ ID NO: 1595092 - DNA, 25 bp, Homo sapien
gcaaattggtatgcagcgtccgccc

SEQ ID NO: 1595093 - DNA, 25 bp, Homo sapien
gggctcaacactcagtcaaggtggg

SEQ ID NO: 1595094 - DNA, 25 bp, Homo sapien
ctcccgcccgggattcagagtcggg

SEQ ID NO: 1595095 - DNA, 25 bp, Homo sapien
ccacttccagggacgcacaatagca

SEQ ID NO: 1595096 - DNA, 25 bp, Homo sapien
ggaccagagcccaaggacgggctca

SEQ ID NO: 1595097 - DNA, 25 bp, Homo sapien
ggatgcgcacgcagcgcaccatcaa

SEQ ID NO: 1595098 - DNA, 25 bp, Homo sapien
tgtggtcggtccaggacgaggcggg

SEQ ID NO: 1595099 - DNA, 25 bp, Homo sapien
aacgcgtagtcgaactgcccgcgct

SEQ ID NO: 1595100 - DNA, 25 bp, Homo sapien
gcagagcacgaaggcgaacaccgtg

SEQ ID NO: 1595101 - DNA, 25 bp, Homo sapien
accaccacgcggggacccaactctg

SEQ ID NO: 1595102 - DNA, 25 bp, Homo sapien
ccgggctacgcccatgcccggcccg

SEQ ID NO: 1595103 - DNA, 25 bp, Homo sapien
gcgccggggatgaggctgcgccctc

SEQ ID NO: 1595104 - DNA, 25 bp, Homo sapien
cctcggtccccgggctacgcccatg

SEQ ID NO: 1595105 - DNA, 25 bp, Homo sapien
ccgcgccggctgcgcgttcggcctc

SEQ ID NO: 1595106 - DNA, 25 bp, Homo sapien
gccggctgcgcgttcggcctctccc

SEQ ID NO: 1595107 - DNA, 25 bp, Homo sapien
cgccggctgcgcgttcggcctctcc

SEQ ID NO: 1595108 - DNA, 25 bp, Homo sapien
cggctgcgcgttcggcctctccccg

SEQ ID NO: 1595109 - DNA, 25 bp, Homo sapien
ctaaagtggcttggctgacgtggct

SEQ ID NO: 1595110 - DNA, 25 bp, Homo sapien
tctcaggcttatgcacaagatggaa

SEQ ID NO: 1595111 - DNA, 25 bp, Homo sapien
agagcccgcagtcttgttcccagag

SEQ ID NO: 1595112 - DNA, 25 bp, Homo sapien
tgttgcggtgcctctgtgcctgatg

SEQ ID NO: 1595113 - DNA, 25 bp, Homo sapien
tgctggaggccgagatgtccaggag

SEQ ID NO: 1595114 - DNA, 25 bp, Homo sapien
ggcagagcgcccacacgtacagcat

SEQ ID NO: 1595115 - DNA, 25 bp, Homo sapien
ttgagctcgtcctggtctcggcaga

SEQ ID NO: 1595116 - DNA, 25 bp, Homo sapien
cgagatgtccaggagccgccaggcc

SEQ ID NO: 1595117 - DNA, 25 bp, Homo sapien
gcagaggccagcacaattgcctaga

SEQ ID NO: 1595118 - DNA, 25 bp, Homo sapien
tgagagggttgaggtgacccaggca

SEQ ID NO: 1595119 - DNA, 25 bp, Homo sapien
gaggccagcacaattgcctagactc

SEQ ID NO: 1595120 - DNA, 25 bp, Homo sapien
ggccagcacaattgcctagactcag

SEQ ID NO: 1595121 - DNA, 25 bp, Homo sapien
ggtgatgatcagcaccggcccctgc

SEQ ID NO: 1595122 - DNA, 25 bp, Homo sapien
gtgatgatcagcaccggcccctgct

SEQ ID NO: 1595123 - DNA, 25 bp, Homo sapien
cgttgtcaatgtctaggatgcgaga

SEQ ID NO: 1595124 - DNA, 25 bp, Homo sapien
gtcgacgttgtcaatgtctaggatg

SEQ ID NO: 1595125 - DNA, 25 bp, Homo sapien
tctaggatgcgagaatggaactgga

SEQ ID NO: 1595126 - DNA, 25 bp, Homo sapien
aatgtctaggatgcgagaatggaac

SEQ ID NO: 1595127 - DNA, 25 bp, Homo sapien
aaatctactcccagggctaagctgg

SEQ ID NO: 1595128 - DNA, 25 bp, Homo sapien
tattcgccgcactctgaatcttggc

SEQ ID NO: 1595129 - DNA, 25 bp, Homo sapien
gaatcttggcctgagatcaaacgcc

SEQ ID NO: 1595130 - DNA, 25 bp, Homo sapien
ccgagacacgttttcgctggaggtt

SEQ ID NO: 1595131 - DNA, 25 bp, Homo sapien
ttgggctgctgggattgaaagcata

SEQ ID NO: 1595132 - DNA, 25 bp, Homo sapien
gggattgaaagcataggccaccgtg

SEQ ID NO: 1595133 - DNA, 25 bp, Homo sapien
aaaaggcccagtaaaattggcagct

SEQ ID NO: 1595134 - DNA, 25 bp, Homo sapien
tttgtgatctctcacaggcccaggg

SEQ ID NO: 1595135 - DNA, 25 bp, Homo sapien
agcttcatagcaccagtctttgaga

SEQ ID NO: 1595136 - DNA, 25 bp, Homo sapien
agaatgtcaagctctccagaaatca

SEQ ID NO: 1595137 - DNA, 25 bp, Homo sapien
catagcaccagtctttgagaatgtc

SEQ ID NO: 1595138 - DNA, 25 bp, Homo sapien
gaatgtcaagctctccagaaatcat

SEQ ID NO: 1595139 - DNA, 25 bp, Homo sapien
tttcagcctggtcaggaatccaagc

SEQ ID NO: 1595140 - DNA, 25 bp, Homo sapien
gcaccagaacgagagtgggcttttc

SEQ ID NO: 1595141 - DNA, 25 bp, Homo sapien
gaccggctgcctcctaactgctggg

SEQ ID NO: 1595142 - DNA, 25 bp, Homo sapien
gggaccacatttcggactgcaaggc

SEQ ID NO: 1595143 - DNA, 25 bp, Homo sapien
ctgggagctgcttccacaggatcct

SEQ ID NO: 1595144 - DNA, 25 bp, Homo sapien
gggagctgcttccacaggatcctgg

SEQ ID NO: 1595145 - DNA, 25 bp, Homo sapien
gtggtgaaagctgtgagcggcaggg

SEQ ID NO: 1595146 - DNA, 25 bp, Homo sapien
cctgggccggatccgatgaggggga

SEQ ID NO: 1595147 - DNA, 25 bp, Homo sapien
agaggacgttgggcggaggccggcg

SEQ ID NO: 1595148 - DNA, 25 bp, Homo sapien
ccaaggatggagagtcccatgaagg

SEQ ID NO: 1595149 - DNA, 25 bp, Homo sapien
cctgcccgaagtggcgggaaggata

SEQ ID NO: 1595150 - DNA, 25 bp, Homo sapien
tgggccgaaggtgtccaggctcctc

SEQ ID NO: 1595151 - DNA, 25 bp, Homo sapien
ggcccaggaagggcttcgggcacag

SEQ ID NO: 1595152 - DNA, 25 bp, Homo sapien
taaggcccaggaagggcttcgggca

SEQ ID NO: 1595153 - DNA, 25 bp, Homo sapien
aagggcttcgggcacagctcatggg

SEQ ID NO: 1595154 - DNA, 25 bp, Homo sapien
ccaggaagggcttcgggcacagctc

SEQ ID NO: 1595155 - DNA, 25 bp, Homo sapien
gcaggagcccgtgtgcaaccagcct

SEQ ID NO: 1595156 - DNA, 25 bp, Homo sapien
agccgggcaggagcccgtgtgcaac

SEQ ID NO: 1595157 - DNA, 25 bp, Homo sapien
ccgggcaggagcccgtgtgcaacca

SEQ ID NO: 1595158 - DNA, 25 bp, Homo sapien
ccgtgtgcaaccagcctcctcagaa

SEQ ID NO: 1595159 - DNA, 25 bp, Homo sapien
tgtcgttctcgcactgtttcagaaa

SEQ ID NO: 1595160 - DNA, 25 bp, Homo sapien
tcagaaaccggtccttgtcaaaggc

SEQ ID NO: 1595161 - DNA, 25 bp, Homo sapien
gggtccacccggaggatctccgtga

SEQ ID NO: 1595162 - DNA, 25 bp, Homo sapien
gcacctccgacatctctgtcttgga

SEQ ID NO: 1595163 - DNA, 25 bp, Homo sapien
gcgttgtcgctttcgtcatacttca

SEQ ID NO: 1595164 - DNA, 25 bp, Homo sapien
gatgcccggatgaacgcgttgtcgc

SEQ ID NO: 1595165 - DNA, 25 bp, Homo sapien
caagtcggtgaccttgtccgtaagg

SEQ ID NO: 1595166 - DNA, 25 bp, Homo sapien
agcaagtcggtgaccttgtccgtaa

SEQ ID NO: 1595167 - DNA, 25 bp, Homo sapien
ccttccactgctggtaccacttgga

SEQ ID NO: 1595168 - DNA, 25 bp, Homo sapien
tggtaccacttggagtccttgtgca

SEQ ID NO: 1595169 - DNA, 25 bp, Homo sapien
tccttgtgcagcacgacccccaggg

SEQ ID NO: 1595170 - DNA, 25 bp, Homo sapien
taaacaccacgttgttctccttgaa

SEQ ID NO: 1595171 - DNA, 25 bp, Homo sapien
gccctggggtgagcggcggcgccag

SEQ ID NO: 1595172 - DNA, 25 bp, Homo sapien
agcaggcagctgagacctcaaacct

SEQ ID NO: 1595173 - DNA, 25 bp, Homo sapien
gcaggcagctgagacctcaaaccta

SEQ ID NO: 1595174 - DNA, 25 bp, Homo sapien
cagctgagacctcaaacctaggggc

SEQ ID NO: 1595175 - DNA, 25 bp, Homo sapien
ggcagctgagacctcaaacctaggg

SEQ ID NO: 1595176 - DNA, 25 bp, Homo sapien
ggcaaactcaagaaacggactcagg

SEQ ID NO: 1595177 - DNA, 25 bp, Homo sapien
gactcaggagggaaccattggtggg

SEQ ID NO: 1595178 - DNA, 25 bp, Homo sapien
cattggtgggctcccgaaatggaca

SEQ ID NO: 1595179 - DNA, 25 bp, Homo sapien
tcaccctcaaattcgagggagccgg

SEQ ID NO: 1595180 - DNA, 25 bp, Homo sapien
ggcagcgagggccacgggctggtac

SEQ ID NO: 1595181 - DNA, 25 bp, Homo sapien
ctgcccaaaatgggggcagcgaggg

SEQ ID NO: 1595182 - DNA, 25 bp, Homo sapien
atgggggcagcgagggccacgggct

SEQ ID NO: 1595183 - DNA, 25 bp, Homo sapien
ccaaaatgggggcagcgagggccac

SEQ ID NO: 1595184 - DNA, 25 bp, Homo sapien
ctccgttctcttccggagtcgctgg

SEQ ID NO: 1595185 - DNA, 25 bp, Homo sapien
ggcccggtctgtcccaggacgctgt

SEQ ID NO: 1595186 - DNA, 25 bp, Homo sapien
tctcccgcaaactccgttctcttcc

SEQ ID NO: 1595187 - DNA, 25 bp, Homo sapien
tagggcccggtctgtcccaggacgc

SEQ ID NO: 1595188 - DNA, 25 bp, Homo sapien
cctccttgattttccggccgagatc

SEQ ID NO: 1595189 - DNA, 25 bp, Homo sapien
tggataccgactcggccgactgctt

SEQ ID NO: 1595190 - DNA, 25 bp, Homo sapien
gactgcttggccgtcttggctgctt

SEQ ID NO: 1595191 - DNA, 25 bp, Homo sapien
ttccggccgagatcacttttactga

SEQ ID NO: 1595192 - DNA, 25 bp, Homo sapien
tgagggcgccccatgctgcgcaaag

SEQ ID NO: 1595193 - DNA, 25 bp, Homo sapien
gagacgctgggtctgctggcccctt

SEQ ID NO: 1595194 - DNA, 25 bp, Homo sapien
cctttccaaaatgggcaggagtcct

SEQ ID NO: 1595195 - DNA, 25 bp, Homo sapien
gagtcctctggagacccgggaactg

SEQ ID NO: 1595196 - DNA, 25 bp, Homo sapien
gcttcttccgtagcacctcgctcgt

SEQ ID NO: 1595197 - DNA, 25 bp, Homo sapien
gcacggtttctgactcgatggtttt

SEQ ID NO: 1595198 - DNA, 25 bp, Homo sapien
gctccccaagcttcttccgtagcac

SEQ ID NO: 1595199 - DNA, 25 bp, Homo sapien
tcgctcgtccgcacggtttctgact

SEQ ID NO: 1595200 - DNA, 25 bp, Homo sapien
tgtctttaagtctgtatgttctgac

SEQ ID NO: 1595201 - DNA, 25 bp, Homo sapien
gagacaatgtctccgttgccgaggc

SEQ ID NO: 1595202 - DNA, 25 bp, Homo sapien
tgtgcctggccaaccgttgtgtctt

SEQ ID NO: 1595203 - DNA, 25 bp, Homo sapien
ctgtatgttctgacacggcagtgac

SEQ ID NO: 1595204 - DNA, 25 bp, Homo sapien
gattgagggtctcagcagcggtgag

SEQ ID NO: 1595205 - DNA, 25 bp, Homo sapien
tcgggtccccgcttggcagctacct

SEQ ID NO: 1595206 - DNA, 25 bp, Homo sapien
ttgagggtctcagcagcggtgagct

SEQ ID NO: 1595207 - DNA, 25 bp, Homo sapien
cggcagactcgggtccccgcttggc

SEQ ID NO: 1595208 - DNA, 25 bp, Homo sapien
ccagccaccacagcttggtcttatg

SEQ ID NO: 1595209 - DNA, 25 bp, Homo sapien
caccgggtggtaggaggtggccttg

SEQ ID NO: 1595210 - DNA, 25 bp, Homo sapien
gtcttcagatgacccctgcattaat

SEQ ID NO: 1595211 - DNA, 25 bp, Homo sapien
gcttggtcttatgtctcccgctcca

SEQ ID NO: 1595212 - DNA, 25 bp, Homo sapien
gattcttctagccttctggcctcgt

SEQ ID NO: 1595213 - DNA, 25 bp, Homo sapien
gacattatctagcaagccggacaga

SEQ ID NO: 1595214 - DNA, 25 bp, Homo sapien
cttctggcctcgtcacggaattttt

SEQ ID NO: 1595215 - DNA, 25 bp, Homo sapien
gcctcctggagcacgtctgattctt

SEQ ID NO: 1595216 - DNA, 25 bp, Homo sapien
tgggctacaaaccatgggagtgagt

SEQ ID NO: 1595217 - DNA, 25 bp, Homo sapien
cagagactcttgggctacaaaccat

SEQ ID NO: 1595218 - DNA, 25 bp, Homo sapien
gactcttgggctacaaaccatggga

SEQ ID NO: 1595219 - DNA, 25 bp, Homo sapien
tcttgggctacaaaccatgggagtg

SEQ ID NO: 1595220 - DNA, 25 bp, Homo sapien
gcagctctccgcccggccggcgcat

SEQ ID NO: 1595221 - DNA, 25 bp, Homo sapien
agtggcagctctccgcccggccggc

SEQ ID NO: 1595222 - DNA, 25 bp, Homo sapien
tggcagctctccgcccggccggcgc

SEQ ID NO: 1595223 - DNA, 25 bp, Homo sapien
cagtggcagctctccgcccggccgg

SEQ ID NO: 1595224 - DNA, 25 bp, Homo sapien
aattggattccactgccgaggcatc

SEQ ID NO: 1595225 - DNA, 25 bp, Homo sapien
tcgacccatggggtaggttgtggct

SEQ ID NO: 1595226 - DNA, 25 bp, Homo sapien
aagaaattggattccactgccgagg

SEQ ID NO: 1595227 - DNA, 25 bp, Homo sapien
gaaattggattccactgccgaggca

SEQ ID NO: 1595228 - DNA, 25 bp, Homo sapien
gtggacagcggcaccagccactccg

SEQ ID NO: 1595229 - DNA, 25 bp, Homo sapien
tggacagcggcaccagccactccgc

SEQ ID NO: 1595230 - DNA, 25 bp, Homo sapien
ggacagcggcaccagccactccgca

SEQ ID NO: 1595231 - DNA, 25 bp, Homo sapien
agaatcgtgtgaccttctcgcggcg

SEQ ID NO: 1595232 - DNA, 25 bp, Homo sapien
atcgtgtgaccttctcgcggcgcgg

SEQ ID NO: 1595233 - DNA, 25 bp, Homo sapien
gttggagaatcgtgtgaccttctcg

SEQ ID NO: 1595234 - DNA, 25 bp, Homo sapien
cggttgcgtcatccgccgcttcggc

SEQ ID NO: 1595235 - DNA, 25 bp, Homo sapien
tagagccgcgcaagcctgagaaaag

SEQ ID NO: 1595236 - DNA, 25 bp, Homo sapien
ctagagccgcgcaagcctgagaaaa

SEQ ID NO: 1595237 - DNA, 25 bp, Homo sapien
ttgacttgatagaaactggcactgg

SEQ ID NO: 1595238 - DNA, 25 bp, Homo sapien
ggtctcgacatccccagctctttga

SEQ ID NO: 1595239 - DNA, 25 bp, Homo sapien
aggcttgacttgatagaaactggca

SEQ ID NO: 1595240 - DNA, 25 bp, Homo sapien
ttacaggctatttccacggtctcga

SEQ ID NO: 1595241 - DNA, 25 bp, Homo sapien
tcgggagccgtctcttctccttgga

SEQ ID NO: 1595242 - DNA, 25 bp, Homo sapien
acaacacacagggccctggcttggg

SEQ ID NO: 1595243 - DNA, 25 bp, Homo sapien
cttgaagggagcaatggaaatagcc

SEQ ID NO: 1595244 - DNA, 25 bp, Homo sapien
ggctgggcctctcgggctctgaatt

SEQ ID NO: 1595245 - DNA, 25 bp, Homo sapien
cactcggtgggcccactgacctgtg

SEQ ID NO: 1595246 - DNA, 25 bp, Homo sapien
gaggcaggatccccgggtcactgtt

SEQ ID NO: 1595247 - DNA, 25 bp, Homo sapien
aggcaggatccccgggtcactgttg

SEQ ID NO: 1595248 - DNA, 25 bp, Homo sapien
tcggtgggcccactgacctgtgaac

SEQ ID NO: 1595249 - DNA, 25 bp, Homo sapien
gaaagaaacctgaacgatgtcactg

SEQ ID NO: 1595250 - DNA, 25 bp, Homo sapien
catgggaatcggttaagagagcctc

SEQ ID NO: 1595251 - DNA, 25 bp, Homo sapien
taaacggaacatcacatggtcatgg

SEQ ID NO: 1595252 - DNA, 25 bp, Homo sapien
cctaacttaggtactggcggtgact

SEQ ID NO: 1595253 - DNA, 25 bp, Homo sapien
ttattctctttcatccaacacagga

SEQ ID NO: 1595254 - DNA, 25 bp, Homo sapien
attctctttcatccaacacaggaag

SEQ ID NO: 1595255 - DNA, 25 bp, Homo sapien
tattctctttcatccaacacaggaa

SEQ ID NO: 1595256 - DNA, 25 bp, Homo sapien
ttctctttcatccaacacaggaagg

SEQ ID NO: 1595257 - DNA, 25 bp, Homo sapien
ggccaagcgcagactctcagaggtt

SEQ ID NO: 1595258 - DNA, 25 bp, Homo sapien
agcagcacggttcagtccctggagg

SEQ ID NO: 1595259 - DNA, 25 bp, Homo sapien
ttcaatgcctggtggacaaatggcc

SEQ ID NO: 1595260 - DNA, 25 bp, Homo sapien
tcatttggaagcaaaccgggtcaag

SEQ ID NO: 1595261 - DNA, 25 bp, Homo sapien
ttccaggagaaggtggcggaaccca

SEQ ID NO: 1595262 - DNA, 25 bp, Homo sapien
tccaggagaaggtggcggaacccac

SEQ ID NO: 1595263 - DNA, 25 bp, Homo sapien
tcagtcacagagctgcgactagagg

SEQ ID NO: 1595264 - DNA, 25 bp, Homo sapien
cgggcccccgaggaagcccatgaat

SEQ ID NO: 1595265 - DNA, 25 bp, Homo sapien
tcagcacccgggagggaatcagtca

SEQ ID NO: 1595266 - DNA, 25 bp, Homo sapien
gaaaactgcggcttggcaaattaca

SEQ ID NO: 1595267 - DNA, 25 bp, Homo sapien
ggttcacaaattcggagctgcctgg

SEQ ID NO: 1595268 - DNA, 25 bp, Homo sapien
ccagaggaagttacacacgggtcaa

SEQ ID NO: 1595269 - DNA, 25 bp, Homo sapien
ggccagcaactagaaccttgatgga

SEQ ID NO: 1595270 - DNA, 25 bp, Homo sapien
cacgggtcaaaagggaattcaatca

SEQ ID NO: 1595271 - DNA, 25 bp, Homo sapien
ttccatcagaagggtgttggctccc

SEQ ID NO: 1595272 - DNA, 25 bp, Homo sapien
cttccatcagaagggtgttggctcc

SEQ ID NO: 1595273 - DNA, 25 bp, Homo sapien
ccatcagaagggtgttggctcccac

SEQ ID NO: 1595274 - DNA, 25 bp, Homo sapien
tccatcagaagggtgttggctccca

SEQ ID NO: 1595275 - DNA, 25 bp, Homo sapien
cgaatccgggcaatgggcctcggtt

SEQ ID NO: 1595276 - DNA, 25 bp, Homo sapien
cctcttttgtgtcgaatccgggcaa

SEQ ID NO: 1595277 - DNA, 25 bp, Homo sapien
caggaaagcattctggtcccaggat

SEQ ID NO: 1595278 - DNA, 25 bp, Homo sapien
gctctcgggcaacagagcagggacc

SEQ ID NO: 1595279 - DNA, 25 bp, Homo sapien
ggcaccaggccgacttttatgagac

SEQ ID NO: 1595280 - DNA, 25 bp, Homo sapien
gggatgggcatcctcaattgtccag

SEQ ID NO: 1595281 - DNA, 25 bp, Homo sapien
cacagcctgggtacggatggcaaca

SEQ ID NO: 1595282 - DNA, 25 bp, Homo sapien
tttataaacgccagatcccagtcct

SEQ ID NO: 1595283 - DNA, 25 bp, Homo sapien
gcaacacatcttcaggcgtgcctgg

SEQ ID NO: 1595284 - DNA, 25 bp, Homo sapien
gcgtgcctggagcttagatctgact

SEQ ID NO: 1595285 - DNA, 25 bp, Homo sapien
tacagagccattttacgcctccaag

SEQ ID NO: 1595286 - DNA, 25 bp, Homo sapien
tctaagcgctcacgagaagggatgc

SEQ ID NO: 1595287 - DNA, 25 bp, Homo sapien
gaaacgcgtgttagacagtcttaga

SEQ ID NO: 1595288 - DNA, 25 bp, Homo sapien
tgttgaagcggttgagaaaacgcac

SEQ ID NO: 1595289 - DNA, 25 bp, Homo sapien
tgaacatgtcggttgcatcccagag

SEQ ID NO: 1595290 - DNA, 25 bp, Homo sapien
taaagcatgcttcaggttcaccacc

SEQ ID NO: 1595291 - DNA, 25 bp, Homo sapien
tatttgtgggacttgttggttttga

SEQ ID NO: 1595292 - DNA, 25 bp, Homo sapien
tgtgggacttgttggttttgaagga

SEQ ID NO: 1595293 - DNA, 25 bp, Homo sapien
ggctatggccatcgcggcttcttca

SEQ ID NO: 1595294 - DNA, 25 bp, Homo sapien
tagatgaaaatgcaccagccggagg

SEQ ID NO: 1595295 - DNA, 25 bp, Homo sapien
cgctcatgtgatcgacgcccatggg

SEQ ID NO: 1595296 - DNA, 25 bp, Homo sapien
gaagtcgcggatcactttcacattg

SEQ ID NO: 1595297 - DNA, 25 bp, Homo sapien
cattactgggaccagagtcccatgt

SEQ ID NO: 1595298 - DNA, 25 bp, Homo sapien
ctcattactgggaccagagtcccat

SEQ ID NO: 1595299 - DNA, 25 bp, Homo sapien
cctgctcgaccagaaatgtccactt

SEQ ID NO: 1595300 - DNA, 25 bp, Homo sapien
ttttcctgctcgaccagaaatgtcc

SEQ ID NO: 1595301 - DNA, 25 bp, Homo sapien
gaaacgcgctctctgacgggatcag

SEQ ID NO: 1595302 - DNA, 25 bp, Homo sapien
catgaaagacaacgcccaatcggaa

SEQ ID NO: 1595303 - DNA, 25 bp, Homo sapien
gatcagtctatcatccccgtggttt

SEQ ID NO: 1595304 - DNA, 25 bp, Homo sapien
gaagtaaacggctttcctacagaca

SEQ ID NO: 1595305 - DNA, 25 bp, Homo sapien
gaaactggtaattgcctcttctgcc

SEQ ID NO: 1595306 - DNA, 25 bp, Homo sapien
gaatctctgcgcctggtggtgaacg

SEQ ID NO: 1595307 - DNA, 25 bp, Homo sapien
aaccgtcgcgctggcgagtggtaca

SEQ ID NO: 1595308 - DNA, 25 bp, Homo sapien
gaggagtgccacgtttttgttctgg

SEQ ID NO: 1595309 - DNA, 25 bp, Homo sapien
tgaaaagcaaaagtcaggtcagtct

SEQ ID NO: 1595310 - DNA, 25 bp, Homo sapien
gctaggactttcaaaactgaaaagc

SEQ ID NO: 1595311 - DNA, 25 bp, Homo sapien
cgctaggactttcaaaactgaaaag

SEQ ID NO: 1595312 - DNA, 25 bp, Homo sapien
agcaaaagtcaggtcagtctactgt

SEQ ID NO: 1595313 - DNA, 25 bp, Homo sapien
caaatacgactgagagctgacgctg

SEQ ID NO: 1595314 - DNA, 25 bp, Homo sapien
tctcacgacacgaatgacagcttag

SEQ ID NO: 1595315 - DNA, 25 bp, Homo sapien
cacgtgtgcaagtgtggcttcctcg

SEQ ID NO: 1595316 - DNA, 25 bp, Homo sapien
ttctgtttctaaagaccctgcggcc

SEQ ID NO: 1595317 - DNA, 25 bp, Homo sapien
accctgggggcgcaatactaaggtg

SEQ ID NO: 1595318 - DNA, 25 bp, Homo sapien
accttgaggttcacagccgaccctg

SEQ ID NO: 1595319 - DNA, 25 bp, Homo sapien
cctcactgctctgcaaagatgacaa

SEQ ID NO: 1595320 - DNA, 25 bp, Homo sapien
caaaggttccttaggccaccttgag

SEQ ID NO: 1595321 - DNA, 25 bp, Homo sapien
cctgagggaaggtgctagaatctct

SEQ ID NO: 1595322 - DNA, 25 bp, Homo sapien
tctcttggcgttttcactgtacatg

SEQ ID NO: 1595323 - DNA, 25 bp, Homo sapien
gatatccccagcttcttttaatgcc

SEQ ID NO: 1595324 - DNA, 25 bp, Homo sapien
ggtgctgtcctcgtttgcggaataa

SEQ ID NO: 1595325 - DNA, 25 bp, Homo sapien
gacatttaaaatcaaacggtgatct

SEQ ID NO: 1595326 - DNA, 25 bp, Homo sapien
tttaaaatcaaacggtgatctgcct

SEQ ID NO: 1595327 - DNA, 25 bp, Homo sapien
catttaaaatcaaacggtgatctgc

SEQ ID NO: 1595328 - DNA, 25 bp, Homo sapien
tccccacgcgtctggggcccctctg

SEQ ID NO: 1595329 - DNA, 25 bp, Homo sapien
gaggacccgcgagttgatgatccgc

SEQ ID NO: 1595330 - DNA, 25 bp, Homo sapien
tgatccgcccaaaccgagagaacat

SEQ ID NO: 1595331 - DNA, 25 bp, Homo sapien
cgggagcccgctgatgtacaagttg

SEQ ID NO: 1595332 - DNA, 25 bp, Homo sapien
ttgatcacctctgagctcgggcgag

SEQ ID NO: 1595333 - DNA, 25 bp, Homo sapien
attagtacaggcacgtggccaaagc

SEQ ID NO: 1595334 - DNA, 25 bp, Homo sapien
ttgggaacacaaccactttccgaga

SEQ ID NO: 1595335 - DNA, 25 bp, Homo sapien
aaccactttccgagattagtacagg

SEQ ID NO: 1595336 - DNA, 25 bp, Homo sapien
gattagtacaggcacgtggccaaag

SEQ ID NO: 1595337 - DNA, 25 bp, Homo sapien
tctgatgcctcccaaggacaggtgt

SEQ ID NO: 1595338 - DNA, 25 bp, Homo sapien
gacacttgctcaccccatgatgtgg

SEQ ID NO: 1595339 - DNA, 25 bp, Homo sapien
cttgggacctcaaaacgtgacctga

SEQ ID NO: 1595340 - DNA, 25 bp, Homo sapien
gaatcgagggagcatgtcactacgg

SEQ ID NO: 1595341 - DNA, 25 bp, Homo sapien
tgctgtgaagaacgcctgcctatct

SEQ ID NO: 1595342 - DNA, 25 bp, Homo sapien
tgtgtgtctcctgccatatccaaag

SEQ ID NO: 1595343 - DNA, 25 bp, Homo sapien
gacaatgttaagtgcctgtagccac

SEQ ID NO: 1595344 - DNA, 25 bp, Homo sapien
tgtagccacatacagcacccggttt

SEQ ID NO: 1595345 - DNA, 25 bp, Homo sapien
cagagcccaggatgagcacaaggct

SEQ ID NO: 1595346 - DNA, 25 bp, Homo sapien
gagcccaggatgagcacaaggctcc

SEQ ID NO: 1595347 - DNA, 25 bp, Homo sapien
gcccaggatgagcacaaggctccag

SEQ ID NO: 1595348 - DNA, 25 bp, Homo sapien
tcagagcccaggatgagcacaaggc

SEQ ID NO: 1595349 - DNA, 25 bp, Homo sapien
cataaggccttggatcccacttgag

SEQ ID NO: 1595350 - DNA, 25 bp, Homo sapien
gttcgatcacatggccaaagagtca

SEQ ID NO: 1595351 - DNA, 25 bp, Homo sapien
ggccctagcccgtattgtcataaag

SEQ ID NO: 1595352 - DNA, 25 bp, Homo sapien
ccaagcatgtgactagacggctggg

SEQ ID NO: 1595353 - DNA, 25 bp, Homo sapien
tttggccactgagtaaccaagatca

SEQ ID NO: 1595354 - DNA, 25 bp, Homo sapien
tggccactgagtaaccaagatcatg

SEQ ID NO: 1595355 - DNA, 25 bp, Homo sapien
gcaggagtggcgcgcctgccctcag

SEQ ID NO: 1595356 - DNA, 25 bp, Homo sapien
ggcaggagtggcgcgcctgccctca

SEQ ID NO: 1595357 - DNA, 25 bp, Homo sapien
tgaaggcgggcactgagggcgggtg

SEQ ID NO: 1595358 - DNA, 25 bp, Homo sapien
tgggtatcttgtgaaggcgggcact

SEQ ID NO: 1595359 - DNA, 25 bp, Homo sapien
gtatcttgtgaaggcgggcactgag

SEQ ID NO: 1595360 - DNA, 25 bp, Homo sapien
gtctgtgggtatcttgtgaaggcgg

SEQ ID NO: 1595361 - DNA, 25 bp, Homo sapien
gatgcggtggtgatcagatcccttt

SEQ ID NO: 1595362 - DNA, 25 bp, Homo sapien
ggaatggatgcggtggtgatcagat

SEQ ID NO: 1595363 - DNA, 25 bp, Homo sapien
tgcggtggtgatcagatccctttac

SEQ ID NO: 1595364 - DNA, 25 bp, Homo sapien
tggatgcggtggtgatcagatccct

SEQ ID NO: 1595365 - DNA, 25 bp, Homo sapien
cagcgtgttgatcgctctctctgca

SEQ ID NO: 1595366 - DNA, 25 bp, Homo sapien
gagcctcaagccgttcagcgtgttg

SEQ ID NO: 1595367 - DNA, 25 bp, Homo sapien
tcgcggtcacgtagttcacaaagcc

SEQ ID NO: 1595368 - DNA, 25 bp, Homo sapien
cttaatggtttttgactggagcctc

SEQ ID NO: 1595369 - DNA, 25 bp, Homo sapien
acatgaagacattggtaagccaacc

SEQ ID NO: 1595370 - DNA, 25 bp, Homo sapien
atgaagacattggtaagccaaccgt

SEQ ID NO: 1595371 - DNA, 25 bp, Homo sapien
catgaagacattggtaagccaaccg

SEQ ID NO: 1595372 - DNA, 25 bp, Homo sapien
caagcctgagaccagcccgaccccg

SEQ ID NO: 1595373 - DNA, 25 bp, Homo sapien
ctttccaagcctgagaccagcccga

SEQ ID NO: 1595374 - DNA, 25 bp, Homo sapien
tccaagcctgagaccagcccgaccc

SEQ ID NO: 1595375 - DNA, 25 bp, Homo sapien
tttccaagcctgagaccagcccgac

SEQ ID NO: 1595376 - DNA, 25 bp, Homo sapien
gcgacaacgagcaggtcaccgaaca

SEQ ID NO: 1595377 - DNA, 25 bp, Homo sapien
gcagagcgcgacaacgagcaggtca

SEQ ID NO: 1595378 - DNA, 25 bp, Homo sapien
aacgagcaggtcaccgaacaggagg

SEQ ID NO: 1595379 - DNA, 25 bp, Homo sapien
ccagccggcagagcgcgacaacgag

SEQ ID NO: 1595380 - DNA, 25 bp, Homo sapien
cgtcaacgtgacttatggctgctgg

SEQ ID NO: 1595381 - DNA, 25 bp, Homo sapien
aatgctggtgacgatgaatgttccc

SEQ ID NO: 1595382 - DNA, 25 bp, Homo sapien
gcatggccctgacgtagcagctata

SEQ ID NO: 1595383 - DNA, 25 bp, Homo sapien
tctcgtcacacgatgtcaagggcac

SEQ ID NO: 1595384 - DNA, 25 bp, Homo sapien
atgactcatattaagaaaaaagcca

SEQ ID NO: 1595385 - DNA, 25 bp, Homo sapien
catgactcatattaagaaaaaagcc

SEQ ID NO: 1595386 - DNA, 25 bp, Homo sapien
aaacatgactcatattaagaaaaaa

SEQ ID NO: 1595387 - DNA, 25 bp, Homo sapien
acatgactcatattaagaaaaaagc

SEQ ID NO: 1595388 - DNA, 25 bp, Homo sapien
caggctgggaaagtccggaaggaca

SEQ ID NO: 1595389 - DNA, 25 bp, Homo sapien
aggctgggaaagtccggaaggacat

SEQ ID NO: 1595390 - DNA, 25 bp, Homo sapien
tcaggctgggaaagtccggaaggac

SEQ ID NO: 1595391 - DNA, 25 bp, Homo sapien
agagaatcacaagcgcccaagagta

SEQ ID NO: 1595392 - DNA, 25 bp, Homo sapien
acaagcgcccaagagtagagcctga

SEQ ID NO: 1595393 - DNA, 25 bp, Homo sapien
gttcagagaatcacaagcgcccaag

SEQ ID NO: 1595394 - DNA, 25 bp, Homo sapien
acagtgttcagagaatcacaagcgc

SEQ ID NO: 1595395 - DNA, 25 bp, Homo sapien
gtgtgggctttaacccgaccagaga

SEQ ID NO: 1595396 - DNA, 25 bp, Homo sapien
gaccagagatatacagcaagacaga

SEQ ID NO: 1595397 - DNA, 25 bp, Homo sapien
cctccgggatgtggttaaagccttg

SEQ ID NO: 1595398 - DNA, 25 bp, Homo sapien
gtggctccggcatgacaggtcatcc

SEQ ID NO: 1595399 - DNA, 25 bp, Homo sapien
ctgactccttctgatcccccgaggg

SEQ ID NO: 1595400 - DNA, 25 bp, Homo sapien
gagggtagagggctgactccttctg

SEQ ID NO: 1595401 - DNA, 25 bp, Homo sapien
gctgactccttctgatcccccgagg

SEQ ID NO: 1595402 - DNA, 25 bp, Homo sapien
aagaggtttgcccacactggcggca

SEQ ID NO: 1595403 - DNA, 25 bp, Homo sapien
taaagctccagtcacttgaagggct

SEQ ID NO: 1595404 - DNA, 25 bp, Homo sapien
gacacccgtgttgtgagctgagcta

SEQ ID NO: 1595405 - DNA, 25 bp, Homo sapien
tgagctaggccagggatcagattcg

SEQ ID NO: 1595406 - DNA, 25 bp, Homo sapien
tgagttttcagtatagggaatcaca

SEQ ID NO: 1595407 - DNA, 25 bp, Homo sapien
accaagtggtacttggtaaggtgca

SEQ ID NO: 1595408 - DNA, 25 bp, Homo sapien
aagtgtagaagacactttagtacca

SEQ ID NO: 1595409 - DNA, 25 bp, Homo sapien
gagttttcagtatagggaatcacag

SEQ ID NO: 1595410 - DNA, 25 bp, Homo sapien
acaatctccacattccggatgggga

SEQ ID NO: 1595411 - DNA, 25 bp, Homo sapien
ctccacattccggatggggacacaa

SEQ ID NO: 1595412 - DNA, 25 bp, Homo sapien
ccacattccggatggggacacaaag

SEQ ID NO: 1595413 - DNA, 25 bp, Homo sapien
aatctccacattccggatggggaca

SEQ ID NO: 1595414 - DNA, 25 bp, Homo sapien
caaggtcctcggtgttctgctgacc

SEQ ID NO: 1595415 - DNA, 25 bp, Homo sapien
ctgacctgggcctgaccaagagtgg

SEQ ID NO: 1595416 - DNA, 25 bp, Homo sapien
caaggctgtagttatcctgcactga

SEQ ID NO: 1595417 - DNA, 25 bp, Homo sapien
cataacgaagggctgtccacaaggt

SEQ ID NO: 1595418 - DNA, 25 bp, Homo sapien
gatcaaattcgttctcccgatgtca

SEQ ID NO: 1595419 - DNA, 25 bp, Homo sapien
gctgaacaggcttcgtaactcatcc

SEQ ID NO: 1595420 - DNA, 25 bp, Homo sapien
ctgagggaggtagttgacgatcaaa

SEQ ID NO: 1595421 - DNA, 25 bp, Homo sapien
aacttcaccaatgctgctgaacagg

SEQ ID NO: 1595422 - DNA, 25 bp, Homo sapien
ctctgcacctgtttattcccaaaga

SEQ ID NO: 1595423 - DNA, 25 bp, Homo sapien
tctgcacctgtttattcccaaagac

SEQ ID NO: 1595424 - DNA, 25 bp, Homo sapien
ggtaggcaatggtcctctgcacctg

SEQ ID NO: 1595425 - DNA, 25 bp, Homo sapien
ggcaggtaggcaatggtcctctgca

SEQ ID NO: 1595426 - DNA, 25 bp, Homo sapien
tctaccagtcagaggaacttggtct

SEQ ID NO: 1595427 - DNA, 25 bp, Homo sapien
tctctaccagtcagaggaacttggt

SEQ ID NO: 1595428 - DNA, 25 bp, Homo sapien
ctctaccagtcagaggaacttggtc

SEQ ID NO: 1595429 - DNA, 25 bp, Homo sapien
caacgccgagggaagaattaggtct

SEQ ID NO: 1595430 - DNA, 25 bp, Homo sapien
tgtggagatttcctacctactccct

SEQ ID NO: 1595431 - DNA, 25 bp, Homo sapien
tactccctgaatcaacgccgaggga

SEQ ID NO: 1595432 - DNA, 25 bp, Homo sapien
ggagatttcctacctactccctgaa

SEQ ID NO: 1595433 - DNA, 25 bp, Homo sapien
ctccatgccattgctgtaaaccttt

SEQ ID NO: 1595434 - DNA, 25 bp, Homo sapien
tctagttctcagtgcctccatgcca

SEQ ID NO: 1595435 - DNA, 25 bp, Homo sapien
cagtgcctccatgccattgctgtaa

SEQ ID NO: 1595436 - DNA, 25 bp, Homo sapien
gctgtaaacctttgttactgtccca

SEQ ID NO: 1595437 - DNA, 25 bp, Homo sapien
caaaatcaaggcgaatgtatgtctc

SEQ ID NO: 1595438 - DNA, 25 bp, Homo sapien
tgtctctagtcccacttcatgaaca

SEQ ID NO: 1595439 - DNA, 25 bp, Homo sapien
gtcccacttcatgaacaaaatcaag

SEQ ID NO: 1595440 - DNA, 25 bp, Homo sapien
tccctgtctgcagctacaaacacct

SEQ ID NO: 1595441 - DNA, 25 bp, Homo sapien
ttgaaatagcaccatgggctgggcg

SEQ ID NO: 1595442 - DNA, 25 bp, Homo sapien
gaactcctgctggagtgtggaaaga

SEQ ID NO: 1595443 - DNA, 25 bp, Homo sapien
tcttttacttgaaatagcaccatgg

SEQ ID NO: 1595444 - DNA, 25 bp, Homo sapien
tgctcaacaaggcgaaatcccacct

SEQ ID NO: 1595445 - DNA, 25 bp, Homo sapien
tctggttgagcgctcgccgtgtgtc

SEQ ID NO: 1595446 - DNA, 25 bp, Homo sapien
tgacggaaggcggtggctgaggagc

SEQ ID NO: 1595447 - DNA, 25 bp, Homo sapien
gcgctgctcattggccggcgtagct

SEQ ID NO: 1595448 - DNA, 25 bp, Homo sapien
cgctcggcctcggtagcggtggcgg

SEQ ID NO: 1595449 - DNA, 25 bp, Homo sapien
caccgcgcctggcctcttttctttt

SEQ ID NO: 1595450 - DNA, 25 bp, Homo sapien
ttggagatagagtgtcgctctgtcg

SEQ ID NO: 1595451 - DNA, 25 bp, Homo sapien
cccaggttagagtacagtggcgtga

SEQ ID NO: 1595452 - DNA, 25 bp, Homo sapien
acagtggcgtgatcccggctcactg

SEQ ID NO: 1595453 - DNA, 25 bp, Homo sapien
ccacagcaggtagaaggcaggagcc

SEQ ID NO: 1595454 - DNA, 25 bp, Homo sapien
gccacagcaggtagaaggcaggagc

SEQ ID NO: 1595455 - DNA, 25 bp, Homo sapien
caaggagaacctgccgactccaagg

SEQ ID NO: 1595456 - DNA, 25 bp, Homo sapien
gagaggcacccgactcctgcttcag

SEQ ID NO: 1595457 - DNA, 25 bp, Homo sapien
ggtcccttttccagtaggcaagaga

SEQ ID NO: 1595458 - DNA, 25 bp, Homo sapien
tcagtgacgtaagtccttcagaggc

SEQ ID NO: 1595459 - DNA, 25 bp, Homo sapien
cttctactccgaggaataagccctg

SEQ ID NO: 1595460 - DNA, 25 bp, Homo sapien
tgaaagcctgagattggccagacac

SEQ ID NO: 1595461 - DNA, 25 bp, Homo sapien
aatctggtcagccatcgcttctggg

SEQ ID NO: 1595462 - DNA, 25 bp, Homo sapien
gcctgaggttgtcgtgtagcatttc

SEQ ID NO: 1595463 - DNA, 25 bp, Homo sapien
tctggctggacaccccagggtcctg

SEQ ID NO: 1595464 - DNA, 25 bp, Homo sapien
cagctgcaccttcagcctcaaggcc

SEQ ID NO: 1595465 - DNA, 25 bp, Homo sapien
ctggacaccccagggtcctgccatg

SEQ ID NO: 1595466 - DNA, 25 bp, Homo sapien
gcctcaaggcctggccccatggccc

SEQ ID NO: 1595467 - DNA, 25 bp, Homo sapien
gtgatgcatgcgaaagaaaccttgc

SEQ ID NO: 1595468 - DNA, 25 bp, Homo sapien
atgacgtagcggatccggccctcta

SEQ ID NO: 1595469 - DNA, 25 bp, Homo sapien
aaccttgctcgtttccgcggacgat

SEQ ID NO: 1595470 - DNA, 25 bp, Homo sapien
cccggcccaggtgtgagaggttcag

SEQ ID NO: 1595471 - DNA, 25 bp, Homo sapien
tggcaaaaatgccctctctgcacac

SEQ ID NO: 1595472 - DNA, 25 bp, Homo sapien
agttgaggggcaagcagctggcatc

SEQ ID NO: 1595473 - DNA, 25 bp, Homo sapien
gttgaggggcaagcagctggcatct

SEQ ID NO: 1595474 - DNA, 25 bp, Homo sapien
tctgtggcaaaaatgccctctctgc

SEQ ID NO: 1595475 - DNA, 25 bp, Homo sapien
taggcctgccctacggctactgagt

SEQ ID NO: 1595476 - DNA, 25 bp, Homo sapien
tacggctactgagtggtgtgttgaa

SEQ ID NO: 1595477 - DNA, 25 bp, Homo sapien
ggtgtgttgaagatccctgagattc

SEQ ID NO: 1595478 - DNA, 25 bp, Homo sapien
gggatggagccataggcctgcccta

SEQ ID NO: 1595479 - DNA, 25 bp, Homo sapien
cattgatcttgcattcgtagcaggc

SEQ ID NO: 1595480 - DNA, 25 bp, Homo sapien
tgaagcccaggccggagacacagtg

SEQ ID NO: 1595481 - DNA, 25 bp, Homo sapien
tagcaggcttcagacgagagcagct

SEQ ID NO: 1595482 - DNA, 25 bp, Homo sapien
tccctgtgggcactgcgtcgtggcc

SEQ ID NO: 1595483 - DNA, 25 bp, Homo sapien
caccaagagtgttgcgacaggaggc

SEQ ID NO: 1595484 - DNA, 25 bp, Homo sapien
ggcgacagggcacactcattctcat

SEQ ID NO: 1595485 - DNA, 25 bp, Homo sapien
caggaagccaccaggcgtgttggca

SEQ ID NO: 1595486 - DNA, 25 bp, Homo sapien
ccagcccggaagtagccttgaggac

SEQ ID NO: 1595487 - DNA, 25 bp, Homo sapien
tgggctggcctgttcaatctttaga

SEQ ID NO: 1595488 - DNA, 25 bp, Homo sapien
cacatcatcttgcagggtggcgtct

SEQ ID NO: 1595489 - DNA, 25 bp, Homo sapien
gtgatcacaaaattgcagacttcag

SEQ ID NO: 1595490 - DNA, 25 bp, Homo sapien
gcgtctgttagtcgcctgctctgag

SEQ ID NO: 1595491 - DNA, 25 bp, Homo sapien
agctgcagcggtagccccctagctg

SEQ ID NO: 1595492 - DNA, 25 bp, Homo sapien
tagccccctagctggttctgacagc

SEQ ID NO: 1595493 - DNA, 25 bp, Homo sapien
ctggcagcggtggggcccatcacat

SEQ ID NO: 1595494 - DNA, 25 bp, Homo sapien
agcggtagccccctagctggttctg

SEQ ID NO: 1595495 - DNA, 25 bp, Homo sapien
cagtgcccgtgggcaccacatgggc

SEQ ID NO: 1595496 - DNA, 25 bp, Homo sapien
agtgcccgtgggcaccacatgggcc

SEQ ID NO: 1595497 - DNA, 25 bp, Homo sapien
gtgcccgtgggcaccacatgggcca

SEQ ID NO: 1595498 - DNA, 25 bp, Homo sapien
tgagagaagcagtcacgtgtgacct

SEQ ID NO: 1595499 - DNA, 25 bp, Homo sapien
gtgtgaccttgctccacggatgtta

SEQ ID NO: 1595500 - DNA, 25 bp, Homo sapien
gatgttacccatgtgatgcacggcc

SEQ ID NO: 1595501 - DNA, 25 bp, Homo sapien
catggtagagtccaatcgtggcgac

SEQ ID NO: 1595502 - DNA, 25 bp, Homo sapien
tgctgggtgaagccgggcggacagc

SEQ ID NO: 1595503 - DNA, 25 bp, Homo sapien
agccgggcggacagcggcaggtgaa

SEQ ID NO: 1595504 - DNA, 25 bp, Homo sapien
tgccgggaggtgcattcgtccaggt

SEQ ID NO: 1595505 - DNA, 25 bp, Homo sapien
aggtgaaggcgcccacagtgttgac

SEQ ID NO: 1595506 - DNA, 25 bp, Homo sapien
ggaaactgcccttcgtgtttttgca

SEQ ID NO: 1595507 - DNA, 25 bp, Homo sapien
tgcccttcgtgtttttgcagaggaa

SEQ ID NO: 1595508 - DNA, 25 bp, Homo sapien
cctccagcaggtagcctcggggaca

SEQ ID NO: 1595509 - DNA, 25 bp, Homo sapien
actgcccttcgtgtttttgcagagg

SEQ ID NO: 1595510 - DNA, 25 bp, Homo sapien
aggagccaaggctgttgatgcactc

SEQ ID NO: 1595511 - DNA, 25 bp, Homo sapien
ggtgagcaagcatacggcattcatc

SEQ ID NO: 1595512 - DNA, 25 bp, Homo sapien
tgttgatgcactccccatgagcaca

SEQ ID NO: 1595513 - DNA, 25 bp, Homo sapien
tagcagtagcatccggtgtgtaccc

SEQ ID NO: 1595514 - DNA, 25 bp, Homo sapien
gctgcttcgcgcctccaccgaggaa

SEQ ID NO: 1595515 - DNA, 25 bp, Homo sapien
aaaaagtagggtgcaaatggggctg

SEQ ID NO: 1595516 - DNA, 25 bp, Homo sapien
ttcgcgcctccaccgaggaatgtct

SEQ ID NO: 1595517 - DNA, 25 bp, Homo sapien
tggctggctgcttcgcgcctccacc

SEQ ID NO: 1595518 - DNA, 25 bp, Homo sapien
ctgctggacagagaccggcacatgg

SEQ ID NO: 1595519 - DNA, 25 bp, Homo sapien
gtctgcagcacctcggcaaagcagg

SEQ ID NO: 1595520 - DNA, 25 bp, Homo sapien
gccctcagcagtgtagcctgagcca

SEQ ID NO: 1595521 - DNA, 25 bp, Homo sapien
ctcagcagtgtagcctgagccatgg

SEQ ID NO: 1595522 - DNA, 25 bp, Homo sapien
ccgttgacacagaggtcaggctgag

SEQ ID NO: 1595523 - DNA, 25 bp, Homo sapien
caggctgagcgtggcattcattgtc

SEQ ID NO: 1595524 - DNA, 25 bp, Homo sapien
tcatcacagtcgcaccggaagctgc

SEQ ID NO: 1595525 - DNA, 25 bp, Homo sapien
ttgacacagcggccgttgacacaga

SEQ ID NO: 1595526 - DNA, 25 bp, Homo sapien
gtaccgatgaggttcttgcactcca

SEQ ID NO: 1595527 - DNA, 25 bp, Homo sapien
acagacgcacgcgaaggtaccgatg

SEQ ID NO: 1595528 - DNA, 25 bp, Homo sapien
gctgaccatctgcacactcgtccac

SEQ ID NO: 1595529 - DNA, 25 bp, Homo sapien
ccccgggcgtggcagtcctgctgac

SEQ ID NO: 1595530 - DNA, 25 bp, Homo sapien
cggtattgtggcagcggaaggcaca

SEQ ID NO: 1595531 - DNA, 25 bp, Homo sapien
ggagccctcggtattgtggcagcgg

SEQ ID NO: 1595532 - DNA, 25 bp, Homo sapien
catcctcccgcagggtgtagccggc

SEQ ID NO: 1595533 - DNA, 25 bp, Homo sapien
gggtgtagccggctggacaggtgca

SEQ ID NO: 1595534 - DNA, 25 bp, Homo sapien
gcatctccgtcacacggcccaggtc

SEQ ID NO: 1595535 - DNA, 25 bp, Homo sapien
ctccgtcacacggcccaggtcctgg

SEQ ID NO: 1595536 - DNA, 25 bp, Homo sapien
ggcatctccgtcacacggcccaggt

SEQ ID NO: 1595537 - DNA, 25 bp, Homo sapien
atctccgtcacacggcccaggtcct

SEQ ID NO: 1595538 - DNA, 25 bp, Homo sapien
cgaagcctccgatgacattggtgca

SEQ ID NO: 1595539 - DNA, 25 bp, Homo sapien
cgtcagcacaggcacattcgaagcc

SEQ ID NO: 1595540 - DNA, 25 bp, Homo sapien
tcgcaggtcatcatgaggccaggct

SEQ ID NO: 1595541 - DNA, 25 bp, Homo sapien
tggccgacagagcactcgtctgtgt

SEQ ID NO: 1595542 - DNA, 25 bp, Homo sapien
tcacagcggaaggatccatcggtgt

SEQ ID NO: 1595543 - DNA, 25 bp, Homo sapien
acagacgccgttagtgcagacgcca

SEQ ID NO: 1595544 - DNA, 25 bp, Homo sapien
ggctgtagccaaagggacactcaca

SEQ ID NO: 1595545 - DNA, 25 bp, Homo sapien
cacacagttgatgccagtgaagtcc

SEQ ID NO: 1595546 - DNA, 25 bp, Homo sapien
ggcaggcgttgcagacatggcttct

SEQ ID NO: 1595547 - DNA, 25 bp, Homo sapien
ttctgtcaccacacaatcgccagag

SEQ ID NO: 1595548 - DNA, 25 bp, Homo sapien
tggccacactcaaggccccaagggg

SEQ ID NO: 1595549 - DNA, 25 bp, Homo sapien
ccaggcagtgcggagatggatctgg

SEQ ID NO: 1595550 - DNA, 25 bp, Homo sapien
gactgccccgtggccaaaggggcag

SEQ ID NO: 1595551 - DNA, 25 bp, Homo sapien
ggcctgggactgccccgtggccaaa

SEQ ID NO: 1595552 - DNA, 25 bp, Homo sapien
cttctcgggagtcatccgggcctgg

SEQ ID NO: 1595553 - DNA, 25 bp, Homo sapien
ctgggactgccccgtggccaaaggg

SEQ ID NO: 1595554 - DNA, 25 bp, Homo sapien
gcacatcatccagggagcctggaca

SEQ ID NO: 1595555 - DNA, 25 bp, Homo sapien
cagggcctaggtgcagcccccaggt

SEQ ID NO: 1595556 - DNA, 25 bp, Homo sapien
tcagagtcagggcctaggtgcagcc

SEQ ID NO: 1595557 - DNA, 25 bp, Homo sapien
agagtcagggcctaggtgcagcccc

SEQ ID NO: 1595558 - DNA, 25 bp, Homo sapien
cctcaaaacgggtgaagcagaaact

SEQ ID NO: 1595559 - DNA, 25 bp, Homo sapien
aaagctttgggcaccgagcacttcc

SEQ ID NO: 1595560 - DNA, 25 bp, Homo sapien
gcagcgggtcttggtggtgttgaaa

SEQ ID NO: 1595561 - DNA, 25 bp, Homo sapien
caggcctcttactgcagcagcagcg

SEQ ID NO: 1595562 - DNA, 25 bp, Homo sapien
accctcttccctaagccctgtgtgg

SEQ ID NO: 1595563 - DNA, 25 bp, Homo sapien
cctcttccctaagccctgtgtggac

SEQ ID NO: 1595564 - DNA, 25 bp, Homo sapien
cccaccctcttccctaagccctgtg

SEQ ID NO: 1595565 - DNA, 25 bp, Homo sapien
caccctcttccctaagccctgtgtg

SEQ ID NO: 1595566 - DNA, 25 bp, Homo sapien
gggctcctctgagcactcgtcgata

SEQ ID NO: 1595567 - DNA, 25 bp, Homo sapien
caaagcaacggtgcccattgtcaga

SEQ ID NO: 1595568 - DNA, 25 bp, Homo sapien
ctgttggtacaggtgccaaagaggc

SEQ ID NO: 1595569 - DNA, 25 bp, Homo sapien
tggaagctcccagggctgttggtac

SEQ ID NO: 1595570 - DNA, 25 bp, Homo sapien
ggcaagtgccgggtaggcaggttcc

SEQ ID NO: 1595571 - DNA, 25 bp, Homo sapien
ggttctggcaagtgccgggtaggca

SEQ ID NO: 1595572 - DNA, 25 bp, Homo sapien
aaggagccctcgaggttctggcaag

SEQ ID NO: 1595573 - DNA, 25 bp, Homo sapien
ggaaggagccctcgaggttctggca

SEQ ID NO: 1595574 - DNA, 25 bp, Homo sapien
catggtatctatttagcgcttctac

SEQ ID NO: 1595575 - DNA, 25 bp, Homo sapien
gaaagaggtagcaagattcctaatc

SEQ ID NO: 1595576 - DNA, 25 bp, Homo sapien
gggaccaacacctgcaatcactgtg

SEQ ID NO: 1595577 - DNA, 25 bp, Homo sapien
ccccatacatagaaacataggtttg

SEQ ID NO: 1595578 - DNA, 25 bp, Homo sapien
tgcctccgagcaccataggcagact

SEQ ID NO: 1595579 - DNA, 25 bp, Homo sapien
cagaagtaccaaactgtggtgtaca

SEQ ID NO: 1595580 - DNA, 25 bp, Homo sapien
tggctgagatgcctccgagcaccat

SEQ ID NO: 1595581 - DNA, 25 bp, Homo sapien
caaactgtggtgtacatggagcagg

SEQ ID NO: 1595582 - DNA, 25 bp, Homo sapien
tgccccaccagggtagtacactcat

SEQ ID NO: 1595583 - DNA, 25 bp, Homo sapien
caccagggtagtacactcatcaaaa

SEQ ID NO: 1595584 - DNA, 25 bp, Homo sapien
ggcaatggccaaatcggcacacctg

SEQ ID NO: 1595585 - DNA, 25 bp, Homo sapien
accagctgtgttgaggcaatggcca

SEQ ID NO: 1595586 - DNA, 25 bp, Homo sapien
agaggcagttgtaggagccaatgat

SEQ ID NO: 1595587 - DNA, 25 bp, Homo sapien
cattgtgtgtcaccacaaagccagg

SEQ ID NO: 1595588 - DNA, 25 bp, Homo sapien
acaatccccattgtgtgtcaccaca

SEQ ID NO: 1595589 - DNA, 25 bp, Homo sapien
gccaatgatgttcttgcaggtccca

SEQ ID NO: 1595590 - DNA, 25 bp, Homo sapien
tgcagaagcaaagccgagagcccaa

SEQ ID NO: 1595591 - DNA, 25 bp, Homo sapien
ccagctcacccagggcattggggaa

SEQ ID NO: 1595592 - DNA, 25 bp, Homo sapien
gagagcccaacccagctcacccagg

SEQ ID NO: 1595593 - DNA, 25 bp, Homo sapien
ctgcagaagcaaagccgagagccca

SEQ ID NO: 1595594 - DNA, 25 bp, Homo sapien
ggctacagacattcgggatctcccg

SEQ ID NO: 1595595 - DNA, 25 bp, Homo sapien
catgcacagggtctggtctgcagag

SEQ ID NO: 1595596 - DNA, 25 bp, Homo sapien
agtcaccatggctacagacattcgg

SEQ ID NO: 1595597 - DNA, 25 bp, Homo sapien
cattcgggatctcccgacactcatt

SEQ ID NO: 1595598 - DNA, 25 bp, Homo sapien
tctgctggcagggactctccctgct

SEQ ID NO: 1595599 - DNA, 25 bp, Homo sapien
cgcctggcgacagtttgtaccctcg

SEQ ID NO: 1595600 - DNA, 25 bp, Homo sapien
ccctcgggtgcacttgcagcggtag

SEQ ID NO: 1595601 - DNA, 25 bp, Homo sapien
gcgacagtttgtaccctcgggtgca

SEQ ID NO: 1595602 - DNA, 25 bp, Homo sapien
ccaggccccagggctgggaacaggg

SEQ ID NO: 1595603 - DNA, 25 bp, Homo sapien
gatgctgttgtagttgaagcctgcg

SEQ ID NO: 1595604 - DNA, 25 bp, Homo sapien
actcgcagcggaaactcccgatctg

SEQ ID NO: 1595605 - DNA, 25 bp, Homo sapien
atctggtttatgcagatgccattgg

SEQ ID NO: 1595606 - DNA, 25 bp, Homo sapien
cattggcacagatggcggggatctc

SEQ ID NO: 1595607 - DNA, 25 bp, Homo sapien
tttccacacaggatctggtagtcag

SEQ ID NO: 1595608 - DNA, 25 bp, Homo sapien
ccccgtgtggatgtcagtgaggaat

SEQ ID NO: 1595609 - DNA, 25 bp, Homo sapien
gatttccacacaggatctggtagtc

SEQ ID NO: 1595610 - DNA, 25 bp, Homo sapien
ggcttccccgtgtggatgtcagtga

SEQ ID NO: 1595611 - DNA, 25 bp, Homo sapien
actgatgggagtggggcaggcctca

SEQ ID NO: 1595612 - DNA, 25 bp, Homo sapien
gactgatgggagtggggcaggcctc

SEQ ID NO: 1595613 - DNA, 25 bp, Homo sapien
ctgatgggagtggggcaggcctcac

SEQ ID NO: 1595614 - DNA, 25 bp, Homo sapien
tgccgttatagtgccggaagcagac

SEQ ID NO: 1595615 - DNA, 25 bp, Homo sapien
cattttgacatgtgccgttatagtg

SEQ ID NO: 1595616 - DNA, 25 bp, Homo sapien
gcagcaacacattttccgggtcacg

SEQ ID NO: 1595617 - DNA, 25 bp, Homo sapien
ttccgggtcacgttgaaggccagct

SEQ ID NO: 1595618 - DNA, 25 bp, Homo sapien
ttgccaccattgacttggaggtact

SEQ ID NO: 1595619 - DNA, 25 bp, Homo sapien
ggagtgtgtggagcattcgtcaata

SEQ ID NO: 1595620 - DNA, 25 bp, Homo sapien
accattgacttggaggtactctgca

SEQ ID NO: 1595621 - DNA, 25 bp, Homo sapien
cagggccacagatgccggagtgtgt

SEQ ID NO: 1595622 - DNA, 25 bp, Homo sapien
gttgacgcagtcacccccctgacac

SEQ ID NO: 1595623 - DNA, 25 bp, Homo sapien
tggaaactgccaaacgtgttgacgc

SEQ ID NO: 1595624 - DNA, 25 bp, Homo sapien
tgtgctcactgaggtggtagccagg

SEQ ID NO: 1595625 - DNA, 25 bp, Homo sapien
tgcgggtgtgctcactgaggtggta

SEQ ID NO: 1595626 - DNA, 25 bp, Homo sapien
gatgcggttaggctggaagccctca

SEQ ID NO: 1595627 - DNA, 25 bp, Homo sapien
agtgatgcggttaggctggaagccc

SEQ ID NO: 1595628 - DNA, 25 bp, Homo sapien
gacagtgatgcggttaggctggaag

SEQ ID NO: 1595629 - DNA, 25 bp, Homo sapien
gaagccctcaccacccgggcacagg

SEQ ID NO: 1595630 - DNA, 25 bp, Homo sapien
acagctcacagggattgccccaagc

SEQ ID NO: 1595631 - DNA, 25 bp, Homo sapien
tcggtcatgcgtctccaggaaacag

SEQ ID NO: 1595632 - DNA, 25 bp, Homo sapien
cgggtgacaccaactccgatctcgg

SEQ ID NO: 1595633 - DNA, 25 bp, Homo sapien
agcaacagcaggaagctcgggtgac

SEQ ID NO: 1595634 - DNA, 25 bp, Homo sapien
ccagaaccctgatctggagttgagc

SEQ ID NO: 1595635 - DNA, 25 bp, Homo sapien
aaccctgatctggagttgagcatgg

SEQ ID NO: 1595636 - DNA, 25 bp, Homo sapien
cagaaccctgatctggagttgagca

SEQ ID NO: 1595637 - DNA, 25 bp, Homo sapien
cctgatctggagttgagcatggact

SEQ ID NO: 1595638 - DNA, 25 bp, Homo sapien
ttactgggtctgcacactcgttgat

SEQ ID NO: 1595639 - DNA, 25 bp, Homo sapien
gggtgttaatgcacacgccgttgat

SEQ ID NO: 1595640 - DNA, 25 bp, Homo sapien
ggttcagctcaaaatcctgggggca

SEQ ID NO: 1595641 - DNA, 25 bp, Homo sapien
cacgccgttgatgcagtttactggg

SEQ ID NO: 1595642 - DNA, 25 bp, Homo sapien
tcggtccagttcgtagccaccattg

SEQ ID NO: 1595643 - DNA, 25 bp, Homo sapien
ccaaatgcacagaggttcccttgcg

SEQ ID NO: 1595644 - DNA, 25 bp, Homo sapien
cattgcagatgcagcggaacattcc

SEQ ID NO: 1595645 - DNA, 25 bp, Homo sapien
aatgcacagaggttcccttgcgcac

SEQ ID NO: 1595646 - DNA, 25 bp, Homo sapien
gaggtccacgttctcggcacattca

SEQ ID NO: 1595647 - DNA, 25 bp, Homo sapien
tcctcggtggggtcaaagcccatct

SEQ ID NO: 1595648 - DNA, 25 bp, Homo sapien
tggcaggcccggtggtcctcggtgg

SEQ ID NO: 1595649 - DNA, 25 bp, Homo sapien
acccgccgggcgcattgaggcactg

SEQ ID NO: 1595650 - DNA, 25 bp, Homo sapien
ctgaggggccccaagattcggaggg

SEQ ID NO: 1595651 - DNA, 25 bp, Homo sapien
tcttgggctgcaccggtgctcctgg

SEQ ID NO: 1595652 - DNA, 25 bp, Homo sapien
ctcttgggctgcaccggtgctcctg

SEQ ID NO: 1595653 - DNA, 25 bp, Homo sapien
tgtgtcctccaacctcgcattcatc

SEQ ID NO: 1595654 - DNA, 25 bp, Homo sapien
ggcaggcacctacagctgaaactcc

SEQ ID NO: 1595655 - DNA, 25 bp, Homo sapien
gacaggaggcgtgactgtcacagtt

SEQ ID NO: 1595656 - DNA, 25 bp, Homo sapien
actccccgggatgttgagacaggag

SEQ ID NO: 1595657 - DNA, 25 bp, Homo sapien
aggcagatgtgagggttcaggtcac

SEQ ID NO: 1595658 - DNA, 25 bp, Homo sapien
ggaacccttcgtgttctcgcagtcc

SEQ ID NO: 1595659 - DNA, 25 bp, Homo sapien
aaaggaacccttcgtgttctcgcag

SEQ ID NO: 1595660 - DNA, 25 bp, Homo sapien
catggaggcagatgtgagggttcag

SEQ ID NO: 1595661 - DNA, 25 bp, Homo sapien
gtcctcatgtctggcgtggccatga

SEQ ID NO: 1595662 - DNA, 25 bp, Homo sapien
caacacatgtcctcatgtctggcgt

SEQ ID NO: 1595663 - DNA, 25 bp, Homo sapien
tcacaaacgcgggggttctcttcac

SEQ ID NO: 1595664 - DNA, 25 bp, Homo sapien
ccatcatagcacaggcagcggtgac

SEQ ID NO: 1595665 - DNA, 25 bp, Homo sapien
agcagggttggggactgtgcttagc

SEQ ID NO: 1595666 - DNA, 25 bp, Homo sapien
gttggggactgtgcttagctttgcc

SEQ ID NO: 1595667 - DNA, 25 bp, Homo sapien
ggagcagggttggggactgtgctta

SEQ ID NO: 1595668 - DNA, 25 bp, Homo sapien
gggttggggactgtgcttagctttg

SEQ ID NO: 1595669 - DNA, 25 bp, Homo sapien
cagtgggaagaagttgtgcccacct

SEQ ID NO: 1595670 - DNA, 25 bp, Homo sapien
gtgggaagaagttgtgcccacctac

SEQ ID NO: 1595671 - DNA, 25 bp, Homo sapien
ctccacaccaggcagtgggaagaag

SEQ ID NO: 1595672 - DNA, 25 bp, Homo sapien
ggcagtgggaagaagttgtgcccac

SEQ ID NO: 1595673 - DNA, 25 bp, Homo sapien
gttaatacagtgcacgtcacaccca

SEQ ID NO: 1595674 - DNA, 25 bp, Homo sapien
tgccctcagtgttaatacagtgcac

SEQ ID NO: 1595675 - DNA, 25 bp, Homo sapien
gggcatcagcgagtagccctgccca

SEQ ID NO: 1595676 - DNA, 25 bp, Homo sapien
atgcccttccgtcgggcatcagcga

SEQ ID NO: 1595677 - DNA, 25 bp, Homo sapien
ggccagcaggtgggcacagtctcac

SEQ ID NO: 1595678 - DNA, 25 bp, Homo sapien
cactatgtctgggactgtggttggt

SEQ ID NO: 1595679 - DNA, 25 bp, Homo sapien
tatgtctgggactgtggttggtgcc

SEQ ID NO: 1595680 - DNA, 25 bp, Homo sapien
gggccagcaggtgggcacagtctca

SEQ ID NO: 1595681 - DNA, 25 bp, Homo sapien
ccacgcagccctggcggtcaggtgt

SEQ ID NO: 1595682 - DNA, 25 bp, Homo sapien
cagccctggcggtcaggtgtgctct

SEQ ID NO: 1595683 - DNA, 25 bp, Homo sapien
tggaaggcaccgatgacattgacac

SEQ ID NO: 1595684 - DNA, 25 bp, Homo sapien
ccgatgacattgacacactggccat

SEQ ID NO: 1595685 - DNA, 25 bp, Homo sapien
aggcagtgcccttggccgtcagctc

SEQ ID NO: 1595686 - DNA, 25 bp, Homo sapien
ccgtcagctcatgcccagggggaca

SEQ ID NO: 1595687 - DNA, 25 bp, Homo sapien
cagctcatgcccagggggacactgg

SEQ ID NO: 1595688 - DNA, 25 bp, Homo sapien
cacaggcagtgcccttggccgtcag

SEQ ID NO: 1595689 - DNA, 25 bp, Homo sapien
gtgttggtgcaagtgcctccccggc

SEQ ID NO: 1595690 - DNA, 25 bp, Homo sapien
catccgtgttggtgcaagtgcctcc

SEQ ID NO: 1595691 - DNA, 25 bp, Homo sapien
tggtgcaagtgcctccccggcagag

SEQ ID NO: 1595692 - DNA, 25 bp, Homo sapien
agctcccatccgtgttggtgcaagt

SEQ ID NO: 1595693 - DNA, 25 bp, Homo sapien
gcatgaaggtgctgatgcagggagg

SEQ ID NO: 1595694 - DNA, 25 bp, Homo sapien
agcaggcatgaaggtgctgatgcag

SEQ ID NO: 1595695 - DNA, 25 bp, Homo sapien
gaaagagagagcaggcatgaaggtg

SEQ ID NO: 1595696 - DNA, 25 bp, Homo sapien
gaaggtttgtgtggaaagagagagc

SEQ ID NO: 1595697 - DNA, 25 bp, Homo sapien
tcttggggccactagaaacggcact

SEQ ID NO: 1595698 - DNA, 25 bp, Homo sapien
aacggcactaagaggccttcctcca

SEQ ID NO: 1595699 - DNA, 25 bp, Homo sapien
aagaacaaaggccacgaagctgaca

SEQ ID NO: 1595700 - DNA, 25 bp, Homo sapien
aaaggccacgaagctgacactcttg

SEQ ID NO: 1595701 - DNA, 25 bp, Homo sapien
aagctgcccggcgtgttgacacagg

SEQ ID NO: 1595702 - DNA, 25 bp, Homo sapien
aggtcaggagagatgcgacactcgt

SEQ ID NO: 1595703 - DNA, 25 bp, Homo sapien
gccgggaaaacactcgcactcaaag

SEQ ID NO: 1595704 - DNA, 25 bp, Homo sapien
gcatgaagccactctcgtagccggg

SEQ ID NO: 1595705 - DNA, 25 bp, Homo sapien
ggcatccagggcgaagccccccgca

SEQ ID NO: 1595706 - DNA, 25 bp, Homo sapien
cccgcacaggcgcagtggaagctgc

SEQ ID NO: 1595707 - DNA, 25 bp, Homo sapien
gcagtggaagctgcccaccgtgttt

SEQ ID NO: 1595708 - DNA, 25 bp, Homo sapien
ctgtgcagttccgttcctgggcatc

SEQ ID NO: 1595709 - DNA, 25 bp, Homo sapien
ctgcaggtaccgtgcgtgcagaggc

SEQ ID NO: 1595710 - DNA, 25 bp, Homo sapien
tgcaggtaccgtgcgtgcagaggcc

SEQ ID NO: 1595711 - DNA, 25 bp, Homo sapien
gcaggtaccgtgcgtgcagaggcca

SEQ ID NO: 1595712 - DNA, 25 bp, Homo sapien
caggtaccgtgcgtgcagaggccag

SEQ ID NO: 1595713 - DNA, 25 bp, Homo sapien
aggaagtcccggctggcgaagccca

SEQ ID NO: 1595714 - DNA, 25 bp, Homo sapien
tcgggatccgggcaggcctcgcact

SEQ ID NO: 1595715 - DNA, 25 bp, Homo sapien
tggcgaactccagagactcgggatc

SEQ ID NO: 1595716 - DNA, 25 bp, Homo sapien
gaatggtcggccagacaggaagtcc

SEQ ID NO: 1595717 - DNA, 25 bp, Homo sapien
tcctcatcccatcgcaggaaacatg

SEQ ID NO: 1595718 - DNA, 25 bp, Homo sapien
cgcaggaaacatggttccaatctca

SEQ ID NO: 1595719 - DNA, 25 bp, Homo sapien
tcccatcgcaggaaacatggttcca

SEQ ID NO: 1595720 - DNA, 25 bp, Homo sapien
caggaaacatggttccaatctcaca

SEQ ID NO: 1595721 - DNA, 25 bp, Homo sapien
acagccggcctgaggcgtccagcat

SEQ ID NO: 1595722 - DNA, 25 bp, Homo sapien
gacgcaacgcccgttgggacagact

SEQ ID NO: 1595723 - DNA, 25 bp, Homo sapien
tcacagcggaaagacccagcagtgt

SEQ ID NO: 1595724 - DNA, 25 bp, Homo sapien
cggcctgaggcgtccagcatcaggc

SEQ ID NO: 1595725 - DNA, 25 bp, Homo sapien
caggtgacacccgtcatccgggcaa

SEQ ID NO: 1595726 - DNA, 25 bp, Homo sapien
tcatccgggcaaagccccgggcaca

SEQ ID NO: 1595727 - DNA, 25 bp, Homo sapien
atccgggcaaagccccgggcacagg

SEQ ID NO: 1595728 - DNA, 25 bp, Homo sapien
gtgacacccgtcatccgggcaaagc

SEQ ID NO: 1595729 - DNA, 25 bp, Homo sapien
gtgaagagaggagtcattttctcat

SEQ ID NO: 1595730 - DNA, 25 bp, Homo sapien
gaagagaggagtcattttctcatgc

SEQ ID NO: 1595731 - DNA, 25 bp, Homo sapien
aagagaggagtcattttctcatgcc

SEQ ID NO: 1595732 - DNA, 25 bp, Homo sapien
gagaggagtcattttctcatgccag

SEQ ID NO: 1595733 - DNA, 25 bp, Homo sapien
gggcttttcccatgggtgcctggga

SEQ ID NO: 1595734 - DNA, 25 bp, Homo sapien
ggcttttcccatgggtgcctgggag

SEQ ID NO: 1595735 - DNA, 25 bp, Homo sapien
tcacagcggctctcctggatcttca

SEQ ID NO: 1595736 - DNA, 25 bp, Homo sapien
atctcgcagcgttcgcaggggctcc

SEQ ID NO: 1595737 - DNA, 25 bp, Homo sapien
acagcggctctcctggatcttcagc

SEQ ID NO: 1595738 - DNA, 25 bp, Homo sapien
cgatctcgcagcgttcgcaggggct

SEQ ID NO: 1595739 - DNA, 25 bp, Homo sapien
tgcaccctgacccatagacgcccag

SEQ ID NO: 1595740 - DNA, 25 bp, Homo sapien
ctctggaacgccgtcgggctccggg

SEQ ID NO: 1595741 - DNA, 25 bp, Homo sapien
ctgcaccctgacccatagacgccca

SEQ ID NO: 1595742 - DNA, 25 bp, Homo sapien
ccagcctctggaacgccgtcgggct

SEQ ID NO: 1595743 - DNA, 25 bp, Homo sapien
ttgcaggtgtaggagccggccaggt

SEQ ID NO: 1595744 - DNA, 25 bp, Homo sapien
gggctggacaggcattcgtcgacat

SEQ ID NO: 1595745 - DNA, 25 bp, Homo sapien
gccactcacacacgggctggacagg

SEQ ID NO: 1595746 - DNA, 25 bp, Homo sapien
ggccaggttccgacagacgccactc

SEQ ID NO: 1595747 - DNA, 25 bp, Homo sapien
gggctattctggcaccacccgttgt

SEQ ID NO: 1595748 - DNA, 25 bp, Homo sapien
accacccgttgtcacacaggaggct

SEQ ID NO: 1595749 - DNA, 25 bp, Homo sapien
tccgtgtcctgccagaagtggaagc

SEQ ID NO: 1595750 - DNA, 25 bp, Homo sapien
aggctgttgagggcacactcatcca

SEQ ID NO: 1595751 - DNA, 25 bp, Homo sapien
taacccaggttgcagacacagcggt

SEQ ID NO: 1595752 - DNA, 25 bp, Homo sapien
aaggttctcgcacacgccattggca

SEQ ID NO: 1595753 - DNA, 25 bp, Homo sapien
acgccattggcacaaacctcaggat

SEQ ID NO: 1595754 - DNA, 25 bp, Homo sapien
caggatccagagcacactcgttgat

SEQ ID NO: 1595755 - DNA, 25 bp, Homo sapien
gaccatccgtggtaatgccaagccc

SEQ ID NO: 1595756 - DNA, 25 bp, Homo sapien
ctcgaccatccgtggtaatgccaag

SEQ ID NO: 1595757 - DNA, 25 bp, Homo sapien
ccgtggtaatgccaagcccactgct

SEQ ID NO: 1595758 - DNA, 25 bp, Homo sapien
catccgtggtaatgccaagcccact

SEQ ID NO: 1595759 - DNA, 25 bp, Homo sapien
cactcggacttggtgacagtgccag

SEQ ID NO: 1595760 - DNA, 25 bp, Homo sapien
tacagtggccgttcacgcagatgcc

SEQ ID NO: 1595761 - DNA, 25 bp, Homo sapien
gccccatagcaggtgctgcgcacgt

SEQ ID NO: 1595762 - DNA, 25 bp, Homo sapien
caaaaccgtggtccggattggcaca

SEQ ID NO: 1595763 - DNA, 25 bp, Homo sapien
tcctcgttgagacacacgccgttga

SEQ ID NO: 1595764 - DNA, 25 bp, Homo sapien
gcacatggtgctggtggcacactcg

SEQ ID NO: 1595765 - DNA, 25 bp, Homo sapien
gcaggaagccgggtttgcagaggca

SEQ ID NO: 1595766 - DNA, 25 bp, Homo sapien
ccatgcagtagtggccgccaggcgc

SEQ ID NO: 1595767 - DNA, 25 bp, Homo sapien
agcctgcattgcagacacactggaa

SEQ ID NO: 1595768 - DNA, 25 bp, Homo sapien
aggccaccactgacaatgcactcgt

SEQ ID NO: 1595769 - DNA, 25 bp, Homo sapien
tcagggctgagctcgaagcctgcat

SEQ ID NO: 1595770 - DNA, 25 bp, Homo sapien
cagttcttgccgtcagggctgagct

SEQ ID NO: 1595771 - DNA, 25 bp, Homo sapien
ccggggatgttgacgcagtcaccgt

SEQ ID NO: 1595772 - DNA, 25 bp, Homo sapien
tgttgacgcagtcaccgtggtggca

SEQ ID NO: 1595773 - DNA, 25 bp, Homo sapien
ccacgcatgcctgcctggtgggcgt

SEQ ID NO: 1595774 - DNA, 25 bp, Homo sapien
tggaagcccgggtagcaccggcagt

SEQ ID NO: 1595775 - DNA, 25 bp, Homo sapien
tgggtgtagcccacgttacactcgc

SEQ ID NO: 1595776 - DNA, 25 bp, Homo sapien
ttggtgaagtgtcggcagatgtcaa

SEQ ID NO: 1595777 - DNA, 25 bp, Homo sapien
ctcgccgcgcacgtcctgggtgtag

SEQ ID NO: 1595778 - DNA, 25 bp, Homo sapien
ggcagcggccattcagacacaggtt

SEQ ID NO: 1595779 - DNA, 25 bp, Homo sapien
caatattagagttgccagggcccag

SEQ ID NO: 1595780 - DNA, 25 bp, Homo sapien
aatattagagttgccagggcccagg

SEQ ID NO: 1595781 - DNA, 25 bp, Homo sapien
atgccattggatccgaagcccagga

SEQ ID NO: 1595782 - DNA, 25 bp, Homo sapien
ccgctgggcgcacagttgctggaat

SEQ ID NO: 1595783 - DNA, 25 bp, Homo sapien
gttgagtcgcgctggcccaagaggg

SEQ ID NO: 1595784 - DNA, 25 bp, Homo sapien
atcccacgcgcatcagagccatggg

SEQ ID NO: 1595785 - DNA, 25 bp, Homo sapien
agcactgcctgcgagtgtagtggcc

SEQ ID NO: 1595786 - DNA, 25 bp, Homo sapien
tgcgagtgtagtggccggcgaggtc

SEQ ID NO: 1595787 - DNA, 25 bp, Homo sapien
agtggccggcgaggtctccagcaca

SEQ ID NO: 1595788 - DNA, 25 bp, Homo sapien
agcagcactgcctgcgagtgtagtg

SEQ ID NO: 1595789 - DNA, 25 bp, Homo sapien
ctgagaagcaggcgccggcccggta

SEQ ID NO: 1595790 - DNA, 25 bp, Homo sapien
gagaagcaggcgccggcccggtagt

SEQ ID NO: 1595791 - DNA, 25 bp, Homo sapien
tgagaagcaggcgccggcccggtag

SEQ ID NO: 1595792 - DNA, 25 bp, Homo sapien
acgtagctcccgacagtgttggtgc

SEQ ID NO: 1595793 - DNA, 25 bp, Homo sapien
taaacagggacaaggtcagaactgg

SEQ ID NO: 1595794 - DNA, 25 bp, Homo sapien
ctcggttcactcaggcagtgggtgc

SEQ ID NO: 1595795 - DNA, 25 bp, Homo sapien
gacaaggtcagaactgggcacctca

SEQ ID NO: 1595796 - DNA, 25 bp, Homo sapien
gacagcggcaatggaaggagcccac

SEQ ID NO: 1595797 - DNA, 25 bp, Homo sapien
gagcccaccatgttgacgcagctgc

SEQ ID NO: 1595798 - DNA, 25 bp, Homo sapien
cttcacatgcggcgctgctgtcact

SEQ ID NO: 1595799 - DNA, 25 bp, Homo sapien
tcactgagccggtgtccaactggac

SEQ ID NO: 1595800 - DNA, 25 bp, Homo sapien
atattggggatgaagccgcggcggc

SEQ ID NO: 1595801 - DNA, 25 bp, Homo sapien
cgaggcccgtcagctgatgctggca

SEQ ID NO: 1595802 - DNA, 25 bp, Homo sapien
ggctgtgcagggcaaagttcacatg

SEQ ID NO: 1595803 - DNA, 25 bp, Homo sapien
caaagtgccttggtgcacacgaggc

SEQ ID NO: 1595804 - DNA, 25 bp, Homo sapien
aagccatacacacaggcgcagcggt

SEQ ID NO: 1595805 - DNA, 25 bp, Homo sapien
cccattgtggcagccgcggtcacag

SEQ ID NO: 1595806 - DNA, 25 bp, Homo sapien
aggtcccatgaagccatacacacag

SEQ ID NO: 1595807 - DNA, 25 bp, Homo sapien
gcggttgggcccaatgcagcgaccc

SEQ ID NO: 1595808 - DNA, 25 bp, Homo sapien
cacggtgcctgtgtagcccttctga

SEQ ID NO: 1595809 - DNA, 25 bp, Homo sapien
gctgcccacacacggtgcctgtgta

SEQ ID NO: 1595810 - DNA, 25 bp, Homo sapien
tagcccttctgacacagacaggacg

SEQ ID NO: 1595811 - DNA, 25 bp, Homo sapien
ggtgcccccattcatacagctcaca

SEQ ID NO: 1595812 - DNA, 25 bp, Homo sapien
agccagcgtcccatccgcacaggtg

SEQ ID NO: 1595813 - DNA, 25 bp, Homo sapien
gagcagaagccttcaccgcaggcgc

SEQ ID NO: 1595814 - DNA, 25 bp, Homo sapien
gcagaagccttcaccgcaggcgcgc

SEQ ID NO: 1595815 - DNA, 25 bp, Homo sapien
gcacaggtgcacaggttgggctggg

SEQ ID NO: 1595816 - DNA, 25 bp, Homo sapien
atggaaccgggagccgcacacattc

SEQ ID NO: 1595817 - DNA, 25 bp, Homo sapien
gcatggaaccgggagccgcacacat

SEQ ID NO: 1595818 - DNA, 25 bp, Homo sapien
acagcagtaggcatggaaccgggag

SEQ ID NO: 1595819 - DNA, 25 bp, Homo sapien
agtaggcatggaaccgggagccgca

SEQ ID NO: 1595820 - DNA, 25 bp, Homo sapien
tcccagcatcccaggtaccacgcac

SEQ ID NO: 1595821 - DNA, 25 bp, Homo sapien
ggacagcccaatccacaccgaaggg

SEQ ID NO: 1595822 - DNA, 25 bp, Homo sapien
tcggggacagcgagatgggtctggt

SEQ ID NO: 1595823 - DNA, 25 bp, Homo sapien
tctggtgagcccctgcccgtgtgga

SEQ ID NO: 1595824 - DNA, 25 bp, Homo sapien
cttgccaaatacagaccctccagag

SEQ ID NO: 1595825 - DNA, 25 bp, Homo sapien
gccccgcctccgcacacgtccagga

SEQ ID NO: 1595826 - DNA, 25 bp, Homo sapien
gccaaatacagaccctccagagtca

SEQ ID NO: 1595827 - DNA, 25 bp, Homo sapien
ctgccccgcctccgcacacgtccag

SEQ ID NO: 1595828 - DNA, 25 bp, Homo sapien
cggtgaacagtcagaggaggcttcc

SEQ ID NO: 1595829 - DNA, 25 bp, Homo sapien
gacccaacacaacgaggagggcagg

SEQ ID NO: 1595830 - DNA, 25 bp, Homo sapien
atccagccccaaccgggaagcggtg

SEQ ID NO: 1595831 - DNA, 25 bp, Homo sapien
gaagcagagtcagccctagatgagc

SEQ ID NO: 1595832 - DNA, 25 bp, Homo sapien
ccctgtcaacgttggagggttggct

SEQ ID NO: 1595833 - DNA, 25 bp, Homo sapien
tcttctcagttgtccgggtcagtcc

SEQ ID NO: 1595834 - DNA, 25 bp, Homo sapien
tcagttgtccgggtcagtccgcact

SEQ ID NO: 1595835 - DNA, 25 bp, Homo sapien
ggagagacccctgtcaacgttggag

SEQ ID NO: 1595836 - DNA, 25 bp, Homo sapien
gaaaaactccgatggactggaggga

SEQ ID NO: 1595837 - DNA, 25 bp, Homo sapien
gaggagggcgcgtttgcacctctta

SEQ ID NO: 1595838 - DNA, 25 bp, Homo sapien
gaacgcaaagccgagaggccgaccc

SEQ ID NO: 1595839 - DNA, 25 bp, Homo sapien
ttttcggatcgagactaaggtggag

SEQ ID NO: 1595840 - DNA, 25 bp, Homo sapien
acccagaatgtcagggttcttaaca

SEQ ID NO: 1595841 - DNA, 25 bp, Homo sapien
gaatgtcagggttcttaacatcaca

SEQ ID NO: 1595842 - DNA, 25 bp, Homo sapien
tcagggttcttaacatcacaattca

SEQ ID NO: 1595843 - DNA, 25 bp, Homo sapien
cagaatgtcagggttcttaacatca

SEQ ID NO: 1595844 - DNA, 25 bp, Homo sapien
cgccccgaacgccaccctcacggcg

SEQ ID NO: 1595845 - DNA, 25 bp, Homo sapien
cgcgccgcgaacaccgccccgaacg

SEQ ID NO: 1595846 - DNA, 25 bp, Homo sapien
gccgcgaacaccgccccgaacgcca

SEQ ID NO: 1595847 - DNA, 25 bp, Homo sapien
caccgccccgaacgccaccctcacg

SEQ ID NO: 1595848 - DNA, 25 bp, Homo sapien
tgatgggggagccctagggatgcag

SEQ ID NO: 1595849 - DNA, 25 bp, Homo sapien
ggatgcagggatggtagcctcgatc

SEQ ID NO: 1595850 - DNA, 25 bp, Homo sapien
tcagataggtgatgggggagcccta

SEQ ID NO: 1595851 - DNA, 25 bp, Homo sapien
atgcagggatggtagcctcgatcag

SEQ ID NO: 1595852 - DNA, 25 bp, Homo sapien
tttcctccctctcggatgatgccat

SEQ ID NO: 1595853 - DNA, 25 bp, Homo sapien
tatgtgaccctgtgtaggtgatccg

SEQ ID NO: 1595854 - DNA, 25 bp, Homo sapien
ggcatgtctccaagactcagtttgt

SEQ ID NO: 1595855 - DNA, 25 bp, Homo sapien
tggccatttgtcagctatgtgaccc

SEQ ID NO: 1595856 - DNA, 25 bp, Homo sapien
aattctgaggctactgctgatgagc

SEQ ID NO: 1595857 - DNA, 25 bp, Homo sapien
gatcccatcagagcataacccagat

SEQ ID NO: 1595858 - DNA, 25 bp, Homo sapien
taatacctgggatggtaccaacgct

SEQ ID NO: 1595859 - DNA, 25 bp, Homo sapien
taagcgtctgatggataatacctgg

SEQ ID NO: 1595860 - DNA, 25 bp, Homo sapien
tgcttggccctatatgaatctacct

SEQ ID NO: 1595861 - DNA, 25 bp, Homo sapien
atgtaacatgtcatgtgggtgaacc

SEQ ID NO: 1595862 - DNA, 25 bp, Homo sapien
ttaaaagggaaggatgtaacatgtc

SEQ ID NO: 1595863 - DNA, 25 bp, Homo sapien
agtatctgggacttacttggaagta

SEQ ID NO: 1595864 - DNA, 25 bp, Homo sapien
cttggaagtaagctggccaccacgc

SEQ ID NO: 1595865 - DNA, 25 bp, Homo sapien
gcagccacgtgaactgcacagcatg

SEQ ID NO: 1595866 - DNA, 25 bp, Homo sapien
aagatcccggcccttgtgagcagac

SEQ ID NO: 1595867 - DNA, 25 bp, Homo sapien
catgcgaaggagagatttactaaca

SEQ ID NO: 1595868 - DNA, 25 bp, Homo sapien
acagttcaaagatcccggcccttgt

SEQ ID NO: 1595869 - DNA, 25 bp, Homo sapien
ggctacagcgaatcaagattgtacc

SEQ ID NO: 1595870 - DNA, 25 bp, Homo sapien
ctacagcgaatcaagattgtaccac

SEQ ID NO: 1595871 - DNA, 25 bp, Homo sapien
gctacagcgaatcaagattgtacca

SEQ ID NO: 1595872 - DNA, 25 bp, Homo sapien
tccctctgggcaactggacagatct

SEQ ID NO: 1595873 - DNA, 25 bp, Homo sapien
gggtgactggactggcgcccctggg

SEQ ID NO: 1595874 - DNA, 25 bp, Homo sapien
ggcaactggacagatctgggagcca

SEQ ID NO: 1595875 - DNA, 25 bp, Homo sapien
atatttctggggtgactggactggc

SEQ ID NO: 1595876 - DNA, 25 bp, Homo sapien
aagggatatgacaagctacaaaatg

SEQ ID NO: 1595877 - DNA, 25 bp, Homo sapien
acaggcgtgagagaggtgaagtttt

SEQ ID NO: 1595878 - DNA, 25 bp, Homo sapien
ggatatgacaagctacaaaatggaa

SEQ ID NO: 1595879 - DNA, 25 bp, Homo sapien
tacaggcgtgagagaggtgaagttt

SEQ ID NO: 1595880 - DNA, 25 bp, Homo sapien
gatgaggacccgatgtagcagtgta

SEQ ID NO: 1595881 - DNA, 25 bp, Homo sapien
gaaagacaacccaagttgccactgc

SEQ ID NO: 1595882 - DNA, 25 bp, Homo sapien
tttccggctcaggagtgtagctaca

SEQ ID NO: 1595883 - DNA, 25 bp, Homo sapien
tgtagctacagaccttttgcagtga

SEQ ID NO: 1595884 - DNA, 25 bp, Homo sapien
ggtctcaaattttcgggctgaagtc

SEQ ID NO: 1595885 - DNA, 25 bp, Homo sapien
caaattttcgggctgaagtcatcca

SEQ ID NO: 1595886 - DNA, 25 bp, Homo sapien
gtctcaaattttcgggctgaagtca

SEQ ID NO: 1595887 - DNA, 25 bp, Homo sapien
attttcgggctgaagtcatccaccc

SEQ ID NO: 1595888 - DNA, 25 bp, Homo sapien
ctcaaatgatcacgcctgggattac

SEQ ID NO: 1595889 - DNA, 25 bp, Homo sapien
agcttccagagtagccccaggttca

SEQ ID NO: 1595890 - DNA, 25 bp, Homo sapien
gcatgcacccttcgtatttcttagt

SEQ ID NO: 1595891 - DNA, 25 bp, Homo sapien
tatttccgggatggtctctaaatcc

SEQ ID NO: 1595892 - DNA, 25 bp, Homo sapien
ggcagcaggagtgtcttaagcacag

SEQ ID NO: 1595893 - DNA, 25 bp, Homo sapien
gaggttccacgtggccagaagagct

SEQ ID NO: 1595894 - DNA, 25 bp, Homo sapien
actttaattgccaccctcagacggg

SEQ ID NO: 1595895 - DNA, 25 bp, Homo sapien
caggagctcgggttcgaggttccac

SEQ ID NO: 1595896 - DNA, 25 bp, Homo sapien
agcagggactccttcatggccacca

SEQ ID NO: 1595897 - DNA, 25 bp, Homo sapien
gtggcggtgaccaggcttgcactga

SEQ ID NO: 1595898 - DNA, 25 bp, Homo sapien
aatccccggagctctaagcccccag

SEQ ID NO: 1595899 - DNA, 25 bp, Homo sapien
ggagctctaagcccccagcatggga

SEQ ID NO: 1595900 - DNA, 25 bp, Homo sapien
gctctaagcccccagcatgggaggg

SEQ ID NO: 1595901 - DNA, 25 bp, Homo sapien
ctaagcccccagcatgggagggtaa

SEQ ID NO: 1595902 - DNA, 25 bp, Homo sapien
tgcaataaccccataggcagttggg

SEQ ID NO: 1595903 - DNA, 25 bp, Homo sapien
ccttccgggaggatctcattggttc

SEQ ID NO: 1595904 - DNA, 25 bp, Homo sapien
tggttgtggcatccccttccgggag

SEQ ID NO: 1595905 - DNA, 25 bp, Homo sapien
tccagactggtctccggcagaggag

SEQ ID NO: 1595906 - DNA, 25 bp, Homo sapien
tcgcagcgccacgtgagtggaatgc

SEQ ID NO: 1595907 - DNA, 25 bp, Homo sapien
aacggagctcgcctgctaggcaggc

SEQ ID NO: 1595908 - DNA, 25 bp, Homo sapien
agtggaatgcagtcatcgctcagcg

SEQ ID NO: 1595909 - DNA, 25 bp, Homo sapien
cgagctcgtcgctggagtcgggaca

SEQ ID NO: 1595910 - DNA, 25 bp, Homo sapien
tgcgcagtttcttgtcagttccccc

SEQ ID NO: 1595911 - DNA, 25 bp, Homo sapien
cctttctgggtacatggctcaatcc

SEQ ID NO: 1595912 - DNA, 25 bp, Homo sapien
ccctttctgggtacatggctcaatc

SEQ ID NO: 1595913 - DNA, 25 bp, Homo sapien
ggtgggcattgccctttctgggtac

SEQ ID NO: 1595914 - DNA, 25 bp, Homo sapien
ccagggggcggtgggcattgccctt

SEQ ID NO: 1595915 - DNA, 25 bp, Homo sapien
acaagctccacctccgcgtgcctgg

SEQ ID NO: 1595916 - DNA, 25 bp, Homo sapien
cttcttatgacccacagacccaagt

SEQ ID NO: 1595917 - DNA, 25 bp, Homo sapien
cagcccaagcccatcttagaccccg

SEQ ID NO: 1595918 - DNA, 25 bp, Homo sapien
acccaagtcgcacccatccctgcgg

SEQ ID NO: 1595919 - DNA, 25 bp, Homo sapien
cactggtgcggcactggaacttggt

SEQ ID NO: 1595920 - DNA, 25 bp, Homo sapien
aacttggtgggtgggcacgagcctg

SEQ ID NO: 1595921 - DNA, 25 bp, Homo sapien
agtccctgtcgcagcgccaggtgag

SEQ ID NO: 1595922 - DNA, 25 bp, Homo sapien
tgcagtccaagtccctgtcgcagcg

SEQ ID NO: 1595923 - DNA, 25 bp, Homo sapien
gatataggaaccacactggcggctg

SEQ ID NO: 1595924 - DNA, 25 bp, Homo sapien
gaggctggacctttctccaagagca

SEQ ID NO: 1595925 - DNA, 25 bp, Homo sapien
ttactgagcccctagtacgagtggg

SEQ ID NO: 1595926 - DNA, 25 bp, Homo sapien
ggaaccaagaggaggccatacagct

SEQ ID NO: 1595927 - DNA, 25 bp, Homo sapien
gacctcgcgttctctaaggatggag

SEQ ID NO: 1595928 - DNA, 25 bp, Homo sapien
tcctgaccacgctggtatgaagggc

SEQ ID NO: 1595929 - DNA, 25 bp, Homo sapien
gattagcggtcggacaatctgagcc

SEQ ID NO: 1595930 - DNA, 25 bp, Homo sapien
ggtgacccgtcctgcgtgattagcg

SEQ ID NO: 1595931 - DNA, 25 bp, Homo sapien
tcggggtggaaagcgggctcgcggc

SEQ ID NO: 1595932 - DNA, 25 bp, Homo sapien
agagcccctgttcgccacgctccaa

SEQ ID NO: 1595933 - DNA, 25 bp, Homo sapien
ttcgccacgctccaacctgcgccat

SEQ ID NO: 1595934 - DNA, 25 bp, Homo sapien
aggcctagtccgaggccgagcagca

SEQ ID NO: 1595935 - DNA, 25 bp, Homo sapien
gcgctgtccagaccgctctcttatc

SEQ ID NO: 1595936 - DNA, 25 bp, Homo sapien
cacgcgctgtccagaccgctctctt

SEQ ID NO: 1595937 - DNA, 25 bp, Homo sapien
gccggccacgcgctgtccagaccgc

SEQ ID NO: 1595938 - DNA, 25 bp, Homo sapien
ggccacgcgctgtccagaccgctct

SEQ ID NO: 1595939 - DNA, 25 bp, Homo sapien
catagaatgctagctactggagggc

SEQ ID NO: 1595940 - DNA, 25 bp, Homo sapien
tgttgtccgagtccccatagaatgc

SEQ ID NO: 1595941 - DNA, 25 bp, Homo sapien
cactgcttttgtggcgccgacaggt

SEQ ID NO: 1595942 - DNA, 25 bp, Homo sapien
tgaaacgtccattctcggagtcggg

SEQ ID NO: 1595943 - DNA, 25 bp, Homo sapien
gggtcacgtgtgtgatcccagcatt

SEQ ID NO: 1595944 - DNA, 25 bp, Homo sapien
tagcctttgtaggacccactctggg

SEQ ID NO: 1595945 - DNA, 25 bp, Homo sapien
aaacttggttcagatgccgtcagcg

SEQ ID NO: 1595946 - DNA, 25 bp, Homo sapien
tgaccatggtcaagcaggagcctca

SEQ ID NO: 1595947 - DNA, 25 bp, Homo sapien
cactctgggacactggtacctgctg

SEQ ID NO: 1595948 - DNA, 25 bp, Homo sapien
aggaggcaaagtagtcgggtggccg

SEQ ID NO: 1595949 - DNA, 25 bp, Homo sapien
agtcgggtggccgtgagggtgcagt

SEQ ID NO: 1595950 - DNA, 25 bp, Homo sapien
caaagtagtcgggtggccgtgaggg

SEQ ID NO: 1595951 - DNA, 25 bp, Homo sapien
gtcgggtggccgtgagggtgcagtg

SEQ ID NO: 1595952 - DNA, 25 bp, Homo sapien
aaggctggtccgaggacagctccca

SEQ ID NO: 1595953 - DNA, 25 bp, Homo sapien
aggctggtccgaggacagctcccac

SEQ ID NO: 1595954 - DNA, 25 bp, Homo sapien
aggagctggagtcaccgccttcttc

SEQ ID NO: 1595955 - DNA, 25 bp, Homo sapien
ggagtcaccgccttcttctcagtgg

SEQ ID NO: 1595956 - DNA, 25 bp, Homo sapien
ctggagtcaccgccttcttctcagt

SEQ ID NO: 1595957 - DNA, 25 bp, Homo sapien
gagctggagtcaccgccttcttctc

SEQ ID NO: 1595958 - DNA, 25 bp, Homo sapien
caatagtaattgttggagagcttgt

SEQ ID NO: 1595959 - DNA, 25 bp, Homo sapien
ggccatcgcgagtgcaatagtaatt

SEQ ID NO: 1595960 - DNA, 25 bp, Homo sapien
tctgcgacgacatgatgatggaagg

SEQ ID NO: 1595961 - DNA, 25 bp, Homo sapien
gggcacagattcccggcggccatcg

SEQ ID NO: 1595962 - DNA, 25 bp, Homo sapien
cagccactgggataagccacaggct

SEQ ID NO: 1595963 - DNA, 25 bp, Homo sapien
aaaaaagatgagcactgaagcaaag

SEQ ID NO: 1595964 - DNA, 25 bp, Homo sapien
cagccagccactgggataagccaca

SEQ ID NO: 1595965 - DNA, 25 bp, Homo sapien
agatgagcactgaagcaaagagaca

SEQ ID NO: 1595966 - DNA, 25 bp, Homo sapien
ggagggtacagaggaccctttctga

SEQ ID NO: 1595967 - DNA, 25 bp, Homo sapien
ctgtcccaaatgtggagggtacaga

SEQ ID NO: 1595968 - DNA, 25 bp, Homo sapien
gtcccaaatgtggagggtacagagg

SEQ ID NO: 1595969 - DNA, 25 bp, Homo sapien
gagggtacagaggaccctttctgag

SEQ ID NO: 1595970 - DNA, 25 bp, Homo sapien
gagaccagactggccaacatggtga

SEQ ID NO: 1595971 - DNA, 25 bp, Homo sapien
aggcggattatgaagtcaggagttc

SEQ ID NO: 1595972 - DNA, 25 bp, Homo sapien
ccgaggcaggcggattatgaagtca

SEQ ID NO: 1595973 - DNA, 25 bp, Homo sapien
gcaggcggattatgaagtcaggagt

SEQ ID NO: 1595974 - DNA, 25 bp, Homo sapien
gagatctcctggtagcgtagctgca

SEQ ID NO: 1595975 - DNA, 25 bp, Homo sapien
tggagatctcctggtagcgtagctg

SEQ ID NO: 1595976 - DNA, 25 bp, Homo sapien
gatctcctggtagcgtagctgcagc

SEQ ID NO: 1595977 - DNA, 25 bp, Homo sapien
cgcttggagatctcctggtagcgta

SEQ ID NO: 1595978 - DNA, 25 bp, Homo sapien
gtcggcctgcaaggcaccccaggag

SEQ ID NO: 1595979 - DNA, 25 bp, Homo sapien
tcctgcaggtgaagagcaaagccag

SEQ ID NO: 1595980 - DNA, 25 bp, Homo sapien
gagagcgaagggtcccggcttagga

SEQ ID NO: 1595981 - DNA, 25 bp, Homo sapien
gggcccacagatccaaggctaagaa

SEQ ID NO: 1595982 - DNA, 25 bp, Homo sapien
cgctggatgagacgggtggcggacg

SEQ ID NO: 1595983 - DNA, 25 bp, Homo sapien
ggacgcccagttccgcagccgctgg

SEQ ID NO: 1595984 - DNA, 25 bp, Homo sapien
ggatgagacgggtggcggacgccat

SEQ ID NO: 1595985 - DNA, 25 bp, Homo sapien
agccgctggatgagacgggtggcgg

SEQ ID NO: 1595986 - DNA, 25 bp, Homo sapien
actgaagggcgcagccggtgacgtc

SEQ ID NO: 1595987 - DNA, 25 bp, Homo sapien
tgaagggcgcagccggtgacgtctc

SEQ ID NO: 1595988 - DNA, 25 bp, Homo sapien
agggcgcagccggtgacgtctccac

SEQ ID NO: 1595989 - DNA, 25 bp, Homo sapien
aagggcgcagccggtgacgtctcca

SEQ ID NO: 1595990 - DNA, 25 bp, Homo sapien
gtcctgggcaggaccggttctcagg

SEQ ID NO: 1595991 - DNA, 25 bp, Homo sapien
cggttctcagggacagtgcacgcag

SEQ ID NO: 1595992 - DNA, 25 bp, Homo sapien
caggaccggttctcagggacagtgc

SEQ ID NO: 1595993 - DNA, 25 bp, Homo sapien
aggtcctgggcaggaccggttctca

SEQ ID NO: 1595994 - DNA, 25 bp, Homo sapien
cgcaatgtaaaaggccccgtgcgcg

SEQ ID NO: 1595995 - DNA, 25 bp, Homo sapien
tggacgacacgagccgatccatcat

SEQ ID NO: 1595996 - DNA, 25 bp, Homo sapien
tgcgcgtggaattcatggacgacac

SEQ ID NO: 1595997 - DNA, 25 bp, Homo sapien
atcatccgcaatgtaaaaggccccg

SEQ ID NO: 1595998 - DNA, 25 bp, Homo sapien
agtcagagcgagaagcccggaggtt

SEQ ID NO: 1595999 - DNA, 25 bp, Homo sapien
gcgagaagcccggaggttgcgctga

SEQ ID NO: 1596000 - DNA, 25 bp, Homo sapien
tggagtcagagcgagaagcccggag

SEQ ID NO: 1596001 - DNA, 25 bp, Homo sapien
tcagagcgagaagcccggaggttgc

SEQ ID NO: 1596002 - DNA, 25 bp, Homo sapien
ggtgcaaagaggacacccctttgat

SEQ ID NO: 1596003 - DNA, 25 bp, Homo sapien
gcaaagaggacacccctttgataga

SEQ ID NO: 1596004 - DNA, 25 bp, Homo sapien
tgggtgcaaagaggacacccctttg

SEQ ID NO: 1596005 - DNA, 25 bp, Homo sapien
tgcaaagaggacacccctttgatag

SEQ ID NO: 1596006 - DNA, 25 bp, Homo sapien
tgcaccctctaccccaaacaaaaca

SEQ ID NO: 1596007 - DNA, 25 bp, Homo sapien
ctctaccccaaacaaaacacaagcg

SEQ ID NO: 1596008 - DNA, 25 bp, Homo sapien
agtgggtggatcagggctctatcac

SEQ ID NO: 1596009 - DNA, 25 bp, Homo sapien
tcagggctctatcacttggtcccca

SEQ ID NO: 1596010 - DNA, 25 bp, Homo sapien
ttcagagagtgggtggatcagggct

SEQ ID NO: 1596011 - DNA, 25 bp, Homo sapien
tattagcaaagaagtttcagagagt

SEQ ID NO: 1596012 - DNA, 25 bp, Homo sapien
tcggccagtgttagcctctgagcag

SEQ ID NO: 1596013 - DNA, 25 bp, Homo sapien
gactgacgaggagatctccccacag

SEQ ID NO: 1596014 - DNA, 25 bp, Homo sapien
ttctgtgcgccaaaggctgaggtga

SEQ ID NO: 1596015 - DNA, 25 bp, Homo sapien
acagtcaccccaactgaaattgcct

SEQ ID NO: 1596016 - DNA, 25 bp, Homo sapien
ctaggtgtagtgagccagacgaggc

SEQ ID NO: 1596017 - DNA, 25 bp, Homo sapien
aggtgtagtgagccagacgaggcag

SEQ ID NO: 1596018 - DNA, 25 bp, Homo sapien
taggtgtagtgagccagacgaggca

SEQ ID NO: 1596019 - DNA, 25 bp, Homo sapien
ggtgtagtgagccagacgaggcagc

SEQ ID NO: 1596020 - DNA, 25 bp, Homo sapien
ctccattgtcaccgcattctccttc

SEQ ID NO: 1596021 - DNA, 25 bp, Homo sapien
acctgggggttctctccattgtcac

SEQ ID NO: 1596022 - DNA, 25 bp, Homo sapien
ccattgtcaccgcattctccttcac

SEQ ID NO: 1596023 - DNA, 25 bp, Homo sapien
tgaacctgggggttctctccattgt

SEQ ID NO: 1596024 - DNA, 25 bp, Homo sapien
aggtgtggctgtctgggagccaggg

SEQ ID NO: 1596025 - DNA, 25 bp, Homo sapien
gtctgggagccagggggtgactcgc

SEQ ID NO: 1596026 - DNA, 25 bp, Homo sapien
ggctgtctgggagccagggggtgac

SEQ ID NO: 1596027 - DNA, 25 bp, Homo sapien
ctgtctgggagccagggggtgactc

SEQ ID NO: 1596028 - DNA, 25 bp, Homo sapien
caggaaacgtgggattcagccccag

SEQ ID NO: 1596029 - DNA, 25 bp, Homo sapien
ccaggctgcctggtttgtatccaac

SEQ ID NO: 1596030 - DNA, 25 bp, Homo sapien
tacattccggtgagtacatcatagg

SEQ ID NO: 1596031 - DNA, 25 bp, Homo sapien
caggtgttcctcagtttacaatggg

SEQ ID NO: 1596032 - DNA, 25 bp, Homo sapien
tttattgaatactctgctgaagtgt

SEQ ID NO: 1596033 - DNA, 25 bp, Homo sapien
agtgtggtttttactaagcacacat

SEQ ID NO: 1596034 - DNA, 25 bp, Homo sapien
tattgaatactctgctgaagtgtgg

SEQ ID NO: 1596035 - DNA, 25 bp, Homo sapien
aagtgtggtttttactaagcacaca

SEQ ID NO: 1596036 - DNA, 25 bp, Homo sapien
aaaattgtaagttgtgccaggcgcg

SEQ ID NO: 1596037 - DNA, 25 bp, Homo sapien
aaaaattgtaagttgtgccaggcgc

SEQ ID NO: 1596038 - DNA, 25 bp, Homo sapien
ggtgggcatgtagcagagcggccac

SEQ ID NO: 1596039 - DNA, 25 bp, Homo sapien
cccgagctcaggtgggcatgtagca

SEQ ID NO: 1596040 - DNA, 25 bp, Homo sapien
ggctggcccgagctcaggtgggcat

SEQ ID NO: 1596041 - DNA, 25 bp, Homo sapien
tgtcgggctggcccgagctcaggtg

SEQ ID NO: 1596042 - DNA, 25 bp, Homo sapien
tccagggcgatggccagggcactgg

SEQ ID NO: 1596043 - DNA, 25 bp, Homo sapien
agggcgatggccagggcactggtgc

SEQ ID NO: 1596044 - DNA, 25 bp, Homo sapien
cctccagggcgatggccagggcact

SEQ ID NO: 1596045 - DNA, 25 bp, Homo sapien
tgctcagcctccagggcgatggcca

SEQ ID NO: 1596046 - DNA, 25 bp, Homo sapien
tcactggcacacatcagcgctgtgg

SEQ ID NO: 1596047 - DNA, 25 bp, Homo sapien
atcagccccacacgccagtagggtt

SEQ ID NO: 1596048 - DNA, 25 bp, Homo sapien
gtccaggatggcagggtcacagcct

SEQ ID NO: 1596049 - DNA, 25 bp, Homo sapien
cgcatcctgcgcattcacatcagcc

SEQ ID NO: 1596050 - DNA, 25 bp, Homo sapien
tcggttctggcggttgacctcgcag

SEQ ID NO: 1596051 - DNA, 25 bp, Homo sapien
ctcttcctgcctcacagaggtgagt

SEQ ID NO: 1596052 - DNA, 25 bp, Homo sapien
agcatgagggccgagtagccggctc

SEQ ID NO: 1596053 - DNA, 25 bp, Homo sapien
acagaggtgagtgcagccagcatga

SEQ ID NO: 1596054 - DNA, 25 bp, Homo sapien
aaaggagcggggtcggggtcatgag

SEQ ID NO: 1596055 - DNA, 25 bp, Homo sapien
ggattgaggtagtttaaggaaatga

SEQ ID NO: 1596056 - DNA, 25 bp, Homo sapien
tctgaggattgaggtagtttaagga

SEQ ID NO: 1596057 - DNA, 25 bp, Homo sapien
gggtcggggtcatgagatggataac

SEQ ID NO: 1596058 - DNA, 25 bp, Homo sapien
ttctaccttaccagactcaggcagg

SEQ ID NO: 1596059 - DNA, 25 bp, Homo sapien
gacaagatgctccaaggtagggttt

SEQ ID NO: 1596060 - DNA, 25 bp, Homo sapien
cagattccatacaccttgggcagcc

SEQ ID NO: 1596061 - DNA, 25 bp, Homo sapien
tggccaggagctaaagttcaagaaa

SEQ ID NO: 1596062 - DNA, 25 bp, Homo sapien
caaggaggagtggtgccctgtgctg

SEQ ID NO: 1596063 - DNA, 25 bp, Homo sapien
taaactcaaggaggagtggtgccct

SEQ ID NO: 1596064 - DNA, 25 bp, Homo sapien
tgtgctggacagccattctctgctt

SEQ ID NO: 1596065 - DNA, 25 bp, Homo sapien
aactcaaggaggagtggtgccctgt

SEQ ID NO: 1596066 - DNA, 25 bp, Homo sapien
ctctccccccacccatttcctggtg

SEQ ID NO: 1596067 - DNA, 25 bp, Homo sapien
tcccacccaccctcccttggctctg

SEQ ID NO: 1596068 - DNA, 25 bp, Homo sapien
cacccatttcctggtgtcccaccca

SEQ ID NO: 1596069 - DNA, 25 bp, Homo sapien
ctaggtcagcccctgccctctcccc

SEQ ID NO: 1596070 - DNA, 25 bp, Homo sapien
agcaggcttgcgatggccaggttcc

SEQ ID NO: 1596071 - DNA, 25 bp, Homo sapien
aggttcaccacgtgcgccagcagtt

SEQ ID NO: 1596072 - DNA, 25 bp, Homo sapien
tcccgtgggacacactgtagtgcag

SEQ ID NO: 1596073 - DNA, 25 bp, Homo sapien
tggctggacactcgaaaccactcct

SEQ ID NO: 1596074 - DNA, 25 bp, Homo sapien
taacatcggcgatggtccacggcgg

SEQ ID NO: 1596075 - DNA, 25 bp, Homo sapien
gataacatcggcgatggtccacggc

SEQ ID NO: 1596076 - DNA, 25 bp, Homo sapien
ccaagataacatcggcgatggtcca

SEQ ID NO: 1596077 - DNA, 25 bp, Homo sapien
gggccaagataacatcggcgatggt

SEQ ID NO: 1596078 - DNA, 25 bp, Homo sapien
gccgctgcagcgctacgcacgcctc

SEQ ID NO: 1596079 - DNA, 25 bp, Homo sapien
gtcgctggctactccgcggggccgg

SEQ ID NO: 1596080 - DNA, 25 bp, Homo sapien
tgcagcgctacgcacgcctccctca

SEQ ID NO: 1596081 - DNA, 25 bp, Homo sapien
tccctcagacgcgggctcagctcgc

SEQ ID NO: 1596082 - DNA, 25 bp, Homo sapien
tcctctccaaacaactagcgagcgc

SEQ ID NO: 1596083 - DNA, 25 bp, Homo sapien
ggacagcgccgaccaggaggagggc

SEQ ID NO: 1596084 - DNA, 25 bp, Homo sapien
gccaggagagactcaggatggatcg

SEQ ID NO: 1596085 - DNA, 25 bp, Homo sapien
ggatggatcggggacagcgccgacc

SEQ ID NO: 1596086 - DNA, 25 bp, Homo sapien
ggctcggcgccaccgttctcgctgt

SEQ ID NO: 1596087 - DNA, 25 bp, Homo sapien
gcgtcctcgctggaggagctctcgt

SEQ ID NO: 1596088 - DNA, 25 bp, Homo sapien
gcgccaccgttctcgctgtcgccat

SEQ ID NO: 1596089 - DNA, 25 bp, Homo sapien
tcgggctcagggtcccggatgtccc

SEQ ID NO: 1596090 - DNA, 25 bp, Homo sapien
tggccgttcccatttaacgatgagg

SEQ ID NO: 1596091 - DNA, 25 bp, Homo sapien
gtctgctaaacctcccctgtgggct

SEQ ID NO: 1596092 - DNA, 25 bp, Homo sapien
ctgaggattgcccagaccacgctgc

SEQ ID NO: 1596093 - DNA, 25 bp, Homo sapien
cccagtctatgtcccggcagaagct

SEQ ID NO: 1596094 - DNA, 25 bp, Homo sapien
cttgggtccggagctgggttgggca

SEQ ID NO: 1596095 - DNA, 25 bp, Homo sapien
tcttgggtccggagctgggttgggc

SEQ ID NO: 1596096 - DNA, 25 bp, Homo sapien
ctcttgggtccggagctgggttggg

SEQ ID NO: 1596097 - DNA, 25 bp, Homo sapien
atccgggcgagctctcctgagtcaa

SEQ ID NO: 1596098 - DNA, 25 bp, Homo sapien
ggtctgcgcggccttttcggcacag

SEQ ID NO: 1596099 - DNA, 25 bp, Homo sapien
ctgggtggtggcctcgcgtagctgg

SEQ ID NO: 1596100 - DNA, 25 bp, Homo sapien
tgtctccgtccatggatccgggcga

SEQ ID NO: 1596101 - DNA, 25 bp, Homo sapien
agcagctctagctcgcgctcggcgg

SEQ ID NO: 1596102 - DNA, 25 bp, Homo sapien
cagcagctctagctcgcgctcggcg

SEQ ID NO: 1596103 - DNA, 25 bp, Homo sapien
tcgggggcagcctccacgccggcct

SEQ ID NO: 1596104 - DNA, 25 bp, Homo sapien
tcacccacgcgtccgcctccacggt

SEQ ID NO: 1596105 - DNA, 25 bp, Homo sapien
ctgggagagtatgcccggtgctcca

SEQ ID NO: 1596106 - DNA, 25 bp, Homo sapien
gcgcgctcgtgtgtctgcgccagct

SEQ ID NO: 1596107 - DNA, 25 bp, Homo sapien
agccaggccgtctgggctgtcagcc

SEQ ID NO: 1596108 - DNA, 25 bp, Homo sapien
tctcccggagcgtgtgctcgacgcg

SEQ ID NO: 1596109 - DNA, 25 bp, Homo sapien
tgggctacgtgcgcccgcgaggccg

SEQ ID NO: 1596110 - DNA, 25 bp, Homo sapien
ctgggctacgtgcgcccgcgaggcc

SEQ ID NO: 1596111 - DNA, 25 bp, Homo sapien
gggctacgtgcgcccgcgaggccgg

SEQ ID NO: 1596112 - DNA, 25 bp, Homo sapien
gctacgtgcgcccgcgaggccgggc

SEQ ID NO: 1596113 - DNA, 25 bp, Homo sapien
tctccaccgagtagggcgagctcgg

SEQ ID NO: 1596114 - DNA, 25 bp, Homo sapien
ccgtagggcgtctccaccgagtagg

SEQ ID NO: 1596115 - DNA, 25 bp, Homo sapien
tggaagccgtagggcgtctccaccg

SEQ ID NO: 1596116 - DNA, 25 bp, Homo sapien
gcgtctccaccgagtagggcgagct

SEQ ID NO: 1596117 - DNA, 25 bp, Homo sapien
cgggcacaggcgggggccgcccagg

SEQ ID NO: 1596118 - DNA, 25 bp, Homo sapien
ccgggcacaggcgggggccgcccag

SEQ ID NO: 1596119 - DNA, 25 bp, Homo sapien
cggcggcggggaccgggcacaggcg

SEQ ID NO: 1596120 - DNA, 25 bp, Homo sapien
ctgcgtgcgcccccggcggcgggga

SEQ ID NO: 1596121 - DNA, 25 bp, Homo sapien
tgtacccaagtattaactcaatcgc

SEQ ID NO: 1596122 - DNA, 25 bp, Homo sapien
gatactaaacaaaccgagcgtgtcc

SEQ ID NO: 1596123 - DNA, 25 bp, Homo sapien
gcttcacacctatctgtacccaagt

SEQ ID NO: 1596124 - DNA, 25 bp, Homo sapien
ctcaatcgcttgtttaatgagcacc

SEQ ID NO: 1596125 - DNA, 25 bp, Homo sapien
ttctgattcagggcaaacttggcca

SEQ ID NO: 1596126 - DNA, 25 bp, Homo sapien
tctgattcagggcaaacttggccat

SEQ ID NO: 1596127 - DNA, 25 bp, Homo sapien
tgtccagtcctccactgacaggcat

SEQ ID NO: 1596128 - DNA, 25 bp, Homo sapien
agtcctccactgacaggcatctgcc

SEQ ID NO: 1596129 - DNA, 25 bp, Homo sapien
ctgtccagtcctccactgacaggca

SEQ ID NO: 1596130 - DNA, 25 bp, Homo sapien
tccagtcctccactgacaggcatct

SEQ ID NO: 1596131 - DNA, 25 bp, Homo sapien
gccccagccgcgcccgcacccgagc

SEQ ID NO: 1596132 - DNA, 25 bp, Homo sapien
cccagccgcgcccgcacccgagccc

SEQ ID NO: 1596133 - DNA, 25 bp, Homo sapien
agccccagccgcgcccgcacccgag

SEQ ID NO: 1596134 - DNA, 25 bp, Homo sapien
ccccagccgcgcccgcacccgagcc

SEQ ID NO: 1596135 - DNA, 25 bp, Homo sapien
cattgacacccctgacatgagagct

SEQ ID NO: 1596136 - DNA, 25 bp, Homo sapien
tcagaacattgacacccctgacatg

SEQ ID NO: 1596137 - DNA, 25 bp, Homo sapien
cacccctgacatgagagctaattgg

SEQ ID NO: 1596138 - DNA, 25 bp, Homo sapien
tgagagctaattggccccagtcagg

SEQ ID NO: 1596139 - DNA, 25 bp, Homo sapien
cccggcccattcctcaagtctttat

SEQ ID NO: 1596140 - DNA, 25 bp, Homo sapien
cggcccattcctcaagtctttattg

SEQ ID NO: 1596141 - DNA, 25 bp, Homo sapien
ccggcccattcctcaagtctttatt

SEQ ID NO: 1596142 - DNA, 25 bp, Homo sapien
ggaaagagagtcccgccgggcgcag

SEQ ID NO: 1596143 - DNA, 25 bp, Homo sapien
aggaaagagagtcccgccgggcgca

SEQ ID NO: 1596144 - DNA, 25 bp, Homo sapien
tgaggaaagagagtcccgccgggcg

SEQ ID NO: 1596145 - DNA, 25 bp, Homo sapien
aataatgcaaaaactagtcgggcgt

SEQ ID NO: 1596146 - DNA, 25 bp, Homo sapien
tgcatgcgttgcctcctgagatcga

SEQ ID NO: 1596147 - DNA, 25 bp, Homo sapien
cagactggcctcaatggcggactca

SEQ ID NO: 1596148 - DNA, 25 bp, Homo sapien
aaagacggtgactcttggctctgcc

SEQ ID NO: 1596149 - DNA, 25 bp, Homo sapien
ccaatggtatctgggcggagctcac

SEQ ID NO: 1596150 - DNA, 25 bp, Homo sapien
aaagtccatgtaaacatgttcccag

SEQ ID NO: 1596151 - DNA, 25 bp, Homo sapien
acaaagtccatgtaaacatgttccc

SEQ ID NO: 1596152 - DNA, 25 bp, Homo sapien
ttagttcacagatctagtaagttac

SEQ ID NO: 1596153 - DNA, 25 bp, Homo sapien
tcacagatctagtaagttaccctca

SEQ ID NO: 1596154 - DNA, 25 bp, Homo sapien
tggtctcaaacaccgagactcaagg

SEQ ID NO: 1596155 - DNA, 25 bp, Homo sapien
ctcaaacaccgagactcaagggatc

SEQ ID NO: 1596156 - DNA, 25 bp, Homo sapien
agaggctgcaaataagccgagattg

SEQ ID NO: 1596157 - DNA, 25 bp, Homo sapien
aggcagaggctgcaaataagccgag

SEQ ID NO: 1596158 - DNA, 25 bp, Homo sapien
gccaccttaagagctggaacactta

SEQ ID NO: 1596159 - DNA, 25 bp, Homo sapien
gaaacaaactccagacgcgccacct

SEQ ID NO: 1596160 - DNA, 25 bp, Homo sapien
tcagaagaaacaaactccagacgcg

SEQ ID NO: 1596161 - DNA, 25 bp, Homo sapien
cgcgccaccttaagagctggaacac

SEQ ID NO: 1596162 - DNA, 25 bp, Homo sapien
ccccccaattccggatacagtgcca

SEQ ID NO: 1596163 - DNA, 25 bp, Homo sapien
ccccaattccggatacagtgccact

SEQ ID NO: 1596164 - DNA, 25 bp, Homo sapien
cccaattccggatacagtgccactg

SEQ ID NO: 1596165 - DNA, 25 bp, Homo sapien
cccccaattccggatacagtgccac

SEQ ID NO: 1596166 - DNA, 25 bp, Homo sapien
ctcaggttcccttccacgctgtaga

SEQ ID NO: 1596167 - DNA, 25 bp, Homo sapien
tggacaaatcagcactctaaaacgg

SEQ ID NO: 1596168 - DNA, 25 bp, Homo sapien
acgctgtagaagctctgttctttca

SEQ ID NO: 1596169 - DNA, 25 bp, Homo sapien
tctaaaacggaacaatcagcactct

SEQ ID NO: 1596170 - DNA, 25 bp, Homo sapien
aagggcatgtttttaggcataagcc

SEQ ID NO: 1596171 - DNA, 25 bp, Homo sapien
tatactttgtgttaataattttgca

SEQ ID NO: 1596172 - DNA, 25 bp, Homo sapien
cattttagatactctcactacacac

SEQ ID NO: 1596173 - DNA, 25 bp, Homo sapien
aagtacattttagatactctcacta

SEQ ID NO: 1596174 - DNA, 25 bp, Homo sapien
ggacaggtcctctgatagtcgggta

SEQ ID NO: 1596175 - DNA, 25 bp, Homo sapien
ttcgggctaggatgcgcggctatac

SEQ ID NO: 1596176 - DNA, 25 bp, Homo sapien
tagtcgggtaggttctcaatcaagc

SEQ ID NO: 1596177 - DNA, 25 bp, Homo sapien
tggcgcgtccgtcacttcaaaaagg

SEQ ID NO: 1596178 - DNA, 25 bp, Homo sapien
cagtaggcaactgctaagtggccaa

SEQ ID NO: 1596179 - DNA, 25 bp, Homo sapien
gctggtgcagaaaacgcctgacaca

SEQ ID NO: 1596180 - DNA, 25 bp, Homo sapien
tcagagcggctctgcctgcaaaata

SEQ ID NO: 1596181 - DNA, 25 bp, Homo sapien
tcagttcccgtgtcaaggccggtgg

SEQ ID NO: 1596182 - DNA, 25 bp, Homo sapien
agaccacaatgtagggagttttagg

SEQ ID NO: 1596183 - DNA, 25 bp, Homo sapien
taaaacagctgcctgagaccacaat

SEQ ID NO: 1596184 - DNA, 25 bp, Homo sapien
gctgcctgagaccacaatgtaggga

SEQ ID NO: 1596185 - DNA, 25 bp, Homo sapien
gagagtaaaacagctgcctgagacc

SEQ ID NO: 1596186 - DNA, 25 bp, Homo sapien
ttctccaaggtcgtggaggctacgg

SEQ ID NO: 1596187 - DNA, 25 bp, Homo sapien
tctccaccgtcatccgtgccttgga

SEQ ID NO: 1596188 - DNA, 25 bp, Homo sapien
gcacaggtgacttcaagggatggcc

SEQ ID NO: 1596189 - DNA, 25 bp, Homo sapien
tcggaccgccccagtatgtggcaca

SEQ ID NO: 1596190 - DNA, 25 bp, Homo sapien
cgtgtggctgcaccggcacgctggg

SEQ ID NO: 1596191 - DNA, 25 bp, Homo sapien
caccggcacgctgggtgccgtgcat

SEQ ID NO: 1596192 - DNA, 25 bp, Homo sapien
ccggatctgccatgagggagcgaac

SEQ ID NO: 1596193 - DNA, 25 bp, Homo sapien
atggtcctttctgccggatctgcca

SEQ ID NO: 1596194 - DNA, 25 bp, Homo sapien
gacggagcaggcaccctgatctcat

SEQ ID NO: 1596195 - DNA, 25 bp, Homo sapien
cctggcaccctcgactttatataaa

SEQ ID NO: 1596196 - DNA, 25 bp, Homo sapien
ggtccacatggcaccttctgggcca

SEQ ID NO: 1596197 - DNA, 25 bp, Homo sapien
caagggcgcccttaaagctggaaca

SEQ ID NO: 1596198 - DNA, 25 bp, Homo sapien
atcagaaaacagaccccgggaggag

SEQ ID NO: 1596199 - DNA, 25 bp, Homo sapien
gatacactcgcgttaggcaccgact

SEQ ID NO: 1596200 - DNA, 25 bp, Homo sapien
gatgaagcttgttcaacccgcggtc

SEQ ID NO: 1596201 - DNA, 25 bp, Homo sapien
cagaccggcagctgttgatcgcttc

SEQ ID NO: 1596202 - DNA, 25 bp, Homo sapien
ctttgtgtgagcgaacgggctgcac

SEQ ID NO: 1596203 - DNA, 25 bp, Homo sapien
tgagtccgatagaggaggcatctcc

SEQ ID NO: 1596204 - DNA, 25 bp, Homo sapien
gaagcgatcaacagctgccggtctg

SEQ ID NO: 1596205 - DNA, 25 bp, Homo sapien
ccagtcggtgcctaacgcgagtgta

SEQ ID NO: 1596206 - DNA, 25 bp, Homo sapien
cggaccgcgggttgaacaagcttca

SEQ ID NO: 1596207 - DNA, 25 bp, Homo sapien
gtttacgaatcgtgtgccggaccgc

SEQ ID NO: 1596208 - DNA, 25 bp, Homo sapien
gagatgcctcctctatcggactcag

SEQ ID NO: 1596209 - DNA, 25 bp, Homo sapien
cacaaagcccagacgcggagaaaat

SEQ ID NO: 1596210 - DNA, 25 bp, Homo sapien
tgttacctcaccaactacaaatcag

SEQ ID NO: 1596211 - DNA, 25 bp, Homo sapien
tcagcaaccttgtatggagcctctg

SEQ ID NO: 1596212 - DNA, 25 bp, Homo sapien
gtttccagacgacacataaaccaag

SEQ ID NO: 1596213 - DNA, 25 bp, Homo sapien
tagaacaatcatcagcaaccttgta

SEQ ID NO: 1596214 - DNA, 25 bp, Homo sapien
tcagtttccagacgacacataaacc

SEQ ID NO: 1596215 - DNA, 25 bp, Homo sapien
agccaagaaaacaatgggaatttag

SEQ ID NO: 1596216 - DNA, 25 bp, Homo sapien
cttggtttatgtgtcgtctggaaac

SEQ ID NO: 1596217 - DNA, 25 bp, Homo sapien
actgatttgtagttggtgaggtaac

SEQ ID NO: 1596218 - DNA, 25 bp, Homo sapien
ggtttatgtgtcgtctggaaactga

SEQ ID NO: 1596219 - DNA, 25 bp, Homo sapien
cagaggctccatacaaggttgctga

SEQ ID NO: 1596220 - DNA, 25 bp, Homo sapien
catacaaggttgctgatgattgttc

SEQ ID NO: 1596221 - DNA, 25 bp, Homo sapien
ctaaattcccattgttttcttggct

SEQ ID NO: 1596222 - DNA, 25 bp, Homo sapien
ttggaaaagcgggactcccatttgc

SEQ ID NO: 1596223 - DNA, 25 bp, Homo sapien
ctttggccagccatttggaaaagcg

SEQ ID NO: 1596224 - DNA, 25 bp, Homo sapien
aattgggcatccaaacagaatacca

SEQ ID NO: 1596225 - DNA, 25 bp, Homo sapien
gctattggtccccagttatccaaat

SEQ ID NO: 1596226 - DNA, 25 bp, Homo sapien
cccagttatccaaattgggcatcca

SEQ ID NO: 1596227 - DNA, 25 bp, Homo sapien
aagcgggactcccatttgcaaatcc

SEQ ID NO: 1596228 - DNA, 25 bp, Homo sapien
tggtattctgtttggatgcccaatt

SEQ ID NO: 1596229 - DNA, 25 bp, Homo sapien
ggatttgcaaatgggagtcccgctt

SEQ ID NO: 1596230 - DNA, 25 bp, Homo sapien
tggatgcccaatttggataactggg

SEQ ID NO: 1596231 - DNA, 25 bp, Homo sapien
cgcttttccaaatggctggccaaag

SEQ ID NO: 1596232 - DNA, 25 bp, Homo sapien
tttccaaatggctggccaaagagct

SEQ ID NO: 1596233 - DNA, 25 bp, Homo sapien
gcaaatgggagtcccgcttttccaa

SEQ ID NO: 1596234 - DNA, 25 bp, Homo sapien
gatacttacgcacatccctttggag

SEQ ID NO: 1596235 - DNA, 25 bp, Homo sapien
gactatgcttgtttaggacttccgc

SEQ ID NO: 1596236 - DNA, 25 bp, Homo sapien
taaatgccgtctgggaccatgaccg

SEQ ID NO: 1596237 - DNA, 25 bp, Homo sapien
tatccgcagtgttaagcaagagctt

SEQ ID NO: 1596238 - DNA, 25 bp, Homo sapien
gactttcagtggtcttccgctcaga

SEQ ID NO: 1596239 - DNA, 25 bp, Homo sapien
gaaacgagtcgagtgaaaccagtcc

SEQ ID NO: 1596240 - DNA, 25 bp, Homo sapien
tcctaaacaagcatagtctgagcgg

SEQ ID NO: 1596241 - DNA, 25 bp, Homo sapien
cctccaaagggatgtgcgtaagtat

SEQ ID NO: 1596242 - DNA, 25 bp, Homo sapien
tctgagcggaagaccactgaaagtc

SEQ ID NO: 1596243 - DNA, 25 bp, Homo sapien
gcatgaaaaaagctgcggaagtcct

SEQ ID NO: 1596244 - DNA, 25 bp, Homo sapien
ggtcccagacggcatttacaaagca

SEQ ID NO: 1596245 - DNA, 25 bp, Homo sapien
aagctcttgcttaacactgcggata

SEQ ID NO: 1596246 - DNA, 25 bp, Homo sapien
gattaaaaactctaggctaagccta

SEQ ID NO: 1596247 - DNA, 25 bp, Homo sapien
gacggtcttgtctgagttgtatgaa

SEQ ID NO: 1596248 - DNA, 25 bp, Homo sapien
ggcatatgcccatgttgtaaccatc

SEQ ID NO: 1596249 - DNA, 25 bp, Homo sapien
agaagtggcctcttccaaaatgatg

SEQ ID NO: 1596250 - DNA, 25 bp, Homo sapien
tagaaagactcatgggcatatgccc

SEQ ID NO: 1596251 - DNA, 25 bp, Homo sapien
tctgggtaagacatgcagtgacggt

SEQ ID NO: 1596252 - DNA, 25 bp, Homo sapien
gaccgtcactgcatgtcttacccag

SEQ ID NO: 1596253 - DNA, 25 bp, Homo sapien
tccaaagaatgtgctactagagaga

SEQ ID NO: 1596254 - DNA, 25 bp, Homo sapien
taatcccttggagagtaccccacag

SEQ ID NO: 1596255 - DNA, 25 bp, Homo sapien
ttcatacaactcagacaagaccgtc

SEQ ID NO: 1596256 - DNA, 25 bp, Homo sapien
catcattttggaagaggccacttct

SEQ ID NO: 1596257 - DNA, 25 bp, Homo sapien
gatggttacaacatgggcatatgcc

SEQ ID NO: 1596258 - DNA, 25 bp, Homo sapien
tatttcagcttagaaggttgttgtc

SEQ ID NO: 1596259 - DNA, 25 bp, Homo sapien
caaatggcacaactatttcagctta

SEQ ID NO: 1596260 - DNA, 25 bp, Homo sapien
gtcccgtggtcaggagacctgcagc

SEQ ID NO: 1596261 - DNA, 25 bp, Homo sapien
ttttgcatctatcaatgcccctagc

SEQ ID NO: 1596262 - DNA, 25 bp, Homo sapien
gcagtgctatggtcccgtggtcagg

SEQ ID NO: 1596263 - DNA, 25 bp, Homo sapien
cacttttcagggcactgcggcagtg

SEQ ID NO: 1596264 - DNA, 25 bp, Homo sapien
ccttctaagctgaaatagttgtgcc

SEQ ID NO: 1596265 - DNA, 25 bp, Homo sapien
taagctgaaatagttgtgccatttg

SEQ ID NO: 1596266 - DNA, 25 bp, Homo sapien
gctgcaggtctcctgaccacgggac

SEQ ID NO: 1596267 - DNA, 25 bp, Homo sapien
atagcactgccgcagtgccctgaaa

SEQ ID NO: 1596268 - DNA, 25 bp, Homo sapien
tgacaacaaccttctaagctgaaat

SEQ ID NO: 1596269 - DNA, 25 bp, Homo sapien
cactgccgcagtgccctgaaaagtg

SEQ ID NO: 1596270 - DNA, 25 bp, Homo sapien
gcgcctggccgacatttaacaatct

SEQ ID NO: 1596271 - DNA, 25 bp, Homo sapien
ttcaccatcgactgtgtcacacggc

SEQ ID NO: 1596272 - DNA, 25 bp, Homo sapien
tccgagtgccgtatctcagaacatc

SEQ ID NO: 1596273 - DNA, 25 bp, Homo sapien
tcctgactgcgagattacacctgcc

SEQ ID NO: 1596274 - DNA, 25 bp, Homo sapien
gtcctgggaacctgcatgaccagca

SEQ ID NO: 1596275 - DNA, 25 bp, Homo sapien
gcacttggaatcctttgccaccgcg

SEQ ID NO: 1596276 - DNA, 25 bp, Homo sapien
gatgttctgagatacggcactcgga

SEQ ID NO: 1596277 - DNA, 25 bp, Homo sapien
tacgcggtggcaaaggattccaagt

SEQ ID NO: 1596278 - DNA, 25 bp, Homo sapien
tgctggtcatgcaggttcccaggac

SEQ ID NO: 1596279 - DNA, 25 bp, Homo sapien
gattgttaaatgtcggccaggcgcg

SEQ ID NO: 1596280 - DNA, 25 bp, Homo sapien
gccgtgtgacacagtcgatggtgaa

SEQ ID NO: 1596281 - DNA, 25 bp, Homo sapien
ggcaggtgtaatctcgcagtcagga

SEQ ID NO: 1596282 - DNA, 25 bp, Homo sapien
tacaaattcagaggtctcgtatcga

SEQ ID NO: 1596283 - DNA, 25 bp, Homo sapien
caaagtcatattcgatgtcaacaag

SEQ ID NO: 1596284 - DNA, 25 bp, Homo sapien
tgcaaacagtcaaatggaaccccag

SEQ ID NO: 1596285 - DNA, 25 bp, Homo sapien
aaaggcaactgcttaagcgtttcta

SEQ ID NO: 1596286 - DNA, 25 bp, Homo sapien
aattcgaacgtcaatctctcggcca

SEQ ID NO: 1596287 - DNA, 25 bp, Homo sapien
tctcgtatcgatgtttaaaaaaggc

SEQ ID NO: 1596288 - DNA, 25 bp, Homo sapien
gatagaaacgcttaagcagttgcct

SEQ ID NO: 1596289 - DNA, 25 bp, Homo sapien
tgacgttcgaattgatagaaacgct

SEQ ID NO: 1596290 - DNA, 25 bp, Homo sapien
ctgagtggccgagagattgacgttc

SEQ ID NO: 1596291 - DNA, 25 bp, Homo sapien
taaacatcgatacgagacctctgaa

SEQ ID NO: 1596292 - DNA, 25 bp, Homo sapien
catcttgttgacatcgaatatgact

SEQ ID NO: 1596293 - DNA, 25 bp, Homo sapien
tgcattgagattgcaatgtgcgcaa

SEQ ID NO: 1596294 - DNA, 25 bp, Homo sapien
tcaccagcttcttgccacccttttc

SEQ ID NO: 1596295 - DNA, 25 bp, Homo sapien
tgactttcccgcgccgggatccagg

SEQ ID NO: 1596296 - DNA, 25 bp, Homo sapien
tttaaactggggctttatgtggcca

SEQ ID NO: 1596297 - DNA, 25 bp, Homo sapien
gctctgtgactttcccgcgccggga

SEQ ID NO: 1596298 - DNA, 25 bp, Homo sapien
gctttaaactggggctttatgtggc

SEQ ID NO: 1596299 - DNA, 25 bp, Homo sapien
tctccccagaagcccaatagtgagc

SEQ ID NO: 1596300 - DNA, 25 bp, Homo sapien
tgccgaggaagcgtgacttccatgg

SEQ ID NO: 1596301 - DNA, 25 bp, Homo sapien
ccgaggaagcgtgacttccatggac

SEQ ID NO: 1596302 - DNA, 25 bp, Homo sapien
aggaagcgtgacttccatggacccc

SEQ ID NO: 1596303 - DNA, 25 bp, Homo sapien
cgcagaagtcgacatcatcgtacac

SEQ ID NO: 1596304 - DNA, 25 bp, Homo sapien
agtcgacatcatcgtacacctccgt

SEQ ID NO: 1596305 - DNA, 25 bp, Homo sapien
cagaagtcgacatcatcgtacacct

SEQ ID NO: 1596306 - DNA, 25 bp, Homo sapien
gaagtcgacatcatcgtacacctcc

SEQ ID NO: 1596307 - DNA, 25 bp, Homo sapien
gcaggagcgctgttctgggcacgta

SEQ ID NO: 1596308 - DNA, 25 bp, Homo sapien
gagcgctgttctgggcacgtagcca

SEQ ID NO: 1596309 - DNA, 25 bp, Homo sapien
gggcaggagcgctgttctgggcacg

SEQ ID NO: 1596310 - DNA, 25 bp, Homo sapien
caggagcgctgttctgggcacgtag

SEQ ID NO: 1596311 - DNA, 25 bp, Homo sapien
acagcatctcctcattgctggtgaa

SEQ ID NO: 1596312 - DNA, 25 bp, Homo sapien
ccccgcgacgtgtcttagcgttggg

SEQ ID NO: 1596313 - DNA, 25 bp, Homo sapien
tgctggtgaactcgatcacctccag

SEQ ID NO: 1596314 - DNA, 25 bp, Homo sapien
gggtcgatcatcatcttcgtgtgaa

SEQ ID NO: 1596315 - DNA, 25 bp, Homo sapien
ggcgcgagatgttagggcctctgct

SEQ ID NO: 1596316 - DNA, 25 bp, Homo sapien
tgccgcccttgggcccctgtcttct

SEQ ID NO: 1596317 - DNA, 25 bp, Homo sapien
ccttgggcccctgtcttctttctga

SEQ ID NO: 1596318 - DNA, 25 bp, Homo sapien
ctggggcgcgagatgttagggcctc

SEQ ID NO: 1596319 - DNA, 25 bp, Homo sapien
cagctgcttcagcaactttgggtcc

SEQ ID NO: 1596320 - DNA, 25 bp, Homo sapien
cctcagctgcttcagcaactttggg

SEQ ID NO: 1596321 - DNA, 25 bp, Homo sapien
tgaacttcttccggaactccctctc

SEQ ID NO: 1596322 - DNA, 25 bp, Homo sapien
ccggaactccctctcggccttctct

SEQ ID NO: 1596323 - DNA, 25 bp, Homo sapien
caactgctgtggctggggatccttc

SEQ ID NO: 1596324 - DNA, 25 bp, Homo sapien
gggtggcaactgctgtggctgggga

SEQ ID NO: 1596325 - DNA, 25 bp, Homo sapien
tggcaactgctgtggctggggatcc

SEQ ID NO: 1596326 - DNA, 25 bp, Homo sapien
actgctgtggctggggatccttctc

SEQ ID NO: 1596327 - DNA, 25 bp, Homo sapien
agcccccaccaaggaattgtgtgct

SEQ ID NO: 1596328 - DNA, 25 bp, Homo sapien
gctcgtgagcaagttgtgctcctct

SEQ ID NO: 1596329 - DNA, 25 bp, Homo sapien
aggaattgtgtgctcgtgagcaagt

SEQ ID NO: 1596330 - DNA, 25 bp, Homo sapien
tgtgtgctcgtgagcaagttgtgct

SEQ ID NO: 1596331 - DNA, 25 bp, Homo sapien
gtcttgtggtggcctcctggcggct

SEQ ID NO: 1596332 - DNA, 25 bp, Homo sapien
gcctcctggcggcttgctgaactga

SEQ ID NO: 1596333 - DNA, 25 bp, Homo sapien
gggtcttgtggtggcctcctggcgg

SEQ ID NO: 1596334 - DNA, 25 bp, Homo sapien
ctcctggcggcttgctgaactgagg

SEQ ID NO: 1596335 - DNA, 25 bp, Homo sapien
gccggctcagcctttaccctggtag

SEQ ID NO: 1596336 - DNA, 25 bp, Homo sapien
gggacagtcaggactccgagtcaag

SEQ ID NO: 1596337 - DNA, 25 bp, Homo sapien
cagcctttaccctggtagctgtttt

SEQ ID NO: 1596338 - DNA, 25 bp, Homo sapien
aggactccgagtcaaggcagggccc

SEQ ID NO: 1596339 - DNA, 25 bp, Homo sapien
tccgcaagcctttctcaggggtcat

SEQ ID NO: 1596340 - DNA, 25 bp, Homo sapien
tcttccgcaagcctttctcaggggt

SEQ ID NO: 1596341 - DNA, 25 bp, Homo sapien
ttccgcaagcctttctcaggggtca

SEQ ID NO: 1596342 - DNA, 25 bp, Homo sapien
cttcttccgcaagcctttctcaggg

SEQ ID NO: 1596343 - DNA, 25 bp, Homo sapien
aggtgtgcaacaccatgtccaacta

SEQ ID NO: 1596344 - DNA, 25 bp, Homo sapien
caaagaactgggattttaggcatga

SEQ ID NO: 1596345 - DNA, 25 bp, Homo sapien
ccaaagaactgggattttaggcatg

SEQ ID NO: 1596346 - DNA, 25 bp, Homo sapien
tacaggtgtgcaacaccatgtccaa

SEQ ID NO: 1596347 - DNA, 25 bp, Homo sapien
tatttggtgacaggaacaatgggcc

SEQ ID NO: 1596348 - DNA, 25 bp, Homo sapien
cagatgctcctagcctcggaagagg

SEQ ID NO: 1596349 - DNA, 25 bp, Homo sapien
gtcagcgagagcaggagcaccttag

SEQ ID NO: 1596350 - DNA, 25 bp, Homo sapien
cacagggaggtgttgcaagaagctc

SEQ ID NO: 1596351 - DNA, 25 bp, Homo sapien
gaatcttgggcttacgggatcctcc

SEQ ID NO: 1596352 - DNA, 25 bp, Homo sapien
agcctcactgcagtctgcagtctcg

SEQ ID NO: 1596353 - DNA, 25 bp, Homo sapien
gattactgaattcacccactgctcc

SEQ ID NO: 1596354 - DNA, 25 bp, Homo sapien
cttctcactggtccttcgcctctgg

SEQ ID NO: 1596355 - DNA, 25 bp, Homo sapien
caggagcatggcagaaaatggcctt

SEQ ID NO: 1596356 - DNA, 25 bp, Homo sapien
ggagcatggcagaaaatggccttgc

SEQ ID NO: 1596357 - DNA, 25 bp, Homo sapien
ggccttgccccgaatgttttgcagg

SEQ ID NO: 1596358 - DNA, 25 bp, Homo sapien
gggactcgggcaggccaccaacaaa

SEQ ID NO: 1596359 - DNA, 25 bp, Homo sapien
cacatcgtcatacagctcgtagatc

SEQ ID NO: 1596360 - DNA, 25 bp, Homo sapien
cgtcatacagctcgtagatctcatc

SEQ ID NO: 1596361 - DNA, 25 bp, Homo sapien
tctgggttccacatcgtcatacagc

SEQ ID NO: 1596362 - DNA, 25 bp, Homo sapien
cagctcgtagatctcatctgggacc

SEQ ID NO: 1596363 - DNA, 25 bp, Homo sapien
cagcggccgagcgggtcctccgtag

SEQ ID NO: 1596364 - DNA, 25 bp, Homo sapien
cccagcggccgagcgggtcctccgt

SEQ ID NO: 1596365 - DNA, 25 bp, Homo sapien
gcggccgagcgggtcctccgtagat

SEQ ID NO: 1596366 - DNA, 25 bp, Homo sapien
agcccagcggccgagcgggtcctcc

SEQ ID NO: 1596367 - DNA, 25 bp, Homo sapien
tgcagagggtctccgaaagctctgc

SEQ ID NO: 1596368 - DNA, 25 bp, Homo sapien
ctgcagagggtctccgaaagctctg

SEQ ID NO: 1596369 - DNA, 25 bp, Homo sapien
tgcatatccacgggccccgggggca

SEQ ID NO: 1596370 - DNA, 25 bp, Homo sapien
cagagggtctccgaaagctctgcat

SEQ ID NO: 1596371 - DNA, 25 bp, Homo sapien
gggcagaggcctccgccggggtgga

SEQ ID NO: 1596372 - DNA, 25 bp, Homo sapien
cagaggcctccgccggggtggatgg

SEQ ID NO: 1596373 - DNA, 25 bp, Homo sapien
gcctccgccggggtggatggctggg

SEQ ID NO: 1596374 - DNA, 25 bp, Homo sapien
gaggcctccgccggggtggatggct

SEQ ID NO: 1596375 - DNA, 25 bp, Homo sapien
gagagcgctttgaattcggccggcc

SEQ ID NO: 1596376 - DNA, 25 bp, Homo sapien
tcaccgaagaactcaggctgcgggt

SEQ ID NO: 1596377 - DNA, 25 bp, Homo sapien
agcacgctgacttcgggctctgagg

SEQ ID NO: 1596378 - DNA, 25 bp, Homo sapien
ggctttcgagggagatcaccgaaga

SEQ ID NO: 1596379 - DNA, 25 bp, Homo sapien
ggcacggacttcttagggaggccac

SEQ ID NO: 1596380 - DNA, 25 bp, Homo sapien
gagaggtcactcaactccagtttgg

SEQ ID NO: 1596381 - DNA, 25 bp, Homo sapien
aaaggtactcaactcaggctgcggg

SEQ ID NO: 1596382 - DNA, 25 bp, Homo sapien
tcaaggacactgcaccaaactcagg

SEQ ID NO: 1596383 - DNA, 25 bp, Homo sapien
gggctgatggtcaggaatgctcaca

SEQ ID NO: 1596384 - DNA, 25 bp, Homo sapien
cacagagatgcctggagacggccat

SEQ ID NO: 1596385 - DNA, 25 bp, Homo sapien
ggagacggccatgcggtccctctca

SEQ ID NO: 1596386 - DNA, 25 bp, Homo sapien
tctcacaccgtctctgacatgcggg

SEQ ID NO: 1596387 - DNA, 25 bp, Homo sapien
tgtcaccccgcaggaaagcactgct

SEQ ID NO: 1596388 - DNA, 25 bp, Homo sapien
ttcccacatggctgctcatgttgac

SEQ ID NO: 1596389 - DNA, 25 bp, Homo sapien
tttgtcaccccgcaggaaagcactg

SEQ ID NO: 1596390 - DNA, 25 bp, Homo sapien
cagcccgttcccacatggctgctca

SEQ ID NO: 1596391 - DNA, 25 bp, Homo sapien
catggctgcaggcaggtgatgggcc

SEQ ID NO: 1596392 - DNA, 25 bp, Homo sapien
tggctgcaggcaggtgatgggccat

SEQ ID NO: 1596393 - DNA, 25 bp, Homo sapien
atggctgcaggcaggtgatgggcca

SEQ ID NO: 1596394 - DNA, 25 bp, Homo sapien
tgctccacggtcagcacacagggtg

SEQ ID NO: 1596395 - DNA, 25 bp, Homo sapien
gctccacggtcagcacacagggtgg

SEQ ID NO: 1596396 - DNA, 25 bp, Homo sapien
tgaaatccaattcccggctctgagc

SEQ ID NO: 1596397 - DNA, 25 bp, Homo sapien
actggttgcccgcatgttcctaaca

SEQ ID NO: 1596398 - DNA, 25 bp, Homo sapien
tgctgtctgccctggttggctcatc

SEQ ID NO: 1596399 - DNA, 25 bp, Homo sapien
ccatgtgaccgggtgaggcctctgc

SEQ ID NO: 1596400 - DNA, 25 bp, Homo sapien
tgttctggggcagatatcacaggcc

SEQ ID NO: 1596401 - DNA, 25 bp, Homo sapien
gttctggggcagatatcacaggcca

SEQ ID NO: 1596402 - DNA, 25 bp, Homo sapien
tacagcagatttgggggtcggtggg

SEQ ID NO: 1596403 - DNA, 25 bp, Homo sapien
cagatttgggggtcggtgggtgagt

SEQ ID NO: 1596404 - DNA, 25 bp, Homo sapien
ctggtacagcagatttgggggtcgg

SEQ ID NO: 1596405 - DNA, 25 bp, Homo sapien
gcagatttgggggtcggtgggtgag

SEQ ID NO: 1596406 - DNA, 25 bp, Homo sapien
tttcattcccccgagtctgagattc

SEQ ID NO: 1596407 - DNA, 25 bp, Homo sapien
ccccgagtctgagattcctgggcgc

SEQ ID NO: 1596408 - DNA, 25 bp, Homo sapien
ctatccccactgctctcccggcttt

SEQ ID NO: 1596409 - DNA, 25 bp, Homo sapien
cgagtctgagattcctgggcgcccc

SEQ ID NO: 1596410 - DNA, 25 bp, Homo sapien
gagaggtccctggacggacgtgttg

SEQ ID NO: 1596411 - DNA, 25 bp, Homo sapien
ccctggacggacgtgttggctctag

SEQ ID NO: 1596412 - DNA, 25 bp, Homo sapien
gggtggccgaataaagaaactgatg

SEQ ID NO: 1596413 - DNA, 25 bp, Homo sapien
tgggaagaggcgtggcctagatctg

SEQ ID NO: 1596414 - DNA, 25 bp, Homo sapien
ttgagatggagttccactcgtattg

SEQ ID NO: 1596415 - DNA, 25 bp, Homo sapien
tggagttccactcgtattgcccaga

SEQ ID NO: 1596416 - DNA, 25 bp, Homo sapien
tgagatggagttccactcgtattgc

SEQ ID NO: 1596417 - DNA, 25 bp, Homo sapien
agttccactcgtattgcccagactg

SEQ ID NO: 1596418 - DNA, 25 bp, Homo sapien
gatgtgatcaatccatgactgctgg

SEQ ID NO: 1596419 - DNA, 25 bp, Homo sapien
tgcacctgtggacccaggtggtcct

SEQ ID NO: 1596420 - DNA, 25 bp, Homo sapien
tctggacaagggagaacgctgccac

SEQ ID NO: 1596421 - DNA, 25 bp, Homo sapien
gagagtccccatcccatttggtttc

SEQ ID NO: 1596422 - DNA, 25 bp, Homo sapien
agcagcggcgacaccttgggtgcaa

SEQ ID NO: 1596423 - DNA, 25 bp, Homo sapien
acaaaactacccacatcccatggcc

SEQ ID NO: 1596424 - DNA, 25 bp, Homo sapien
ccaaagcggcgggattcagagctgc

SEQ ID NO: 1596425 - DNA, 25 bp, Homo sapien
tcagagctgcgagaacactggaagc

SEQ ID NO: 1596426 - DNA, 25 bp, Homo sapien
gagcctcagcgccttgggcccccgc

SEQ ID NO: 1596427 - DNA, 25 bp, Homo sapien
tgagcctcagcgccttgggcccccg

SEQ ID NO: 1596428 - DNA, 25 bp, Homo sapien
ccacccgcgcattcctcggccttac

SEQ ID NO: 1596429 - DNA, 25 bp, Homo sapien
tctccacccgcgcattcctcggcct

SEQ ID NO: 1596430 - DNA, 25 bp, Homo sapien
cgggccgcgaggccgtggagaaggc

SEQ ID NO: 1596431 - DNA, 25 bp, Homo sapien
catgcacgagtagcggccgcgtgtg

SEQ ID NO: 1596432 - DNA, 25 bp, Homo sapien
agtagcggccgcgtgtgtgctccca

SEQ ID NO: 1596433 - DNA, 25 bp, Homo sapien
tgcatgcacgagtagcggccgcgtg

SEQ ID NO: 1596434 - DNA, 25 bp, Homo sapien
tagcggccgcgtgtgtgctcccaca

SEQ ID NO: 1596435 - DNA, 25 bp, Homo sapien
ccgggtctgtctgcccctagagttg

SEQ ID NO: 1596436 - DNA, 25 bp, Homo sapien
cagaagacccgtgcgccaaggatgg

SEQ ID NO: 1596437 - DNA, 25 bp, Homo sapien
aagcccgctccgaggtgaacggtga

SEQ ID NO: 1596438 - DNA, 25 bp, Homo sapien
gcttccgggcgcctagttcagtttc

SEQ ID NO: 1596439 - DNA, 25 bp, Homo sapien
aatcctgtatttcgggacggtggca

SEQ ID NO: 1596440 - DNA, 25 bp, Homo sapien
tcctggtatccaccagaccccgcag

SEQ ID NO: 1596441 - DNA, 25 bp, Homo sapien
cggtggcatttgtgccccctgggaa

SEQ ID NO: 1596442 - DNA, 25 bp, Homo sapien
accccgcagggcgcaggaaagaaag

SEQ ID NO: 1596443 - DNA, 25 bp, Homo sapien
cgtcggagccgccctggggtcttcg

SEQ ID NO: 1596444 - DNA, 25 bp, Homo sapien
gcgtcggagccgccctggggtcttc

SEQ ID NO: 1596445 - DNA, 25 bp, Homo sapien
gtcaagttcagagtcagggcgagcc

SEQ ID NO: 1596446 - DNA, 25 bp, Homo sapien
cgggtcaagttcagagtcagggcga

SEQ ID NO: 1596447 - DNA, 25 bp, Homo sapien
agttcagagtcagggcgagcccagc

SEQ ID NO: 1596448 - DNA, 25 bp, Homo sapien
gggcgggtcaagttcagagtcaggg

SEQ ID NO: 1596449 - DNA, 25 bp, Homo sapien
cagggttcaagtagggcaggaacgg

SEQ ID NO: 1596450 - DNA, 25 bp, Homo sapien
ggccaaagggcgcagggttcaagta

SEQ ID NO: 1596451 - DNA, 25 bp, Homo sapien
aagggcgcagggttcaagtagggca

SEQ ID NO: 1596452 - DNA, 25 bp, Homo sapien
ggcgcagggttcaagtagggcagga

SEQ ID NO: 1596453 - DNA, 25 bp, Homo sapien
gcgggggtcgtgaagggttccagca

SEQ ID NO: 1596454 - DNA, 25 bp, Homo sapien
caggcccggcgctgatgcggggtca

SEQ ID NO: 1596455 - DNA, 25 bp, Homo sapien
acggcaggcccggcgctgatgcggg

SEQ ID NO: 1596456 - DNA, 25 bp, Homo sapien
cagcgggaacggcaggcccggcgct

SEQ ID NO: 1596457 - DNA, 25 bp, Homo sapien
gctccgcgcaaacatgcaggtgctt

SEQ ID NO: 1596458 - DNA, 25 bp, Homo sapien
caggtgcttgaagagcgagcggtgc

SEQ ID NO: 1596459 - DNA, 25 bp, Homo sapien
aagagcgagcggtgcgtgcggaagc

SEQ ID NO: 1596460 - DNA, 25 bp, Homo sapien
tctgcgcatgctccgcgcaaacatg

SEQ ID NO: 1596461 - DNA, 25 bp, Homo sapien
tggaggtgggcagagggctgggctg

SEQ ID NO: 1596462 - DNA, 25 bp, Homo sapien
ctggaggtgggcagagggctgggct

SEQ ID NO: 1596463 - DNA, 25 bp, Homo sapien
ggaggtgggcagagggctgggctgg

SEQ ID NO: 1596464 - DNA, 25 bp, Homo sapien
gcggagctcaagaggtcagggtctc

SEQ ID NO: 1596465 - DNA, 25 bp, Homo sapien
ctgtacaactgtggcagcgaccctt

SEQ ID NO: 1596466 - DNA, 25 bp, Homo sapien
ctgaccacttcgggtgggaacctgg

SEQ ID NO: 1596467 - DNA, 25 bp, Homo sapien
ccacacatagggtgaggctagggca

SEQ ID NO: 1596468 - DNA, 25 bp, Homo sapien
gaagtagcgattgggtttgtagtgc

SEQ ID NO: 1596469 - DNA, 25 bp, Homo sapien
agatgctgtgccaggtcacggacgc

SEQ ID NO: 1596470 - DNA, 25 bp, Homo sapien
tgtgtgggcgggcagtgggttcgca

SEQ ID NO: 1596471 - DNA, 25 bp, Homo sapien
tgccaggtcacggacgctgggaaaa

SEQ ID NO: 1596472 - DNA, 25 bp, Homo sapien
aggtcacggacgctgggaaaactga

SEQ ID NO: 1596473 - DNA, 25 bp, Homo sapien
cacgttcccacactggcggtgtggc

SEQ ID NO: 1596474 - DNA, 25 bp, Homo sapien
gctggtcccggagactatgctggtc

SEQ ID NO: 1596475 - DNA, 25 bp, Homo sapien
tccttgtcggtctcactggagctgg

SEQ ID NO: 1596476 - DNA, 25 bp, Homo sapien
tggctcctccgacatggaggaggaa

SEQ ID NO: 1596477 - DNA, 25 bp, Homo sapien
aggcggagagaacccttctgggctc

SEQ ID NO: 1596478 - DNA, 25 bp, Homo sapien
ggaagaggcggagagaacccttctg

SEQ ID NO: 1596479 - DNA, 25 bp, Homo sapien
gcggagagaacccttctgggctctg

SEQ ID NO: 1596480 - DNA, 25 bp, Homo sapien
aagaggcggagagaacccttctggg

SEQ ID NO: 1596481 - DNA, 25 bp, Homo sapien
ggattgagctccttatgcatacggg

SEQ ID NO: 1596482 - DNA, 25 bp, Homo sapien
gaatacgtaagggtggactaagctc

SEQ ID NO: 1596483 - DNA, 25 bp, Homo sapien
tcaactaggataggtgggagcccca

SEQ ID NO: 1596484 - DNA, 25 bp, Homo sapien
tgcacacaagcgtggcctagaggga

SEQ ID NO: 1596485 - DNA, 25 bp, Homo sapien
agtagggcgctctccgagtgacagc

SEQ ID NO: 1596486 - DNA, 25 bp, Homo sapien
cccggaagtagggcgctctccgagt

SEQ ID NO: 1596487 - DNA, 25 bp, Homo sapien
tctccgagtgacagccagcggcgga

SEQ ID NO: 1596488 - DNA, 25 bp, Homo sapien
agcggcggacgggtgcccggatgtg

SEQ ID NO: 1596489 - DNA, 25 bp, Homo sapien
cacggctcggcctcttgtttctgcg

SEQ ID NO: 1596490 - DNA, 25 bp, Homo sapien
cggcctcttgtttctgcggctccgg

SEQ ID NO: 1596491 - DNA, 25 bp, Homo sapien
cttcgacacggctcggcctcttgtt

SEQ ID NO: 1596492 - DNA, 25 bp, Homo sapien
ggctcggcctcttgtttctgcggct

SEQ ID NO: 1596493 - DNA, 25 bp, Homo sapien
gcagtgcgagttcgcgctcacgtca

SEQ ID NO: 1596494 - DNA, 25 bp, Homo sapien
ttaggcggcggccaccctctgggca

SEQ ID NO: 1596495 - DNA, 25 bp, Homo sapien
tctgggcagtgcgagttcgcgctca

SEQ ID NO: 1596496 - DNA, 25 bp, Homo sapien
gttcgcgctcacgtcagcgccattt

SEQ ID NO: 1596497 - DNA, 25 bp, Homo sapien
tgtgaaaacatcgtccttgttgggc

SEQ ID NO: 1596498 - DNA, 25 bp, Homo sapien
catatgaatgcaaggcatggctctg

SEQ ID NO: 1596499 - DNA, 25 bp, Homo sapien
tgggtcagtgaacctctctgaacct

SEQ ID NO: 1596500 - DNA, 25 bp, Homo sapien
gacaaattcaagctttatggtcaca

SEQ ID NO: 1596501 - DNA, 25 bp, Homo sapien
gctattgcagcccaggtaaacgagg

SEQ ID NO: 1596502 - DNA, 25 bp, Homo sapien
ttcttaatcacatggcagttgggag

SEQ ID NO: 1596503 - DNA, 25 bp, Homo sapien
tggcactttgccaacagcacaggac

SEQ ID NO: 1596504 - DNA, 25 bp, Homo sapien
gcaaagtcacgcttgttaaggaccc

SEQ ID NO: 1596505 - DNA, 25 bp, Homo sapien
ctcctggccgtgaagccggcccttc

SEQ ID NO: 1596506 - DNA, 25 bp, Homo sapien
atcttctccacgtagtttcctggga

SEQ ID NO: 1596507 - DNA, 25 bp, Homo sapien
tcctggccgtgaagccggcccttcc

SEQ ID NO: 1596508 - DNA, 25 bp, Homo sapien
tcttctccacgtagtttcctgggaa

SEQ ID NO: 1596509 - DNA, 25 bp, Homo sapien
cacatcttggcccacgtactggtat

SEQ ID NO: 1596510 - DNA, 25 bp, Homo sapien
cgtactggtatagggcccggcacct

SEQ ID NO: 1596511 - DNA, 25 bp, Homo sapien
ctcgttcacgttgaagctcagctcg

SEQ ID NO: 1596512 - DNA, 25 bp, Homo sapien
ccatgaggatctcaatgacctcgtt

SEQ ID NO: 1596513 - DNA, 25 bp, Homo sapien
tctgtgttgtgctctgagggcggac

SEQ ID NO: 1596514 - DNA, 25 bp, Homo sapien
tggtcaggcacgttgaggaattctg

SEQ ID NO: 1596515 - DNA, 25 bp, Homo sapien
ccagggatgtggacggagggccccg

SEQ ID NO: 1596516 - DNA, 25 bp, Homo sapien
tgtgggtgccccctccagacatgat

SEQ ID NO: 1596517 - DNA, 25 bp, Homo sapien
ccttggccattcccttccgcgtagg

SEQ ID NO: 1596518 - DNA, 25 bp, Homo sapien
ttggccattcccttccgcgtaggct

SEQ ID NO: 1596519 - DNA, 25 bp, Homo sapien
cttggccattcccttccgcgtaggc

SEQ ID NO: 1596520 - DNA, 25 bp, Homo sapien
ttgagcactgccaagtcgccgaagc

SEQ ID NO: 1596521 - DNA, 25 bp, Homo sapien
tggagctcttgggcagcccatcgcc

SEQ ID NO: 1596522 - DNA, 25 bp, Homo sapien
agaaggtgacgctgcgggtgccgcc

SEQ ID NO: 1596523 - DNA, 25 bp, Homo sapien
gtgagggtccgaccgccaaccttga

SEQ ID NO: 1596524 - DNA, 25 bp, Homo sapien
tggtgctggggttggcggggccgta

SEQ ID NO: 1596525 - DNA, 25 bp, Homo sapien
ccgagatggtgctggggttggcggg

SEQ ID NO: 1596526 - DNA, 25 bp, Homo sapien
agatggtgctggggttggcggggcc

SEQ ID NO: 1596527 - DNA, 25 bp, Homo sapien
cccgagatggtgctggggttggcgg

SEQ ID NO: 1596528 - DNA, 25 bp, Homo sapien
ctcgaagcgcttgcacagaaggctg

SEQ ID NO: 1596529 - DNA, 25 bp, Homo sapien
acagaaggctgacaaactcggtctt

SEQ ID NO: 1596530 - DNA, 25 bp, Homo sapien
ctcctcgaagcgcttgcacagaagg

SEQ ID NO: 1596531 - DNA, 25 bp, Homo sapien
aaactcggtcttgaagacgctctcc

SEQ ID NO: 1596532 - DNA, 25 bp, Homo sapien
acatacacacacttgggcgtcagga

SEQ ID NO: 1596533 - DNA, 25 bp, Homo sapien
tcaggatcaagtcccgcttgatggg

SEQ ID NO: 1596534 - DNA, 25 bp, Homo sapien
tttctctcgcccaatcacatacaca

SEQ ID NO: 1596535 - DNA, 25 bp, Homo sapien
ttgggcgtcaggatcaagtcccgct

SEQ ID NO: 1596536 - DNA, 25 bp, Homo sapien
agctggcctgcggtcagagttctct

SEQ ID NO: 1596537 - DNA, 25 bp, Homo sapien
ctggcctgcggtcagagttctctgg

SEQ ID NO: 1596538 - DNA, 25 bp, Homo sapien
tagaagggtgaatgtgcaagccggt

SEQ ID NO: 1596539 - DNA, 25 bp, Homo sapien
atgtgcaagccggttgagctggcct

SEQ ID NO: 1596540 - DNA, 25 bp, Homo sapien
catccaggtaaagatggtatatagg

SEQ ID NO: 1596541 - DNA, 25 bp, Homo sapien
gccatatgagactatccatccaggt

SEQ ID NO: 1596542 - DNA, 25 bp, Homo sapien
tgtacagatcatgtgaggaggcacc

SEQ ID NO: 1596543 - DNA, 25 bp, Homo sapien
gaaggtacccaataatgtgtgtctg

SEQ ID NO: 1596544 - DNA, 25 bp, Homo sapien
caggtacaggtgacggtaaacaggc

SEQ ID NO: 1596545 - DNA, 25 bp, Homo sapien
gtaaacaggccaagtctgggtgtac

SEQ ID NO: 1596546 - DNA, 25 bp, Homo sapien
ctggcccgcccaggtacaggtgacg

SEQ ID NO: 1596547 - DNA, 25 bp, Homo sapien
tgacggtaaacaggccaagtctggg

SEQ ID NO: 1596548 - DNA, 25 bp, Homo sapien
gtgtctgtgccgggtaatgatgtac

SEQ ID NO: 1596549 - DNA, 25 bp, Homo sapien
tgtgtctgtgccgggtaatgatgta

SEQ ID NO: 1596550 - DNA, 25 bp, Homo sapien
tagatacctatggacaggtgtgtct

SEQ ID NO: 1596551 - DNA, 25 bp, Homo sapien
tctaggctgggggatagatacctgt

SEQ ID NO: 1596552 - DNA, 25 bp, Homo sapien
tgcctgggctaggtgaggatatacc

SEQ ID NO: 1596553 - DNA, 25 bp, Homo sapien
tctaggctgggggatagatacctat

SEQ ID NO: 1596554 - DNA, 25 bp, Homo sapien
gtcttgctgtgcccacccactagtg

SEQ ID NO: 1596555 - DNA, 25 bp, Homo sapien
tgatggaacagatggatctaggctg

SEQ ID NO: 1596556 - DNA, 25 bp, Homo sapien
ctgggggatatctggctgtgggcag

SEQ ID NO: 1596557 - DNA, 25 bp, Homo sapien
tgccaggctgtagtcagggtcttgc

SEQ ID NO: 1596558 - DNA, 25 bp, Homo sapien
gattgatgctgttgcgcctccgctc

SEQ ID NO: 1596559 - DNA, 25 bp, Homo sapien
tagtccccgacgaagttccgattga

SEQ ID NO: 1596560 - DNA, 25 bp, Homo sapien
tggtgaccgaatcggcgaagtccac

SEQ ID NO: 1596561 - DNA, 25 bp, Homo sapien
ttgcccaggaactgacgcagctcgg

SEQ ID NO: 1596562 - DNA, 25 bp, Homo sapien
tggagggcagagctcctgatacagc

SEQ ID NO: 1596563 - DNA, 25 bp, Homo sapien
cgcgccgtttacccgaagcctctca

SEQ ID NO: 1596564 - DNA, 25 bp, Homo sapien
gcgccgtttacccgaagcctctcac

SEQ ID NO: 1596565 - DNA, 25 bp, Homo sapien
agctcctgatacagctcctccaggt

SEQ ID NO: 1596566 - DNA, 25 bp, Homo sapien
cgtggcgccgccaggccttctggat

SEQ ID NO: 1596567 - DNA, 25 bp, Homo sapien
aagccatcgaactttcgctctcgca

SEQ ID NO: 1596568 - DNA, 25 bp, Homo sapien
ctcgtacttccggacagccacgtgg

SEQ ID NO: 1596569 - DNA, 25 bp, Homo sapien
ccttctggatggttcgggcaaagcc

SEQ ID NO: 1596570 - DNA, 25 bp, Homo sapien
gggctccatgttgaccgcccgaagc

SEQ ID NO: 1596571 - DNA, 25 bp, Homo sapien
cacgtctcgggggtcagaatggcat

SEQ ID NO: 1596572 - DNA, 25 bp, Homo sapien
cccgaagcaggtgctggacgccctg

SEQ ID NO: 1596573 - DNA, 25 bp, Homo sapien
catctggtactggtcgggctccatg

SEQ ID NO: 1596574 - DNA, 25 bp, Homo sapien
gctctgcgcaccctgatgttctcct

SEQ ID NO: 1596575 - DNA, 25 bp, Homo sapien
ctggcggcggtaggcgaagccggct

SEQ ID NO: 1596576 - DNA, 25 bp, Homo sapien
gaactggcggcggtaggcgaagccg

SEQ ID NO: 1596577 - DNA, 25 bp, Homo sapien
tctgcaggaatttggcgaactggcg

SEQ ID NO: 1596578 - DNA, 25 bp, Homo sapien
ctggtggggagggtaggctgagtcc

SEQ ID NO: 1596579 - DNA, 25 bp, Homo sapien
tggtggggagggtaggctgagtccc

SEQ ID NO: 1596580 - DNA, 25 bp, Homo sapien
ggatctggattcatgctgagggaag

SEQ ID NO: 1596581 - DNA, 25 bp, Homo sapien
tggggagtcaccagtcctgggggtg

SEQ ID NO: 1596582 - DNA, 25 bp, Homo sapien
gggggatctggattcatgctgaggg

SEQ ID NO: 1596583 - DNA, 25 bp, Homo sapien
ctggattcatgctgagggaagtttg

SEQ ID NO: 1596584 - DNA, 25 bp, Homo sapien
cttggtctcgttgggtttgatgcag

SEQ ID NO: 1596585 - DNA, 25 bp, Homo sapien
tcccagtctcggggcctcttggtct

SEQ ID NO: 1596586 - DNA, 25 bp, Homo sapien
cagcggatgtagtggggtgtgcacc

SEQ ID NO: 1596587 - DNA, 25 bp, Homo sapien
ggcctcttggtctcgttgggtttga

SEQ ID NO: 1596588 - DNA, 25 bp, Homo sapien
agtgtggccaccaggtcgttggctt

SEQ ID NO: 1596589 - DNA, 25 bp, Homo sapien
gtggccaccaggtcgttggcttgtt

SEQ ID NO: 1596590 - DNA, 25 bp, Homo sapien
tgtggccaccaggtcgttggcttgt

SEQ ID NO: 1596591 - DNA, 25 bp, Homo sapien
tggccaccaggtcgttggcttgttt

SEQ ID NO: 1596592 - DNA, 25 bp, Homo sapien
atttgttgtcacattcatagcaaca

SEQ ID NO: 1596593 - DNA, 25 bp, Homo sapien
cagactagatttgttgtcacattca

SEQ ID NO: 1596594 - DNA, 25 bp, Homo sapien
gatttgttgtcacattcatagcaac

SEQ ID NO: 1596595 - DNA, 25 bp, Homo sapien
gactagatttgttgtcacattcata

SEQ ID NO: 1596596 - DNA, 25 bp, Homo sapien
cttgatcttggagccggcggtgctg

SEQ ID NO: 1596597 - DNA, 25 bp, Homo sapien
gtctccatccagcttctcggggaag

SEQ ID NO: 1596598 - DNA, 25 bp, Homo sapien
catccagcttctcggggaagagcat

SEQ ID NO: 1596599 - DNA, 25 bp, Homo sapien
agcttctcggggaagagcatccgga

SEQ ID NO: 1596600 - DNA, 25 bp, Homo sapien
ggaacaacacggataaattgtacat

SEQ ID NO: 1596601 - DNA, 25 bp, Homo sapien
gggaacaacacggataaattgtaca

SEQ ID NO: 1596602 - DNA, 25 bp, Homo sapien
cactcccctcgagtttgtggcgaga

SEQ ID NO: 1596603 - DNA, 25 bp, Homo sapien
tttttacatcagaactagtccatag

SEQ ID NO: 1596604 - DNA, 25 bp, Homo sapien
gatggcagttctgggtaagatggag

SEQ ID NO: 1596605 - DNA, 25 bp, Homo sapien
actagtccatagaaacaccatcctg

SEQ ID NO: 1596606 - DNA, 25 bp, Homo sapien
cagctctatgaggtcggagaagaga

SEQ ID NO: 1596607 - DNA, 25 bp, Homo sapien
cgcagaagccgctgacgtcgtagga

SEQ ID NO: 1596608 - DNA, 25 bp, Homo sapien
cagaagccgctgacgtcgtaggaga

SEQ ID NO: 1596609 - DNA, 25 bp, Homo sapien
gagaagagaacgtctcggttcctct

SEQ ID NO: 1596610 - DNA, 25 bp, Homo sapien
ggttacaacctagatgagccaggag

SEQ ID NO: 1596611 - DNA, 25 bp, Homo sapien
gctggggggtatctacagttcagaa

SEQ ID NO: 1596612 - DNA, 25 bp, Homo sapien
tgttcaagttgaggttagaggatcg

SEQ ID NO: 1596613 - DNA, 25 bp, Homo sapien
gatcgtggctgtatcccaggtcaga

SEQ ID NO: 1596614 - DNA, 25 bp, Homo sapien
ggtgcccacgaccacgcccggctga

SEQ ID NO: 1596615 - DNA, 25 bp, Homo sapien
cttgctctgttgctcaggctggagt

SEQ ID NO: 1596616 - DNA, 25 bp, Homo sapien
ttgcttttgttttgtgagatggagt

SEQ ID NO: 1596617 - DNA, 25 bp, Homo sapien
tgcacccggccctgtttgcttttgt

SEQ ID NO: 1596618 - DNA, 25 bp, Homo sapien
ccctggataagggtcctagcaggct

SEQ ID NO: 1596619 - DNA, 25 bp, Homo sapien
ttctggttagtagggggtggattga

SEQ ID NO: 1596620 - DNA, 25 bp, Homo sapien
ctggggggtcagccggaagggtctg

SEQ ID NO: 1596621 - DNA, 25 bp, Homo sapien
ggacagtggaattctacagccctgg

SEQ ID NO: 1596622 - DNA, 25 bp, Homo sapien
ccagctgttgaaatgctcgtgggtc

SEQ ID NO: 1596623 - DNA, 25 bp, Homo sapien
gctgttgaaatgctcgtgggtcccc

SEQ ID NO: 1596624 - DNA, 25 bp, Homo sapien
gcacacgtcgtccaagacgctcatg

SEQ ID NO: 1596625 - DNA, 25 bp, Homo sapien
tggtggatgacgaagccggcgctcc

SEQ ID NO: 1596626 - DNA, 25 bp, Homo sapien
gcctgaggatgccataacacccttg

SEQ ID NO: 1596627 - DNA, 25 bp, Homo sapien
agctcaggggaccagtgagacgccc

SEQ ID NO: 1596628 - DNA, 25 bp, Homo sapien
cccgccaaagttgacccagccctca

SEQ ID NO: 1596629 - DNA, 25 bp, Homo sapien
ggttgttatctgtcgctggaagtcc

SEQ ID NO: 1596630 - DNA, 25 bp, Homo sapien
tgttttcgatgaggtcacagacgac

SEQ ID NO: 1596631 - DNA, 25 bp, Homo sapien
cacagacgaccttgttgttgaagta

SEQ ID NO: 1596632 - DNA, 25 bp, Homo sapien
tgttgaagtactggattggagtcca

SEQ ID NO: 1596633 - DNA, 25 bp, Homo sapien
cagcggatgccttcctgcacatact

SEQ ID NO: 1596634 - DNA, 25 bp, Homo sapien
ccacacctggctaagttttatattt

SEQ ID NO: 1596635 - DNA, 25 bp, Homo sapien
tgcctcctgggttcaagcaattctc

SEQ ID NO: 1596636 - DNA, 25 bp, Homo sapien
aattctcctgcctcagactcctgag

SEQ ID NO: 1596637 - DNA, 25 bp, Homo sapien
acaatctcgactcactacaagctct

SEQ ID NO: 1596638 - DNA, 25 bp, Homo sapien
tcccctagttgctaagggatcctca

SEQ ID NO: 1596639 - DNA, 25 bp, Homo sapien
ggcagaaggaagtatcactatggag

SEQ ID NO: 1596640 - DNA, 25 bp, Homo sapien
gcacagagaggtgggaacgcggtgg

SEQ ID NO: 1596641 - DNA, 25 bp, Homo sapien
tatcactatggagcctgggtaggtt

SEQ ID NO: 1596642 - DNA, 25 bp, Homo sapien
gctcggccttcagggtaagttcgat

SEQ ID NO: 1596643 - DNA, 25 bp, Homo sapien
ggtaagttcgataaagatttgctgc

SEQ ID NO: 1596644 - DNA, 25 bp, Homo sapien
ctcattgacgaagttgatgcaaaac

SEQ ID NO: 1596645 - DNA, 25 bp, Homo sapien
gatgcaaaactgctcgaagccattt

SEQ ID NO: 1596646 - DNA, 25 bp, Homo sapien
tggtgctggaagttcttgtggccac

SEQ ID NO: 1596647 - DNA, 25 bp, Homo sapien
tcctggtgctggaagttcttgtggc

SEQ ID NO: 1596648 - DNA, 25 bp, Homo sapien
ctggtgctggaagttcttgtggcca

SEQ ID NO: 1596649 - DNA, 25 bp, Homo sapien
cctggtgctggaagttcttgtggcc

SEQ ID NO: 1596650 - DNA, 25 bp, Homo sapien
ccccagggaggacaggatgtgggct

SEQ ID NO: 1596651 - DNA, 25 bp, Homo sapien
tgccccagggaggacaggatgtggg

SEQ ID NO: 1596652 - DNA, 25 bp, Homo sapien
ccagggaggacaggatgtgggctgg

SEQ ID NO: 1596653 - DNA, 25 bp, Homo sapien
ctgccccagggaggacaggatgtgg

SEQ ID NO: 1596654 - DNA, 25 bp, Homo sapien
gtttctgcatagcacggttgatggc

SEQ ID NO: 1596655 - DNA, 25 bp, Homo sapien
tctcgaagccgtaaatgtccagcac

SEQ ID NO: 1596656 - DNA, 25 bp, Homo sapien
cacaccgatgctgtactcttcctgg

SEQ ID NO: 1596657 - DNA, 25 bp, Homo sapien
gggtttctgcatagcacggttgatg

SEQ ID NO: 1596658 - DNA, 25 bp, Homo sapien
caagtgtcagtgtatcagggtccct

SEQ ID NO: 1596659 - DNA, 25 bp, Homo sapien
tgtcagtgtatcagggtccctgact

SEQ ID NO: 1596660 - DNA, 25 bp, Homo sapien
acccaagtgtcagtgtatcagggtc

SEQ ID NO: 1596661 - DNA, 25 bp, Homo sapien
ccaagtgtcagtgtatcagggtccc

SEQ ID NO: 1596662 - DNA, 25 bp, Homo sapien
ggctgactccatacattaaaaaagt

SEQ ID NO: 1596663 - DNA, 25 bp, Homo sapien
gctgactccatacattaaaaaagtt

SEQ ID NO: 1596664 - DNA, 25 bp, Homo sapien
tagccagaactacacatgcacacca

SEQ ID NO: 1596665 - DNA, 25 bp, Homo sapien
cacccaactaatttgaaatttctgt

SEQ ID NO: 1596666 - DNA, 25 bp, Homo sapien
ggcctcaaagaatgctcccaactca

SEQ ID NO: 1596667 - DNA, 25 bp, Homo sapien
tgcactcagcttccataaatgtttg

SEQ ID NO: 1596668 - DNA, 25 bp, Homo sapien
actctgccttccagccccagcccca

SEQ ID NO: 1596669 - DNA, 25 bp, Homo sapien
ctctgccttccagccccagccccac

SEQ ID NO: 1596670 - DNA, 25 bp, Homo sapien
cccagagcatccactctgccttcca

SEQ ID NO: 1596671 - DNA, 25 bp, Homo sapien
agagcatccactctgccttccagcc

SEQ ID NO: 1596672 - DNA, 25 bp, Homo sapien
gcatcacgggtgtaggctgcctgct

SEQ ID NO: 1596673 - DNA, 25 bp, Homo sapien
cgaagaggcgggcatagagcccctt

SEQ ID NO: 1596674 - DNA, 25 bp, Homo sapien
agcggctgtccatcttgcggctggt

SEQ ID NO: 1596675 - DNA, 25 bp, Homo sapien
ccacgttgagggtcacattgatgga

SEQ ID NO: 1596676 - DNA, 25 bp, Homo sapien
ctaccagggcaaaggtcagggcaaa

SEQ ID NO: 1596677 - DNA, 25 bp, Homo sapien
cagggcaaaggtcagggcaaaaatg

SEQ ID NO: 1596678 - DNA, 25 bp, Homo sapien
gcaaaggtcagggcaaaaatgggac

SEQ ID NO: 1596679 - DNA, 25 bp, Homo sapien
caaaggtcagggcaaaaatgggaca

SEQ ID NO: 1596680 - DNA, 25 bp, Homo sapien
cacactctccactcgggcgtaattc

SEQ ID NO: 1596681 - DNA, 25 bp, Homo sapien
atccccgccacgagctgcaggacca

SEQ ID NO: 1596682 - DNA, 25 bp, Homo sapien
tcgggcgtaattcccgtcttcacag

SEQ ID NO: 1596683 - DNA, 25 bp, Homo sapien
aggtgcaagatccccgccacgagct

SEQ ID NO: 1596684 - DNA, 25 bp, Homo sapien
ctggcctgggcttcggtttcctaat

SEQ ID NO: 1596685 - DNA, 25 bp, Homo sapien
gggactggagtagaggccggtgctc

SEQ ID NO: 1596686 - DNA, 25 bp, Homo sapien
gactggagtagaggccggtgctcac

SEQ ID NO: 1596687 - DNA, 25 bp, Homo sapien
aatttgtaactcaggagggtttctg

SEQ ID NO: 1596688 - DNA, 25 bp, Homo sapien
atagtagtccggtgtcatgaggccc

SEQ ID NO: 1596689 - DNA, 25 bp, Homo sapien
aagtcgcttctgtcgtccgtgccgt

SEQ ID NO: 1596690 - DNA, 25 bp, Homo sapien
tgtccgattggttgaggtagtaata

SEQ ID NO: 1596691 - DNA, 25 bp, Homo sapien
agtctcaccaaagtcgcttctgtcg

SEQ ID NO: 1596692 - DNA, 25 bp, Homo sapien
tggagggtgtgccatgttcatgcat

SEQ ID NO: 1596693 - DNA, 25 bp, Homo sapien
gtgatccctcatctgccctgccatg

SEQ ID NO: 1596694 - DNA, 25 bp, Homo sapien
gagggtgtgccatgttcatgcatct

SEQ ID NO: 1596695 - DNA, 25 bp, Homo sapien
catgcatctggtgcttgcctggctc

SEQ ID NO: 1596696 - DNA, 25 bp, Homo sapien
cttcccattgtccaccccgctgggc

SEQ ID NO: 1596697 - DNA, 25 bp, Homo sapien
ttcccattgtccaccccgctgggct

SEQ ID NO: 1596698 - DNA, 25 bp, Homo sapien
cggctgaactggatctcaaagtact

SEQ ID NO: 1596699 - DNA, 25 bp, Homo sapien
ccacctcggctgaactggatctcaa

SEQ ID NO: 1596700 - DNA, 25 bp, Homo sapien
caagaagttggagatcttgccccca

SEQ ID NO: 1596701 - DNA, 25 bp, Homo sapien
attttgcatgaccacgcgggacttc

SEQ ID NO: 1596702 - DNA, 25 bp, Homo sapien
atccgagagaaccatgtcagcaccc

SEQ ID NO: 1596703 - DNA, 25 bp, Homo sapien
gagagaaccatgtcagcaccccagt

SEQ ID NO: 1596704 - DNA, 25 bp, Homo sapien
gaatccgagagaaccatgtcagcac

SEQ ID NO: 1596705 - DNA, 25 bp, Homo sapien
ctgaatccgagagaaccatgtcagc

SEQ ID NO: 1596706 - DNA, 25 bp, Homo sapien
tacctatcctgactttcactgggcc

SEQ ID NO: 1596707 - DNA, 25 bp, Homo sapien
gactctcttttgaaagggaccatga

SEQ ID NO: 1596708 - DNA, 25 bp, Homo sapien
cacacaaagaacgagtcccagaact

SEQ ID NO: 1596709 - DNA, 25 bp, Homo sapien
tcccagaactattgtcgaaagaagg

SEQ ID NO: 1596710 - DNA, 25 bp, Homo sapien
tggaattgttgttgcgcacagtctt

SEQ ID NO: 1596711 - DNA, 25 bp, Homo sapien
gcgcacagtcttggcgttgccgaag

SEQ ID NO: 1596712 - DNA, 25 bp, Homo sapien
ttgttgttgcgcacagtcttggcgt

SEQ ID NO: 1596713 - DNA, 25 bp, Homo sapien
actgcaggatgatatctttgacgtg

SEQ ID NO: 1596714 - DNA, 25 bp, Homo sapien
cagaggcaggtggagtgggaagaag

SEQ ID NO: 1596715 - DNA, 25 bp, Homo sapien
ggcaggtggagtgggaagaagtcag

SEQ ID NO: 1596716 - DNA, 25 bp, Homo sapien
gcagaggcaggtggagtgggaagaa

SEQ ID NO: 1596717 - DNA, 25 bp, Homo sapien
gaggcaggtggagtgggaagaagtc

SEQ ID NO: 1596718 - DNA, 25 bp, Homo sapien
ggaccttctcgcctccgccagacac

SEQ ID NO: 1596719 - DNA, 25 bp, Homo sapien
cgcctccgccagacaccttggagat

SEQ ID NO: 1596720 - DNA, 25 bp, Homo sapien
ctggaccttctcgcctccgccagac

SEQ ID NO: 1596721 - DNA, 25 bp, Homo sapien
tctcgcctccgccagacaccttgga

SEQ ID NO: 1596722 - DNA, 25 bp, Homo sapien
tggttctcacagtcgataagcatgt

SEQ ID NO: 1596723 - DNA, 25 bp, Homo sapien
cagtcgataagcatgttccggtaca

SEQ ID NO: 1596724 - DNA, 25 bp, Homo sapien
tacatgttgtccgtgagggcgtaga

SEQ ID NO: 1596725 - DNA, 25 bp, Homo sapien
taatgatgacacactggttctcaca

SEQ ID NO: 1596726 - DNA, 25 bp, Homo sapien
gagtctgggggctgtgcctcccacc

SEQ ID NO: 1596727 - DNA, 25 bp, Homo sapien
aggggaggtcaggtctcagcccagg

SEQ ID NO: 1596728 - DNA, 25 bp, Homo sapien
gggccaggagtctgggggctgtgcc

SEQ ID NO: 1596729 - DNA, 25 bp, Homo sapien
tggcaggggaggtcaggtctcagcc

SEQ ID NO: 1596730 - DNA, 25 bp, Homo sapien
tagaggtcgatctcacggtcggtga

SEQ ID NO: 1596731 - DNA, 25 bp, Homo sapien
cgcgccctgatagaggtcgatctca

SEQ ID NO: 1596732 - DNA, 25 bp, Homo sapien
cacggtcggtgaagtagggcatctg

SEQ ID NO: 1596733 - DNA, 25 bp, Homo sapien
tgatagaggtcgatctcacggtcgg

SEQ ID NO: 1596734 - DNA, 25 bp, Homo sapien
gaaggggtttacagagatgagcaca

SEQ ID NO: 1596735 - DNA, 25 bp, Homo sapien
tgcttcacgttgtggctctgccagt

SEQ ID NO: 1596736 - DNA, 25 bp, Homo sapien
gaagatgtagtcgtccatgaagcgc

SEQ ID NO: 1596737 - DNA, 25 bp, Homo sapien
tctgccagtggaagcgctccttgct

SEQ ID NO: 1596738 - DNA, 25 bp, Homo sapien
gcggcaatggcgtcttcggtgatct

SEQ ID NO: 1596739 - DNA, 25 bp, Homo sapien
gcttctgggttctgtcccacctccc

SEQ ID NO: 1596740 - DNA, 25 bp, Homo sapien
gctatcagcttctgggttctgtccc

SEQ ID NO: 1596741 - DNA, 25 bp, Homo sapien
atcagcttctgggttctgtcccacc

SEQ ID NO: 1596742 - DNA, 25 bp, Homo sapien
tcagcttctgggttctgtcccacct

SEQ ID NO: 1596743 - DNA, 25 bp, Homo sapien
cgttggacacgctcatctcgaactc

SEQ ID NO: 1596744 - DNA, 25 bp, Homo sapien
accacgttggacacgctcatctcga

SEQ ID NO: 1596745 - DNA, 25 bp, Homo sapien
tttcaagatggggagaccagatggt

SEQ ID NO: 1596746 - DNA, 25 bp, Homo sapien
ccagatggttgatgagaagagacaa

SEQ ID NO: 1596747 - DNA, 25 bp, Homo sapien
tgtgtctggctaggcccatcagccc

SEQ ID NO: 1596748 - DNA, 25 bp, Homo sapien
ggtcagctgtgtctggctaggccca

SEQ ID NO: 1596749 - DNA, 25 bp, Homo sapien
gctctcccggctctgacgacttggt

SEQ ID NO: 1596750 - DNA, 25 bp, Homo sapien
ggctctgacgacttggttcctcttc

SEQ ID NO: 1596751 - DNA, 25 bp, Homo sapien
caagatggctgttaatagtgtggcc

SEQ ID NO: 1596752 - DNA, 25 bp, Homo sapien
tgtccagtgtaaatgctagcgttcc

SEQ ID NO: 1596753 - DNA, 25 bp, Homo sapien
gggtgcaaatctcacaggctgctct

SEQ ID NO: 1596754 - DNA, 25 bp, Homo sapien
gagcttttgcaactcaccccatggg

SEQ ID NO: 1596755 - DNA, 25 bp, Homo sapien
gttcctggccctgtgactgtacctt

SEQ ID NO: 1596756 - DNA, 25 bp, Homo sapien
gaatccttcagcgatcttcctggca

SEQ ID NO: 1596757 - DNA, 25 bp, Homo sapien
cacccggccgggcattagattgtca

SEQ ID NO: 1596758 - DNA, 25 bp, Homo sapien
tttctaacagacagaccatggcccg

SEQ ID NO: 1596759 - DNA, 25 bp, Homo sapien
atcatcctctgcgatacgggtggcc

SEQ ID NO: 1596760 - DNA, 25 bp, Homo sapien
ctcactgactgaatgacgagaaatg

SEQ ID NO: 1596761 - DNA, 25 bp, Homo sapien
tcacagccacatgctctcatcctca

SEQ ID NO: 1596762 - DNA, 25 bp, Homo sapien
gaatgacgagaaatgaaagctgaag

SEQ ID NO: 1596763 - DNA, 25 bp, Homo sapien
gactgaatgacgagaaatgaaagct

SEQ ID NO: 1596764 - DNA, 25 bp, Homo sapien
aggctcctgaatgggtcgtgatgga

SEQ ID NO: 1596765 - DNA, 25 bp, Homo sapien
tctgcccgttcaccggactcccggc

SEQ ID NO: 1596766 - DNA, 25 bp, Homo sapien
gccctgcttctgcccgttcaccgga

SEQ ID NO: 1596767 - DNA, 25 bp, Homo sapien
caggttcagggggatcttgggggtg

SEQ ID NO: 1596768 - DNA, 25 bp, Homo sapien
tcacagtacatattccgatcaaagg

SEQ ID NO: 1596769 - DNA, 25 bp, Homo sapien
ggtctcactatgtgaactggaaggg

SEQ ID NO: 1596770 - DNA, 25 bp, Homo sapien
taaataacttccggctccgtctcac

SEQ ID NO: 1596771 - DNA, 25 bp, Homo sapien
ctaagggtgggttcaaagggtgctg

SEQ ID NO: 1596772 - DNA, 25 bp, Homo sapien
ggcggaagtaggctcggctgcagaa

SEQ ID NO: 1596773 - DNA, 25 bp, Homo sapien
gggcagtaggcgaccttgttcacat

SEQ ID NO: 1596774 - DNA, 25 bp, Homo sapien
aagtaggctcggctgcagaactgaa

SEQ ID NO: 1596775 - DNA, 25 bp, Homo sapien
gaaatttgagcaccagggggcagta

SEQ ID NO: 1596776 - DNA, 25 bp, Homo sapien
taatagcaccgatgtcactaggctg

SEQ ID NO: 1596777 - DNA, 25 bp, Homo sapien
tcctcaactatcaaagggggcttat

SEQ ID NO: 1596778 - DNA, 25 bp, Homo sapien
gggcttataatagcaccgatgtcac

SEQ ID NO: 1596779 - DNA, 25 bp, Homo sapien
gatgtcactaggctgttttgaggat

SEQ ID NO: 1596780 - DNA, 25 bp, Homo sapien
gactatggatggatatgagcttcca

SEQ ID NO: 1596781 - DNA, 25 bp, Homo sapien
tgagcttccatctagcggccagtga

SEQ ID NO: 1596782 - DNA, 25 bp, Homo sapien
ggcgaattaaaagctacagatggat

SEQ ID NO: 1596783 - DNA, 25 bp, Homo sapien
gccagtgatttatggcaggaccagg

SEQ ID NO: 1596784 - DNA, 25 bp, Homo sapien
tggctcttgcctgtagtccttgggg

SEQ ID NO: 1596785 - DNA, 25 bp, Homo sapien
gtctctatcaaagaatacaagaata

SEQ ID NO: 1596786 - DNA, 25 bp, Homo sapien
caaagtgagtcccggtctcaaaaat

SEQ ID NO: 1596787 - DNA, 25 bp, Homo sapien
agatcgctctactgcactccaacgt

SEQ ID NO: 1596788 - DNA, 25 bp, Homo sapien
cgtgcgacgcctggcccgtgtggct

SEQ ID NO: 1596789 - DNA, 25 bp, Homo sapien
tgcccgacgccgcactgtgcagagc

SEQ ID NO: 1596790 - DNA, 25 bp, Homo sapien
ggcctccgtgcactcgtgcgacgcc

SEQ ID NO: 1596791 - DNA, 25 bp, Homo sapien
tggtgcagcgcaccgagcgctgccg

SEQ ID NO: 1596792 - DNA, 25 bp, Homo sapien
catggtggccggtggcttggcggcg

SEQ ID NO: 1596793 - DNA, 25 bp, Homo sapien
cgctcttgcaaaggaccacgcggtg

SEQ ID NO: 1596794 - DNA, 25 bp, Homo sapien
cagcgtggcgcggtggtctgcgctc

SEQ ID NO: 1596795 - DNA, 25 bp, Homo sapien
gggcagcggcgcaagttgcagcgca

SEQ ID NO: 1596796 - DNA, 25 bp, Homo sapien
acgcctgcatcgcagctgcggctgc

SEQ ID NO: 1596797 - DNA, 25 bp, Homo sapien
gtggcaggcctccagtacaggtggg

SEQ ID NO: 1596798 - DNA, 25 bp, Homo sapien
tgcagagcgaccagttccctacaac

SEQ ID NO: 1596799 - DNA, 25 bp, Homo sapien
ggcatgcgctgtcgtccagcgcctt

SEQ ID NO: 1596800 - DNA, 25 bp, Homo sapien
cactgcagtagtggggggcgaccgc

SEQ ID NO: 1596801 - DNA, 25 bp, Homo sapien
ttgcaggcgcgctgccttttgggca

SEQ ID NO: 1596802 - DNA, 25 bp, Homo sapien
ctccgtgttgcaggcgcgctgcctt

SEQ ID NO: 1596803 - DNA, 25 bp, Homo sapien
agctgtccagctggttgcggcactc

SEQ ID NO: 1596804 - DNA, 25 bp, Homo sapien
ccagggcgcatagtgccaggagtag

SEQ ID NO: 1596805 - DNA, 25 bp, Homo sapien
agtcacgggcgatgggggcattgaa

SEQ ID NO: 1596806 - DNA, 25 bp, Homo sapien
ggcattgaagcggtagcggagggca

SEQ ID NO: 1596807 - DNA, 25 bp, Homo sapien
agtaggggggcagcgagtcacgggc

SEQ ID NO: 1596808 - DNA, 25 bp, Homo sapien
ctggtctggcccctgtcgcagttga

SEQ ID NO: 1596809 - DNA, 25 bp, Homo sapien
cgatgagagatgcattaatcggtcc

SEQ ID NO: 1596810 - DNA, 25 bp, Homo sapien
tctggcccctgtcgcagttgaaagg

SEQ ID NO: 1596811 - DNA, 25 bp, Homo sapien
attaatcggtcccagggcttcgagg

SEQ ID NO: 1596812 - DNA, 25 bp, Homo sapien
gcagggactcctggtctcccttcag

SEQ ID NO: 1596813 - DNA, 25 bp, Homo sapien
ctagaggcagacggtggggctgggg

SEQ ID NO: 1596814 - DNA, 25 bp, Homo sapien
agggactcctggtctcccttcaggg

SEQ ID NO: 1596815 - DNA, 25 bp, Homo sapien
agcagcagggactcctggtctccct

SEQ ID NO: 1596816 - DNA, 25 bp, Homo sapien
ggagcctttgggaatccagacgaca

SEQ ID NO: 1596817 - DNA, 25 bp, Homo sapien
ggatgaagatgtggacggagccttt

SEQ ID NO: 1596818 - DNA, 25 bp, Homo sapien
tgtggacggagcctttgggaatcca

SEQ ID NO: 1596819 - DNA, 25 bp, Homo sapien
tgggaatccagacgacatcctcgta

SEQ ID NO: 1596820 - DNA, 25 bp, Homo sapien
tcccgcaggtcggagcccaggactc

SEQ ID NO: 1596821 - DNA, 25 bp, Homo sapien
cacacactcggcacttgtcctcccg

SEQ ID NO: 1596822 - DNA, 25 bp, Homo sapien
tcggcacttgtcctcccgcaggtcg

SEQ ID NO: 1596823 - DNA, 25 bp, Homo sapien
cccaggactcggtcgcagcccacgt

SEQ ID NO: 1596824 - DNA, 25 bp, Homo sapien
aagttgaagccttccgctaggcacg

SEQ ID NO: 1596825 - DNA, 25 bp, Homo sapien
gccgccctctccgtgtagaagttga

SEQ ID NO: 1596826 - DNA, 25 bp, Homo sapien
aatgtccaccgtgtctggacggcag

SEQ ID NO: 1596827 - DNA, 25 bp, Homo sapien
cttgcattcgccactgacgcaaatg

SEQ ID NO: 1596828 - DNA, 25 bp, Homo sapien
aggccaccccggaactctttgcttg

SEQ ID NO: 1596829 - DNA, 25 bp, Homo sapien
ggccccgtcacaccacgggccaggc

SEQ ID NO: 1596830 - DNA, 25 bp, Homo sapien
tggggggcacggccccgtcacacca

SEQ ID NO: 1596831 - DNA, 25 bp, Homo sapien
caggccaccccggaactctttgctt

SEQ ID NO: 1596832 - DNA, 25 bp, Homo sapien
tgctgtcaaattcagaacactgcac

SEQ ID NO: 1596833 - DNA, 25 bp, Homo sapien
atgctgtcaaattcagaacactgca

SEQ ID NO: 1596834 - DNA, 25 bp, Homo sapien
ccttctctcacccagacagtacttg

SEQ ID NO: 1596835 - DNA, 25 bp, Homo sapien
tgcaggagcggtgccgccttctctc

SEQ ID NO: 1596836 - DNA, 25 bp, Homo sapien
atccgtgttgcaggagcggtgccgc

SEQ ID NO: 1596837 - DNA, 25 bp, Homo sapien
cagacagtacttgcccccgatggtt

SEQ ID NO: 1596838 - DNA, 25 bp, Homo sapien
ggacacagacccgtttgtagcacca

SEQ ID NO: 1596839 - DNA, 25 bp, Homo sapien
tgacggctagaagaggacacgccgc

SEQ ID NO: 1596840 - DNA, 25 bp, Homo sapien
ctctgggcgcgacccaaaggggaca

SEQ ID NO: 1596841 - DNA, 25 bp, Homo sapien
tccggctgcagtcgccccatggagt

SEQ ID NO: 1596842 - DNA, 25 bp, Homo sapien
gggtctgaacatgcgaacagagtca

SEQ ID NO: 1596843 - DNA, 25 bp, Homo sapien
gagtccagcccggaggacactcgtc

SEQ ID NO: 1596844 - DNA, 25 bp, Homo sapien
acagagtcaggttacgtaggagagt

SEQ ID NO: 1596845 - DNA, 25 bp, Homo sapien
gccagagatatcagcctctccggga

SEQ ID NO: 1596846 - DNA, 25 bp, Homo sapien
ccccttgtcgatggtgtgcgtctgg

SEQ ID NO: 1596847 - DNA, 25 bp, Homo sapien
ggttgctcttgctcagacaccacag

SEQ ID NO: 1596848 - DNA, 25 bp, Homo sapien
tgctgttggtgatgcaccggttgct

SEQ ID NO: 1596849 - DNA, 25 bp, Homo sapien
tgtgcgtctggcacagcgtgccctc

SEQ ID NO: 1596850 - DNA, 25 bp, Homo sapien
ctggatgatgactaggccaacggcc

SEQ ID NO: 1596851 - DNA, 25 bp, Homo sapien
tcttactgggagaaaaccaagcttc

SEQ ID NO: 1596852 - DNA, 25 bp, Homo sapien
ggttctgagaaatcggcctggatga

SEQ ID NO: 1596853 - DNA, 25 bp, Homo sapien
caagcttcagacaggtaaggtcaca

SEQ ID NO: 1596854 - DNA, 25 bp, Homo sapien
ctgaatcctggatgggctgaactag

SEQ ID NO: 1596855 - DNA, 25 bp, Homo sapien
cactctgactcttaaagtccaggtt

SEQ ID NO: 1596856 - DNA, 25 bp, Homo sapien
gactcttaaagtccaggttaatatc

SEQ ID NO: 1596857 - DNA, 25 bp, Homo sapien
ccgtctgaatcctggatgggctgaa

SEQ ID NO: 1596858 - DNA, 25 bp, Homo sapien
tcagcccctgagagatacctgtaca

SEQ ID NO: 1596859 - DNA, 25 bp, Homo sapien
cagcgtctttcctctaaaaagtagg

SEQ ID NO: 1596860 - DNA, 25 bp, Homo sapien
gactggatcgatcaatggccacagg

SEQ ID NO: 1596861 - DNA, 25 bp, Homo sapien
tcctctaagaagtaggtggtccttc

SEQ ID NO: 1596862 - DNA, 25 bp, Homo sapien
aaaaactgccccgtgagaggtcttg

SEQ ID NO: 1596863 - DNA, 25 bp, Homo sapien
caagcactgtctgattgcttaggac

SEQ ID NO: 1596864 - DNA, 25 bp, Homo sapien
aagcaggtgatcccatttttgttcc

SEQ ID NO: 1596865 - DNA, 25 bp, Homo sapien
taggacattttgcacactccatgca

SEQ ID NO: 1596866 - DNA, 25 bp, Homo sapien
tgggtgccctggtggagttccctcc

SEQ ID NO: 1596867 - DNA, 25 bp, Homo sapien
ctcccctcccaggaaggaaagcagg

SEQ ID NO: 1596868 - DNA, 25 bp, Homo sapien
aggaaagcaggaagactctctctac

SEQ ID NO: 1596869 - DNA, 25 bp, Homo sapien
tcccaggtgggtgccctggtggagt

SEQ ID NO: 1596870 - DNA, 25 bp, Homo sapien
actgacgcgatttgactccatgctg

SEQ ID NO: 1596871 - DNA, 25 bp, Homo sapien
cactgtcgggtacacaaagtcctgt

SEQ ID NO: 1596872 - DNA, 25 bp, Homo sapien
ttggcccggtgccactgtcgggtac

SEQ ID NO: 1596873 - DNA, 25 bp, Homo sapien
gactccatgctgaaagcggcattgc

SEQ ID NO: 1596874 - DNA, 25 bp, Homo sapien
tggggggccggttgttcaggcagag

SEQ ID NO: 1596875 - DNA, 25 bp, Homo sapien
ggggggccggttgttcaggcagagc

SEQ ID NO: 1596876 - DNA, 25 bp, Homo sapien
ctggggggccggttgttcaggcaga

SEQ ID NO: 1596877 - DNA, 25 bp, Homo sapien
gggggccggttgttcaggcagagcc

SEQ ID NO: 1596878 - DNA, 25 bp, Homo sapien
ccaccatgagtgtgacccgctctga

SEQ ID NO: 1596879 - DNA, 25 bp, Homo sapien
tttctatcgtctcccgtgtaccctg

SEQ ID NO: 1596880 - DNA, 25 bp, Homo sapien
ccatgagtgtgacccgctctgaggg

SEQ ID NO: 1596881 - DNA, 25 bp, Homo sapien
cagggagcatccctgatttctatcg

SEQ ID NO: 1596882 - DNA, 25 bp, Homo sapien
tggtcttcatggtaatgtgggcagc

SEQ ID NO: 1596883 - DNA, 25 bp, Homo sapien
cacgccgtcatggttcatgccgaat

SEQ ID NO: 1596884 - DNA, 25 bp, Homo sapien
aggatgaccacacgaatgggttggt

SEQ ID NO: 1596885 - DNA, 25 bp, Homo sapien
tgtagtcacggctgcaggatgacca

SEQ ID NO: 1596886 - DNA, 25 bp, Homo sapien
tcggctctgccgggcgctgagggac

SEQ ID NO: 1596887 - DNA, 25 bp, Homo sapien
cggctctgccgggcgctgagggacc

SEQ ID NO: 1596888 - DNA, 25 bp, Homo sapien
ggctctgccgggcgctgagggaccc

SEQ ID NO: 1596889 - DNA, 25 bp, Homo sapien
ctcattgacgctgcagcttctctcg

SEQ ID NO: 1596890 - DNA, 25 bp, Homo sapien
ccaggccaatgtcctcattgacgct

SEQ ID NO: 1596891 - DNA, 25 bp, Homo sapien
gcccgatctcgtgggcaatggtgaa

SEQ ID NO: 1596892 - DNA, 25 bp, Homo sapien
tctcgtgggcaatggtgaacgctgt

SEQ ID NO: 1596893 - DNA, 25 bp, Homo sapien
ggaagacggacatgtggggatgggg

SEQ ID NO: 1596894 - DNA, 25 bp, Homo sapien
ctagtgtgccgcagggtttgttctt

SEQ ID NO: 1596895 - DNA, 25 bp, Homo sapien
gttcttgtagatgcagatgtcatag

SEQ ID NO: 1596896 - DNA, 25 bp, Homo sapien
ttgttcttgtagatgcagatgtcat

SEQ ID NO: 1596897 - DNA, 25 bp, Homo sapien
gtgtgccgcagggtttgttcttgta

SEQ ID NO: 1596898 - DNA, 25 bp, Homo sapien
gggttgagtcctgccttggaggcgc

SEQ ID NO: 1596899 - DNA, 25 bp, Homo sapien
tctccctaagccctgctgatgccac

SEQ ID NO: 1596900 - DNA, 25 bp, Homo sapien
gtcctgccttggaggcgccatctgc

SEQ ID NO: 1596901 - DNA, 25 bp, Homo sapien
tgagtcctgccttggaggcgccatc

SEQ ID NO: 1596902 - DNA, 25 bp, Homo sapien
tcccggcatggtgggtgatctccag

SEQ ID NO: 1596903 - DNA, 25 bp, Homo sapien
tgtgtcatggttagccacaccgttc

SEQ ID NO: 1596904 - DNA, 25 bp, Homo sapien
gctgtggttcacgatggatttctgc

SEQ ID NO: 1596905 - DNA, 25 bp, Homo sapien
tacagaagctgtccagggacttccc

SEQ ID NO: 1596906 - DNA, 25 bp, Homo sapien
tgaggcgagttacgaggatgttaac

SEQ ID NO: 1596907 - DNA, 25 bp, Homo sapien
ccagactcgagtcctggaaaagttt

SEQ ID NO: 1596908 - DNA, 25 bp, Homo sapien
tgttaacggtgcttcccagactcga

SEQ ID NO: 1596909 - DNA, 25 bp, Homo sapien
tacgaggatgttaacggtgcttccc

SEQ ID NO: 1596910 - DNA, 25 bp, Homo sapien
ctccaagaaacaagagagaccgagt

SEQ ID NO: 1596911 - DNA, 25 bp, Homo sapien
tcttaggctaaacctgctattaggg

SEQ ID NO: 1596912 - DNA, 25 bp, Homo sapien
caatgataacagcttgctttcatca

SEQ ID NO: 1596913 - DNA, 25 bp, Homo sapien
gcccagccatgtatcagtcttttca

SEQ ID NO: 1596914 - DNA, 25 bp, Homo sapien
cacctactgtgtgtcgggtcttagg

SEQ ID NO: 1596915 - DNA, 25 bp, Homo sapien
ctgagggatatacatgtctgagttc

SEQ ID NO: 1596916 - DNA, 25 bp, Homo sapien
tgtctgaaggtaccaatttgcccat

SEQ ID NO: 1596917 - DNA, 25 bp, Homo sapien
cattccacagctgtctgaaggtacc

SEQ ID NO: 1596918 - DNA, 25 bp, Homo sapien
ggatatacatgtctgagttcattcc

SEQ ID NO: 1596919 - DNA, 25 bp, Homo sapien
tcatgatggccaggacatactgctc

SEQ ID NO: 1596920 - DNA, 25 bp, Homo sapien
tcggctgaccgatcgcttcaggcct

SEQ ID NO: 1596921 - DNA, 25 bp, Homo sapien
gcggtggcttcaaggtccgcagcca

SEQ ID NO: 1596922 - DNA, 25 bp, Homo sapien
cctggctggccacgctctgtttcat

SEQ ID NO: 1596923 - DNA, 25 bp, Homo sapien
tctatagggcatcttggcggtacca

SEQ ID NO: 1596924 - DNA, 25 bp, Homo sapien
ttgttttgtctatagggcatcttgg

SEQ ID NO: 1596925 - DNA, 25 bp, Homo sapien
tatagggcatcttggcggtaccatc

SEQ ID NO: 1596926 - DNA, 25 bp, Homo sapien
ttgtctatagggcatcttggcggta

SEQ ID NO: 1596927 - DNA, 25 bp, Homo sapien
ttcttaaatgcctgattgtacaacc

SEQ ID NO: 1596928 - DNA, 25 bp, Homo sapien
caccatgcccgaactgacctggttt

SEQ ID NO: 1596929 - DNA, 25 bp, Homo sapien
taaatgcctgattgtacaaccatcc

SEQ ID NO: 1596930 - DNA, 25 bp, Homo sapien
cctagcagtacgattgtgttggtaa

SEQ ID NO: 1596931 - DNA, 25 bp, Homo sapien
gctgtataactgctggagtatctga

SEQ ID NO: 1596932 - DNA, 25 bp, Homo sapien
cagtctgatcgtaaatctggccttt

SEQ ID NO: 1596933 - DNA, 25 bp, Homo sapien
ggccttttggctgtataactgctgg

SEQ ID NO: 1596934 - DNA, 25 bp, Homo sapien
tacaaccaccacaccgtctaactgt

SEQ ID NO: 1596935 - DNA, 25 bp, Homo sapien
tcagtgctgggctaggtgactatag

SEQ ID NO: 1596936 - DNA, 25 bp, Homo sapien
tctggctgtcttactcagtgctggg

SEQ ID NO: 1596937 - DNA, 25 bp, Homo sapien
tgaacacctttctggctgtcttact

SEQ ID NO: 1596938 - DNA, 25 bp, Homo sapien
taggtgactatagcagggataagat

SEQ ID NO: 1596939 - DNA, 25 bp, Homo sapien
cgcagagaggaacgcttgtacacca

SEQ ID NO: 1596940 - DNA, 25 bp, Homo sapien
tgtggtccactttcctccgggctcc

SEQ ID NO: 1596941 - DNA, 25 bp, Homo sapien
cctcgtctgccacgatcaggccgtg

SEQ ID NO: 1596942 - DNA, 25 bp, Homo sapien
tcaatcaggtactcttcctcgtctg

SEQ ID NO: 1596943 - DNA, 25 bp, Homo sapien
tcagccttacctaaggctatacatt

SEQ ID NO: 1596944 - DNA, 25 bp, Homo sapien
gtttagctcattaattttcagcctt

SEQ ID NO: 1596945 - DNA, 25 bp, Homo sapien
ttcagccttacctaaggctatacat

SEQ ID NO: 1596946 - DNA, 25 bp, Homo sapien
tttgagattgatgtttagctcatta

SEQ ID NO: 1596947 - DNA, 25 bp, Homo sapien
agtactccacggagacgtgccctgc

SEQ ID NO: 1596948 - DNA, 25 bp, Homo sapien
gcgatctcatagctctccagactgg

SEQ ID NO: 1596949 - DNA, 25 bp, Homo sapien
aaggccagcagtgccccgttgtggt

SEQ ID NO: 1596950 - DNA, 25 bp, Homo sapien
tgccctgccagtagacgggagctgc

SEQ ID NO: 1596951 - DNA, 25 bp, Homo sapien
cgtgcgtgacctcgaacatgaggcc

SEQ ID NO: 1596952 - DNA, 25 bp, Homo sapien
gcgtgacctcgaacatgaggcccag

SEQ ID NO: 1596953 - DNA, 25 bp, Homo sapien
accggaaggcgtgcgtgacctcgaa

SEQ ID NO: 1596954 - DNA, 25 bp, Homo sapien
aggcgtgcgtgacctcgaacatgag

SEQ ID NO: 1596955 - DNA, 25 bp, Homo sapien
gttcacagccttcgcagcatcaccg

SEQ ID NO: 1596956 - DNA, 25 bp, Homo sapien
acagccttcgcagcatcaccgggct

SEQ ID NO: 1596957 - DNA, 25 bp, Homo sapien
tcacagccttcgcagcatcaccggg

SEQ ID NO: 1596958 - DNA, 25 bp, Homo sapien
ctgttcacagccttcgcagcatcac

SEQ ID NO: 1596959 - DNA, 25 bp, Homo sapien
ggtggagtagtgttgggcccctgta

SEQ ID NO: 1596960 - DNA, 25 bp, Homo sapien
tgtacggatccttccctcgcctgct

SEQ ID NO: 1596961 - DNA, 25 bp, Homo sapien
tgttgggcccctgtacggatccttc

SEQ ID NO: 1596962 - DNA, 25 bp, Homo sapien
ggcttcggttggtggagtagtgttg

SEQ ID NO: 1596963 - DNA, 25 bp, Homo sapien
tggtgtcgaggtgtgacacagccca

SEQ ID NO: 1596964 - DNA, 25 bp, Homo sapien
agaaggctcacaggcgtctgagctg

SEQ ID NO: 1596965 - DNA, 25 bp, Homo sapien
cagcccacagggtggtgtcgaggtg

SEQ ID NO: 1596966 - DNA, 25 bp, Homo sapien
cagaaggctcacaggcgtctgagct

SEQ ID NO: 1596967 - DNA, 25 bp, Homo sapien
ctgcgccgcgcccggggcctccgcg

SEQ ID NO: 1596968 - DNA, 25 bp, Homo sapien
gcgcccggggcctccgcgccgtcgc

SEQ ID NO: 1596969 - DNA, 25 bp, Homo sapien
cgcgcccggggcctccgcgccgtcg

SEQ ID NO: 1596970 - DNA, 25 bp, Homo sapien
cgccgcgcccggggcctccgcgccg

SEQ ID NO: 1596971 - DNA, 25 bp, Homo sapien
gtttgtgtgcctggcccaagtgtga

SEQ ID NO: 1596972 - DNA, 25 bp, Homo sapien
ccagggagcagacgtgaggtttgtg

SEQ ID NO: 1596973 - DNA, 25 bp, Homo sapien
tgtgaggtggatgctgtcacagttc

SEQ ID NO: 1596974 - DNA, 25 bp, Homo sapien
cccaagtgtgaggtggatgctgtca

SEQ ID NO: 1596975 - DNA, 25 bp, Homo sapien
tccagttcttcatctagaaccagct

SEQ ID NO: 1596976 - DNA, 25 bp, Homo sapien
ggactgcgggtccaacttcagaaaa

SEQ ID NO: 1596977 - DNA, 25 bp, Homo sapien
cagttcttcatctagaaccagctgt

SEQ ID NO: 1596978 - DNA, 25 bp, Homo sapien
ggaggaaggtatcggactgcgggtc

SEQ ID NO: 1596979 - DNA, 25 bp, Homo sapien
tatagccctgttcgtgggcacagag

SEQ ID NO: 1596980 - DNA, 25 bp, Homo sapien
gtgggcacagagttctctgccatgg

SEQ ID NO: 1596981 - DNA, 25 bp, Homo sapien
ccatggcactttgttggttgacaat

SEQ ID NO: 1596982 - DNA, 25 bp, Homo sapien
ctgggatatctccattatagccctg

SEQ ID NO: 1596983 - DNA, 25 bp, Homo sapien
gcataacacagcatagagcgtgatg

SEQ ID NO: 1596984 - DNA, 25 bp, Homo sapien
cgtgatgaccggcttggagtttacc

SEQ ID NO: 1596985 - DNA, 25 bp, Homo sapien
ccggcttggagtttaccaggctgtc

SEQ ID NO: 1596986 - DNA, 25 bp, Homo sapien
catagagcgtgatgaccggcttgga

SEQ ID NO: 1596987 - DNA, 25 bp, Homo sapien
ctccttgggcaggtcgtgctgtatg

SEQ ID NO: 1596988 - DNA, 25 bp, Homo sapien
ccagaactggtttagttctgagacg

SEQ ID NO: 1596989 - DNA, 25 bp, Homo sapien
gctgtatgggataagcccagaactg

SEQ ID NO: 1596990 - DNA, 25 bp, Homo sapien
tctgagacgagggtgcagatagtat

SEQ ID NO: 1596991 - DNA, 25 bp, Homo sapien
tgtttcccagtaatgccagaggctg

SEQ ID NO: 1596992 - DNA, 25 bp, Homo sapien
aaaggagttctgactgtttcccagt

SEQ ID NO: 1596993 - DNA, 25 bp, Homo sapien
gagttctgactgtttcccagtaatg

SEQ ID NO: 1596994 - DNA, 25 bp, Homo sapien
tgactgtttcccagtaatgccagag

SEQ ID NO: 1596995 - DNA, 25 bp, Homo sapien
gctggacagagaggctttgtccaag

SEQ ID NO: 1596996 - DNA, 25 bp, Homo sapien
ggctggacagagaggctttgtccaa

SEQ ID NO: 1596997 - DNA, 25 bp, Homo sapien
gggagactttagctgtggccagctc

SEQ ID NO: 1596998 - DNA, 25 bp, Homo sapien
aggggctggacaagcaggtcttcct

SEQ ID NO: 1596999 - DNA, 25 bp, Homo sapien
atgggagactttagctgtggccagc

SEQ ID NO: 1597000 - DNA, 25 bp, Homo sapien
caggggctggacaagcaggtcttcc

SEQ ID NO: 1597001 - DNA, 25 bp, Homo sapien
ttactctccagtgatgtccctgagt

SEQ ID NO: 1597002 - DNA, 25 bp, Homo sapien
tcctggtggggctgtttactctcca

SEQ ID NO: 1597003 - DNA, 25 bp, Homo sapien
atgtccctgagtctgggccatccca

SEQ ID NO: 1597004 - DNA, 25 bp, Homo sapien
ggcagacaccaggtgcggggacacc

SEQ ID NO: 1597005 - DNA, 25 bp, Homo sapien
ggggagacagcgtccagagcaggtg

SEQ ID NO: 1597006 - DNA, 25 bp, Homo sapien
gagacagcgtccagagcaggtgagg

SEQ ID NO: 1597007 - DNA, 25 bp, Homo sapien
ggagacagcgtccagagcaggtgag

SEQ ID NO: 1597008 - DNA, 25 bp, Homo sapien
gggagacagcgtccagagcaggtga

SEQ ID NO: 1597009 - DNA, 25 bp, Homo sapien
gcctttttacttctacgggtgcagc

SEQ ID NO: 1597010 - DNA, 25 bp, Homo sapien
ctgtcctgcctttttacttctacgg

SEQ ID NO: 1597011 - DNA, 25 bp, Homo sapien
cttcctgaagcccaccttctcctgc

SEQ ID NO: 1597012 - DNA, 25 bp, Homo sapien
cgcttgttttcccacctggctccaa

SEQ ID NO: 1597013 - DNA, 25 bp, Homo sapien
cgcccaatgtttccctgctgcgccc

SEQ ID NO: 1597014 - DNA, 25 bp, Homo sapien
tgccgccgcccaatgtttccctgct

SEQ ID NO: 1597015 - DNA, 25 bp, Homo sapien
cgccgcccaatgtttccctgctgcg

SEQ ID NO: 1597016 - DNA, 25 bp, Homo sapien
acagctgccgccgcccaatgtttcc

SEQ ID NO: 1597017 - DNA, 25 bp, Homo sapien
ctgtgctaggtgaatggaagagcat

SEQ ID NO: 1597018 - DNA, 25 bp, Homo sapien
ctctgtactctgttggcctctgagt

SEQ ID NO: 1597019 - DNA, 25 bp, Homo sapien
taaacttctctgtactctgttggcc

SEQ ID NO: 1597020 - DNA, 25 bp, Homo sapien
gagtcttctggtaactgtagcttca

SEQ ID NO: 1597021 - DNA, 25 bp, Homo sapien
tgtccttttaaacttctctgtactc

SEQ ID NO: 1597022 - DNA, 25 bp, Homo sapien
gtcttgcttgatagtatggtgtcca

SEQ ID NO: 1597023 - DNA, 25 bp, Homo sapien
taagagtatcactacccactgatgt

SEQ ID NO: 1597024 - DNA, 25 bp, Homo sapien
gtatttcgggcggagacacagtgca

SEQ ID NO: 1597025 - DNA, 25 bp, Homo sapien
gcatctgccccatgactgcagtgga

SEQ ID NO: 1597026 - DNA, 25 bp, Homo sapien
gcagaggctttactgcccccacgcc

SEQ ID NO: 1597027 - DNA, 25 bp, Homo sapien
agaggctttactgcccccacgccct

SEQ ID NO: 1597028 - DNA, 25 bp, Homo sapien
cagaggctttactgcccccacgccc

SEQ ID NO: 1597029 - DNA, 25 bp, Homo sapien
ccttctggaagtcggaggccacgta

SEQ ID NO: 1597030 - DNA, 25 bp, Homo sapien
catttgcggtacacgatatagggac

SEQ ID NO: 1597031 - DNA, 25 bp, Homo sapien
gagaagcacgttttgggccaagtcc

SEQ ID NO: 1597032 - DNA, 25 bp, Homo sapien
tccagtgacaacttgcggagactct

SEQ ID NO: 1597033 - DNA, 25 bp, Homo sapien
gcttgttcaccacgttgggactggg

SEQ ID NO: 1597034 - DNA, 25 bp, Homo sapien
aggacttggggcgacttgcatccat

SEQ ID NO: 1597035 - DNA, 25 bp, Homo sapien
ggcctccagggaggactgggattcc

SEQ ID NO: 1597036 - DNA, 25 bp, Homo sapien
ccatgccggggaagtcccgctgcag

SEQ ID NO: 1597037 - DNA, 25 bp, Homo sapien
ccaggtgagggggcttttcctctgg

SEQ ID NO: 1597038 - DNA, 25 bp, Homo sapien
ttcttctcttcatcaggctgaatca

SEQ ID NO: 1597039 - DNA, 25 bp, Homo sapien
tcttcatcaggctgaatcagggtgt

SEQ ID NO: 1597040 - DNA, 25 bp, Homo sapien
ctcttcatcaggctgaatcagggtg

SEQ ID NO: 1597041 - DNA, 25 bp, Homo sapien
ttctcttcatcaggctgaatcaggg

SEQ ID NO: 1597042 - DNA, 25 bp, Homo sapien
tcagcggcaacgtgatgattgcaga

SEQ ID NO: 1597043 - DNA, 25 bp, Homo sapien
cagcggcaacgtgatgattgcagag

SEQ ID NO: 1597044 - DNA, 25 bp, Homo sapien
gtggtcagcggcaacgtgatgattg

SEQ ID NO: 1597045 - DNA, 25 bp, Homo sapien
ggtcagcggcaacgtgatgattgca

SEQ ID NO: 1597046 - DNA, 25 bp, Homo sapien
taaagctaacaaaactctgaagaag

SEQ ID NO: 1597047 - DNA, 25 bp, Homo sapien
ttataaagctaacaaaactctgaag

SEQ ID NO: 1597048 - DNA, 25 bp, Homo sapien
acattataaagctaacaaaactctg

SEQ ID NO: 1597049 - DNA, 25 bp, Homo sapien
actctgaagaagtgtcagcaccaaa

SEQ ID NO: 1597050 - DNA, 25 bp, Homo sapien
tagaagagacgtcttcgggccttgc

SEQ ID NO: 1597051 - DNA, 25 bp, Homo sapien
gccttgcacgttggcctccatagaa

SEQ ID NO: 1597052 - DNA, 25 bp, Homo sapien
gcaaattctgggctccggactgggt

SEQ ID NO: 1597053 - DNA, 25 bp, Homo sapien
tgcatggcccatgagccttagaaga

SEQ ID NO: 1597054 - DNA, 25 bp, Homo sapien
tccaggccgtggagatccaagtgga

SEQ ID NO: 1597055 - DNA, 25 bp, Homo sapien
gggacggccgctctgtagtcaggtt

SEQ ID NO: 1597056 - DNA, 25 bp, Homo sapien
tagtcaggtttgaggtagaggacac

SEQ ID NO: 1597057 - DNA, 25 bp, Homo sapien
aggtagaggacacgccaggaagaag

SEQ ID NO: 1597058 - DNA, 25 bp, Homo sapien
tcttctactgaaggcgccacacaca

SEQ ID NO: 1597059 - DNA, 25 bp, Homo sapien
cctcttctactgaaggcgccacaca

SEQ ID NO: 1597060 - DNA, 25 bp, Homo sapien
ctcttctactgaaggcgccacacac

SEQ ID NO: 1597061 - DNA, 25 bp, Homo sapien
ccttcagggacatcaagagttgctc

SEQ ID NO: 1597062 - DNA, 25 bp, Homo sapien
cagacagtctctgtactagtgagca

SEQ ID NO: 1597063 - DNA, 25 bp, Homo sapien
ttcaatgtcaatctcccagacagtc

SEQ ID NO: 1597064 - DNA, 25 bp, Homo sapien
ttccaagaccgcgatgatcatcttc

SEQ ID NO: 1597065 - DNA, 25 bp, Homo sapien
gggagctggctgtaccggagctggt

SEQ ID NO: 1597066 - DNA, 25 bp, Homo sapien
ctggctgtaccggagctggttctgc

SEQ ID NO: 1597067 - DNA, 25 bp, Homo sapien
tggtggggagctggctgtaccggag

SEQ ID NO: 1597068 - DNA, 25 bp, Homo sapien
ggctgtaccggagctggttctgcac

SEQ ID NO: 1597069 - DNA, 25 bp, Homo sapien
gctcctccactttctggcgttttgg

SEQ ID NO: 1597070 - DNA, 25 bp, Homo sapien
ctcctccactttctggcgttttggg

SEQ ID NO: 1597071 - DNA, 25 bp, Homo sapien
ggcatttgatggcgtgccgctggag

SEQ ID NO: 1597072 - DNA, 25 bp, Homo sapien
cgttttggggcatttgatggcgtgc

SEQ ID NO: 1597073 - DNA, 25 bp, Homo sapien
cttgggcgccgggaacctttcatgg

SEQ ID NO: 1597074 - DNA, 25 bp, Homo sapien
gaggctctgacaactgagctcttgg

SEQ ID NO: 1597075 - DNA, 25 bp, Homo sapien
aaagctgctcccgaaggcttgggtt

SEQ ID NO: 1597076 - DNA, 25 bp, Homo sapien
cctttgagagagtggtgtcagcccc

SEQ ID NO: 1597077 - DNA, 25 bp, Homo sapien
gggacacagaagaccgtgttgtact

SEQ ID NO: 1597078 - DNA, 25 bp, Homo sapien
gaccgtgttgtactcatctcctcga

SEQ ID NO: 1597079 - DNA, 25 bp, Homo sapien
acagaagaccgtgttgtactcatct

SEQ ID NO: 1597080 - DNA, 25 bp, Homo sapien
tgttgtactcatctcctcgatttta

SEQ ID NO: 1597081 - DNA, 25 bp, Homo sapien
aaagactcgttagaagtgcagactc

SEQ ID NO: 1597082 - DNA, 25 bp, Homo sapien
ctctggggatctattcgtaaaagac

SEQ ID NO: 1597083 - DNA, 25 bp, Homo sapien
tcgtaaaagactcgttagaagtgca

SEQ ID NO: 1597084 - DNA, 25 bp, Homo sapien
gatctattcgtaaaagactcgttag

SEQ ID NO: 1597085 - DNA, 25 bp, Homo sapien
ctcctccgagatgccgagacatgtg

SEQ ID NO: 1597086 - DNA, 25 bp, Homo sapien
ccgagatgccgagacatgtgtgcag

SEQ ID NO: 1597087 - DNA, 25 bp, Homo sapien
tctctcctccgagatgccgagacat

SEQ ID NO: 1597088 - DNA, 25 bp, Homo sapien
gcatctctctcctccgagatgccga

SEQ ID NO: 1597089 - DNA, 25 bp, Homo sapien
ctgattcccgtctggtgcctgaggg

SEQ ID NO: 1597090 - DNA, 25 bp, Homo sapien
cattctgaatagagcgtctctgatt

SEQ ID NO: 1597091 - DNA, 25 bp, Homo sapien
attctgaatagagcgtctctgattc

SEQ ID NO: 1597092 - DNA, 25 bp, Homo sapien
tagaagagacgtcttcgggccttgc

SEQ ID NO: 1597093 - DNA, 25 bp, Homo sapien
gccttgcacgttggcctccatagaa

SEQ ID NO: 1597094 - DNA, 25 bp, Homo sapien
gcaaattctgggctccggactgggt

SEQ ID NO: 1597095 - DNA, 25 bp, Homo sapien
gcctccatagaaacttgtggcaaat

SEQ ID NO: 1597096 - DNA, 25 bp, Homo sapien
aggtagaggacacgccaggaagaag

SEQ ID NO: 1597097 - DNA, 25 bp, Homo sapien
gacggccgctctgtagtcaggtttg

SEQ ID NO: 1597098 - DNA, 25 bp, Homo sapien
gggggacggccgctctgtagtcagg

SEQ ID NO: 1597099 - DNA, 25 bp, Homo sapien
tagtcaggtttgaggtagaggacac

SEQ ID NO: 1597100 - DNA, 25 bp, Homo sapien
ctcttctactgaaggcgccacacac

SEQ ID NO: 1597101 - DNA, 25 bp, Homo sapien
cctcttctactgaaggcgccacaca

SEQ ID NO: 1597102 - DNA, 25 bp, Homo sapien
ccttcagggacatcaagagttgctc

SEQ ID NO: 1597103 - DNA, 25 bp, Homo sapien
cagacagtctctgtactagtgagca

SEQ ID NO: 1597104 - DNA, 25 bp, Homo sapien
ttcaatgtcaatctcccagacagtc

SEQ ID NO: 1597105 - DNA, 25 bp, Homo sapien
ttccaagaccgcgatgatcatcttc

SEQ ID NO: 1597106 - DNA, 25 bp, Homo sapien
gggagctggctgtaccggagctggt

SEQ ID NO: 1597107 - DNA, 25 bp, Homo sapien
ctggctgtaccggagctggttctgc

SEQ ID NO: 1597108 - DNA, 25 bp, Homo sapien
tggtggggagctggctgtaccggag

SEQ ID NO: 1597109 - DNA, 25 bp, Homo sapien
ggctgtaccggagctggttctgcac

SEQ ID NO: 1597110 - DNA, 25 bp, Homo sapien
ctcctccactttctggcgttttggg

SEQ ID NO: 1597111 - DNA, 25 bp, Homo sapien
gctcctccactttctggcgttttgg

SEQ ID NO: 1597112 - DNA, 25 bp, Homo sapien
ggcatttgatggcgtgccgctggag

SEQ ID NO: 1597113 - DNA, 25 bp, Homo sapien
cgttttggggcatttgatggcgtgc

SEQ ID NO: 1597114 - DNA, 25 bp, Homo sapien
cttgggcgccgggaacctttcatgg

SEQ ID NO: 1597115 - DNA, 25 bp, Homo sapien
gaggctctgacaactgagctcttgg

SEQ ID NO: 1597116 - DNA, 25 bp, Homo sapien
aaagctgctcccgaaggcttgggtt

SEQ ID NO: 1597117 - DNA, 25 bp, Homo sapien
cctttgagagagtggtgtcagcccc

SEQ ID NO: 1597118 - DNA, 25 bp, Homo sapien
gtaacttgtgagcatccttactgcc

SEQ ID NO: 1597119 - DNA, 25 bp, Homo sapien
tgtaacttgtgagcatccttactgc

SEQ ID NO: 1597120 - DNA, 25 bp, Homo sapien
taacttgtgagcatccttactgcca

SEQ ID NO: 1597121 - DNA, 25 bp, Homo sapien
ctctggggatctattcgtaaaagac

SEQ ID NO: 1597122 - DNA, 25 bp, Homo sapien
tcgtaaaagactcgttagaagtgca

SEQ ID NO: 1597123 - DNA, 25 bp, Homo sapien
gatctattcgtaaaagactcgttag

SEQ ID NO: 1597124 - DNA, 25 bp, Homo sapien
aaagactcgttagaagtgcagactc

SEQ ID NO: 1597125 - DNA, 25 bp, Homo sapien
ctgattcccgtctggtgcctgaggg

SEQ ID NO: 1597126 - DNA, 25 bp, Homo sapien
cattctgaatagagcgtctctgatt

SEQ ID NO: 1597127 - DNA, 25 bp, Homo sapien
attctgaatagagcgtctctgattc

SEQ ID NO: 1597128 - DNA, 25 bp, Homo sapien
tagaagagacgtcttcgggccttgc

SEQ ID NO: 1597129 - DNA, 25 bp, Homo sapien
gccttgcacgttggcctccatagaa

SEQ ID NO: 1597130 - DNA, 25 bp, Homo sapien
gcaaattctgggctccggactgggt

SEQ ID NO: 1597131 - DNA, 25 bp, Homo sapien
gcctccatagaaacttgtggcaaat

SEQ ID NO: 1597132 - DNA, 25 bp, Homo sapien
aggtagaggacacgccaggaagaag

SEQ ID NO: 1597133 - DNA, 25 bp, Homo sapien
gggacggccgctctgtagtcaggtt

SEQ ID NO: 1597134 - DNA, 25 bp, Homo sapien
tagtcaggtttgaggtagaggacac

SEQ ID NO: 1597135 - DNA, 25 bp, Homo sapien
tccaggccgtggagatccaagtgga

SEQ ID NO: 1597136 - DNA, 25 bp, Homo sapien
ctcttctactgaaggcgccacacac

SEQ ID NO: 1597137 - DNA, 25 bp, Homo sapien
cctcttctactgaaggcgccacaca

SEQ ID NO: 1597138 - DNA, 25 bp, Homo sapien
ccttcagggacatcaagagttgctc

SEQ ID NO: 1597139 - DNA, 25 bp, Homo sapien
cagacagtctctgtactagtgagca

SEQ ID NO: 1597140 - DNA, 25 bp, Homo sapien
ttccaagaccgcgatgatcatcttc

SEQ ID NO: 1597141 - DNA, 25 bp, Homo sapien
ttcaatgtcaatctcccagacagtc

SEQ ID NO: 1597142 - DNA, 25 bp, Homo sapien
gctccaggggcagctgtgcagggtg

SEQ ID NO: 1597143 - DNA, 25 bp, Homo sapien
agctccaggggcagctgtgcagggt

SEQ ID NO: 1597144 - DNA, 25 bp, Homo sapien
ccaggggcagctgtgcagggtggtg

SEQ ID NO: 1597145 - DNA, 25 bp, Homo sapien
cagggtggtggggagctggctgtac

SEQ ID NO: 1597146 - DNA, 25 bp, Homo sapien
cactggcttggtagcaggggactca

SEQ ID NO: 1597147 - DNA, 25 bp, Homo sapien
ctcatgacgtgacgggacactggct

SEQ ID NO: 1597148 - DNA, 25 bp, Homo sapien
aggaagctcccgacactctggacag

SEQ ID NO: 1597149 - DNA, 25 bp, Homo sapien
agcacagctgctcgcctcatgacgt

SEQ ID NO: 1597150 - DNA, 25 bp, Homo sapien
ggcatttgatggcgtgccgctggag

SEQ ID NO: 1597151 - DNA, 25 bp, Homo sapien
gctcctccactttctggcgttttgg

SEQ ID NO: 1597152 - DNA, 25 bp, Homo sapien
ctcctccactttctggcgttttggg

SEQ ID NO: 1597153 - DNA, 25 bp, Homo sapien
cgttttggggcatttgatggcgtgc

SEQ ID NO: 1597154 - DNA, 25 bp, Homo sapien
cttgggcgccgggaacctttcatgg

SEQ ID NO: 1597155 - DNA, 25 bp, Homo sapien
gaggctctgacaactgagctcttgg

SEQ ID NO: 1597156 - DNA, 25 bp, Homo sapien
aaagctgctcccgaaggcttgggat

SEQ ID NO: 1597157 - DNA, 25 bp, Homo sapien
cctttgagagagtggtgtcagcccc

SEQ ID NO: 1597158 - DNA, 25 bp, Homo sapien
gtaacttgtgagcatccttactgcc

SEQ ID NO: 1597159 - DNA, 25 bp, Homo sapien
tgtaacttgtgagcatccttactgc

SEQ ID NO: 1597160 - DNA, 25 bp, Homo sapien
taacttgtgagcatccttactgcca

SEQ ID NO: 1597161 - DNA, 25 bp, Homo sapien
ctctggggatctattcgtaaaagac

SEQ ID NO: 1597162 - DNA, 25 bp, Homo sapien
tcgtaaaagactcgttagaagtgca

SEQ ID NO: 1597163 - DNA, 25 bp, Homo sapien
gatctattcgtaaaagactcgttag

SEQ ID NO: 1597164 - DNA, 25 bp, Homo sapien
aaagactcgttagaagtgcagactc

SEQ ID NO: 1597165 - DNA, 25 bp, Homo sapien
ctgattcccgtctggtgcctgaggg

SEQ ID NO: 1597166 - DNA, 25 bp, Homo sapien
cattctgaatagagcgtctctgatt

SEQ ID NO: 1597167 - DNA, 25 bp, Homo sapien
attctgaatagagcgtctctgattc

SEQ ID NO: 1597168 - DNA, 25 bp, Homo sapien
tagaagagacgtcttcgggccttgc

SEQ ID NO: 1597169 - DNA, 25 bp, Homo sapien
gccttgcacgttggcctccatagaa

SEQ ID NO: 1597170 - DNA, 25 bp, Homo sapien
gcctccatagaaacttgtggcaaat

SEQ ID NO: 1597171 - DNA, 25 bp, Homo sapien
gcaaattctgggctccggactgggt

SEQ ID NO: 1597172 - DNA, 25 bp, Homo sapien
tccaggccgtggagatccaagtgga

SEQ ID NO: 1597173 - DNA, 25 bp, Homo sapien
gggacggccgctctgtagtcaggtt

SEQ ID NO: 1597174 - DNA, 25 bp, Homo sapien
tagtcaggtttgaggtagaggacac

SEQ ID NO: 1597175 - DNA, 25 bp, Homo sapien
aggtagaggacacgccaggaagaag

SEQ ID NO: 1597176 - DNA, 25 bp, Homo sapien
cctcttctactgaaggcgccacaca

SEQ ID NO: 1597177 - DNA, 25 bp, Homo sapien
ctcttctactgaaggcgccacacac

SEQ ID NO: 1597178 - DNA, 25 bp, Homo sapien
ccttcagggacatcaagagttgctc

SEQ ID NO: 1597179 - DNA, 25 bp, Homo sapien
ttcaatgtcaatctcccagacagtc

SEQ ID NO: 1597180 - DNA, 25 bp, Homo sapien
cagacagtctctgtactagtgagca

SEQ ID NO: 1597181 - DNA, 25 bp, Homo sapien
ttccaagaccgcgatgatcatcttc

SEQ ID NO: 1597182 - DNA, 25 bp, Homo sapien
gggagctggctgtaccggagctggt

SEQ ID NO: 1597183 - DNA, 25 bp, Homo sapien
ctggctgtaccggagctggttctgc

SEQ ID NO: 1597184 - DNA, 25 bp, Homo sapien
ggctgtaccggagctggttctgcac

SEQ ID NO: 1597185 - DNA, 25 bp, Homo sapien
tggtggggagctggctgtaccggag

SEQ ID NO: 1597186 - DNA, 25 bp, Homo sapien
gctcctccactttctggcgttttgg

SEQ ID NO: 1597187 - DNA, 25 bp, Homo sapien
ctcctccactttctggcgttttggg

SEQ ID NO: 1597188 - DNA, 25 bp, Homo sapien
ggcatttgatggcgtgccgctggag

SEQ ID NO: 1597189 - DNA, 25 bp, Homo sapien
cgttttggggcatttgatggcgtgc

SEQ ID NO: 1597190 - DNA, 25 bp, Homo sapien
cttgggcgccgggaacctttcatgg

SEQ ID NO: 1597191 - DNA, 25 bp, Homo sapien
aaagctgctcccgaaggcttgggat

SEQ ID NO: 1597192 - DNA, 25 bp, Homo sapien
cctttgagagagtggtgtcagcccc

SEQ ID NO: 1597193 - DNA, 25 bp, Homo sapien
tcttggattcggtgcaggaatcact

SEQ ID NO: 1597194 - DNA, 25 bp, Homo sapien
gggggaatcttgtacactgtcagca

SEQ ID NO: 1597195 - DNA, 25 bp, Homo sapien
gagctcttgggggaatcttgtacac

SEQ ID NO: 1597196 - DNA, 25 bp, Homo sapien
gccaggggatttgtcagcaggaact

SEQ ID NO: 1597197 - DNA, 25 bp, Homo sapien
atgaggctctgacaactgagctctt

SEQ ID NO: 1597198 - DNA, 25 bp, Homo sapien
agcgtctctgcttcaattcctgcca

SEQ ID NO: 1597199 - DNA, 25 bp, Homo sapien
caagcttctctgagcgtctctgctt

SEQ ID NO: 1597200 - DNA, 25 bp, Homo sapien
gagcgtctctgcttcaattcctgcc

SEQ ID NO: 1597201 - DNA, 25 bp, Homo sapien
acaagcttctctgagcgtctctgct

SEQ ID NO: 1597202 - DNA, 25 bp, Homo sapien
ctctggggatctattcgtaaaagac

SEQ ID NO: 1597203 - DNA, 25 bp, Homo sapien
tcgtaaaagactcgttagaagtgca

SEQ ID NO: 1597204 - DNA, 25 bp, Homo sapien
aaagactcgttagaagtgcagactc

SEQ ID NO: 1597205 - DNA, 25 bp, Homo sapien
gatctattcgtaaaagactcgttag

SEQ ID NO: 1597206 - DNA, 25 bp, Homo sapien
ccgagatgccgagacatgtgtgcag

SEQ ID NO: 1597207 - DNA, 25 bp, Homo sapien
ctgattcccgtctggtgcctgaggg

SEQ ID NO: 1597208 - DNA, 25 bp, Homo sapien
tctctcctccgagatgccgagacat

SEQ ID NO: 1597209 - DNA, 25 bp, Homo sapien
cattctgaatagagcgtctctgatt

SEQ ID NO: 1597210 - DNA, 25 bp, Homo sapien
gccttgcacgttggcctccatagaa

SEQ ID NO: 1597211 - DNA, 25 bp, Homo sapien
gcaaattctgggctccggactgggt

SEQ ID NO: 1597212 - DNA, 25 bp, Homo sapien
gcctccatagaaacttgtggcaaat

SEQ ID NO: 1597213 - DNA, 25 bp, Homo sapien
tagaagagacgtcttcgggccttgc

SEQ ID NO: 1597214 - DNA, 25 bp, Homo sapien
tccaggccgtggagatccaagtgga

SEQ ID NO: 1597215 - DNA, 25 bp, Homo sapien
gggacggccgctctgtagtcaggtt

SEQ ID NO: 1597216 - DNA, 25 bp, Homo sapien
tagtcaggtttgaggtagaggacac

SEQ ID NO: 1597217 - DNA, 25 bp, Homo sapien
aggtagaggacacgccaggaagaag

SEQ ID NO: 1597218 - DNA, 25 bp, Homo sapien
ctcttctactgaaggcgccacacac

SEQ ID NO: 1597219 - DNA, 25 bp, Homo sapien
cctcttctactgaaggcgccacaca

SEQ ID NO: 1597220 - DNA, 25 bp, Homo sapien
ccttcagggacatcaagagttgctc

SEQ ID NO: 1597221 - DNA, 25 bp, Homo sapien
cagacagtctctgtactagtgagca

SEQ ID NO: 1597222 - DNA, 25 bp, Homo sapien
ttcaatgtcaatctcccagacagtc

SEQ ID NO: 1597223 - DNA, 25 bp, Homo sapien
ttccaagaccgcgatgatcatcttc

SEQ ID NO: 1597224 - DNA, 25 bp, Homo sapien
gggagctggctgtaccggagctggt

SEQ ID NO: 1597225 - DNA, 25 bp, Homo sapien
ctggctgtaccggagctggttctgc

SEQ ID NO: 1597226 - DNA, 25 bp, Homo sapien
tggtggggagctggctgtaccggag

SEQ ID NO: 1597227 - DNA, 25 bp, Homo sapien
ggctgtaccggagctggttctgcac

SEQ ID NO: 1597228 - DNA, 25 bp, Homo sapien
ggcatttgatggcgtgccgctggag

SEQ ID NO: 1597229 - DNA, 25 bp, Homo sapien
ctcctccactttctggcgttttggg

SEQ ID NO: 1597230 - DNA, 25 bp, Homo sapien
gctcctccactttctggcgttttgg

SEQ ID NO: 1597231 - DNA, 25 bp, Homo sapien
cgttttggggcatttgatggcgtgc

SEQ ID NO: 1597232 - DNA, 25 bp, Homo sapien
cttgggcgccgggaacctttcatgg

SEQ ID NO: 1597233 - DNA, 25 bp, Homo sapien
aaagctgctcccgaaggcttgggtt

SEQ ID NO: 1597234 - DNA, 25 bp, Homo sapien
tcttggattcggtgcaggaatcact

SEQ ID NO: 1597235 - DNA, 25 bp, Homo sapien
cctttgagagagtggtgtcagcccc

SEQ ID NO: 1597236 - DNA, 25 bp, Homo sapien
gtaacttgtgagcatccttactgcc

SEQ ID NO: 1597237 - DNA, 25 bp, Homo sapien
tgtaacttgtgagcatccttactgc

SEQ ID NO: 1597238 - DNA, 25 bp, Homo sapien
taacttgtgagcatccttactgcca

SEQ ID NO: 1597239 - DNA, 25 bp, Homo sapien
gcaaattctgggctccggactgggt

SEQ ID NO: 1597240 - DNA, 25 bp, Homo sapien
tgcatggcccatgagccttagaaga

SEQ ID NO: 1597241 - DNA, 25 bp, Homo sapien
tagaagagacgtcttcgggccttgc

SEQ ID NO: 1597242 - DNA, 25 bp, Homo sapien
tccgagatgccgagacatgtgtgca

SEQ ID NO: 1597243 - DNA, 25 bp, Homo sapien
tgtaacttgtgagcatccttaccgc

SEQ ID NO: 1597244 - DNA, 25 bp, Homo sapien
cttgtgagcatccttaccgccagca

SEQ ID NO: 1597245 - DNA, 25 bp, Homo sapien
aacttgtgagcatccttaccgccag

SEQ ID NO: 1597246 - DNA, 25 bp, Homo sapien
taacttgtgagcatccttaccgcca

SEQ ID NO: 1597247 - DNA, 25 bp, Homo sapien
cgtctggtgcctgagggtccatggc

SEQ ID NO: 1597248 - DNA, 25 bp, Homo sapien
cccgtctggtgcctgagggtccatg

SEQ ID NO: 1597249 - DNA, 25 bp, Homo sapien
ttcccgtctggtgcctgagggtcca

SEQ ID NO: 1597250 - DNA, 25 bp, Homo sapien
attcccgtctggtgcctgagggtcc

SEQ ID NO: 1597251 - DNA, 25 bp, Homo sapien
gcaaattctgggctccggactgggt

SEQ ID NO: 1597252 - DNA, 25 bp, Homo sapien
gccttgcacgttggcctccatagaa

SEQ ID NO: 1597253 - DNA, 25 bp, Homo sapien
tagaagagacgtcttcgggccttgc

SEQ ID NO: 1597254 - DNA, 25 bp, Homo sapien
gcctccatagaaacttgtggcaaat

SEQ ID NO: 1597255 - DNA, 25 bp, Homo sapien
gggacggccgctctgtagtcaggtt

SEQ ID NO: 1597256 - DNA, 25 bp, Homo sapien
tagtcaggtttgaggtagaggacac

SEQ ID NO: 1597257 - DNA, 25 bp, Homo sapien
tccaggccgtggagatccaagtgga

SEQ ID NO: 1597258 - DNA, 25 bp, Homo sapien
aggtagaggacacgccaggaagaag

SEQ ID NO: 1597259 - DNA, 25 bp, Homo sapien
ctcttttactgaaggcgccacacac

SEQ ID NO: 1597260 - DNA, 25 bp, Homo sapien
cctcttttactgaaggcgccacaca

SEQ ID NO: 1597261 - DNA, 25 bp, Homo sapien
ccttcagggacatcaagagttgctc

SEQ ID NO: 1597262 - DNA, 25 bp, Homo sapien
cagacagtctctgtactagtgagca

SEQ ID NO: 1597263 - DNA, 25 bp, Homo sapien
ttccaagaccgcgatgatcatcttc

SEQ ID NO: 1597264 - DNA, 25 bp, Homo sapien
ttcaatgtcaatctcccagacagtc

SEQ ID NO: 1597265 - DNA, 25 bp, Homo sapien
gggagctggctgtaccggagctggt

SEQ ID NO: 1597266 - DNA, 25 bp, Homo sapien
ctggctgtaccggagctggttctgc

SEQ ID NO: 1597267 - DNA, 25 bp, Homo sapien
ggctgtaccggagctggttctgcac

SEQ ID NO: 1597268 - DNA, 25 bp, Homo sapien
tggtggggagctggctgtaccggag

SEQ ID NO: 1597269 - DNA, 25 bp, Homo sapien
gctcctccactttctggcgttttgg

SEQ ID NO: 1597270 - DNA, 25 bp, Homo sapien
ctcctccactttctggcgttttggg

SEQ ID NO: 1597271 - DNA, 25 bp, Homo sapien
ggcatttgatggcgtgccgctggag

SEQ ID NO: 1597272 - DNA, 25 bp, Homo sapien
cgttttggggcatttgatggcgtgc

SEQ ID NO: 1597273 - DNA, 25 bp, Homo sapien
cttgggcgccgggaacctttcatgg

SEQ ID NO: 1597274 - DNA, 25 bp, Homo sapien
gaggctctgacaactgagctcttgg

SEQ ID NO: 1597275 - DNA, 25 bp, Homo sapien
aaagctgctcccgaaggcttgggtt

SEQ ID NO: 1597276 - DNA, 25 bp, Homo sapien
cctttgagagagtggtgtcagcccc

SEQ ID NO: 1597277 - DNA, 25 bp, Homo sapien
gtaacttgtgagcatccttactgcc

SEQ ID NO: 1597278 - DNA, 25 bp, Homo sapien
tgtaacttgtgagcatccttactgc

SEQ ID NO: 1597279 - DNA, 25 bp, Homo sapien
taacttgtgagcatccttactgcca

SEQ ID NO: 1597280 - DNA, 25 bp, Homo sapien
gaagaagatgggttgttattctgtg

SEQ ID NO: 1597281 - DNA, 25 bp, Homo sapien
atggaggtcccattgtcttagtttg

SEQ ID NO: 1597282 - DNA, 25 bp, Homo sapien
ctggatggaggtcccattgtcttag

SEQ ID NO: 1597283 - DNA, 25 bp, Homo sapien
aagaagatgggttgttattctgtgg

SEQ ID NO: 1597284 - DNA, 25 bp, Homo sapien
aattcctggaattatgtatgtctct

SEQ ID NO: 1597285 - DNA, 25 bp, Homo sapien
agtgtttctgaaaatacggttatgc

SEQ ID NO: 1597286 - DNA, 25 bp, Homo sapien
acggttatgctgttaattctctcag

SEQ ID NO: 1597287 - DNA, 25 bp, Homo sapien
gtttcctgttgatcttaattcctgg

SEQ ID NO: 1597288 - DNA, 25 bp, Homo sapien
tagtcttactgatgctgctttgaaa

SEQ ID NO: 1597289 - DNA, 25 bp, Homo sapien
tggatgctatcgctgactgacctct

SEQ ID NO: 1597290 - DNA, 25 bp, Homo sapien
tattccctcccattggaaaacattg

SEQ ID NO: 1597291 - DNA, 25 bp, Homo sapien
gaccctggctatttcctgcaggagg

SEQ ID NO: 1597292 - DNA, 25 bp, Homo sapien
gttttgcatccagggagaagttcca

SEQ ID NO: 1597293 - DNA, 25 bp, Homo sapien
gagccagcagtccaatctacagatg

SEQ ID NO: 1597294 - DNA, 25 bp, Homo sapien
gatttccagtgcgtcttaagggatg

SEQ ID NO: 1597295 - DNA, 25 bp, Homo sapien
ggctgaggcatcctaacactgatta

SEQ ID NO: 1597296 - DNA, 25 bp, Homo sapien
cagtacataatcttctgggcccatg

SEQ ID NO: 1597297 - DNA, 25 bp, Homo sapien
gaaggctttctacagctgttccatt

SEQ ID NO: 1597298 - DNA, 25 bp, Homo sapien
ccatgaaggtgagaattcgagctga

SEQ ID NO: 1597299 - DNA, 25 bp, Homo sapien
tgagagctttaccatacagattgtc

SEQ ID NO: 1597300 - DNA, 25 bp, Homo sapien
catgagagatcctgcagtgtaacta

SEQ ID NO: 1597301 - DNA, 25 bp, Homo sapien
taaagaggcctacatggtaatgact

SEQ ID NO: 1597302 - DNA, 25 bp, Homo sapien
tggatcactaaccttggcgagaact

SEQ ID NO: 1597303 - DNA, 25 bp, Homo sapien
gaaagcttagcagtcctcctgagga

SEQ ID NO: 1597304 - DNA, 25 bp, Homo sapien
tcatatccatctattatgtattctc

SEQ ID NO: 1597305 - DNA, 25 bp, Homo sapien
ttgtgcacagaaagataggagttac

SEQ ID NO: 1597306 - DNA, 25 bp, Homo sapien
ctcttgtgcacagaaagataggagt

SEQ ID NO: 1597307 - DNA, 25 bp, Homo sapien
attctcttgtgcacagaaagatagg

SEQ ID NO: 1597308 - DNA, 25 bp, Homo sapien
taagggatgagggatcactaaatgc

SEQ ID NO: 1597309 - DNA, 25 bp, Homo sapien
gagagaggaccttgtgctgaaagct

SEQ ID NO: 1597310 - DNA, 25 bp, Homo sapien
ctggtgcggaaaacgtgaaaacact

SEQ ID NO: 1597311 - DNA, 25 bp, Homo sapien
cttttgaggttacaactggtgcgga

SEQ ID NO: 1597312 - DNA, 25 bp, Homo sapien
tcagtggttgtatgtgatttctgcc

SEQ ID NO: 1597313 - DNA, 25 bp, Homo sapien
gctactttcagtggttgtatgtgat

SEQ ID NO: 1597314 - DNA, 25 bp, Homo sapien
ggctactttcagtggttgtatgtga

SEQ ID NO: 1597315 - DNA, 25 bp, Homo sapien
gaaaaccagaaatcacccatgttag

SEQ ID NO: 1597316 - DNA, 25 bp, Homo sapien
ccagaaatcacccatgttagtctta

SEQ ID NO: 1597317 - DNA, 25 bp, Homo sapien
aaaccagaaatcacccatgttagtc

SEQ ID NO: 1597318 - DNA, 25 bp, Homo sapien
cagaaatcacccatgttagtcttac

SEQ ID NO: 1597319 - DNA, 25 bp, Homo sapien
atttggctttaagtagagtctccaa

SEQ ID NO: 1597320 - DNA, 25 bp, Homo sapien
cttcttaggagttaaccatttggct

SEQ ID NO: 1597321 - DNA, 25 bp, Homo sapien
tcttcttaggagttaaccatttggc

SEQ ID NO: 1597322 - DNA, 25 bp, Homo sapien
cattcttcttaggagttaaccattt

SEQ ID NO: 1597323 - DNA, 25 bp, Homo sapien
cagactgggtttattaacacgacac

SEQ ID NO: 1597324 - DNA, 25 bp, Homo sapien
ccaactgggatatcagactgggttt

SEQ ID NO: 1597325 - DNA, 25 bp, Homo sapien
ggtgcttggtagaattcctctttcc

SEQ ID NO: 1597326 - DNA, 25 bp, Homo sapien
ctggacaggtgcttggtagaattcc

SEQ ID NO: 1597327 - DNA, 25 bp, Homo sapien
cagaacagctacagtgaaacaaagt

SEQ ID NO: 1597328 - DNA, 25 bp, Homo sapien
tacacatctacattaatgggcacac

SEQ ID NO: 1597329 - DNA, 25 bp, Homo sapien
tattaaaattctcagggcaaccact

SEQ ID NO: 1597330 - DNA, 25 bp, Homo sapien
atagtaaataggcagaagtagctcc

SEQ ID NO: 1597331 - DNA, 25 bp, Homo sapien
tacagtgtcctttgggcagggtcca

SEQ ID NO: 1597332 - DNA, 25 bp, Homo sapien
cacatccctgtacagtgtcctttgg

SEQ ID NO: 1597333 - DNA, 25 bp, Homo sapien
gggcagggtccagcaacgcccactc

SEQ ID NO: 1597334 - DNA, 25 bp, Homo sapien
gtgaggccaggttcctgcagttctc

SEQ ID NO: 1597335 - DNA, 25 bp, Homo sapien
gatcatgggcccgtgacatggcaga

SEQ ID NO: 1597336 - DNA, 25 bp, Homo sapien
tgcttgggtttagaacatcatcacg

SEQ ID NO: 1597337 - DNA, 25 bp, Homo sapien
ggagggagctctgaacctgcagtaa

SEQ ID NO: 1597338 - DNA, 25 bp, Homo sapien
tccagtgcacagtaccacagagcag

SEQ ID NO: 1597339 - DNA, 25 bp, Homo sapien
tgctggaaggtatcaagtccaacct

SEQ ID NO: 1597340 - DNA, 25 bp, Homo sapien
gatgcctgaggacctggtttggcca

SEQ ID NO: 1597341 - DNA, 25 bp, Homo sapien
tgatgcctggaaatcctgggatgcc

SEQ ID NO: 1597342 - DNA, 25 bp, Homo sapien
aggctgctggaaggtatcaagtcca

SEQ ID NO: 1597343 - DNA, 25 bp, Homo sapien
ctggccaaaggaataatgatttggg

SEQ ID NO: 1597344 - DNA, 25 bp, Homo sapien
caaaggaataatgatttgggaaaag

SEQ ID NO: 1597345 - DNA, 25 bp, Homo sapien
atttgggaaaaggaacatctgactc

SEQ ID NO: 1597346 - DNA, 25 bp, Homo sapien
ttgggaaaaggaacatctgactcac

SEQ ID NO: 1597347 - DNA, 25 bp, Homo sapien
tcaggagctcattaaccagctctcc

SEQ ID NO: 1597348 - DNA, 25 bp, Homo sapien
aggagctcattaaccagctctccgc

SEQ ID NO: 1597349 - DNA, 25 bp, Homo sapien
caggagctcattaaccagctctccg

SEQ ID NO: 1597350 - DNA, 25 bp, Homo sapien
agcagtcgagggcaggatgacagcc

SEQ ID NO: 1597351 - DNA, 25 bp, Homo sapien
tcgagggcaggatgacagccgccat

SEQ ID NO: 1597352 - DNA, 25 bp, Homo sapien
agtcgagggcaggatgacagccgcc

SEQ ID NO: 1597353 - DNA, 25 bp, Homo sapien
gcagtcgagggcaggatgacagccg

SEQ ID NO: 1597354 - DNA, 25 bp, Homo sapien
aggacgctcctcctttatcccgcag

SEQ ID NO: 1597355 - DNA, 25 bp, Homo sapien
cctgtgactccgacagcaacagggc

SEQ ID NO: 1597356 - DNA, 25 bp, Homo sapien
gaagcaggacgctcctcctttatcc

SEQ ID NO: 1597357 - DNA, 25 bp, Homo sapien
cgctcctcctttatcccgcagcgct

SEQ ID NO: 1597358 - DNA, 25 bp, Homo sapien
atgggccctcctcaacccatccttc

SEQ ID NO: 1597359 - DNA, 25 bp, Homo sapien
tgcaagttccggcttccacactggg

SEQ ID NO: 1597360 - DNA, 25 bp, Homo sapien
gaaacgggaatgctccaagtctccg

SEQ ID NO: 1597361 - DNA, 25 bp, Homo sapien
tcaaatgcaagttccggcttccaca

SEQ ID NO: 1597362 - DNA, 25 bp, Homo sapien
ctgagcaggcaatgaattcagggcc

SEQ ID NO: 1597363 - DNA, 25 bp, Homo sapien
gagcaggcaatgaattcagggccac

SEQ ID NO: 1597364 - DNA, 25 bp, Homo sapien
gcaggcaatgaattcagggccacct

SEQ ID NO: 1597365 - DNA, 25 bp, Homo sapien
caggcaatgaattcagggccacctg

SEQ ID NO: 1597366 - DNA, 25 bp, Homo sapien
cccatccaagcgcaccacaaacgca

SEQ ID NO: 1597367 - DNA, 25 bp, Homo sapien
acgcattcccggctactccctcctt

SEQ ID NO: 1597368 - DNA, 25 bp, Homo sapien
aagcgcaccacaaacgcattcccgg

SEQ ID NO: 1597369 - DNA, 25 bp, Homo sapien
accacaaacgcattcccggctactc

SEQ ID NO: 1597370 - DNA, 25 bp, Homo sapien
ggctgtgacgttgccactctggaat

SEQ ID NO: 1597371 - DNA, 25 bp, Homo sapien
taacacggtcaccaacgtgtagaga

SEQ ID NO: 1597372 - DNA, 25 bp, Homo sapien
gcagggcgatcccacaggtcagcat

SEQ ID NO: 1597373 - DNA, 25 bp, Homo sapien
acgtgtagagaaccctcagcctgca

SEQ ID NO: 1597374 - DNA, 25 bp, Homo sapien
cccggtacccgttgagccttcagat

SEQ ID NO: 1597375 - DNA, 25 bp, Homo sapien
ggtcttggaaggcactacagctgct

SEQ ID NO: 1597376 - DNA, 25 bp, Homo sapien
tgccatggtgggaagacgctcaagt

SEQ ID NO: 1597377 - DNA, 25 bp, Homo sapien
gctctgactcgcaggccatggagtg

SEQ ID NO: 1597378 - DNA, 25 bp, Homo sapien
aactctggcgctatttcctatctgg

SEQ ID NO: 1597379 - DNA, 25 bp, Homo sapien
tggattgcagcaactctggcgctat

SEQ ID NO: 1597380 - DNA, 25 bp, Homo sapien
ggagacgtggattgcagcaactctg

SEQ ID NO: 1597381 - DNA, 25 bp, Homo sapien
tgcagcaactctggcgctatttcct

SEQ ID NO: 1597382 - DNA, 25 bp, Homo sapien
gaggttgacatgagccaagatcgcg

SEQ ID NO: 1597383 - DNA, 25 bp, Homo sapien
ccactgcactccaacctggccaaca

SEQ ID NO: 1597384 - DNA, 25 bp, Homo sapien
aacctggccaacagagtgagacttg

SEQ ID NO: 1597385 - DNA, 25 bp, Homo sapien
ggagatttgcttgagtctgggaggt

SEQ ID NO: 1597386 - DNA, 25 bp, Homo sapien
tgttgtaggttccacactgtactca

SEQ ID NO: 1597387 - DNA, 25 bp, Homo sapien
gaggagttcttctacacagcagagc

SEQ ID NO: 1597388 - DNA, 25 bp, Homo sapien
aatgtggttacaaccccagcacagg

SEQ ID NO: 1597389 - DNA, 25 bp, Homo sapien
taagataccttcactcttagtgact

SEQ ID NO: 1597390 - DNA, 25 bp, Homo sapien
aacacgaatctgagcttgaatgatg

SEQ ID NO: 1597391 - DNA, 25 bp, Homo sapien
acgaatctgagcttgaatgatgctt

SEQ ID NO: 1597392 - DNA, 25 bp, Homo sapien
acaacaggtggaccttgtggcaggc

SEQ ID NO: 1597393 - DNA, 25 bp, Homo sapien
cacgaatctgagcttgaatgatgct

SEQ ID NO: 1597394 - DNA, 25 bp, Homo sapien
atgaaccgaaacacggctccctgga

SEQ ID NO: 1597395 - DNA, 25 bp, Homo sapien
gaggcctcatgaaccgaaacacggc

SEQ ID NO: 1597396 - DNA, 25 bp, Homo sapien
acagcccgaggcctcatgaaccgaa

SEQ ID NO: 1597397 - DNA, 25 bp, Homo sapien
tcatgaaccgaaacacggctccctg

SEQ ID NO: 1597398 - DNA, 25 bp, Homo sapien
gcggggccaaaagcgccgactcgcg

SEQ ID NO: 1597399 - DNA, 25 bp, Homo sapien
cggggccaaaagcgccgactcgcgg

SEQ ID NO: 1597400 - DNA, 25 bp, Homo sapien
cgactcgcggggacggagggactcg

SEQ ID NO: 1597401 - DNA, 25 bp, Homo sapien
ctcgcggggacggagggactcgctc

SEQ ID NO: 1597402 - DNA, 25 bp, Homo sapien
tggaccctggctgggggaaaggcac

SEQ ID NO: 1597403 - DNA, 25 bp, Homo sapien
cagccaagcttctttggaccctggc

SEQ ID NO: 1597404 - DNA, 25 bp, Homo sapien
atatggtttatttctgccccagcca

SEQ ID NO: 1597405 - DNA, 25 bp, Homo sapien
tgccccagccaagcttctttggacc

SEQ ID NO: 1597406 - DNA, 25 bp, Homo sapien
tccttcttccgccggcgggtggtca

SEQ ID NO: 1597407 - DNA, 25 bp, Homo sapien
gcagatcctccaggtctaggtgtga

SEQ ID NO: 1597408 - DNA, 25 bp, Homo sapien
tgactggtagtagcctgggcactgt

SEQ ID NO: 1597409 - DNA, 25 bp, Homo sapien
ggcactgttgctggacgttgtattc

SEQ ID NO: 1597410 - DNA, 25 bp, Homo sapien
acaccgcagatcaggcatgtgatga

SEQ ID NO: 1597411 - DNA, 25 bp, Homo sapien
gagtcctgccaagccgatgaggatg

SEQ ID NO: 1597412 - DNA, 25 bp, Homo sapien
tgccaagccgatgaggatgacagcc

SEQ ID NO: 1597413 - DNA, 25 bp, Homo sapien
caggacaccgcagatcaggcatgtg

SEQ ID NO: 1597414 - DNA, 25 bp, Homo sapien
tcccagttaagggctcatttctgtt

SEQ ID NO: 1597415 - DNA, 25 bp, Homo sapien
cagttaagggctcatttctgttggg

SEQ ID NO: 1597416 - DNA, 25 bp, Homo sapien
cccagttaagggctcatttctgttg

SEQ ID NO: 1597417 - DNA, 25 bp, Homo sapien
ccagttaagggctcatttctgttgg

SEQ ID NO: 1597418 - DNA, 25 bp, Homo sapien
ctcagtcccaatgacccagggagct

SEQ ID NO: 1597419 - DNA, 25 bp, Homo sapien
actctgtctactctccgagccagtg

SEQ ID NO: 1597420 - DNA, 25 bp, Homo sapien
gtaccattccgggtcatccgcagaa

SEQ ID NO: 1597421 - DNA, 25 bp, Homo sapien
gaagttctgcagctgggtaccattc

SEQ ID NO: 1597422 - DNA, 25 bp, Homo sapien
cgagaagttacacagggagtccacc

SEQ ID NO: 1597423 - DNA, 25 bp, Homo sapien
tgctgtttcggaagagttggttgag

SEQ ID NO: 1597424 - DNA, 25 bp, Homo sapien
ttgatgctgctgtttcggaagagtt

SEQ ID NO: 1597425 - DNA, 25 bp, Homo sapien
ctgctgtttcggaagagttggttga

SEQ ID NO: 1597426 - DNA, 25 bp, Homo sapien
atgctgctgtttcggaagagttggt

SEQ ID NO: 1597427 - DNA, 25 bp, Homo sapien
tcctctggtaattggtggtgcctgg

SEQ ID NO: 1597428 - DNA, 25 bp, Homo sapien
tggtgatggtgaaattcaggtagaa

SEQ ID NO: 1597429 - DNA, 25 bp, Homo sapien
ctctggtaattggtggtgcctggct

SEQ ID NO: 1597430 - DNA, 25 bp, Homo sapien
tttgtcctgggaatatggtaggttg

SEQ ID NO: 1597431 - DNA, 25 bp, Homo sapien
ttggttgataaactgatgactccat

SEQ ID NO: 1597432 - DNA, 25 bp, Homo sapien
gttggttgataaactgatgactcca

SEQ ID NO: 1597433 - DNA, 25 bp, Homo sapien
tggagctgcttgttggttgataaac

SEQ ID NO: 1597434 - DNA, 25 bp, Homo sapien
ggtcacctacatgggtctccagaaa

SEQ ID NO: 1597435 - DNA, 25 bp, Homo sapien
tggatgatctactgccagaggtcac

SEQ ID NO: 1597436 - DNA, 25 bp, Homo sapien
tagagcctccaccaattccactggt

SEQ ID NO: 1597437 - DNA, 25 bp, Homo sapien
tcttccagttaggaaaccagccacc

SEQ ID NO: 1597438 - DNA, 25 bp, Homo sapien
ccaatggaatgaggcattcagggtc

SEQ ID NO: 1597439 - DNA, 25 bp, Homo sapien
accaactggtaggtggagcccagcc

SEQ ID NO: 1597440 - DNA, 25 bp, Homo sapien
gggtccaaattggaggagaacaatg

SEQ ID NO: 1597441 - DNA, 25 bp, Homo sapien
caatgccttgacagtgaccaacacg

SEQ ID NO: 1597442 - DNA, 25 bp, Homo sapien
cagagaccacaggaattcagccagt

SEQ ID NO: 1597443 - DNA, 25 bp, Homo sapien
agggtcatcggttgctgtctttaaa

SEQ ID NO: 1597444 - DNA, 25 bp, Homo sapien
agcatcagcagggtcatcggttgct

SEQ ID NO: 1597445 - DNA, 25 bp, Homo sapien
gaccacaggaattcagccagtactc

SEQ ID NO: 1597446 - DNA, 25 bp, Homo sapien
cagaagcggaatgtgtcatgtagtt

SEQ ID NO: 1597447 - DNA, 25 bp, Homo sapien
gaatgtgtcatgtagttgactgcct

SEQ ID NO: 1597448 - DNA, 25 bp, Homo sapien
aagcggaatgtgtcatgtagttgac

SEQ ID NO: 1597449 - DNA, 25 bp, Homo sapien
aggcagaagcggaatgtgtcatgta

SEQ ID NO: 1597450 - DNA, 25 bp, Homo sapien
tcgccccggattgataaattctggg

SEQ ID NO: 1597451 - DNA, 25 bp, Homo sapien
gggtctggattactgaggttccagt

SEQ ID NO: 1597452 - DNA, 25 bp, Homo sapien
ggattactgaggttccagttgacaa

SEQ ID NO: 1597453 - DNA, 25 bp, Homo sapien
aatttatctggtactcgccccggat

SEQ ID NO: 1597454 - DNA, 25 bp, Homo sapien
gatgaagaggctatccctgtccagg

SEQ ID NO: 1597455 - DNA, 25 bp, Homo sapien
ttgatgaagaggctatccctgtcca

SEQ ID NO: 1597456 - DNA, 25 bp, Homo sapien
tgaagaggctatccctgtccaggac

SEQ ID NO: 1597457 - DNA, 25 bp, Homo sapien
gaggctatccctgtccaggacatag

SEQ ID NO: 1597458 - DNA, 25 bp, Homo sapien
ggcatttgaggactctagagaggtc

SEQ ID NO: 1597459 - DNA, 25 bp, Homo sapien
tttgaggactctagagaggtcccga

SEQ ID NO: 1597460 - DNA, 25 bp, Homo sapien
gaggactctagagaggtcccgagac

SEQ ID NO: 1597461 - DNA, 25 bp, Homo sapien
ggactctagagaggtcccgagacct

SEQ ID NO: 1597462 - DNA, 25 bp, Homo sapien
gatcagttggcaacccaagtagaag

SEQ ID NO: 1597463 - DNA, 25 bp, Homo sapien
tgagggagatcagttggcaacccaa

SEQ ID NO: 1597464 - DNA, 25 bp, Homo sapien
gggagatcagttggcaacccaagta

SEQ ID NO: 1597465 - DNA, 25 bp, Homo sapien
acccaagtagaaggggcccatgctg

SEQ ID NO: 1597466 - DNA, 25 bp, Homo sapien
tgagcccttgcccatatctggtgaa

SEQ ID NO: 1597467 - DNA, 25 bp, Homo sapien
gagggtcttcaggtggtaccccatg

SEQ ID NO: 1597468 - DNA, 25 bp, Homo sapien
ccctcggtggagttgaatgtagctg

SEQ ID NO: 1597469 - DNA, 25 bp, Homo sapien
tctggtgaatactggagattggaga

SEQ ID NO: 1597470 - DNA, 25 bp, Homo sapien
tgttgtggcttctgacagaggaggc

SEQ ID NO: 1597471 - DNA, 25 bp, Homo sapien
ctgttgtggcttctgacagaggagg

SEQ ID NO: 1597472 - DNA, 25 bp, Homo sapien
taggaggctcatctggaccaggttc

SEQ ID NO: 1597473 - DNA, 25 bp, Homo sapien
gaggctcatctggaccaggttcatt

SEQ ID NO: 1597474 - DNA, 25 bp, Homo sapien
ttgtaggaggctcatctggaccagg

SEQ ID NO: 1597475 - DNA, 25 bp, Homo sapien
tcatctggaccaggttcattgtaac

SEQ ID NO: 1597476 - DNA, 25 bp, Homo sapien
aaggtagaggctgtctttgtccaga

SEQ ID NO: 1597477 - DNA, 25 bp, Homo sapien
gtgcagaggaggtccacccgtgtct

SEQ ID NO: 1597478 - DNA, 25 bp, Homo sapien
cccagccgggtgatgccatgggtct

SEQ ID NO: 1597479 - DNA, 25 bp, Homo sapien
cttgataggcagacctgggccgctg

SEQ ID NO: 1597480 - DNA, 25 bp, Homo sapien
cttagtgcgatgaccctgcagcctg

SEQ ID NO: 1597481 - DNA, 25 bp, Homo sapien
tgtgtaccgtgcacccaggctgctc

SEQ ID NO: 1597482 - DNA, 25 bp, Homo sapien
gaccctgcagcctgtgtaccgtgca

SEQ ID NO: 1597483 - DNA, 25 bp, Homo sapien
tgcagcctgtgtaccgtgcacccag

SEQ ID NO: 1597484 - DNA, 25 bp, Homo sapien
ctgtgatgttgaacttgagggagcc

SEQ ID NO: 1597485 - DNA, 25 bp, Homo sapien
cgccatgtagcgcaggttgttgatg

SEQ ID NO: 1597486 - DNA, 25 bp, Homo sapien
ttgttgatggtgaagttcagtgtga

SEQ ID NO: 1597487 - DNA, 25 bp, Homo sapien
ccgggttggcccatgtccgccatgt

SEQ ID NO: 1597488 - DNA, 25 bp, Homo sapien
gccaagctaaggtttaagacaaatc

SEQ ID NO: 1597489 - DNA, 25 bp, Homo sapien
tccagccaagctaaggtttaagaca

SEQ ID NO: 1597490 - DNA, 25 bp, Homo sapien
tgtccagccaagctaaggtttaaga

SEQ ID NO: 1597491 - DNA, 25 bp, Homo sapien
cagtgtccagccaagctaaggttta

SEQ ID NO: 1597492 - DNA, 25 bp, Homo sapien
tgggtacagagctccgatgggtgaa

SEQ ID NO: 1597493 - DNA, 25 bp, Homo sapien
ggtacagagctccgatgggtgaaac

SEQ ID NO: 1597494 - DNA, 25 bp, Homo sapien
ggtgggtacagagctccgatgggtg

SEQ ID NO: 1597495 - DNA, 25 bp, Homo sapien
tgctggtggtgggtacagagctccg

SEQ ID NO: 1597496 - DNA, 25 bp, Homo sapien
agctcagtgatgctgtgggtcagct

SEQ ID NO: 1597497 - DNA, 25 bp, Homo sapien
attgacatagagactgtccctgtcc

SEQ ID NO: 1597498 - DNA, 25 bp, Homo sapien
ttgacatagagactgtccctgtcca

SEQ ID NO: 1597499 - DNA, 25 bp, Homo sapien
cattgacatagagactgtccctgtc

SEQ ID NO: 1597500 - DNA, 25 bp, Homo sapien
agggagggcagataagggggatgac

SEQ ID NO: 1597501 - DNA, 25 bp, Homo sapien
ctagggagggcagataagggggatg

SEQ ID NO: 1597502 - DNA, 25 bp, Homo sapien
cagataagggggatgacattaaata

SEQ ID NO: 1597503 - DNA, 25 bp, Homo sapien
ggcagataagggggatgacattaaa

SEQ ID NO: 1597504 - DNA, 25 bp, Homo sapien
aacactggtgttcttgaacaagggc

SEQ ID NO: 1597505 - DNA, 25 bp, Homo sapien
gcagccagagtacagagggccaaca

SEQ ID NO: 1597506 - DNA, 25 bp, Homo sapien
ctgcagccagagtacagagggccaa

SEQ ID NO: 1597507 - DNA, 25 bp, Homo sapien
agggccaacactggtgttcttgaac

SEQ ID NO: 1597508 - DNA, 25 bp, Homo sapien
tgaacttcctggagccaggccacat

SEQ ID NO: 1597509 - DNA, 25 bp, Homo sapien
ttgaacttcctggagccaggccaca

SEQ ID NO: 1597510 - DNA, 25 bp, Homo sapien
gaacttcctggagccaggccacatg

SEQ ID NO: 1597511 - DNA, 25 bp, Homo sapien
acttcctggagccaggccacatgtt

SEQ ID NO: 1597512 - DNA, 25 bp, Homo sapien
ctgaagggccaaatatcgaggctgg

SEQ ID NO: 1597513 - DNA, 25 bp, Homo sapien
caaatatcgaggctggagtcttaga

SEQ ID NO: 1597514 - DNA, 25 bp, Homo sapien
gaggctggagtcttagatgctccca

SEQ ID NO: 1597515 - DNA, 25 bp, Homo sapien
agggccaaatatcgaggctggagtc

SEQ ID NO: 1597516 - DNA, 25 bp, Homo sapien
ctggtggtggacacagagctccgat

SEQ ID NO: 1597517 - DNA, 25 bp, Homo sapien
gctggtggtggacacagagctccga

SEQ ID NO: 1597518 - DNA, 25 bp, Homo sapien
ggtggtggacacagagctccgatga

SEQ ID NO: 1597519 - DNA, 25 bp, Homo sapien
tggtggacacagagctccgatgagt

SEQ ID NO: 1597520 - DNA, 25 bp, Homo sapien
agaggctgtcgttgtccagggcata

SEQ ID NO: 1597521 - DNA, 25 bp, Homo sapien
tgacaaagaggctgtcgttgtccag

SEQ ID NO: 1597522 - DNA, 25 bp, Homo sapien
acaaagaggctgtcgttgtccaggg

SEQ ID NO: 1597523 - DNA, 25 bp, Homo sapien
aaagaggctgtcgttgtccagggca

SEQ ID NO: 1597524 - DNA, 25 bp, Homo sapien
agagggccaacactggtgctcttga

SEQ ID NO: 1597525 - DNA, 25 bp, Homo sapien
gcagccagagtacagagggccaaca

SEQ ID NO: 1597526 - DNA, 25 bp, Homo sapien
agtctgcagccagagtacagagggc

SEQ ID NO: 1597527 - DNA, 25 bp, Homo sapien
gggccaacactggtgctcttgaaca

SEQ ID NO: 1597528 - DNA, 25 bp, Homo sapien
atgttctcctcataccgcaggttgg

SEQ ID NO: 1597529 - DNA, 25 bp, Homo sapien
tgttctcctcataccgcaggttggt

SEQ ID NO: 1597530 - DNA, 25 bp, Homo sapien
catgttctcctcataccgcaggttg

SEQ ID NO: 1597531 - DNA, 25 bp, Homo sapien
ttctcctcataccgcaggttggtga

SEQ ID NO: 1597532 - DNA, 25 bp, Homo sapien
gtttagaaactggagtcccagatgt

SEQ ID NO: 1597533 - DNA, 25 bp, Homo sapien
ggtttagaaactggagtcccagatg

SEQ ID NO: 1597534 - DNA, 25 bp, Homo sapien
ggagaaggcctcattagtgaaagtg

SEQ ID NO: 1597535 - DNA, 25 bp, Homo sapien
gaaggcctcattagtgaaagtgttg

SEQ ID NO: 1597536 - DNA, 25 bp, Homo sapien
tgaggagaaggcctcattagtgaaa

SEQ ID NO: 1597537 - DNA, 25 bp, Homo sapien
gagaaggcctcattagtgaaagtgt

SEQ ID NO: 1597538 - DNA, 25 bp, Homo sapien
gggcacagagctccgctgtgtgaaa

SEQ ID NO: 1597539 - DNA, 25 bp, Homo sapien
ggtgggcacagagctccgctgtgtg

SEQ ID NO: 1597540 - DNA, 25 bp, Homo sapien
tgggcacagagctccgctgtgtgaa

SEQ ID NO: 1597541 - DNA, 25 bp, Homo sapien
ggcacagagctccgctgtgtgaaac

SEQ ID NO: 1597542 - DNA, 25 bp, Homo sapien
agctcagtgatgctgtgggtcagct

SEQ ID NO: 1597543 - DNA, 25 bp, Homo sapien
ttgacatagagactgtccctgtcca

SEQ ID NO: 1597544 - DNA, 25 bp, Homo sapien
tgtccagggtgtaggggcccagctc

SEQ ID NO: 1597545 - DNA, 25 bp, Homo sapien
cattgacatagagactgtccctgtc

SEQ ID NO: 1597546 - DNA, 25 bp, Homo sapien
gattggggaaagacaatacacggat

SEQ ID NO: 1597547 - DNA, 25 bp, Homo sapien
ggcaagattggggaaagacaataca

SEQ ID NO: 1597548 - DNA, 25 bp, Homo sapien
tggggaaagacaatacacggattgc

SEQ ID NO: 1597549 - DNA, 25 bp, Homo sapien
ggagggcaagattggggaaagacaa

SEQ ID NO: 1597550 - DNA, 25 bp, Homo sapien
gggccaacactggtgttcttgaaca

SEQ ID NO: 1597551 - DNA, 25 bp, Homo sapien
agggccaacactggtgttcttgaac

SEQ ID NO: 1597552 - DNA, 25 bp, Homo sapien
gcagccagagtacagagggccaaca

SEQ ID NO: 1597553 - DNA, 25 bp, Homo sapien
agtctgcagccagagtacagagggc

SEQ ID NO: 1597554 - DNA, 25 bp, Homo sapien
gtagaatgaggtatgtggggctctt

SEQ ID NO: 1597555 - DNA, 25 bp, Homo sapien
agaatgaggtatgtggggctcttac

SEQ ID NO: 1597556 - DNA, 25 bp, Homo sapien
gtgagtggggtagaatgaggtatgt

SEQ ID NO: 1597557 - DNA, 25 bp, Homo sapien
atggtgagtggggtagaatgaggta

SEQ ID NO: 1597558 - DNA, 25 bp, Homo sapien
gaagttaattgtgaatagcaccagg

SEQ ID NO: 1597559 - DNA, 25 bp, Homo sapien
tggtgttaaactttctagagccagg

SEQ ID NO: 1597560 - DNA, 25 bp, Homo sapien
caggttagtgatggtgaagttaatt

SEQ ID NO: 1597561 - DNA, 25 bp, Homo sapien
tctctccgtggtgttaaactttcta

SEQ ID NO: 1597562 - DNA, 25 bp, Homo sapien
gaggctggagttctcgaggttgcca

SEQ ID NO: 1597563 - DNA, 25 bp, Homo sapien
cagggaggctggagttctcgaggtt

SEQ ID NO: 1597564 - DNA, 25 bp, Homo sapien
gggaggctggagttctcgaggttgc

SEQ ID NO: 1597565 - DNA, 25 bp, Homo sapien
acagggaggctggagttctcgaggt

SEQ ID NO: 1597566 - DNA, 25 bp, Homo sapien
tctggtggtcgtcatagagctctga

SEQ ID NO: 1597567 - DNA, 25 bp, Homo sapien
ttctggtggtcgtcatagagctctg

SEQ ID NO: 1597568 - DNA, 25 bp, Homo sapien
tggtggtcgtcatagagctctgatg

SEQ ID NO: 1597569 - DNA, 25 bp, Homo sapien
tggtcgtcatagagctctgatgggt

SEQ ID NO: 1597570 - DNA, 25 bp, Homo sapien
acgatgggtgcagacagcatccact

SEQ ID NO: 1597571 - DNA, 25 bp, Homo sapien
caggacgatgggtgcagacagcatc

SEQ ID NO: 1597572 - DNA, 25 bp, Homo sapien
tcaggacgatgggtgcagacagcat

SEQ ID NO: 1597573 - DNA, 25 bp, Homo sapien
ggacgatgggtgcagacagcatcca

SEQ ID NO: 1597574 - DNA, 25 bp, Homo sapien
taaaaattgcctcaggaggagttct

SEQ ID NO: 1597575 - DNA, 25 bp, Homo sapien
aaaattgcctcaggaggagttctga

SEQ ID NO: 1597576 - DNA, 25 bp, Homo sapien
ttaaaaattgcctcaggaggagttc

SEQ ID NO: 1597577 - DNA, 25 bp, Homo sapien
aaaaattgcctcaggaggagttctg

SEQ ID NO: 1597578 - DNA, 25 bp, Homo sapien
gctgacactggtgttcttgaacaag

SEQ ID NO: 1597579 - DNA, 25 bp, Homo sapien
gagagctgacactggtgttcttgaa

SEQ ID NO: 1597580 - DNA, 25 bp, Homo sapien
gagtacagagagctgacactggtgt

SEQ ID NO: 1597581 - DNA, 25 bp, Homo sapien
acactggtgttcttgaacaagggca

SEQ ID NO: 1597582 - DNA, 25 bp, Homo sapien
gggcagagtaagttggacaggggtc

SEQ ID NO: 1597583 - DNA, 25 bp, Homo sapien
gtgggaggggcagagtaagttggac

SEQ ID NO: 1597584 - DNA, 25 bp, Homo sapien
tgggaggggcagagtaagttggaca

SEQ ID NO: 1597585 - DNA, 25 bp, Homo sapien
agagtaagttggacaggggtctcac

SEQ ID NO: 1597586 - DNA, 25 bp, Homo sapien
atactgcaggttagtgatggtaaaa

SEQ ID NO: 1597587 - DNA, 25 bp, Homo sapien
gatggagtctcagaggtttccggct

SEQ ID NO: 1597588 - DNA, 25 bp, Homo sapien
ggatgatggagtctcagaggtttcc

SEQ ID NO: 1597589 - DNA, 25 bp, Homo sapien
agaggtttccggctgtactgtgaaa

SEQ ID NO: 1597590 - DNA, 25 bp, Homo sapien
gaggtttccggctgtactgtgaaag

SEQ ID NO: 1597591 - DNA, 25 bp, Homo sapien
ggcacagagctccgctgggtgaaac

SEQ ID NO: 1597592 - DNA, 25 bp, Homo sapien
gtgggcacagagctccgctgggtga

SEQ ID NO: 1597593 - DNA, 25 bp, Homo sapien
tgggcacagagctccgctgggtgaa

SEQ ID NO: 1597594 - DNA, 25 bp, Homo sapien
tggtgggcacagagctccgctgggt

SEQ ID NO: 1597595 - DNA, 25 bp, Homo sapien
cagatggcgtccactctggtggcta

SEQ ID NO: 1597596 - DNA, 25 bp, Homo sapien
gatggcgtccactctggtggctact

SEQ ID NO: 1597597 - DNA, 25 bp, Homo sapien
tggcgtccactctggtggctactcc

SEQ ID NO: 1597598 - DNA, 25 bp, Homo sapien
gcgtccactctggtggctactccat

SEQ ID NO: 1597599 - DNA, 25 bp, Homo sapien
agagggccaacactggtgctcttga

SEQ ID NO: 1597600 - DNA, 25 bp, Homo sapien
gggccaacactggtgctcttgaaca

SEQ ID NO: 1597601 - DNA, 25 bp, Homo sapien
agggccaacactggtgctcttgaac

SEQ ID NO: 1597602 - DNA, 25 bp, Homo sapien
gagggccaacactggtgctcttgaa

SEQ ID NO: 1597603 - DNA, 25 bp, Homo sapien
gaccctgcagaacactctccgtgat

SEQ ID NO: 1597604 - DNA, 25 bp, Homo sapien
gaacactctccgtgatgttgaactt

SEQ ID NO: 1597605 - DNA, 25 bp, Homo sapien
gcagaacactctccgtgatgttgaa

SEQ ID NO: 1597606 - DNA, 25 bp, Homo sapien
aatggcaccaggagagggccggtgg

SEQ ID NO: 1597607 - DNA, 25 bp, Homo sapien
aaggtcaactgtggaagtccaagga

SEQ ID NO: 1597608 - DNA, 25 bp, Homo sapien
ggtggtgagcccagagctccgatgg

SEQ ID NO: 1597609 - DNA, 25 bp, Homo sapien
agcccagagctccgatgggtgaaac

SEQ ID NO: 1597610 - DNA, 25 bp, Homo sapien
tgagcccagagctccgatgggtgaa

SEQ ID NO: 1597611 - DNA, 25 bp, Homo sapien
tgctggtggtgagcccagagctccg

SEQ ID NO: 1597612 - DNA, 25 bp, Homo sapien
tgtccagtccagggctttgagggtt

SEQ ID NO: 1597613 - DNA, 25 bp, Homo sapien
cagggctttgagggttaaggtggtg

SEQ ID NO: 1597614 - DNA, 25 bp, Homo sapien
cagtccagggctttgagggttaagg

SEQ ID NO: 1597615 - DNA, 25 bp, Homo sapien
tccagtccagggctttgagggttaa

SEQ ID NO: 1597616 - DNA, 25 bp, Homo sapien
ggtaggtggggagaatgacaatgaa

SEQ ID NO: 1597617 - DNA, 25 bp, Homo sapien
aaggtaggtggggagaatgacaatg

SEQ ID NO: 1597618 - DNA, 25 bp, Homo sapien
ggaaggtaggtggggagaatgacaa

SEQ ID NO: 1597619 - DNA, 25 bp, Homo sapien
taggtggggagaatgacaatgaaaa

SEQ ID NO: 1597620 - DNA, 25 bp, Homo sapien
gtctgcagccagagtacagagggcc

SEQ ID NO: 1597621 - DNA, 25 bp, Homo sapien
agtctgcagccagagtacagagggc

SEQ ID NO: 1597622 - DNA, 25 bp, Homo sapien
cctggcttggatgttgtaggaggga

SEQ ID NO: 1597623 - DNA, 25 bp, Homo sapien
tggtgttgaacttcctggagccagg

SEQ ID NO: 1597624 - DNA, 25 bp, Homo sapien
gtggtgttgaacttcctggagccag

SEQ ID NO: 1597625 - DNA, 25 bp, Homo sapien
gttgagggtgaacggcaccaggaga

SEQ ID NO: 1597626 - DNA, 25 bp, Homo sapien
aagttgagggtgaacggcaccagga

SEQ ID NO: 1597627 - DNA, 25 bp, Homo sapien
cctgaggtcccaaggtccactgtgg

SEQ ID NO: 1597628 - DNA, 25 bp, Homo sapien
aggtcccaaggtccactgtggaggt

SEQ ID NO: 1597629 - DNA, 25 bp, Homo sapien
tcccaaggtccactgtggaggtccc

SEQ ID NO: 1597630 - DNA, 25 bp, Homo sapien
ccctgaggtcccaaggtccactgtg

SEQ ID NO: 1597631 - DNA, 25 bp, Homo sapien
ggggccacagagctccgatgggtga

SEQ ID NO: 1597632 - DNA, 25 bp, Homo sapien
ggtgggggccacagagctccgatgg

SEQ ID NO: 1597633 - DNA, 25 bp, Homo sapien
gccacagagctccgatgggtgaaac

SEQ ID NO: 1597634 - DNA, 25 bp, Homo sapien
tgggggccacagagctccgatgggt

SEQ ID NO: 1597635 - DNA, 25 bp, Homo sapien
cccagctctttgatgccatgggtca

SEQ ID NO: 1597636 - DNA, 25 bp, Homo sapien
gtctgcagccagagtacagaaggcc

SEQ ID NO: 1597637 - DNA, 25 bp, Homo sapien
agtctgcagccagagtacagaaggc

SEQ ID NO: 1597638 - DNA, 25 bp, Homo sapien
tgatgtaggaggtactgactctctg

SEQ ID NO: 1597639 - DNA, 25 bp, Homo sapien
atggatgatgtaggaggtactgact

SEQ ID NO: 1597640 - DNA, 25 bp, Homo sapien
gatgatgtaggaggtactgactctc

SEQ ID NO: 1597641 - DNA, 25 bp, Homo sapien
gatgtaggaggtactgactctctgg

SEQ ID NO: 1597642 - DNA, 25 bp, Homo sapien
cctcctcgtactgcaggttggtgat

SEQ ID NO: 1597643 - DNA, 25 bp, Homo sapien
ccgtggtgttgaacttcctggagcc

SEQ ID NO: 1597644 - DNA, 25 bp, Homo sapien
atgtcctcctcgtactgcaggttgg

SEQ ID NO: 1597645 - DNA, 25 bp, Homo sapien
ctccgtggtgttgaacttcctggag

SEQ ID NO: 1597646 - DNA, 25 bp, Homo sapien
ccctgaggtcccaaggtccactgtg

SEQ ID NO: 1597647 - DNA, 25 bp, Homo sapien
aggtcccaaggtccactgtggaggt

SEQ ID NO: 1597648 - DNA, 25 bp, Homo sapien
cctgaggtcccaaggtccactgtgg

SEQ ID NO: 1597649 - DNA, 25 bp, Homo sapien
tcccaaggtccactgtggaggtccc

SEQ ID NO: 1597650 - DNA, 25 bp, Homo sapien
gctggtgttgggcgcagaggtctga

SEQ ID NO: 1597651 - DNA, 25 bp, Homo sapien
tgctggtgttgggcgcagaggtctg

SEQ ID NO: 1597652 - DNA, 25 bp, Homo sapien
gtgttgggcgcagaggtctgatggg

SEQ ID NO: 1597653 - DNA, 25 bp, Homo sapien
tggtgttgggcgcagaggtctgatg

SEQ ID NO: 1597654 - DNA, 25 bp, Homo sapien
tgatgccattggtcagctggctcag

SEQ ID NO: 1597655 - DNA, 25 bp, Homo sapien
agctcccagtatagctgctccctgt

SEQ ID NO: 1597656 - DNA, 25 bp, Homo sapien
gggtcaagacggtgggtgcagatgg

SEQ ID NO: 1597657 - DNA, 25 bp, Homo sapien
gtgggtgcagatggcatccactcca

SEQ ID NO: 1597658 - DNA, 25 bp, Homo sapien
agattgcctaggacttgtcttgaga

SEQ ID NO: 1597659 - DNA, 25 bp, Homo sapien
gacaatgaaaagattgcctaggact

SEQ ID NO: 1597660 - DNA, 25 bp, Homo sapien
gggaaacatatcaaggaaccagagg

SEQ ID NO: 1597661 - DNA, 25 bp, Homo sapien
tgtcttgagattgctgagggaaaca

SEQ ID NO: 1597662 - DNA, 25 bp, Homo sapien
agggccaacactggtgttcttgaac

SEQ ID NO: 1597663 - DNA, 25 bp, Homo sapien
gggccaacactggtgttcttgaaca

SEQ ID NO: 1597664 - DNA, 25 bp, Homo sapien
gcagccagagtacagagggccaaca

SEQ ID NO: 1597665 - DNA, 25 bp, Homo sapien
agtctgcagccagagtacagagggc

SEQ ID NO: 1597666 - DNA, 25 bp, Homo sapien
cttggcatctatgatgtagaaggga

SEQ ID NO: 1597667 - DNA, 25 bp, Homo sapien
aagttgagggtgaacggcaccagga

SEQ ID NO: 1597668 - DNA, 25 bp, Homo sapien
gttgagggtgaacggcaccaggaga

SEQ ID NO: 1597669 - DNA, 25 bp, Homo sapien
gtggtgttgaacttcctggagccag

SEQ ID NO: 1597670 - DNA, 25 bp, Homo sapien
tggtgttgaacttcctggagccagg

SEQ ID NO: 1597671 - DNA, 25 bp, Homo sapien
gggaggatggagtccctgacccaag

SEQ ID NO: 1597672 - DNA, 25 bp, Homo sapien
ggagggaggatggagtccctgaccc

SEQ ID NO: 1597673 - DNA, 25 bp, Homo sapien
cccaaggtccactgtggaggtccca

SEQ ID NO: 1597674 - DNA, 25 bp, Homo sapien
tccctgacccaaggtccactgtgga

SEQ ID NO: 1597675 - DNA, 25 bp, Homo sapien
ggcacagggatccaatgggtgaaac

SEQ ID NO: 1597676 - DNA, 25 bp, Homo sapien
ctggtgggcacagggatccaatggg

SEQ ID NO: 1597677 - DNA, 25 bp, Homo sapien
gtgggcacagggatccaatgggtga

SEQ ID NO: 1597678 - DNA, 25 bp, Homo sapien
ctgctggtgggcacagggatccaat

SEQ ID NO: 1597679 - DNA, 25 bp, Homo sapien
tgatgccattggtcagctggctcag

SEQ ID NO: 1597680 - DNA, 25 bp, Homo sapien
agctcccagtatagctgctccctgt

SEQ ID NO: 1597681 - DNA, 25 bp, Homo sapien
gtgggtgcagatggcatccactcca

SEQ ID NO: 1597682 - DNA, 25 bp, Homo sapien
catagagactgttcctgtccagggt

SEQ ID NO: 1597683 - DNA, 25 bp, Homo sapien
agattgcctaggacttgtcttgaga

SEQ ID NO: 1597684 - DNA, 25 bp, Homo sapien
tgtcttgagattgctgagggaaaca

SEQ ID NO: 1597685 - DNA, 25 bp, Homo sapien
gacaatgaaaagattgcctaggact

SEQ ID NO: 1597686 - DNA, 25 bp, Homo sapien
gggaaacatatcaaggaaccagagg

SEQ ID NO: 1597687 - DNA, 25 bp, Homo sapien
gtctgcagccagagtacagaaggcc

SEQ ID NO: 1597688 - DNA, 25 bp, Homo sapien
agtctgcagccagagtacagaaggc

SEQ ID NO: 1597689 - DNA, 25 bp, Homo sapien
tgatgtagaagggactggatatctg

SEQ ID NO: 1597690 - DNA, 25 bp, Homo sapien
atgatgtagaagggactggatatct

SEQ ID NO: 1597691 - DNA, 25 bp, Homo sapien
tggtgttgaacttcctggagccagg

SEQ ID NO: 1597692 - DNA, 25 bp, Homo sapien
gtggtgttgaacttcctggagccag

SEQ ID NO: 1597693 - DNA, 25 bp, Homo sapien
tgaggttccaaggtccactgtggag

SEQ ID NO: 1597694 - DNA, 25 bp, Homo sapien
ggagaatggagtccctgaggttcca

SEQ ID NO: 1597695 - DNA, 25 bp, Homo sapien
tgcggggcttgggagggagaatgga

SEQ ID NO: 1597696 - DNA, 25 bp, Homo sapien
ttccaaggtccactgtggaggtccc

SEQ ID NO: 1597697 - DNA, 25 bp, Homo sapien
tgggcacagaggtccgatgggtgaa

SEQ ID NO: 1597698 - DNA, 25 bp, Homo sapien
tgctggtgggcacagaggtccgatg

SEQ ID NO: 1597699 - DNA, 25 bp, Homo sapien
gggcacagaggtccgatgggtgaaa

SEQ ID NO: 1597700 - DNA, 25 bp, Homo sapien
tggtgggcacagaggtccgatgggt

SEQ ID NO: 1597701 - DNA, 25 bp, Homo sapien
tagagactgttcctgtccagggtgt

SEQ ID NO: 1597702 - DNA, 25 bp, Homo sapien
tgtaggggcccagctctttgatgcc

SEQ ID NO: 1597703 - DNA, 25 bp, Homo sapien
cattgacatagagactgttcctgtc

SEQ ID NO: 1597704 - DNA, 25 bp, Homo sapien
tgacatagagactgttcctgtccag

SEQ ID NO: 1597705 - DNA, 25 bp, Homo sapien
tgcagccagagtacagagggccaac

SEQ ID NO: 1597706 - DNA, 25 bp, Homo sapien
gcagccagagtacagagggccaaca

SEQ ID NO: 1597707 - DNA, 25 bp, Homo sapien
agtctgcagccagagtacagagggc

SEQ ID NO: 1597708 - DNA, 25 bp, Homo sapien
tctgcagccagagtacagagggcca

SEQ ID NO: 1597709 - DNA, 25 bp, Homo sapien
tggtgttgaacttcctggagccagg

SEQ ID NO: 1597710 - DNA, 25 bp, Homo sapien
gtggtgttgaacttcctggagccag

SEQ ID NO: 1597711 - DNA, 25 bp, Homo sapien
atggagtccctgaggttctgagatc

SEQ ID NO: 1597712 - DNA, 25 bp, Homo sapien
ccctgaggttctgagatccactgtg

SEQ ID NO: 1597713 - DNA, 25 bp, Homo sapien
gaggttctgagatccactgtggagg

SEQ ID NO: 1597714 - DNA, 25 bp, Homo sapien
gggaggatggagtccctgaggttct

SEQ ID NO: 1597715 - DNA, 25 bp, Homo sapien
ttatgaagaggacttaatgggttta

SEQ ID NO: 1597716 - DNA, 25 bp, Homo sapien
ctcttggtgtaggaaccgaggcatg

SEQ ID NO: 1597717 - DNA, 25 bp, Homo sapien
ccgaggcatgtggatatgagttgaa

SEQ ID NO: 1597718 - DNA, 25 bp, Homo sapien
tgctcctcttggtgtaggaaccgag

SEQ ID NO: 1597719 - DNA, 25 bp, Homo sapien
gctggtggtggacacagagctctga

SEQ ID NO: 1597720 - DNA, 25 bp, Homo sapien
tggtggtggacacagagctctgatg

SEQ ID NO: 1597721 - DNA, 25 bp, Homo sapien
gacacagagctctgatgggtgaaac

SEQ ID NO: 1597722 - DNA, 25 bp, Homo sapien
tggacacagagctctgatgggtgaa

SEQ ID NO: 1597723 - DNA, 25 bp, Homo sapien
tcaatgtcattggtcagtttgctta

SEQ ID NO: 1597724 - DNA, 25 bp, Homo sapien
ttcaatgtcattggtcagtttgctt

SEQ ID NO: 1597725 - DNA, 25 bp, Homo sapien
cttcaatgtcattggtcagtttgct

SEQ ID NO: 1597726 - DNA, 25 bp, Homo sapien
agggccaacactggtgttcttgaac

SEQ ID NO: 1597727 - DNA, 25 bp, Homo sapien
gcagccagagtacagagggccaaca

SEQ ID NO: 1597728 - DNA, 25 bp, Homo sapien
aacactggtgttcttgaacaagggc

SEQ ID NO: 1597729 - DNA, 25 bp, Homo sapien
tctgcagccagagtacagagggcca

SEQ ID NO: 1597730 - DNA, 25 bp, Homo sapien
atgtcctcctcgtactgcaggttgg

SEQ ID NO: 1597731 - DNA, 25 bp, Homo sapien
cctcctcgtactgcaggttggtgat

SEQ ID NO: 1597732 - DNA, 25 bp, Homo sapien
tgtcctcctcgtactgcaggttggt

SEQ ID NO: 1597733 - DNA, 25 bp, Homo sapien
tcctcctcgtactgcaggttggtga

SEQ ID NO: 1597734 - DNA, 25 bp, Homo sapien
ccacatccactgtggaggtcccagg

SEQ ID NO: 1597735 - DNA, 25 bp, Homo sapien
ggaggatggagtccctgaggttccc

SEQ ID NO: 1597736 - DNA, 25 bp, Homo sapien
tgaggttcccacatccactgtggag

SEQ ID NO: 1597737 - DNA, 25 bp, Homo sapien
ctggaggatggagtccctgaggttc

SEQ ID NO: 1597738 - DNA, 25 bp, Homo sapien
ctttgcttggtgtaggatcatgggc

SEQ ID NO: 1597739 - DNA, 25 bp, Homo sapien
tcatgggcatgtggacatgagttga

SEQ ID NO: 1597740 - DNA, 25 bp, Homo sapien
catgtggacatgagttgaatactca

SEQ ID NO: 1597741 - DNA, 25 bp, Homo sapien
tatgggtttatgaggaggggcagct

SEQ ID NO: 1597742 - DNA, 25 bp, Homo sapien
gggcatagagcttcgatgggtgaaa

SEQ ID NO: 1597743 - DNA, 25 bp, Homo sapien
tggtgggcatagagcttcgatgggt

SEQ ID NO: 1597744 - DNA, 25 bp, Homo sapien
tggtggtgggcatagagcttcgatg

SEQ ID NO: 1597745 - DNA, 25 bp, Homo sapien
gtgggcatagagcttcgatgggtga

SEQ ID NO: 1597746 - DNA, 25 bp, Homo sapien
gtgtgcagatggcatccactgccgt

SEQ ID NO: 1597747 - DNA, 25 bp, Homo sapien
gtccagtccgaggtcttcagggtca

SEQ ID NO: 1597748 - DNA, 25 bp, Homo sapien
tcctggatgccatttgtcagattgc

SEQ ID NO: 1597749 - DNA, 25 bp, Homo sapien
cactgccgtggctgagctatccttc

SEQ ID NO: 1597750 - DNA, 25 bp, Homo sapien
acctacatatgcttagtccatccac

SEQ ID NO: 1597751 - DNA, 25 bp, Homo sapien
gaacctacatatgcttagtccatcc

SEQ ID NO: 1597752 - DNA, 25 bp, Homo sapien
gtaagaacctacatatgcttagtcc

SEQ ID NO: 1597753 - DNA, 25 bp, Homo sapien
tacatatgcttagtccatccacctc

SEQ ID NO: 1597754 - DNA, 25 bp, Homo sapien
gagtgaggctagtctgcagcctgaa

SEQ ID NO: 1597755 - DNA, 25 bp, Homo sapien
tgaatagaggtattccagactgcta

SEQ ID NO: 1597756 - DNA, 25 bp, Homo sapien
ctagtctgcagcctgaatagaggta

SEQ ID NO: 1597757 - DNA, 25 bp, Homo sapien
tccagactgctattcctgaacaagg

SEQ ID NO: 1597758 - DNA, 25 bp, Homo sapien
cctcctcgtactgcaggttggtgat

SEQ ID NO: 1597759 - DNA, 25 bp, Homo sapien
atgtcctcctcgtactgcaggttgg

SEQ ID NO: 1597760 - DNA, 25 bp, Homo sapien
tgtcctcctcgtactgcaggttggt

SEQ ID NO: 1597761 - DNA, 25 bp, Homo sapien
tcctcctcgtactgcaggttggtga

SEQ ID NO: 1597762 - DNA, 25 bp, Homo sapien
tgtggagctggggatggaggatgtg

SEQ ID NO: 1597763 - DNA, 25 bp, Homo sapien
gagctggggatggaggatgtggaaa

SEQ ID NO: 1597764 - DNA, 25 bp, Homo sapien
ctggggatggaggatgtggaaatcc

SEQ ID NO: 1597765 - DNA, 25 bp, Homo sapien
ctgtggagctggggatggaggatgt

SEQ ID NO: 1597766 - DNA, 25 bp, Homo sapien
ctggggagaatgtagaagtcactgg

SEQ ID NO: 1597767 - DNA, 25 bp, Homo sapien
ggggagaatgtagaagtcactggag

SEQ ID NO: 1597768 - DNA, 25 bp, Homo sapien
tggggagaatgtagaagtcactgga

SEQ ID NO: 1597769 - DNA, 25 bp, Homo sapien
ctggtggcaggggtccagtaccgac

SEQ ID NO: 1597770 - DNA, 25 bp, Homo sapien
gctggtggcaggggtccagtaccga

SEQ ID NO: 1597771 - DNA, 25 bp, Homo sapien
tggtggcaggggtccagtaccgacg

SEQ ID NO: 1597772 - DNA, 25 bp, Homo sapien
tgctggtggcaggggtccagtaccg

SEQ ID NO: 1597773 - DNA, 25 bp, Homo sapien
ggggctcacagatacgagaggcctt

SEQ ID NO: 1597774 - DNA, 25 bp, Homo sapien
tggggctcacagatacgagaggcct

SEQ ID NO: 1597775 - DNA, 25 bp, Homo sapien
gggctcacagatacgagaggccttg

SEQ ID NO: 1597776 - DNA, 25 bp, Homo sapien
tggtggagatccaggaccgatggtt

SEQ ID NO: 1597777 - DNA, 25 bp, Homo sapien
ggagatccaggaccgatggttataa

SEQ ID NO: 1597778 - DNA, 25 bp, Homo sapien
gtggagatccaggaccgatggttat

SEQ ID NO: 1597779 - DNA, 25 bp, Homo sapien
gagatccaggaccgatggttataac

SEQ ID NO: 1597780 - DNA, 25 bp, Homo sapien
tctctgttctgggatgggtgctcaa

SEQ ID NO: 1597781 - DNA, 25 bp, Homo sapien
gatatttgtaaacggctcaccagtg

SEQ ID NO: 1597782 - DNA, 25 bp, Homo sapien
tcaccaaccgtgatacagcaggcga

SEQ ID NO: 1597783 - DNA, 25 bp, Homo sapien
tctggactactatgggaaaaactgg

SEQ ID NO: 1597784 - DNA, 25 bp, Homo sapien
tgactggtcttatggtacctctgtg

SEQ ID NO: 1597785 - DNA, 25 bp, Homo sapien
actggcaggcgaagtggatgtctga

SEQ ID NO: 1597786 - DNA, 25 bp, Homo sapien
ctgagggcctttgactggtcttatg

SEQ ID NO: 1597787 - DNA, 25 bp, Homo sapien
tgtgtgctgcttcattgggtatttt

SEQ ID NO: 1597788 - DNA, 25 bp, Homo sapien
ttgataagcacttgtcactgttccc

SEQ ID NO: 1597789 - DNA, 25 bp, Homo sapien
gatgaagatgtcctgcctggttggc

SEQ ID NO: 1597790 - DNA, 25 bp, Homo sapien
accaagcgtccttcagtagtgctgc

SEQ ID NO: 1597791 - DNA, 25 bp, Homo sapien
tcaaccgtgttgagagtgaaggaac

SEQ ID NO: 1597792 - DNA, 25 bp, Homo sapien
gcaatggtggacagagtagcatccc

SEQ ID NO: 1597793 - DNA, 25 bp, Homo sapien
aaggttgaagaggagaatggcacag

SEQ ID NO: 1597794 - DNA, 25 bp, Homo sapien
tggtggacagagtagcatccccagg

SEQ ID NO: 1597795 - DNA, 25 bp, Homo sapien
tgaagaggagaatggcacaggagtg

SEQ ID NO: 1597796 - DNA, 25 bp, Homo sapien
gtggaactccagtggtggcaaatga

SEQ ID NO: 1597797 - DNA, 25 bp, Homo sapien
tcgtggaactccagtggtggcaaat

SEQ ID NO: 1597798 - DNA, 25 bp, Homo sapien
aacctgagatggctcgtggaactcc

SEQ ID NO: 1597799 - DNA, 25 bp, Homo sapien
ctgaacctgagatggctcgtggaac

SEQ ID NO: 1597800 - DNA, 25 bp, Homo sapien
cagtatactgtgaggctggaggcca

SEQ ID NO: 1597801 - DNA, 25 bp, Homo sapien
tacccactgggtatgtagccttgga

SEQ ID NO: 1597802 - DNA, 25 bp, Homo sapien
gaggttatcccagtggactccgtaa

SEQ ID NO: 1597803 - DNA, 25 bp, Homo sapien
gacatagtaaacctggattctggga

SEQ ID NO: 1597804 - DNA, 25 bp, Homo sapien
gatatctgtggttgtcgccgggcca

SEQ ID NO: 1597805 - DNA, 25 bp, Homo sapien
ttttgccaagccagacgtgaggagt

SEQ ID NO: 1597806 - DNA, 25 bp, Homo sapien
taaaggtaccttgtgaggatgcccc

SEQ ID NO: 1597807 - DNA, 25 bp, Homo sapien
taagagtactctgtgctgtagcccc

SEQ ID NO: 1597808 - DNA, 25 bp, Homo sapien
gaaacagttgtatgccccatggtgg

SEQ ID NO: 1597809 - DNA, 25 bp, Homo sapien
ggaaattcctgagtcgccatcgagt

SEQ ID NO: 1597810 - DNA, 25 bp, Homo sapien
tggtgtgtccaaggtaaatgtgccc

SEQ ID NO: 1597811 - DNA, 25 bp, Homo sapien
gaaatgctggtctctctcagtccag

SEQ ID NO: 1597812 - DNA, 25 bp, Homo sapien
catgttcggaacttgtgacccagcc

SEQ ID NO: 1597813 - DNA, 25 bp, Homo sapien
gagatgctcatcctctggacacgag

SEQ ID NO: 1597814 - DNA, 25 bp, Homo sapien
tcagttggccaagagatgtcacccc

SEQ ID NO: 1597815 - DNA, 25 bp, Homo sapien
ttgatatagaagcaagagcgtcccc

SEQ ID NO: 1597816 - DNA, 25 bp, Homo sapien
gtggtcactagcgttccatcagttg

SEQ ID NO: 1597817 - DNA, 25 bp, Homo sapien
tctttatggtggtcactagcgttcc

SEQ ID NO: 1597818 - DNA, 25 bp, Homo sapien
cgtggaatttccttgtgctgcctgg

SEQ ID NO: 1597819 - DNA, 25 bp, Homo sapien
tgctgcctggcttgacatctttatg

SEQ ID NO: 1597820 - DNA, 25 bp, Homo sapien
gaaatagagcttgcccatgtttctg

SEQ ID NO: 1597821 - DNA, 25 bp, Homo sapien
gagcttgcccatgtttctggagaac

SEQ ID NO: 1597822 - DNA, 25 bp, Homo sapien
ggaactgaaatagagcttgcccatg

SEQ ID NO: 1597823 - DNA, 25 bp, Homo sapien
gaactgaaatagagcttgcccatgt

SEQ ID NO: 1597824 - DNA, 25 bp, Homo sapien
gatgcaccaatatgttgggctgcct

SEQ ID NO: 1597825 - DNA, 25 bp, Homo sapien
caatggtctggcttgaggttaactc

SEQ ID NO: 1597826 - DNA, 25 bp, Homo sapien
gagaggaactagaaccagaccttgc

SEQ ID NO: 1597827 - DNA, 25 bp, Homo sapien
gctcctcctgggacatatttagagt

SEQ ID NO: 1597828 - DNA, 25 bp, Homo sapien
tgatgatgccttgcttgggtctgga

SEQ ID NO: 1597829 - DNA, 25 bp, Homo sapien
tgaggcatatctagggtcccctgtt

SEQ ID NO: 1597830 - DNA, 25 bp, Homo sapien
tgggtctggataagacatgctctct

SEQ ID NO: 1597831 - DNA, 25 bp, Homo sapien
ttttgatgcaagagaggtcgatgtc

SEQ ID NO: 1597832 - DNA, 25 bp, Homo sapien
gcggacttagtatccaaacttggga

SEQ ID NO: 1597833 - DNA, 25 bp, Homo sapien
tgaaatgagcttgcacttatggcct

SEQ ID NO: 1597834 - DNA, 25 bp, Homo sapien
caaaggcctttgatgggcttgagga

SEQ ID NO: 1597835 - DNA, 25 bp, Homo sapien
ccctttgggtgctgttgattgagta

SEQ ID NO: 1597836 - DNA, 25 bp, Homo sapien
caaccgaagatgtaggactggccaa

SEQ ID NO: 1597837 - DNA, 25 bp, Homo sapien
caaaaagtggttgcctcagaggagc

SEQ ID NO: 1597838 - DNA, 25 bp, Homo sapien
tatccgaagctatagtcaccagtgg

SEQ ID NO: 1597839 - DNA, 25 bp, Homo sapien
cattgttgccgtcccagtgaggtga

SEQ ID NO: 1597840 - DNA, 25 bp, Homo sapien
tgttctgtcaccacgattgcacctg

SEQ ID NO: 1597841 - DNA, 25 bp, Homo sapien
tagatgtcttaggtgacaaggtggc

SEQ ID NO: 1597842 - DNA, 25 bp, Homo sapien
tctggtgtggctttagtgctcctgc

SEQ ID NO: 1597843 - DNA, 25 bp, Homo sapien
gaatccatttctggtgtggctttag

SEQ ID NO: 1597844 - DNA, 25 bp, Homo sapien
agcgggtgggagaagatgacccagg

SEQ ID NO: 1597845 - DNA, 25 bp, Homo sapien
tccatgtggggatgacgaattctcc

SEQ ID NO: 1597846 - DNA, 25 bp, Homo sapien
atttttctaccagagggctgcctgt

SEQ ID NO: 1597847 - DNA, 25 bp, Homo sapien
gcaggactgattgttgatttttcta

SEQ ID NO: 1597848 - DNA, 25 bp, Homo sapien
tggccatactgaggttccatgtggg

SEQ ID NO: 1597849 - DNA, 25 bp, Homo sapien
tattcatgactttaggaggctgctg

SEQ ID NO: 1597850 - DNA, 25 bp, Homo sapien
tgtgaatcatctggatccactatgt

SEQ ID NO: 1597851 - DNA, 25 bp, Homo sapien
gatccactatgtggtgtggctgttg

SEQ ID NO: 1597852 - DNA, 25 bp, Homo sapien
catggctgtattcatgactttagga

SEQ ID NO: 1597853 - DNA, 25 bp, Homo sapien
ctgtggtttgggcaaagaccactgc

SEQ ID NO: 1597854 - DNA, 25 bp, Homo sapien
aggaagggtcgtgggtcaactgcct

SEQ ID NO: 1597855 - DNA, 25 bp, Homo sapien
aagaccactgcgtcgaaaggcagcc

SEQ ID NO: 1597856 - DNA, 25 bp, Homo sapien
ccacggagctgatgagtgacgccgg

SEQ ID NO: 1597857 - DNA, 25 bp, Homo sapien
ctattgcccctgcgccggcactaac

SEQ ID NO: 1597858 - DNA, 25 bp, Homo sapien
tcgttgtcgtatttgtcggaatagt

SEQ ID NO: 1597859 - DNA, 25 bp, Homo sapien
aatagtaaatttgtttgtgggacat

SEQ ID NO: 1597860 - DNA, 25 bp, Homo sapien
tgtcggaatagtaaatttgtttgtg

SEQ ID NO: 1597861 - DNA, 25 bp, Homo sapien
tgagactcaaactcctcgttgtcgt

SEQ ID NO: 1597862 - DNA, 25 bp, Homo sapien
aggctcacggccagcgctagcaggg

SEQ ID NO: 1597863 - DNA, 25 bp, Homo sapien
tcacggccagcgctagcaggggcct

SEQ ID NO: 1597864 - DNA, 25 bp, Homo sapien
ggccagcgctagcaggggcctgcgt

SEQ ID NO: 1597865 - DNA, 25 bp, Homo sapien
gaggaggctcacggccagcgctagc

SEQ ID NO: 1597866 - DNA, 25 bp, Homo sapien
gggtgtgcagggccctcccggccca

SEQ ID NO: 1597867 - DNA, 25 bp, Homo sapien
tgggtgtgcagggccctcccggccc

SEQ ID NO: 1597868 - DNA, 25 bp, Homo sapien
ggtgtgcagggccctcccggcccat

SEQ ID NO: 1597869 - DNA, 25 bp, Homo sapien
ctgggtgtgcagggccctcccggcc

SEQ ID NO: 1597870 - DNA, 25 bp, Homo sapien
tccggtggctaaaagctatggctct

SEQ ID NO: 1597871 - DNA, 25 bp, Homo sapien
tagccaacgtacacttgaggtctgt

SEQ ID NO: 1597872 - DNA, 25 bp, Homo sapien
gaaaagtccggttatcaagaagaga

SEQ ID NO: 1597873 - DNA, 25 bp, Homo sapien
tgacttcaagtatagtccggtggct

SEQ ID NO: 1597874 - DNA, 25 bp, Homo sapien
caggaagtcataggaccctctggcc

SEQ ID NO: 1597875 - DNA, 25 bp, Homo sapien
tgggcacgggatacactgggatcct

SEQ ID NO: 1597876 - DNA, 25 bp, Homo sapien
cagtgagcgtgtccccagggttctc

SEQ ID NO: 1597877 - DNA, 25 bp, Homo sapien
ctctggcctcgcaggtgaccttgaa

SEQ ID NO: 1597878 - DNA, 25 bp, Homo sapien
ggctctggtgtccagatgagtaatt

SEQ ID NO: 1597879 - DNA, 25 bp, Homo sapien
ttctttcttccttgttttgccatgt

SEQ ID NO: 1597880 - DNA, 25 bp, Homo sapien
ctttctccctttctgcttccttcct

SEQ ID NO: 1597881 - DNA, 25 bp, Homo sapien
ctttctttctccctttctgcttcct

SEQ ID NO: 1597882 - DNA, 25 bp, Homo sapien
ctttctttcttccttgttttgccat

SEQ ID NO: 1597883 - DNA, 25 bp, Homo sapien
aggccttgctgagacttgagctcag

SEQ ID NO: 1597884 - DNA, 25 bp, Homo sapien
ccctggaaccctgaggcgccccagg

SEQ ID NO: 1597885 - DNA, 25 bp, Homo sapien
ccaggcctgcagtgtataaatgcct

SEQ ID NO: 1597886 - DNA, 25 bp, Homo sapien
tgtttccacctccactaaccctgga

SEQ ID NO: 1597887 - DNA, 25 bp, Homo sapien
taaccaaacaggatctgtcactagg

SEQ ID NO: 1597888 - DNA, 25 bp, Homo sapien
tgcagaggacgcctcgggtcctttt

SEQ ID NO: 1597889 - DNA, 25 bp, Homo sapien
ttttcctcctgcgaaaccacagagg

SEQ ID NO: 1597890 - DNA, 25 bp, Homo sapien
gatctgtcactaggctcagcgtgca

SEQ ID NO: 1597891 - DNA, 25 bp, Homo sapien
catcgctccctctgagtgtcttgtc

SEQ ID NO: 1597892 - DNA, 25 bp, Homo sapien
tttctccagtgtcctgtaagtcctc

SEQ ID NO: 1597893 - DNA, 25 bp, Homo sapien
ccagtgtcctgtaagtcctcaaagc

SEQ ID NO: 1597894 - DNA, 25 bp, Homo sapien
caaatccctcatcgctccctctgag

SEQ ID NO: 1597895 - DNA, 25 bp, Homo sapien
atctcagcattagtaacaccagggc

SEQ ID NO: 1597896 - DNA, 25 bp, Homo sapien
agcattagtaacaccagggcccacc

SEQ ID NO: 1597897 - DNA, 25 bp, Homo sapien
tctcagcattagtaacaccagggcc

SEQ ID NO: 1597898 - DNA, 25 bp, Homo sapien
tcagcattagtaacaccagggccca

SEQ ID NO: 1597899 - DNA, 25 bp, Homo sapien
gggataagagatggccttgcttccg

SEQ ID NO: 1597900 - DNA, 25 bp, Homo sapien
taagagatggccttgcttccggttt

SEQ ID NO: 1597901 - DNA, 25 bp, Homo sapien
gatggccttgcttccggtttgaagg

SEQ ID NO: 1597902 - DNA, 25 bp, Homo sapien
cagggataagagatggccttgcttc

SEQ ID NO: 1597903 - DNA, 25 bp, Homo sapien
gtgttggtggccagacagaaatcaa

SEQ ID NO: 1597904 - DNA, 25 bp, Homo sapien
gatggtgttggtggccagacagaaa

SEQ ID NO: 1597905 - DNA, 25 bp, Homo sapien
gggatggtgttggtggccagacaga

SEQ ID NO: 1597906 - DNA, 25 bp, Homo sapien
tggtgttggtggccagacagaaatc

SEQ ID NO: 1597907 - DNA, 25 bp, Homo sapien
gagaaaagagaagtgtttcctgctc

SEQ ID NO: 1597908 - DNA, 25 bp, Homo sapien
gaaaagagaagtgtttcctgctccg

SEQ ID NO: 1597909 - DNA, 25 bp, Homo sapien
aaagagaagtgtttcctgctccggc

SEQ ID NO: 1597910 - DNA, 25 bp, Homo sapien
aaaagagaagtgtttcctgctccgg

SEQ ID NO: 1597911 - DNA, 25 bp, Homo sapien
taagccaggcttacttatggtgtgt

SEQ ID NO: 1597912 - DNA, 25 bp, Homo sapien
ataaataagccaggcttacttatgg

SEQ ID NO: 1597913 - DNA, 25 bp, Homo sapien
aataagccaggcttacttatggtgt

SEQ ID NO: 1597914 - DNA, 25 bp, Homo sapien
ccaggcttacttatggtgtgtgcct

SEQ ID NO: 1597915 - DNA, 25 bp, Homo sapien
aaatgtcttctggttgactccatga

SEQ ID NO: 1597916 - DNA, 25 bp, Homo sapien
gaatcaggtctagatatgtctcttg

SEQ ID NO: 1597917 - DNA, 25 bp, Homo sapien
tatctattatcaatggacccaggga

SEQ ID NO: 1597918 - DNA, 25 bp, Homo sapien
tgtctcttgcattgactgcaactac

SEQ ID NO: 1597919 - DNA, 25 bp, Homo sapien
ggtatcctccctatgaacttcctca

SEQ ID NO: 1597920 - DNA, 25 bp, Homo sapien
aaggtatcctccctatgaacttcct

SEQ ID NO: 1597921 - DNA, 25 bp, Homo sapien
ccctatgaacttcctcaaggttcct

SEQ ID NO: 1597922 - DNA, 25 bp, Homo sapien
tcctccctatgaacttcctcaaggt

SEQ ID NO: 1597923 - DNA, 25 bp, Homo sapien
tgaagccactgcagtcttcctaggt

SEQ ID NO: 1597924 - DNA, 25 bp, Homo sapien
gtcagtaaccacagaactaatgtac

SEQ ID NO: 1597925 - DNA, 25 bp, Homo sapien
agtcagtaaccacagaactaatgta

SEQ ID NO: 1597926 - DNA, 25 bp, Homo sapien
caggaggtgatctgagtgtaagaca

SEQ ID NO: 1597927 - DNA, 25 bp, Homo sapien
tattgatgagggtgtctgaacaggt

SEQ ID NO: 1597928 - DNA, 25 bp, Homo sapien
agaggaacaccaccaaatatgcaag

SEQ ID NO: 1597929 - DNA, 25 bp, Homo sapien
gacaaaatgattccagacagaggaa

SEQ ID NO: 1597930 - DNA, 25 bp, Homo sapien
aacaggctgaaaaggacgggctgca

SEQ ID NO: 1597931 - DNA, 25 bp, Homo sapien
gggcattcacaacactagtcaacag

SEQ ID NO: 1597932 - DNA, 25 bp, Homo sapien
cagttcacagaagaagagcgggatt

SEQ ID NO: 1597933 - DNA, 25 bp, Homo sapien
gcagcctgagtacgtgatgctccga

SEQ ID NO: 1597934 - DNA, 25 bp, Homo sapien
gtatttgctacagccatctgggtcc

SEQ ID NO: 1597935 - DNA, 25 bp, Homo sapien
gggtattacgtctgtatttgctaca

SEQ ID NO: 1597936 - DNA, 25 bp, Homo sapien
tttgctacagccatctgggtccatg

SEQ ID NO: 1597937 - DNA, 25 bp, Homo sapien
tcatgtctgggtattacgtctgtat

SEQ ID NO: 1597938 - DNA, 25 bp, Homo sapien
cggtcgtaggccatgactgcaagaa

SEQ ID NO: 1597939 - DNA, 25 bp, Homo sapien
gcgagcttgatgacctgaacgactt

SEQ ID NO: 1597940 - DNA, 25 bp, Homo sapien
taattcgggaagactcagcaacagc

SEQ ID NO: 1597941 - DNA, 25 bp, Homo sapien
catcatttgagggaccacagtgtac

SEQ ID NO: 1597942 - DNA, 25 bp, Homo sapien
taaacagatgtcagtaaaggagaga

SEQ ID NO: 1597943 - DNA, 25 bp, Homo sapien
aggaacaggctgaaagggattaact

SEQ ID NO: 1597944 - DNA, 25 bp, Homo sapien
ctctgtcactttcatgagaagaaat

SEQ ID NO: 1597945 - DNA, 25 bp, Homo sapien
ggttgtggttaaacagatgtcagta

SEQ ID NO: 1597946 - DNA, 25 bp, Homo sapien
aaagctttattacttgctgacggca

SEQ ID NO: 1597947 - DNA, 25 bp, Homo sapien
caaatgggaggtgagactcacagct

SEQ ID NO: 1597948 - DNA, 25 bp, Homo sapien
gaaacggcagagctaatgtacaccc

SEQ ID NO: 1597949 - DNA, 25 bp, Homo sapien
tgacggcattctcaaaacagacaag

SEQ ID NO: 1597950 - DNA, 25 bp, Homo sapien
gaccacggtatacatcactgatgct

SEQ ID NO: 1597951 - DNA, 25 bp, Homo sapien
tgggtagccccagaactaaggtaca

SEQ ID NO: 1597952 - DNA, 25 bp, Homo sapien
aatgtgacccgcagatggaaaaagc

SEQ ID NO: 1597953 - DNA, 25 bp, Homo sapien
ttcatgacagaggagacaattcgtg

SEQ ID NO: 1597954 - DNA, 25 bp, Homo sapien
cagcattgtggccaggtacatggac

SEQ ID NO: 1597955 - DNA, 25 bp, Homo sapien
taattgatggattgagcctgtgcct

SEQ ID NO: 1597956 - DNA, 25 bp, Homo sapien
tccaggtctatgcagaaggtcagct

SEQ ID NO: 1597957 - DNA, 25 bp, Homo sapien
caggacactaacgatgaaggacagc

SEQ ID NO: 1597958 - DNA, 25 bp, Homo sapien
agtgtctgagaagtttcctgctttc

SEQ ID NO: 1597959 - DNA, 25 bp, Homo sapien
gtgtctgagaagtttcctgctttca

SEQ ID NO: 1597960 - DNA, 25 bp, Homo sapien
tgcctcagtctcttgttataggtct

SEQ ID NO: 1597961 - DNA, 25 bp, Homo sapien
ctcagtctcttgttataggtctctc

SEQ ID NO: 1597962 - DNA, 25 bp, Homo sapien
gcctcagtctcttgttataggtctc

SEQ ID NO: 1597963 - DNA, 25 bp, Homo sapien
cagtctcttgttataggtctctcaa

SEQ ID NO: 1597964 - DNA, 25 bp, Homo sapien
gaatggctcttgagcagaatcagcc

SEQ ID NO: 1597965 - DNA, 25 bp, Homo sapien
gacagttgtagaggagccgagaata

SEQ ID NO: 1597966 - DNA, 25 bp, Homo sapien
gatggtgaatgtagactgctcctaa

SEQ ID NO: 1597967 - DNA, 25 bp, Homo sapien
ctggattcactgacacgggagtaaa

SEQ ID NO: 1597968 - DNA, 25 bp, Homo sapien
gagccaccttgcccagcctcaattc

SEQ ID NO: 1597969 - DNA, 25 bp, Homo sapien
ccaccttgcccagcctcaattcagt

SEQ ID NO: 1597970 - DNA, 25 bp, Homo sapien
accttgcccagcctcaattcagttt

SEQ ID NO: 1597971 - DNA, 25 bp, Homo sapien
gccaccttgcccagcctcaattcag

SEQ ID NO: 1597972 - DNA, 25 bp, Homo sapien
tggaaatgcattccggaccctctcg

SEQ ID NO: 1597973 - DNA, 25 bp, Homo sapien
tgtcacgactgtgggaaagctttcc

SEQ ID NO: 1597974 - DNA, 25 bp, Homo sapien
aaatccacatgcgagttcacactgg

SEQ ID NO: 1597975 - DNA, 25 bp, Homo sapien
agagaagccctttgactgcagtcag

SEQ ID NO: 1597976 - DNA, 25 bp, Homo sapien
cagagcttgtattgggaatgcctat

SEQ ID NO: 1597977 - DNA, 25 bp, Homo sapien
cagtcgtccaggtaaggcctgttca

SEQ ID NO: 1597978 - DNA, 25 bp, Homo sapien
cccaaggtggaagggcactcagtta

SEQ ID NO: 1597979 - DNA, 25 bp, Homo sapien
ccagtgcaatcatgggtgagcccaa

SEQ ID NO: 1597980 - DNA, 25 bp, Homo sapien
gattgctatgcaaaaccagaagata

SEQ ID NO: 1597981 - DNA, 25 bp, Homo sapien
aatttcaggcgcaactgggaattcg

SEQ ID NO: 1597982 - DNA, 25 bp, Homo sapien
atttcaggcgcaactgggaattcgg

SEQ ID NO: 1597983 - DNA, 25 bp, Homo sapien
tgcccgatgttaatgcacgttcttt

SEQ ID NO: 1597984 - DNA, 25 bp, Homo sapien
gtgcccgatgttaatgcacgttctt

SEQ ID NO: 1597985 - DNA, 25 bp, Homo sapien
ctctctaaaatggacctcatcggct

SEQ ID NO: 1597986 - DNA, 25 bp, Homo sapien
aatggacctcatcggcttcgttctc

SEQ ID NO: 1597987 - DNA, 25 bp, Homo sapien
gcagggtccgtgtgtactgccacag

SEQ ID NO: 1597988 - DNA, 25 bp, Homo sapien
agtttctcgtcaggcccacagccag

SEQ ID NO: 1597989 - DNA, 25 bp, Homo sapien
cagcagggtccgtgtgtactgccac

SEQ ID NO: 1597990 - DNA, 25 bp, Homo sapien
gtagtttctcgtcaggcccacagcc

SEQ ID NO: 1597991 - DNA, 25 bp, Homo sapien
tggacatccaggctcatagtagact

SEQ ID NO: 1597992 - DNA, 25 bp, Homo sapien
aagtctgctcctgattgtgatggcc

SEQ ID NO: 1597993 - DNA, 25 bp, Homo sapien
gacatcggttttgcctctactactg

SEQ ID NO: 1597994 - DNA, 25 bp, Homo sapien
gactcatctcttacgtgggctgcct

SEQ ID NO: 1597995 - DNA, 25 bp, Homo sapien
caagagtcggccctgctgaggagtc

SEQ ID NO: 1597996 - DNA, 25 bp, Homo sapien
gacaagagtcggccctgctgaggag

SEQ ID NO: 1597997 - DNA, 25 bp, Homo sapien
atggacaagagtcggccctgctgag

SEQ ID NO: 1597998 - DNA, 25 bp, Homo sapien
tcatggacaagagtcggccctgctg

SEQ ID NO: 1597999 - DNA, 25 bp, Homo sapien
aagtcctgttccatagaacaaggag

SEQ ID NO: 1598000 - DNA, 25 bp, Homo sapien
catagaacaaggagaccacacagag

SEQ ID NO: 1598001 - DNA, 25 bp, Homo sapien
gacaatgttattgaggagggtgtta

SEQ ID NO: 1598002 - DNA, 25 bp, Homo sapien
caagacaatgttattgaggagggtg

SEQ ID NO: 1598003 - DNA, 25 bp, Homo sapien
aagacaatgttattgaggagggtgt

SEQ ID NO: 1598004 - DNA, 25 bp, Homo sapien
acaatgttattgaggagggtgttag

SEQ ID NO: 1598005 - DNA, 25 bp, Homo sapien
tgaggcaccccatgtaggagatgtc

SEQ ID NO: 1598006 - DNA, 25 bp, Homo sapien
gagatgtctttgctccgtgcctgga

SEQ ID NO: 1598007 - DNA, 25 bp, Homo sapien
aatacacctgagtgaggcaccccat

SEQ ID NO: 1598008 - DNA, 25 bp, Homo sapien
tccgtgcctggatgctcactagcat

SEQ ID NO: 1598009 - DNA, 25 bp, Homo sapien
ctgtaaggttttctgcttccatgta

SEQ ID NO: 1598010 - DNA, 25 bp, Homo sapien
tctgcttccatgtagctgttgtgtc

SEQ ID NO: 1598011 - DNA, 25 bp, Homo sapien
gtaaggttttctgcttccatgtagc

SEQ ID NO: 1598012 - DNA, 25 bp, Homo sapien
tgcttccatgtagctgttgtgtctg

SEQ ID NO: 1598013 - DNA, 25 bp, Homo sapien
aagttttctcttctacacgatctgt

SEQ ID NO: 1598014 - DNA, 25 bp, Homo sapien
gtcacactaactctgatggttatca

SEQ ID NO: 1598015 - DNA, 25 bp, Homo sapien
ctgttcctaggaagccgtactgggt

SEQ ID NO: 1598016 - DNA, 25 bp, Homo sapien
tctgatggttatcactgaagttttc

SEQ ID NO: 1598017 - DNA, 25 bp, Homo sapien
tattcattactatgtttgtgccaag

SEQ ID NO: 1598018 - DNA, 25 bp, Homo sapien
gtattcattactatgtttgtgccaa

SEQ ID NO: 1598019 - DNA, 25 bp, Homo sapien
attcattactatgtttgtgccaagc

SEQ ID NO: 1598020 - DNA, 25 bp, Homo sapien
atggaagcagaaaaccttacagaat

SEQ ID NO: 1598021 - DNA, 25 bp, Homo sapien
gcagaaaaccttacagaattatcag

SEQ ID NO: 1598022 - DNA, 25 bp, Homo sapien
tggaagcagaaaaccttacagaatt

SEQ ID NO: 1598023 - DNA, 25 bp, Homo sapien
gaagcagaaaaccttacagaattat

SEQ ID NO: 1598024 - DNA, 25 bp, Homo sapien
agcagagtcatctcctatgaaggct

SEQ ID NO: 1598025 - DNA, 25 bp, Homo sapien
tgtggacatgcaaactcacagcaga

SEQ ID NO: 1598026 - DNA, 25 bp, Homo sapien
tgaaggctgcctgactcagatgtct

SEQ ID NO: 1598027 - DNA, 25 bp, Homo sapien
cagagtcatctcctatgaaggctgc

SEQ ID NO: 1598028 - DNA, 25 bp, Homo sapien
cacttttaatttccctgttaggctg

SEQ ID NO: 1598029 - DNA, 25 bp, Homo sapien
ggataagaggacatgtctgaactga

SEQ ID NO: 1598030 - DNA, 25 bp, Homo sapien
ctgggataagaggacatgtctgaac

SEQ ID NO: 1598031 - DNA, 25 bp, Homo sapien
ataagaggacatgtctgaactgagg

SEQ ID NO: 1598032 - DNA, 25 bp, Homo sapien
tgggataagaggacatgtctgaact

SEQ ID NO: 1598033 - DNA, 25 bp, Homo sapien
cagcaaggaaatacatgactatgtc

SEQ ID NO: 1598034 - DNA, 25 bp, Homo sapien
ggcagcaaggaaatacatgactatg

SEQ ID NO: 1598035 - DNA, 25 bp, Homo sapien
caaggaaatacatgactatgtcatt

SEQ ID NO: 1598036 - DNA, 25 bp, Homo sapien
gcaaggaaatacatgactatgtcat

SEQ ID NO: 1598037 - DNA, 25 bp, Homo sapien
ggtaatttgtaaggcaatccaattg

SEQ ID NO: 1598038 - DNA, 25 bp, Homo sapien
aacaggcaagggtgggggagttgag

SEQ ID NO: 1598039 - DNA, 25 bp, Homo sapien
aatttgtaaggcaatccaattgtgc

SEQ ID NO: 1598040 - DNA, 25 bp, Homo sapien
gcaggtaatttgtaaggcaatccaa

SEQ ID NO: 1598041 - DNA, 25 bp, Homo sapien
gttcatgatgactggataatccaga

SEQ ID NO: 1598042 - DNA, 25 bp, Homo sapien
ccagagggtgacagatgtccacaaa

SEQ ID NO: 1598043 - DNA, 25 bp, Homo sapien
catgatgactggataatccagaggg

SEQ ID NO: 1598044 - DNA, 25 bp, Homo sapien
gatgactggataatccagagggtga

SEQ ID NO: 1598045 - DNA, 25 bp, Homo sapien
agaagcatgtcttccatgcatccaa

SEQ ID NO: 1598046 - DNA, 25 bp, Homo sapien
cagaagcatgtcttccatgcatcca

SEQ ID NO: 1598047 - DNA, 25 bp, Homo sapien
cgatgccagccaaggacaggttgga

SEQ ID NO: 1598048 - DNA, 25 bp, Homo sapien
ctatggtggaggggaaaccgatgcc

SEQ ID NO: 1598049 - DNA, 25 bp, Homo sapien
tggtggaggggaaaccgatgccagc

SEQ ID NO: 1598050 - DNA, 25 bp, Homo sapien
cagccaaggacaggttggagaggaa

SEQ ID NO: 1598051 - DNA, 25 bp, Homo sapien
ttagactgttctgctgtgcagcctc

SEQ ID NO: 1598052 - DNA, 25 bp, Homo sapien
ttctgctgtgcagcctccacagggc

SEQ ID NO: 1598053 - DNA, 25 bp, Homo sapien
tgttctgctgtgcagcctccacagg

SEQ ID NO: 1598054 - DNA, 25 bp, Homo sapien
ctgctgtgcagcctccacagggcac

SEQ ID NO: 1598055 - DNA, 25 bp, Homo sapien
catcactgaggtgaccgcacccttc

SEQ ID NO: 1598056 - DNA, 25 bp, Homo sapien
gtacatcactgaggtgaccgcaccc

SEQ ID NO: 1598057 - DNA, 25 bp, Homo sapien
tacatcactgaggtgaccgcaccct

SEQ ID NO: 1598058 - DNA, 25 bp, Homo sapien
gctgaactgaggtaggctccaagtc

SEQ ID NO: 1598059 - DNA, 25 bp, Homo sapien
gaggtaggctccaagtcctgttcca

SEQ ID NO: 1598060 - DNA, 25 bp, Homo sapien
ctgggagttcaacaggctaagaata

SEQ ID NO: 1598061 - DNA, 25 bp, Homo sapien
gaaagaggacgcagctgaactgagg

SEQ ID NO: 1598062 - DNA, 25 bp, Homo sapien
ccatcacagtcaggaccatgtcatt

SEQ ID NO: 1598063 - DNA, 25 bp, Homo sapien
atcacagtcaggaccatgtcattca

SEQ ID NO: 1598064 - DNA, 25 bp, Homo sapien
acagtcaggaccatgtcattcatac

SEQ ID NO: 1598065 - DNA, 25 bp, Homo sapien
cacagtcaggaccatgtcattcata

SEQ ID NO: 1598066 - DNA, 25 bp, Homo sapien
gattctgctgtgagattgcatatca

SEQ ID NO: 1598067 - DNA, 25 bp, Homo sapien
tgattctgctgtgagattgcatatc

SEQ ID NO: 1598068 - DNA, 25 bp, Homo sapien
ttctgctgtgagattgcatatcaac

SEQ ID NO: 1598069 - DNA, 25 bp, Homo sapien
attctgctgtgagattgcatatcaa

SEQ ID NO: 1598070 - DNA, 25 bp, Homo sapien
agaggtgagtccgatgtcagccaag

SEQ ID NO: 1598071 - DNA, 25 bp, Homo sapien
ggatggtggcagaggtgagtccgat

SEQ ID NO: 1598072 - DNA, 25 bp, Homo sapien
ggcagaggtgagtccgatgtcagcc

SEQ ID NO: 1598073 - DNA, 25 bp, Homo sapien
tggtggcagaggtgagtccgatgtc

SEQ ID NO: 1598074 - DNA, 25 bp, Homo sapien
ttctgcgagtctgtgtaacttggac

SEQ ID NO: 1598075 - DNA, 25 bp, Homo sapien
ctgcgagtctgtgtaacttggacac

SEQ ID NO: 1598076 - DNA, 25 bp, Homo sapien
gtgagattctgcgagtctgtgtaac

SEQ ID NO: 1598077 - DNA, 25 bp, Homo sapien
gattctgcgagtctgtgtaacttgg

SEQ ID NO: 1598078 - DNA, 25 bp, Homo sapien
taacattttcacacttgaagaccat

SEQ ID NO: 1598079 - DNA, 25 bp, Homo sapien
agcaattcacaagtaacattttcac

SEQ ID NO: 1598080 - DNA, 25 bp, Homo sapien
tttggatacaagcaattcacaagta

SEQ ID NO: 1598081 - DNA, 25 bp, Homo sapien
tgctgtgtgcatattttggatacaa

SEQ ID NO: 1598082 - DNA, 25 bp, Homo sapien
ctgcgcttcccctctgctgggccat

SEQ ID NO: 1598083 - DNA, 25 bp, Homo sapien
tgagctgcgcttcccctctgctggg

SEQ ID NO: 1598084 - DNA, 25 bp, Homo sapien
gagctgcgcttcccctctgctgggc

SEQ ID NO: 1598085 - DNA, 25 bp, Homo sapien
gctgcgcttcccctctgctgggcca

SEQ ID NO: 1598086 - DNA, 25 bp, Homo sapien
accacggagagcaggtccgccgtcc

SEQ ID NO: 1598087 - DNA, 25 bp, Homo sapien
ccacggagagcaggtccgccgtcct

SEQ ID NO: 1598088 - DNA, 25 bp, Homo sapien
gaccacggagagcaggtccgccgtc

SEQ ID NO: 1598089 - DNA, 25 bp, Homo sapien
acggagagcaggtccgccgtcctcc

SEQ ID NO: 1598090 - DNA, 25 bp, Homo sapien
ttacccctgtagagtcctgccattg

SEQ ID NO: 1598091 - DNA, 25 bp, Homo sapien
tgacactcgggcatgaaaactagga

SEQ ID NO: 1598092 - DNA, 25 bp, Homo sapien
tcatcagaagctactcatggagtcc

SEQ ID NO: 1598093 - DNA, 25 bp, Homo sapien
caagatttcagtaatgcaccgcata

SEQ ID NO: 1598094 - DNA, 25 bp, Homo sapien
gaatcataagctagtgctcgctgct

SEQ ID NO: 1598095 - DNA, 25 bp, Homo sapien
gaagatgtttctacattcagccagg

SEQ ID NO: 1598096 - DNA, 25 bp, Homo sapien
cagtagtcctaatggatttgcagca

SEQ ID NO: 1598097 - DNA, 25 bp, Homo sapien
gctcgctgctggcaccatatttgaa

SEQ ID NO: 1598098 - DNA, 25 bp, Homo sapien
cacggcttactacatgctcaaactc

SEQ ID NO: 1598099 - DNA, 25 bp, Homo sapien
tcacggcttactacatgctcaaact

SEQ ID NO: 1598100 - DNA, 25 bp, Homo sapien
tgataacattctaagattgcagatt

SEQ ID NO: 1598101 - DNA, 25 bp, Homo sapien
tgatctgataacattctaagattgc

SEQ ID NO: 1598102 - DNA, 25 bp, Homo sapien
gaggctatcaaagcttattttagaa

SEQ ID NO: 1598103 - DNA, 25 bp, Homo sapien
tttattttagaggctatcaaagctt

SEQ ID NO: 1598104 - DNA, 25 bp, Homo sapien
gaactaagatacacaccaaggcctg

SEQ ID NO: 1598105 - DNA, 25 bp, Homo sapien
ggaagaggacgatgcattggaacta

SEQ ID NO: 1598106 - DNA, 25 bp, Homo sapien
agcagtgtttctagggtcctcttga

SEQ ID NO: 1598107 - DNA, 25 bp, Homo sapien
cctgttccgcaagcaatagatgaag

SEQ ID NO: 1598108 - DNA, 25 bp, Homo sapien
acaaagtccagaaggccggccacca

SEQ ID NO: 1598109 - DNA, 25 bp, Homo sapien
gggcacaaagtccagaaggccggcc

SEQ ID NO: 1598110 - DNA, 25 bp, Homo sapien
acgtagagcaggatgtaattgacat

SEQ ID NO: 1598111 - DNA, 25 bp, Homo sapien
tagagcaggatgtaattgacatgtg

SEQ ID NO: 1598112 - DNA, 25 bp, Homo sapien
gactcaactggtgcagaaggacacc

SEQ ID NO: 1598113 - DNA, 25 bp, Homo sapien
aactggtgcagaaggacacccgcag

SEQ ID NO: 1598114 - DNA, 25 bp, Homo sapien
tgaatgactcaactggtgcagaagg

SEQ ID NO: 1598115 - DNA, 25 bp, Homo sapien
gaaggacacccgcagcaccaacaga

SEQ ID NO: 1598116 - DNA, 25 bp, Homo sapien
agtatgacaagctgaggaaccagga

SEQ ID NO: 1598117 - DNA, 25 bp, Homo sapien
ctggtgacacagtagtacagggggt

SEQ ID NO: 1598118 - DNA, 25 bp, Homo sapien
gggagtatgacaagctgaggaacca

SEQ ID NO: 1598119 - DNA, 25 bp, Homo sapien
tcagggagtatgacaagctgaggaa

SEQ ID NO: 1598120 - DNA, 25 bp, Homo sapien
tgaggagaaatgtgtccatgcctcc

SEQ ID NO: 1598121 - DNA, 25 bp, Homo sapien
gagaaatgtgtccatgcctccaaaa

SEQ ID NO: 1598122 - DNA, 25 bp, Homo sapien
ggtgaggagaaatgtgtccatgcct

SEQ ID NO: 1598123 - DNA, 25 bp, Homo sapien
gaggagaaatgtgtccatgcctcca

SEQ ID NO: 1598124 - DNA, 25 bp, Homo sapien
atagctgatggcattgctctgcacc

SEQ ID NO: 1598125 - DNA, 25 bp, Homo sapien
ctgcatagctgatggcattgctctg

SEQ ID NO: 1598126 - DNA, 25 bp, Homo sapien
atgcagtctgcatagctgatggcat

SEQ ID NO: 1598127 - DNA, 25 bp, Homo sapien
gcagtctgcatagctgatggcattg

SEQ ID NO: 1598128 - DNA, 25 bp, Homo sapien
ctctaggtcttgggaaaatcccagg

SEQ ID NO: 1598129 - DNA, 25 bp, Homo sapien
cagtgcaaagagcaactgttgatcc

SEQ ID NO: 1598130 - DNA, 25 bp, Homo sapien
agagcaactgttgatcctctaggtc

SEQ ID NO: 1598131 - DNA, 25 bp, Homo sapien
tctaggtcttgggaaaatcccagga

SEQ ID NO: 1598132 - DNA, 25 bp, Homo sapien
tgaaactcttgtttgatttcccaag

SEQ ID NO: 1598133 - DNA, 25 bp, Homo sapien
ctgaaactcttgtttgatttcccaa

SEQ ID NO: 1598134 - DNA, 25 bp, Homo sapien
ctcttgtttgatttcccaagtccat

SEQ ID NO: 1598135 - DNA, 25 bp, Homo sapien
actcttgtttgatttcccaagtcca

SEQ ID NO: 1598136 - DNA, 25 bp, Homo sapien
taaatgtcaccagctataaagtcaa

SEQ ID NO: 1598137 - DNA, 25 bp, Homo sapien
gacaacctaggtaaatggacaatta

SEQ ID NO: 1598138 - DNA, 25 bp, Homo sapien
gatattgcaattctacgtgctagcc

SEQ ID NO: 1598139 - DNA, 25 bp, Homo sapien
catcaactggaaaactcgatattgt

SEQ ID NO: 1598140 - DNA, 25 bp, Homo sapien
tatggtattgatgcaagaaaagaca

SEQ ID NO: 1598141 - DNA, 25 bp, Homo sapien
aagttggaaggctttcactaccaga

SEQ ID NO: 1598142 - DNA, 25 bp, Homo sapien
tgtgaaaattaatcctgagattcca

SEQ ID NO: 1598143 - DNA, 25 bp, Homo sapien
gaaggcaagacaatcttaaagaata

SEQ ID NO: 1598144 - DNA, 25 bp, Homo sapien
agccatgtctgaagctcgttatacc

SEQ ID NO: 1598145 - DNA, 25 bp, Homo sapien
tgtctgaagctcgttatacccaagg

SEQ ID NO: 1598146 - DNA, 25 bp, Homo sapien
tgaagctcgttatacccaaggactt

SEQ ID NO: 1598147 - DNA, 25 bp, Homo sapien
gacagaattcaactagataacattt

SEQ ID NO: 1598148 - DNA, 25 bp, Homo sapien
tacacatcaggtaaatgcacactgt

SEQ ID NO: 1598149 - DNA, 25 bp, Homo sapien
ggacaggtgtgtgaaacaactggaa

SEQ ID NO: 1598150 - DNA, 25 bp, Homo sapien
gaaatgtttcaacaggtgccctcaa

SEQ ID NO: 1598151 - DNA, 25 bp, Homo sapien
cattcctgagcatatagcacatacc

SEQ ID NO: 1598152 - DNA, 25 bp, Homo sapien
gatggccccactaaacatagcataa

SEQ ID NO: 1598153 - DNA, 25 bp, Homo sapien
tggactgtgtaagaaagactgcaac

SEQ ID NO: 1598154 - DNA, 25 bp, Homo sapien
ggtaatcaacgagccagcattctac

SEQ ID NO: 1598155 - DNA, 25 bp, Homo sapien
ccagccacgagcaaggacaaagaat

SEQ ID NO: 1598156 - DNA, 25 bp, Homo sapien
gttctgatatgtactgtaaggtggg

SEQ ID NO: 1598157 - DNA, 25 bp, Homo sapien
gaagaatgacgaaatgctttcccac

SEQ ID NO: 1598158 - DNA, 25 bp, Homo sapien
tcacatgccttcgaaaggatgaggg

SEQ ID NO: 1598159 - DNA, 25 bp, Homo sapien
ccttcgaaagtaggcaggacaaaca

SEQ ID NO: 1598160 - DNA, 25 bp, Homo sapien
cacatgtgtattaagggaagtggga

SEQ ID NO: 1598161 - DNA, 25 bp, Homo sapien
acatgtgtattaagggaagtgggaa

SEQ ID NO: 1598162 - DNA, 25 bp, Homo sapien
catgtgtattaagggaagtgggaag

SEQ ID NO: 1598163 - DNA, 25 bp, Homo sapien
tcacatgtgtattaagggaagtggg

SEQ ID NO: 1598164 - DNA, 25 bp, Homo sapien
tcttatatgtattataaggtgagag

SEQ ID NO: 1598165 - DNA, 25 bp, Homo sapien
ccagtatgtgtcctcccatgtacag

SEQ ID NO: 1598166 - DNA, 25 bp, Homo sapien
tgagaggaagagctaaaggccttcc

SEQ ID NO: 1598167 - DNA, 25 bp, Homo sapien
cagtgagttttgaggactcgctgaa

SEQ ID NO: 1598168 - DNA, 25 bp, Homo sapien
acattccttacattcataaggctta

SEQ ID NO: 1598169 - DNA, 25 bp, Homo sapien
cattccttacattcataaggcttat

SEQ ID NO: 1598170 - DNA, 25 bp, Homo sapien
gaattcttttgtgttctgtgagcga

SEQ ID NO: 1598171 - DNA, 25 bp, Homo sapien
ttcttttgtgttctgtgagcgatga

SEQ ID NO: 1598172 - DNA, 25 bp, Homo sapien
tgtgttctgtgagcgatgaggaaca

SEQ ID NO: 1598173 - DNA, 25 bp, Homo sapien
tttgtgttctgtgagcgatgaggaa

SEQ ID NO: 1598174 - DNA, 25 bp, Homo sapien
ggaacttggctgaaagtctgtccat

SEQ ID NO: 1598175 - DNA, 25 bp, Homo sapien
gatgaatgatccacgaaggcctttc

SEQ ID NO: 1598176 - DNA, 25 bp, Homo sapien
ccagtatgagacctgatgtgactct

SEQ ID NO: 1598177 - DNA, 25 bp, Homo sapien
tgccctaaagaatgaggaacagctg

SEQ ID NO: 1598178 - DNA, 25 bp, Homo sapien
ttcatagatgttctctaccatatga

SEQ ID NO: 1598179 - DNA, 25 bp, Homo sapien
ttgttctgataatcaataccacagg

SEQ ID NO: 1598180 - DNA, 25 bp, Homo sapien
cattagttttaagttgagtctcaaa

SEQ ID NO: 1598181 - DNA, 25 bp, Homo sapien
cacaggactcctggttttcatgtaa

SEQ ID NO: 1598182 - DNA, 25 bp, Homo sapien
ccacaaatatcttgtgaagcaactg

SEQ ID NO: 1598183 - DNA, 25 bp, Homo sapien
ccctggataagttctctcttcactg

SEQ ID NO: 1598184 - DNA, 25 bp, Homo sapien
tcccataaagatgccctggataagt

SEQ ID NO: 1598185 - DNA, 25 bp, Homo sapien
tcccactgggagatcagatggggtg

SEQ ID NO: 1598186 - DNA, 25 bp, Homo sapien
cttcccggtgctctcccataaagat

SEQ ID NO: 1598187 - DNA, 25 bp, Homo sapien
caaagactgtagcagatatcataca

SEQ ID NO: 1598188 - DNA, 25 bp, Homo sapien
caaattaaaacaaggcaccactaca

SEQ ID NO: 1598189 - DNA, 25 bp, Homo sapien
tcctgaacattcacaacaacaaatg

SEQ ID NO: 1598190 - DNA, 25 bp, Homo sapien
gagccaaagacctttacagacacct

SEQ ID NO: 1598191 - DNA, 25 bp, Homo sapien
agaggtttctctgagcaagatccag

SEQ ID NO: 1598192 - DNA, 25 bp, Homo sapien
gccaggttctggaagttttccagca

SEQ ID NO: 1598193 - DNA, 25 bp, Homo sapien
ggccaggttctggaagttttccagc

SEQ ID NO: 1598194 - DNA, 25 bp, Homo sapien
tgtagaggtttctctgagcaagatc

SEQ ID NO: 1598195 - DNA, 25 bp, Homo sapien
tccacaggttggagattccacagga

SEQ ID NO: 1598196 - DNA, 25 bp, Homo sapien
tccacaggaggtcccactaaactgc

SEQ ID NO: 1598197 - DNA, 25 bp, Homo sapien
tggctaaaatcagggctcctactac

SEQ ID NO: 1598198 - DNA, 25 bp, Homo sapien
ccaaggtcattacgaagtacacaga

SEQ ID NO: 1598199 - DNA, 25 bp, Homo sapien
ctatttttctgtaactcagcagttt

SEQ ID NO: 1598200 - DNA, 25 bp, Homo sapien
tttttctgtaactcagcagtttttc

SEQ ID NO: 1598201 - DNA, 25 bp, Homo sapien
tttctgtaactcagcagtttttctt

SEQ ID NO: 1598202 - DNA, 25 bp, Homo sapien
tctgtaactcagcagtttttctttc

SEQ ID NO: 1598203 - DNA, 25 bp, Homo sapien
tgtacccagaccagagttcccgatt

SEQ ID NO: 1598204 - DNA, 25 bp, Homo sapien
tcacagagaacgaggctgaagcgct

SEQ ID NO: 1598205 - DNA, 25 bp, Homo sapien
tttcggaggctgatgaactacgaca

SEQ ID NO: 1598206 - DNA, 25 bp, Homo sapien
gaagcgcttgtccttgagacacgaa

SEQ ID NO: 1598207 - DNA, 25 bp, Homo sapien
aagagtgagcaacgtttattgtgaa

SEQ ID NO: 1598208 - DNA, 25 bp, Homo sapien
caaagagtgagcaacgtttattgtg

SEQ ID NO: 1598209 - DNA, 25 bp, Homo sapien
agtgagcaacgtttattgtgaagag

SEQ ID NO: 1598210 - DNA, 25 bp, Homo sapien
tattcccttatcgacccctcccatg

SEQ ID NO: 1598211 - DNA, 25 bp, Homo sapien
tgggttggaaaaagccgcagcagct

SEQ ID NO: 1598212 - DNA, 25 bp, Homo sapien
cgcgtgcgcggcgtgtctgcgtggg

SEQ ID NO: 1598213 - DNA, 25 bp, Homo sapien
taggtggtcctagcctttgcgcgtg

SEQ ID NO: 1598214 - DNA, 25 bp, Homo sapien
gtctgcgtgggcgcatgcgcataac

SEQ ID NO: 1598215 - DNA, 25 bp, Homo sapien
gggttagtcccgtaggcatacagca

SEQ ID NO: 1598216 - DNA, 25 bp, Homo sapien
tgagccaagtgtcagtcctgaagac

SEQ ID NO: 1598217 - DNA, 25 bp, Homo sapien
cagatctttctcaagagagtgcagg

SEQ ID NO: 1598218 - DNA, 25 bp, Homo sapien
gacgatctcatggtcacgttggaga

SEQ ID NO: 1598219 - DNA, 25 bp, Homo sapien
attgttgacggtgaatccatttttc

SEQ ID NO: 1598220 - DNA, 25 bp, Homo sapien
catctaacaatctgaggataggaca

SEQ ID NO: 1598221 - DNA, 25 bp, Homo sapien
tatggcttacccttcctacttggtg

SEQ ID NO: 1598222 - DNA, 25 bp, Homo sapien
acttctgaaataattgttgacggtg

SEQ ID NO: 1598223 - DNA, 25 bp, Homo sapien
gagcgacatattgcatgcttttgca

SEQ ID NO: 1598224 - DNA, 25 bp, Homo sapien
tttttgccattagttgctttgatta

SEQ ID NO: 1598225 - DNA, 25 bp, Homo sapien
ggctttgctgagatacgtagttgga

SEQ ID NO: 1598226 - DNA, 25 bp, Homo sapien
taatgtggaaagagcgacatattgc

SEQ ID NO: 1598227 - DNA, 25 bp, Homo sapien
gcgtccagcccatatcttgcacttt

SEQ ID NO: 1598228 - DNA, 25 bp, Homo sapien
tatcttgcactttgattggctattt

SEQ ID NO: 1598229 - DNA, 25 bp, Homo sapien
gcccatatcttgcactttgattggc

SEQ ID NO: 1598230 - DNA, 25 bp, Homo sapien
gtccagcccatatcttgcactttga

SEQ ID NO: 1598231 - DNA, 25 bp, Homo sapien
ttgaagacatccatgtgggtcccct

SEQ ID NO: 1598232 - DNA, 25 bp, Homo sapien
ttgctcccaccaatgtttgcgtcca

SEQ ID NO: 1598233 - DNA, 25 bp, Homo sapien
aagacatccatgtgggtcccctcag

SEQ ID NO: 1598234 - DNA, 25 bp, Homo sapien
caatgtttgcgtccatgggagagga

SEQ ID NO: 1598235 - DNA, 25 bp, Homo sapien
caaatgtgcgagctgggcagcccac

SEQ ID NO: 1598236 - DNA, 25 bp, Homo sapien
agtcctcagggcgaatccgccaaat

SEQ ID NO: 1598237 - DNA, 25 bp, Homo sapien
ggcgaatccgccaaatgtgcgagct

SEQ ID NO: 1598238 - DNA, 25 bp, Homo sapien
tccgccaaatgtgcgagctgggcag

SEQ ID NO: 1598239 - DNA, 25 bp, Homo sapien
ggaagcggaagtgggcgtccgtcgc

SEQ ID NO: 1598240 - DNA, 25 bp, Homo sapien
aagcggaagtgggcgtccgtcgcct

SEQ ID NO: 1598241 - DNA, 25 bp, Homo sapien
agcggaagtgggcgtccgtcgcctc

SEQ ID NO: 1598242 - DNA, 25 bp, Homo sapien
gaagcggaagtgggcgtccgtcgcc

SEQ ID NO: 1598243 - DNA, 25 bp, Homo sapien
gaagtttgtgatatgactgtgatgc

SEQ ID NO: 1598244 - DNA, 25 bp, Homo sapien
tcattgccccaaaagagaatcccat

SEQ ID NO: 1598245 - DNA, 25 bp, Homo sapien
agagaattcattagagagactatgg

SEQ ID NO: 1598246 - DNA, 25 bp, Homo sapien
ccatgactacaatctaactctagaa

SEQ ID NO: 1598247 - DNA, 25 bp, Homo sapien
gatctacctgtccattctgaaatga

SEQ ID NO: 1598248 - DNA, 25 bp, Homo sapien
caatgaatatgaggtcacagatacc

SEQ ID NO: 1598249 - DNA, 25 bp, Homo sapien
aaacacgttgtttccatatagcagc

SEQ ID NO: 1598250 - DNA, 25 bp, Homo sapien
tatagtcaccaagccatacatcagg

SEQ ID NO: 1598251 - DNA, 25 bp, Homo sapien
gttctagaagttttatgatctcagg

SEQ ID NO: 1598252 - DNA, 25 bp, Homo sapien
ttttctatcgaactgtatgtatttc

SEQ ID NO: 1598253 - DNA, 25 bp, Homo sapien
tatcgaactgtatgtatttcgtaaa

SEQ ID NO: 1598254 - DNA, 25 bp, Homo sapien
aaatattgtgcagattctttctccc

SEQ ID NO: 1598255 - DNA, 25 bp, Homo sapien
gtgatgcctccagtattgttcaaga

SEQ ID NO: 1598256 - DNA, 25 bp, Homo sapien
cacctttcatagtgtgacatttgac

SEQ ID NO: 1598257 - DNA, 25 bp, Homo sapien
catttgccgaagagactgtcctctc

SEQ ID NO: 1598258 - DNA, 25 bp, Homo sapien
ttagttgaccatacatgccagggtt

SEQ ID NO: 1598259 - DNA, 25 bp, Homo sapien
catgttactaagtgtcctttctttt

SEQ ID NO: 1598260 - DNA, 25 bp, Homo sapien
aatcagctccattactgatgaagcc

SEQ ID NO: 1598261 - DNA, 25 bp, Homo sapien
cagtattagggtaatctggattgag

SEQ ID NO: 1598262 - DNA, 25 bp, Homo sapien
cctcatcttttgtttgtccaaggaa

SEQ ID NO: 1598263 - DNA, 25 bp, Homo sapien
cattactcacatgtctgtcatttaa

SEQ ID NO: 1598264 - DNA, 25 bp, Homo sapien
tccaatcacctaatgacatagccag

SEQ ID NO: 1598265 - DNA, 25 bp, Homo sapien
taatgaatagtaataagtgaccaca

SEQ ID NO: 1598266 - DNA, 25 bp, Homo sapien
cagtagtaaatatggttatgtacag

SEQ ID NO: 1598267 - DNA, 25 bp, Homo sapien
taatttcgggatattaactcagccc

SEQ ID NO: 1598268 - DNA, 25 bp, Homo sapien
cctgaataccttaagtgggacacgg

SEQ ID NO: 1598269 - DNA, 25 bp, Homo sapien
cattgtcaccataggagatgtcagc

SEQ ID NO: 1598270 - DNA, 25 bp, Homo sapien
tagtgttgaacatctagcaggccta

SEQ ID NO: 1598271 - DNA, 25 bp, Homo sapien
ggtggatcaagaacagctgaagaca

SEQ ID NO: 1598272 - DNA, 25 bp, Homo sapien
gtctgatctccaaggtggatcaaga

SEQ ID NO: 1598273 - DNA, 25 bp, Homo sapien
gaattttacaaggtgactgtgcagg

SEQ ID NO: 1598274 - DNA, 25 bp, Homo sapien
ccaaggtggatcaagaacagctgaa

SEQ ID NO: 1598275 - DNA, 25 bp, Homo sapien
tactgcttgttcctatcactggtga

SEQ ID NO: 1598276 - DNA, 25 bp, Homo sapien
catacgttcatttggtctccgagaa

SEQ ID NO: 1598277 - DNA, 25 bp, Homo sapien
caccatctattcaatcgttcatacg

SEQ ID NO: 1598278 - DNA, 25 bp, Homo sapien
gctttttgccagataatactgtctt

SEQ ID NO: 1598279 - DNA, 25 bp, Homo sapien
gaatcctcatggaagagaattcctg

SEQ ID NO: 1598280 - DNA, 25 bp, Homo sapien
gacagaggagtgagcttattcaact

SEQ ID NO: 1598281 - DNA, 25 bp, Homo sapien
tgtattaaagaagccctttgctggg

SEQ ID NO: 1598282 - DNA, 25 bp, Homo sapien
taatagggcaaaagtcatacgcacc

SEQ ID NO: 1598283 - DNA, 25 bp, Homo sapien
ggctgcagacatttacaggaaccca

SEQ ID NO: 1598284 - DNA, 25 bp, Homo sapien
cttgcaacttatactcaggaataga

SEQ ID NO: 1598285 - DNA, 25 bp, Homo sapien
gtcaataccatttataagagcaaca

SEQ ID NO: 1598286 - DNA, 25 bp, Homo sapien
tgacgtaaacaaatttgagacattc

SEQ ID NO: 1598287 - DNA, 25 bp, Homo sapien
tgcaggaggctaccctttgacccca

SEQ ID NO: 1598288 - DNA, 25 bp, Homo sapien
agtcccagcgcgacgtccgggaaag

SEQ ID NO: 1598289 - DNA, 25 bp, Homo sapien
gaggcgacctgcaggaggctaccct

SEQ ID NO: 1598290 - DNA, 25 bp, Homo sapien
gaagtgcggtgtcggcaggaagtcc

SEQ ID NO: 1598291 - DNA, 25 bp, Homo sapien
tgatctaaagcttttcccaagttcc

SEQ ID NO: 1598292 - DNA, 25 bp, Homo sapien
aagttcctcacagtattagtttcct

SEQ ID NO: 1598293 - DNA, 25 bp, Homo sapien
aagcttgatctaaagcttttcccaa

SEQ ID NO: 1598294 - DNA, 25 bp, Homo sapien
tagtttcctagggttgctgtacaaa

SEQ ID NO: 1598295 - DNA, 25 bp, Homo sapien
tcctctggaggccataatgaaagca

SEQ ID NO: 1598296 - DNA, 25 bp, Homo sapien
gaagtgcaatatcaaggtggagaca

SEQ ID NO: 1598297 - DNA, 25 bp, Homo sapien
gatgtcagattagggatcgaaccca

SEQ ID NO: 1598298 - DNA, 25 bp, Homo sapien
taggacttagggcttacaaatatgg

SEQ ID NO: 1598299 - DNA, 25 bp, Homo sapien
ttatgctgacagtctctcatccgca

SEQ ID NO: 1598300 - DNA, 25 bp, Homo sapien
tctctcatccgcatgccttctttca

SEQ ID NO: 1598301 - DNA, 25 bp, Homo sapien
tctcatccgcatgccttctttcatg

SEQ ID NO: 1598302 - DNA, 25 bp, Homo sapien
tgacagtctctcatccgcatgcctt

SEQ ID NO: 1598303 - DNA, 25 bp, Homo sapien
tacacgtgaatggttttttggcgct

SEQ ID NO: 1598304 - DNA, 25 bp, Homo sapien
taagactggaggaatgcgtaaatgc

SEQ ID NO: 1598305 - DNA, 25 bp, Homo sapien
ggatccgcatgtgaaggttaacaca

SEQ ID NO: 1598306 - DNA, 25 bp, Homo sapien
tgtatgttcactaaggcgagaggat

SEQ ID NO: 1598307 - DNA, 25 bp, Homo sapien
tgagaagatctagtgaaggctatcc

SEQ ID NO: 1598308 - DNA, 25 bp, Homo sapien
gttgagaagatctagtgaaggctat

SEQ ID NO: 1598309 - DNA, 25 bp, Homo sapien
agaagatctagtgaaggctatccca

SEQ ID NO: 1598310 - DNA, 25 bp, Homo sapien
gagaagatctagtgaaggctatccc

SEQ ID NO: 1598311 - DNA, 25 bp, Homo sapien
ttaagcaagaggaaacagtgaaggc

SEQ ID NO: 1598312 - DNA, 25 bp, Homo sapien
aagaggaaacagtgaaggctctccc

SEQ ID NO: 1598313 - DNA, 25 bp, Homo sapien
gttgacttaagcaagaggaaacagt

SEQ ID NO: 1598314 - DNA, 25 bp, Homo sapien
gcaagaggaaacagtgaaggctctc

SEQ ID NO: 1598315 - DNA, 25 bp, Homo sapien
taagttgacaagacctggtgaaggc

SEQ ID NO: 1598316 - DNA, 25 bp, Homo sapien
gttctctggcaaacaacatctgggt

SEQ ID NO: 1598317 - DNA, 25 bp, Homo sapien
gtttgtatacgcacagcaaggtctg

SEQ ID NO: 1598318 - DNA, 25 bp, Homo sapien
tacagaacgttgctctccagtagag

SEQ ID NO: 1598319 - DNA, 25 bp, Homo sapien
cactatctagttacaaatgtgtact

SEQ ID NO: 1598320 - DNA, 25 bp, Homo sapien
aactcactatctagttacaaatgtg

SEQ ID NO: 1598321 - DNA, 25 bp, Homo sapien
attgtcttaaaaactcactatctag

SEQ ID NO: 1598322 - DNA, 25 bp, Homo sapien
acaaatgtgtacttgaggggaactc

SEQ ID NO: 1598323 - DNA, 25 bp, Homo sapien
ctgctgaagggctaactctttggtt

SEQ ID NO: 1598324 - DNA, 25 bp, Homo sapien
tttaagttgcactttccattctgaa

SEQ ID NO: 1598325 - DNA, 25 bp, Homo sapien
cctgctgaagggctaactctttggt

SEQ ID NO: 1598326 - DNA, 25 bp, Homo sapien
atcctgctgaagggctaactctttg

SEQ ID NO: 1598327 - DNA, 25 bp, Homo sapien
catacagggtagacagatggagctg

SEQ ID NO: 1598328 - DNA, 25 bp, Homo sapien
acaaacacaaagacagatttgaaga

SEQ ID NO: 1598329 - DNA, 25 bp, Homo sapien
tggagctgaaaatgagagggatcat

SEQ ID NO: 1598330 - DNA, 25 bp, Homo sapien
gcaataataaggatatagcgtcaaa

SEQ ID NO: 1598331 - DNA, 25 bp, Homo sapien
cttggaaatcacctctctgcactgt

SEQ ID NO: 1598332 - DNA, 25 bp, Homo sapien
ttggaaatcacctctctgcactgtc

SEQ ID NO: 1598333 - DNA, 25 bp, Homo sapien
tactgtggccaaattcttgtagttc

SEQ ID NO: 1598334 - DNA, 25 bp, Homo sapien
tgtggccaaattcttgtagttctcc

SEQ ID NO: 1598335 - DNA, 25 bp, Homo sapien
ctactgtggccaaattcttgtagtt

SEQ ID NO: 1598336 - DNA, 25 bp, Homo sapien
ggccaaattcttgtagttctccagc

SEQ ID NO: 1598337 - DNA, 25 bp, Homo sapien
tctgagttgggtccagtaaagtcca

SEQ ID NO: 1598338 - DNA, 25 bp, Homo sapien
gaagtccacagccagatcatcaaaa

SEQ ID NO: 1598339 - DNA, 25 bp, Homo sapien
tccacagccagatcatcaaaagtca

SEQ ID NO: 1598340 - DNA, 25 bp, Homo sapien
tttctctgagttgggtccagtaaag

SEQ ID NO: 1598341 - DNA, 25 bp, Homo sapien
caaaacatgtctaccagtgttcact

SEQ ID NO: 1598342 - DNA, 25 bp, Homo sapien
acacatgctggcttgagccacaaaa

SEQ ID NO: 1598343 - DNA, 25 bp, Homo sapien
ggaggtcctctctatccacactcac

SEQ ID NO: 1598344 - DNA, 25 bp, Homo sapien
tacctacagagtctgagggctcaca

SEQ ID NO: 1598345 - DNA, 25 bp, Homo sapien
caaccagactgggaggtcatctgat

SEQ ID NO: 1598346 - DNA, 25 bp, Homo sapien
ggcacttcttacacatgattgtatg

SEQ ID NO: 1598347 - DNA, 25 bp, Homo sapien
ctccactgcagcacactcttgagca

SEQ ID NO: 1598348 - DNA, 25 bp, Homo sapien
tgacacggcttgaatggcacttctt

SEQ ID NO: 1598349 - DNA, 25 bp, Homo sapien
ttcatgtcccttaccatgtgtcaga

SEQ ID NO: 1598350 - DNA, 25 bp, Homo sapien
ccatgagggaagactaattaatcaa

SEQ ID NO: 1598351 - DNA, 25 bp, Homo sapien
taaaaactatgcagttgggaccatg

SEQ ID NO: 1598352 - DNA, 25 bp, Homo sapien
ggatgacattcaaggcaaaccctca

SEQ ID NO: 1598353 - DNA, 25 bp, Homo sapien
ggatatacttcctgcatacctgata

SEQ ID NO: 1598354 - DNA, 25 bp, Homo sapien
tcttttcttgaaggcagactgggtc

SEQ ID NO: 1598355 - DNA, 25 bp, Homo sapien
ggaattcgactagggactcagtcct

SEQ ID NO: 1598356 - DNA, 25 bp, Homo sapien
aacaatttgtcagacagtcagccac

SEQ ID NO: 1598357 - DNA, 25 bp, Homo sapien
tcagaaatgaagctgcagcgtgaat

SEQ ID NO: 1598358 - DNA, 25 bp, Homo sapien
caccgctatcaattccagggcacta

SEQ ID NO: 1598359 - DNA, 25 bp, Homo sapien
gcgtgaatgatcaggcacaggccac

SEQ ID NO: 1598360 - DNA, 25 bp, Homo sapien
aacccagggctgacgataattccca

SEQ ID NO: 1598361 - DNA, 25 bp, Homo sapien
cagggctgatggctgaatgtgcttc

SEQ ID NO: 1598362 - DNA, 25 bp, Homo sapien
ggctgatggctgaatgtgcttcaaa

SEQ ID NO: 1598363 - DNA, 25 bp, Homo sapien
tgatggctgaatgtgcttcaaagca

SEQ ID NO: 1598364 - DNA, 25 bp, Homo sapien
ggctgaatgtgcttcaaagcacctt

SEQ ID NO: 1598365 - DNA, 25 bp, Homo sapien
cattctctttatccagggttaacgg

SEQ ID NO: 1598366 - DNA, 25 bp, Homo sapien
cacggacagaggtaacctccattct

SEQ ID NO: 1598367 - DNA, 25 bp, Homo sapien
ctacacggacagaggtaacctccat

SEQ ID NO: 1598368 - DNA, 25 bp, Homo sapien
cctccattctctttatccagggtta

SEQ ID NO: 1598369 - DNA, 25 bp, Homo sapien
gacatcattagcactctctctgcag

SEQ ID NO: 1598370 - DNA, 25 bp, Homo sapien
ctctctgcagagcatatagaggaaa

SEQ ID NO: 1598371 - DNA, 25 bp, Homo sapien
gaagaccaacttccactactgagga

SEQ ID NO: 1598372 - DNA, 25 bp, Homo sapien
cactgaaaacggtgtacactacaaa

SEQ ID NO: 1598373 - DNA, 25 bp, Homo sapien
tctgtatctcatgggcagccttagg

SEQ ID NO: 1598374 - DNA, 25 bp, Homo sapien
catgagcacaatagccagggttgcc

SEQ ID NO: 1598375 - DNA, 25 bp, Homo sapien
cagccttaggtatctttgggtgcca

SEQ ID NO: 1598376 - DNA, 25 bp, Homo sapien
tctagtacccgctaaaagtgcagag

SEQ ID NO: 1598377 - DNA, 25 bp, Homo sapien
tgaaaactcagttatagggccaaat

SEQ ID NO: 1598378 - DNA, 25 bp, Homo sapien
gcagtggatctacatgaaaagtgga

SEQ ID NO: 1598379 - DNA, 25 bp, Homo sapien
tctgactcacaggtcaaggtgtacg

SEQ ID NO: 1598380 - DNA, 25 bp, Homo sapien
aagtggaatcgcatactgaaaactc

SEQ ID NO: 1598381 - DNA, 25 bp, Homo sapien
tattccaaagaaattcctatgtgtg

SEQ ID NO: 1598382 - DNA, 25 bp, Homo sapien
gagtgcatatggatggtaaagaacc

SEQ ID NO: 1598383 - DNA, 25 bp, Homo sapien
tgaggagtaattgacatggcgtgcc

SEQ ID NO: 1598384 - DNA, 25 bp, Homo sapien
gactgtttgaactgcgcatctgctc

SEQ ID NO: 1598385 - DNA, 25 bp, Homo sapien
ctgatgccatatgggagggctccac

SEQ ID NO: 1598386 - DNA, 25 bp, Homo sapien
tgccatatgggagggctccacagcc

SEQ ID NO: 1598387 - DNA, 25 bp, Homo sapien
gcctgctggggtacctctctgctgc

SEQ ID NO: 1598388 - DNA, 25 bp, Homo sapien
ggctgatgccatatgggagggctcc

SEQ ID NO: 1598389 - DNA, 25 bp, Homo sapien
tctgtgaagcactgccaatactccc

SEQ ID NO: 1598390 - DNA, 25 bp, Homo sapien
gtgaagcactgccaatactcccatc

SEQ ID NO: 1598391 - DNA, 25 bp, Homo sapien
ttgtctctgtgaagcactgccaata

SEQ ID NO: 1598392 - DNA, 25 bp, Homo sapien
ctgttgtctctgtgaagcactgcca

SEQ ID NO: 1598393 - DNA, 25 bp, Homo sapien
cccggcagctgctcatctgataggg

SEQ ID NO: 1598394 - DNA, 25 bp, Homo sapien
aaatacataatgctagcgcctcgaa

SEQ ID NO: 1598395 - DNA, 25 bp, Homo sapien
acattagattgtcccagaggcccgg

SEQ ID NO: 1598396 - DNA, 25 bp, Homo sapien
gaaattctctatcatgctctagggc

SEQ ID NO: 1598397 - DNA, 25 bp, Homo sapien
tgctggcattcatacccctggataa

SEQ ID NO: 1598398 - DNA, 25 bp, Homo sapien
ctgttgagcgcacgcacgacctttg

SEQ ID NO: 1598399 - DNA, 25 bp, Homo sapien
ccctggataacaccctcctgttgag

SEQ ID NO: 1598400 - DNA, 25 bp, Homo sapien
cgcacgcacgacctttgaccagttt

SEQ ID NO: 1598401 - DNA, 25 bp, Homo sapien
ccagactggccaacatgctgaaacc

SEQ ID NO: 1598402 - DNA, 25 bp, Homo sapien
actggccaacatgctgaaaccatct

SEQ ID NO: 1598403 - DNA, 25 bp, Homo sapien
cagactggccaacatgctgaaacca

SEQ ID NO: 1598404 - DNA, 25 bp, Homo sapien
ggccaacatgctgaaaccatctcta

SEQ ID NO: 1598405 - DNA, 25 bp, Homo sapien
tatttttggtctcagcttgcatatc

SEQ ID NO: 1598406 - DNA, 25 bp, Homo sapien
cagtatggctaaatcataccatatt

SEQ ID NO: 1598407 - DNA, 25 bp, Homo sapien
tttttggtctcagcttgcatatcac

SEQ ID NO: 1598408 - DNA, 25 bp, Homo sapien
ccttcagtatggctaaatcatacca

SEQ ID NO: 1598409 - DNA, 25 bp, Homo sapien
cgacgagctggactcgccaggtacg

SEQ ID NO: 1598410 - DNA, 25 bp, Homo sapien
ctggactcgccaggtacgggagatt

SEQ ID NO: 1598411 - DNA, 25 bp, Homo sapien
tgattcgaacgacgaaaactcgttg

SEQ ID NO: 1598412 - DNA, 25 bp, Homo sapien
cagtcaacctgattcgaacgacgaa

SEQ ID NO: 1598413 - DNA, 25 bp, Homo sapien
gcaaggtctctctaaggaggcccct

SEQ ID NO: 1598414 - DNA, 25 bp, Homo sapien
tccgacctcgccaaagctgtattaa

SEQ ID NO: 1598415 - DNA, 25 bp, Homo sapien
tcgcagtgacaactcgagtggcttt

SEQ ID NO: 1598416 - DNA, 25 bp, Homo sapien
ggctttttgaacctggcggcgccag

SEQ ID NO: 1598417 - DNA, 25 bp, Homo sapien
acgttcctagcaccctcaaaatgat

SEQ ID NO: 1598418 - DNA, 25 bp, Homo sapien
atgcttcctttgataatcctgccag

SEQ ID NO: 1598419 - DNA, 25 bp, Homo sapien
tcctcccacgttcctagcaccctca

SEQ ID NO: 1598420 - DNA, 25 bp, Homo sapien
gatgcttcctttgataatcctgcca

SEQ ID NO: 1598421 - DNA, 25 bp, Homo sapien
tccaaatggatatggaatttttcat

SEQ ID NO: 1598422 - DNA, 25 bp, Homo sapien
attccaaatggatatggaatttttc

SEQ ID NO: 1598423 - DNA, 25 bp, Homo sapien
tttttaaattccaaatggatatgga

SEQ ID NO: 1598424 - DNA, 25 bp, Homo sapien
tttaaattccaaatggatatggaat

SEQ ID NO: 1598425 - DNA, 25 bp, Homo sapien
ccagcctaaggtcaacgctagagaa

SEQ ID NO: 1598426 - DNA, 25 bp, Homo sapien
catcaggtacaaagggaatctcgtc

SEQ ID NO: 1598427 - DNA, 25 bp, Homo sapien
gaagacatacagtcaccagcctaag

SEQ ID NO: 1598428 - DNA, 25 bp, Homo sapien
gaatctcgtcatcaggctaatagca

SEQ ID NO: 1598429 - DNA, 25 bp, Homo sapien
gattcaactgttcaggctttctcac

SEQ ID NO: 1598430 - DNA, 25 bp, Homo sapien
gaagaactagtgttttcctacatcc

SEQ ID NO: 1598431 - DNA, 25 bp, Homo sapien
catgttcagttaggcttgaggaaac

SEQ ID NO: 1598432 - DNA, 25 bp, Homo sapien
tctacagtgtgagtttgtacatatc

SEQ ID NO: 1598433 - DNA, 25 bp, Homo sapien
tagtgtgttttcaaatgtgcaatac

SEQ ID NO: 1598434 - DNA, 25 bp, Homo sapien
ctagtgtgttttcaaatgtgcaata

SEQ ID NO: 1598435 - DNA, 25 bp, Homo sapien
tcgcacatgattagtaagatctgaa

SEQ ID NO: 1598436 - DNA, 25 bp, Homo sapien
ttaaatgttgaatacgtcctgagga

SEQ ID NO: 1598437 - DNA, 25 bp, Homo sapien
cgtcctgaggatgtacggaaggcct

SEQ ID NO: 1598438 - DNA, 25 bp, Homo sapien
gagtttttaagcgatcatgaaagca

SEQ ID NO: 1598439 - DNA, 25 bp, Homo sapien
cacatgcgttacattcagaggtctt

SEQ ID NO: 1598440 - DNA, 25 bp, Homo sapien
atttcgaaaggaatttccacatgcg

SEQ ID NO: 1598441 - DNA, 25 bp, Homo sapien
tggaatttcgaaaggaatttccaca

SEQ ID NO: 1598442 - DNA, 25 bp, Homo sapien
catgcgttacattcagaggtcttct

SEQ ID NO: 1598443 - DNA, 25 bp, Homo sapien
caataaggcctgcagatgtaccaaa

SEQ ID NO: 1598444 - DNA, 25 bp, Homo sapien
tcaactagactggaggagacaacaa

SEQ ID NO: 1598445 - DNA, 25 bp, Homo sapien
tacatgttcaagaaagcctgacggc

SEQ ID NO: 1598446 - DNA, 25 bp, Homo sapien
taacacctgaggatgtaccaaaggc

SEQ ID NO: 1598447 - DNA, 25 bp, Homo sapien
aaattatcttgccaaagggctggcc

SEQ ID NO: 1598448 - DNA, 25 bp, Homo sapien
cttggagaactcttggcagtgtgct

SEQ ID NO: 1598449 - DNA, 25 bp, Homo sapien
ggaagaggctcatgcaagaaatggc

SEQ ID NO: 1598450 - DNA, 25 bp, Homo sapien
tctgaagacactggttatctctgac

SEQ ID NO: 1598451 - DNA, 25 bp, Homo sapien
acacagggaaagatacaccaatgga

SEQ ID NO: 1598452 - DNA, 25 bp, Homo sapien
tcatttcctgtttgccccaagaaac

SEQ ID NO: 1598453 - DNA, 25 bp, Homo sapien
actgtacaggtttctctgagctggg

SEQ ID NO: 1598454 - DNA, 25 bp, Homo sapien
tgaggacaggttcttgtagttctcc

SEQ ID NO: 1598455 - DNA, 25 bp, Homo sapien
acagccacactgtcaaaggttacca

SEQ ID NO: 1598456 - DNA, 25 bp, Homo sapien
gctgggtccagtaaagtccactctt

SEQ ID NO: 1598457 - DNA, 25 bp, Homo sapien
tcctgctgcagtgctgaaacactgg

SEQ ID NO: 1598458 - DNA, 25 bp, Homo sapien
ttgtatcccattagaagtttgtatt

SEQ ID NO: 1598459 - DNA, 25 bp, Homo sapien
tatcccattagaagtttgtattttc

SEQ ID NO: 1598460 - DNA, 25 bp, Homo sapien
acactggtttgatgttttattgccc

SEQ ID NO: 1598461 - DNA, 25 bp, Homo sapien
cttggagaactccttgctgcaaggt

SEQ ID NO: 1598462 - DNA, 25 bp, Homo sapien
tgcaaggttctcaactcttcttctt

SEQ ID NO: 1598463 - DNA, 25 bp, Homo sapien
agagatgacactgggtttaaagagc

SEQ ID NO: 1598464 - DNA, 25 bp, Homo sapien
ccaagagatgacactgggtttaaag

SEQ ID NO: 1598465 - DNA, 25 bp, Homo sapien
tcttccctaagaggctgcataaaat

SEQ ID NO: 1598466 - DNA, 25 bp, Homo sapien
tatatctcttccctaagaggctgca

SEQ ID NO: 1598467 - DNA, 25 bp, Homo sapien
caatgtatatctcttccctaagagg

SEQ ID NO: 1598468 - DNA, 25 bp, Homo sapien
cctaagaggctgcataaaatgatgg

SEQ ID NO: 1598469 - DNA, 25 bp, Homo sapien
tttggccacgttctcataattctcc

SEQ ID NO: 1598470 - DNA, 25 bp, Homo sapien
aacaatttgtcaggcagtaagccat

SEQ ID NO: 1598471 - DNA, 25 bp, Homo sapien
tcatgaaggcagattgggttcctag

SEQ ID NO: 1598472 - DNA, 25 bp, Homo sapien
aaggcagattgggttcctagaaaga

SEQ ID NO: 1598473 - DNA, 25 bp, Homo sapien
tgaaggcagattgggttcctagaaa

SEQ ID NO: 1598474 - DNA, 25 bp, Homo sapien
catgaaggcagattgggttcctaga

SEQ ID NO: 1598475 - DNA, 25 bp, Homo sapien
tcttctcaaagaacacacttaaggg

SEQ ID NO: 1598476 - DNA, 25 bp, Homo sapien
tgtgaatactaaggcctagagccct

SEQ ID NO: 1598477 - DNA, 25 bp, Homo sapien
gaatgtaagtctttttgtgcccatg

SEQ ID NO: 1598478 - DNA, 25 bp, Homo sapien
tagagccctggactatatattctgc

SEQ ID NO: 1598479 - DNA, 25 bp, Homo sapien
catagggcaaatcctgtgaggctga

SEQ ID NO: 1598480 - DNA, 25 bp, Homo sapien
aggctgacagtgaaatatgtctgga

SEQ ID NO: 1598481 - DNA, 25 bp, Homo sapien
tatgtctggacacagttttttgtga

SEQ ID NO: 1598482 - DNA, 25 bp, Homo sapien
cagttttttgtgattccaaggacat

SEQ ID NO: 1598483 - DNA, 25 bp, Homo sapien
tacagtcatcctgttaatggtaaat

SEQ ID NO: 1598484 - DNA, 25 bp, Homo sapien
tattctagtattagtgtgtaaaccc

SEQ ID NO: 1598485 - DNA, 25 bp, Homo sapien
aatggtaaattcgattattctagta

SEQ ID NO: 1598486 - DNA, 25 bp, Homo sapien
tagtattagtgtgtaaaccctccat

SEQ ID NO: 1598487 - DNA, 25 bp, Homo sapien
aacacggtggagtcgccaggtccgt

SEQ ID NO: 1598488 - DNA, 25 bp, Homo sapien
ccgaacacggtggagtcgccaggtc

SEQ ID NO: 1598489 - DNA, 25 bp, Homo sapien
gggacggagtcaatcgaacgcgaac

SEQ ID NO: 1598490 - DNA, 25 bp, Homo sapien
aatcgaacgcgaacggcaaaattct

SEQ ID NO: 1598491 - DNA, 25 bp, Homo sapien
caaagtagtgaacgaccagacaaca

SEQ ID NO: 1598492 - DNA, 25 bp, Homo sapien
caaaggaaaaagtggctctgaggaa

SEQ ID NO: 1598493 - DNA, 25 bp, Homo sapien
tagtgaacgaccagacaacacaaag

SEQ ID NO: 1598494 - DNA, 25 bp, Homo sapien
tctgaggaaacaggcgccagcgacc

SEQ ID NO: 1598495 - DNA, 25 bp, Homo sapien
tttatttgctcataatttttgaggc

SEQ ID NO: 1598496 - DNA, 25 bp, Homo sapien
tatttgctcataatttttgaggctg

SEQ ID NO: 1598497 - DNA, 25 bp, Homo sapien
cagaaatttatttgctcataatttt

SEQ ID NO: 1598498 - DNA, 25 bp, Homo sapien
tgctcataatttttgaggctggaag

SEQ ID NO: 1598499 - DNA, 25 bp, Homo sapien
ggtcccagggatgaaagccttaatg

SEQ ID NO: 1598500 - DNA, 25 bp, Homo sapien
gacagaaagttgagctcaggcagta

SEQ ID NO: 1598501 - DNA, 25 bp, Homo sapien
aaattctgtgcctgctaccctggta

SEQ ID NO: 1598502 - DNA, 25 bp, Homo sapien
gaacaacagagagctttaccacaat

SEQ ID NO: 1598503 - DNA, 25 bp, Homo sapien
tcatgattactagaggcctgcttac

SEQ ID NO: 1598504 - DNA, 25 bp, Homo sapien
taatccctggacaatagaatgctgc

SEQ ID NO: 1598505 - DNA, 25 bp, Homo sapien
tacatcctgacccaactaaagggtg

SEQ ID NO: 1598506 - DNA, 25 bp, Homo sapien
taagaaccagaaccagatatagcag

SEQ ID NO: 1598507 - DNA, 25 bp, Homo sapien
tccaactttgagcatagaaggaaga

SEQ ID NO: 1598508 - DNA, 25 bp, Homo sapien
taacactactcaagaaacggtacag

SEQ ID NO: 1598509 - DNA, 25 bp, Homo sapien
taatgggatttcagtccactccaag

SEQ ID NO: 1598510 - DNA, 25 bp, Homo sapien
taaggcttcctacatgcattacagg

SEQ ID NO: 1598511 - DNA, 25 bp, Homo sapien
acaggctttttcatgctccttacat

SEQ ID NO: 1598512 - DNA, 25 bp, Homo sapien
caggctttttcatgctccttacatt

SEQ ID NO: 1598513 - DNA, 25 bp, Homo sapien
gattacaggaattaagtaattttca

SEQ ID NO: 1598514 - DNA, 25 bp, Homo sapien
gattattaagacatgagggataccc

SEQ ID NO: 1598515 - DNA, 25 bp, Homo sapien
gagttctcatatgtgcctgaaggta

SEQ ID NO: 1598516 - DNA, 25 bp, Homo sapien
gaggttttctcacacagggtaagga

SEQ ID NO: 1598517 - DNA, 25 bp, Homo sapien
gatcgtacatgcatactaaggcccg

SEQ ID NO: 1598518 - DNA, 25 bp, Homo sapien
attaacagaacatacccatctgaag

SEQ ID NO: 1598519 - DNA, 25 bp, Homo sapien
catattaacagaacatacccatctg

SEQ ID NO: 1598520 - DNA, 25 bp, Homo sapien
aaacatattaacagaacatacccat

SEQ ID NO: 1598521 - DNA, 25 bp, Homo sapien
tctcaaacatattaacagaacatac

SEQ ID NO: 1598522 - DNA, 25 bp, Homo sapien
aattgtatcccaatggatgtctgac

SEQ ID NO: 1598523 - DNA, 25 bp, Homo sapien
caattgtatcccaatggatgtctga

SEQ ID NO: 1598524 - DNA, 25 bp, Homo sapien
cctgctgaagtatagaccactgggt

SEQ ID NO: 1598525 - DNA, 25 bp, Homo sapien
tcctgctgaagtatagaccactggg

SEQ ID NO: 1598526 - DNA, 25 bp, Homo sapien
gtcctgctgaagtatagaccactgg

SEQ ID NO: 1598527 - DNA, 25 bp, Homo sapien
agtcctgctgaagtatagaccactg

SEQ ID NO: 1598528 - DNA, 25 bp, Homo sapien
tgaaaagtgaaatcacagacaaggg

SEQ ID NO: 1598529 - DNA, 25 bp, Homo sapien
cagataactgaaaccgtgaaaagtg

SEQ ID NO: 1598530 - DNA, 25 bp, Homo sapien
gcctggccgagtttcccatttaata

SEQ ID NO: 1598531 - DNA, 25 bp, Homo sapien
gaaacaaggttctcggtatgttgcc

SEQ ID NO: 1598532 - DNA, 25 bp, Homo sapien
agagattagactgggtttgatgatc

SEQ ID NO: 1598533 - DNA, 25 bp, Homo sapien
gagattagactgggtttgatgatct

SEQ ID NO: 1598534 - DNA, 25 bp, Homo sapien
aagagattagactgggtttgatgat

SEQ ID NO: 1598535 - DNA, 25 bp, Homo sapien
tcagaatggtcacagtagattaaaa

SEQ ID NO: 1598536 - DNA, 25 bp, Homo sapien
taaaatctatttaggacagggacta

SEQ ID NO: 1598537 - DNA, 25 bp, Homo sapien
acacagattattgggcttcaactcc

SEQ ID NO: 1598538 - DNA, 25 bp, Homo sapien
ggtgttgctattaatcttggaccac

SEQ ID NO: 1598539 - DNA, 25 bp, Homo sapien
agcatcacgtcactgtagaggcttc

SEQ ID NO: 1598540 - DNA, 25 bp, Homo sapien
gaagggggacccaatgcctatgcag

SEQ ID NO: 1598541 - DNA, 25 bp, Homo sapien
gccaagtaacaagcccatcagcgtt

SEQ ID NO: 1598542 - DNA, 25 bp, Homo sapien
caatgcctatgcaggattccaaggg

SEQ ID NO: 1598543 - DNA, 25 bp, Homo sapien
cccatcagcgttcgctggaggatga

SEQ ID NO: 1598544 - DNA, 25 bp, Homo sapien
caatctgttaggcagtcagccacta

SEQ ID NO: 1598545 - DNA, 25 bp, Homo sapien
gttaggcagtcagccactattcttc

SEQ ID NO: 1598546 - DNA, 25 bp, Homo sapien
ctgataacaatctgttaggcagtca

SEQ ID NO: 1598547 - DNA, 25 bp, Homo sapien
taacaatctgttaggcagtcagcca

SEQ ID NO: 1598548 - DNA, 25 bp, Homo sapien
catgggacaaatcagcagctgccat

SEQ ID NO: 1598549 - DNA, 25 bp, Homo sapien
cacttcaggacacctcattaatcta

SEQ ID NO: 1598550 - DNA, 25 bp, Homo sapien
cccgcgaggtgagaacgtgtcagaa

SEQ ID NO: 1598551 - DNA, 25 bp, Homo sapien
tgagaacgtgtcagaaccctccttt

SEQ ID NO: 1598552 - DNA, 25 bp, Homo sapien
ttaatctaaatggacagtggcaatc

SEQ ID NO: 1598553 - DNA, 25 bp, Homo sapien
agccatcaaacatatacaccggctg

SEQ ID NO: 1598554 - DNA, 25 bp, Homo sapien
ctgttggtattaatcaataatcaac

SEQ ID NO: 1598555 - DNA, 25 bp, Homo sapien
caagcagtacttaatcatcagccat

SEQ ID NO: 1598556 - DNA, 25 bp, Homo sapien
tatacaccggctggggcagtagctc

SEQ ID NO: 1598557 - DNA, 25 bp, Homo sapien
ctcagaaatcgccaggtccctgaac

SEQ ID NO: 1598558 - DNA, 25 bp, Homo sapien
caacgcggatgcaaaaggcagcaat

SEQ ID NO: 1598559 - DNA, 25 bp, Homo sapien
ggagccaacgcggatgcaaaaggca

SEQ ID NO: 1598560 - DNA, 25 bp, Homo sapien
ggacggagccaacgcggatgcaaaa

SEQ ID NO: 1598561 - DNA, 25 bp, Homo sapien
gccaacgcggatgcaaaaggcagca

SEQ ID NO: 1598562 - DNA, 25 bp, Homo sapien
ggcaaaaagactctcaggcgctcac

SEQ ID NO: 1598563 - DNA, 25 bp, Homo sapien
aggcaaaaagactctcaggcgctca

SEQ ID NO: 1598564 - DNA, 25 bp, Homo sapien
aaggcaaaaagactctcaggcgctc

SEQ ID NO: 1598565 - DNA, 25 bp, Homo sapien
ttcacatactttgtgtgtaccgaag

SEQ ID NO: 1598566 - DNA, 25 bp, Homo sapien
cctttcacatactttgtgtgtaccg

SEQ ID NO: 1598567 - DNA, 25 bp, Homo sapien
catactttgtgtgtaccgaagagta

SEQ ID NO: 1598568 - DNA, 25 bp, Homo sapien
tgtgtgtaccgaagagtattgttaa

SEQ ID NO: 1598569 - DNA, 25 bp, Homo sapien
tccatcttgcgtggctgacactcaa

SEQ ID NO: 1598570 - DNA, 25 bp, Homo sapien
ccagcttgtggcaaataccgcagta

SEQ ID NO: 1598571 - DNA, 25 bp, Homo sapien
tctgagtttgacgttagatacccca

SEQ ID NO: 1598572 - DNA, 25 bp, Homo sapien
gataccccatataagtggaaatggg

SEQ ID NO: 1598573 - DNA, 25 bp, Homo sapien
gatagctacagacaagggaatttgg

SEQ ID NO: 1598574 - DNA, 25 bp, Homo sapien
tacgccctgagctaaagataagaac

SEQ ID NO: 1598575 - DNA, 25 bp, Homo sapien
tagagaagacctaaaagccagggca

SEQ ID NO: 1598576 - DNA, 25 bp, Homo sapien
taatctaggattgagcacgtgctat

SEQ ID NO: 1598577 - DNA, 25 bp, Homo sapien
ttaagtgggtgcgttagcatgtgcc

SEQ ID NO: 1598578 - DNA, 25 bp, Homo sapien
tgagacctcggctctacgaataaaa

SEQ ID NO: 1598579 - DNA, 25 bp, Homo sapien
aagtcctgtggcaatgtcatgtcga

SEQ ID NO: 1598580 - DNA, 25 bp, Homo sapien
tggaaaccactacagcaacagctac

SEQ ID NO: 1598581 - DNA, 25 bp, Homo sapien
gatcagccgggtaaacagtaaagtc

SEQ ID NO: 1598582 - DNA, 25 bp, Homo sapien
aggcagataggggagcatcacttga

SEQ ID NO: 1598583 - DNA, 25 bp, Homo sapien
aagatcagccgggtaaacagtaaag

SEQ ID NO: 1598584 - DNA, 25 bp, Homo sapien
tcaagatcagccgggtaaacagtaa

SEQ ID NO: 1598585 - DNA, 25 bp, Homo sapien
gaaaggaaaacagcctcaccactaa

SEQ ID NO: 1598586 - DNA, 25 bp, Homo sapien
agcctcaccactaacacggaataag

SEQ ID NO: 1598587 - DNA, 25 bp, Homo sapien
aaaacagcctcaccactaacacgga

SEQ ID NO: 1598588 - DNA, 25 bp, Homo sapien
ctcaccactaacacggaataagttt

SEQ ID NO: 1598589 - DNA, 25 bp, Homo sapien
gacttcaaagattcaaaggacgggc

SEQ ID NO: 1598590 - DNA, 25 bp, Homo sapien
ctgatgtggaatctgcagcaagcat

SEQ ID NO: 1598591 - DNA, 25 bp, Homo sapien
caaagatcagttcgtgaggtttaac

SEQ ID NO: 1598592 - DNA, 25 bp, Homo sapien
aggactttcacagctctaggtaagc

SEQ ID NO: 1598593 - DNA, 25 bp, Homo sapien
cagcctgtgtgatgacaacagcaaa

SEQ ID NO: 1598594 - DNA, 25 bp, Homo sapien
gcctgtgtgatgacaacagcaaaac

SEQ ID NO: 1598595 - DNA, 25 bp, Homo sapien
ctccagcctgtgtgatgacaacagc

SEQ ID NO: 1598596 - DNA, 25 bp, Homo sapien
tccagcctgtgtgatgacaacagca

SEQ ID NO: 1598597 - DNA, 25 bp, Homo sapien
ttcatgtcttcgaagtgaatgggga

SEQ ID NO: 1598598 - DNA, 25 bp, Homo sapien
cctaaaatttataggggacacatag

SEQ ID NO: 1598599 - DNA, 25 bp, Homo sapien
tcatgtcttcgaagtgaatggggat

SEQ ID NO: 1598600 - DNA, 25 bp, Homo sapien
taggggacacatagagtatgagttc

SEQ ID NO: 1598601 - DNA, 25 bp, Homo sapien
tctgtagatgtgaagaagcacggaa

SEQ ID NO: 1598602 - DNA, 25 bp, Homo sapien
tttctgtagatgtgaagaagcacgg

SEQ ID NO: 1598603 - DNA, 25 bp, Homo sapien
tgtgaagaagcacggaaggttttcc

SEQ ID NO: 1598604 - DNA, 25 bp, Homo sapien
tagatgtgaagaagcacggaaggtt

SEQ ID NO: 1598605 - DNA, 25 bp, Homo sapien
tgtgactgatcaacaaaggcttcct

SEQ ID NO: 1598606 - DNA, 25 bp, Homo sapien
cagcatggcttgtggagtaagtaaa

SEQ ID NO: 1598607 - DNA, 25 bp, Homo sapien
ggcttttctgcactgattcaacaca

SEQ ID NO: 1598608 - DNA, 25 bp, Homo sapien
tcatcacagtcataagtgtcccctg

SEQ ID NO: 1598609 - DNA, 25 bp, Homo sapien
taaagtcacagagttcccctccatt

SEQ ID NO: 1598610 - DNA, 25 bp, Homo sapien
cataaaataggatcagcaggaggcc

SEQ ID NO: 1598611 - DNA, 25 bp, Homo sapien
taaaataggatcagcaggaggcctg

SEQ ID NO: 1598612 - DNA, 25 bp, Homo sapien
ataaaataggatcagcaggaggcct

SEQ ID NO: 1598613 - DNA, 25 bp, Homo sapien
aaaataggatcagcaggaggcctga

SEQ ID NO: 1598614 - DNA, 25 bp, Homo sapien
aaaatgttgttgaggtgctgacact

SEQ ID NO: 1598615 - DNA, 25 bp, Homo sapien
aatgttgttgaggtgctgacacttt

SEQ ID NO: 1598616 - DNA, 25 bp, Homo sapien
catttgtatgccgtttgatgttttg

SEQ ID NO: 1598617 - DNA, 25 bp, Homo sapien
gtatgccgtttgatgttttgttaag

SEQ ID NO: 1598618 - DNA, 25 bp, Homo sapien
cttggggaactccggttggcaatgt

SEQ ID NO: 1598619 - DNA, 25 bp, Homo sapien
ctccggttggcaatgtgctcaactt

SEQ ID NO: 1598620 - DNA, 25 bp, Homo sapien
ttggcaatgtgctcaacttttcctt

SEQ ID NO: 1598621 - DNA, 25 bp, Homo sapien
agagacagactgagtttgaataggt

SEQ ID NO: 1598622 - DNA, 25 bp, Homo sapien
tgctgaaaacgaggcagtgacctag

SEQ ID NO: 1598623 - DNA, 25 bp, Homo sapien
caaatgcctgaagggagaaacatcc

SEQ ID NO: 1598624 - DNA, 25 bp, Homo sapien
tgttcaggagcaccatactgtaggg

SEQ ID NO: 1598625 - DNA, 25 bp, Homo sapien
ggtcacctgggcatgaacacacagc

SEQ ID NO: 1598626 - DNA, 25 bp, Homo sapien
ctttagcaaggccattttaatttat

SEQ ID NO: 1598627 - DNA, 25 bp, Homo sapien
gcacattccaacatgcccggctcat

SEQ ID NO: 1598628 - DNA, 25 bp, Homo sapien
tgcttgtttcccggtgccgtaaaga

SEQ ID NO: 1598629 - DNA, 25 bp, Homo sapien
tgaaatgcttgtttcccggtgccgt

SEQ ID NO: 1598630 - DNA, 25 bp, Homo sapien
tggactccaccacgataaaggcgaa

SEQ ID NO: 1598631 - DNA, 25 bp, Homo sapien
gatggcgattgtgcgctgacgtcac

SEQ ID NO: 1598632 - DNA, 25 bp, Homo sapien
aatggcactgaccatgcggagccag

SEQ ID NO: 1598633 - DNA, 25 bp, Homo sapien
gccagcgccggaaaagatggcgatt

SEQ ID NO: 1598634 - DNA, 25 bp, Homo sapien
ccggctagccggcggttcaggtggc

SEQ ID NO: 1598635 - DNA, 25 bp, Homo sapien
tagaggtgggacccggctagccggc

SEQ ID NO: 1598636 - DNA, 25 bp, Homo sapien
tgggacccggctagccggcggttca

SEQ ID NO: 1598637 - DNA, 25 bp, Homo sapien
gctagccggcggttcaggtggccgg

SEQ ID NO: 1598638 - DNA, 25 bp, Homo sapien
aaaaagaaatcgcattcaaatataa

SEQ ID NO: 1598639 - DNA, 25 bp, Homo sapien
aaggcgttcttattactgatgcacc

SEQ ID NO: 1598640 - DNA, 25 bp, Homo sapien
cgttcttattactgatgcacctggt

SEQ ID NO: 1598641 - DNA, 25 bp, Homo sapien
ggcgttcttattactgatgcacctg

SEQ ID NO: 1598642 - DNA, 25 bp, Homo sapien
catgcccagcacgtagtatttttca

SEQ ID NO: 1598643 - DNA, 25 bp, Homo sapien
ggctcaactgatctttttgcctaag

SEQ ID NO: 1598644 - DNA, 25 bp, Homo sapien
cccagcacgtagtatttttcagtag

SEQ ID NO: 1598645 - DNA, 25 bp, Homo sapien
actgatctttttgcctaagccttcc

SEQ ID NO: 1598646 - DNA, 25 bp, Homo sapien
gttgaagctccaaatcccaatgtga

SEQ ID NO: 1598647 - DNA, 25 bp, Homo sapien
cataccatcattggccaggaacagt

SEQ ID NO: 1598648 - DNA, 25 bp, Homo sapien
taaaatagagcacgtatctcagcag

SEQ ID NO: 1598649 - DNA, 25 bp, Homo sapien
tactttggactgaatgataaccctg

SEQ ID NO: 1598650 - DNA, 25 bp, Homo sapien
agaagtatcgtgaaatgatgtcaag

SEQ ID NO: 1598651 - DNA, 25 bp, Homo sapien
tctcgccagaagttgaccatgctgg

SEQ ID NO: 1598652 - DNA, 25 bp, Homo sapien
aggaagagagctctcgccagaagtt

SEQ ID NO: 1598653 - DNA, 25 bp, Homo sapien
aaaataggctctttagaagtatcgt

SEQ ID NO: 1598654 - DNA, 25 bp, Homo sapien
cccaaatttggacataaacaggcca

SEQ ID NO: 1598655 - DNA, 25 bp, Homo sapien
caacccttgatacgaagtagtgaag

SEQ ID NO: 1598656 - DNA, 25 bp, Homo sapien
aatagacatacaaggcagaacaggc

SEQ ID NO: 1598657 - DNA, 25 bp, Homo sapien
tattttgtgatagtggcctgagctc

SEQ ID NO: 1598658 - DNA, 25 bp, Homo sapien
taaggccaatccatgagtcattaca

SEQ ID NO: 1598659 - DNA, 25 bp, Homo sapien
ataattaaagatggcaaccgatggg

SEQ ID NO: 1598660 - DNA, 25 bp, Homo sapien
tgccaataattaaagatggcaaccg

SEQ ID NO: 1598661 - DNA, 25 bp, Homo sapien
gaccctcaggatggtatctaaggcc

SEQ ID NO: 1598662 - DNA, 25 bp, Homo sapien
taaatggtaacactcatatccttgc

SEQ ID NO: 1598663 - DNA, 25 bp, Homo sapien
tggtaacactcatatccttgcattc

SEQ ID NO: 1598664 - DNA, 25 bp, Homo sapien
aatggtaacactcatatccttgcat

SEQ ID NO: 1598665 - DNA, 25 bp, Homo sapien
ggtaacactcatatccttgcattca

SEQ ID NO: 1598666 - DNA, 25 bp, Homo sapien
tgctgaataagacttgtggatgtag

SEQ ID NO: 1598667 - DNA, 25 bp, Homo sapien
tatgctgaataagacttgtggatgt

SEQ ID NO: 1598668 - DNA, 25 bp, Homo sapien
ctgaataagacttgtggatgtagtg

SEQ ID NO: 1598669 - DNA, 25 bp, Homo sapien
tgtatgctgaataagacttgtggat

SEQ ID NO: 1598670 - DNA, 25 bp, Homo sapien
cattcatagggttttattccagtgt

SEQ ID NO: 1598671 - DNA, 25 bp, Homo sapien
tcatagggttttattccagtgtgag

SEQ ID NO: 1598672 - DNA, 25 bp, Homo sapien
acattcatagggttttattccagtg

SEQ ID NO: 1598673 - DNA, 25 bp, Homo sapien
agggttttattccagtgtgagttct

SEQ ID NO: 1598674 - DNA, 25 bp, Homo sapien
atgtacagcaagacctggagttaga

SEQ ID NO: 1598675 - DNA, 25 bp, Homo sapien
gctttcccacagtaagtacacttgt

SEQ ID NO: 1598676 - DNA, 25 bp, Homo sapien
agacctggagttagagtaaagactt

SEQ ID NO: 1598677 - DNA, 25 bp, Homo sapien
gaagctgtgacagctctcccatatt

SEQ ID NO: 1598678 - DNA, 25 bp, Homo sapien
ctctgactgagctgattttctagaa

SEQ ID NO: 1598679 - DNA, 25 bp, Homo sapien
ctgactgagctgattttctagaatg

SEQ ID NO: 1598680 - DNA, 25 bp, Homo sapien
gactgagctgattttctagaatgga

SEQ ID NO: 1598681 - DNA, 25 bp, Homo sapien
tgagctgattttctagaatggaatt

SEQ ID NO: 1598682 - DNA, 25 bp, Homo sapien
tgctgaagtgatgaccgtttggttc

SEQ ID NO: 1598683 - DNA, 25 bp, Homo sapien
ctgctgaagtgatgaccgtttggtt

SEQ ID NO: 1598684 - DNA, 25 bp, Homo sapien
cctgctgaagtgatgaccgtttggt

SEQ ID NO: 1598685 - DNA, 25 bp, Homo sapien
ctgaagtgatgaccgtttggttcta

SEQ ID NO: 1598686 - DNA, 25 bp, Homo sapien
gatctagataaacagcatgtatcag

SEQ ID NO: 1598687 - DNA, 25 bp, Homo sapien
cagagaaccttgaggattttggtac

SEQ ID NO: 1598688 - DNA, 25 bp, Homo sapien
caaaaatttggctataatgatgtgg

SEQ ID NO: 1598689 - DNA, 25 bp, Homo sapien
gatcataggaatgtttgacaagatg

SEQ ID NO: 1598690 - DNA, 25 bp, Homo sapien
ccaagcatagtgatgttactcttac

SEQ ID NO: 1598691 - DNA, 25 bp, Homo sapien
catgccaagcatagtgatgttactc

SEQ ID NO: 1598692 - DNA, 25 bp, Homo sapien
tgccaagcatagtgatgttactctt

SEQ ID NO: 1598693 - DNA, 25 bp, Homo sapien
accatgccaagcatagtgatgttac

SEQ ID NO: 1598694 - DNA, 25 bp, Homo sapien
ccaggttcatgtagttctccagcat

SEQ ID NO: 1598695 - DNA, 25 bp, Homo sapien
agaggccaggttcatgtagttctcc

SEQ ID NO: 1598696 - DNA, 25 bp, Homo sapien
gccaggttcatgtagttctccagca

SEQ ID NO: 1598697 - DNA, 25 bp, Homo sapien
aggccaggttcatgtagttctccag

SEQ ID NO: 1598698 - DNA, 25 bp, Homo sapien
gtgtccagtaaagcccactcctctg

SEQ ID NO: 1598699 - DNA, 25 bp, Homo sapien
atttctcagttgtgtccagtaaagc

SEQ ID NO: 1598700 - DNA, 25 bp, Homo sapien
gccacatcatcaaacgtcactgaat

SEQ ID NO: 1598701 - DNA, 25 bp, Homo sapien
tcagttgtgtccagtaaagcccact

SEQ ID NO: 1598702 - DNA, 25 bp, Homo sapien
tttgagccaatgaacacttccacca

SEQ ID NO: 1598703 - DNA, 25 bp, Homo sapien
gctggtttgagccaatgaacacttc

SEQ ID NO: 1598704 - DNA, 25 bp, Homo sapien
tggtttgagccaatgaacacttcca

SEQ ID NO: 1598705 - DNA, 25 bp, Homo sapien
ggtttgagccaatgaacacttccac

SEQ ID NO: 1598706 - DNA, 25 bp, Homo sapien
tcaaggttgacctcctacaggcata

SEQ ID NO: 1598707 - DNA, 25 bp, Homo sapien
ggaaccttatactcacttacacgtg

SEQ ID NO: 1598708 - DNA, 25 bp, Homo sapien
cacgtggttgtcaggtctcccatga

SEQ ID NO: 1598709 - DNA, 25 bp, Homo sapien
tacaggcatatgccttaaacagcac

SEQ ID NO: 1598710 - DNA, 25 bp, Homo sapien
tggtgtctatgcagcacactcctca

SEQ ID NO: 1598711 - DNA, 25 bp, Homo sapien
gcacactgcttacgcttgatctcag

SEQ ID NO: 1598712 - DNA, 25 bp, Homo sapien
caggcacaactgctgattactacag

SEQ ID NO: 1598713 - DNA, 25 bp, Homo sapien
taaaaacagggtccaactgtgtcac

SEQ ID NO: 1598714 - DNA, 25 bp, Homo sapien
tctacctattggatgaaagcatatc

SEQ ID NO: 1598715 - DNA, 25 bp, Homo sapien
tgctctaagaaaactctgaagatga

SEQ ID NO: 1598716 - DNA, 25 bp, Homo sapien
ccgcacccagcaatgtaagaaagat

SEQ ID NO: 1598717 - DNA, 25 bp, Homo sapien
ccatgaaggtcaagcttaagtagta

SEQ ID NO: 1598718 - DNA, 25 bp, Homo sapien
taaccacttgccaggtagtcctcca

SEQ ID NO: 1598719 - DNA, 25 bp, Homo sapien
tgataaccacttgccaggtagtcct

SEQ ID NO: 1598720 - DNA, 25 bp, Homo sapien
ctgataaccacttgccaggtagtcc

SEQ ID NO: 1598721 - DNA, 25 bp, Homo sapien
cacttgccaggtagtcctccaccat

SEQ ID NO: 1598722 - DNA, 25 bp, Homo sapien
tgtcttttcttcaaaagggcagatt

SEQ ID NO: 1598723 - DNA, 25 bp, Homo sapien
cttttcttcaaaagggcagattggt

SEQ ID NO: 1598724 - DNA, 25 bp, Homo sapien
ttcttcaaaagggcagattggttcc

SEQ ID NO: 1598725 - DNA, 25 bp, Homo sapien
ctttgtcttttcttcaaaagggcag

SEQ ID NO: 1598726 - DNA, 25 bp, Homo sapien
cgcttgtgttgtggagggtgaccta

SEQ ID NO: 1598727 - DNA, 25 bp, Homo sapien
gctcagctcactggacgcttgtgtt

SEQ ID NO: 1598728 - DNA, 25 bp, Homo sapien
gttctgtggttcacttcaattcctc

SEQ ID NO: 1598729 - DNA, 25 bp, Homo sapien
ccaggtctggcagtatgtgcttgtg

SEQ ID NO: 1598730 - DNA, 25 bp, Homo sapien
gaagctgatggtgtgatgatgtgca

SEQ ID NO: 1598731 - DNA, 25 bp, Homo sapien
aagctgatggtgtgatgatgtgcat

SEQ ID NO: 1598732 - DNA, 25 bp, Homo sapien
tgaagctgatggtgtgatgatgtgc

SEQ ID NO: 1598733 - DNA, 25 bp, Homo sapien
caagatcacctcaggccagcttatg

SEQ ID NO: 1598734 - DNA, 25 bp, Homo sapien
ccttgatgccaagatcacctcaggc

SEQ ID NO: 1598735 - DNA, 25 bp, Homo sapien
tgccaagatcacctcaggccagctt

SEQ ID NO: 1598736 - DNA, 25 bp, Homo sapien
aagatcacctcaggccagcttatga

SEQ ID NO: 1598737 - DNA, 25 bp, Homo sapien
gtggatagaggcaatctccattcct

SEQ ID NO: 1598738 - DNA, 25 bp, Homo sapien
ttcctctttgtacagggttatttgc

SEQ ID NO: 1598739 - DNA, 25 bp, Homo sapien
ctaggtggatagaggcaatctccat

SEQ ID NO: 1598740 - DNA, 25 bp, Homo sapien
ctccattcctctttgtacagggtta

SEQ ID NO: 1598741 - DNA, 25 bp, Homo sapien
gcgcgcagcctctccgaactggacg

SEQ ID NO: 1598742 - DNA, 25 bp, Homo sapien
agcctctccgaactggacgcacagg

SEQ ID NO: 1598743 - DNA, 25 bp, Homo sapien
ctccgaactggacgcacagggagga

SEQ ID NO: 1598744 - DNA, 25 bp, Homo sapien
cctctccgaactggacgcacaggga

SEQ ID NO: 1598745 - DNA, 25 bp, Homo sapien
gcgacagcgcgcaatcattcctttg

SEQ ID NO: 1598746 - DNA, 25 bp, Homo sapien
tgctatccccgggaccgccaaggag

SEQ ID NO: 1598747 - DNA, 25 bp, Homo sapien
ctgagaggctcctaggcgacagcgc

SEQ ID NO: 1598748 - DNA, 25 bp, Homo sapien
aagcgagtgaagtgaagcggatctg

SEQ ID NO: 1598749 - DNA, 25 bp, Homo sapien
cagactccaccaccataaaggcgaa

SEQ ID NO: 1598750 - DNA, 25 bp, Homo sapien
tgggcagactccaccaccataaagg

SEQ ID NO: 1598751 - DNA, 25 bp, Homo sapien
caccataaaggcgaaaccgcactga

SEQ ID NO: 1598752 - DNA, 25 bp, Homo sapien
aaaccgcactgacggagaggagcca

SEQ ID NO: 1598753 - DNA, 25 bp, Homo sapien
gggttggctcagggagggggatgca

SEQ ID NO: 1598754 - DNA, 25 bp, Homo sapien
gttggctcagggagggggatgcaga

SEQ ID NO: 1598755 - DNA, 25 bp, Homo sapien
ttggctcagggagggggatgcagaa

SEQ ID NO: 1598756 - DNA, 25 bp, Homo sapien
ggttggctcagggagggggatgcag

SEQ ID NO: 1598757 - DNA, 25 bp, Homo sapien
gcagggaggatgtatcctacaaagt

SEQ ID NO: 1598758 - DNA, 25 bp, Homo sapien
gcttgatcatgatgcggccagctca

SEQ ID NO: 1598759 - DNA, 25 bp, Homo sapien
tgtgtattacatccgggtgtggacg

SEQ ID NO: 1598760 - DNA, 25 bp, Homo sapien
ggtgtggacgggctgagtctgacaa

SEQ ID NO: 1598761 - DNA, 25 bp, Homo sapien
ccatggtatggccagctcagagtac

SEQ ID NO: 1598762 - DNA, 25 bp, Homo sapien
gaaaggtgtactgtcacaagggcca

SEQ ID NO: 1598763 - DNA, 25 bp, Homo sapien
tgggctgtccaacaaaacagtcagc

SEQ ID NO: 1598764 - DNA, 25 bp, Homo sapien
taccagggactacatacgtgcacca

SEQ ID NO: 1598765 - DNA, 25 bp, Homo sapien
caatctgaactttgtatcaaatggg

SEQ ID NO: 1598766 - DNA, 25 bp, Homo sapien
aaatggaatacgaacaggaacaatc

SEQ ID NO: 1598767 - DNA, 25 bp, Homo sapien
caaatgggtaataagactatgtaac

SEQ ID NO: 1598768 - DNA, 25 bp, Homo sapien
aacagttgctgcctagacattagaa

SEQ ID NO: 1598769 - DNA, 25 bp, Homo sapien
gacatctgtaatctaccacagggtg

SEQ ID NO: 1598770 - DNA, 25 bp, Homo sapien
tactggtcaaagcaaggactggctc

SEQ ID NO: 1598771 - DNA, 25 bp, Homo sapien
gagagagattgcaccttcagagagt

SEQ ID NO: 1598772 - DNA, 25 bp, Homo sapien
ttactgctaacacgagtgggcctgg

SEQ ID NO: 1598773 - DNA, 25 bp, Homo sapien
ggattgttaattggtattattcaag

SEQ ID NO: 1598774 - DNA, 25 bp, Homo sapien
aaatgtcaggcactaaatgtgcaac

SEQ ID NO: 1598775 - DNA, 25 bp, Homo sapien
taaaggtatgatcaatacacatcag

SEQ ID NO: 1598776 - DNA, 25 bp, Homo sapien
cacatcagtacaaagaggggaacac

SEQ ID NO: 1598777 - DNA, 25 bp, Homo sapien
tctctaccaagattaacacaagcaa

SEQ ID NO: 1598778 - DNA, 25 bp, Homo sapien
gaaatagtgtagatttttcaagcga

SEQ ID NO: 1598779 - DNA, 25 bp, Homo sapien
gaattagtggaacagaaaacatgca

SEQ ID NO: 1598780 - DNA, 25 bp, Homo sapien
tgaaagaattcataaacctgggtac

SEQ ID NO: 1598781 - DNA, 25 bp, Homo sapien
tgctgtgattaaagccgtgaagcac

SEQ ID NO: 1598782 - DNA, 25 bp, Homo sapien
gtgattaaagccgtgaagcaccgtg

SEQ ID NO: 1598783 - DNA, 25 bp, Homo sapien
tacaggggcacaataccgtgcccag

SEQ ID NO: 1598784 - DNA, 25 bp, Homo sapien
attaaagccgtgaagcaccgtgccc

SEQ ID NO: 1598785 - DNA, 25 bp, Homo sapien
catgctcgtgatggctatgacgccc

SEQ ID NO: 1598786 - DNA, 25 bp, Homo sapien
taggtaccatcatgagctaggtgca

SEQ ID NO: 1598787 - DNA, 25 bp, Homo sapien
tgcagcgggttaaaatcagtccagt

SEQ ID NO: 1598788 - DNA, 25 bp, Homo sapien
gaaaactggaaaactgctcaaggca

SEQ ID NO: 1598789 - DNA, 25 bp, Homo sapien
ttattttacaagaaggggacataga

SEQ ID NO: 1598790 - DNA, 25 bp, Homo sapien
tggaggagcatctttttaacaatcc

SEQ ID NO: 1598791 - DNA, 25 bp, Homo sapien
tcaatctgcatgatttatctcgtac

SEQ ID NO: 1598792 - DNA, 25 bp, Homo sapien
ggcagttatggatggtttcactcct

SEQ ID NO: 1598793 - DNA, 25 bp, Homo sapien
ctcgggatgcatctaaggccaatct

SEQ ID NO: 1598794 - DNA, 25 bp, Homo sapien
gatctttgcactgccaataattaaa

SEQ ID NO: 1598795 - DNA, 25 bp, Homo sapien
tttaatttcagaccctcgggatgca

SEQ ID NO: 1598796 - DNA, 25 bp, Homo sapien
ttaggactaatctgatgatctttgc

SEQ ID NO: 1598797 - DNA, 25 bp, Homo sapien
atgcatacttaggcatgaggaaaga

SEQ ID NO: 1598798 - DNA, 25 bp, Homo sapien
tgcatacttaggcatgaggaaagag

SEQ ID NO: 1598799 - DNA, 25 bp, Homo sapien
tggtaggagttcacaggtggggtga

SEQ ID NO: 1598800 - DNA, 25 bp, Homo sapien
gtaggagttcacaggtggggtgagg

SEQ ID NO: 1598801 - DNA, 25 bp, Homo sapien
ggtaggagttcacaggtggggtgag

SEQ ID NO: 1598802 - DNA, 25 bp, Homo sapien
ctggtaggagttcacaggtggggtg

SEQ ID NO: 1598803 - DNA, 25 bp, Homo sapien
tgttgagtaagcgttgaagatctat

SEQ ID NO: 1598804 - DNA, 25 bp, Homo sapien
cgttgaagatctattgaaggctttc

SEQ ID NO: 1598805 - DNA, 25 bp, Homo sapien
tctatgttgagtaagcgttgaagat

SEQ ID NO: 1598806 - DNA, 25 bp, Homo sapien
taagcgttgaagatctattgaaggc

SEQ ID NO: 1598807 - DNA, 25 bp, Homo sapien
actgctttaagtgtgaggaagttgt

SEQ ID NO: 1598808 - DNA, 25 bp, Homo sapien
agttgtgatggctctctcacattcc

SEQ ID NO: 1598809 - DNA, 25 bp, Homo sapien
gctttaagtgtgaggaagttgtgat

SEQ ID NO: 1598810 - DNA, 25 bp, Homo sapien
gaggaagttgtgatggctctctcac

SEQ ID NO: 1598811 - DNA, 25 bp, Homo sapien
tgccactggctctaattgttcaaaa

SEQ ID NO: 1598812 - DNA, 25 bp, Homo sapien
cattgcctggtctatagtgcactgc

SEQ ID NO: 1598813 - DNA, 25 bp, Homo sapien
tcagcctgccaactagcatgtgcaa

SEQ ID NO: 1598814 - DNA, 25 bp, Homo sapien
tccctcaagggtgcaggctacttct

SEQ ID NO: 1598815 - DNA, 25 bp, Homo sapien
cggcctctgggtaagcaattgtcct

SEQ ID NO: 1598816 - DNA, 25 bp, Homo sapien
gcctctgggtaagcaattgtcctgc

SEQ ID NO: 1598817 - DNA, 25 bp, Homo sapien
gagtaactaggataacgggtgccca

SEQ ID NO: 1598818 - DNA, 25 bp, Homo sapien
ctgctgaagtgatgaccgtttggtt

SEQ ID NO: 1598819 - DNA, 25 bp, Homo sapien
tgctgaagtgatgaccgtttggttc

SEQ ID NO: 1598820 - DNA, 25 bp, Homo sapien
cctgctgaagtgatgaccgtttggt

SEQ ID NO: 1598821 - DNA, 25 bp, Homo sapien
ctgaagtgatgaccgtttggttcta

SEQ ID NO: 1598822 - DNA, 25 bp, Homo sapien
aactggtagttttgtttgactagat

SEQ ID NO: 1598823 - DNA, 25 bp, Homo sapien
gaaagatcaggataaagagcatata

SEQ ID NO: 1598824 - DNA, 25 bp, Homo sapien
actgcttctgtgaaaattacaactg

SEQ ID NO: 1598825 - DNA, 25 bp, Homo sapien
ttctgtgaaaattacaactgatggg

SEQ ID NO: 1598826 - DNA, 25 bp, Homo sapien
catgccaagcaaagtgatgttactc

SEQ ID NO: 1598827 - DNA, 25 bp, Homo sapien
ccggcctagtctttattcttaggat

SEQ ID NO: 1598828 - DNA, 25 bp, Homo sapien
ccaagcaaagtgatgttactcttac

SEQ ID NO: 1598829 - DNA, 25 bp, Homo sapien
ccaccatgccaagcaaagtgatgtt

SEQ ID NO: 1598830 - DNA, 25 bp, Homo sapien
agccacatcatcaaacgtcactgaa

SEQ ID NO: 1598831 - DNA, 25 bp, Homo sapien
agttgtgtccagtaaagcccactcc

SEQ ID NO: 1598832 - DNA, 25 bp, Homo sapien
gtgtccagtaaagcccactcctctg

SEQ ID NO: 1598833 - DNA, 25 bp, Homo sapien
gccacatcatcaaacgtcactgaat

SEQ ID NO: 1598834 - DNA, 25 bp, Homo sapien
tttgagccaatgaacacttccacca

SEQ ID NO: 1598835 - DNA, 25 bp, Homo sapien
gctggtttgagccaatgaacacttc

SEQ ID NO: 1598836 - DNA, 25 bp, Homo sapien
tggtttgagccaatgaacacttcca

SEQ ID NO: 1598837 - DNA, 25 bp, Homo sapien
ggtttgagccaatgaacacttccac

SEQ ID NO: 1598838 - DNA, 25 bp, Homo sapien
ctcacttatacgtggttctcaagtc

SEQ ID NO: 1598839 - DNA, 25 bp, Homo sapien
ggagctcttgtgtctaaacaatcaa

SEQ ID NO: 1598840 - DNA, 25 bp, Homo sapien
tacgtggttctcaagtctcccatga

SEQ ID NO: 1598841 - DNA, 25 bp, Homo sapien
ctcaggagctcttgtgtctaaacaa

SEQ ID NO: 1598842 - DNA, 25 bp, Homo sapien
gtgccacccaggcacaatcgctgct

SEQ ID NO: 1598843 - DNA, 25 bp, Homo sapien
acactgcttacattatctcagcaca

SEQ ID NO: 1598844 - DNA, 25 bp, Homo sapien
acccaggcacaatcgctgcttactg

SEQ ID NO: 1598845 - DNA, 25 bp, Homo sapien
cttcctgtcccattggtctctgggc

SEQ ID NO: 1598846 - DNA, 25 bp, Homo sapien
gaatttgaccggtggtcctctacca

SEQ ID NO: 1598847 - DNA, 25 bp, Homo sapien
aatttgaccggtggtcctctaccat

SEQ ID NO: 1598848 - DNA, 25 bp, Homo sapien
taagaatttgaccggtggtcctcta

SEQ ID NO: 1598849 - DNA, 25 bp, Homo sapien
cttttcttcaaaaggacagattggt

SEQ ID NO: 1598850 - DNA, 25 bp, Homo sapien
ttcttcaaaaggacagattggttcc

SEQ ID NO: 1598851 - DNA, 25 bp, Homo sapien
tttgtcttttcttcaaaaggacaga

SEQ ID NO: 1598852 - DNA, 25 bp, Homo sapien
cgttcctatctttgtcttttcttca

SEQ ID NO: 1598853 - DNA, 25 bp, Homo sapien
catgggacatatcaaaggctgacat

SEQ ID NO: 1598854 - DNA, 25 bp, Homo sapien
gatggtgagatgtgcctcaatgctg

SEQ ID NO: 1598855 - DNA, 25 bp, Homo sapien
gtctttcttgatgccaagatcgcct

SEQ ID NO: 1598856 - DNA, 25 bp, Homo sapien
ggtgagatgtgcctcaatgctgtct

SEQ ID NO: 1598857 - DNA, 25 bp, Homo sapien
aagatcgcctcagggcagcttatga

SEQ ID NO: 1598858 - DNA, 25 bp, Homo sapien
cctttgtacagggttatctgaggcc

SEQ ID NO: 1598859 - DNA, 25 bp, Homo sapien
ccctttgtacagggttatctgaggc

SEQ ID NO: 1598860 - DNA, 25 bp, Homo sapien
cccctttgtacagggttatctgagg

SEQ ID NO: 1598861 - DNA, 25 bp, Homo sapien
tcccctttgtacagggttatctgag

SEQ ID NO: 1598862 - DNA, 25 bp, Homo sapien
cacacagggcatgtgttccaacatt

SEQ ID NO: 1598863 - DNA, 25 bp, Homo sapien
acagtcactgattgttttcacacag

SEQ ID NO: 1598864 - DNA, 25 bp, Homo sapien
cttgtacatttcttgcacggtttgg

SEQ ID NO: 1598865 - DNA, 25 bp, Homo sapien
tattatgttatggttaagttgttcc

SEQ ID NO: 1598866 - DNA, 25 bp, Homo sapien
tctcaaataccaccgtttatataac

SEQ ID NO: 1598867 - DNA, 25 bp, Homo sapien
ggatcatgaggtacagcctgggcga

SEQ ID NO: 1598868 - DNA, 25 bp, Homo sapien
atctcaaataccaccgtttatataa

SEQ ID NO: 1598869 - DNA, 25 bp, Homo sapien
gatcatgaggtacagcctgggcgac

SEQ ID NO: 1598870 - DNA, 25 bp, Homo sapien
gaacttcagatgaagagaatagttg

SEQ ID NO: 1598871 - DNA, 25 bp, Homo sapien
aattctagtgtcagtgtaataaagc

SEQ ID NO: 1598872 - DNA, 25 bp, Homo sapien
ggaggcctctgttttgaagcactgt

SEQ ID NO: 1598873 - DNA, 25 bp, Homo sapien
gaatagttgagtattattgcctttc

SEQ ID NO: 1598874 - DNA, 25 bp, Homo sapien
ttccactctttgaaactgcacatcc

SEQ ID NO: 1598875 - DNA, 25 bp, Homo sapien
caatagggtcagtttagattctgcg

SEQ ID NO: 1598876 - DNA, 25 bp, Homo sapien
gttcccttggctactcattctgcag

SEQ ID NO: 1598877 - DNA, 25 bp, Homo sapien
aaatattcacagatagccaataggg

SEQ ID NO: 1598878 - DNA, 25 bp, Homo sapien
caagcttttcaagagaggagcacag

SEQ ID NO: 1598879 - DNA, 25 bp, Homo sapien
gcacagcggatgaaagtactcaaga

SEQ ID NO: 1598880 - DNA, 25 bp, Homo sapien
gaggcggaacaaacacacttcccga

SEQ ID NO: 1598881 - DNA, 25 bp, Homo sapien
tagaaaagcgagtgaaactaggcgg

SEQ ID NO: 1598882 - DNA, 25 bp, Homo sapien
tcaggcacgtaggacaaagaaattc

SEQ ID NO: 1598883 - DNA, 25 bp, Homo sapien
aaggttaaacggcactgaccatgct

SEQ ID NO: 1598884 - DNA, 25 bp, Homo sapien
catgctgagccacagccggtaaaga

SEQ ID NO: 1598885 - DNA, 25 bp, Homo sapien
tggcggtggcacactgacgtcactt

SEQ ID NO: 1598886 - DNA, 25 bp, Homo sapien
agcgggatgcagaaacgggttcaga

SEQ ID NO: 1598887 - DNA, 25 bp, Homo sapien
atgcagaaacgggttcagagaaaaa

SEQ ID NO: 1598888 - DNA, 25 bp, Homo sapien
ctcagggagcgggatgcagaaacgg

SEQ ID NO: 1598889 - DNA, 25 bp, Homo sapien
gaaacgggttcagagaaaaagatga

SEQ ID NO: 1598890 - DNA, 25 bp, Homo sapien
tgtctcttctgcaatagtgaggcgg

SEQ ID NO: 1598891 - DNA, 25 bp, Homo sapien
gtctcttctgcaatagtgaggcgga

SEQ ID NO: 1598892 - DNA, 25 bp, Homo sapien
tcgagggtgccgctctctgttgatc

SEQ ID NO: 1598893 - DNA, 25 bp, Homo sapien
tttgaaagatcgagggtgccgctct

SEQ ID NO: 1598894 - DNA, 25 bp, Homo sapien
gtgccgctctctgttgatcacacca

SEQ ID NO: 1598895 - DNA, 25 bp, Homo sapien
cttcacgtaaaccactttgaaagat

SEQ ID NO: 1598896 - DNA, 25 bp, Homo sapien
aggttccagtgtcaatcttgatgaa

SEQ ID NO: 1598897 - DNA, 25 bp, Homo sapien
acaggttccagtgtcaatcttgatg

SEQ ID NO: 1598898 - DNA, 25 bp, Homo sapien
caggttccagtgtcaatcttgatga

SEQ ID NO: 1598899 - DNA, 25 bp, Homo sapien
tgtcacaggtcagttgggaattctc

SEQ ID NO: 1598900 - DNA, 25 bp, Homo sapien
gtagcagatggcgtgagtatcaaga

SEQ ID NO: 1598901 - DNA, 25 bp, Homo sapien
cgtgagtatcaagagtcaccagatg

SEQ ID NO: 1598902 - DNA, 25 bp, Homo sapien
gtgtcacaggtcagttgggaattct

SEQ ID NO: 1598903 - DNA, 25 bp, Homo sapien
agattgctttcactgtgtggactcc

SEQ ID NO: 1598904 - DNA, 25 bp, Homo sapien
tcacagagacgaagcctgctacaat

SEQ ID NO: 1598905 - DNA, 25 bp, Homo sapien
tcttttgtaacccaaacttcagcag

SEQ ID NO: 1598906 - DNA, 25 bp, Homo sapien
tggcaatacccaaaaacactacctg

SEQ ID NO: 1598907 - DNA, 25 bp, Homo sapien
cattcttcctgactgcttatagtaa

SEQ ID NO: 1598908 - DNA, 25 bp, Homo sapien
gaagtggtgaagaacttagcaaaac

SEQ ID NO: 1598909 - DNA, 25 bp, Homo sapien
ttttggcactgagaagtgaggcact

SEQ ID NO: 1598910 - DNA, 25 bp, Homo sapien
cctgagctgattaaggcagattttg

SEQ ID NO: 1598911 - DNA, 25 bp, Homo sapien
cctaatcaccaaggtaaggtagcct

SEQ ID NO: 1598912 - DNA, 25 bp, Homo sapien
gatggcacccaaggccaattcatga

SEQ ID NO: 1598913 - DNA, 25 bp, Homo sapien
tttaatttcagacccttgtgatggc

SEQ ID NO: 1598914 - DNA, 25 bp, Homo sapien
ggctgggaccaatctagatgactta

SEQ ID NO: 1598915 - DNA, 25 bp, Homo sapien
cttatattcatagggttcctcccca

SEQ ID NO: 1598916 - DNA, 25 bp, Homo sapien
ttcctccccagtgtgaattctttca

SEQ ID NO: 1598917 - DNA, 25 bp, Homo sapien
cccagtgtgaattctttcatgtcta

SEQ ID NO: 1598918 - DNA, 25 bp, Homo sapien
cctccccagtgtgaattctttcatg

SEQ ID NO: 1598919 - DNA, 25 bp, Homo sapien
gtgaggaaacagcaaaagctttccc

SEQ ID NO: 1598920 - DNA, 25 bp, Homo sapien
taggtgtgaggaaacagcaaaagct

SEQ ID NO: 1598921 - DNA, 25 bp, Homo sapien
ttaggtgtgaggaaacagcaaaagc

SEQ ID NO: 1598922 - DNA, 25 bp, Homo sapien
ggtgtgaggaaacagcaaaagcttt

SEQ ID NO: 1598923 - DNA, 25 bp, Homo sapien
ctttacatatgagggctttctctct

SEQ ID NO: 1598924 - DNA, 25 bp, Homo sapien
tcgtatgtgtatagcaaggcccgtg

SEQ ID NO: 1598925 - DNA, 25 bp, Homo sapien
cgtatgtgtatagcaaggcccgtgt

SEQ ID NO: 1598926 - DNA, 25 bp, Homo sapien
ttcgtatgtgtatagcaaggcccgt

SEQ ID NO: 1598927 - DNA, 25 bp, Homo sapien
gtatgtgtatagcaaggcccgtgta

SEQ ID NO: 1598928 - DNA, 25 bp, Homo sapien
cattcatagggttttattccagtgt

SEQ ID NO: 1598929 - DNA, 25 bp, Homo sapien
agggttttattccagtgtgagttct

SEQ ID NO: 1598930 - DNA, 25 bp, Homo sapien
tcatagggttttattccagtgtgag

SEQ ID NO: 1598931 - DNA, 25 bp, Homo sapien
acattcatagggttttattccagtg

SEQ ID NO: 1598932 - DNA, 25 bp, Homo sapien
tgttgagtaaggtgagttgacctag

SEQ ID NO: 1598933 - DNA, 25 bp, Homo sapien
tgaggaatgagtgatggctctccta

SEQ ID NO: 1598934 - DNA, 25 bp, Homo sapien
tgagtaaggtgagttgacctagtga

SEQ ID NO: 1598935 - DNA, 25 bp, Homo sapien
atgagtgatggctctcctacattcc

SEQ ID NO: 1598936 - DNA, 25 bp, Homo sapien
agagtttccatccactgtagcttct

SEQ ID NO: 1598937 - DNA, 25 bp, Homo sapien
gagtttccatccactgtagcttctt

SEQ ID NO: 1598938 - DNA, 25 bp, Homo sapien
cagagtttccatccactgtagcttc

SEQ ID NO: 1598939 - DNA, 25 bp, Homo sapien
gtttagatagtttattacaaactgc

SEQ ID NO: 1598940 - DNA, 25 bp, Homo sapien
gatgtgtttagatagtttattacaa

SEQ ID NO: 1598941 - DNA, 25 bp, Homo sapien
gacgtggggtttattacacaattga

SEQ ID NO: 1598942 - DNA, 25 bp, Homo sapien
acaattgatgtgtttagatagttta

SEQ ID NO: 1598943 - DNA, 25 bp, Homo sapien
gctaatatcaaactcccacactcaa

SEQ ID NO: 1598944 - DNA, 25 bp, Homo sapien
tactgtccatgctaatatcaaactc

SEQ ID NO: 1598945 - DNA, 25 bp, Homo sapien
aatactgtccatgctaatatcaaac

SEQ ID NO: 1598946 - DNA, 25 bp, Homo sapien
tccatgctaatatcaaactcccaca

SEQ ID NO: 1598947 - DNA, 25 bp, Homo sapien
ttctcagttgtgtccagtaaagccc

SEQ ID NO: 1598948 - DNA, 25 bp, Homo sapien
tttctcagttgtgtccagtaaagcc

SEQ ID NO: 1598949 - DNA, 25 bp, Homo sapien
atttctcagttgtgtccagtaaagc

SEQ ID NO: 1598950 - DNA, 25 bp, Homo sapien
agccacatcatcaaacgtcactgaa

SEQ ID NO: 1598951 - DNA, 25 bp, Homo sapien
gccacatcatcaaacgtcactgaat

SEQ ID NO: 1598952 - DNA, 25 bp, Homo sapien
gctctcccaagatctactccagtgt

SEQ ID NO: 1598953 - DNA, 25 bp, Homo sapien
gtttgagccaatgaacactgccatg

SEQ ID NO: 1598954 - DNA, 25 bp, Homo sapien
tctcaggagctcttgtgtctaagca

SEQ ID NO: 1598955 - DNA, 25 bp, Homo sapien
caaggtgaacctactagaggcatat

SEQ ID NO: 1598956 - DNA, 25 bp, Homo sapien
tattggatgtaagcatgtcattttg

SEQ ID NO: 1598957 - DNA, 25 bp, Homo sapien
tcattttgtacaatggcacattttc

SEQ ID NO: 1598958 - DNA, 25 bp, Homo sapien
cattttgtacaatggcacattttct

SEQ ID NO: 1598959 - DNA, 25 bp, Homo sapien
ggatgtaagcatgtcattttgtaca

SEQ ID NO: 1598960 - DNA, 25 bp, Homo sapien
tgataagaatttgccaggtagtcct

SEQ ID NO: 1598961 - DNA, 25 bp, Homo sapien
ctgataagaatttgccaggtagtcc

SEQ ID NO: 1598962 - DNA, 25 bp, Homo sapien
caaaagggcagattggttccctggg

SEQ ID NO: 1598963 - DNA, 25 bp, Homo sapien
tcaaaagggcagattggttccctgg

SEQ ID NO: 1598964 - DNA, 25 bp, Homo sapien
ttcttcaaaagggcagattggttcc

SEQ ID NO: 1598965 - DNA, 25 bp, Homo sapien
cttcaaaagggcagattggttccct

SEQ ID NO: 1598966 - DNA, 25 bp, Homo sapien
catgggacaaatcagtgactgccat

SEQ ID NO: 1598967 - DNA, 25 bp, Homo sapien
tggtcagttgtgcctcaatgctctc

SEQ ID NO: 1598968 - DNA, 25 bp, Homo sapien
gatggtcagttgtgcctcaatgctc

SEQ ID NO: 1598969 - DNA, 25 bp, Homo sapien
atggtcagttgtgcctcaatgctct

SEQ ID NO: 1598970 - DNA, 25 bp, Homo sapien
tgtcacttccgctacgagcttcggg

SEQ ID NO: 1598971 - DNA, 25 bp, Homo sapien
tcgactccaccaagataaaggtgaa

SEQ ID NO: 1598972 - DNA, 25 bp, Homo sapien
cagtttcagccacgtaggaccaggt

SEQ ID NO: 1598973 - DNA, 25 bp, Homo sapien
gtgaaacagcactgaccgtgggcag

SEQ ID NO: 1598974 - DNA, 25 bp, Homo sapien
gtgtatagcaaggcccgtgtactga

SEQ ID NO: 1598975 - DNA, 25 bp, Homo sapien
atagcaaggcccgtgtactgagtga

SEQ ID NO: 1598976 - DNA, 25 bp, Homo sapien
agcaaggcccgtgtactgagtgaag

SEQ ID NO: 1598977 - DNA, 25 bp, Homo sapien
aaggcccgtgtactgagtgaaggct

SEQ ID NO: 1598978 - DNA, 25 bp, Homo sapien
actgctttaggtgtgaggagggtgt

SEQ ID NO: 1598979 - DNA, 25 bp, Homo sapien
ctgctttaggtgtgaggagggtgtg

SEQ ID NO: 1598980 - DNA, 25 bp, Homo sapien
gagggtgtgatggttctcccacatt

SEQ ID NO: 1598981 - DNA, 25 bp, Homo sapien
cagcgtgaattcccatgtgattatc

SEQ ID NO: 1598982 - DNA, 25 bp, Homo sapien
gcgtgaattcccatgtgattatcaa

SEQ ID NO: 1598983 - DNA, 25 bp, Homo sapien
cgtgaattcccatgtgattatcaag

SEQ ID NO: 1598984 - DNA, 25 bp, Homo sapien
gtgaattcccatgtgattatcaagg

SEQ ID NO: 1598985 - DNA, 25 bp, Homo sapien
tgcaaaacacttaaagccttttcca

SEQ ID NO: 1598986 - DNA, 25 bp, Homo sapien
cacttaaagccttttccacattcct

SEQ ID NO: 1598987 - DNA, 25 bp, Homo sapien
gaaaaacagctccctgaagacctct

SEQ ID NO: 1598988 - DNA, 25 bp, Homo sapien
aaaaacagctccctgaagacctctt

SEQ ID NO: 1598989 - DNA, 25 bp, Homo sapien
ggaaaaacagctccctgaagacctc

SEQ ID NO: 1598990 - DNA, 25 bp, Homo sapien
tgatgaggggataaaggatttaaaa

SEQ ID NO: 1598991 - DNA, 25 bp, Homo sapien
ctgatgaggggataaaggatttaaa

SEQ ID NO: 1598992 - DNA, 25 bp, Homo sapien
tgctccagcgaggtgttccaccggg

SEQ ID NO: 1598993 - DNA, 25 bp, Homo sapien
gggcaactgactacctgggaatgct

SEQ ID NO: 1598994 - DNA, 25 bp, Homo sapien
atcagaacaaaatcagagtatcagg

SEQ ID NO: 1598995 - DNA, 25 bp, Homo sapien
tatagtttatgccaaaccagaatca

SEQ ID NO: 1598996 - DNA, 25 bp, Homo sapien
ggaacagaacagtacatggtttttc

SEQ ID NO: 1598997 - DNA, 25 bp, Homo sapien
taaccaattagttcaggggtctgtc

SEQ ID NO: 1598998 - DNA, 25 bp, Homo sapien
gttgcgatcgattgatcaagcaggg

SEQ ID NO: 1598999 - DNA, 25 bp, Homo sapien
caactaggcccagggtttgacgccg

SEQ ID NO: 1599000 - DNA, 25 bp, Homo sapien
aattatacatacaagggagatcatc

SEQ ID NO: 1599001 - DNA, 25 bp, Homo sapien
aagtcacctatgagacattcagtgg

SEQ ID NO: 1599002 - DNA, 25 bp, Homo sapien
gccaggcgaggtgcctcatattttt

SEQ ID NO: 1599003 - DNA, 25 bp, Homo sapien
gaaagtgctttgcaagccaggcgag

SEQ ID NO: 1599004 - DNA, 25 bp, Homo sapien
atggtctttttggaggcttttgaag

SEQ ID NO: 1599005 - DNA, 25 bp, Homo sapien
tggaggcttttgaagggagctccat

SEQ ID NO: 1599006 - DNA, 25 bp, Homo sapien
tttggaggcttttgaagggagctcc

SEQ ID NO: 1599007 - DNA, 25 bp, Homo sapien
ttttggaggcttttgaagggagctc

SEQ ID NO: 1599008 - DNA, 25 bp, Homo sapien
tattgttacattaggttctagggta

SEQ ID NO: 1599009 - DNA, 25 bp, Homo sapien
cgagaagctacagggtatagtctat

SEQ ID NO: 1599010 - DNA, 25 bp, Homo sapien
agccctctaggcgactatcttccag

SEQ ID NO: 1599011 - DNA, 25 bp, Homo sapien
caaactctacaaccgcgatggactg

SEQ ID NO: 1599012 - DNA, 25 bp, Homo sapien
gacaccctagctggatgatcagttg

SEQ ID NO: 1599013 - DNA, 25 bp, Homo sapien
cttgtctttacccacctgaggaact

SEQ ID NO: 1599014 - DNA, 25 bp, Homo sapien
tacaggctgactgagctacctctcc

SEQ ID NO: 1599015 - DNA, 25 bp, Homo sapien
tagacagatttggtgagaactcccc

SEQ ID NO: 1599016 - DNA, 25 bp, Homo sapien
cagagatttcgcattaaaaagcggc

SEQ ID NO: 1599017 - DNA, 25 bp, Homo sapien
tgcaaatgggaacgaacaactgcct

SEQ ID NO: 1599018 - DNA, 25 bp, Homo sapien
taggattttgggtgcaggacccctc

SEQ ID NO: 1599019 - DNA, 25 bp, Homo sapien
tacccagccccatgaatagtagtga

SEQ ID NO: 1599020 - DNA, 25 bp, Homo sapien
caactggatgggcacatgtactcta

SEQ ID NO: 1599021 - DNA, 25 bp, Homo sapien
gttgtctgtgtacaatgcaacagca

SEQ ID NO: 1599022 - DNA, 25 bp, Homo sapien
aaacagtatttcaagggcgggtgtg

SEQ ID NO: 1599023 - DNA, 25 bp, Homo sapien
tcattagggcaagttcttccacctt

SEQ ID NO: 1599024 - DNA, 25 bp, Homo sapien
tgtaccaatagtctagttgtctgtg

SEQ ID NO: 1599025 - DNA, 25 bp, Homo sapien
gaatgccttgtagctggatattgaa

SEQ ID NO: 1599026 - DNA, 25 bp, Homo sapien
ggtacagtcagattcagtgtcagat

SEQ ID NO: 1599027 - DNA, 25 bp, Homo sapien
tccgagttctggagattaggtcaaa

SEQ ID NO: 1599028 - DNA, 25 bp, Homo sapien
caacatacgcaagttgaggagacaa

SEQ ID NO: 1599029 - DNA, 25 bp, Homo sapien
tcttagatgtttagcaagtgctgaa

SEQ ID NO: 1599030 - DNA, 25 bp, Homo sapien
tgagttcgtgtgtgaacgttaaggt

SEQ ID NO: 1599031 - DNA, 25 bp, Homo sapien
ttcacatgccttagttcttagatgt

SEQ ID NO: 1599032 - DNA, 25 bp, Homo sapien
gtgaacgttaaggtatgtggaatac

SEQ ID NO: 1599033 - DNA, 25 bp, Homo sapien
tcctgtgtgcgttcgcatgtgcata

SEQ ID NO: 1599034 - DNA, 25 bp, Homo sapien
tacatgttgactaagcattgaggaa

SEQ ID NO: 1599035 - DNA, 25 bp, Homo sapien
taaggcccgaggattgagtgaaagc

SEQ ID NO: 1599036 - DNA, 25 bp, Homo sapien
catattaagatttgtggaacgagca

SEQ ID NO: 1599037 - DNA, 25 bp, Homo sapien
cccacatgccttacataaatacagc

SEQ ID NO: 1599038 - DNA, 25 bp, Homo sapien
taaaacaagtcctgaggaacgagta

SEQ ID NO: 1599039 - DNA, 25 bp, Homo sapien
ttcccacatgccttacataaataca

SEQ ID NO: 1599040 - DNA, 25 bp, Homo sapien
tcccacatgccttacataaatacag

SEQ ID NO: 1599041 - DNA, 25 bp, Homo sapien
ttgtaaggtatgaggaatgaataaa

SEQ ID NO: 1599042 - DNA, 25 bp, Homo sapien
tgtaaggtatgaggaatgaataaaa

SEQ ID NO: 1599043 - DNA, 25 bp, Homo sapien
gtaaggtatgaggaatgaataaaag

SEQ ID NO: 1599044 - DNA, 25 bp, Homo sapien
tgaattcgcatgtgtaaaataagtc

SEQ ID NO: 1599045 - DNA, 25 bp, Homo sapien
aattcgcatgtgtaaaataagtcct

SEQ ID NO: 1599046 - DNA, 25 bp, Homo sapien
taaaataagtcctgtggatctagtg

SEQ ID NO: 1599047 - DNA, 25 bp, Homo sapien
tgtgaattcgcatgtgtaaaataag

SEQ ID NO: 1599048 - DNA, 25 bp, Homo sapien
cctgtggattgagtgaaagctttac

SEQ ID NO: 1599049 - DNA, 25 bp, Homo sapien
tctgcctagtaagatttggaaactg

SEQ ID NO: 1599050 - DNA, 25 bp, Homo sapien
tccagaatggttagagtcatacagt

SEQ ID NO: 1599051 - DNA, 25 bp, Homo sapien
gaattcttccatgtcctataaggtg

SEQ ID NO: 1599052 - DNA, 25 bp, Homo sapien
ctgttgagatataaaagatgaataa

SEQ ID NO: 1599053 - DNA, 25 bp, Homo sapien
ttgagatataaaagatgaataaaga

SEQ ID NO: 1599054 - DNA, 25 bp, Homo sapien
gagatataaaagatgaataaagaat

SEQ ID NO: 1599055 - DNA, 25 bp, Homo sapien
gatataaaagatgaataaagaattt

SEQ ID NO: 1599056 - DNA, 25 bp, Homo sapien
ttggttttgagttgcaaatccaatt

SEQ ID NO: 1599057 - DNA, 25 bp, Homo sapien
caattgtactccatttggtgatctt

SEQ ID NO: 1599058 - DNA, 25 bp, Homo sapien
ccagacatgagactacgtttgaata

SEQ ID NO: 1599059 - DNA, 25 bp, Homo sapien
ttgttccaatccagacatgagacta

SEQ ID NO: 1599060 - DNA, 25 bp, Homo sapien
tccaatccagacatgagactacgtt

SEQ ID NO: 1599061 - DNA, 25 bp, Homo sapien
catgagactacgtttgaataattca

SEQ ID NO: 1599062 - DNA, 25 bp, Homo sapien
gcaaactaatcatataacatttcca

SEQ ID NO: 1599063 - DNA, 25 bp, Homo sapien
gattctaaagatggtcaagtgtaac

SEQ ID NO: 1599064 - DNA, 25 bp, Homo sapien
gaggcccatgcaagacataacacca

SEQ ID NO: 1599065 - DNA, 25 bp, Homo sapien
aaaatgttgcccaggtataatggct

SEQ ID NO: 1599066 - DNA, 25 bp, Homo sapien
tttgacagcaaacatttaagaaaca

SEQ ID NO: 1599067 - DNA, 25 bp, Homo sapien
gggtcagtgaagaaatgatgccagt

SEQ ID NO: 1599068 - DNA, 25 bp, Homo sapien
aacattgatttcctaaaggggtcag

SEQ ID NO: 1599069 - DNA, 25 bp, Homo sapien
catttaagaaacattgatttcctaa

SEQ ID NO: 1599070 - DNA, 25 bp, Homo sapien
ctagtataatgagattcttgtagtt

SEQ ID NO: 1599071 - DNA, 25 bp, Homo sapien
gtataatgagattcttgtagttctc

SEQ ID NO: 1599072 - DNA, 25 bp, Homo sapien
atgagattcttgtagttctccaaca

SEQ ID NO: 1599073 - DNA, 25 bp, Homo sapien
tagtataatgagattcttgtagttc

SEQ ID NO: 1599074 - DNA, 25 bp, Homo sapien
cagcttcagctaagtaccatctcct

SEQ ID NO: 1599075 - DNA, 25 bp, Homo sapien
tacatgccagcttcagctaagtacc

SEQ ID NO: 1599076 - DNA, 25 bp, Homo sapien
cagctaagtaccatctcctttgatg

SEQ ID NO: 1599077 - DNA, 25 bp, Homo sapien
ttaaatacatgccagcttcagctaa

SEQ ID NO: 1599078 - DNA, 25 bp, Homo sapien
tacacgataacaaggtaaggctacc

SEQ ID NO: 1599079 - DNA, 25 bp, Homo sapien
ctttaagatgcttgaatacacgata

SEQ ID NO: 1599080 - DNA, 25 bp, Homo sapien
caaggtaaggctaccgatgatggct

SEQ ID NO: 1599081 - DNA, 25 bp, Homo sapien
taccgatgatggctacaagcataac

SEQ ID NO: 1599082 - DNA, 25 bp, Homo sapien
cttggcttctcgatgttcctgtcat

SEQ ID NO: 1599083 - DNA, 25 bp, Homo sapien
aatccatcagtaatccatcagtaac

SEQ ID NO: 1599084 - DNA, 25 bp, Homo sapien
gtaacccagccactagccttggctt

SEQ ID NO: 1599085 - DNA, 25 bp, Homo sapien
ttctcgatgttcctgtcatgaagac

SEQ ID NO: 1599086 - DNA, 25 bp, Homo sapien
gccctgtcggtgacaagaggacgct

SEQ ID NO: 1599087 - DNA, 25 bp, Homo sapien
actgcaatcgccctgtcggtgacaa

SEQ ID NO: 1599088 - DNA, 25 bp, Homo sapien
caatcgccctgtcggtgacaagagg

SEQ ID NO: 1599089 - DNA, 25 bp, Homo sapien
ggaacgcactgcaatcgccctgtcg

SEQ ID NO: 1599090 - DNA, 25 bp, Homo sapien
ccaggcccagactgatgcgggcgca

SEQ ID NO: 1599091 - DNA, 25 bp, Homo sapien
gacctagcagaagtccggagcgtca

SEQ ID NO: 1599092 - DNA, 25 bp, Homo sapien
cctaggttgagcatgagcgctggct

SEQ ID NO: 1599093 - DNA, 25 bp, Homo sapien
gaggtgaaaacccagctaggaagct

SEQ ID NO: 1599094 - DNA, 25 bp, Homo sapien
ttctcgcatcccaggtggaccagga

SEQ ID NO: 1599095 - DNA, 25 bp, Homo sapien
tcaatctgtcgatattgggaacgac

SEQ ID NO: 1599096 - DNA, 25 bp, Homo sapien
tccggttgcgcacggcattaagtgt

SEQ ID NO: 1599097 - DNA, 25 bp, Homo sapien
tcgacacgcgtacagaaaagtcccg

SEQ ID NO: 1599098 - DNA, 25 bp, Homo sapien
cgcagcgggcggggcacgcgtggag

SEQ ID NO: 1599099 - DNA, 25 bp, Homo sapien
cagcgggcggggcacgcgtggaggc

SEQ ID NO: 1599100 - DNA, 25 bp, Homo sapien
cgggcggggcacgcgtggaggcgtc

SEQ ID NO: 1599101 - DNA, 25 bp, Homo sapien
ggcggggcacgcgtggaggcgtcac

SEQ ID NO: 1599102 - DNA, 25 bp, Homo sapien
agacgcattttaagcagtggtcaaa

SEQ ID NO: 1599103 - DNA, 25 bp, Homo sapien
ttttaagcagtggtcaaaggaacat

SEQ ID NO: 1599104 - DNA, 25 bp, Homo sapien
gcagtggtcaaaggaacattcatat

SEQ ID NO: 1599105 - DNA, 25 bp, Homo sapien
ggaacattcatattcctaaacactt

SEQ ID NO: 1599106 - DNA, 25 bp, Homo sapien
tggagtctccactctgctgccaggc

SEQ ID NO: 1599107 - DNA, 25 bp, Homo sapien
gagtctccactctgctgccaggctg

SEQ ID NO: 1599108 - DNA, 25 bp, Homo sapien
gatggagtctccactctgctgccag

SEQ ID NO: 1599109 - DNA, 25 bp, Homo sapien
agtctccactctgctgccaggctgg

SEQ ID NO: 1599110 - DNA, 25 bp, Homo sapien
gagtgtagtacagtgatcttcactc

SEQ ID NO: 1599111 - DNA, 25 bp, Homo sapien
gtgtagtacagtgatcttcactcac

SEQ ID NO: 1599112 - DNA, 25 bp, Homo sapien
ggagtgtagtacagtgatcttcact

SEQ ID NO: 1599113 - DNA, 25 bp, Homo sapien
gaggtaggactcagcccttagtaca

SEQ ID NO: 1599114 - DNA, 25 bp, Homo sapien
aacagtggctgcacattagattcac

SEQ ID NO: 1599115 - DNA, 25 bp, Homo sapien
tcagaacttaagtcaaccttgcctc

SEQ ID NO: 1599116 - DNA, 25 bp, Homo sapien
tgtccacttgatatagtcctacaca

SEQ ID NO: 1599117 - DNA, 25 bp, Homo sapien
gggactgcaggcactagccatcgcg

SEQ ID NO: 1599118 - DNA, 25 bp, Homo sapien
tttctcgcaaggtggagacaagaga

SEQ ID NO: 1599119 - DNA, 25 bp, Homo sapien
cacacctgttggtatttctcgcaag

SEQ ID NO: 1599120 - DNA, 25 bp, Homo sapien
aagtgaggatctgcaccggcactgg

SEQ ID NO: 1599121 - DNA, 25 bp, Homo sapien
ggccagtatggtcttaatcgattgc

SEQ ID NO: 1599122 - DNA, 25 bp, Homo sapien
gcccctgtctcaaccaagaccgagt

SEQ ID NO: 1599123 - DNA, 25 bp, Homo sapien
tcttaatcgattgccctcgtgatcc

SEQ ID NO: 1599124 - DNA, 25 bp, Homo sapien
actactctctttcacggagacccca

SEQ ID NO: 1599125 - DNA, 25 bp, Homo sapien
gtggccacgcgcacttctgattccg

SEQ ID NO: 1599126 - DNA, 25 bp, Homo sapien
gcggcggctaaagggcaggaggcgc

SEQ ID NO: 1599127 - DNA, 25 bp, Homo sapien
tactgctggggaaaccgttgggcca

SEQ ID NO: 1599128 - DNA, 25 bp, Homo sapien
ttctgattccgctccagggtttcag

SEQ ID NO: 1599129 - DNA, 25 bp, Homo sapien
attgagtacgatgaatgctttgcca

SEQ ID NO: 1599130 - DNA, 25 bp, Homo sapien
ggttccattatagtcatgacattca

SEQ ID NO: 1599131 - DNA, 25 bp, Homo sapien
gaatgctttgccataggttccatta

SEQ ID NO: 1599132 - DNA, 25 bp, Homo sapien
tgccataggttccattatagtcatg

SEQ ID NO: 1599133 - DNA, 25 bp, Homo sapien
tttattctgatagtcatctaaacaa

SEQ ID NO: 1599134 - DNA, 25 bp, Homo sapien
gatattttattctgatagtcatcta

SEQ ID NO: 1599135 - DNA, 25 bp, Homo sapien
cagatattttattctgatagtcatc

SEQ ID NO: 1599136 - DNA, 25 bp, Homo sapien
tctgatagtcatctaaacaaaaact

SEQ ID NO: 1599137 - DNA, 25 bp, Homo sapien
ctgtgtaaatattcaacatgcgagt

SEQ ID NO: 1599138 - DNA, 25 bp, Homo sapien
cgtgctgcggagaaccggcaatcat

SEQ ID NO: 1599139 - DNA, 25 bp, Homo sapien
tatggacgacgtgcctacttgtgag

SEQ ID NO: 1599140 - DNA, 25 bp, Homo sapien
tgtgagacctctctgtgagtaagca

SEQ ID NO: 1599141 - DNA, 25 bp, Homo sapien
tcttgggcatagacaaggagaacct

SEQ ID NO: 1599142 - DNA, 25 bp, Homo sapien
tctcttccggccagcagattgtttt

SEQ ID NO: 1599143 - DNA, 25 bp, Homo sapien
ttgcagctatctttttggtgctaca

SEQ ID NO: 1599144 - DNA, 25 bp, Homo sapien
tccccaactttattccgctttgcag

SEQ ID NO: 1599145 - DNA, 25 bp, Homo sapien
ttttggtgctacatggtcttctggt

SEQ ID NO: 1599146 - DNA, 25 bp, Homo sapien
tcaccgagttctcgtcccagtctcc

SEQ ID NO: 1599147 - DNA, 25 bp, Homo sapien
gtctctccctcaccgagttctcgtc

SEQ ID NO: 1599148 - DNA, 25 bp, Homo sapien
ccgtctctccctcaccgagttctcg

SEQ ID NO: 1599149 - DNA, 25 bp, Homo sapien
tccctcaccgagttctcgtcccagt

SEQ ID NO: 1599150 - DNA, 25 bp, Homo sapien
gaaaccgttggttcagctgcggttc

SEQ ID NO: 1599151 - DNA, 25 bp, Homo sapien
tgttgggcgggacctcgaaatgcct

SEQ ID NO: 1599152 - DNA, 25 bp, Homo sapien
ctccggcttcactgggcaccgtggg

SEQ ID NO: 1599153 - DNA, 25 bp, Homo sapien
ggcgggaccacgatggagggagtct

SEQ ID NO: 1599154 - DNA, 25 bp, Homo sapien
acaagcacgcaccactatgcccgga

SEQ ID NO: 1599155 - DNA, 25 bp, Homo sapien
cgcaccactatgcccggataacttt

SEQ ID NO: 1599156 - DNA, 25 bp, Homo sapien
cacgcaccactatgcccggataact

SEQ ID NO: 1599157 - DNA, 25 bp, Homo sapien
agcacgcaccactatgcccggataa

SEQ ID NO: 1599158 - DNA, 25 bp, Homo sapien
taaggctttgcaatgtaaccgtgag

SEQ ID NO: 1599159 - DNA, 25 bp, Homo sapien
tcccagaggctgatgatatgaccaa

SEQ ID NO: 1599160 - DNA, 25 bp, Homo sapien
ccaatggtctggaggtccctaggcc

SEQ ID NO: 1599161 - DNA, 25 bp, Homo sapien
ctgttcctgaagacgaccatgaagg

SEQ ID NO: 1599162 - DNA, 25 bp, Homo sapien
gggcagccccttacacaggatcttc

SEQ ID NO: 1599163 - DNA, 25 bp, Homo sapien
gtggggcagccccttacacaggatc

SEQ ID NO: 1599164 - DNA, 25 bp, Homo sapien
ggcagccccttacacaggatcttct

SEQ ID NO: 1599165 - DNA, 25 bp, Homo sapien
acaggatcttctccgcctcctgacc

SEQ ID NO: 1599166 - DNA, 25 bp, Homo sapien
gatcttgcgcacatctcggaggtgg

SEQ ID NO: 1599167 - DNA, 25 bp, Homo sapien
ccctgcaggtgctcgtcacggaagg

SEQ ID NO: 1599168 - DNA, 25 bp, Homo sapien
acctcaagcctctgcagatagctga

SEQ ID NO: 1599169 - DNA, 25 bp, Homo sapien
ggtccagcacgatgcattcaagcag

SEQ ID NO: 1599170 - DNA, 25 bp, Homo sapien
gccacccatccgcagggaatggagc

SEQ ID NO: 1599171 - DNA, 25 bp, Homo sapien
ggtgccacatgactttaggtcgcat

SEQ ID NO: 1599172 - DNA, 25 bp, Homo sapien
ccttcgaaggaggtgccacatgact

SEQ ID NO: 1599173 - DNA, 25 bp, Homo sapien
cgggatgccatgtaccttcgaagga

SEQ ID NO: 1599174 - DNA, 25 bp, Homo sapien
ctgtaagagccagagattggggtga

SEQ ID NO: 1599175 - DNA, 25 bp, Homo sapien
ctggagacacacaaccccggggtgg

SEQ ID NO: 1599176 - DNA, 25 bp, Homo sapien
ctgggctggagacacacaaccccgg

SEQ ID NO: 1599177 - DNA, 25 bp, Homo sapien
tgcactcggccacttagaataaatc

SEQ ID NO: 1599178 - DNA, 25 bp, Homo sapien
gcactcggccacttagaataaatct

SEQ ID NO: 1599179 - DNA, 25 bp, Homo sapien
ctgcactcggccacttagaataaat

SEQ ID NO: 1599180 - DNA, 25 bp, Homo sapien
cactcggccacttagaataaatctg

SEQ ID NO: 1599181 - DNA, 25 bp, Homo sapien
atttctctacttggcatcatagggc

SEQ ID NO: 1599182 - DNA, 25 bp, Homo sapien
aggaaaattgtctaataacatattc

SEQ ID NO: 1599183 - DNA, 25 bp, Homo sapien
tttatgtgtgcttacaaaggtgttt

SEQ ID NO: 1599184 - DNA, 25 bp, Homo sapien
ttatgtgtgcttacaaaggtgtttc

SEQ ID NO: 1599185 - DNA, 25 bp, Homo sapien
agaaaatgagaaagaagcccgggcg

SEQ ID NO: 1599186 - DNA, 25 bp, Homo sapien
aatgagaaagaagcccgggcgcagt

SEQ ID NO: 1599187 - DNA, 25 bp, Homo sapien
gagaaaatgagaaagaagcccgggc

SEQ ID NO: 1599188 - DNA, 25 bp, Homo sapien
aaaatgagaaagaagcccgggcgca

SEQ ID NO: 1599189 - DNA, 25 bp, Homo sapien
gctccgccccttgtggctttacagg

SEQ ID NO: 1599190 - DNA, 25 bp, Homo sapien
ctccgccccttgtggctttacaggg

SEQ ID NO: 1599191 - DNA, 25 bp, Homo sapien
gctggtaagcgatgatgccgagata

SEQ ID NO: 1599192 - DNA, 25 bp, Homo sapien
ggtactgtcctttatccccattgca

SEQ ID NO: 1599193 - DNA, 25 bp, Homo sapien
taatagccccgtgaggcaggtactg

SEQ ID NO: 1599194 - DNA, 25 bp, Homo sapien
tccctgcgtgatctcagtgaagtcc

SEQ ID NO: 1599195 - DNA, 25 bp, Homo sapien
tcaggtcgacatgtcgccacagcca

SEQ ID NO: 1599196 - DNA, 25 bp, Homo sapien
tagagcgtcaggtcgacatgtcgcc

SEQ ID NO: 1599197 - DNA, 25 bp, Homo sapien
agccaccggtcgtccaccagcctct

SEQ ID NO: 1599198 - DNA, 25 bp, Homo sapien
cgtgtagagcgtcaggtcgacatgt

SEQ ID NO: 1599199 - DNA, 25 bp, Homo sapien
ccagccccgggccacatcgcatctc

SEQ ID NO: 1599200 - DNA, 25 bp, Homo sapien
cccgggccacatcgcatctccaggt

SEQ ID NO: 1599201 - DNA, 25 bp, Homo sapien
agccccgggccacatcgcatctcca

SEQ ID NO: 1599202 - DNA, 25 bp, Homo sapien
gacgcgcggttagaacgaccccagc

SEQ ID NO: 1599203 - DNA, 25 bp, Homo sapien
ctggagatgcggatccggtcccgta

SEQ ID NO: 1599204 - DNA, 25 bp, Homo sapien
tggagatgcggatccggtcccgtac

SEQ ID NO: 1599205 - DNA, 25 bp, Homo sapien
aagagaagatctcgagcaggaccga

SEQ ID NO: 1599206 - DNA, 25 bp, Homo sapien
agcaggaccgagtccggcagttcga

SEQ ID NO: 1599207 - DNA, 25 bp, Homo sapien
ccggcagttcgaccaaagtcgccat

SEQ ID NO: 1599208 - DNA, 25 bp, Homo sapien
agatctcgagcaggaccgagtccgg

SEQ ID NO: 1599209 - DNA, 25 bp, Homo sapien
tgatttggccgcgactgggaactaa

SEQ ID NO: 1599210 - DNA, 25 bp, Homo sapien
tggagtgaggcgaagctcggaggcg

SEQ ID NO: 1599211 - DNA, 25 bp, Homo sapien
gaaatttgaccttcctctcgctggg

SEQ ID NO: 1599212 - DNA, 25 bp, Homo sapien
tcccgtagccggtcgagaaatttga

SEQ ID NO: 1599213 - DNA, 25 bp, Homo sapien
gacccaggatttctaagagaatgca

SEQ ID NO: 1599214 - DNA, 25 bp, Homo sapien
ctggctgtgacccaggatttctaag

SEQ ID NO: 1599215 - DNA, 25 bp, Homo sapien
gatttctaagagaatgcaaagatgt

SEQ ID NO: 1599216 - DNA, 25 bp, Homo sapien
cagacgcctgccacatttttgtatt

SEQ ID NO: 1599217 - DNA, 25 bp, Homo sapien
tcaggacatggagttcagatgcaca

SEQ ID NO: 1599218 - DNA, 25 bp, Homo sapien
gtgctccaacaatcatcaagacagg

SEQ ID NO: 1599219 - DNA, 25 bp, Homo sapien
tgggatgggacgttccacaaccttg

SEQ ID NO: 1599220 - DNA, 25 bp, Homo sapien
tcagcttgaccaaaacaggattgtg

SEQ ID NO: 1599221 - DNA, 25 bp, Homo sapien
tgaattgaggaaggacggtccttgt

SEQ ID NO: 1599222 - DNA, 25 bp, Homo sapien
aagatacagctgcaggagattgtgc

SEQ ID NO: 1599223 - DNA, 25 bp, Homo sapien
ttgtgcaaatgtgcaatgtttccag

SEQ ID NO: 1599224 - DNA, 25 bp, Homo sapien
aagtgctccccaaagatacagctgc

SEQ ID NO: 1599225 - DNA, 25 bp, Homo sapien
ttcgggctcaggatcaggagcttac

SEQ ID NO: 1599226 - DNA, 25 bp, Homo sapien
tagttgccgctgcaagaggcttcgg

SEQ ID NO: 1599227 - DNA, 25 bp, Homo sapien
gaagggatgactgcagaactcgtcc

SEQ ID NO: 1599228 - DNA, 25 bp, Homo sapien
atcaagcttcgcctactgactggag

SEQ ID NO: 1599229 - DNA, 25 bp, Homo sapien
cacctgtcaagccttgggacaccga

SEQ ID NO: 1599230 - DNA, 25 bp, Homo sapien
acacctgtcaagccttgggacaccg

SEQ ID NO: 1599231 - DNA, 25 bp, Homo sapien
tgtcaagccttgggacaccgaaacc

SEQ ID NO: 1599232 - DNA, 25 bp, Homo sapien
cctgtcaagccttgggacaccgaaa

SEQ ID NO: 1599233 - DNA, 25 bp, Homo sapien
caaaatgggcttccttagccctggg

SEQ ID NO: 1599234 - DNA, 25 bp, Homo sapien
aaatgggcttccttagccctgggct

SEQ ID NO: 1599235 - DNA, 25 bp, Homo sapien
ccaaaatgggcttccttagccctgg

SEQ ID NO: 1599236 - DNA, 25 bp, Homo sapien
tccaaaatgggcttccttagccctg

SEQ ID NO: 1599237 - DNA, 25 bp, Homo sapien
tcgcatagcaagtgtcagtcccagg

SEQ ID NO: 1599238 - DNA, 25 bp, Homo sapien
tatatgaatgtcaatgtcggcaccc

SEQ ID NO: 1599239 - DNA, 25 bp, Homo sapien
gcttatccccgctttgcagattggg

SEQ ID NO: 1599240 - DNA, 25 bp, Homo sapien
ccagagcctagggaaaagttgagcc

SEQ ID NO: 1599241 - DNA, 25 bp, Homo sapien
gcggacctccgggaacagctcaggc

SEQ ID NO: 1599242 - DNA, 25 bp, Homo sapien
cagccagactcttccgcatgggagg

SEQ ID NO: 1599243 - DNA, 25 bp, Homo sapien
cataagctctatcccgcctgggtgg

SEQ ID NO: 1599244 - DNA, 25 bp, Homo sapien
gagttgctgcggcattagccaatcc

SEQ ID NO: 1599245 - DNA, 25 bp, Homo sapien
gattctcccttaaggaattgacttc

SEQ ID NO: 1599246 - DNA, 25 bp, Homo sapien
gccagattctcccttaaggaattga

SEQ ID NO: 1599247 - DNA, 25 bp, Homo sapien
tgcgaccgccagattctcccttaag

SEQ ID NO: 1599248 - DNA, 25 bp, Homo sapien
agttggggctgcgaccgccagattc

SEQ ID NO: 1599249 - DNA, 25 bp, Homo sapien
acacaggcagaatgaaaagggcccc

SEQ ID NO: 1599250 - DNA, 25 bp, Homo sapien
cagagacggaaagaactggagaacc

SEQ ID NO: 1599251 - DNA, 25 bp, Homo sapien
agatcacccttgagggacacaggca

SEQ ID NO: 1599252 - DNA, 25 bp, Homo sapien
cagatccatgcactcaactcctggg

SEQ ID NO: 1599253 - DNA, 25 bp, Homo sapien
aggggtccccagaggtgctgatgac

SEQ ID NO: 1599254 - DNA, 25 bp, Homo sapien
tcaggggtccccagaggtgctgatg

SEQ ID NO: 1599255 - DNA, 25 bp, Homo sapien
caggggtccccagaggtgctgatga

SEQ ID NO: 1599256 - DNA, 25 bp, Homo sapien
tgggagttggtcacgtagagcacac

SEQ ID NO: 1599257 - DNA, 25 bp, Homo sapien
tagagcacaccgcagatcatgaagg

SEQ ID NO: 1599258 - DNA, 25 bp, Homo sapien
catgaagtccatgtcggagaagccg

SEQ ID NO: 1599259 - DNA, 25 bp, Homo sapien
tgttccaggtatagagggcgcgctc

SEQ ID NO: 1599260 - DNA, 25 bp, Homo sapien
gggggccatcgtgtcagtcatccag

SEQ ID NO: 1599261 - DNA, 25 bp, Homo sapien
gatggggttactgaccccggtcagc

SEQ ID NO: 1599262 - DNA, 25 bp, Homo sapien
tccaggagccgaagcgggaccccat

SEQ ID NO: 1599263 - DNA, 25 bp, Homo sapien
ggctatccgcactgggggccatcgt

SEQ ID NO: 1599264 - DNA, 25 bp, Homo sapien
gggccatcacccgttgctgcaggtc

SEQ ID NO: 1599265 - DNA, 25 bp, Homo sapien
tgaatggccgccagactgccggaga

SEQ ID NO: 1599266 - DNA, 25 bp, Homo sapien
caggtcctcatacccgtaggcaccc

SEQ ID NO: 1599267 - DNA, 25 bp, Homo sapien
ccagactgccggagagattcctcac

SEQ ID NO: 1599268 - DNA, 25 bp, Homo sapien
tcccgcaagcgtacaatggtccgcg

SEQ ID NO: 1599269 - DNA, 25 bp, Homo sapien
gctcaggggcaacagttccgtcatc

SEQ ID NO: 1599270 - DNA, 25 bp, Homo sapien
tgccttgtactgctccaggaccgag

SEQ ID NO: 1599271 - DNA, 25 bp, Homo sapien
aatggtccgcgtgtctgccttgtac

SEQ ID NO: 1599272 - DNA, 25 bp, Homo sapien
ccatggactgggagacgttctggac

SEQ ID NO: 1599273 - DNA, 25 bp, Homo sapien
tacatactggaggtcgcgatacgtc

SEQ ID NO: 1599274 - DNA, 25 bp, Homo sapien
atccaggctccgcatgagggtctcc

SEQ ID NO: 1599275 - DNA, 25 bp, Homo sapien
aagctcttggccgagagggacccat

SEQ ID NO: 1599276 - DNA, 25 bp, Homo sapien
tcatcccctgtagtcaattctctac

SEQ ID NO: 1599277 - DNA, 25 bp, Homo sapien
accttcatcccctgtagtcaattct

SEQ ID NO: 1599278 - DNA, 25 bp, Homo sapien
cctagtctcccagttccaccttcat

SEQ ID NO: 1599279 - DNA, 25 bp, Homo sapien
cagttccaccttcatcccctgtagt

SEQ ID NO: 1599280 - DNA, 25 bp, Homo sapien
tgccatctcgagagcaggtactctg

SEQ ID NO: 1599281 - DNA, 25 bp, Homo sapien
agcaggtactctgcgctgggatcac

SEQ ID NO: 1599282 - DNA, 25 bp, Homo sapien
gatgcatttcccgtcaggggcctgg

SEQ ID NO: 1599283 - DNA, 25 bp, Homo sapien
gatcacggccgtgcagatgcatttc

SEQ ID NO: 1599284 - DNA, 25 bp, Homo sapien
gaaaaggatgctctgtggtcaaata

SEQ ID NO: 1599285 - DNA, 25 bp, Homo sapien
tccaaactgattagaagacacccct

SEQ ID NO: 1599286 - DNA, 25 bp, Homo sapien
taccagggaactctagacacaaatc

SEQ ID NO: 1599287 - DNA, 25 bp, Homo sapien
ggtaatcttaccaggtgtgctggga

SEQ ID NO: 1599288 - DNA, 25 bp, Homo sapien
cagcagtgtaattaaatgcctgggt

SEQ ID NO: 1599289 - DNA, 25 bp, Homo sapien
tctctgcagcagtgtaattaaatgc

SEQ ID NO: 1599290 - DNA, 25 bp, Homo sapien
tctgcagcagtgtaattaaatgcct

SEQ ID NO: 1599291 - DNA, 25 bp, Homo sapien
agtgtaattaaatgcctgggttttg

SEQ ID NO: 1599292 - DNA, 25 bp, Homo sapien
ctggtcatttatgcggttctcagtg

SEQ ID NO: 1599293 - DNA, 25 bp, Homo sapien
tatggccgggccataagtttggctc

SEQ ID NO: 1599294 - DNA, 25 bp, Homo sapien
gaaagctggtcatttatgcggttct

SEQ ID NO: 1599295 - DNA, 25 bp, Homo sapien
ggccataagtttggctccaagctcc

SEQ ID NO: 1599296 - DNA, 25 bp, Homo sapien
tgctggctccaggcctgcctctacc

SEQ ID NO: 1599297 - DNA, 25 bp, Homo sapien
gggtgggaatgctggctccaggcct

SEQ ID NO: 1599298 - DNA, 25 bp, Homo sapien
ggaatgctggctccaggcctgcctc

SEQ ID NO: 1599299 - DNA, 25 bp, Homo sapien
aatgctggctccaggcctgcctcta

SEQ ID NO: 1599300 - DNA, 25 bp, Homo sapien
gatataaatttgcagccatcagcgc

SEQ ID NO: 1599301 - DNA, 25 bp, Homo sapien
tccgcgtgtggaaaaggtcgccatg

SEQ ID NO: 1599302 - DNA, 25 bp, Homo sapien
tcgccatgggggacatttaacttcc

SEQ ID NO: 1599303 - DNA, 25 bp, Homo sapien
tttctgaaatcaatccgtccgcgtg

SEQ ID NO: 1599304 - DNA, 25 bp, Homo sapien
caagctctcgttgtttaaacgtgtg

SEQ ID NO: 1599305 - DNA, 25 bp, Homo sapien
tgctctggccgtgtaaaacccgcct

SEQ ID NO: 1599306 - DNA, 25 bp, Homo sapien
cgtacccagccaagctctcgttgtt

SEQ ID NO: 1599307 - DNA, 25 bp, Homo sapien
tcaccccctgccatgaatgtcagtt

SEQ ID NO: 1599308 - DNA, 25 bp, Homo sapien
tcaaagctgccggagagaggcccgt

SEQ ID NO: 1599309 - DNA, 25 bp, Homo sapien
tcccagtcaaagctgccggagagag

SEQ ID NO: 1599310 - DNA, 25 bp, Homo sapien
agtcaaagctgccggagagaggccc

SEQ ID NO: 1599311 - DNA, 25 bp, Homo sapien
ccagtcaaagctgccggagagaggc

SEQ ID NO: 1599312 - DNA, 25 bp, Homo sapien
gttttgcagaaagcgccacacatcc

SEQ ID NO: 1599313 - DNA, 25 bp, Homo sapien
tgttttgcagaaagcgccacacatc

SEQ ID NO: 1599314 - DNA, 25 bp, Homo sapien
tccatgtctgtttggttgaatataa

SEQ ID NO: 1599315 - DNA, 25 bp, Homo sapien
cgagagggcgtcccctacccaggcg

SEQ ID NO: 1599316 - DNA, 25 bp, Homo sapien
agagggcgtcccctacccaggcgtg

SEQ ID NO: 1599317 - DNA, 25 bp, Homo sapien
tctgcctccacgtccgaccctggaa

SEQ ID NO: 1599318 - DNA, 25 bp, Homo sapien
aggcgtgccgggcagggtcgtggga

SEQ ID NO: 1599319 - DNA, 25 bp, Homo sapien
cacgggacacggtgccgttgagccc

SEQ ID NO: 1599320 - DNA, 25 bp, Homo sapien
agaggcgcccgcacgggacacggtg

SEQ ID NO: 1599321 - DNA, 25 bp, Homo sapien
tttctcagaggcgcccgcacgggac

SEQ ID NO: 1599322 - DNA, 25 bp, Homo sapien
ccgttgagccccacgagcgagggca

SEQ ID NO: 1599323 - DNA, 25 bp, Homo sapien
gccgcggggcgctcggtccctcgac

SEQ ID NO: 1599324 - DNA, 25 bp, Homo sapien
cccgccgcgcgtcccttctctggcc

SEQ ID NO: 1599325 - DNA, 25 bp, Homo sapien
gggagggggcacgagcgcgagctgc

SEQ ID NO: 1599326 - DNA, 25 bp, Homo sapien
cgcccgccgcgcgtcccttctctgg

SEQ ID NO: 1599327 - DNA, 25 bp, Homo sapien
ccgccgtctggaggcggcgatgact

SEQ ID NO: 1599328 - DNA, 25 bp, Homo sapien
ccgccgccgtctggaggcggcgatg

SEQ ID NO: 1599329 - DNA, 25 bp, Homo sapien
gccgccgtcgccctcagcccgcggc

SEQ ID NO: 1599330 - DNA, 25 bp, Homo sapien
tcaggcctttccaggcggcggcctg

SEQ ID NO: 1599331 - DNA, 25 bp, Homo sapien
cctgtagggatgactgttcctctct

SEQ ID NO: 1599332 - DNA, 25 bp, Homo sapien
gacctgtagggatgactgttcctct

SEQ ID NO: 1599333 - DNA, 25 bp, Homo sapien
tgacctgtagggatgactgttcctc

SEQ ID NO: 1599334 - DNA, 25 bp, Homo sapien
gtagggatgactgttcctctctgcc

SEQ ID NO: 1599335 - DNA, 25 bp, Homo sapien
tccctgtgctcatggtccctgaaca

SEQ ID NO: 1599336 - DNA, 25 bp, Homo sapien
tacacgcatgacaccacagacacat

SEQ ID NO: 1599337 - DNA, 25 bp, Homo sapien
gtgatgatgatacaagcatgtccct

SEQ ID NO: 1599338 - DNA, 25 bp, Homo sapien
tgaacatgcacacagtcaccaaaca

SEQ ID NO: 1599339 - DNA, 25 bp, Homo sapien
tcaccctccaattgcaattctggca

SEQ ID NO: 1599340 - DNA, 25 bp, Homo sapien
tgcaattctggcagcaaactctggc

SEQ ID NO: 1599341 - DNA, 25 bp, Homo sapien
tctggcagcaaactctggcatccta

SEQ ID NO: 1599342 - DNA, 25 bp, Homo sapien
tccaattgcaattctggcagcaaac

SEQ ID NO: 1599343 - DNA, 25 bp, Homo sapien
gcggcggcgggaccgtgagcggcca

SEQ ID NO: 1599344 - DNA, 25 bp, Homo sapien
agcggcggcgggaccgtgagcggcc

SEQ ID NO: 1599345 - DNA, 25 bp, Homo sapien
cgcctcggcgcggggaccgccacca

SEQ ID NO: 1599346 - DNA, 25 bp, Homo sapien
gcctcgccggcggccgggattccgc

SEQ ID NO: 1599347 - DNA, 25 bp, Homo sapien
gcccgccctagcggcgcctcggcgc

SEQ ID NO: 1599348 - DNA, 25 bp, Homo sapien
gcggggaccgccaccaggcgcgacc

SEQ ID NO: 1599349 - DNA, 25 bp, Homo sapien
tcctctccccaccttgtagtagagg

SEQ ID NO: 1599350 - DNA, 25 bp, Homo sapien
agagatcaagaactgacacctggac

SEQ ID NO: 1599351 - DNA, 25 bp, Homo sapien
aggagctaggattcaagcccttgtc

SEQ ID NO: 1599352 - DNA, 25 bp, Homo sapien
tccatttaagctacaagcagagatc

SEQ ID NO: 1599353 - DNA, 25 bp, Homo sapien
gacctcagtcctttcaccgtggaag

SEQ ID NO: 1599354 - DNA, 25 bp, Homo sapien
catatcccagccttccctaaggagg

SEQ ID NO: 1599355 - DNA, 25 bp, Homo sapien
cacaacccagtcaagggaagtccct

SEQ ID NO: 1599356 - DNA, 25 bp, Homo sapien
aattatgccctatggcctggcggtg

SEQ ID NO: 1599357 - DNA, 25 bp, Homo sapien
ttgttcatcagctctgagttagaag

SEQ ID NO: 1599358 - DNA, 25 bp, Homo sapien
tcatcagctctgagttagaagctca

SEQ ID NO: 1599359 - DNA, 25 bp, Homo sapien
ttcatcagctctgagttagaagctc

SEQ ID NO: 1599360 - DNA, 25 bp, Homo sapien
tgttcatcagctctgagttagaagc

SEQ ID NO: 1599361 - DNA, 25 bp, Homo sapien
catagtcacaggtaacgaaaaatac

SEQ ID NO: 1599362 - DNA, 25 bp, Homo sapien
gaatgactgtccgtgatgagcgaag

SEQ ID NO: 1599363 - DNA, 25 bp, Homo sapien
aatacggtggcttcaaagcctcagc

SEQ ID NO: 1599364 - DNA, 25 bp, Homo sapien
gagccagactgcagtatgccacctg

SEQ ID NO: 1599365 - DNA, 25 bp, Homo sapien
ggttcgtctggccaaagtcagtggc

SEQ ID NO: 1599366 - DNA, 25 bp, Homo sapien
tgaattcgaaaagggtcttcgtctg

SEQ ID NO: 1599367 - DNA, 25 bp, Homo sapien
gaagagctgaattcgaaaagggtct

SEQ ID NO: 1599368 - DNA, 25 bp, Homo sapien
gcagaaatcccgctcgagaagagct

SEQ ID NO: 1599369 - DNA, 25 bp, Homo sapien
cagagacggtgagttaccgggaagg

SEQ ID NO: 1599370 - DNA, 25 bp, Homo sapien
aagacagagacggtgagttaccggg

SEQ ID NO: 1599371 - DNA, 25 bp, Homo sapien
atcttgcctcccctctctagctggc

SEQ ID NO: 1599372 - DNA, 25 bp, Homo sapien
ggtggccgacatcttgcctcccctc

SEQ ID NO: 1599373 - DNA, 25 bp, Homo sapien
gacccgtcggcgtccacgtaggaga

SEQ ID NO: 1599374 - DNA, 25 bp, Homo sapien
ggcgagctgtggcactcagcagttt

SEQ ID NO: 1599375 - DNA, 25 bp, Homo sapien
agtttcaggaagttcagctgcacga

SEQ ID NO: 1599376 - DNA, 25 bp, Homo sapien
agtggctgctgtcgtctggttgaaa

SEQ ID NO: 1599377 - DNA, 25 bp, Homo sapien
ctggtgagaggagggcaaggcagag

SEQ ID NO: 1599378 - DNA, 25 bp, Homo sapien
ggatgaggggctccatgagcctctt

SEQ ID NO: 1599379 - DNA, 25 bp, Homo sapien
aaggcagaggatgaggggctccatg

SEQ ID NO: 1599380 - DNA, 25 bp, Homo sapien
agaggatgaggggctccatgagcct

SEQ ID NO: 1599381 - DNA, 25 bp, Homo sapien
tcgacggaatgtgctataccagcct

SEQ ID NO: 1599382 - DNA, 25 bp, Homo sapien
cttcttccctcgacggaatgtgcta

SEQ ID NO: 1599383 - DNA, 25 bp, Homo sapien
tccctcgacggaatgtgctatacca

SEQ ID NO: 1599384 - DNA, 25 bp, Homo sapien
aatgtgctataccagcctccaggct

SEQ ID NO: 1599385 - DNA, 25 bp, Homo sapien
aaccctgaacgagtcccgcgcgcag

SEQ ID NO: 1599386 - DNA, 25 bp, Homo sapien
tctcaaacttcttgtcgggatagag

SEQ ID NO: 1599387 - DNA, 25 bp, Homo sapien
ggtctctcctcccgccgtgaagttg

SEQ ID NO: 1599388 - DNA, 25 bp, Homo sapien
tgtcgggatagaggcaggtctctcc

SEQ ID NO: 1599389 - DNA, 25 bp, Homo sapien
caggtgcgggtggttgcggtgcagc

SEQ ID NO: 1599390 - DNA, 25 bp, Homo sapien
tgcagctcgtggcacacgaggcccg

SEQ ID NO: 1599391 - DNA, 25 bp, Homo sapien
catcaggcaggtgcgggtggttgcg

SEQ ID NO: 1599392 - DNA, 25 bp, Homo sapien
caagctcagcgatgtgagcgaggcc

SEQ ID NO: 1599393 - DNA, 25 bp, Homo sapien
ctggaagcgggactgggacgaagcg

SEQ ID NO: 1599394 - DNA, 25 bp, Homo sapien
cgggactgggacgaagcgccggcgc

SEQ ID NO: 1599395 - DNA, 25 bp, Homo sapien
gactgggacgaagcgccggcgcctg

SEQ ID NO: 1599396 - DNA, 25 bp, Homo sapien
aagcgggactgggacgaagcgccgg

SEQ ID NO: 1599397 - DNA, 25 bp, Homo sapien
ccagtgtctccacgggggcccatgg

SEQ ID NO: 1599398 - DNA, 25 bp, Homo sapien
ggtccagtgtctccacgggggccca

SEQ ID NO: 1599399 - DNA, 25 bp, Homo sapien
tgcaggtccagtgtctccacggggg

SEQ ID NO: 1599400 - DNA, 25 bp, Homo sapien
caggtccagtgtctccacgggggcc

SEQ ID NO: 1599401 - DNA, 25 bp, Homo sapien
aataaatgaaggcagagacgtggag

SEQ ID NO: 1599402 - DNA, 25 bp, Homo sapien
tgggatgtgtaagcccacggaagca

SEQ ID NO: 1599403 - DNA, 25 bp, Homo sapien
tctgatgaaatacaaccgtaggtgt

SEQ ID NO: 1599404 - DNA, 25 bp, Homo sapien
aatatttgtcgaacgcacgattgca

SEQ ID NO: 1599405 - DNA, 25 bp, Homo sapien
cttttgagcctttctgtcctagagg

SEQ ID NO: 1599406 - DNA, 25 bp, Homo sapien
cccttttgagcctttctgtcctaga

SEQ ID NO: 1599407 - DNA, 25 bp, Homo sapien
cggagacccttttgagcctttctgt

SEQ ID NO: 1599408 - DNA, 25 bp, Homo sapien
ttgagcctttctgtcctagagggcc

SEQ ID NO: 1599409 - DNA, 25 bp, Homo sapien
catcccacaaaagattccctgcata

SEQ ID NO: 1599410 - DNA, 25 bp, Homo sapien
ccacaaaagattccctgcatactca

SEQ ID NO: 1599411 - DNA, 25 bp, Homo sapien
ctcatcccacaaaagattccctgca

SEQ ID NO: 1599412 - DNA, 25 bp, Homo sapien
tcccacaaaagattccctgcatact

SEQ ID NO: 1599413 - DNA, 25 bp, Homo sapien
gcccagggtggcccagagagccaat

SEQ ID NO: 1599414 - DNA, 25 bp, Homo sapien
cagggtggcccagagagccaatggg

SEQ ID NO: 1599415 - DNA, 25 bp, Homo sapien
gagagccaatgggaccagggggacc

SEQ ID NO: 1599416 - DNA, 25 bp, Homo sapien
ggcccagagagccaatgggaccagg

SEQ ID NO: 1599417 - DNA, 25 bp, Homo sapien
cagggggtccctgcacgcctggcaa

SEQ ID NO: 1599418 - DNA, 25 bp, Homo sapien
ggggtccctgcacgcctggcaaccc

SEQ ID NO: 1599419 - DNA, 25 bp, Homo sapien
tccctgcacgcctggcaacccctga

SEQ ID NO: 1599420 - DNA, 25 bp, Homo sapien
cttgggaccagggggtccctgcacg

SEQ ID NO: 1599421 - DNA, 25 bp, Homo sapien
tcccggggggccaatgagaccgatc

SEQ ID NO: 1599422 - DNA, 25 bp, Homo sapien
aatgagaccgatcaatccaatgtgg

SEQ ID NO: 1599423 - DNA, 25 bp, Homo sapien
tgagaccgatcaatccaatgtggcc

SEQ ID NO: 1599424 - DNA, 25 bp, Homo sapien
gccaatgagaccgatcaatccaatg

SEQ ID NO: 1599425 - DNA, 25 bp, Homo sapien
ttggggccagtgtctcccttcagcc

SEQ ID NO: 1599426 - DNA, 25 bp, Homo sapien
cccttggggccagtgtctcccttca

SEQ ID NO: 1599427 - DNA, 25 bp, Homo sapien
cccttcagccctgggaggccagagg

SEQ ID NO: 1599428 - DNA, 25 bp, Homo sapien
ttcagccctgggaggccagagggcc

SEQ ID NO: 1599429 - DNA, 25 bp, Homo sapien
gatttcaaatgggaattaccaggga

SEQ ID NO: 1599430 - DNA, 25 bp, Homo sapien
gggatggtcaaatgggaaattatgc

SEQ ID NO: 1599431 - DNA, 25 bp, Homo sapien
caagggtcagttagggattctcaaa

SEQ ID NO: 1599432 - DNA, 25 bp, Homo sapien
ctcaaatgtgaactcgaggtctgtg

SEQ ID NO: 1599433 - DNA, 25 bp, Homo sapien
ggccaggagggcccatctgtccagg

SEQ ID NO: 1599434 - DNA, 25 bp, Homo sapien
ggggccaggagggcccatctgtcca

SEQ ID NO: 1599435 - DNA, 25 bp, Homo sapien
ggagggcccatctgtccaggggctc

SEQ ID NO: 1599436 - DNA, 25 bp, Homo sapien
agggcccatctgtccaggggctccc

SEQ ID NO: 1599437 - DNA, 25 bp, Homo sapien
tctagcccccattggacccgtcctc

SEQ ID NO: 1599438 - DNA, 25 bp, Homo sapien
ctctagcccccattggacccgtcct

SEQ ID NO: 1599439 - DNA, 25 bp, Homo sapien
ttctccccttctctgccttctcgac

SEQ ID NO: 1599440 - DNA, 25 bp, Homo sapien
ctccccttctctgccttctcgaccc

SEQ ID NO: 1599441 - DNA, 25 bp, Homo sapien
cttggcacctttctccccttctctg

SEQ ID NO: 1599442 - DNA, 25 bp, Homo sapien
ccccttctctgccttctcgacccat

SEQ ID NO: 1599443 - DNA, 25 bp, Homo sapien
gacagtgaggggggtctaggggctg

SEQ ID NO: 1599444 - DNA, 25 bp, Homo sapien
acagtgaggggggtctaggggctga

SEQ ID NO: 1599445 - DNA, 25 bp, Homo sapien
cttggaagggaaagacagtgagggg

SEQ ID NO: 1599446 - DNA, 25 bp, Homo sapien
agacagtgaggggggtctaggggct

SEQ ID NO: 1599447 - DNA, 25 bp, Homo sapien
tcagaggggtgagtggggtctgggt

SEQ ID NO: 1599448 - DNA, 25 bp, Homo sapien
tggggggttatggatgagtggggtc

SEQ ID NO: 1599449 - DNA, 25 bp, Homo sapien
ctggggggttatggatgagtggggt

SEQ ID NO: 1599450 - DNA, 25 bp, Homo sapien
gatgagtggggtctgtaaggtgagt

SEQ ID NO: 1599451 - DNA, 25 bp, Homo sapien
agtggggtctgtaaggtgagtgggg

SEQ ID NO: 1599452 - DNA, 25 bp, Homo sapien
gctccccagaagctccaggcggacc

SEQ ID NO: 1599453 - DNA, 25 bp, Homo sapien
gggctccccagaagctccaggcgga

SEQ ID NO: 1599454 - DNA, 25 bp, Homo sapien
ggggcgccgggctccccagaagctc

SEQ ID NO: 1599455 - DNA, 25 bp, Homo sapien
ggcgccgggctccccagaagctcca

SEQ ID NO: 1599456 - DNA, 25 bp, Homo sapien
ttctcccctggggaaccatctatgc

SEQ ID NO: 1599457 - DNA, 25 bp, Homo sapien
tctcccctggggaaccatctatgcc

SEQ ID NO: 1599458 - DNA, 25 bp, Homo sapien
gggggccctagatctccgggcagcc

SEQ ID NO: 1599459 - DNA, 25 bp, Homo sapien
cctgggggccctagatctccgggca

SEQ ID NO: 1599460 - DNA, 25 bp, Homo sapien
ggccctagatctccgggcagccccg

SEQ ID NO: 1599461 - DNA, 25 bp, Homo sapien
tctcctgggggccctagatctccgg

SEQ ID NO: 1599462 - DNA, 25 bp, Homo sapien
acctttcttgcctgggggtccagca

SEQ ID NO: 1599463 - DNA, 25 bp, Homo sapien
gacctttcttgcctgggggtccagc

SEQ ID NO: 1599464 - DNA, 25 bp, Homo sapien
ggtctccagcgtcccctcgctcacc

SEQ ID NO: 1599465 - DNA, 25 bp, Homo sapien
cctgggtctccagcgtcccctcgct

SEQ ID NO: 1599466 - DNA, 25 bp, Homo sapien
ccctgggtctccagcgtcccctcgc

SEQ ID NO: 1599467 - DNA, 25 bp, Homo sapien
tgggtctccagcgtcccctcgctca

SEQ ID NO: 1599468 - DNA, 25 bp, Homo sapien
cttctcacccacggcgcctggctga

SEQ ID NO: 1599469 - DNA, 25 bp, Homo sapien
ggcgcctggctgaccaactcctcca

SEQ ID NO: 1599470 - DNA, 25 bp, Homo sapien
cacggcgcctggctgaccaactcct

SEQ ID NO: 1599471 - DNA, 25 bp, Homo sapien
acccacggcgcctggctgaccaact

SEQ ID NO: 1599472 - DNA, 25 bp, Homo sapien
gggaccccgaggacctggagctcca

SEQ ID NO: 1599473 - DNA, 25 bp, Homo sapien
tggggaccccgaggacctggagctc

SEQ ID NO: 1599474 - DNA, 25 bp, Homo sapien
gaccccgaggacctggagctccatg

SEQ ID NO: 1599475 - DNA, 25 bp, Homo sapien
ccccgaggacctggagctccatggg

SEQ ID NO: 1599476 - DNA, 25 bp, Homo sapien
catggacccgacgtctccgacctcc

SEQ ID NO: 1599477 - DNA, 25 bp, Homo sapien
caggagggccaatcacccccacaaa

SEQ ID NO: 1599478 - DNA, 25 bp, Homo sapien
caaagcctctgactccgtcatctcc

SEQ ID NO: 1599479 - DNA, 25 bp, Homo sapien
gtccaggagggccaatcacccccac

SEQ ID NO: 1599480 - DNA, 25 bp, Homo sapien
aagcctctgactccgtcatctcctt

SEQ ID NO: 1599481 - DNA, 25 bp, Homo sapien
ctgcaggaccccgtatccctggttg

SEQ ID NO: 1599482 - DNA, 25 bp, Homo sapien
tgcaggaccccgtatccctggttgt

SEQ ID NO: 1599483 - DNA, 25 bp, Homo sapien
gcaggaccccgtatccctggttgtc

SEQ ID NO: 1599484 - DNA, 25 bp, Homo sapien
ggcctcctctttcttccgctaccca

SEQ ID NO: 1599485 - DNA, 25 bp, Homo sapien
cctgccccactggggaccttcactc

SEQ ID NO: 1599486 - DNA, 25 bp, Homo sapien
tgccccactggggaccttcactcac

SEQ ID NO: 1599487 - DNA, 25 bp, Homo sapien
tcttccgctacccaccccaccctgc

SEQ ID NO: 1599488 - DNA, 25 bp, Homo sapien
ctttatcgcctttactccccttgtg

SEQ ID NO: 1599489 - DNA, 25 bp, Homo sapien
atcgcctttactccccttgtgtccg

SEQ ID NO: 1599490 - DNA, 25 bp, Homo sapien
gcgtctcctttatcgcctttactcc

SEQ ID NO: 1599491 - DNA, 25 bp, Homo sapien
cgcgtctcctttatcgcctttactc

SEQ ID NO: 1599492 - DNA, 25 bp, Homo sapien
cttgtccccttcctcgccagaaggc

SEQ ID NO: 1599493 - DNA, 25 bp, Homo sapien
ttgtccccttcctcgccagaaggcc

SEQ ID NO: 1599494 - DNA, 25 bp, Homo sapien
gccctgggatcccatctttgccagt

SEQ ID NO: 1599495 - DNA, 25 bp, Homo sapien
ctgggatcccatctttgccagtggg

SEQ ID NO: 1599496 - DNA, 25 bp, Homo sapien
ctgggcccaaaggaccgcgctcacc

SEQ ID NO: 1599497 - DNA, 25 bp, Homo sapien
aaaggaccgcgctcaccaggggagc

SEQ ID NO: 1599498 - DNA, 25 bp, Homo sapien
gctgggcccaaaggaccgcgctcac

SEQ ID NO: 1599499 - DNA, 25 bp, Homo sapien
cccaaaggaccgcgctcaccagggg

SEQ ID NO: 1599500 - DNA, 25 bp, Homo sapien
gcccttatcaccctttaagccagta

SEQ ID NO: 1599501 - DNA, 25 bp, Homo sapien
ccttatcaccctttaagccagtagg

SEQ ID NO: 1599502 - DNA, 25 bp, Homo sapien
cccttatcaccctttaagccagtag

SEQ ID NO: 1599503 - DNA, 25 bp, Homo sapien
ggccgggaaagcccctgagtccagc

SEQ ID NO: 1599504 - DNA, 25 bp, Homo sapien
agtccagctggcccttctttcccaa

SEQ ID NO: 1599505 - DNA, 25 bp, Homo sapien
gtccagctggcccttctttcccaag

SEQ ID NO: 1599506 - DNA, 25 bp, Homo sapien
ctgagtccagctggcccttctttcc

SEQ ID NO: 1599507 - DNA, 25 bp, Homo sapien
cctggaggccccctttcacctagag

SEQ ID NO: 1599508 - DNA, 25 bp, Homo sapien
cctttcacctagaggtcccacttct

SEQ ID NO: 1599509 - DNA, 25 bp, Homo sapien
tcacctagaggtcccacttctcctg

SEQ ID NO: 1599510 - DNA, 25 bp, Homo sapien
tttcacctagaggtcccacttctcc

SEQ ID NO: 1599511 - DNA, 25 bp, Homo sapien
taggggagtcgctcaggagtccagc

SEQ ID NO: 1599512 - DNA, 25 bp, Homo sapien
acaagggaggtttatggagtccact

SEQ ID NO: 1599513 - DNA, 25 bp, Homo sapien
aagggaggtttatggagtccactct

SEQ ID NO: 1599514 - DNA, 25 bp, Homo sapien
ggaggtttatggagtccactctgac

SEQ ID NO: 1599515 - DNA, 25 bp, Homo sapien
tgtccagggtgccctggtcgcccat

SEQ ID NO: 1599516 - DNA, 25 bp, Homo sapien
ccagggtgccctggtcgcccatctt

SEQ ID NO: 1599517 - DNA, 25 bp, Homo sapien
tctctgtccagggtgccctggtcgc

SEQ ID NO: 1599518 - DNA, 25 bp, Homo sapien
gggtgccctggtcgcccatctttac

SEQ ID NO: 1599519 - DNA, 25 bp, Homo sapien
ccccaatgagggtgacctcactcac

SEQ ID NO: 1599520 - DNA, 25 bp, Homo sapien
ggagggccttgcagaccagggaggc

SEQ ID NO: 1599521 - DNA, 25 bp, Homo sapien
gccctttggcccagggaatcctgga

SEQ ID NO: 1599522 - DNA, 25 bp, Homo sapien
tcctggagggccttgcagaccaggg

SEQ ID NO: 1599523 - DNA, 25 bp, Homo sapien
ggaatcctggagggccttgcagacc

SEQ ID NO: 1599524 - DNA, 25 bp, Homo sapien
gaaacagaaatcatgatctcatccc

SEQ ID NO: 1599525 - DNA, 25 bp, Homo sapien
aatggaaacagaaatcatgatctca

SEQ ID NO: 1599526 - DNA, 25 bp, Homo sapien
agaaatcatgatctcatcccccctg

SEQ ID NO: 1599527 - DNA, 25 bp, Homo sapien
tggaaacagaaatcatgatctcatc

SEQ ID NO: 1599528 - DNA, 25 bp, Homo sapien
tttctccagggatcccaggggctcc

SEQ ID NO: 1599529 - DNA, 25 bp, Homo sapien
tccagggatcccaggggctccatcc

SEQ ID NO: 1599530 - DNA, 25 bp, Homo sapien
cagggatcccaggggctccatcctg

SEQ ID NO: 1599531 - DNA, 25 bp, Homo sapien
cttttctccagggatcccaggggct

SEQ ID NO: 1599532 - DNA, 25 bp, Homo sapien
ctggttgccctgtggcacccggttg

SEQ ID NO: 1599533 - DNA, 25 bp, Homo sapien
tggcacccggttgccccctctctcc

SEQ ID NO: 1599534 - DNA, 25 bp, Homo sapien
ctgtggcacccggttgccccctctc

SEQ ID NO: 1599535 - DNA, 25 bp, Homo sapien
tggttgccctgtggcacccggttgc

SEQ ID NO: 1599536 - DNA, 25 bp, Homo sapien
ggtccccgctctccttccaggcctg

SEQ ID NO: 1599537 - DNA, 25 bp, Homo sapien
ccaggcctggctgccctgtctttcc

SEQ ID NO: 1599538 - DNA, 25 bp, Homo sapien
tggtggtccccgctctccttccagg

SEQ ID NO: 1599539 - DNA, 25 bp, Homo sapien
cttccaggcctggctgccctgtctt

SEQ ID NO: 1599540 - DNA, 25 bp, Homo sapien
tccctttctctcctatgggtcccag

SEQ ID NO: 1599541 - DNA, 25 bp, Homo sapien
ccctttctctcctatgggtcccagg

SEQ ID NO: 1599542 - DNA, 25 bp, Homo sapien
ctttctctcctatgggtcccagggg

SEQ ID NO: 1599543 - DNA, 25 bp, Homo sapien
cctttctctcctatgggtcccaggg

SEQ ID NO: 1599544 - DNA, 25 bp, Homo sapien
cacacggtgagtgctttttaatatt

SEQ ID NO: 1599545 - DNA, 25 bp, Homo sapien
agtccatgctggaggaacccttcct

SEQ ID NO: 1599546 - DNA, 25 bp, Homo sapien
ttcagatcagaaaagacagttgccc

SEQ ID NO: 1599547 - DNA, 25 bp, Homo sapien
catagctcattggtcttattcccca

SEQ ID NO: 1599548 - DNA, 25 bp, Homo sapien
agcctggacccccagatgttagtct

SEQ ID NO: 1599549 - DNA, 25 bp, Homo sapien
tctgaatcctgcccatatccatctc

SEQ ID NO: 1599550 - DNA, 25 bp, Homo sapien
cctggacccccagatgttagtctct

SEQ ID NO: 1599551 - DNA, 25 bp, Homo sapien
ctgaatcctgcccatatccatctcc

SEQ ID NO: 1599552 - DNA, 25 bp, Homo sapien
taggtccagggcgtcctggataacc

SEQ ID NO: 1599553 - DNA, 25 bp, Homo sapien
ccagggcgtcctggataacctggga

SEQ ID NO: 1599554 - DNA, 25 bp, Homo sapien
cctggataacctgggaggcctggca

SEQ ID NO: 1599555 - DNA, 25 bp, Homo sapien
gcgtcctggataacctgggaggcct

SEQ ID NO: 1599556 - DNA, 25 bp, Homo sapien
cagaaaggttatgggacaaaggtca

SEQ ID NO: 1599557 - DNA, 25 bp, Homo sapien
ctgcagaaaggttatgggacaaagg

SEQ ID NO: 1599558 - DNA, 25 bp, Homo sapien
tgggacaaaggtcagaaattgcaac

SEQ ID NO: 1599559 - DNA, 25 bp, Homo sapien
ttatgggacaaaggtcagaaattgc

SEQ ID NO: 1599560 - DNA, 25 bp, Homo sapien
ctcctgaggtcgaaggtataataaa

SEQ ID NO: 1599561 - DNA, 25 bp, Homo sapien
acaccttgactgtgggaggctagag

SEQ ID NO: 1599562 - DNA, 25 bp, Homo sapien
gaaaagattggggacaccttgactg

SEQ ID NO: 1599563 - DNA, 25 bp, Homo sapien
ctgaggtcgaaggtataataaaagg

SEQ ID NO: 1599564 - DNA, 25 bp, Homo sapien
ctctccccggggacctggagctccg

SEQ ID NO: 1599565 - DNA, 25 bp, Homo sapien
ccctcaggaccatcctctccccggg

SEQ ID NO: 1599566 - DNA, 25 bp, Homo sapien
gccccttcggcccctcaggaccatc

SEQ ID NO: 1599567 - DNA, 25 bp, Homo sapien
cccgcctgccccttcggcccctcag

SEQ ID NO: 1599568 - DNA, 25 bp, Homo sapien
ctgatcacctttgagccccacatcg

SEQ ID NO: 1599569 - DNA, 25 bp, Homo sapien
tgatcacctttgagccccacatcgc

SEQ ID NO: 1599570 - DNA, 25 bp, Homo sapien
ggaggccccggttgcctgaagtgcc

SEQ ID NO: 1599571 - DNA, 25 bp, Homo sapien
tggaggccccggttgcctgaagtgc

SEQ ID NO: 1599572 - DNA, 25 bp, Homo sapien
gaggtccaggatagcccggagggcc

SEQ ID NO: 1599573 - DNA, 25 bp, Homo sapien
cgaggtccaggatagcccggagggc

SEQ ID NO: 1599574 - DNA, 25 bp, Homo sapien
tttctctcccgtggggccctcatgt

SEQ ID NO: 1599575 - DNA, 25 bp, Homo sapien
ctttctctcccgtggggccctcatg

SEQ ID NO: 1599576 - DNA, 25 bp, Homo sapien
cctttctctcccgtggggccctcat

SEQ ID NO: 1599577 - DNA, 25 bp, Homo sapien
agagggccatcggatcctgggaggc

SEQ ID NO: 1599578 - DNA, 25 bp, Homo sapien
cagagggccatcggatcctgggagg

SEQ ID NO: 1599579 - DNA, 25 bp, Homo sapien
aggtgctcagagccctggagcacca

SEQ ID NO: 1599580 - DNA, 25 bp, Homo sapien
ctgaaagaagatgaacagcagggga

SEQ ID NO: 1599581 - DNA, 25 bp, Homo sapien
cagaggtgctcagagccctggagca

SEQ ID NO: 1599582 - DNA, 25 bp, Homo sapien
agagacagaggtgctcagagccctg

SEQ ID NO: 1599583 - DNA, 25 bp, Homo sapien
agtgccaatgagtccctggggaccg

SEQ ID NO: 1599584 - DNA, 25 bp, Homo sapien
ggagtgccaatgagtccctggggac

SEQ ID NO: 1599585 - DNA, 25 bp, Homo sapien
tctccccaggagtgccaatgagtcc

SEQ ID NO: 1599586 - DNA, 25 bp, Homo sapien
cccaggagtgccaatgagtccctgg

SEQ ID NO: 1599587 - DNA, 25 bp, Homo sapien
tcccggagggcctggttctcctgga

SEQ ID NO: 1599588 - DNA, 25 bp, Homo sapien
ctgggacccatggtttccctgctgt

SEQ ID NO: 1599589 - DNA, 25 bp, Homo sapien
cctgctgtcccggagggcctggttc

SEQ ID NO: 1599590 - DNA, 25 bp, Homo sapien
gggacccatggtttccctgctgtcc

SEQ ID NO: 1599591 - DNA, 25 bp, Homo sapien
ccaggagcaccatcaattccagtca

SEQ ID NO: 1599592 - DNA, 25 bp, Homo sapien
caggagcaccatcaattccagtcac

SEQ ID NO: 1599593 - DNA, 25 bp, Homo sapien
gcgacccgtggggccaggagagcct

SEQ ID NO: 1599594 - DNA, 25 bp, Homo sapien
cgggcgacccgtggggccaggagag

SEQ ID NO: 1599595 - DNA, 25 bp, Homo sapien
gacccgtggggccaggagagcctct

SEQ ID NO: 1599596 - DNA, 25 bp, Homo sapien
acccgtggggccaggagagcctctg

SEQ ID NO: 1599597 - DNA, 25 bp, Homo sapien
cggctccccagcctggccagtgggc

SEQ ID NO: 1599598 - DNA, 25 bp, Homo sapien
ggctccccagcctggccagtgggcc

SEQ ID NO: 1599599 - DNA, 25 bp, Homo sapien
gggaccgggttgccccacatggcca

SEQ ID NO: 1599600 - DNA, 25 bp, Homo sapien
ctgggggaccgggttgccccacatg

SEQ ID NO: 1599601 - DNA, 25 bp, Homo sapien
gaccgggttgccccacatggccaaa

SEQ ID NO: 1599602 - DNA, 25 bp, Homo sapien
ccgggttgccccacatggccaaagt

SEQ ID NO: 1599603 - DNA, 25 bp, Homo sapien
gggacacagggatcatgactctgat

SEQ ID NO: 1599604 - DNA, 25 bp, Homo sapien
tgtgggcggagagaccagccccctg

SEQ ID NO: 1599605 - DNA, 25 bp, Homo sapien
ggaacagaggggagttcagagtgga

SEQ ID NO: 1599606 - DNA, 25 bp, Homo sapien
aacagaggggagttcagagtggaag

SEQ ID NO: 1599607 - DNA, 25 bp, Homo sapien
ggaggccatcgaagccacgatcacc

SEQ ID NO: 1599608 - DNA, 25 bp, Homo sapien
ccctgggaggccccgagctccatct

SEQ ID NO: 1599609 - DNA, 25 bp, Homo sapien
gggaggccccgagctccatctgctc

SEQ ID NO: 1599610 - DNA, 25 bp, Homo sapien
ctgggaggccccgagctccatctgc

SEQ ID NO: 1599611 - DNA, 25 bp, Homo sapien
tgggaggccccgagctccatctgct

SEQ ID NO: 1599612 - DNA, 25 bp, Homo sapien
ctcggccagggggtccatgaggtcc

SEQ ID NO: 1599613 - DNA, 25 bp, Homo sapien
cactcggccagggggtccatgaggt

SEQ ID NO: 1599614 - DNA, 25 bp, Homo sapien
actcggccagggggtccatgaggtc

SEQ ID NO: 1599615 - DNA, 25 bp, Homo sapien
tcggccagggggtccatgaggtccc

SEQ ID NO: 1599616 - DNA, 25 bp, Homo sapien
ttcagacctggatgcccggggagac

SEQ ID NO: 1599617 - DNA, 25 bp, Homo sapien
cctttcagacctggatgcccgggga

SEQ ID NO: 1599618 - DNA, 25 bp, Homo sapien
tcagacctggatgcccggggagacc

SEQ ID NO: 1599619 - DNA, 25 bp, Homo sapien
tttcagacctggatgcccggggaga

SEQ ID NO: 1599620 - DNA, 25 bp, Homo sapien
ccctccacgcagtcgccttactcac

SEQ ID NO: 1599621 - DNA, 25 bp, Homo sapien
gattcttcactaatgcatgcaccgc

SEQ ID NO: 1599622 - DNA, 25 bp, Homo sapien
tgggtagatgattcttcactaatgc

SEQ ID NO: 1599623 - DNA, 25 bp, Homo sapien
aggagtgtgggtagatgattcttca

SEQ ID NO: 1599624 - DNA, 25 bp, Homo sapien
ccactggaccaggggggcctttcat

SEQ ID NO: 1599625 - DNA, 25 bp, Homo sapien
gcctgggcgcccagtgagccccact

SEQ ID NO: 1599626 - DNA, 25 bp, Homo sapien
gggcgcccagtgagccccactggac

SEQ ID NO: 1599627 - DNA, 25 bp, Homo sapien
gaccaggggggcctttcatagagag

SEQ ID NO: 1599628 - DNA, 25 bp, Homo sapien
ggcctttaaaggagccgcctgcaaa

SEQ ID NO: 1599629 - DNA, 25 bp, Homo sapien
acagtgcccggtgggcctcggatcc

SEQ ID NO: 1599630 - DNA, 25 bp, Homo sapien
cctcggatcccatcaatgccgggga

SEQ ID NO: 1599631 - DNA, 25 bp, Homo sapien
tcggatcccatcaatgccggggatt

SEQ ID NO: 1599632 - DNA, 25 bp, Homo sapien
catgatcacagtgcccggtgggcct

SEQ ID NO: 1599633 - DNA, 25 bp, Homo sapien
tggaccagggtcgccagggaatcct

SEQ ID NO: 1599634 - DNA, 25 bp, Homo sapien
accagggtcgccagggaatcctggg

SEQ ID NO: 1599635 - DNA, 25 bp, Homo sapien
cggtggaccagggtcgccagggaat

SEQ ID NO: 1599636 - DNA, 25 bp, Homo sapien
ggtggaccagggtcgccagggaatc

SEQ ID NO: 1599637 - DNA, 25 bp, Homo sapien
gctcctggaggtccctcaaactgct

SEQ ID NO: 1599638 - DNA, 25 bp, Homo sapien
gggctcctggaggtccctcaaactg

SEQ ID NO: 1599639 - DNA, 25 bp, Homo sapien
ctggggctcctggaggtccctcaaa

SEQ ID NO: 1599640 - DNA, 25 bp, Homo sapien
tcctggaggtccctcaaactgctgc

SEQ ID NO: 1599641 - DNA, 25 bp, Homo sapien
tttcaatcactgcgggctctccttt

SEQ ID NO: 1599642 - DNA, 25 bp, Homo sapien
aatcactgcgggctctccttttgct

SEQ ID NO: 1599643 - DNA, 25 bp, Homo sapien
tcaatcactgcgggctctccttttg

SEQ ID NO: 1599644 - DNA, 25 bp, Homo sapien
cttttcaatcactgcgggctctcct

SEQ ID NO: 1599645 - DNA, 25 bp, Homo sapien
actgagtccgagatggatattctgc

SEQ ID NO: 1599646 - DNA, 25 bp, Homo sapien
ctggaactgagtccgagatggatat

SEQ ID NO: 1599647 - DNA, 25 bp, Homo sapien
tctggaactgagtccgagatggata

SEQ ID NO: 1599648 - DNA, 25 bp, Homo sapien
ggaactgagtccgagatggatattc

SEQ ID NO: 1599649 - DNA, 25 bp, Homo sapien
ccagggtccccagctcggttccact

SEQ ID NO: 1599650 - DNA, 25 bp, Homo sapien
agggtccccagctcggttccactgt

SEQ ID NO: 1599651 - DNA, 25 bp, Homo sapien
ccagctcggttccactgtcagggtc

SEQ ID NO: 1599652 - DNA, 25 bp, Homo sapien
ccccagctcggttccactgtcaggg

SEQ ID NO: 1599653 - DNA, 25 bp, Homo sapien
gcattgagtccagtagtcacagtgg

SEQ ID NO: 1599654 - DNA, 25 bp, Homo sapien
cacagtggaggtgacgaccaaaggc

SEQ ID NO: 1599655 - DNA, 25 bp, Homo sapien
ctctaggatcgtggcattgagtcca

SEQ ID NO: 1599656 - DNA, 25 bp, Homo sapien
agtcacagtggaggtgacgaccaaa

SEQ ID NO: 1599657 - DNA, 25 bp, Homo sapien
tcaagacaaaagggaggcaccctcc

SEQ ID NO: 1599658 - DNA, 25 bp, Homo sapien
aatcaagacaaaagggaggcaccct

SEQ ID NO: 1599659 - DNA, 25 bp, Homo sapien
acaaaagggaggcaccctcccactg

SEQ ID NO: 1599660 - DNA, 25 bp, Homo sapien
atcaagacaaaagggaggcaccctc

SEQ ID NO: 1599661 - DNA, 25 bp, Homo sapien
gttctctgcggagtcaggaggtgga

SEQ ID NO: 1599662 - DNA, 25 bp, Homo sapien
tctgcggagtcaggaggtggacttg

SEQ ID NO: 1599663 - DNA, 25 bp, Homo sapien
cttgaggtccaaatttccttgttct

SEQ ID NO: 1599664 - DNA, 25 bp, Homo sapien
tggacttgaggtccaaatttccttg

SEQ ID NO: 1599665 - DNA, 25 bp, Homo sapien
aggatctgggcttatcagcagctcc

SEQ ID NO: 1599666 - DNA, 25 bp, Homo sapien
tgccggtgccaggttgtcacagtcg

SEQ ID NO: 1599667 - DNA, 25 bp, Homo sapien
tcacagtcggggaggtaccgctcac

SEQ ID NO: 1599668 - DNA, 25 bp, Homo sapien
gcctgaggatctgggcttatcagca

SEQ ID NO: 1599669 - DNA, 25 bp, Homo sapien
agcacagtgagtccagctatgctga

SEQ ID NO: 1599670 - DNA, 25 bp, Homo sapien
tggcccaaaacagggggctgagctt

SEQ ID NO: 1599671 - DNA, 25 bp, Homo sapien
acagtcagctaccagggtcaccatc

SEQ ID NO: 1599672 - DNA, 25 bp, Homo sapien
agtccagctatgctgatgaagcggg

SEQ ID NO: 1599673 - DNA, 25 bp, Homo sapien
agcaggacagactgattggctggct

SEQ ID NO: 1599674 - DNA, 25 bp, Homo sapien
gctgtccccgcaaggtgatcagcaa

SEQ ID NO: 1599675 - DNA, 25 bp, Homo sapien
tgccgggcacccctttcatcataaa

SEQ ID NO: 1599676 - DNA, 25 bp, Homo sapien
ggtcacctaggagacccagcgctgg

SEQ ID NO: 1599677 - DNA, 25 bp, Homo sapien
tggggatgccgagcgtgctggcctg

SEQ ID NO: 1599678 - DNA, 25 bp, Homo sapien
cccacgtggggatgccgagcgtgct

SEQ ID NO: 1599679 - DNA, 25 bp, Homo sapien
ggccaattctgaatgcccggtcacc

SEQ ID NO: 1599680 - DNA, 25 bp, Homo sapien
ctggccaattctgaatgcccggtca

SEQ ID NO: 1599681 - DNA, 25 bp, Homo sapien
cggcctgcgtccccggcagaagctg

SEQ ID NO: 1599682 - DNA, 25 bp, Homo sapien
gcctgcgtccccggcagaagctgca

SEQ ID NO: 1599683 - DNA, 25 bp, Homo sapien
cctgcgtccccggcagaagctgcag

SEQ ID NO: 1599684 - DNA, 25 bp, Homo sapien
ctgcgtccccggcagaagctgcagc

SEQ ID NO: 1599685 - DNA, 25 bp, Homo sapien
ctcgggctcggtgcagtcactcgcg

SEQ ID NO: 1599686 - DNA, 25 bp, Homo sapien
gcggggcgcggcgacttctcgggct

SEQ ID NO: 1599687 - DNA, 25 bp, Homo sapien
ttctcgggctcggtgcagtcactcg

SEQ ID NO: 1599688 - DNA, 25 bp, Homo sapien
gacttctcgggctcggtgcagtcac

SEQ ID NO: 1599689 - DNA, 25 bp, Homo sapien
ctctttcttttcattcgtttgttct

SEQ ID NO: 1599690 - DNA, 25 bp, Homo sapien
ttctcttctttctctctcttctttc

SEQ ID NO: 1599691 - DNA, 25 bp, Homo sapien
tttcattcgtttgttctttctcttc

SEQ ID NO: 1599692 - DNA, 25 bp, Homo sapien
cttctttctctttcttttcattcgt

SEQ ID NO: 1599693 - DNA, 25 bp, Homo sapien
ttatgcatgcgtctaattgaagaga

SEQ ID NO: 1599694 - DNA, 25 bp, Homo sapien
taatttttgggacacaatctcactc

SEQ ID NO: 1599695 - DNA, 25 bp, Homo sapien
agtagttggtgttatgcatgcgtct

SEQ ID NO: 1599696 - DNA, 25 bp, Homo sapien
tttgggacacaatctcactcggtcg

SEQ ID NO: 1599697 - DNA, 25 bp, Homo sapien
accttggggagccatctgaggccaa

SEQ ID NO: 1599698 - DNA, 25 bp, Homo sapien
agctcaaaccgagatatgaatgacc

SEQ ID NO: 1599699 - DNA, 25 bp, Homo sapien
tgtgttattataagatatgagctca

SEQ ID NO: 1599700 - DNA, 25 bp, Homo sapien
ggtcccattttcagcgcccagggtc

SEQ ID NO: 1599701 - DNA, 25 bp, Homo sapien
gaatatgccccaccacgaaactcag

SEQ ID NO: 1599702 - DNA, 25 bp, Homo sapien
ccgaatgagcatggcggccttcctg

SEQ ID NO: 1599703 - DNA, 25 bp, Homo sapien
ctgagagaatatgccccaccacgaa

SEQ ID NO: 1599704 - DNA, 25 bp, Homo sapien
gcttcaggggccgaatgagcatggc

SEQ ID NO: 1599705 - DNA, 25 bp, Homo sapien
gtagtggccgccgtggtgccacaca

SEQ ID NO: 1599706 - DNA, 25 bp, Homo sapien
cagcctccccgctggtacagggcac

SEQ ID NO: 1599707 - DNA, 25 bp, Homo sapien
gtgccacacaccgttgaggttggag

SEQ ID NO: 1599708 - DNA, 25 bp, Homo sapien
ctggtagcggcttcggtagtggccg

SEQ ID NO: 1599709 - DNA, 25 bp, Homo sapien
gaacaggagtcccgcctcccctatc

SEQ ID NO: 1599710 - DNA, 25 bp, Homo sapien
acaggagtcccgcctcccctatcct

SEQ ID NO: 1599711 - DNA, 25 bp, Homo sapien
cagaacaggagtcccgcctccccta

SEQ ID NO: 1599712 - DNA, 25 bp, Homo sapien
aggagtcccgcctcccctatcctct

SEQ ID NO: 1599713 - DNA, 25 bp, Homo sapien
gaagccatcatagtgggcacgtgct

SEQ ID NO: 1599714 - DNA, 25 bp, Homo sapien
tcattgtgccaggaaagagagtctc

SEQ ID NO: 1599715 - DNA, 25 bp, Homo sapien
ctatccacggtgctgaagggcttgt

SEQ ID NO: 1599716 - DNA, 25 bp, Homo sapien
gctggtcagctgatacacgggttca

SEQ ID NO: 1599717 - DNA, 25 bp, Homo sapien
gcagttcatacactccactctgttc

SEQ ID NO: 1599718 - DNA, 25 bp, Homo sapien
ttgactgaaccatcttgcctccgct

SEQ ID NO: 1599719 - DNA, 25 bp, Homo sapien
gctgccaggtagtgaagaagttgac

SEQ ID NO: 1599720 - DNA, 25 bp, Homo sapien
catactgacactacgtgacggccca

SEQ ID NO: 1599721 - DNA, 25 bp, Homo sapien
caagacggaccggaaccacaggcac

SEQ ID NO: 1599722 - DNA, 25 bp, Homo sapien
tgcaggcatgggagaagccatgggc

SEQ ID NO: 1599723 - DNA, 25 bp, Homo sapien
ggtgtcactggtgctacccacaaga

SEQ ID NO: 1599724 - DNA, 25 bp, Homo sapien
gctgggtccagcatcctactggtgt

SEQ ID NO: 1599725 - DNA, 25 bp, Homo sapien
ctgctgctgcccgcccgcgcctccc

SEQ ID NO: 1599726 - DNA, 25 bp, Homo sapien
ctgctgcccgcccgcgcctcccggg

SEQ ID NO: 1599727 - DNA, 25 bp, Homo sapien
tgctgctgcccgcccgcgcctcccg

SEQ ID NO: 1599728 - DNA, 25 bp, Homo sapien
gctgcccgcccgcgcctcccgggca

SEQ ID NO: 1599729 - DNA, 25 bp, Homo sapien
ctccaggcgggcgatgagactgctc

SEQ ID NO: 1599730 - DNA, 25 bp, Homo sapien
tgcgccagctcgcggaacttgacgt

SEQ ID NO: 1599731 - DNA, 25 bp, Homo sapien
gggcgatgagactgctctgctgggt

SEQ ID NO: 1599732 - DNA, 25 bp, Homo sapien
ccagctcgcggaacttgacgtccag

SEQ ID NO: 1599733 - DNA, 25 bp, Homo sapien
cgcgctgagcctcggcggacgcgtt

SEQ ID NO: 1599734 - DNA, 25 bp, Homo sapien
tggtggaaccgggcggctgcgcgct

SEQ ID NO: 1599735 - DNA, 25 bp, Homo sapien
agcctcggcggacgcgttgagcacg

SEQ ID NO: 1599736 - DNA, 25 bp, Homo sapien
ggcggctgcgcgctgagcctcggcg

SEQ ID NO: 1599737 - DNA, 25 bp, Homo sapien
cgagcagcgccagcgccgcggcagg

SEQ ID NO: 1599738 - DNA, 25 bp, Homo sapien
tccccgagcagcgccagcgccgcgg

SEQ ID NO: 1599739 - DNA, 25 bp, Homo sapien
ctccccgagcagcgccagcgccgcg

SEQ ID NO: 1599740 - DNA, 25 bp, Homo sapien
cccgagcagcgccagcgccgcggca

SEQ ID NO: 1599741 - DNA, 25 bp, Homo sapien
gcagctgcgcgcgcaactggcccag

SEQ ID NO: 1599742 - DNA, 25 bp, Homo sapien
ctgcgcgcgcaactggcccaggcgc

SEQ ID NO: 1599743 - DNA, 25 bp, Homo sapien
gcgcaactggcccaggcgcgcgctc

SEQ ID NO: 1599744 - DNA, 25 bp, Homo sapien
ctgcagctgcgcgcgcaactggccc

SEQ ID NO: 1599745 - DNA, 25 bp, Homo sapien
ggcctcgggcgtcgcccgcgtggat

SEQ ID NO: 1599746 - DNA, 25 bp, Homo sapien
cccgtgaacttctgcgggggcagca

SEQ ID NO: 1599747 - DNA, 25 bp, Homo sapien
tgcagctcgcgtaacagctcctcgt

SEQ ID NO: 1599748 - DNA, 25 bp, Homo sapien
agctgtagcgcacgcagccagggct

SEQ ID NO: 1599749 - DNA, 25 bp, Homo sapien
gagaggaggcttggtaaccactccc

SEQ ID NO: 1599750 - DNA, 25 bp, Homo sapien
agtccaaggaagagccgagggtcca

SEQ ID NO: 1599751 - DNA, 25 bp, Homo sapien
acaagaagtccaaggaagagccgag

SEQ ID NO: 1599752 - DNA, 25 bp, Homo sapien
tgaatccagcgaagctcacagaaca

SEQ ID NO: 1599753 - DNA, 25 bp, Homo sapien
cgtctcgggtaaggagaaggcatgt

SEQ ID NO: 1599754 - DNA, 25 bp, Homo sapien
aacgtctcgggtaaggagaaggcat

SEQ ID NO: 1599755 - DNA, 25 bp, Homo sapien
caacgtctcgggtaaggagaaggca

SEQ ID NO: 1599756 - DNA, 25 bp, Homo sapien
agccaacgtctcgggtaaggagaag

SEQ ID NO: 1599757 - DNA, 25 bp, Homo sapien
aggcccgaggcctgcatcaagtgtc

SEQ ID NO: 1599758 - DNA, 25 bp, Homo sapien
acagagcgtatagcctggtgctggc

SEQ ID NO: 1599759 - DNA, 25 bp, Homo sapien
cagctggcagtcagcgacctgctct

SEQ ID NO: 1599760 - DNA, 25 bp, Homo sapien
caggcatgactgtggccgagaagct

SEQ ID NO: 1599761 - DNA, 25 bp, Homo sapien
agctggggccctacgtgggctacca

SEQ ID NO: 1599762 - DNA, 25 bp, Homo sapien
tgctgccgacactgccccggctaca

SEQ ID NO: 1599763 - DNA, 25 bp, Homo sapien
cctacgtgggctaccaggtgatgcg

SEQ ID NO: 1599764 - DNA, 25 bp, Homo sapien
ccctctactctacatggccgcagtg

SEQ ID NO: 1599765 - DNA, 25 bp, Homo sapien
caagggtcccggaccgagtacacag

SEQ ID NO: 1599766 - DNA, 25 bp, Homo sapien
gtcttctgtcgccaagggtcccgga

SEQ ID NO: 1599767 - DNA, 25 bp, Homo sapien
cggaggctgtcttctgtcgccaagg

SEQ ID NO: 1599768 - DNA, 25 bp, Homo sapien
gctttattgcccttggagcccgcgc

SEQ ID NO: 1599769 - DNA, 25 bp, Homo sapien
aaagccggacaccccggcaatggca

SEQ ID NO: 1599770 - DNA, 25 bp, Homo sapien
atgaggtggtcgtagccaaagccgg

SEQ ID NO: 1599771 - DNA, 25 bp, Homo sapien
gtggtcgtagccaaagccggacacc

SEQ ID NO: 1599772 - DNA, 25 bp, Homo sapien
ccactcgacgttgaggatgaggtgg

SEQ ID NO: 1599773 - DNA, 25 bp, Homo sapien
cggcggtggaagctgatgaaggcaa

SEQ ID NO: 1599774 - DNA, 25 bp, Homo sapien
ggcggtggaagctgatgaaggcaaa

SEQ ID NO: 1599775 - DNA, 25 bp, Homo sapien
ctcgcggcggtggaagctgatgaag

SEQ ID NO: 1599776 - DNA, 25 bp, Homo sapien
cgcggcggtggaagctgatgaaggc

SEQ ID NO: 1599777 - DNA, 25 bp, Homo sapien
tctgacaagttggtgacacggatgg

SEQ ID NO: 1599778 - DNA, 25 bp, Homo sapien
ccttagccaggtagatgcgggagat

SEQ ID NO: 1599779 - DNA, 25 bp, Homo sapien
tgcaggtcggtctcacgcgtgtcct

SEQ ID NO: 1599780 - DNA, 25 bp, Homo sapien
ggccagtggtcttgtccttagccag

SEQ ID NO: 1599781 - DNA, 25 bp, Homo sapien
tgcgtggcctgcaccggctctagct

SEQ ID NO: 1599782 - DNA, 25 bp, Homo sapien
ggctcggcggcacatacttccctgt

SEQ ID NO: 1599783 - DNA, 25 bp, Homo sapien
ttgggctgcatggactccccgcggc

SEQ ID NO: 1599784 - DNA, 25 bp, Homo sapien
ctgtcttgttctgcgtggcctgcac

SEQ ID NO: 1599785 - DNA, 25 bp, Homo sapien
gggaccaaaagacagtcaagttcaa

SEQ ID NO: 1599786 - DNA, 25 bp, Homo sapien
gaccaaaagacagtcaagttcaacc

SEQ ID NO: 1599787 - DNA, 25 bp, Homo sapien
caaaagacagtcaagttcaacctca

SEQ ID NO: 1599788 - DNA, 25 bp, Homo sapien
ctggggaccaaaagacagtcaagtt

SEQ ID NO: 1599789 - DNA, 25 bp, Homo sapien
ccaaagaattcggacggtacagcca

SEQ ID NO: 1599790 - DNA, 25 bp, Homo sapien
tacagccacaggcatgcaacggaga

SEQ ID NO: 1599791 - DNA, 25 bp, Homo sapien
gacatgggacacacaacaggaacag

SEQ ID NO: 1599792 - DNA, 25 bp, Homo sapien
tcgcacatatatgggagacgcccgt

SEQ ID NO: 1599793 - DNA, 25 bp, Homo sapien
ggacacgatcttctggcccttgagt

SEQ ID NO: 1599794 - DNA, 25 bp, Homo sapien
tggtccagtggtcgcccttgcagat

SEQ ID NO: 1599795 - DNA, 25 bp, Homo sapien
ccttgagtttgttcatagggtcctc

SEQ ID NO: 1599796 - DNA, 25 bp, Homo sapien
atgggccccagcgtatccttgtagg

SEQ ID NO: 1599797 - DNA, 25 bp, Homo sapien
agccccacctgattgccccgcttac

SEQ ID NO: 1599798 - DNA, 25 bp, Homo sapien
cagccccacctgattgccccgctta

SEQ ID NO: 1599799 - DNA, 25 bp, Homo sapien
acatcgtcactgacagtggtggtgg

SEQ ID NO: 1599800 - DNA, 25 bp, Homo sapien
tcaaactctgagttcccgaacttct

SEQ ID NO: 1599801 - DNA, 25 bp, Homo sapien
ctttgctggtgatgaacgtcataga

SEQ ID NO: 1599802 - DNA, 25 bp, Homo sapien
tgaacgtcatagagacatcgtcact

SEQ ID NO: 1599803 - DNA, 25 bp, Homo sapien
gggcccttgagctagacaacctgag

SEQ ID NO: 1599804 - DNA, 25 bp, Homo sapien
ggtccaggtgacagctacacagcgt

SEQ ID NO: 1599805 - DNA, 25 bp, Homo sapien
tgcaggttgacaggccaagaggaat

SEQ ID NO: 1599806 - DNA, 25 bp, Homo sapien
ggaataagaatctaaccgtggctgg

SEQ ID NO: 1599807 - DNA, 25 bp, Homo sapien
cgactgctgtgccttggacttttca

SEQ ID NO: 1599808 - DNA, 25 bp, Homo sapien
tcagttcagcttcaacaaaataggt

SEQ ID NO: 1599809 - DNA, 25 bp, Homo sapien
ataggtacaaagaggtaagcctggc

SEQ ID NO: 1599810 - DNA, 25 bp, Homo sapien
ttttcagggccccaagacagtgcaa

SEQ ID NO: 1599811 - DNA, 25 bp, Homo sapien
ccaattcctctaggttagccctggg

SEQ ID NO: 1599812 - DNA, 25 bp, Homo sapien
gttagccctggggaagaagagcctc

SEQ ID NO: 1599813 - DNA, 25 bp, Homo sapien
catctctaaacacaaagtccgggag

SEQ ID NO: 1599814 - DNA, 25 bp, Homo sapien
ctaaacacaaagtccgggagcacgg

SEQ ID NO: 1599815 - DNA, 25 bp, Homo sapien
ctccttgcgacagcctttgaagcct

SEQ ID NO: 1599816 - DNA, 25 bp, Homo sapien
gccttccgggtctcaatcctgaagg

SEQ ID NO: 1599817 - DNA, 25 bp, Homo sapien
tctcaatcctgaaggtgcggacaat

SEQ ID NO: 1599818 - DNA, 25 bp, Homo sapien
ttcctccttgcgacagcctttgaag

SEQ ID NO: 1599819 - DNA, 25 bp, Homo sapien
ttgatgacctccttgggaggcggca

SEQ ID NO: 1599820 - DNA, 25 bp, Homo sapien
cctcatctatcttgtactctgtcac

SEQ ID NO: 1599821 - DNA, 25 bp, Homo sapien
tcctcatctatcttgtactctgtca

SEQ ID NO: 1599822 - DNA, 25 bp, Homo sapien
tgatgacctccttgggaggcggcag

SEQ ID NO: 1599823 - DNA, 25 bp, Homo sapien
atggggatcaggagcggcagggctg

SEQ ID NO: 1599824 - DNA, 25 bp, Homo sapien
catggggatcaggagcggcagggct

SEQ ID NO: 1599825 - DNA, 25 bp, Homo sapien
acaccgagtggcagtcctcactcac

SEQ ID NO: 1599826 - DNA, 25 bp, Homo sapien
gacaccgagtggcagtcctcactca

SEQ ID NO: 1599827 - DNA, 25 bp, Homo sapien
tcccggcagtagctctggctctggg

SEQ ID NO: 1599828 - DNA, 25 bp, Homo sapien
gatccccttgaggagctcgctggtg

SEQ ID NO: 1599829 - DNA, 25 bp, Homo sapien
agagggatccccttgaggagctcgc

SEQ ID NO: 1599830 - DNA, 25 bp, Homo sapien
gaggagctcgctggtgacacatttg

SEQ ID NO: 1599831 - DNA, 25 bp, Homo sapien
atccctcgtaggaaggtgggtgcca

SEQ ID NO: 1599832 - DNA, 25 bp, Homo sapien
tccccagctgcgatggaagggcttt

SEQ ID NO: 1599833 - DNA, 25 bp, Homo sapien
aagggcttttgggatgacgcctaca

SEQ ID NO: 1599834 - DNA, 25 bp, Homo sapien
atgaagccaaccaggcgccagtaga

SEQ ID NO: 1599835 - DNA, 25 bp, Homo sapien
tccacctggtcggcccaactgggct

SEQ ID NO: 1599836 - DNA, 25 bp, Homo sapien
tcctccacctggtcggcccaactgg

SEQ ID NO: 1599837 - DNA, 25 bp, Homo sapien
ccacctggtcggcccaactgggctt

SEQ ID NO: 1599838 - DNA, 25 bp, Homo sapien
cctccacctggtcggcccaactggg

SEQ ID NO: 1599839 - DNA, 25 bp, Homo sapien
ccgtgcccctttccgcgatcgccga

SEQ ID NO: 1599840 - DNA, 25 bp, Homo sapien
cccagagcaccccaaccgcttcccg

SEQ ID NO: 1599841 - DNA, 25 bp, Homo sapien
cccctttccgcgatcgccgactcac

SEQ ID NO: 1599842 - DNA, 25 bp, Homo sapien
ccccataatacttcccagagcaccc

SEQ ID NO: 1599843 - DNA, 25 bp, Homo sapien
ggccagagagcggaagcgggcgaaa

SEQ ID NO: 1599844 - DNA, 25 bp, Homo sapien
aagcccggccagagagcggaagcgg

SEQ ID NO: 1599845 - DNA, 25 bp, Homo sapien
cagagagcggaagcgggcgaaaacg

SEQ ID NO: 1599846 - DNA, 25 bp, Homo sapien
gcgaaaacgagacttccggtgccgc

SEQ ID NO: 1599847 - DNA, 25 bp, Homo sapien
ccagccgcggcacccacagcgacac

SEQ ID NO: 1599848 - DNA, 25 bp, Homo sapien
tagaggggcccagccgcggcaccca

SEQ ID NO: 1599849 - DNA, 25 bp, Homo sapien
ctagaggggcccagccgcggcaccc

SEQ ID NO: 1599850 - DNA, 25 bp, Homo sapien
ggcccagccgcggcacccacagcga

SEQ ID NO: 1599851 - DNA, 25 bp, Homo sapien
cacgcggctgtgtatgctactgggc

SEQ ID NO: 1599852 - DNA, 25 bp, Homo sapien
gcacgcggctgtgtatgctactggg

SEQ ID NO: 1599853 - DNA, 25 bp, Homo sapien
acgcggctgtgtatgctactgggcg

SEQ ID NO: 1599854 - DNA, 25 bp, Homo sapien
cgcacgcggctgtgtatgctactgg

SEQ ID NO: 1599855 - DNA, 25 bp, Homo sapien
cggtcctcacgtggcctcctctgtg

SEQ ID NO: 1599856 - DNA, 25 bp, Homo sapien
tgtgtgtgtctatgtcccaatctct

SEQ ID NO: 1599857 - DNA, 25 bp, Homo sapien
ccaagatcacagtgtcggcagggtt

SEQ ID NO: 1599858 - DNA, 25 bp, Homo sapien
tttcttctgaggtgggggcaccttc

SEQ ID NO: 1599859 - DNA, 25 bp, Homo sapien
acaaaaattcgccaggcacacgcct

SEQ ID NO: 1599860 - DNA, 25 bp, Homo sapien
aaaattcgccaggcacacgcctgta

SEQ ID NO: 1599861 - DNA, 25 bp, Homo sapien
aaaaattcgccaggcacacgcctgt

SEQ ID NO: 1599862 - DNA, 25 bp, Homo sapien
atacaaaaattcgccaggcacacgc

SEQ ID NO: 1599863 - DNA, 25 bp, Homo sapien
tgtaccacacatgtgaacggacaga

SEQ ID NO: 1599864 - DNA, 25 bp, Homo sapien
aaatccagaatgcacaaagtactgc

SEQ ID NO: 1599865 - DNA, 25 bp, Homo sapien
gataagcgaacctcacacaacagct

SEQ ID NO: 1599866 - DNA, 25 bp, Homo sapien
aacagcttcatgtcagccaaggcca

SEQ ID NO: 1599867 - DNA, 25 bp, Homo sapien
tagcagcttcctcctcctttatttt

SEQ ID NO: 1599868 - DNA, 25 bp, Homo sapien
gcagcttcctcctcctttattttag

SEQ ID NO: 1599869 - DNA, 25 bp, Homo sapien
cttagcagcttcctcctcctttatt

SEQ ID NO: 1599870 - DNA, 25 bp, Homo sapien
ctagtccttagcagcttcctcctcc

SEQ ID NO: 1599871 - DNA, 25 bp, Homo sapien
tgacacgtgcaactcactcaatcct

SEQ ID NO: 1599872 - DNA, 25 bp, Homo sapien
gctgtgtgcagcacgcctgctctaa

SEQ ID NO: 1599873 - DNA, 25 bp, Homo sapien
gccaacctgaccaaaggcctgctgt

SEQ ID NO: 1599874 - DNA, 25 bp, Homo sapien
agcccaaaacggtggccagcaactg

SEQ ID NO: 1599875 - DNA, 25 bp, Homo sapien
tttggccaacatacaaagcttgatc

SEQ ID NO: 1599876 - DNA, 25 bp, Homo sapien
gccaacatacaaagcttgatctcca

SEQ ID NO: 1599877 - DNA, 25 bp, Homo sapien
aggggcggtggcacggcattgccca

SEQ ID NO: 1599878 - DNA, 25 bp, Homo sapien
tggccaacatacaaagcttgatctc

SEQ ID NO: 1599879 - DNA, 25 bp, Homo sapien
acaacctgggcattgcaccccttgg

SEQ ID NO: 1599880 - DNA, 25 bp, Homo sapien
cccctgctcagatggaggacaacct

SEQ ID NO: 1599881 - DNA, 25 bp, Homo sapien
ggacaacctgggcattgcacccctt

SEQ ID NO: 1599882 - DNA, 25 bp, Homo sapien
tgctcagatggaggacaacctgggc

SEQ ID NO: 1599883 - DNA, 25 bp, Homo sapien
aggaaccagcatagggacgcagcct

SEQ ID NO: 1599884 - DNA, 25 bp, Homo sapien
tcctttagcgcgacggactgtcctt

SEQ ID NO: 1599885 - DNA, 25 bp, Homo sapien
gagctgtcgccaccatgggttttag

SEQ ID NO: 1599886 - DNA, 25 bp, Homo sapien
gacgcagcctgactcggatgtctca

SEQ ID NO: 1599887 - DNA, 25 bp, Homo sapien
tgttgccgaagagccggtaggtgtc

SEQ ID NO: 1599888 - DNA, 25 bp, Homo sapien
aagagccggtaggtgtcagggaagc

SEQ ID NO: 1599889 - DNA, 25 bp, Homo sapien
tccaggatgttgccgaagagccggt

SEQ ID NO: 1599890 - DNA, 25 bp, Homo sapien
ctgggagcgggcacactcccgcacg

SEQ ID NO: 1599891 - DNA, 25 bp, Homo sapien
tgcttgcccatgggctcggggttgg

SEQ ID NO: 1599892 - DNA, 25 bp, Homo sapien
ctgcttgcccatgggctcggggttg

SEQ ID NO: 1599893 - DNA, 25 bp, Homo sapien
cttgcccatgggctcggggttggtg

SEQ ID NO: 1599894 - DNA, 25 bp, Homo sapien
tgcccatgggctcggggttggtgac

SEQ ID NO: 1599895 - DNA, 25 bp, Homo sapien
gccggttcccggtgtggggcaggca

SEQ ID NO: 1599896 - DNA, 25 bp, Homo sapien
gctgaagaagccgtcccactcgagc

SEQ ID NO: 1599897 - DNA, 25 bp, Homo sapien
gtcccactcgagccttccatagagg

SEQ ID NO: 1599898 - DNA, 25 bp, Homo sapien
actcgagccttccatagaggccagc

SEQ ID NO: 1599899 - DNA, 25 bp, Homo sapien
gctgcggggtcgcaggctttgccgg

SEQ ID NO: 1599900 - DNA, 25 bp, Homo sapien
ggccatgaacccagcctgcttttac

SEQ ID NO: 1599901 - DNA, 25 bp, Homo sapien
aacccagcctgcttttactactcaa

SEQ ID NO: 1599902 - DNA, 25 bp, Homo sapien
tgaacccagcctgcttttactactc

SEQ ID NO: 1599903 - DNA, 25 bp, Homo sapien
catgaacccagcctgcttttactac

SEQ ID NO: 1599904 - DNA, 25 bp, Homo sapien
tgcggccgttcttcctgtcatggtg

SEQ ID NO: 1599905 - DNA, 25 bp, Homo sapien
tcgatgttgggcagatcgcgccagt

SEQ ID NO: 1599906 - DNA, 25 bp, Homo sapien
tcatggtgggtataccgcagcttcc

SEQ ID NO: 1599907 - DNA, 25 bp, Homo sapien
tctgagagccgcacctcgatgttgg

SEQ ID NO: 1599908 - DNA, 25 bp, Homo sapien
ccatcgggaaagagacagtcaggga

SEQ ID NO: 1599909 - DNA, 25 bp, Homo sapien
cgtgggaatctaagctgagccttta

SEQ ID NO: 1599910 - DNA, 25 bp, Homo sapien
ggatatcgcacttggctcgaggcca

SEQ ID NO: 1599911 - DNA, 25 bp, Homo sapien
tcatgtgagcagcatccgagcatcc

SEQ ID NO: 1599912 - DNA, 25 bp, Homo sapien
aggactgaggctccccgttgtagga

SEQ ID NO: 1599913 - DNA, 25 bp, Homo sapien
taggagatctccagtgccgaggctc

SEQ ID NO: 1599914 - DNA, 25 bp, Homo sapien
tcggacatcgtgtctcgcaccgtga

SEQ ID NO: 1599915 - DNA, 25 bp, Homo sapien
cgcaccgtgatggtccggaaaggac

SEQ ID NO: 1599916 - DNA, 25 bp, Homo sapien
aacacgtgcagtggctccgggaaca

SEQ ID NO: 1599917 - DNA, 25 bp, Homo sapien
caaacacgtgcagtggctccgggaa

SEQ ID NO: 1599918 - DNA, 25 bp, Homo sapien
gagcaaacacgtgcagtggctccgg

SEQ ID NO: 1599919 - DNA, 25 bp, Homo sapien
caggcccggggagcaaacacgtgca

SEQ ID NO: 1599920 - DNA, 25 bp, Homo sapien
atgatggcccgcctcctagtctggg

SEQ ID NO: 1599921 - DNA, 25 bp, Homo sapien
ggatgatggcccgcctcctagtctg

SEQ ID NO: 1599922 - DNA, 25 bp, Homo sapien
gatgatggcccgcctcctagtctgg

SEQ ID NO: 1599923 - DNA, 25 bp, Homo sapien
cctcctagtctgggccacgccgtac

SEQ ID NO: 1599924 - DNA, 25 bp, Homo sapien
aagggccccaaggtcttagcactcg

SEQ ID NO: 1599925 - DNA, 25 bp, Homo sapien
tcagcaggcgtgctcctggtcagag

SEQ ID NO: 1599926 - DNA, 25 bp, Homo sapien
cgtcagtgggacactcccaactgga

SEQ ID NO: 1599927 - DNA, 25 bp, Homo sapien
tggctggccaatgcggagtgcactt

SEQ ID NO: 1599928 - DNA, 25 bp, Homo sapien
gctgcatggcgagaagcccattgta

SEQ ID NO: 1599929 - DNA, 25 bp, Homo sapien
gctcaagagacactagcggtggact

SEQ ID NO: 1599930 - DNA, 25 bp, Homo sapien
ttttaaaccaatcgaacagctgccg

SEQ ID NO: 1599931 - DNA, 25 bp, Homo sapien
tcccaggcatgttcgagaacacagc

SEQ ID NO: 1599932 - DNA, 25 bp, Homo sapien
ctgatagcccatgcggaccaggcag

SEQ ID NO: 1599933 - DNA, 25 bp, Homo sapien
gagcgcttgaaggagacaaagttcc

SEQ ID NO: 1599934 - DNA, 25 bp, Homo sapien
cgccgaaggtgcactgatagcccat

SEQ ID NO: 1599935 - DNA, 25 bp, Homo sapien
tgagcttcaggaccatggagcgctt

SEQ ID NO: 1599936 - DNA, 25 bp, Homo sapien
ggaagcccctcacgaatgttatcaa

SEQ ID NO: 1599937 - DNA, 25 bp, Homo sapien
gaccactgctgacatgcggcacagc

SEQ ID NO: 1599938 - DNA, 25 bp, Homo sapien
gaatgttatcaaagtctctccctgg

SEQ ID NO: 1599939 - DNA, 25 bp, Homo sapien
aagaaacgacccactgtgccggaag

SEQ ID NO: 1599940 - DNA, 25 bp, Homo sapien
tttttgaacttggagtaggtgcgcg

SEQ ID NO: 1599941 - DNA, 25 bp, Homo sapien
gttgttcagccggaacgcctgggcc

SEQ ID NO: 1599942 - DNA, 25 bp, Homo sapien
taggtgcgcgaattgaagcggttca

SEQ ID NO: 1599943 - DNA, 25 bp, Homo sapien
atctcgatggcccacagcgtgtcag

SEQ ID NO: 1599944 - DNA, 25 bp, Homo sapien
ggcagatcaagcacgaagccatgct

SEQ ID NO: 1599945 - DNA, 25 bp, Homo sapien
tctgggctcaccaggtattcagaga

SEQ ID NO: 1599946 - DNA, 25 bp, Homo sapien
tattcagagatggagcctacgggcg

SEQ ID NO: 1599947 - DNA, 25 bp, Homo sapien
ggaagtcgtttcaggtagcacctgc

SEQ ID NO: 1599948 - DNA, 25 bp, Homo sapien
tgcttggtggaatccctccgacaac

SEQ ID NO: 1599949 - DNA, 25 bp, Homo sapien
agccagaaaacacatccagggtccg

SEQ ID NO: 1599950 - DNA, 25 bp, Homo sapien
tgatctctatctctggctcgctcgg

SEQ ID NO: 1599951 - DNA, 25 bp, Homo sapien
gcagcttgggcagcttgatctctat

SEQ ID NO: 1599952 - DNA, 25 bp, Homo sapien
ttgggaggatcttcaaagcttttgc

SEQ ID NO: 1599953 - DNA, 25 bp, Homo sapien
tacgggcatggttgggaggatcttc

SEQ ID NO: 1599954 - DNA, 25 bp, Homo sapien
cagggctacgggcatggttgggagg

SEQ ID NO: 1599955 - DNA, 25 bp, Homo sapien
gcatggttgggaggatcttcaaagc

SEQ ID NO: 1599956 - DNA, 25 bp, Homo sapien
ttgggagagaaacgcactgtcccct

SEQ ID NO: 1599957 - DNA, 25 bp, Homo sapien
aaaaggagagaactgcaatcgtttg

SEQ ID NO: 1599958 - DNA, 25 bp, Homo sapien
tgtcccctctctaacgcagactagt

SEQ ID NO: 1599959 - DNA, 25 bp, Homo sapien
cagactagtaagaaggcaatttgat

SEQ ID NO: 1599960 - DNA, 25 bp, Homo sapien
gatctggctgacactgaaatgccta

SEQ ID NO: 1599961 - DNA, 25 bp, Homo sapien
ccatgcctgggagaacgtggatgta

SEQ ID NO: 1599962 - DNA, 25 bp, Homo sapien
caagcacttgagagtaccttctaga

SEQ ID NO: 1599963 - DNA, 25 bp, Homo sapien
cttgatcagctgactcgtgggccct

SEQ ID NO: 1599964 - DNA, 25 bp, Homo sapien
acctggacgcactcgggcaggtcct

SEQ ID NO: 1599965 - DNA, 25 bp, Homo sapien
gcctcctcgtcgctccagtagagca

SEQ ID NO: 1599966 - DNA, 25 bp, Homo sapien
gttggggccgcccatggagtacacc

SEQ ID NO: 1599967 - DNA, 25 bp, Homo sapien
atgtctgcgtggtagctcgctggag

SEQ ID NO: 1599968 - DNA, 25 bp, Homo sapien
cacaaccttgtttcaggcagagcct

SEQ ID NO: 1599969 - DNA, 25 bp, Homo sapien
gagtctgtggcctcgtggaagaaca

SEQ ID NO: 1599970 - DNA, 25 bp, Homo sapien
tatcagtgcccaccgataatcagaa

SEQ ID NO: 1599971 - DNA, 25 bp, Homo sapien
taactcttagaacaactgtgggtgc

SEQ ID NO: 1599972 - DNA, 25 bp, Homo sapien
gatccggccaattcggtagggctca

SEQ ID NO: 1599973 - DNA, 25 bp, Homo sapien
tatttccggtagtgctctgggtaca

SEQ ID NO: 1599974 - DNA, 25 bp, Homo sapien
tctgggtacaggtcctcatccacgg

SEQ ID NO: 1599975 - DNA, 25 bp, Homo sapien
gcgtttcacgggactggacagcttg

SEQ ID NO: 1599976 - DNA, 25 bp, Homo sapien
ccttgcagtggtcagtcaggcatga

SEQ ID NO: 1599977 - DNA, 25 bp, Homo sapien
gctgacctgtgatgggcacctcgta

SEQ ID NO: 1599978 - DNA, 25 bp, Homo sapien
tctgcgcattactggctacggtggt

SEQ ID NO: 1599979 - DNA, 25 bp, Homo sapien
gctgacactgctcaaataccccagg

SEQ ID NO: 1599980 - DNA, 25 bp, Homo sapien
acagctggtgcggagggattggcaa

SEQ ID NO: 1599981 - DNA, 25 bp, Homo sapien
caacgtgacggctaggacaacagct

SEQ ID NO: 1599982 - DNA, 25 bp, Homo sapien
tgccacctatgccaacgtgacggct

SEQ ID NO: 1599983 - DNA, 25 bp, Homo sapien
caatgtctgtaaggagggggacacc

SEQ ID NO: 1599984 - DNA, 25 bp, Homo sapien
tagaggacccggctatccaggtcct

SEQ ID NO: 1599985 - DNA, 25 bp, Homo sapien
ttttgcctcatctcagccagacggg

SEQ ID NO: 1599986 - DNA, 25 bp, Homo sapien
gggcaggtacacaccatcaccaact

SEQ ID NO: 1599987 - DNA, 25 bp, Homo sapien
atcaccaactcggtacaggatgccg

SEQ ID NO: 1599988 - DNA, 25 bp, Homo sapien
gaatctcgcgtagtcttgatcatac

SEQ ID NO: 1599989 - DNA, 25 bp, Homo sapien
gggactcgaatctcgcgtagtcttg

SEQ ID NO: 1599990 - DNA, 25 bp, Homo sapien
cgcgtagtcttgatcataccacagc

SEQ ID NO: 1599991 - DNA, 25 bp, Homo sapien
tttggaggggactcgaatctcgcgt

SEQ ID NO: 1599992 - DNA, 25 bp, Homo sapien
cactttgctgtggatatatgaaagc

SEQ ID NO: 1599993 - DNA, 25 bp, Homo sapien
agctccagagggtccgacgtggccc

SEQ ID NO: 1599994 - DNA, 25 bp, Homo sapien
acgtggccccgaggactgtgtctgt

SEQ ID NO: 1599995 - DNA, 25 bp, Homo sapien
ccagcgcagaaccagtgggcgtgaa

SEQ ID NO: 1599996 - DNA, 25 bp, Homo sapien
gcatgcagaagtcaagcaaaaagaa

SEQ ID NO: 1599997 - DNA, 25 bp, Homo sapien
atgcagaagtcaagcaaaaagaaag

SEQ ID NO: 1599998 - DNA, 25 bp, Homo sapien
tgcatgcagaagtcaagcaaaaaga

SEQ ID NO: 1599999 - DNA, 25 bp, Homo sapien
catgcagaagtcaagcaaaaagaaa

SEQ ID NO: 1600000 - DNA, 25 bp, Homo sapien
gaatcatctggaataacagagacac

SEQ ID NO: 1600001 - DNA, 25 bp, Homo sapien
cttgctagatacagcggttttgagg

SEQ ID NO: 1600002 - DNA, 25 bp, Homo sapien
ccagggtttccgcatcaatgcacac

SEQ ID NO: 1600003 - DNA, 25 bp, Homo sapien
gcatcaatgcacaccttcttatagt

SEQ ID NO: 1600004 - DNA, 25 bp, Homo sapien
aacagacaggtttcttagtgccggg

SEQ ID NO: 1600005 - DNA, 25 bp, Homo sapien
gaaaaacaagctatgagggctcacc

SEQ ID NO: 1600006 - DNA, 25 bp, Homo sapien
tcaggttggcgagatactagagggc

SEQ ID NO: 1600007 - DNA, 25 bp, Homo sapien
tgcccctagaactgtgtcaaatgcc

SEQ ID NO: 1600008 - DNA, 25 bp, Homo sapien
tcctcatcgtcatctgcctccttca

SEQ ID NO: 1600009 - DNA, 25 bp, Homo sapien
tgggatgttatcatcgacttcctca

SEQ ID NO: 1600010 - DNA, 25 bp, Homo sapien
tctctgggatgttatcatcgacttc

SEQ ID NO: 1600011 - DNA, 25 bp, Homo sapien
gcatctctgggatgttatcatcgac

SEQ ID NO: 1600012 - DNA, 25 bp, Homo sapien
caccaaatttaaccatgtccttgca

SEQ ID NO: 1600013 - DNA, 25 bp, Homo sapien
ccaaatttaaccatgtccttgcagg

SEQ ID NO: 1600014 - DNA, 25 bp, Homo sapien
actgccaccaaatttaaccatgtcc

SEQ ID NO: 1600015 - DNA, 25 bp, Homo sapien
gccaccaaatttaaccatgtccttg

SEQ ID NO: 1600016 - DNA, 25 bp, Homo sapien
agacgccacatcgccggcgcttaaa

SEQ ID NO: 1600017 - DNA, 25 bp, Homo sapien
acatcgccggcgcttaaaggcgttc

SEQ ID NO: 1600018 - DNA, 25 bp, Homo sapien
agaaagtatcgaagatctggtagac

SEQ ID NO: 1600019 - DNA, 25 bp, Homo sapien
ttcaatttgctctgcgaagaaagta

SEQ ID NO: 1600020 - DNA, 25 bp, Homo sapien
gcctgatggtctgccgcctcgcctg

SEQ ID NO: 1600021 - DNA, 25 bp, Homo sapien
tctccctggtagaatgcctgatggt

SEQ ID NO: 1600022 - DNA, 25 bp, Homo sapien
gatggtctgccgcctcgcctgggct

SEQ ID NO: 1600023 - DNA, 25 bp, Homo sapien
ctccctggtagaatgcctgatggtc

SEQ ID NO: 1600024 - DNA, 25 bp, Homo sapien
cacaaactgcgcgtgtcgcaggagg

SEQ ID NO: 1600025 - DNA, 25 bp, Homo sapien
cggcctcgtcataactctccacctg

SEQ ID NO: 1600026 - DNA, 25 bp, Homo sapien
tctgtcccagcgtgaccccagccag

SEQ ID NO: 1600027 - DNA, 25 bp, Homo sapien
tcaggtcccgcatgcagggtgtcag

SEQ ID NO: 1600028 - DNA, 25 bp, Homo sapien
gtgaagcggttcaagttgaggccag

SEQ ID NO: 1600029 - DNA, 25 bp, Homo sapien
ctgtgaagcggttcaagttgaggcc

SEQ ID NO: 1600030 - DNA, 25 bp, Homo sapien
tgtgaagcggttcaagttgaggcca

SEQ ID NO: 1600031 - DNA, 25 bp, Homo sapien
caatcttgctgatgtagatcttctc

SEQ ID NO: 1600032 - DNA, 25 bp, Homo sapien
gatcttgttgatcaggtcctcatag

SEQ ID NO: 1600033 - DNA, 25 bp, Homo sapien
taggtcgagtcggaattgctctgca

SEQ ID NO: 1600034 - DNA, 25 bp, Homo sapien
caaatatgggcgcatactcgggact

SEQ ID NO: 1600035 - DNA, 25 bp, Homo sapien
atttatggggccaagatttttgcca

SEQ ID NO: 1600036 - DNA, 25 bp, Homo sapien
catcaaagccagtgatccaccattc

SEQ ID NO: 1600037 - DNA, 25 bp, Homo sapien
gatgagggccttttcacctccatca

SEQ ID NO: 1600038 - DNA, 25 bp, Homo sapien
gtgctgaagccgatgagggcctttt

SEQ ID NO: 1600039 - DNA, 25 bp, Homo sapien
agaaaagaagagttcgatattcttc

SEQ ID NO: 1600040 - DNA, 25 bp, Homo sapien
caagagatgggtcatcatcatagat

SEQ ID NO: 1600041 - DNA, 25 bp, Homo sapien
tcttctcgatgaggccggtgtcgat

SEQ ID NO: 1600042 - DNA, 25 bp, Homo sapien
caggtgaccgtgcttacagtacaca

SEQ ID NO: 1600043 - DNA, 25 bp, Homo sapien
gactcgttggcatcaaagatggaca

SEQ ID NO: 1600044 - DNA, 25 bp, Homo sapien
gggaagcgcctcataactctcaaag

SEQ ID NO: 1600045 - DNA, 25 bp, Homo sapien
caaagccagactcgttggcatcaaa

SEQ ID NO: 1600046 - DNA, 25 bp, Homo sapien
ctgaagcaggtcagtttgtgctggg

SEQ ID NO: 1600047 - DNA, 25 bp, Homo sapien
ccatatttgaggtcagggtcgtcca

SEQ ID NO: 1600048 - DNA, 25 bp, Homo sapien
tgggtgctgcccatatttgaggtca

SEQ ID NO: 1600049 - DNA, 25 bp, Homo sapien
cgtccaggtactgcccgcactgaat

SEQ ID NO: 1600050 - DNA, 25 bp, Homo sapien
cgcgtctggtgggtgctgcccatat

SEQ ID NO: 1600051 - DNA, 25 bp, Homo sapien
gagttcatgactgttttggcgcgag

SEQ ID NO: 1600052 - DNA, 25 bp, Homo sapien
gttcatgactgttttggcgcgagcc

SEQ ID NO: 1600053 - DNA, 25 bp, Homo sapien
tcatgactgttttggcgcgagccat

SEQ ID NO: 1600054 - DNA, 25 bp, Homo sapien
cttggagttcatgactgttttggcg

SEQ ID NO: 1600055 - DNA, 25 bp, Homo sapien
ggcgcgtggtcacagtggctcttca

SEQ ID NO: 1600056 - DNA, 25 bp, Homo sapien
aaatatcaaaatcgcccctgtgagg

SEQ ID NO: 1600057 - DNA, 25 bp, Homo sapien
ttgctctggcaattactgaaacccc

SEQ ID NO: 1600058 - DNA, 25 bp, Homo sapien
gatccaaaatgagcctaaggttgct

SEQ ID NO: 1600059 - DNA, 25 bp, Homo sapien
gggtcgttttgcgtctcttctcctc

SEQ ID NO: 1600060 - DNA, 25 bp, Homo sapien
tgggggtcgttttgcgtctcttctc

SEQ ID NO: 1600061 - DNA, 25 bp, Homo sapien
cacgcccagtcttctttttcctaag

SEQ ID NO: 1600062 - DNA, 25 bp, Homo sapien
ccagctaattttgctgtgtccccag

SEQ ID NO: 1600063 - DNA, 25 bp, Homo sapien
tcttctttttcctaagaccagcctg

SEQ ID NO: 1600064 - DNA, 25 bp, Homo sapien
tgtccccagcctggagtgcgatctc

SEQ ID NO: 1600065 - DNA, 25 bp, Homo sapien
tttcttcgggcctccgtttggcagc

SEQ ID NO: 1600066 - DNA, 25 bp, Homo sapien
cctcgtctttttcatcagaaatctg

SEQ ID NO: 1600067 - DNA, 25 bp, Homo sapien
tcctcgtctttttcatcagaaatct

SEQ ID NO: 1600068 - DNA, 25 bp, Homo sapien
ttcttcgggcctccgtttggcagct

SEQ ID NO: 1600069 - DNA, 25 bp, Homo sapien
tacccatgggagctctataggcaca

SEQ ID NO: 1600070 - DNA, 25 bp, Homo sapien
tcgccaactcgcacggaaagtgaca

SEQ ID NO: 1600071 - DNA, 25 bp, Homo sapien
ttgtcatcccgagacgaggccttca

SEQ ID NO: 1600072 - DNA, 25 bp, Homo sapien
tgacaaactaatgcctccccatggg

SEQ ID NO: 1600073 - DNA, 25 bp, Homo sapien
ttctactgatccagatgacacaaaa

SEQ ID NO: 1600074 - DNA, 25 bp, Homo sapien
acctggcctagaacaggctttctac

SEQ ID NO: 1600075 - DNA, 25 bp, Homo sapien
caggctttctactgatccagatgac

SEQ ID NO: 1600076 - DNA, 25 bp, Homo sapien
tagaacaggctttctactgatccag

SEQ ID NO: 1600077 - DNA, 25 bp, Homo sapien
agatctttgggttgacttctgtgct

SEQ ID NO: 1600078 - DNA, 25 bp, Homo sapien
tgggttgacttctgtgcttcttctc

SEQ ID NO: 1600079 - DNA, 25 bp, Homo sapien
gttgacttctgtgcttcttctcatc

SEQ ID NO: 1600080 - DNA, 25 bp, Homo sapien
gatctttgggttgacttctgtgctt

SEQ ID NO: 1600081 - DNA, 25 bp, Homo sapien
ccgggtagacacgaggcttcacttt

SEQ ID NO: 1600082 - DNA, 25 bp, Homo sapien
gaccacgtggtctgtgtcaggatga

SEQ ID NO: 1600083 - DNA, 25 bp, Homo sapien
cactaaagaacctcctagaccaggg

SEQ ID NO: 1600084 - DNA, 25 bp, Homo sapien
gcctgggcagatctaccgggtagac

SEQ ID NO: 1600085 - DNA, 25 bp, Homo sapien
cagccaacaatccttgttctctggg

SEQ ID NO: 1600086 - DNA, 25 bp, Homo sapien
gggacagtggctcttagagctttgg

SEQ ID NO: 1600087 - DNA, 25 bp, Homo sapien
gacagtggctcttagagctttggga

SEQ ID NO: 1600088 - DNA, 25 bp, Homo sapien
gtggaacagccaacaatccttgttc

SEQ ID NO: 1600089 - DNA, 25 bp, Homo sapien
tcgtctccatcttcgtcctcgtcag

SEQ ID NO: 1600090 - DNA, 25 bp, Homo sapien
tccatcttcgtcctcgtcagcctgc

SEQ ID NO: 1600091 - DNA, 25 bp, Homo sapien
ttcgtcctcgtcagcctgcacgcct

SEQ ID NO: 1600092 - DNA, 25 bp, Homo sapien
tttctcgtctccatcttcgtcctcg

SEQ ID NO: 1600093 - DNA, 25 bp, Homo sapien
ttctttggtttgacttcggagtctc

SEQ ID NO: 1600094 - DNA, 25 bp, Homo sapien
ctttggtttgacttcggagtctctt

SEQ ID NO: 1600095 - DNA, 25 bp, Homo sapien
tggtttgacttcggagtctcttttc

SEQ ID NO: 1600096 - DNA, 25 bp, Homo sapien
tttgacttcggagtctcttttcttc

SEQ ID NO: 1600097 - DNA, 25 bp, Homo sapien
gaactagcccgttaggactgcttgt

SEQ ID NO: 1600098 - DNA, 25 bp, Homo sapien
aggtgagggatttcgatcttgcccc

SEQ ID NO: 1600099 - DNA, 25 bp, Homo sapien
tggtggttgaactagcccgttagga

SEQ ID NO: 1600100 - DNA, 25 bp, Homo sapien
gtgagggatttcgatcttgccccag

SEQ ID NO: 1600101 - DNA, 25 bp, Homo sapien
gaaacaaattcgaggtatgcactga

SEQ ID NO: 1600102 - DNA, 25 bp, Homo sapien
caaattcgaggtatgcactgactgc

SEQ ID NO: 1600103 - DNA, 25 bp, Homo sapien
ctgaaacaaattcgaggtatgcact

SEQ ID NO: 1600104 - DNA, 25 bp, Homo sapien
aacaaattcgaggtatgcactgact

SEQ ID NO: 1600105 - DNA, 25 bp, Homo sapien
ctttcatgtagagaccacgagaaaa

SEQ ID NO: 1600106 - DNA, 25 bp, Homo sapien
gcatttcgatcactagcaaaaccca

SEQ ID NO: 1600107 - DNA, 25 bp, Homo sapien
gcaaaacccatcttgttcttccacg

SEQ ID NO: 1600108 - DNA, 25 bp, Homo sapien
tgaaaggtgtttagccaaagtcaaa

SEQ ID NO: 1600109 - DNA, 25 bp, Homo sapien
tgcgcgttcctgattttgctctttc

SEQ ID NO: 1600110 - DNA, 25 bp, Homo sapien
ttccttttcagtgcgcgttcctgat

SEQ ID NO: 1600111 - DNA, 25 bp, Homo sapien
cagtgcgcgttcctgattttgctct

SEQ ID NO: 1600112 - DNA, 25 bp, Homo sapien
ttcagtgcgcgttcctgattttgct

SEQ ID NO: 1600113 - DNA, 25 bp, Homo sapien
gatgtaactctacgtctcttctcat

SEQ ID NO: 1600114 - DNA, 25 bp, Homo sapien
atgtaactctacgtctcttctcatc

SEQ ID NO: 1600115 - DNA, 25 bp, Homo sapien
ctggatgtaactctacgtctcttct

SEQ ID NO: 1600116 - DNA, 25 bp, Homo sapien
ggatgtaactctacgtctcttctca

SEQ ID NO: 1600117 - DNA, 25 bp, Homo sapien
tcttccttgatggactcatccgatt

SEQ ID NO: 1600118 - DNA, 25 bp, Homo sapien
gtcttcttccttgatggactcatcc

SEQ ID NO: 1600119 - DNA, 25 bp, Homo sapien
tcttcctgaggtttccgtttggcag

SEQ ID NO: 1600120 - DNA, 25 bp, Homo sapien
ccttgatggactcatccgatttggc

SEQ ID NO: 1600121 - DNA, 25 bp, Homo sapien
tgtcacacacagtgaggccaaccat

SEQ ID NO: 1600122 - DNA, 25 bp, Homo sapien
ctgtcacacacagtgaggccaacca

SEQ ID NO: 1600123 - DNA, 25 bp, Homo sapien
tgcaaaatgagatgtgatggtggtt

SEQ ID NO: 1600124 - DNA, 25 bp, Homo sapien
ccctttgcaaaatgagatgtgatgg

SEQ ID NO: 1600125 - DNA, 25 bp, Homo sapien
aaaatgagatgtgatggtggtttgc

SEQ ID NO: 1600126 - DNA, 25 bp, Homo sapien
tttgcaaaatgagatgtgatggtgg

SEQ ID NO: 1600127 - DNA, 25 bp, Homo sapien
gcttttccttgtaatcctggggcta

SEQ ID NO: 1600128 - DNA, 25 bp, Homo sapien
tggtgcttttccttgtaatcctggg

SEQ ID NO: 1600129 - DNA, 25 bp, Homo sapien
ctggtgcttttccttgtaatcctgg

SEQ ID NO: 1600130 - DNA, 25 bp, Homo sapien
tccttgtaatcctggggctaggtga

SEQ ID NO: 1600131 - DNA, 25 bp, Homo sapien
attgcactctatcctgggcgataga

SEQ ID NO: 1600132 - DNA, 25 bp, Homo sapien
cgccattgcactctatcctgggcga

SEQ ID NO: 1600133 - DNA, 25 bp, Homo sapien
ccattgcactctatcctgggcgata

SEQ ID NO: 1600134 - DNA, 25 bp, Homo sapien
gcgccattgcactctatcctgggcg

SEQ ID NO: 1600135 - DNA, 25 bp, Homo sapien
tcctgggcgtgcgaggtttggaaag

SEQ ID NO: 1600136 - DNA, 25 bp, Homo sapien
ctgggcgtgcgaggtttggaaaggg

SEQ ID NO: 1600137 - DNA, 25 bp, Homo sapien
tcctcctgggcgtgcgaggtttgga

SEQ ID NO: 1600138 - DNA, 25 bp, Homo sapien
ttgctcctcctgggcgtgcgaggtt

SEQ ID NO: 1600139 - DNA, 25 bp, Homo sapien
agggatttgactttagccaggtagc

SEQ ID NO: 1600140 - DNA, 25 bp, Homo sapien
tcttgcttggttcccgttttctaga

SEQ ID NO: 1600141 - DNA, 25 bp, Homo sapien
tgagcaccgttctccaaggacaaat

SEQ ID NO: 1600142 - DNA, 25 bp, Homo sapien
tagacgtccattcacttcccggttg

SEQ ID NO: 1600143 - DNA, 25 bp, Homo sapien
ctcggataattcttctttacgtaat

SEQ ID NO: 1600144 - DNA, 25 bp, Homo sapien
gcagaaattcgtgcaagagattcaa

SEQ ID NO: 1600145 - DNA, 25 bp, Homo sapien
ttgcagaaattcgtgcaagagattc

SEQ ID NO: 1600146 - DNA, 25 bp, Homo sapien
tgtttgcagaaattcgtgcaagaga

SEQ ID NO: 1600147 - DNA, 25 bp, Homo sapien
tctgttaagctgtctctttccaaat

SEQ ID NO: 1600148 - DNA, 25 bp, Homo sapien
cttttctgttaagctgtctctttcc

SEQ ID NO: 1600149 - DNA, 25 bp, Homo sapien
gctgtctctttccaaatctttgagc

SEQ ID NO: 1600150 - DNA, 25 bp, Homo sapien
tttctgttaagctgtctctttccaa

SEQ ID NO: 1600151 - DNA, 25 bp, Homo sapien
gattactgacaattagtagcttgac

SEQ ID NO: 1600152 - DNA, 25 bp, Homo sapien
ttgcctgggaaatcgtggtctgatt

SEQ ID NO: 1600153 - DNA, 25 bp, Homo sapien
taaaagaacaatagccggtgcagtg

SEQ ID NO: 1600154 - DNA, 25 bp, Homo sapien
tccccgaataactcattcttcagga

SEQ ID NO: 1600155 - DNA, 25 bp, Homo sapien
gaggactcagaatgccggcttagtg

SEQ ID NO: 1600156 - DNA, 25 bp, Homo sapien
agcctgagaccctatgattccttcc

SEQ ID NO: 1600157 - DNA, 25 bp, Homo sapien
tcgcagacagccgtgaaggacggag

SEQ ID NO: 1600158 - DNA, 25 bp, Homo sapien
gattccttcctagtgcttccctcag

SEQ ID NO: 1600159 - DNA, 25 bp, Homo sapien
taggcaaaagagtagacccactggg

SEQ ID NO: 1600160 - DNA, 25 bp, Homo sapien
caaaagagtagacccactgggcaca

SEQ ID NO: 1600161 - DNA, 25 bp, Homo sapien
cgcagtaggcaaaagagtagaccca

SEQ ID NO: 1600162 - DNA, 25 bp, Homo sapien
aagagtagacccactgggcacagtg

SEQ ID NO: 1600163 - DNA, 25 bp, Homo sapien
ttaagaacacagaacctttctagct

SEQ ID NO: 1600164 - DNA, 25 bp, Homo sapien
gagagagatgcaacccgcaaatgct

SEQ ID NO: 1600165 - DNA, 25 bp, Homo sapien
tacgtggccaaagcgattttgcaga

SEQ ID NO: 1600166 - DNA, 25 bp, Homo sapien
tgtaactaagaatacagaccttgag

SEQ ID NO: 1600167 - DNA, 25 bp, Homo sapien
cacacggcctagtctaataactttt

SEQ ID NO: 1600168 - DNA, 25 bp, Homo sapien
taataacttttacacatactaggaa

SEQ ID NO: 1600169 - DNA, 25 bp, Homo sapien
tcttgctagattcactttactgcag

SEQ ID NO: 1600170 - DNA, 25 bp, Homo sapien
tgtgtgactcactttcttgctagat

SEQ ID NO: 1600171 - DNA, 25 bp, Homo sapien
tgagtctactgtgctccaagctgca

SEQ ID NO: 1600172 - DNA, 25 bp, Homo sapien
caataacttagccatacggctggca

SEQ ID NO: 1600173 - DNA, 25 bp, Homo sapien
tgctagcatcagtgttaatccaggc

SEQ ID NO: 1600174 - DNA, 25 bp, Homo sapien
taatcagttgtgcaaaggagtctgc

SEQ ID NO: 1600175 - DNA, 25 bp, Homo sapien
ccttgtgcacggaagttggacagag

SEQ ID NO: 1600176 - DNA, 25 bp, Homo sapien
tgggaccagtgctcccactgatcct

SEQ ID NO: 1600177 - DNA, 25 bp, Homo sapien
gaactgatggcgttcatgaacaagg

SEQ ID NO: 1600178 - DNA, 25 bp, Homo sapien
gcatgaactgctaaagccagggcct

SEQ ID NO: 1600179 - DNA, 25 bp, Homo sapien
caggaaaagaccaaccatgcagcct

SEQ ID NO: 1600180 - DNA, 25 bp, Homo sapien
ttagcaagacttccctgatgcccac

SEQ ID NO: 1600181 - DNA, 25 bp, Homo sapien
cgctgcaatgcacggttaaagttcc

SEQ ID NO: 1600182 - DNA, 25 bp, Homo sapien
cacacgaaagtgtagccagttctca

SEQ ID NO: 1600183 - DNA, 25 bp, Homo sapien
cgccatcgagatgcacagctttggg

SEQ ID NO: 1600184 - DNA, 25 bp, Homo sapien
cggaaacgaacccaaagcttgctgt

SEQ ID NO: 1600185 - DNA, 25 bp, Homo sapien
gaatccacggtccattttggcgcca

SEQ ID NO: 1600186 - DNA, 25 bp, Homo sapien
tcctgtgcgaccaagctggagtcaa

SEQ ID NO: 1600187 - DNA, 25 bp, Homo sapien
catcgtcgggcagcgagatggccgg

SEQ ID NO: 1600188 - DNA, 25 bp, Homo sapien
cgagatggccgggacggccagtgtg

SEQ ID NO: 1600189 - DNA, 25 bp, Homo sapien
tgcggacatcgtcgggcagcgagat

SEQ ID NO: 1600190 - DNA, 25 bp, Homo sapien
cgcctgcggacatcgtcgggcagcg

SEQ ID NO: 1600191 - DNA, 25 bp, Homo sapien
ggcttcagcagacgcggcggcggca

SEQ ID NO: 1600192 - DNA, 25 bp, Homo sapien
ctcggaggcttcagcagacgcggcg

SEQ ID NO: 1600193 - DNA, 25 bp, Homo sapien
caggcgccccggcttttcgcgcgga

SEQ ID NO: 1600194 - DNA, 25 bp, Homo sapien
cggcttttcgcgcggaaaccgatgg

SEQ ID NO: 1600195 - DNA, 25 bp, Homo sapien
ggcgatgagcggaggcggcgtctac

SEQ ID NO: 1600196 - DNA, 25 bp, Homo sapien
aaggatggaacggagccggccatgc

SEQ ID NO: 1600197 - DNA, 25 bp, Homo sapien
ccagggaacacgcatgcgcaaggcg

SEQ ID NO: 1600198 - DNA, 25 bp, Homo sapien
caaacggagagaggcgataccctgt

SEQ ID NO: 1600199 - DNA, 25 bp, Homo sapien
ttgcaacaaacttaaggatagctat

SEQ ID NO: 1600200 - DNA, 25 bp, Homo sapien
atagacaaatgggtttgcaacaaac

SEQ ID NO: 1600201 - DNA, 25 bp, Homo sapien
tagacaaatgggtttgcaacaaact

SEQ ID NO: 1600202 - DNA, 25 bp, Homo sapien
cttaaggatagctatacagcaaaag

SEQ ID NO: 1600203 - DNA, 25 bp, Homo sapien
gactcactcagcagtacggaccatg

SEQ ID NO: 1600204 - DNA, 25 bp, Homo sapien
caaagggatagcacttgaaggaagc

SEQ ID NO: 1600205 - DNA, 25 bp, Homo sapien
ccaggccatgggagaccaaagggat

SEQ ID NO: 1600206 - DNA, 25 bp, Homo sapien
agggatggccagttgtccaggccat

SEQ ID NO: 1600207 - DNA, 25 bp, Homo sapien
gaggggacagatgaacagacctcct

SEQ ID NO: 1600208 - DNA, 25 bp, Homo sapien
gggacagatgaacagacctcctact

SEQ ID NO: 1600209 - DNA, 25 bp, Homo sapien
cttagagccaggggaggaaataaga

SEQ ID NO: 1600210 - DNA, 25 bp, Homo sapien
ttagagccaggggaggaaataagaa

SEQ ID NO: 1600211 - DNA, 25 bp, Homo sapien
gtctttctacttatccacgctcctg

SEQ ID NO: 1600212 - DNA, 25 bp, Homo sapien
tggagagtcccttccaaacgcttcg

SEQ ID NO: 1600213 - DNA, 25 bp, Homo sapien
cacatgcaaaacatgagcaagctct

SEQ ID NO: 1600214 - DNA, 25 bp, Homo sapien
ggacttcattctagaagcctcctcc

SEQ ID NO: 1600215 - DNA, 25 bp, Homo sapien
catgacatggccattgtccatgaaa

SEQ ID NO: 1600216 - DNA, 25 bp, Homo sapien
tgacatggccattgtccatgaaagc

SEQ ID NO: 1600217 - DNA, 25 bp, Homo sapien
gacatggccattgtccatgaaagcc

SEQ ID NO: 1600218 - DNA, 25 bp, Homo sapien
gtccatgacatggccattgtccatg

SEQ ID NO: 1600219 - DNA, 25 bp, Homo sapien
tgcacatttgtgtcttgggttatct

SEQ ID NO: 1600220 - DNA, 25 bp, Homo sapien
gggtgagaaacctattcctcacttc

SEQ ID NO: 1600221 - DNA, 25 bp, Homo sapien
acttccaatcccagctatccaggta

SEQ ID NO: 1600222 - DNA, 25 bp, Homo sapien
caatctggtgttgtggtctggctgt

SEQ ID NO: 1600223 - DNA, 25 bp, Homo sapien
ctgatcttgtaggtgcagagcccca

SEQ ID NO: 1600224 - DNA, 25 bp, Homo sapien
gcctgatcttgtaggtgcagagccc

SEQ ID NO: 1600225 - DNA, 25 bp, Homo sapien
cagggacaggtcattctcagtggtc

SEQ ID NO: 1600226 - DNA, 25 bp, Homo sapien
gtcattctcagtggtcgaacagtcc

SEQ ID NO: 1600227 - DNA, 25 bp, Homo sapien
gtagttccacctacttgggagattg

SEQ ID NO: 1600228 - DNA, 25 bp, Homo sapien
gcggtgagctgtgattacgtcactg

SEQ ID NO: 1600229 - DNA, 25 bp, Homo sapien
ctgtagttccacctacttgggagat

SEQ ID NO: 1600230 - DNA, 25 bp, Homo sapien
ctgcggtgagctgtgattacgtcac

SEQ ID NO: 1600231 - DNA, 25 bp, Homo sapien
tgaaccgtttattagcctaggtctg

SEQ ID NO: 1600232 - DNA, 25 bp, Homo sapien
tctgaggcatgaggtttccttcccc

SEQ ID NO: 1600233 - DNA, 25 bp, Homo sapien
gcattcacaagaaattactctgagg

SEQ ID NO: 1600234 - DNA, 25 bp, Homo sapien
gtttcaggcattgcggaggcacgtc

SEQ ID NO: 1600235 - DNA, 25 bp, Homo sapien
caagttgcgccttgcatcaagagtc

SEQ ID NO: 1600236 - DNA, 25 bp, Homo sapien
tattctgtgccccaaatagtgcaac

SEQ ID NO: 1600237 - DNA, 25 bp, Homo sapien
tcaggagacctggtaccttagctgg

SEQ ID NO: 1600238 - DNA, 25 bp, Homo sapien
gagggtcacagacatcacgcctatg

SEQ ID NO: 1600239 - DNA, 25 bp, Homo sapien
ttctgtagtcgcacgaagttgccca

SEQ ID NO: 1600240 - DNA, 25 bp, Homo sapien
gacagtggttctgtagtcgcacgaa

SEQ ID NO: 1600241 - DNA, 25 bp, Homo sapien
ggggagaagtcgtcaagtggcagct

SEQ ID NO: 1600242 - DNA, 25 bp, Homo sapien
tttccgggcctcagagagacgggga

SEQ ID NO: 1600243 - DNA, 25 bp, Homo sapien
tcaggaccgcactgcaacactgcta

SEQ ID NO: 1600244 - DNA, 25 bp, Homo sapien
agtcagtgccttatctggcctttcc

SEQ ID NO: 1600245 - DNA, 25 bp, Homo sapien
ggtcacactagccactggactggcc

SEQ ID NO: 1600246 - DNA, 25 bp, Homo sapien
gcaacactgctatgtgactagtcag

SEQ ID NO: 1600247 - DNA, 25 bp, Homo sapien
tggcctggttgttggtccaccccca

SEQ ID NO: 1600248 - DNA, 25 bp, Homo sapien
caccgtgttgccctccagaaacgtg

SEQ ID NO: 1600249 - DNA, 25 bp, Homo sapien
gggcatgtgcatgcccctctccagg

SEQ ID NO: 1600250 - DNA, 25 bp, Homo sapien
ccagaaacgtgggtgacgtgggcat

SEQ ID NO: 1600251 - DNA, 25 bp, Homo sapien
gtgacgtgggcatgtgcatgcccct

SEQ ID NO: 1600252 - DNA, 25 bp, Homo sapien
tccagcactgcagcggccgaagcac

SEQ ID NO: 1600253 - DNA, 25 bp, Homo sapien
cggcctccagcactgcagcggccga

SEQ ID NO: 1600254 - DNA, 25 bp, Homo sapien
ctccagcactgcagcggccgaagca

SEQ ID NO: 1600255 - DNA, 25 bp, Homo sapien
gcctccagcactgcagcggccgaag

SEQ ID NO: 1600256 - DNA, 25 bp, Homo sapien
cgataaagacgcctagcacgatggt

SEQ ID NO: 1600257 - DNA, 25 bp, Homo sapien
cacaatggcgcaacagaggatgacg

SEQ ID NO: 1600258 - DNA, 25 bp, Homo sapien
cacataatgcttggcgtagagaggc

SEQ ID NO: 1600259 - DNA, 25 bp, Homo sapien
tacagcttgaccttggcaatggcca

SEQ ID NO: 1600260 - DNA, 25 bp, Homo sapien
ggctcagaggcctgctggggccatg

SEQ ID NO: 1600261 - DNA, 25 bp, Homo sapien
tggggctcagaggcctgctggggcc

SEQ ID NO: 1600262 - DNA, 25 bp, Homo sapien
tcagaggcctgctggggccatgggg

SEQ ID NO: 1600263 - DNA, 25 bp, Homo sapien
ggtggggctcagaggcctgctgggg

SEQ ID NO: 1600264 - DNA, 25 bp, Homo sapien
gatgtaagccaaccagacgagatct

SEQ ID NO: 1600265 - DNA, 25 bp, Homo sapien
cagggcggccctgagattcaaacat

SEQ ID NO: 1600266 - DNA, 25 bp, Homo sapien
ccttttaaatgacgcatgaggcacg

SEQ ID NO: 1600267 - DNA, 25 bp, Homo sapien
gggcaagtccctagacgctgtctca

SEQ ID NO: 1600268 - DNA, 25 bp, Homo sapien
ccggaggggccttggcgtctgcgtc

SEQ ID NO: 1600269 - DNA, 25 bp, Homo sapien
ggccttggcgtctgcgtccccaggg

SEQ ID NO: 1600270 - DNA, 25 bp, Homo sapien
ctggctaggccggcccggctcccgg

SEQ ID NO: 1600271 - DNA, 25 bp, Homo sapien
aggggccttggcgtctgcgtcccca

SEQ ID NO: 1600272 - DNA, 25 bp, Homo sapien
tttggttacgtgactatatatgttt

SEQ ID NO: 1600273 - DNA, 25 bp, Homo sapien
tggttttggttacgtgactatatat

SEQ ID NO: 1600274 - DNA, 25 bp, Homo sapien
gttttggttacgtgactatatatgt

SEQ ID NO: 1600275 - DNA, 25 bp, Homo sapien
ggttttggttacgtgactatatatg

SEQ ID NO: 1600276 - DNA, 25 bp, Homo sapien
actgggaccgctcagattattgatc

SEQ ID NO: 1600277 - DNA, 25 bp, Homo sapien
tgacccattctttcggcagggtttc

SEQ ID NO: 1600278 - DNA, 25 bp, Homo sapien
tggctgtcttccatcaccaaaactg

SEQ ID NO: 1600279 - DNA, 25 bp, Homo sapien
ttattgatctgacccattctttcgg

SEQ ID NO: 1600280 - DNA, 25 bp, Homo sapien
tccctggcccctcggagatctccat

SEQ ID NO: 1600281 - DNA, 25 bp, Homo sapien
ctccctggcccctcggagatctcca

SEQ ID NO: 1600282 - DNA, 25 bp, Homo sapien
gaagccgggtcatctattccgaaag

SEQ ID NO: 1600283 - DNA, 25 bp, Homo sapien
gaaatacactttgcgctgccacgtg

SEQ ID NO: 1600284 - DNA, 25 bp, Homo sapien
cagagagagttatgaccccgagagg

SEQ ID NO: 1600285 - DNA, 25 bp, Homo sapien
cacagcgtgattttggagcctccgg

SEQ ID NO: 1600286 - DNA, 25 bp, Homo sapien
caggcagctggtctgcaacgtcacc

SEQ ID NO: 1600287 - DNA, 25 bp, Homo sapien
agacccgggagaacgtgaccatcta

SEQ ID NO: 1600288 - DNA, 25 bp, Homo sapien
gctccccggctcttggaagttggct

SEQ ID NO: 1600289 - DNA, 25 bp, Homo sapien
tgagctgcactctggacggactgtt

SEQ ID NO: 1600290 - DNA, 25 bp, Homo sapien
tcttcccccgggatccttgaatctg

SEQ ID NO: 1600291 - DNA, 25 bp, Homo sapien
ctcggcatatctctgtactttattg

SEQ ID NO: 1600292 - DNA, 25 bp, Homo sapien
ctcggccaaggctgactggagaagg

SEQ ID NO: 1600293 - DNA, 25 bp, Homo sapien
tccttcctgagagcgtctcctgagg

SEQ ID NO: 1600294 - DNA, 25 bp, Homo sapien
ctgaatggggtccagggacactcca

SEQ ID NO: 1600295 - DNA, 25 bp, Homo sapien
cttcctgaatggggtccagggacac

SEQ ID NO: 1600296 - DNA, 25 bp, Homo sapien
tgaatggggtccagggacactccac

SEQ ID NO: 1600297 - DNA, 25 bp, Homo sapien
tcctgaatggggtccagggacactc

SEQ ID NO: 1600298 - DNA, 25 bp, Homo sapien
agcagcgagtgccgtatttcttgta

SEQ ID NO: 1600299 - DNA, 25 bp, Homo sapien
gagcagcgagtgccgtatttcttgt

SEQ ID NO: 1600300 - DNA, 25 bp, Homo sapien
gcagcgagtgccgtatttcttgtac

SEQ ID NO: 1600301 - DNA, 25 bp, Homo sapien
ctgggtccgacaggaagcacagcgc

SEQ ID NO: 1600302 - DNA, 25 bp, Homo sapien
atcttcagcgtctctccagagcggg

SEQ ID NO: 1600303 - DNA, 25 bp, Homo sapien
cagagcggggtcctctgggtccgac

SEQ ID NO: 1600304 - DNA, 25 bp, Homo sapien
tgatcccacaggcgttgcagagagg

SEQ ID NO: 1600305 - DNA, 25 bp, Homo sapien
tcgggatgcctgtgcggagtcgggc

SEQ ID NO: 1600306 - DNA, 25 bp, Homo sapien
gagtcgggcattttgtgggggtctc

SEQ ID NO: 1600307 - DNA, 25 bp, Homo sapien
tcagaggccaagcatgtgagctcgg

SEQ ID NO: 1600308 - DNA, 25 bp, Homo sapien
agctcgggatgcctgtgcggagtcg

SEQ ID NO: 1600309 - DNA, 25 bp, Homo sapien
aggggattcctgagaacggctactg

SEQ ID NO: 1600310 - DNA, 25 bp, Homo sapien
cctgagaacggctactgcagggcag

SEQ ID NO: 1600311 - DNA, 25 bp, Homo sapien
gggattcctgagaacggctactgca

SEQ ID NO: 1600312 - DNA, 25 bp, Homo sapien
gattcctgagaacggctactgcagg

SEQ ID NO: 1600313 - DNA, 25 bp, Homo sapien
gcaggggttcagctgtttccggggc

SEQ ID NO: 1600314 - DNA, 25 bp, Homo sapien
gctggagtccggctttatctgaaac

SEQ ID NO: 1600315 - DNA, 25 bp, Homo sapien
cactctctcggtgccccggcagggg

SEQ ID NO: 1600316 - DNA, 25 bp, Homo sapien
cagagtcaccccctcgaacccaggg

SEQ ID NO: 1600317 - DNA, 25 bp, Homo sapien
cagacggcggcccttttggctgatc

SEQ ID NO: 1600318 - DNA, 25 bp, Homo sapien
gctgcagacggcggcccttttggct

SEQ ID NO: 1600319 - DNA, 25 bp, Homo sapien
ggcggcccttttggctgatcctggt

SEQ ID NO: 1600320 - DNA, 25 bp, Homo sapien
ggcccttttggctgatcctggtctg

SEQ ID NO: 1600321 - DNA, 25 bp, Homo sapien
ccagcaaggccccaggaccggggtg

SEQ ID NO: 1600322 - DNA, 25 bp, Homo sapien
cccaggaccggggtgtcctgggcag

SEQ ID NO: 1600323 - DNA, 25 bp, Homo sapien
cagcaaggccccaggaccggggtgt

SEQ ID NO: 1600324 - DNA, 25 bp, Homo sapien
acagggcggtgaccgactcctggca

SEQ ID NO: 1600325 - DNA, 25 bp, Homo sapien
tctccactgtctcttggaggaagca

SEQ ID NO: 1600326 - DNA, 25 bp, Homo sapien
ctctccactgtctcttggaggaagc

SEQ ID NO: 1600327 - DNA, 25 bp, Homo sapien
aagcacagggcggtgaccgactcct

SEQ ID NO: 1600328 - DNA, 25 bp, Homo sapien
ggtgactcctgggtttagccggcca

SEQ ID NO: 1600329 - DNA, 25 bp, Homo sapien
tgaggttcagtcatttctaactctg

SEQ ID NO: 1600330 - DNA, 25 bp, Homo sapien
ggccggctctttgtgtacccttgga

SEQ ID NO: 1600331 - DNA, 25 bp, Homo sapien
ggtttaagagttgcagtaattgcaa

SEQ ID NO: 1600332 - DNA, 25 bp, Homo sapien
gtagatcacccaggcagggaccgcc

SEQ ID NO: 1600333 - DNA, 25 bp, Homo sapien
ttacggcacccgtagatcacccagg

SEQ ID NO: 1600334 - DNA, 25 bp, Homo sapien
agccctccacatcaatcaacccctt

SEQ ID NO: 1600335 - DNA, 25 bp, Homo sapien
atcaatcaaccccttacggcacccg

SEQ ID NO: 1600336 - DNA, 25 bp, Homo sapien
tgaccgaggcaggatatcaagcctc

SEQ ID NO: 1600337 - DNA, 25 bp, Homo sapien
ctaggtgaccgaggcaggatatcaa

SEQ ID NO: 1600338 - DNA, 25 bp, Homo sapien
ccgaggcaggatatcaagcctctgg

SEQ ID NO: 1600339 - DNA, 25 bp, Homo sapien
ggtgaccgaggcaggatatcaagcc

SEQ ID NO: 1600340 - DNA, 25 bp, Homo sapien
ctgcaggatcgagaaaaaggttact

SEQ ID NO: 1600341 - DNA, 25 bp, Homo sapien
catgaccccttgatcactgagccag

SEQ ID NO: 1600342 - DNA, 25 bp, Homo sapien
gtttcttttagagaccgagcctcac

SEQ ID NO: 1600343 - DNA, 25 bp, Homo sapien
tcgataaccccagcaaagagaggtc

SEQ ID NO: 1600344 - DNA, 25 bp, Homo sapien
tccaggttcagacagggcggcgcca

SEQ ID NO: 1600345 - DNA, 25 bp, Homo sapien
cagacagggcggcgccagaagcttt

SEQ ID NO: 1600346 - DNA, 25 bp, Homo sapien
cagccgctccaggttcagacagggc

SEQ ID NO: 1600347 - DNA, 25 bp, Homo sapien
tgggagggggatcctcccagccgct

SEQ ID NO: 1600348 - DNA, 25 bp, Homo sapien
tggctcggcctccattgcgccccag

SEQ ID NO: 1600349 - DNA, 25 bp, Homo sapien
tggcattgaggagtccgggattggc

SEQ ID NO: 1600350 - DNA, 25 bp, Homo sapien
gctgggcccacccgatgaaacccac

SEQ ID NO: 1600351 - DNA, 25 bp, Homo sapien
aggagtccgggattggctcggcctc

SEQ ID NO: 1600352 - DNA, 25 bp, Homo sapien
tcttggtagaggatgcgatgagccc

SEQ ID NO: 1600353 - DNA, 25 bp, Homo sapien
ggcttttttcaggtcatccgcgcac

SEQ ID NO: 1600354 - DNA, 25 bp, Homo sapien
gacctgtgtggtgggagcgctcttg

SEQ ID NO: 1600355 - DNA, 25 bp, Homo sapien
cagctgagagcgaccagcctcggcg

SEQ ID NO: 1600356 - DNA, 25 bp, Homo sapien
ccccaaggacactcaacatgctggg

SEQ ID NO: 1600357 - DNA, 25 bp, Homo sapien
cggcatcttagatcccagagggaaa

SEQ ID NO: 1600358 - DNA, 25 bp, Homo sapien
gcagatgcaggtgtggtttgttttt

SEQ ID NO: 1600359 - DNA, 25 bp, Homo sapien
tgtgagccacctgtagaccccagat

SEQ ID NO: 1600360 - DNA, 25 bp, Homo sapien
cgatttattgcagctccaatatgag

SEQ ID NO: 1600361 - DNA, 25 bp, Homo sapien
tgcagctccaatatgagtccactcc

SEQ ID NO: 1600362 - DNA, 25 bp, Homo sapien
gttatcgatttattgcagctccaat

SEQ ID NO: 1600363 - DNA, 25 bp, Homo sapien
tattgcagctccaatatgagtccac

SEQ ID NO: 1600364 - DNA, 25 bp, Homo sapien
tactcaaaccctgattctcaggggc

SEQ ID NO: 1600365 - DNA, 25 bp, Homo sapien
cactaggggccctgtccccaccaga

SEQ ID NO: 1600366 - DNA, 25 bp, Homo sapien
ccactaggggccctgtccccaccag

SEQ ID NO: 1600367 - DNA, 25 bp, Homo sapien
ctaggggccctgtccccaccagagc

SEQ ID NO: 1600368 - DNA, 25 bp, Homo sapien
actaggggccctgtccccaccagag

SEQ ID NO: 1600369 - DNA, 25 bp, Homo sapien
cccaagcaggggtgttgtccttcac

SEQ ID NO: 1600370 - DNA, 25 bp, Homo sapien
ctcccgggcctgtccgcactctggg

SEQ ID NO: 1600371 - DNA, 25 bp, Homo sapien
caagcaggggtgttgtccttcacag

SEQ ID NO: 1600372 - DNA, 25 bp, Homo sapien
tctcccgggcctgtccgcactctgg

SEQ ID NO: 1600373 - DNA, 25 bp, Homo sapien
catggcaatgtggaatggtccaggt

SEQ ID NO: 1600374 - DNA, 25 bp, Homo sapien
ggctattccctcaatctgggccctg

SEQ ID NO: 1600375 - DNA, 25 bp, Homo sapien
ggccatggcaatgtggaatggtcca

SEQ ID NO: 1600376 - DNA, 25 bp, Homo sapien
tggctattccctcaatctgggccct

SEQ ID NO: 1600377 - DNA, 25 bp, Homo sapien
ggggcttggggacatggccatccac

SEQ ID NO: 1600378 - DNA, 25 bp, Homo sapien
gtggggcttggggacatggccatcc

SEQ ID NO: 1600379 - DNA, 25 bp, Homo sapien
tcagtggggcttggggacatggcca

SEQ ID NO: 1600380 - DNA, 25 bp, Homo sapien
cagtggggcttggggacatggccat

SEQ ID NO: 1600381 - DNA, 25 bp, Homo sapien
ggcagggtgaattccgctccttcca

SEQ ID NO: 1600382 - DNA, 25 bp, Homo sapien
ttgggcagggtgaattccgctcctt

SEQ ID NO: 1600383 - DNA, 25 bp, Homo sapien
tgatcttgggcagggtgaattccgc

SEQ ID NO: 1600384 - DNA, 25 bp, Homo sapien
tcttgggcagggtgaattccgctcc

SEQ ID NO: 1600385 - DNA, 25 bp, Homo sapien
atctggcagcccagccgcgagttct

SEQ ID NO: 1600386 - DNA, 25 bp, Homo sapien
caatctggcagcccagccgcgagtt

SEQ ID NO: 1600387 - DNA, 25 bp, Homo sapien
tcagcacaatctggcagcccagccg

SEQ ID NO: 1600388 - DNA, 25 bp, Homo sapien
cacaatctggcagcccagccgcgag

SEQ ID NO: 1600389 - DNA, 25 bp, Homo sapien
ggaggaggggggccatgtctagcat

SEQ ID NO: 1600390 - DNA, 25 bp, Homo sapien
ctggaggaggggggccatgtctagc

SEQ ID NO: 1600391 - DNA, 25 bp, Homo sapien
tggaggaggggggccatgtctagca

SEQ ID NO: 1600392 - DNA, 25 bp, Homo sapien
gaggaggcaggagatccaggtggtc

SEQ ID NO: 1600393 - DNA, 25 bp, Homo sapien
caggtggtcttcactcacatacaca

SEQ ID NO: 1600394 - DNA, 25 bp, Homo sapien
tcacatacacatggcaggtggagca

SEQ ID NO: 1600395 - DNA, 25 bp, Homo sapien
agatccaggtggtcttcactcacat

SEQ ID NO: 1600396 - DNA, 25 bp, Homo sapien
gctcagtcatagcttactgcctcaa

SEQ ID NO: 1600397 - DNA, 25 bp, Homo sapien
gtgccatggctcagtcatagcttac

SEQ ID NO: 1600398 - DNA, 25 bp, Homo sapien
gagtgccatggctcagtcatagctt

SEQ ID NO: 1600399 - DNA, 25 bp, Homo sapien
agcctggagtgccatggctcagtca

SEQ ID NO: 1600400 - DNA, 25 bp, Homo sapien
tggggatcatgtccctcctggccta

SEQ ID NO: 1600401 - DNA, 25 bp, Homo sapien
cactgcaccagaccaggaattaggg

SEQ ID NO: 1600402 - DNA, 25 bp, Homo sapien
actccttcacttagtcttgcagttc

SEQ ID NO: 1600403 - DNA, 25 bp, Homo sapien
ctctgatcacagagaccggtgcttg

SEQ ID NO: 1600404 - DNA, 25 bp, Homo sapien
aaataagagcttggcaacagatgag

SEQ ID NO: 1600405 - DNA, 25 bp, Homo sapien
gccaggagtcctagtgatctctaat

SEQ ID NO: 1600406 - DNA, 25 bp, Homo sapien
tgaagagacacacctaatttgtggg

SEQ ID NO: 1600407 - DNA, 25 bp, Homo sapien
ggattttagtccatatttggtggga

SEQ ID NO: 1600408 - DNA, 25 bp, Homo sapien
cttccaggtccaccccgtggcgctg

SEQ ID NO: 1600409 - DNA, 25 bp, Homo sapien
gaagaacattgtccccgactctgcc

SEQ ID NO: 1600410 - DNA, 25 bp, Homo sapien
ggccaggtgaagaacattgtccccg

SEQ ID NO: 1600411 - DNA, 25 bp, Homo sapien
cgctgggccaggtgaagaacattgt

SEQ ID NO: 1600412 - DNA, 25 bp, Homo sapien
ggatccgctggcctgagcggtctac

SEQ ID NO: 1600413 - DNA, 25 bp, Homo sapien
tccgctggcctgagcggtctacgaa

SEQ ID NO: 1600414 - DNA, 25 bp, Homo sapien
tggcctgagcggtctacgaacacca

SEQ ID NO: 1600415 - DNA, 25 bp, Homo sapien
agcggtctacgaacaccacgttcac

SEQ ID NO: 1600416 - DNA, 25 bp, Homo sapien
agtgcgaatgccgaactggatgatg

SEQ ID NO: 1600417 - DNA, 25 bp, Homo sapien
gacagatggaagtgcgaatgccgaa

SEQ ID NO: 1600418 - DNA, 25 bp, Homo sapien
tggaagtgcgaatgccgaactggat

SEQ ID NO: 1600419 - DNA, 25 bp, Homo sapien
aatgccgaactggatgatgggctca

SEQ ID NO: 1600420 - DNA, 25 bp, Homo sapien
ggaattgaggcttgacgcacaggta

SEQ ID NO: 1600421 - DNA, 25 bp, Homo sapien
gggaccagaggaattccgtgggatg

SEQ ID NO: 1600422 - DNA, 25 bp, Homo sapien
aagggggacctcgagatgaagctac

SEQ ID NO: 1600423 - DNA, 25 bp, Homo sapien
cgagatgaagctacagggcaagatg

SEQ ID NO: 1600424 - DNA, 25 bp, Homo sapien
cagaggaattccgtgggatgaggaa

SEQ ID NO: 1600425 - DNA, 25 bp, Homo sapien
gccgctccgggccgcccgcgtcctc

SEQ ID NO: 1600426 - DNA, 25 bp, Homo sapien
tcctcctctccagccgggcgcgagc

SEQ ID NO: 1600427 - DNA, 25 bp, Homo sapien
gcgtcctcctctccagccgggcgcg

SEQ ID NO: 1600428 - DNA, 25 bp, Homo sapien
gggccgcccgcgtcctcctctccag

SEQ ID NO: 1600429 - DNA, 25 bp, Homo sapien
gccccgccggcatctgacggattaa

SEQ ID NO: 1600430 - DNA, 25 bp, Homo sapien
atctgacggattaacgctgcccgcc

SEQ ID NO: 1600431 - DNA, 25 bp, Homo sapien
ctggaaaacacggttcggtgagcgg

SEQ ID NO: 1600432 - DNA, 25 bp, Homo sapien
aaaacacggttcggtgagcggctgc

SEQ ID NO: 1600433 - DNA, 25 bp, Homo sapien
ctgtcgcttgaaactttctggttgt

SEQ ID NO: 1600434 - DNA, 25 bp, Homo sapien
accctggcactcacgcctccccggg

SEQ ID NO: 1600435 - DNA, 25 bp, Homo sapien
tgcagtagaaccctggcactcacgc

SEQ ID NO: 1600436 - DNA, 25 bp, Homo sapien
ctgcagtagaaccctggcactcacg

SEQ ID NO: 1600437 - DNA, 25 bp, Homo sapien
gtagaaccctggcactcacgcctcc

SEQ ID NO: 1600438 - DNA, 25 bp, Homo sapien
ggaggcgagggaaagcccataatca

SEQ ID NO: 1600439 - DNA, 25 bp, Homo sapien
cagatgtttgcttagggcctgcggt

SEQ ID NO: 1600440 - DNA, 25 bp, Homo sapien
aagagcagggcggaatccatctcag

SEQ ID NO: 1600441 - DNA, 25 bp, Homo sapien
taatcaatggaacataagcgcagat

SEQ ID NO: 1600442 - DNA, 25 bp, Homo sapien
tcttcaacaagcgagtgacagcaga

SEQ ID NO: 1600443 - DNA, 25 bp, Homo sapien
caaaagcgatttggtgcaggccctt

SEQ ID NO: 1600444 - DNA, 25 bp, Homo sapien
tatcttcacgggaggtcagggaaac

SEQ ID NO: 1600445 - DNA, 25 bp, Homo sapien
tgggcgggcccagagtttatcttca

SEQ ID NO: 1600446 - DNA, 25 bp, Homo sapien
agctgcgtttctggccgcccagtgg

SEQ ID NO: 1600447 - DNA, 25 bp, Homo sapien
agtccgcgtagtggccgccgaggcc

SEQ ID NO: 1600448 - DNA, 25 bp, Homo sapien
tcaggtaggagtccgcgtagtggcc

SEQ ID NO: 1600449 - DNA, 25 bp, Homo sapien
aggtgggcaaagctgcgtttctggc

SEQ ID NO: 1600450 - DNA, 25 bp, Homo sapien
agagggcagggcggggcgggtcagg

SEQ ID NO: 1600451 - DNA, 25 bp, Homo sapien
ctggagacagagggcagggcggggc

SEQ ID NO: 1600452 - DNA, 25 bp, Homo sapien
gggccggggcttcccagccctgcat

SEQ ID NO: 1600453 - DNA, 25 bp, Homo sapien
agccctgcatgtccccaccccctgc

SEQ ID NO: 1600454 - DNA, 25 bp, Homo sapien
tgtgaccattaggcccggggctgag

SEQ ID NO: 1600455 - DNA, 25 bp, Homo sapien
cttactgaggtggctctgcttgagg

SEQ ID NO: 1600456 - DNA, 25 bp, Homo sapien
ctggtgaagtaggaagtgggcgagc

SEQ ID NO: 1600457 - DNA, 25 bp, Homo sapien
ttactgaggtggctctgcttgaggc

SEQ ID NO: 1600458 - DNA, 25 bp, Homo sapien
cagcctgcaggccgctggtgaagta

SEQ ID NO: 1600459 - DNA, 25 bp, Homo sapien
tccgttcgccgaagccactgggcgg

SEQ ID NO: 1600460 - DNA, 25 bp, Homo sapien
accgctgctccgttcgccgaagcca

SEQ ID NO: 1600461 - DNA, 25 bp, Homo sapien
tgctccgttcgccgaagccactggg

SEQ ID NO: 1600462 - DNA, 25 bp, Homo sapien
ctcccaccgctgctccgttcgccga

SEQ ID NO: 1600463 - DNA, 25 bp, Homo sapien
ctgggtccgtgaggcccaagggctg

SEQ ID NO: 1600464 - DNA, 25 bp, Homo sapien
cttgtgtcggctgggtccgtgaggc

SEQ ID NO: 1600465 - DNA, 25 bp, Homo sapien
gctggttcccgtgggtgggagaaga

SEQ ID NO: 1600466 - DNA, 25 bp, Homo sapien
ggtgggagaagagccgccgaggtcc

SEQ ID NO: 1600467 - DNA, 25 bp, Homo sapien
ggtagtcgaagctgtagctgtcaga

SEQ ID NO: 1600468 - DNA, 25 bp, Homo sapien
cagacagtcctggttcggggggcag

SEQ ID NO: 1600469 - DNA, 25 bp, Homo sapien
gacttgagctggaaggctttgctgc

SEQ ID NO: 1600470 - DNA, 25 bp, Homo sapien
cgaagctgtagctgtcagacagtcc

SEQ ID NO: 1600471 - DNA, 25 bp, Homo sapien
ctgggcggcggcttctcccggcgcc

SEQ ID NO: 1600472 - DNA, 25 bp, Homo sapien
ggggccctcagctgggcggcggctt

SEQ ID NO: 1600473 - DNA, 25 bp, Homo sapien
ggcggcttctcccggcgcctcccca

SEQ ID NO: 1600474 - DNA, 25 bp, Homo sapien
attcaggggaatccggtagtccttg

SEQ ID NO: 1600475 - DNA, 25 bp, Homo sapien
ctgtgtaggttcaggtagggattca

SEQ ID NO: 1600476 - DNA, 25 bp, Homo sapien
ctggccgggagcaggctgtgtaggt

SEQ ID NO: 1600477 - DNA, 25 bp, Homo sapien
ccgggagcaggctgtgtaggttcag

SEQ ID NO: 1600478 - DNA, 25 bp, Homo sapien
tcggcagaggcccactgtctttctg

SEQ ID NO: 1600479 - DNA, 25 bp, Homo sapien
agggggcgtcggcagaggcccactg

SEQ ID NO: 1600480 - DNA, 25 bp, Homo sapien
cgtcggcagaggcccactgtctttc

SEQ ID NO: 1600481 - DNA, 25 bp, Homo sapien
cagggggcgtcggcagaggcccact

SEQ ID NO: 1600482 - DNA, 25 bp, Homo sapien
agggcctcccggtcacccccagcag

SEQ ID NO: 1600483 - DNA, 25 bp, Homo sapien
gggccaagcacggatggcagcaggg

SEQ ID NO: 1600484 - DNA, 25 bp, Homo sapien
cccagcagggccaagcacggatggc

SEQ ID NO: 1600485 - DNA, 25 bp, Homo sapien
gaggagtgagctgggccgctggggg

SEQ ID NO: 1600486 - DNA, 25 bp, Homo sapien
gtcaagagacaaatccatgctggcc

SEQ ID NO: 1600487 - DNA, 25 bp, Homo sapien
ggccctgagtggagggcacccaact

SEQ ID NO: 1600488 - DNA, 25 bp, Homo sapien
cccaactgatggacaagggcgctgg

SEQ ID NO: 1600489 - DNA, 25 bp, Homo sapien
tcacccgaggccacgtagcagggaa

SEQ ID NO: 1600490 - DNA, 25 bp, Homo sapien
ccccgaggagggggttggctggctg

SEQ ID NO: 1600491 - DNA, 25 bp, Homo sapien
cccgaggagggggttggctggctgg

SEQ ID NO: 1600492 - DNA, 25 bp, Homo sapien
cgaaccatcatgagcaattgccaga

SEQ ID NO: 1600493 - DNA, 25 bp, Homo sapien
ggcatgtctatagagcttccgagca

SEQ ID NO: 1600494 - DNA, 25 bp, Homo sapien
gagtctattcacaaactggtgccca

SEQ ID NO: 1600495 - DNA, 25 bp, Homo sapien
ttttagtcacagaaggccagaccca

SEQ ID NO: 1600496 - DNA, 25 bp, Homo sapien
tgcaacagcgccgtggacagggctg

SEQ ID NO: 1600497 - DNA, 25 bp, Homo sapien
agctgcaacagcgccgtggacaggg

SEQ ID NO: 1600498 - DNA, 25 bp, Homo sapien
tggcccattgagcagcggcatggct

SEQ ID NO: 1600499 - DNA, 25 bp, Homo sapien
ctggcccattgagcagcggcatggc

SEQ ID NO: 1600500 - DNA, 25 bp, Homo sapien
agggacgcggatgggcccaggttgt

SEQ ID NO: 1600501 - DNA, 25 bp, Homo sapien
gcaggatgttgggctcggggaggag

SEQ ID NO: 1600502 - DNA, 25 bp, Homo sapien
atgttgggctcggggaggagtccct

SEQ ID NO: 1600503 - DNA, 25 bp, Homo sapien
gctggagggacgcggatgggcccag

SEQ ID NO: 1600504 - DNA, 25 bp, Homo sapien
cgcagaaggagactcgcaggtggct

SEQ ID NO: 1600505 - DNA, 25 bp, Homo sapien
gccatctcagccgtctcatactcca

SEQ ID NO: 1600506 - DNA, 25 bp, Homo sapien
atgagagcggccagcatactgcggc

SEQ ID NO: 1600507 - DNA, 25 bp, Homo sapien
agggacaggccgtccgcctgctgct

SEQ ID NO: 1600508 - DNA, 25 bp, Homo sapien
gcctcgatctccagacctcgtgatg

SEQ ID NO: 1600509 - DNA, 25 bp, Homo sapien
cctcgatctccagacctcgtgatgc

SEQ ID NO: 1600510 - DNA, 25 bp, Homo sapien
ctgctccccaatgctctccacaggg

SEQ ID NO: 1600511 - DNA, 25 bp, Homo sapien
ccccaatgctctccacagggctcac

SEQ ID NO: 1600512 - DNA, 25 bp, Homo sapien
tccccaatgctctccacagggctca

SEQ ID NO: 1600513 - DNA, 25 bp, Homo sapien
gctccccaatgctctccacagggct

SEQ ID NO: 1600514 - DNA, 25 bp, Homo sapien
gaaagcattgattgcggcctcggcc

SEQ ID NO: 1600515 - DNA, 25 bp, Homo sapien
gcacagagcgtccacatcgttgaag

SEQ ID NO: 1600516 - DNA, 25 bp, Homo sapien
gggcagccgagtccttcttcatgta

SEQ ID NO: 1600517 - DNA, 25 bp, Homo sapien
catccgtccagtgcacgtagagggt

SEQ ID NO: 1600518 - DNA, 25 bp, Homo sapien
gagggcagtgcgaggtcagccgggc

SEQ ID NO: 1600519 - DNA, 25 bp, Homo sapien
ggagggcagtgcgaggtcagccggg

SEQ ID NO: 1600520 - DNA, 25 bp, Homo sapien
agggcagtgcgaggtcagccgggcc

SEQ ID NO: 1600521 - DNA, 25 bp, Homo sapien
aacagtatttgagctcatagtcact

SEQ ID NO: 1600522 - DNA, 25 bp, Homo sapien
atagtcactgagcaggtcatgtact

SEQ ID NO: 1600523 - DNA, 25 bp, Homo sapien
acagtatttgagctcatagtcactg

SEQ ID NO: 1600524 - DNA, 25 bp, Homo sapien
agtcactgagcaggtcatgtacttc

SEQ ID NO: 1600525 - DNA, 25 bp, Homo sapien
tcttctggatctagaggcggcagct

SEQ ID NO: 1600526 - DNA, 25 bp, Homo sapien
tatcttgcggcggttacggaactgg

SEQ ID NO: 1600527 - DNA, 25 bp, Homo sapien
ggaggccccggatcagtatcttgcg

SEQ ID NO: 1600528 - DNA, 25 bp, Homo sapien
caggcgtttccggatctcttctgga

SEQ ID NO: 1600529 - DNA, 25 bp, Homo sapien
ccagcgagccggggcggagcggcat

SEQ ID NO: 1600530 - DNA, 25 bp, Homo sapien
ggaccagcgagccggggcggagcgg

SEQ ID NO: 1600531 - DNA, 25 bp, Homo sapien
tgggaccagcgagccggggcggagc

SEQ ID NO: 1600532 - DNA, 25 bp, Homo sapien
ctgggaccagcgagccggggcggag

SEQ ID NO: 1600533 - DNA, 25 bp, Homo sapien
gagcggcaacgagggcgcgcccgtc

SEQ ID NO: 1600534 - DNA, 25 bp, Homo sapien
cggcaacgagggcgcgcccgtcgat

SEQ ID NO: 1600535 - DNA, 25 bp, Homo sapien
caacgagggcgcgcccgtcgattgg

SEQ ID NO: 1600536 - DNA, 25 bp, Homo sapien
agagcggcaacgagggcgcgcccgt

SEQ ID NO: 1600537 - DNA, 25 bp, Homo sapien
ggctttattggtgcggaatctgagg

SEQ ID NO: 1600538 - DNA, 25 bp, Homo sapien
ccgccaactttgatcccggatccca

SEQ ID NO: 1600539 - DNA, 25 bp, Homo sapien
tgcggaatctgagggcacagccaag

SEQ ID NO: 1600540 - DNA, 25 bp, Homo sapien
ttattggtgcggaatctgagggcac

SEQ ID NO: 1600541 - DNA, 25 bp, Homo sapien
taaggccagtacgatagtcaccacg

SEQ ID NO: 1600542 - DNA, 25 bp, Homo sapien
gcttctgtcggctgcatagacgtga

SEQ ID NO: 1600543 - DNA, 25 bp, Homo sapien
cgttggtgctccctgaagacgtaca

SEQ ID NO: 1600544 - DNA, 25 bp, Homo sapien
tggtaactgccgctccgttggtgct

SEQ ID NO: 1600545 - DNA, 25 bp, Homo sapien
cgaccagggtgtatttgcctcgtga

SEQ ID NO: 1600546 - DNA, 25 bp, Homo sapien
tcaccacgaccagggtgtatttgcc

SEQ ID NO: 1600547 - DNA, 25 bp, Homo sapien
tcaatgtccatcaccacgaccaggg

SEQ ID NO: 1600548 - DNA, 25 bp, Homo sapien
tatttgcctcgtgagctggacgctt

SEQ ID NO: 1600549 - DNA, 25 bp, Homo sapien
ctgcaggacgtgtctcgttttatct

SEQ ID NO: 1600550 - DNA, 25 bp, Homo sapien
tgttacgttgacgaagaacgggatc

SEQ ID NO: 1600551 - DNA, 25 bp, Homo sapien
gagccttccttcaaacaccgcagct

SEQ ID NO: 1600552 - DNA, 25 bp, Homo sapien
tgtggctcggtcaattttgggacca

SEQ ID NO: 1600553 - DNA, 25 bp, Homo sapien
atgtgtgatcagacacccaacacac

SEQ ID NO: 1600554 - DNA, 25 bp, Homo sapien
catgtgtgatcagacacccaacaca

SEQ ID NO: 1600555 - DNA, 25 bp, Homo sapien
caccatgtgtgatcagacacccaac

SEQ ID NO: 1600556 - DNA, 25 bp, Homo sapien
ccatgtgtgatcagacacccaacac

SEQ ID NO: 1600557 - DNA, 25 bp, Homo sapien
aggagcgtctaatctttccagggca

SEQ ID NO: 1600558 - DNA, 25 bp, Homo sapien
cagaggagcgtctaatctttccagg

SEQ ID NO: 1600559 - DNA, 25 bp, Homo sapien
tggtgcagaggagcgtctaatcttt

SEQ ID NO: 1600560 - DNA, 25 bp, Homo sapien
acagtggtgcagaggagcgtctaat

SEQ ID NO: 1600561 - DNA, 25 bp, Homo sapien
agaagaagctgcgtccgtcgtcact

SEQ ID NO: 1600562 - DNA, 25 bp, Homo sapien
gctcgctgaggttcacaatgggtcc

SEQ ID NO: 1600563 - DNA, 25 bp, Homo sapien
tgttcctgtgcaagaactcgccgtc

SEQ ID NO: 1600564 - DNA, 25 bp, Homo sapien
ggactcgcagctggacgctactgtt

SEQ ID NO: 1600565 - DNA, 25 bp, Homo sapien
tttcctctcgggatatccgggccac

SEQ ID NO: 1600566 - DNA, 25 bp, Homo sapien
caacccacgttgcaactgctattgg

SEQ ID NO: 1600567 - DNA, 25 bp, Homo sapien
tgcccaggagcttaatgaacaggac

SEQ ID NO: 1600568 - DNA, 25 bp, Homo sapien
ctgtgtccagcttcgggcactcagg

SEQ ID NO: 1600569 - DNA, 25 bp, Homo sapien
cccccagactgctgaggccgcgccc

SEQ ID NO: 1600570 - DNA, 25 bp, Homo sapien
tttcggctagtctccgccccctctg

SEQ ID NO: 1600571 - DNA, 25 bp, Homo sapien
cccctagggtcacgttgcagacgat

SEQ ID NO: 1600572 - DNA, 25 bp, Homo sapien
gaaaaagcccgtctagggtgcagtc

SEQ ID NO: 1600573 - DNA, 25 bp, Homo sapien
tggctgtggccgttagcgtgtcccc

SEQ ID NO: 1600574 - DNA, 25 bp, Homo sapien
ggttcatgactgtcgcattcagcat

SEQ ID NO: 1600575 - DNA, 25 bp, Homo sapien
aaggtcagggcaccgtctaccctgg

SEQ ID NO: 1600576 - DNA, 25 bp, Homo sapien
agtacaacccccaggactgtgcctt

SEQ ID NO: 1600577 - DNA, 25 bp, Homo sapien
cacagggccatgaaaacggccttct

SEQ ID NO: 1600578 - DNA, 25 bp, Homo sapien
caggatatcttgctgactgggtcac

SEQ ID NO: 1600579 - DNA, 25 bp, Homo sapien
gctgaggtgttcacgaacagtccca

SEQ ID NO: 1600580 - DNA, 25 bp, Homo sapien
tcctccacttggcagcgcagggtga

SEQ ID NO: 1600581 - DNA, 25 bp, Homo sapien
gctgcatgtccagttctgtgcggca

SEQ ID NO: 1600582 - DNA, 25 bp, Homo sapien
ctccgtggtcgtctctgctggccag

SEQ ID NO: 1600583 - DNA, 25 bp, Homo sapien
tacactgagcagaggatccgactgt

SEQ ID NO: 1600584 - DNA, 25 bp, Homo sapien
tacacggtgatgttagaggagcctg

SEQ ID NO: 1600585 - DNA, 25 bp, Homo sapien
tagggacgtctccaaggcgattttc

SEQ ID NO: 1600586 - DNA, 25 bp, Homo sapien
tcacgttgctgagattgaaggctgc

SEQ ID NO: 1600587 - DNA, 25 bp, Homo sapien
ggacaatcagtactgcagttcacaa

SEQ ID NO: 1600588 - DNA, 25 bp, Homo sapien
gacaatcagtactgcagttcacaaa

SEQ ID NO: 1600589 - DNA, 25 bp, Homo sapien
gccctgggccacaacacggatggta

SEQ ID NO: 1600590 - DNA, 25 bp, Homo sapien
agcagaccagcagagtccagcaggc

SEQ ID NO: 1600591 - DNA, 25 bp, Homo sapien
gccacaacacggatggtaccatggt

SEQ ID NO: 1600592 - DNA, 25 bp, Homo sapien
aacacggatggtaccatggtggcca

SEQ ID NO: 1600593 - DNA, 25 bp, Homo sapien
ctgaggtgcccgaagggcaggcagg

SEQ ID NO: 1600594 - DNA, 25 bp, Homo sapien
gagtcctatgagatagcaagtgtga

SEQ ID NO: 1600595 - DNA, 25 bp, Homo sapien
acaaatgtgaaagggtgaaactggc

SEQ ID NO: 1600596 - DNA, 25 bp, Homo sapien
tcccataatggaggactaaggccca

SEQ ID NO: 1600597 - DNA, 25 bp, Homo sapien
taatctatgtggcttgtgaccgccc

SEQ ID NO: 1600598 - DNA, 25 bp, Homo sapien
aatccagccacctctgcgctgtctc

SEQ ID NO: 1600599 - DNA, 25 bp, Homo sapien
gctttcttgaagagggctccaaaaa

SEQ ID NO: 1600600 - DNA, 25 bp, Homo sapien
cagactcccagctaacccagctttc

SEQ ID NO: 1600601 - DNA, 25 bp, Homo sapien
gcgctgtctcatgctagctgctgtc

SEQ ID NO: 1600602 - DNA, 25 bp, Homo sapien
tcaagatcatggttaggctcacggc

SEQ ID NO: 1600603 - DNA, 25 bp, Homo sapien
cctacaaatgttgggtccctcaaga

SEQ ID NO: 1600604 - DNA, 25 bp, Homo sapien
gatttaagggctggattagtgcccc

SEQ ID NO: 1600605 - DNA, 25 bp, Homo sapien
gggtctctagacaggagtaaggcac

SEQ ID NO: 1600606 - DNA, 25 bp, Homo sapien
tgggcgaaaggacgcctctgtctcc

SEQ ID NO: 1600607 - DNA, 25 bp, Homo sapien
tggccttggtacttctcatggactg

SEQ ID NO: 1600608 - DNA, 25 bp, Homo sapien
cagaatgggtatgaggttctcgaag

SEQ ID NO: 1600609 - DNA, 25 bp, Homo sapien
tgaggttctcgaaggttgggcgaaa

SEQ ID NO: 1600610 - DNA, 25 bp, Homo sapien
gtcagggaaagacaaaggaagtctc

SEQ ID NO: 1600611 - DNA, 25 bp, Homo sapien
ctagaaggaaaaaccagggctggtg

SEQ ID NO: 1600612 - DNA, 25 bp, Homo sapien
ctgccctctccacagcaggatagtg

SEQ ID NO: 1600613 - DNA, 25 bp, Homo sapien
tctccacagcaggatagtggggtca

SEQ ID NO: 1600614 - DNA, 25 bp, Homo sapien
gaactgtcatctgaccctgagcaat

SEQ ID NO: 1600615 - DNA, 25 bp, Homo sapien
cctgagcaatgcctatgagctcaag

SEQ ID NO: 1600616 - DNA, 25 bp, Homo sapien
ctcacagggacatttgtcgggccgt

SEQ ID NO: 1600617 - DNA, 25 bp, Homo sapien
ctctcccctcgttccagcaactcag

SEQ ID NO: 1600618 - DNA, 25 bp, Homo sapien
aacaagacaagctcttttcaagagg

SEQ ID NO: 1600619 - DNA, 25 bp, Homo sapien
aaacaagacaagctcttttcaagag

SEQ ID NO: 1600620 - DNA, 25 bp, Homo sapien
acaagacaagctcttttcaagaggc

SEQ ID NO: 1600621 - DNA, 25 bp, Homo sapien
tgggattactgtgaacgttaaacta

SEQ ID NO: 1600622 - DNA, 25 bp, Homo sapien
tagggtaataacatctgccacctgg

SEQ ID NO: 1600623 - DNA, 25 bp, Homo sapien
aagaaatcactctgcaacttcatga

SEQ ID NO: 1600624 - DNA, 25 bp, Homo sapien
ttcatgaaatcgactgcatgggttc

SEQ ID NO: 1600625 - DNA, 25 bp, Homo sapien
tcctgtcctgtcttagacggagtct

SEQ ID NO: 1600626 - DNA, 25 bp, Homo sapien
ctgtcctgtcttagacggagtctcg

SEQ ID NO: 1600627 - DNA, 25 bp, Homo sapien
attgctctagcaaactcccggtggg

SEQ ID NO: 1600628 - DNA, 25 bp, Homo sapien
ctaattgctctagcaaactcccggt

SEQ ID NO: 1600629 - DNA, 25 bp, Homo sapien
ctggagtcacagtgcgtcagcagct

SEQ ID NO: 1600630 - DNA, 25 bp, Homo sapien
gaaggaccagacatctgacgcatag

SEQ ID NO: 1600631 - DNA, 25 bp, Homo sapien
tagaacttatactccttcaggcact

SEQ ID NO: 1600632 - DNA, 25 bp, Homo sapien
gctcatacagggtcaccccgaagga

SEQ ID NO: 1600633 - DNA, 25 bp, Homo sapien
tgatatgctcattggctaggccgct

SEQ ID NO: 1600634 - DNA, 25 bp, Homo sapien
gctcattggctaggccgggttaacc

SEQ ID NO: 1600635 - DNA, 25 bp, Homo sapien
tcagttgggacccacccttaagagc

SEQ ID NO: 1600636 - DNA, 25 bp, Homo sapien
cctgagactgaaggaccctctgggc

SEQ ID NO: 1600637 - DNA, 25 bp, Homo sapien
tcgggcacggccttggctaggccaa

SEQ ID NO: 1600638 - DNA, 25 bp, Homo sapien
tagtgctgcgcgtgcagataggcca

SEQ ID NO: 1600639 - DNA, 25 bp, Homo sapien
ggtagtactcgtggccttcgggcac

SEQ ID NO: 1600640 - DNA, 25 bp, Homo sapien
tgaccagcctgtcgttgtccagcag

SEQ ID NO: 1600641 - DNA, 25 bp, Homo sapien
ccgagccggctgtgcgtggtccctt

SEQ ID NO: 1600642 - DNA, 25 bp, Homo sapien
tggagagggccggatggcacgtggc

SEQ ID NO: 1600643 - DNA, 25 bp, Homo sapien
gccaagcaagccaaacagttcggag

SEQ ID NO: 1600644 - DNA, 25 bp, Homo sapien
gagcagactgcaccggatcgctcag

SEQ ID NO: 1600645 - DNA, 25 bp, Homo sapien
cagctgggccagcccgatgctgtgc

SEQ ID NO: 1600646 - DNA, 25 bp, Homo sapien
gccggggcaggtagtctcggaggct

SEQ ID NO: 1600647 - DNA, 25 bp, Homo sapien
ggctgcccaggggcacgtactccat

SEQ ID NO: 1600648 - DNA, 25 bp, Homo sapien
tgggccagcccgatgctgtgccggg

SEQ ID NO: 1600649 - DNA, 25 bp, Homo sapien
gggaaggccaagacccgcgcacact

SEQ ID NO: 1600650 - DNA, 25 bp, Homo sapien
cagaaccccattctcacttgaggga

SEQ ID NO: 1600651 - DNA, 25 bp, Homo sapien
ggtagcaccccccagatgggaagga

SEQ ID NO: 1600652 - DNA, 25 bp, Homo sapien
cagatgccaagaaccgcgtactgca

SEQ ID NO: 1600653 - DNA, 25 bp, Homo sapien
cttggtcctcgcagcagcccttgta

SEQ ID NO: 1600654 - DNA, 25 bp, Homo sapien
ttggtcctcgcagcagcccttgtac

SEQ ID NO: 1600655 - DNA, 25 bp, Homo sapien
cagtgccgtcgttggtcggatcgta

SEQ ID NO: 1600656 - DNA, 25 bp, Homo sapien
tacaagctgaccttgccgaagtgac

SEQ ID NO: 1600657 - DNA, 25 bp, Homo sapien
tagagcgtgcgcagaatgtcaatct

SEQ ID NO: 1600658 - DNA, 25 bp, Homo sapien
cagtctgccttgagggctttcaccg

SEQ ID NO: 1600659 - DNA, 25 bp, Homo sapien
atagcgcttgtggaaaaccgtaggg

SEQ ID NO: 1600660 - DNA, 25 bp, Homo sapien
ctcgcccagatctcggatctttttc

SEQ ID NO: 1600661 - DNA, 25 bp, Homo sapien
ggttcacagtcaagacgtcagcaag

SEQ ID NO: 1600662 - DNA, 25 bp, Homo sapien
tccgacgccggtgagtccgggttca

SEQ ID NO: 1600663 - DNA, 25 bp, Homo sapien
cacttgggagtcacaaagccagcca

SEQ ID NO: 1600664 - DNA, 25 bp, Homo sapien
aagagttgcggtgggtaaaggcctg

SEQ ID NO: 1600665 - DNA, 25 bp, Homo sapien
aggcccacacttgggagtcacaaag

SEQ ID NO: 1600666 - DNA, 25 bp, Homo sapien
gagttgcggtgggtaaaggcctgac

SEQ ID NO: 1600667 - DNA, 25 bp, Homo sapien
gctgcctctggtagaaatgctcctt

SEQ ID NO: 1600668 - DNA, 25 bp, Homo sapien
caggatggtgcggaatgatggcctc

SEQ ID NO: 1600669 - DNA, 25 bp, Homo sapien
ggctgcagccgggtgaggtcacgca

SEQ ID NO: 1600670 - DNA, 25 bp, Homo sapien
ggcctctgggttggctcataggtca

SEQ ID NO: 1600671 - DNA, 25 bp, Homo sapien
aagggatgcagctttgagctctgat

SEQ ID NO: 1600672 - DNA, 25 bp, Homo sapien
gagggcccaagggtctcctagacat

SEQ ID NO: 1600673 - DNA, 25 bp, Homo sapien
gacttgaagtcacgaggccagaagg

SEQ ID NO: 1600674 - DNA, 25 bp, Homo sapien
caggcacaagtgacttccacaagga

SEQ ID NO: 1600675 - DNA, 25 bp, Homo sapien
ccacttgtccatggcggtgcttagg

SEQ ID NO: 1600676 - DNA, 25 bp, Homo sapien
gggcctctccgtcaaagcagatctc

SEQ ID NO: 1600677 - DNA, 25 bp, Homo sapien
ctcggagggactgcggctctgcaga

SEQ ID NO: 1600678 - DNA, 25 bp, Homo sapien
cagaggggcctctccgtcaaagcag

SEQ ID NO: 1600679 - DNA, 25 bp, Homo sapien
ctggtaggcattcgggggccagcca

SEQ ID NO: 1600680 - DNA, 25 bp, Homo sapien
ccagccaggggatcctctccacccg

SEQ ID NO: 1600681 - DNA, 25 bp, Homo sapien
agccaggggatcctctccacccgct

SEQ ID NO: 1600682 - DNA, 25 bp, Homo sapien
tggtaggcattcgggggccagccag

SEQ ID NO: 1600683 - DNA, 25 bp, Homo sapien
cagcaggatgttccggccacacaca

SEQ ID NO: 1600684 - DNA, 25 bp, Homo sapien
cgggccagcaggatgttccggccac

SEQ ID NO: 1600685 - DNA, 25 bp, Homo sapien
caggcccacgccaggatcactcagc

SEQ ID NO: 1600686 - DNA, 25 bp, Homo sapien
cacattaccatgaaccaggttcttg

SEQ ID NO: 1600687 - DNA, 25 bp, Homo sapien
tcaccacagcctagctgattcttaa

SEQ ID NO: 1600688 - DNA, 25 bp, Homo sapien
agtacctcggcctacaggtgcaagt

SEQ ID NO: 1600689 - DNA, 25 bp, Homo sapien
tacaggtgcaagttaccacattggc

SEQ ID NO: 1600690 - DNA, 25 bp, Homo sapien
gctgattcttaaatttttggtggag

SEQ ID NO: 1600691 - DNA, 25 bp, Homo sapien
gccacacatccaggggtccgtgctc

SEQ ID NO: 1600692 - DNA, 25 bp, Homo sapien
tccaggggtccgtgctccacgtact

SEQ ID NO: 1600693 - DNA, 25 bp, Homo sapien
acacatccaggggtccgtgctccac

SEQ ID NO: 1600694 - DNA, 25 bp, Homo sapien
acatccaggggtccgtgctccacgt

SEQ ID NO: 1600695 - DNA, 25 bp, Homo sapien
cacctagcctatacaaggagttttg

SEQ ID NO: 1600696 - DNA, 25 bp, Homo sapien
cacacctagcctatacaaggagttt

SEQ ID NO: 1600697 - DNA, 25 bp, Homo sapien
cctagcctatacaaggagttttgag

SEQ ID NO: 1600698 - DNA, 25 bp, Homo sapien
gcctatacaaggagttttgagctac

SEQ ID NO: 1600699 - DNA, 25 bp, Homo sapien
gggatgggtatggcgggacccactc

SEQ ID NO: 1600700 - DNA, 25 bp, Homo sapien
ggtataagtcaggggtggcctgcca

SEQ ID NO: 1600701 - DNA, 25 bp, Homo sapien
caggggtggcctgccaaagggggat

SEQ ID NO: 1600702 - DNA, 25 bp, Homo sapien
ataagtcaggggtggcctgccaaag

SEQ ID NO: 1600703 - DNA, 25 bp, Homo sapien
cgccatgcacgaaggccaggtgcgt

SEQ ID NO: 1600704 - DNA, 25 bp, Homo sapien
tcatgaggctggctgtctcgtagaa

SEQ ID NO: 1600705 - DNA, 25 bp, Homo sapien
ggtgcgtgtgggagacctggctcat

SEQ ID NO: 1600706 - DNA, 25 bp, Homo sapien
cacagacgccatgcacgaaggccag

SEQ ID NO: 1600707 - DNA, 25 bp, Homo sapien
ggtgactagggtccagcactttgag

SEQ ID NO: 1600708 - DNA, 25 bp, Homo sapien
tttgagcaccactcgtagctcctgc

SEQ ID NO: 1600709 - DNA, 25 bp, Homo sapien
gcgatgtcatggtgactagggtcca

SEQ ID NO: 1600710 - DNA, 25 bp, Homo sapien
tcgcaggcggccctcatacacgttg

SEQ ID NO: 1600711 - DNA, 25 bp, Homo sapien
tccttctggtcaacccggtggaagc

SEQ ID NO: 1600712 - DNA, 25 bp, Homo sapien
tctccttctggtcaacccggtggaa

SEQ ID NO: 1600713 - DNA, 25 bp, Homo sapien
ccttctggtcaacccggtggaagct

SEQ ID NO: 1600714 - DNA, 25 bp, Homo sapien
cttctggtcaacccggtggaagctg

SEQ ID NO: 1600715 - DNA, 25 bp, Homo sapien
gggaactttcggagccgcaagctct

SEQ ID NO: 1600716 - DNA, 25 bp, Homo sapien
ggcaacagcgacgcagagagaagca

SEQ ID NO: 1600717 - DNA, 25 bp, Homo sapien
ctccagcacgaaggccccgtcctgc

SEQ ID NO: 1600718 - DNA, 25 bp, Homo sapien
gcaagctctgcatgccgtctggtgc

SEQ ID NO: 1600719 - DNA, 25 bp, Homo sapien
ccactgtgaggatcaggcggtaggg

SEQ ID NO: 1600720 - DNA, 25 bp, Homo sapien
aggtacaggccgtcctcgggccgca

SEQ ID NO: 1600721 - DNA, 25 bp, Homo sapien
tggctggtgctccagtgaatgaggt

SEQ ID NO: 1600722 - DNA, 25 bp, Homo sapien
ggccactgtgaggatcaggcggtag

SEQ ID NO: 1600723 - DNA, 25 bp, Homo sapien
agcctactcctactcttgtacttga

SEQ ID NO: 1600724 - DNA, 25 bp, Homo sapien
ctcttgtacttgacgccagacgggc

SEQ ID NO: 1600725 - DNA, 25 bp, Homo sapien
gggccctgacaaggtgacacacact

SEQ ID NO: 1600726 - DNA, 25 bp, Homo sapien
ccagacgggccctgacaaggtgaca

SEQ ID NO: 1600727 - DNA, 25 bp, Homo sapien
caggtagtggctggagtcggccgtc

SEQ ID NO: 1600728 - DNA, 25 bp, Homo sapien
gcggaaatagccgtccaccagcgac

SEQ ID NO: 1600729 - DNA, 25 bp, Homo sapien
agcgacacgaaggacagcgccgcag

SEQ ID NO: 1600730 - DNA, 25 bp, Homo sapien
tcccggatgctcatcaccagccgtg

SEQ ID NO: 1600731 - DNA, 25 bp, Homo sapien
caggcacttgttgtcctgccggtgg

SEQ ID NO: 1600732 - DNA, 25 bp, Homo sapien
ggtgatgtcccggaagtcacagaag

SEQ ID NO: 1600733 - DNA, 25 bp, Homo sapien
ccggtggatgctgacacagtgctct

SEQ ID NO: 1600734 - DNA, 25 bp, Homo sapien
ccacgtgggtgatgtcccggaagtc

SEQ ID NO: 1600735 - DNA, 25 bp, Homo sapien
ggccgactgccttgtgagccttggc

SEQ ID NO: 1600736 - DNA, 25 bp, Homo sapien
tgccggctggccgactgccttgtga

SEQ ID NO: 1600737 - DNA, 25 bp, Homo sapien
gctggccgactgccttgtgagcctt

SEQ ID NO: 1600738 - DNA, 25 bp, Homo sapien
tggccgactgccttgtgagccttgg

SEQ ID NO: 1600739 - DNA, 25 bp, Homo sapien
cttgttcacctcctcctctactggc

SEQ ID NO: 1600740 - DNA, 25 bp, Homo sapien
tccttgttcacctcctcctctactg

SEQ ID NO: 1600741 - DNA, 25 bp, Homo sapien
cctccttgttcacctcctcctctac

SEQ ID NO: 1600742 - DNA, 25 bp, Homo sapien
tgttcacctcctcctctactggcca

SEQ ID NO: 1600743 - DNA, 25 bp, Homo sapien
caggaacctgcggaagacgttccga

SEQ ID NO: 1600744 - DNA, 25 bp, Homo sapien
tcagggcgctgtgctgccggatatg

SEQ ID NO: 1600745 - DNA, 25 bp, Homo sapien
tgtggctaggtatttgaccatgacc

SEQ ID NO: 1600746 - DNA, 25 bp, Homo sapien
ccggctggaagtcccgcaggaacct

SEQ ID NO: 1600747 - DNA, 25 bp, Homo sapien
tgatgccacgtcattcacaaactca

SEQ ID NO: 1600748 - DNA, 25 bp, Homo sapien
gcggagagcgaggtgacagaggtgc

SEQ ID NO: 1600749 - DNA, 25 bp, Homo sapien
taaagtggtggatctcctcctcggt

SEQ ID NO: 1600750 - DNA, 25 bp, Homo sapien
ctcggtcgacagctcccacagtgat

SEQ ID NO: 1600751 - DNA, 25 bp, Homo sapien
ccaggagttgcatcccctgtgctgt

SEQ ID NO: 1600752 - DNA, 25 bp, Homo sapien
ggttcccgaggattcatgccatgcc

SEQ ID NO: 1600753 - DNA, 25 bp, Homo sapien
caacggtacacagccggttcccgag

SEQ ID NO: 1600754 - DNA, 25 bp, Homo sapien
catgccatgccagttccggaaataa

SEQ ID NO: 1600755 - DNA, 25 bp, Homo sapien
tgcggaaatatagcatcaggcttgc

SEQ ID NO: 1600756 - DNA, 25 bp, Homo sapien
cttatgcggaaatatagcatcaggc

SEQ ID NO: 1600757 - DNA, 25 bp, Homo sapien
tatgcggaaatatagcatcaggctt

SEQ ID NO: 1600758 - DNA, 25 bp, Homo sapien
gcggaaatatagcatcaggcttgca

SEQ ID NO: 1600759 - DNA, 25 bp, Homo sapien
agattgaagcaaggaggagtgatac

SEQ ID NO: 1600760 - DNA, 25 bp, Homo sapien
tcaggagtcacgtcatttgctaccg

SEQ ID NO: 1600761 - DNA, 25 bp, Homo sapien
gtcacgtcatttgctaccgtcagcc

SEQ ID NO: 1600762 - DNA, 25 bp, Homo sapien
ctggatcaggtgagaaacgaggtca

SEQ ID NO: 1600763 - DNA, 25 bp, Homo sapien
cgaggtcaggagtcacgtcatttgc

SEQ ID NO: 1600764 - DNA, 25 bp, Homo sapien
ggacagtgcgtatgttgcccatgct

SEQ ID NO: 1600765 - DNA, 25 bp, Homo sapien
tcccttgcagctaggatggagccaa

SEQ ID NO: 1600766 - DNA, 25 bp, Homo sapien
agcttcagtctcacgttgcccctgg

SEQ ID NO: 1600767 - DNA, 25 bp, Homo sapien
tggccaaagggctgggtacatttcc

SEQ ID NO: 1600768 - DNA, 25 bp, Homo sapien
tgacccacataactctacaaactgc

SEQ ID NO: 1600769 - DNA, 25 bp, Homo sapien
aattgtctggcgtctccctgaactc

SEQ ID NO: 1600770 - DNA, 25 bp, Homo sapien
tcctgcagcaaaactaatcctagcc

SEQ ID NO: 1600771 - DNA, 25 bp, Homo sapien
tgtgctcggccgattttaggtaaac

SEQ ID NO: 1600772 - DNA, 25 bp, Homo sapien
ctcactgaaagtgacccagggctcc

SEQ ID NO: 1600773 - DNA, 25 bp, Homo sapien
gcaatgtggatgcagacttcctcag

SEQ ID NO: 1600774 - DNA, 25 bp, Homo sapien
caactttatgtgcaatgtggatgca

SEQ ID NO: 1600775 - DNA, 25 bp, Homo sapien
tcagcgatgactcactgaaagtgac

SEQ ID NO: 1600776 - DNA, 25 bp, Homo sapien
ctccatccccaacgggcttactgcc

SEQ ID NO: 1600777 - DNA, 25 bp, Homo sapien
ggctccatccccaacgggcttactg

SEQ ID NO: 1600778 - DNA, 25 bp, Homo sapien
atccccaacgggcttactgcccctg

SEQ ID NO: 1600779 - DNA, 25 bp, Homo sapien
ctgggctccatccccaacgggctta

SEQ ID NO: 1600780 - DNA, 25 bp, Homo sapien
agcaagccacttagcaattctgggc

SEQ ID NO: 1600781 - DNA, 25 bp, Homo sapien
tcctcagggtgttgccatcaaaaga

SEQ ID NO: 1600782 - DNA, 25 bp, Homo sapien
tagttccgcatattacacattcagc

SEQ ID NO: 1600783 - DNA, 25 bp, Homo sapien
tggagctccctgtgtcaactcaagc

SEQ ID NO: 1600784 - DNA, 25 bp, Homo sapien
ccgctcccgcgggtagctactgctt

SEQ ID NO: 1600785 - DNA, 25 bp, Homo sapien
gtgcagcctgtcaagcgcagccagt

SEQ ID NO: 1600786 - DNA, 25 bp, Homo sapien
agtccccgcggcttcttcctgagga

SEQ ID NO: 1600787 - DNA, 25 bp, Homo sapien
gtcccgaggcaccaggtgctcccat

SEQ ID NO: 1600788 - DNA, 25 bp, Homo sapien
aaagtccgtgctctggtggcaccca

SEQ ID NO: 1600789 - DNA, 25 bp, Homo sapien
ttctggcactgtgtatgttgcaaga

SEQ ID NO: 1600790 - DNA, 25 bp, Homo sapien
cagtacatgggaggtgacaatacac

SEQ ID NO: 1600791 - DNA, 25 bp, Homo sapien
gcttgggcacaacagcattccaggg

SEQ ID NO: 1600792 - DNA, 25 bp, Homo sapien
aagacacagacagcagacgaacagt

SEQ ID NO: 1600793 - DNA, 25 bp, Homo sapien
agagacttgaatgggcgctggagag

SEQ ID NO: 1600794 - DNA, 25 bp, Homo sapien
cgagcagcgcaagtagaggaagtca

SEQ ID NO: 1600795 - DNA, 25 bp, Homo sapien
cccaactacctggtagaccagcctg

SEQ ID NO: 1600796 - DNA, 25 bp, Homo sapien
cagaggccagagtcaatgcagcgct

SEQ ID NO: 1600797 - DNA, 25 bp, Homo sapien
tctcatcgcccgtcttgggaacagc

SEQ ID NO: 1600798 - DNA, 25 bp, Homo sapien
caatgcagcgctgcatgtggtactt

SEQ ID NO: 1600799 - DNA, 25 bp, Homo sapien
agcttccagtaatgggtccccagga

SEQ ID NO: 1600800 - DNA, 25 bp, Homo sapien
agcatttatctgctggatactggga

SEQ ID NO: 1600801 - DNA, 25 bp, Homo sapien
aaactgaggctggactcagtcacag

SEQ ID NO: 1600802 - DNA, 25 bp, Homo sapien
gtgtgtgccaaggtgacacgacccc

SEQ ID NO: 1600803 - DNA, 25 bp, Homo sapien
gaaggacatgcgctcaaagctcagc

SEQ ID NO: 1600804 - DNA, 25 bp, Homo sapien
gtccatcttgctgatggcgtcctgc

SEQ ID NO: 1600805 - DNA, 25 bp, Homo sapien
ggtccatcttgctgatggcgtcctg

SEQ ID NO: 1600806 - DNA, 25 bp, Homo sapien
gggtccatcttgctgatggcgtcct

SEQ ID NO: 1600807 - DNA, 25 bp, Homo sapien
ccccgcacacgctccttgaaggctt

SEQ ID NO: 1600808 - DNA, 25 bp, Homo sapien
tcgtactccttcatggccttctcga

SEQ ID NO: 1600809 - DNA, 25 bp, Homo sapien
ttctcgatgcgcagcttggcacggc

SEQ ID NO: 1600810 - DNA, 25 bp, Homo sapien
cctccatgtactggcgatcggctgt

SEQ ID NO: 1600811 - DNA, 25 bp, Homo sapien
catgacgattgtctggtgggccacc

SEQ ID NO: 1600812 - DNA, 25 bp, Homo sapien
gctccaggataaattgcatgacgat

SEQ ID NO: 1600813 - DNA, 25 bp, Homo sapien
gataaattgcatgacgattgtctgg

SEQ ID NO: 1600814 - DNA, 25 bp, Homo sapien
tccacctttaggctcttggccagct

SEQ ID NO: 1600815 - DNA, 25 bp, Homo sapien
ggtcaatgcaccaaatgaccaggta

SEQ ID NO: 1600816 - DNA, 25 bp, Homo sapien
ctccacctctaggtcaatgcaccaa

SEQ ID NO: 1600817 - DNA, 25 bp, Homo sapien
gcaaagggcctgcctcgaccttgcc

SEQ ID NO: 1600818 - DNA, 25 bp, Homo sapien
caaagggcctgcctcgaccttgccc

SEQ ID NO: 1600819 - DNA, 25 bp, Homo sapien
aaagtgcttgatctgtttctcgtat

SEQ ID NO: 1600820 - DNA, 25 bp, Homo sapien
agtgcttgatctgtttctcgtattt

SEQ ID NO: 1600821 - DNA, 25 bp, Homo sapien
aagtgcttgatctgtttctcgtatt

SEQ ID NO: 1600822 - DNA, 25 bp, Homo sapien
tgcttgatctgtttctcgtattttt

SEQ ID NO: 1600823 - DNA, 25 bp, Homo sapien
tcttctcgggcttggtatttaccat

SEQ ID NO: 1600824 - DNA, 25 bp, Homo sapien
gtcttctcgggcttggtatttacca

SEQ ID NO: 1600825 - DNA, 25 bp, Homo sapien
tctcgggcttggtatttaccatgct

SEQ ID NO: 1600826 - DNA, 25 bp, Homo sapien
cttctcgggcttggtatttaccatg

SEQ ID NO: 1600827 - DNA, 25 bp, Homo sapien
ggcgggccgtggtcgcagcgcccat

SEQ ID NO: 1600828 - DNA, 25 bp, Homo sapien
catcccatccacggcggaggtggtg

SEQ ID NO: 1600829 - DNA, 25 bp, Homo sapien
gagcatcaaggtggcgggagcgtgg

SEQ ID NO: 1600830 - DNA, 25 bp, Homo sapien
tggtgacgaagccatgagcatcaag

SEQ ID NO: 1600831 - DNA, 25 bp, Homo sapien
ccacgtggcccccgtccatccctca

SEQ ID NO: 1600832 - DNA, 25 bp, Homo sapien
ggccaccttgcgcttgcactcgcgg

SEQ ID NO: 1600833 - DNA, 25 bp, Homo sapien
tcggccaccttgcgcttgcactcgc

SEQ ID NO: 1600834 - DNA, 25 bp, Homo sapien
caccttgcgcttgcactcgcggcag

SEQ ID NO: 1600835 - DNA, 25 bp, Homo sapien
tgcgcttgcactcgcggcagcccct

SEQ ID NO: 1600836 - DNA, 25 bp, Homo sapien
tgaggcaccactgatccctaaagga

SEQ ID NO: 1600837 - DNA, 25 bp, Homo sapien
catgtaccggctgggtatcccgggc

SEQ ID NO: 1600838 - DNA, 25 bp, Homo sapien
gacctcctgtgaccatctgacgatg

SEQ ID NO: 1600839 - DNA, 25 bp, Homo sapien
tcttggcctctgcatgtgcggttcc

SEQ ID NO: 1600840 - DNA, 25 bp, Homo sapien
cctcaatgtggtcccacacgctgta

SEQ ID NO: 1600841 - DNA, 25 bp, Homo sapien
catcatcagacacctcaatgtggtc

SEQ ID NO: 1600842 - DNA, 25 bp, Homo sapien
ggtgcgtctcgtcttcatcatcaga

SEQ ID NO: 1600843 - DNA, 25 bp, Homo sapien
ctgatgccgccagcggaagagactg

SEQ ID NO: 1600844 - DNA, 25 bp, Homo sapien
gctccggctcgggtggcggcgacgg

SEQ ID NO: 1600845 - DNA, 25 bp, Homo sapien
tccgcttccgccgagcgcgggaaac

SEQ ID NO: 1600846 - DNA, 25 bp, Homo sapien
ccttccgcttccgccgagcgcggga

SEQ ID NO: 1600847 - DNA, 25 bp, Homo sapien
gtggagactaggagcgcggagcccc

SEQ ID NO: 1600848 - DNA, 25 bp, Homo sapien
gcatttcagacaaggatcggtggct

SEQ ID NO: 1600849 - DNA, 25 bp, Homo sapien
ggtgccaaggtaaagtaagccagcc

SEQ ID NO: 1600850 - DNA, 25 bp, Homo sapien
taaaagcccaacagctcggaggaga

SEQ ID NO: 1600851 - DNA, 25 bp, Homo sapien
gtttaagacactgacccatggccgc

SEQ ID NO: 1600852 - DNA, 25 bp, Homo sapien
ttggcttggtcttgtaggaggccct

SEQ ID NO: 1600853 - DNA, 25 bp, Homo sapien
gcagatgcgtttggcttggtcttgt

SEQ ID NO: 1600854 - DNA, 25 bp, Homo sapien
tggccctgccgacatggccaccgca

SEQ ID NO: 1600855 - DNA, 25 bp, Homo sapien
cagtcccaacggcgcgctaggttgg

SEQ ID NO: 1600856 - DNA, 25 bp, Homo sapien
tgtatagagcggtgggccggcagct

SEQ ID NO: 1600857 - DNA, 25 bp, Homo sapien
gcagaagcgctttagaagaggcagc

SEQ ID NO: 1600858 - DNA, 25 bp, Homo sapien
gcgctccgcggctacctgggacctt

SEQ ID NO: 1600859 - DNA, 25 bp, Homo sapien
tcagtttacctctggcagaagcgct

SEQ ID NO: 1600860 - DNA, 25 bp, Homo sapien
tccgacgcacagacaggagatccca

SEQ ID NO: 1600861 - DNA, 25 bp, Homo sapien
catcactatcctccgacgcacagac

SEQ ID NO: 1600862 - DNA, 25 bp, Homo sapien
tcctccgacgcacagacaggagatc

SEQ ID NO: 1600863 - DNA, 25 bp, Homo sapien
actatcctccgacgcacagacagga

SEQ ID NO: 1600864 - DNA, 25 bp, Homo sapien
cctggagacctctgatagggcatgc

SEQ ID NO: 1600865 - DNA, 25 bp, Homo sapien
tgcaaacctgaagctgcggtcacgc

SEQ ID NO: 1600866 - DNA, 25 bp, Homo sapien
gggtctagggttcgtggctcactct

SEQ ID NO: 1600867 - DNA, 25 bp, Homo sapien
caaaatcatccctgaccgccagggt

SEQ ID NO: 1600868 - DNA, 25 bp, Homo sapien
gtgtatgccaccatagcccagctaa

SEQ ID NO: 1600869 - DNA, 25 bp, Homo sapien
aggtgtatgccaccatagcccagct

SEQ ID NO: 1600870 - DNA, 25 bp, Homo sapien
ggtgtatgccaccatagcccagcta

SEQ ID NO: 1600871 - DNA, 25 bp, Homo sapien
gccacctcaccagacctgtatctct

SEQ ID NO: 1600872 - DNA, 25 bp, Homo sapien
taaaaacttgcccttccctggctga

SEQ ID NO: 1600873 - DNA, 25 bp, Homo sapien
tacaaactgtaccatagtcctggga

SEQ ID NO: 1600874 - DNA, 25 bp, Homo sapien
ggactcaccgctgttgttttatggg

SEQ ID NO: 1600875 - DNA, 25 bp, Homo sapien
gacgatcagtcattcggtccgttga

SEQ ID NO: 1600876 - DNA, 25 bp, Homo sapien
agcgtcgttcctagtctcttcggca

SEQ ID NO: 1600877 - DNA, 25 bp, Homo sapien
tgagaatatcctgacaccagtcgcc

SEQ ID NO: 1600878 - DNA, 25 bp, Homo sapien
cacaacgtcttgagagtggccccag

SEQ ID NO: 1600879 - DNA, 25 bp, Homo sapien
gcgggctacagcagaatagggaccc

SEQ ID NO: 1600880 - DNA, 25 bp, Homo sapien
taccagccctaagtcaaagaggagt

SEQ ID NO: 1600881 - DNA, 25 bp, Homo sapien
tgaaactgaaggacaactgtgtggc

SEQ ID NO: 1600882 - DNA, 25 bp, Homo sapien
gatgtgactaggaattagctgcttg

SEQ ID NO: 1600883 - DNA, 25 bp, Homo sapien
aagatgccctacatataaaaatgcg

SEQ ID NO: 1600884 - DNA, 25 bp, Homo sapien
ccaggcctattacccggccagaggg

SEQ ID NO: 1600885 - DNA, 25 bp, Homo sapien
gggcacatgattcccgctttggact

SEQ ID NO: 1600886 - DNA, 25 bp, Homo sapien
catccggtggcttctatgtacaggc

SEQ ID NO: 1600887 - DNA, 25 bp, Homo sapien
cttcccggaagatgggttatttgca

SEQ ID NO: 1600888 - DNA, 25 bp, Homo sapien
gcccgatgtcattcgggtcacctcg

SEQ ID NO: 1600889 - DNA, 25 bp, Homo sapien
tctgtatctgggtcgtaacactcca

SEQ ID NO: 1600890 - DNA, 25 bp, Homo sapien
tcaacaggtacagttctgctggtca

SEQ ID NO: 1600891 - DNA, 25 bp, Homo sapien
tccaggaacgtgtgaccatcatagc

SEQ ID NO: 1600892 - DNA, 25 bp, Homo sapien
gggctacgaaagtccacgtctctgt

SEQ ID NO: 1600893 - DNA, 25 bp, Homo sapien
tgtttccacatcgtagcgctccacg

SEQ ID NO: 1600894 - DNA, 25 bp, Homo sapien
gacgtagattctcccctggtggaca

SEQ ID NO: 1600895 - DNA, 25 bp, Homo sapien
gatacagttgtgcaggacgcagacg

SEQ ID NO: 1600896 - DNA, 25 bp, Homo sapien
aagggcaccatgcagagaaggtgac

SEQ ID NO: 1600897 - DNA, 25 bp, Homo sapien
taaagggcaccatgcagagaaggtg

SEQ ID NO: 1600898 - DNA, 25 bp, Homo sapien
aaagggcaccatgcagagaaggtga

SEQ ID NO: 1600899 - DNA, 25 bp, Homo sapien
tgttcattgctgtgatcattcgcca

SEQ ID NO: 1600900 - DNA, 25 bp, Homo sapien
ccccacggcataaaggagacgattg

SEQ ID NO: 1600901 - DNA, 25 bp, Homo sapien
cagctgaattaaggcggtttgtccc

SEQ ID NO: 1600902 - DNA, 25 bp, Homo sapien
tcctctctgggtagtaacactcagc

SEQ ID NO: 1600903 - DNA, 25 bp, Homo sapien
tgtagtcccagctaccccagggtct

SEQ ID NO: 1600904 - DNA, 25 bp, Homo sapien
cttgtagtcccagctaccccagggt

SEQ ID NO: 1600905 - DNA, 25 bp, Homo sapien
gtagtcccagctaccccagggtctg

SEQ ID NO: 1600906 - DNA, 25 bp, Homo sapien
agtcccagctaccccagggtctgag

SEQ ID NO: 1600907 - DNA, 25 bp, Homo sapien
ctccgcacaaaggaaccatatgggt

SEQ ID NO: 1600908 - DNA, 25 bp, Homo sapien
gaactctccaaggagcttagcttca

SEQ ID NO: 1600909 - DNA, 25 bp, Homo sapien
tgatggaacattttccaactccgca

SEQ ID NO: 1600910 - DNA, 25 bp, Homo sapien
caaaggtcactgactagaactctcc

SEQ ID NO: 1600911 - DNA, 25 bp, Homo sapien
tgagctcctcgaagatcttgaccag

SEQ ID NO: 1600912 - DNA, 25 bp, Homo sapien
catctgcaggaagttcggcgtcaac

SEQ ID NO: 1600913 - DNA, 25 bp, Homo sapien
cacactgttgtggtggatgcagccg

SEQ ID NO: 1600914 - DNA, 25 bp, Homo sapien
tcgtcccggctgatgagggtcacca

SEQ ID NO: 1600915 - DNA, 25 bp, Homo sapien
caccgttcatgacgtggaggacaca

SEQ ID NO: 1600916 - DNA, 25 bp, Homo sapien
aatgcatgtagatgtactcccgggc

SEQ ID NO: 1600917 - DNA, 25 bp, Homo sapien
tcaatgaggcgctccatgaccttgg

SEQ ID NO: 1600918 - DNA, 25 bp, Homo sapien
tctgctcagcgaagttggcgatgcc

SEQ ID NO: 1600919 - DNA, 25 bp, Homo sapien
cccctgccccctcagggcactgtga

SEQ ID NO: 1600920 - DNA, 25 bp, Homo sapien
gtcccctgccccctcagggcactgt

SEQ ID NO: 1600921 - DNA, 25 bp, Homo sapien
gcgtcccctgccccctcagggcact

SEQ ID NO: 1600922 - DNA, 25 bp, Homo sapien
caccgcgtcccctgccccctcaggg

SEQ ID NO: 1600923 - DNA, 25 bp, Homo sapien
ccccagccccgctaggcctgggatc

SEQ ID NO: 1600924 - DNA, 25 bp, Homo sapien
tgcaggggcaggaatcggcagcagg

SEQ ID NO: 1600925 - DNA, 25 bp, Homo sapien
ggcaggaatcggcagcaggccccag

SEQ ID NO: 1600926 - DNA, 25 bp, Homo sapien
ccccgctaggcctgggatctggctg

SEQ ID NO: 1600927 - DNA, 25 bp, Homo sapien
gttccagaagataagcaacaccacc

SEQ ID NO: 1600928 - DNA, 25 bp, Homo sapien
acaccaccacctctggcactcaggg

SEQ ID NO: 1600929 - DNA, 25 bp, Homo sapien
accaccacctctggcactcagggac

SEQ ID NO: 1600930 - DNA, 25 bp, Homo sapien
ggggttccagaagataagcaacacc

SEQ ID NO: 1600931 - DNA, 25 bp, Homo sapien
gacaactgcagggaggagcaatcat

SEQ ID NO: 1600932 - DNA, 25 bp, Homo sapien
gacctgatcaacctgattggcccaa

SEQ ID NO: 1600933 - DNA, 25 bp, Homo sapien
gcttcagcaatctggcggcctttcc

SEQ ID NO: 1600934 - DNA, 25 bp, Homo sapien
tgtgacaacgtgagaatcgggtgca

SEQ ID NO: 1600935 - DNA, 25 bp, Homo sapien
cgggcgcccgccgtgtcacaataaa

SEQ ID NO: 1600936 - DNA, 25 bp, Homo sapien
cgccgtgtcacaataaaagtccccg

SEQ ID NO: 1600937 - DNA, 25 bp, Homo sapien
accatgactaagcagagccgggcgc

SEQ ID NO: 1600938 - DNA, 25 bp, Homo sapien
ggtcaccatgactaagcagagccgg

SEQ ID NO: 1600939 - DNA, 25 bp, Homo sapien
ccccgcccacgcctgctgtcgccca

SEQ ID NO: 1600940 - DNA, 25 bp, Homo sapien
cccccgcccacgcctgctgtcgccc

SEQ ID NO: 1600941 - DNA, 25 bp, Homo sapien
ccacccccgcccacgcctgctgtcg

SEQ ID NO: 1600942 - DNA, 25 bp, Homo sapien
ggcacgcgaccctgagcgcgcttag

SEQ ID NO: 1600943 - DNA, 25 bp, Homo sapien
gcggggcgggggcacgcgaccctga

SEQ ID NO: 1600944 - DNA, 25 bp, Homo sapien
gggggcacgcgaccctgagcgcgct

SEQ ID NO: 1600945 - DNA, 25 bp, Homo sapien
ggggcgggggcacgcgaccctgagc

SEQ ID NO: 1600946 - DNA, 25 bp, Homo sapien
ggtggacacccctccccgtcgctgc

SEQ ID NO: 1600947 - DNA, 25 bp, Homo sapien
gtggacacccctccccgtcgctgct

SEQ ID NO: 1600948 - DNA, 25 bp, Homo sapien
cacccgcgcactgcgcttccgggaa

SEQ ID NO: 1600949 - DNA, 25 bp, Homo sapien
cacagtgatgccacccgcgcactgc

SEQ ID NO: 1600950 - DNA, 25 bp, Homo sapien
cagcccccaggtcgcctccgtaggg

SEQ ID NO: 1600951 - DNA, 25 bp, Homo sapien
atgccacccgcgcactgcgcttccg

SEQ ID NO: 1600952 - DNA, 25 bp, Homo sapien
tgcccggcgcccgtcggcgaggagt

SEQ ID NO: 1600953 - DNA, 25 bp, Homo sapien
ttccatctcccgatttcgttgctgg

SEQ ID NO: 1600954 - DNA, 25 bp, Homo sapien
tcgttgctggatgtctcctcgcggg

SEQ ID NO: 1600955 - DNA, 25 bp, Homo sapien
aaggagcggcgattctcccgccctt

SEQ ID NO: 1600956 - DNA, 25 bp, Homo sapien
tgacagagcacaagatcccaactca

SEQ ID NO: 1600957 - DNA, 25 bp, Homo sapien
aggaactccaggcttgatcccagga

SEQ ID NO: 1600958 - DNA, 25 bp, Homo sapien
agctataattgtgcccattgcactc

SEQ ID NO: 1600959 - DNA, 25 bp, Homo sapien
aagcaggaactccaggcttgatccc

SEQ ID NO: 1600960 - DNA, 25 bp, Homo sapien
taggatttggctgagtctcccagag

SEQ ID NO: 1600961 - DNA, 25 bp, Homo sapien
ccatggaggccacaagacacctgtg

SEQ ID NO: 1600962 - DNA, 25 bp, Homo sapien
tgggcacatttcagcctcagggcct

SEQ ID NO: 1600963 - DNA, 25 bp, Homo sapien
gatcacctgaattagggcaagtccc

SEQ ID NO: 1600964 - DNA, 25 bp, Homo sapien
ctgcctgtggagccgctggtgtcca

SEQ ID NO: 1600965 - DNA, 25 bp, Homo sapien
cagcccgtcgcgctggggcgatgag

SEQ ID NO: 1600966 - DNA, 25 bp, Homo sapien
atgagcgctccgagccgctgaagct

SEQ ID NO: 1600967 - DNA, 25 bp, Homo sapien
aagctcccatcaaggcccgggggca

SEQ ID NO: 1600968 - DNA, 25 bp, Homo sapien
gggcacgccacgtcgagcaacagca

SEQ ID NO: 1600969 - DNA, 25 bp, Homo sapien
tgctgggagccactcgggtctctgc

SEQ ID NO: 1600970 - DNA, 25 bp, Homo sapien
caggagtggcgtccgcagcagacca

SEQ ID NO: 1600971 - DNA, 25 bp, Homo sapien
accacgctgagcgtgcgcagcaagg

SEQ ID NO: 1600972 - DNA, 25 bp, Homo sapien
cgcggcttgcgacgcgcccgggtcg

SEQ ID NO: 1600973 - DNA, 25 bp, Homo sapien
ttgcgacgcgcccgggtcgaggtgg

SEQ ID NO: 1600974 - DNA, 25 bp, Homo sapien
gcttgcgacgcgcccgggtcgaggt

SEQ ID NO: 1600975 - DNA, 25 bp, Homo sapien
gcgacgcgcccgggtcgaggtggtc

SEQ ID NO: 1600976 - DNA, 25 bp, Homo sapien
gctcagcacggacgcagtgagtgcc

SEQ ID NO: 1600977 - DNA, 25 bp, Homo sapien
cgcgccatggtgaggctgcgctcca

SEQ ID NO: 1600978 - DNA, 25 bp, Homo sapien
cgtagagtgcacagatagcggccag

SEQ ID NO: 1600979 - DNA, 25 bp, Homo sapien
cacgaaggcgagcacgcagaagagc

SEQ ID NO: 1600980 - DNA, 25 bp, Homo sapien
cgtgagcggccccgacagtaggatg

SEQ ID NO: 1600981 - DNA, 25 bp, Homo sapien
tgagcggccccgacagtaggatgtt

SEQ ID NO: 1600982 - DNA, 25 bp, Homo sapien
gtgagcggccccgacagtaggatgt

SEQ ID NO: 1600983 - DNA, 25 bp, Homo sapien
cggcgtaggcggcgcctgccagcag

SEQ ID NO: 1600984 - DNA, 25 bp, Homo sapien
gcggcgtaggcggcgcctgccagca

SEQ ID NO: 1600985 - DNA, 25 bp, Homo sapien
ggcgtaggcggcgcctgccagcaga

SEQ ID NO: 1600986 - DNA, 25 bp, Homo sapien
ctgcccaggagcaggaacatgggag

SEQ ID NO: 1600987 - DNA, 25 bp, Homo sapien
tgaggctgcccaggagcaggaacat

SEQ ID NO: 1600988 - DNA, 25 bp, Homo sapien
gtgaggctgcccaggagcaggaaca

SEQ ID NO: 1600989 - DNA, 25 bp, Homo sapien
aggctgcccaggagcaggaacatgg

SEQ ID NO: 1600990 - DNA, 25 bp, Homo sapien
ttgtaatgcaggacgatgacctcgc

SEQ ID NO: 1600991 - DNA, 25 bp, Homo sapien
gcaccaacaacacggctagattctc

SEQ ID NO: 1600992 - DNA, 25 bp, Homo sapien
gagcttgccggtgtagttgtaatgc

SEQ ID NO: 1600993 - DNA, 25 bp, Homo sapien
tagattctctagcacgatgaaggcg

SEQ ID NO: 1600994 - DNA, 25 bp, Homo sapien
gccacccgcagtcgcgctgccttga

SEQ ID NO: 1600995 - DNA, 25 bp, Homo sapien
cgccctggtcgtgcgccacccgcag

SEQ ID NO: 1600996 - DNA, 25 bp, Homo sapien
gcgccacccgcagtcgcgctgcctt

SEQ ID NO: 1600997 - DNA, 25 bp, Homo sapien
tctgcgccctggtcgtgcgccaccc

SEQ ID NO: 1600998 - DNA, 25 bp, Homo sapien
tgggttgcttagcaggagtcttcag

SEQ ID NO: 1600999 - DNA, 25 bp, Homo sapien
tgcaccccaaggacgccccgtcgat

SEQ ID NO: 1601000 - DNA, 25 bp, Homo sapien
tcgatgattcggaggggtcttcagt

SEQ ID NO: 1601001 - DNA, 25 bp, Homo sapien
cagtgggttgcttagcaggagtctt

SEQ ID NO: 1601002 - DNA, 25 bp, Homo sapien
caagtcacgggaagtttaagtcagc

SEQ ID NO: 1601003 - DNA, 25 bp, Homo sapien
tcagggcctgactcacgtactgtag

SEQ ID NO: 1601004 - DNA, 25 bp, Homo sapien
tctcgaggtgagagctccaagtcac

SEQ ID NO: 1601005 - DNA, 25 bp, Homo sapien
ctgtagtttgcactggacgcccggg

SEQ ID NO: 1601006 - DNA, 25 bp, Homo sapien
cacagctacacgtgttttttaattt

SEQ ID NO: 1601007 - DNA, 25 bp, Homo sapien
ccacagctacacgtgttttttaatt

SEQ ID NO: 1601008 - DNA, 25 bp, Homo sapien
tacccacagctacacgtgtttttta

SEQ ID NO: 1601009 - DNA, 25 bp, Homo sapien
cccacagctacacgtgttttttaat

SEQ ID NO: 1601010 - DNA, 25 bp, Homo sapien
cacagatgagaggatctctgcagca

SEQ ID NO: 1601011 - DNA, 25 bp, Homo sapien
ctgcagcagatagtacttgtgggtg

SEQ ID NO: 1601012 - DNA, 25 bp, Homo sapien
tgtccagggcttgatttgaggagag

SEQ ID NO: 1601013 - DNA, 25 bp, Homo sapien
acttgtgggtgcgagacctgtccag

SEQ ID NO: 1601014 - DNA, 25 bp, Homo sapien
ccagctggcggaagtgcagccgttt

SEQ ID NO: 1601015 - DNA, 25 bp, Homo sapien
cctgcagtctctggcggctgaactc

SEQ ID NO: 1601016 - DNA, 25 bp, Homo sapien
aggagctgttcttgggcccctgttg

SEQ ID NO: 1601017 - DNA, 25 bp, Homo sapien
ggctgaactcgcatccaccaagcat

SEQ ID NO: 1601018 - DNA, 25 bp, Homo sapien
cttctggctgtacgcccgcttgtcc

SEQ ID NO: 1601019 - DNA, 25 bp, Homo sapien
gacctgccgctttttccatgagttc

SEQ ID NO: 1601020 - DNA, 25 bp, Homo sapien
agacctgccgctttttccatgagtt

SEQ ID NO: 1601021 - DNA, 25 bp, Homo sapien
ggccttctggctgtacgcccgcttg

SEQ ID NO: 1601022 - DNA, 25 bp, Homo sapien
ggttcagctccttatcgtcagcagc

SEQ ID NO: 1601023 - DNA, 25 bp, Homo sapien
tttagggagcaccaccggttcagct

SEQ ID NO: 1601024 - DNA, 25 bp, Homo sapien
gctccttatcgtcagcagcgaggat

SEQ ID NO: 1601025 - DNA, 25 bp, Homo sapien
tgcaggtcttctttagggagcacca

SEQ ID NO: 1601026 - DNA, 25 bp, Homo sapien
caccactgtgcggtacttgaagcga

SEQ ID NO: 1601027 - DNA, 25 bp, Homo sapien
gcaggtcgtcgatgatgtcctcgta

SEQ ID NO: 1601028 - DNA, 25 bp, Homo sapien
caggtactcctcgaacgtcttgtcc

SEQ ID NO: 1601029 - DNA, 25 bp, Homo sapien
tagtccagccggtaatactcatcca

SEQ ID NO: 1601030 - DNA, 25 bp, Homo sapien
gtgccccctgcctacccacggcctg

SEQ ID NO: 1601031 - DNA, 25 bp, Homo sapien
cgcggtgccccctgcctacccacgg

SEQ ID NO: 1601032 - DNA, 25 bp, Homo sapien
gggctatgccaggccccgcggtgcc

SEQ ID NO: 1601033 - DNA, 25 bp, Homo sapien
gctatgccaggccccgcggtgcccc

SEQ ID NO: 1601034 - DNA, 25 bp, Homo sapien
tcttgcccgtcaagggggcctcgcg

SEQ ID NO: 1601035 - DNA, 25 bp, Homo sapien
cggccgcggcgaagggcgacttgcg

SEQ ID NO: 1601036 - DNA, 25 bp, Homo sapien
ggcctcgcgctttttcttcctcggc

SEQ ID NO: 1601037 - DNA, 25 bp, Homo sapien
tcttcttgcccgtcaagggggcctc

SEQ ID NO: 1601038 - DNA, 25 bp, Homo sapien
ggacgcacaggtcagatcccaccag

SEQ ID NO: 1601039 - DNA, 25 bp, Homo sapien
ctgccaggacgcacaggtcagatcc

SEQ ID NO: 1601040 - DNA, 25 bp, Homo sapien
caccagccccccgtcagggcccctg

SEQ ID NO: 1601041 - DNA, 25 bp, Homo sapien
ctgggactccctcaacccgtgatac

SEQ ID NO: 1601042 - DNA, 25 bp, Homo sapien
cctgctcaggcccgtcccacgtgtc

SEQ ID NO: 1601043 - DNA, 25 bp, Homo sapien
ctgctcaggcccgtcccacgtgtcc

SEQ ID NO: 1601044 - DNA, 25 bp, Homo sapien
tcctgctcaggcccgtcccacgtgt

SEQ ID NO: 1601045 - DNA, 25 bp, Homo sapien
ctcctgctcaggcccgtcccacgtg

SEQ ID NO: 1601046 - DNA, 25 bp, Homo sapien
cttcctcaaattgtggcttctcctc

SEQ ID NO: 1601047 - DNA, 25 bp, Homo sapien
ctcctccacggccccgtagtactcg

SEQ ID NO: 1601048 - DNA, 25 bp, Homo sapien
ttcctcaaattgtggcttctcctcc

SEQ ID NO: 1601049 - DNA, 25 bp, Homo sapien
ttactcctacagctagggctcccta

SEQ ID NO: 1601050 - DNA, 25 bp, Homo sapien
ctccttggcaactttactcctacag

SEQ ID NO: 1601051 - DNA, 25 bp, Homo sapien
ccactcgagacataggagctgagcc

SEQ ID NO: 1601052 - DNA, 25 bp, Homo sapien
cagagcccactcgagacataggagc

SEQ ID NO: 1601053 - DNA, 25 bp, Homo sapien
gcgtctcacccagtagcccatgctg

SEQ ID NO: 1601054 - DNA, 25 bp, Homo sapien
cgtctcacccagtagcccatgctgg

SEQ ID NO: 1601055 - DNA, 25 bp, Homo sapien
agcgtctcacccagtagcccatgct

SEQ ID NO: 1601056 - DNA, 25 bp, Homo sapien
tcctcgaggcccagcatctcgttgc

SEQ ID NO: 1601057 - DNA, 25 bp, Homo sapien
ctcctcgaggcccagcatctcgttg

SEQ ID NO: 1601058 - DNA, 25 bp, Homo sapien
gtgctgggcagggtcgaagtcgtct

SEQ ID NO: 1601059 - DNA, 25 bp, Homo sapien
gcagggtcgaagtcgtcttcaaggt

SEQ ID NO: 1601060 - DNA, 25 bp, Homo sapien
cagagagggggagggcatgggcttt

SEQ ID NO: 1601061 - DNA, 25 bp, Homo sapien
ggagggcatgggctttcctccaggg

SEQ ID NO: 1601062 - DNA, 25 bp, Homo sapien
gggggagggcatgggctttcctcca

SEQ ID NO: 1601063 - DNA, 25 bp, Homo sapien
agagggggagggcatgggctttcct

SEQ ID NO: 1601064 - DNA, 25 bp, Homo sapien
tcttctcctttctgcgctcatcctt

SEQ ID NO: 1601065 - DNA, 25 bp, Homo sapien
gcgatgctgcgtgggtaggtcttga

SEQ ID NO: 1601066 - DNA, 25 bp, Homo sapien
tctttcgctcccgagtctcttccct

SEQ ID NO: 1601067 - DNA, 25 bp, Homo sapien
gcgctcatccttacggcgcacggag

SEQ ID NO: 1601068 - DNA, 25 bp, Homo sapien
gcccacaagggccgcagagatgatg

SEQ ID NO: 1601069 - DNA, 25 bp, Homo sapien
ctaggcgcaatcagaaaagcccaca

SEQ ID NO: 1601070 - DNA, 25 bp, Homo sapien
gaaaagcccacaagggccgcagaga

SEQ ID NO: 1601071 - DNA, 25 bp, Homo sapien
aggcgcaatcagaaaagcccacaag

SEQ ID NO: 1601072 - DNA, 25 bp, Homo sapien
ctgaggagtcgtccacagccagctg

SEQ ID NO: 1601073 - DNA, 25 bp, Homo sapien
gtacttctgttcaaagtcctcctgt

SEQ ID NO: 1601074 - DNA, 25 bp, Homo sapien
cctcgaaacggaaattgtacttctg

SEQ ID NO: 1601075 - DNA, 25 bp, Homo sapien
ttcagaaacagctccccttcgtctg

SEQ ID NO: 1601076 - DNA, 25 bp, Homo sapien
gggggccagccaagtgaggtcgagc

SEQ ID NO: 1601077 - DNA, 25 bp, Homo sapien
ccagggggccagccaagtgaggtcg

SEQ ID NO: 1601078 - DNA, 25 bp, Homo sapien
gggccagccaagtgaggtcgagccc

SEQ ID NO: 1601079 - DNA, 25 bp, Homo sapien
ggccagccaagtgaggtcgagcccc

SEQ ID NO: 1601080 - DNA, 25 bp, Homo sapien
cgtttgttgaggatgtaatcccgca

SEQ ID NO: 1601081 - DNA, 25 bp, Homo sapien
ctcctcctcatagcgtttgttgagg

SEQ ID NO: 1601082 - DNA, 25 bp, Homo sapien
ctcatagcgtttgttgaggatgtaa

SEQ ID NO: 1601083 - DNA, 25 bp, Homo sapien
gttgaggatgtaatcccgcaggaac

SEQ ID NO: 1601084 - DNA, 25 bp, Homo sapien
caactcagggtcgttccagtattcc

SEQ ID NO: 1601085 - DNA, 25 bp, Homo sapien
aactcagggtcgttccagtattcct

SEQ ID NO: 1601086 - DNA, 25 bp, Homo sapien
tcatccaactcagggtcgttccagt

SEQ ID NO: 1601087 - DNA, 25 bp, Homo sapien
tccaactcagggtcgttccagtatt

SEQ ID NO: 1601088 - DNA, 25 bp, Homo sapien
agccactcgatgtagtcggcctcct

SEQ ID NO: 1601089 - DNA, 25 bp, Homo sapien
ccttcagccactcgatgtagtcggc

SEQ ID NO: 1601090 - DNA, 25 bp, Homo sapien
tgtcccttcagccactcgatgtagt

SEQ ID NO: 1601091 - DNA, 25 bp, Homo sapien
ttcagggaatctgggttccgaatct

SEQ ID NO: 1601092 - DNA, 25 bp, Homo sapien
aaagctagcactgagcatccgcaga

SEQ ID NO: 1601093 - DNA, 25 bp, Homo sapien
tccgcagatgcccagccacccgcca

SEQ ID NO: 1601094 - DNA, 25 bp, Homo sapien
ctgggggaaagctagcactgagcat

SEQ ID NO: 1601095 - DNA, 25 bp, Homo sapien
gggaaagctagcactgagcatccgc

SEQ ID NO: 1601096 - DNA, 25 bp, Homo sapien
tcccccagcagtccagtcaggcccc

SEQ ID NO: 1601097 - DNA, 25 bp, Homo sapien
ctgtcccccagcagtccagtcaggc

SEQ ID NO: 1601098 - DNA, 25 bp, Homo sapien
ccccagcagtccagtcaggccccag

SEQ ID NO: 1601099 - DNA, 25 bp, Homo sapien
agcagtccagtcaggccccagtacc

SEQ ID NO: 1601100 - DNA, 25 bp, Homo sapien
tgcctggttttggcacgtttctgca

SEQ ID NO: 1601101 - DNA, 25 bp, Homo sapien
cctggttttggcacgtttctgcagc

SEQ ID NO: 1601102 - DNA, 25 bp, Homo sapien
tggttttggcacgtttctgcagcaa

SEQ ID NO: 1601103 - DNA, 25 bp, Homo sapien
ctggttttggcacgtttctgcagca

SEQ ID NO: 1601104 - DNA, 25 bp, Homo sapien
ccacataactttgcgacgatgtctc

SEQ ID NO: 1601105 - DNA, 25 bp, Homo sapien
tgttcctccacataactttgcgacg

SEQ ID NO: 1601106 - DNA, 25 bp, Homo sapien
ctccacataactttgcgacgatgtc

SEQ ID NO: 1601107 - DNA, 25 bp, Homo sapien
tcctccacataactttgcgacgatg

SEQ ID NO: 1601108 - DNA, 25 bp, Homo sapien
tgattggaagtctccccgtctgagt

SEQ ID NO: 1601109 - DNA, 25 bp, Homo sapien
gaagtctccccgtctgagttctcct

SEQ ID NO: 1601110 - DNA, 25 bp, Homo sapien
ttggaagtctccccgtctgagttct

SEQ ID NO: 1601111 - DNA, 25 bp, Homo sapien
gattggaagtctccccgtctgagtt

SEQ ID NO: 1601112 - DNA, 25 bp, Homo sapien
aagataaccttcctctcgtagtcct

SEQ ID NO: 1601113 - DNA, 25 bp, Homo sapien
ttctgcttctccaaggcttctgggt

SEQ ID NO: 1601114 - DNA, 25 bp, Homo sapien
tgcttctccaaggcttctgggtcct

SEQ ID NO: 1601115 - DNA, 25 bp, Homo sapien
gcttctccaaggcttctgggtcctc

SEQ ID NO: 1601116 - DNA, 25 bp, Homo sapien
tgttctgttatagaaggtggcatct

SEQ ID NO: 1601117 - DNA, 25 bp, Homo sapien
cttcaacaaggagagcgttttgtaa

SEQ ID NO: 1601118 - DNA, 25 bp, Homo sapien
ggtggcatctttctgataaatgcgg

SEQ ID NO: 1601119 - DNA, 25 bp, Homo sapien
ttttgtaaaagtcccgctcctgctg

SEQ ID NO: 1601120 - DNA, 25 bp, Homo sapien
gggagataataagagccctggcgcc

SEQ ID NO: 1601121 - DNA, 25 bp, Homo sapien
ctgatgtgagaagttgggcgcccca

SEQ ID NO: 1601122 - DNA, 25 bp, Homo sapien
gggcactgtctgtccctcatgggat

SEQ ID NO: 1601123 - DNA, 25 bp, Homo sapien
ccacgtggcgcaaggagtacactaa

SEQ ID NO: 1601124 - DNA, 25 bp, Homo sapien
acgcgctcgtcgcttgagtccgact

SEQ ID NO: 1601125 - DNA, 25 bp, Homo sapien
tgctgtctcggtccccgtagcgatc

SEQ ID NO: 1601126 - DNA, 25 bp, Homo sapien
agtccgactcggagctggagtcgct

SEQ ID NO: 1601127 - DNA, 25 bp, Homo sapien
gctgctgtctcggtccccgtagcga

SEQ ID NO: 1601128 - DNA, 25 bp, Homo sapien
atgcccccccccaggtcagccggcg

SEQ ID NO: 1601129 - DNA, 25 bp, Homo sapien
cggcggggccactcgactccccact

SEQ ID NO: 1601130 - DNA, 25 bp, Homo sapien
cgcgcgcaggctcccgcgcgcatgc

SEQ ID NO: 1601131 - DNA, 25 bp, Homo sapien
ctgcgggacacagacgggatgcccc

SEQ ID NO: 1601132 - DNA, 25 bp, Homo sapien
agttcctcgcgctcccggtagcggt

SEQ ID NO: 1601133 - DNA, 25 bp, Homo sapien
acgacccgcgcggttccggcatggc

SEQ ID NO: 1601134 - DNA, 25 bp, Homo sapien
tgtaccgcgcggcaaacgccgcgtt

SEQ ID NO: 1601135 - DNA, 25 bp, Homo sapien
ccggcatggcggttctgtggcccat

SEQ ID NO: 1601136 - DNA, 25 bp, Homo sapien
catgcctgaagcaacgtgcacactt

SEQ ID NO: 1601137 - DNA, 25 bp, Homo sapien
ctgaaccgtttaggtggctgtggcc

SEQ ID NO: 1601138 - DNA, 25 bp, Homo sapien
ttcttattgatttgggacgctcccc

SEQ ID NO: 1601139 - DNA, 25 bp, Homo sapien
gcctgaggcgcagaagaaactgaac

SEQ ID NO: 1601140 - DNA, 25 bp, Homo sapien
gagatcagattcagctgccagaaag

SEQ ID NO: 1601141 - DNA, 25 bp, Homo sapien
cgtcatggactggactggtaccgga

SEQ ID NO: 1601142 - DNA, 25 bp, Homo sapien
cctggcgtccctgcgatggagatca

SEQ ID NO: 1601143 - DNA, 25 bp, Homo sapien
tgccatcaggcacgttgacatcagc

SEQ ID NO: 1601144 - DNA, 25 bp, Homo sapien
cacccaccttcgaagggggactgtg

SEQ ID NO: 1601145 - DNA, 25 bp, Homo sapien
gggactgtgggggaacaatgaaagc

SEQ ID NO: 1601146 - DNA, 25 bp, Homo sapien
cactcagccggtcgccggcgcgaac

SEQ ID NO: 1601147 - DNA, 25 bp, Homo sapien
cgaagcggttgagggcgtcgggatg

SEQ ID NO: 1601148 - DNA, 25 bp, Homo sapien
agcgccgtcttgccgaagcggttga

SEQ ID NO: 1601149 - DNA, 25 bp, Homo sapien
agggcgtcgggatgcaccagctccc

SEQ ID NO: 1601150 - DNA, 25 bp, Homo sapien
ctccccctgtcagccggaggacggc

SEQ ID NO: 1601151 - DNA, 25 bp, Homo sapien
cgctggcccgaacagccctcccggg

SEQ ID NO: 1601152 - DNA, 25 bp, Homo sapien
tccccctgtcagccggaggacggcg

SEQ ID NO: 1601153 - DNA, 25 bp, Homo sapien
cctccccctgtcagccggaggacgg

SEQ ID NO: 1601154 - DNA, 25 bp, Homo sapien
agggggcggagccaacgtgctcccg

SEQ ID NO: 1601155 - DNA, 25 bp, Homo sapien
gccgctgaggcagccgccagggggc

SEQ ID NO: 1601156 - DNA, 25 bp, Homo sapien
cctcctcctcgccgggcggggtctg

SEQ ID NO: 1601157 - DNA, 25 bp, Homo sapien
gggtctgctctgagcctgcgccgcc

SEQ ID NO: 1601158 - DNA, 25 bp, Homo sapien
agcaggaaaggagcctgcagctgcc

SEQ ID NO: 1601159 - DNA, 25 bp, Homo sapien
cagcaggaaaggagcctgcagctgc

SEQ ID NO: 1601160 - DNA, 25 bp, Homo sapien
ccgggctcagactgagccagcagga

SEQ ID NO: 1601161 - DNA, 25 bp, Homo sapien
cctgccgggctcagactgagccagc

SEQ ID NO: 1601162 - DNA, 25 bp, Homo sapien
gctttaataagataggaatgccgag

SEQ ID NO: 1601163 - DNA, 25 bp, Homo sapien
ccaggccatggctttaataagatag

SEQ ID NO: 1601164 - DNA, 25 bp, Homo sapien
gcccgaccaggccatggctttaata

SEQ ID NO: 1601165 - DNA, 25 bp, Homo sapien
ggaatgccgagcgaagtggctcaca

SEQ ID NO: 1601166 - DNA, 25 bp, Homo sapien
aaataacaataattagtggggcatg

SEQ ID NO: 1601167 - DNA, 25 bp, Homo sapien
cgcgaggaggacttcaagcccctct

SEQ ID NO: 1601168 - DNA, 25 bp, Homo sapien
ctgtgaaggagggacccgcaacacc

SEQ ID NO: 1601169 - DNA, 25 bp, Homo sapien
cgcaacacccgctaaggcaggtaat

SEQ ID NO: 1601170 - DNA, 25 bp, Homo sapien
attgcaagaaggcactcgcgaggag

SEQ ID NO: 1601171 - DNA, 25 bp, Homo sapien
tgcatccggggctgtaaggaagccc

SEQ ID NO: 1601172 - DNA, 25 bp, Homo sapien
gaggtgaggaaggggcgggtgctgg

SEQ ID NO: 1601173 - DNA, 25 bp, Homo sapien
ctaaaatctgcatccggggctgtaa

SEQ ID NO: 1601174 - DNA, 25 bp, Homo sapien
tgtaaggaagccccgtgttcaagcc

SEQ ID NO: 1601175 - DNA, 25 bp, Homo sapien
tcaccccattgtccccaggagctgg

SEQ ID NO: 1601176 - DNA, 25 bp, Homo sapien
gtccccaggagctgggctgccttac

SEQ ID NO: 1601177 - DNA, 25 bp, Homo sapien
cattgtccccaggagctgggctgcc

SEQ ID NO: 1601178 - DNA, 25 bp, Homo sapien
ttgtccccaggagctgggctgcctt

SEQ ID NO: 1601179 - DNA, 25 bp, Homo sapien
ccactctgggtgatgtagcgaaccc

SEQ ID NO: 1601180 - DNA, 25 bp, Homo sapien
tgatgtagcgaacccagggcagggc

SEQ ID NO: 1601181 - DNA, 25 bp, Homo sapien
ctctgggtgatgtagcgaacccagg

SEQ ID NO: 1601182 - DNA, 25 bp, Homo sapien
ggtgatgtagcgaacccagggcagg

SEQ ID NO: 1601183 - DNA, 25 bp, Homo sapien
ctggatcccagagacggtgaagtag

SEQ ID NO: 1601184 - DNA, 25 bp, Homo sapien
ccagagacggtgaagtaggggatct

SEQ ID NO: 1601185 - DNA, 25 bp, Homo sapien
tcccagagacggtgaagtaggggat

SEQ ID NO: 1601186 - DNA, 25 bp, Homo sapien
ggatcccagagacggtgaagtaggg

SEQ ID NO: 1601187 - DNA, 25 bp, Homo sapien
ccaaagtgggctcgcatcaagtact

SEQ ID NO: 1601188 - DNA, 25 bp, Homo sapien
ggccaaagtgggctcgcatcaagta

SEQ ID NO: 1601189 - DNA, 25 bp, Homo sapien
aaagtgggctcgcatcaagtactcc

SEQ ID NO: 1601190 - DNA, 25 bp, Homo sapien
gaggccaaagtgggctcgcatcaag

SEQ ID NO: 1601191 - DNA, 25 bp, Homo sapien
caaaacctctagtagccaagggatg

SEQ ID NO: 1601192 - DNA, 25 bp, Homo sapien
gattctgactgcaaaacccaatcag

SEQ ID NO: 1601193 - DNA, 25 bp, Homo sapien
gcaaactgagcctccttaagtggaa

SEQ ID NO: 1601194 - DNA, 25 bp, Homo sapien
tgttttacaggcactgatgatccac

SEQ ID NO: 1601195 - DNA, 25 bp, Homo sapien
gacttaatactccaaatcacgacgt

SEQ ID NO: 1601196 - DNA, 25 bp, Homo sapien
tctctccggcacatacttggcgctg

SEQ ID NO: 1601197 - DNA, 25 bp, Homo sapien
aaatcacgacgtttctctccggcac

SEQ ID NO: 1601198 - DNA, 25 bp, Homo sapien
gggaaagacttaatactccaaatca

SEQ ID NO: 1601199 - DNA, 25 bp, Homo sapien
gagtcggcatcgctgggtacaggca

SEQ ID NO: 1601200 - DNA, 25 bp, Homo sapien
agtcggcatcgctgggtacaggcac

SEQ ID NO: 1601201 - DNA, 25 bp, Homo sapien
ggagtcggcatcgctgggtacaggc

SEQ ID NO: 1601202 - DNA, 25 bp, Homo sapien
ggagaacttctcaatgacagactca

SEQ ID NO: 1601203 - DNA, 25 bp, Homo sapien
gctgtgggagaacttctcaatgaca

SEQ ID NO: 1601204 - DNA, 25 bp, Homo sapien
aatgacagactcaatccagatcagt

SEQ ID NO: 1601205 - DNA, 25 bp, Homo sapien
atgacagactcaatccagatcagtg

SEQ ID NO: 1601206 - DNA, 25 bp, Homo sapien
agctcaaagtcaccatcaggcggga

SEQ ID NO: 1601207 - DNA, 25 bp, Homo sapien
ttgtcaaagcgagagagccgcacgc

SEQ ID NO: 1601208 - DNA, 25 bp, Homo sapien
cggtcgttgtcaaagcgagagagcc

SEQ ID NO: 1601209 - DNA, 25 bp, Homo sapien
tgctgaggcggtatgacatgagctc

SEQ ID NO: 1601210 - DNA, 25 bp, Homo sapien
gacgatttcgctcagaaggacgctg

SEQ ID NO: 1601211 - DNA, 25 bp, Homo sapien
gatggtaccgacgatttcgctcaga

SEQ ID NO: 1601212 - DNA, 25 bp, Homo sapien
ttcgctcagaaggacgctgccgttg

SEQ ID NO: 1601213 - DNA, 25 bp, Homo sapien
gagcttgatggtaccgacgatttcg

SEQ ID NO: 1601214 - DNA, 25 bp, Homo sapien
acttgataccctcggagcgccagga

SEQ ID NO: 1601215 - DNA, 25 bp, Homo sapien
gacttgcccgtctccagcttgttgc

SEQ ID NO: 1601216 - DNA, 25 bp, Homo sapien
cttcttatacttgataccctcggag

SEQ ID NO: 1601217 - DNA, 25 bp, Homo sapien
tgggtggcacccgtgacttgcccgt

SEQ ID NO: 1601218 - DNA, 25 bp, Homo sapien
gtccagcaactcgtagacgatgaca

SEQ ID NO: 1601219 - DNA, 25 bp, Homo sapien
actcgtagacgatgacaaagttgtc

SEQ ID NO: 1601220 - DNA, 25 bp, Homo sapien
ctgtcggtggtctgcgggaagccaa

SEQ ID NO: 1601221 - DNA, 25 bp, Homo sapien
ctcgtccagcaactcgtagacgatg

SEQ ID NO: 1601222 - DNA, 25 bp, Homo sapien
attgtcttatacaggaaggagtaca

SEQ ID NO: 1601223 - DNA, 25 bp, Homo sapien
aggaaggagtacaccagggaggcat

SEQ ID NO: 1601224 - DNA, 25 bp, Homo sapien
ggcattggcattcttcgatgtggtg

SEQ ID NO: 1601225 - DNA, 25 bp, Homo sapien
ttggcattcttcgatgtggtggcca

SEQ ID NO: 1601226 - DNA, 25 bp, Homo sapien
aaggtgccatttatggagaagtaaa

SEQ ID NO: 1601227 - DNA, 25 bp, Homo sapien
tggagaagtaaatggaatacagacc

SEQ ID NO: 1601228 - DNA, 25 bp, Homo sapien
ttatggagaagtaaatggaatacag

SEQ ID NO: 1601229 - DNA, 25 bp, Homo sapien
gaagtaaatggaatacagaccccga

SEQ ID NO: 1601230 - DNA, 25 bp, Homo sapien
gagctgccaccatcgccgacagccc

SEQ ID NO: 1601231 - DNA, 25 bp, Homo sapien
gagatgtgcggtgcaactcctgtcc

SEQ ID NO: 1601232 - DNA, 25 bp, Homo sapien
atgtgcggtgcaactcctgtcctca

SEQ ID NO: 1601233 - DNA, 25 bp, Homo sapien
agccacagagatgtgcggtgcaact

SEQ ID NO: 1601234 - DNA, 25 bp, Homo sapien
ctccagggacaccacgtggggtgga

SEQ ID NO: 1601235 - DNA, 25 bp, Homo sapien
cacctccagggacaccacgtggggt

SEQ ID NO: 1601236 - DNA, 25 bp, Homo sapien
ccacctccagggacaccacgtgggg

SEQ ID NO: 1601237 - DNA, 25 bp, Homo sapien
cagggacaccacgtggggtggatac

SEQ ID NO: 1601238 - DNA, 25 bp, Homo sapien
tcatggccacatcgcccttgtagtt

SEQ ID NO: 1601239 - DNA, 25 bp, Homo sapien
ccttgtagttgcggctgatcaatgg

SEQ ID NO: 1601240 - DNA, 25 bp, Homo sapien
ttgctcatggccacatcgcccttgt

SEQ ID NO: 1601241 - DNA, 25 bp, Homo sapien
ctcaatcttgctcatggccacatcg

SEQ ID NO: 1601242 - DNA, 25 bp, Homo sapien
ccagctttggcaacatagcgggatc

SEQ ID NO: 1601243 - DNA, 25 bp, Homo sapien
gaccagctttggcaacatagcggga

SEQ ID NO: 1601244 - DNA, 25 bp, Homo sapien
gctttggcaacatagcgggatccct

SEQ ID NO: 1601245 - DNA, 25 bp, Homo sapien
cagctttggcaacatagcgggatcc

SEQ ID NO: 1601246 - DNA, 25 bp, Homo sapien
gtctcccaactcctcatgcccagcc

SEQ ID NO: 1601247 - DNA, 25 bp, Homo sapien
ctgtccgtctcccaactcctcatgc

SEQ ID NO: 1601248 - DNA, 25 bp, Homo sapien
tctcccaactcctcatgcccagcct

SEQ ID NO: 1601249 - DNA, 25 bp, Homo sapien
cccaactcctcatgcccagcctcac

SEQ ID NO: 1601250 - DNA, 25 bp, Homo sapien
cttgcccttaacgtccagaatgaag

SEQ ID NO: 1601251 - DNA, 25 bp, Homo sapien
gcccttaacgtccagaatgaagaca

SEQ ID NO: 1601252 - DNA, 25 bp, Homo sapien
tgcccttaacgtccagaatgaagac

SEQ ID NO: 1601253 - DNA, 25 bp, Homo sapien
ttgcccttaacgtccagaatgaaga

SEQ ID NO: 1601254 - DNA, 25 bp, Homo sapien
tgcggaagcgcctgcgcccaggtga

SEQ ID NO: 1601255 - DNA, 25 bp, Homo sapien
gagcagcgctgtcggccaacttgaa

SEQ ID NO: 1601256 - DNA, 25 bp, Homo sapien
gagcccaggtgtgtgcgtcttaaag

SEQ ID NO: 1601257 - DNA, 25 bp, Homo sapien
tggcggccgaaggacttaggagtcg

SEQ ID NO: 1601258 - DNA, 25 bp, Homo sapien
tactgatccaccgaatggagggtgc

SEQ ID NO: 1601259 - DNA, 25 bp, Homo sapien
gagttccatgaccacattcatgccc

SEQ ID NO: 1601260 - DNA, 25 bp, Homo sapien
ggtgccacagatgttcaggtctttc

SEQ ID NO: 1601261 - DNA, 25 bp, Homo sapien
tctttcttgagttccatgaccacat

SEQ ID NO: 1601262 - DNA, 25 bp, Homo sapien
tgaacatgacttggatatactcttt

SEQ ID NO: 1601263 - DNA, 25 bp, Homo sapien
aggaaacattctgcttcaaagtatt

SEQ ID NO: 1601264 - DNA, 25 bp, Homo sapien
agacaggaatcgcaccaggtgaaca

SEQ ID NO: 1601265 - DNA, 25 bp, Homo sapien
gggtcagtgccagacaggaatcgca

SEQ ID NO: 1601266 - DNA, 25 bp, Homo sapien
ttgagccagccgtgggaagatttag

SEQ ID NO: 1601267 - DNA, 25 bp, Homo sapien
ctgatagatgaagggagctttcccc

SEQ ID NO: 1601268 - DNA, 25 bp, Homo sapien
tggcccatgacgtccctgatagatg

SEQ ID NO: 1601269 - DNA, 25 bp, Homo sapien
ttactaagggctggaggttgagcca

SEQ ID NO: 1601270 - DNA, 25 bp, Homo sapien
tgcataggctgtcaagctcgatgtg

SEQ ID NO: 1601271 - DNA, 25 bp, Homo sapien
taggctgtcaagctcgatgtgctca

SEQ ID NO: 1601272 - DNA, 25 bp, Homo sapien
gtcaagctcgatgtgctcaggaggc

SEQ ID NO: 1601273 - DNA, 25 bp, Homo sapien
gctgtcaagctcgatgtgctcagga

SEQ ID NO: 1601274 - DNA, 25 bp, Homo sapien
gctgtcctcaaaccctttgtcaaaa

SEQ ID NO: 1601275 - DNA, 25 bp, Homo sapien
tggcgatgctcattccccaggcaca

SEQ ID NO: 1601276 - DNA, 25 bp, Homo sapien
gatgctgtcctcaaaccctttgtca

SEQ ID NO: 1601277 - DNA, 25 bp, Homo sapien
gtctgggcagctggcgatgctcatt

SEQ ID NO: 1601278 - DNA, 25 bp, Homo sapien
cactggctgtctctatgcagccgct

SEQ ID NO: 1601279 - DNA, 25 bp, Homo sapien
ctggctgtctctatgcagccgctca

SEQ ID NO: 1601280 - DNA, 25 bp, Homo sapien
tggctgtctctatgcagccgctcac

SEQ ID NO: 1601281 - DNA, 25 bp, Homo sapien
ctgtctctatgcagccgctcaccct

SEQ ID NO: 1601282 - DNA, 25 bp, Homo sapien
tctacatgtatcatgtatacaattc

SEQ ID NO: 1601283 - DNA, 25 bp, Homo sapien
ttcttcctaatatacattcagggct

SEQ ID NO: 1601284 - DNA, 25 bp, Homo sapien
ttcctaatatacattcagggctact

SEQ ID NO: 1601285 - DNA, 25 bp, Homo sapien
catgtatcatgtatacaattctttt

SEQ ID NO: 1601286 - DNA, 25 bp, Homo sapien
tgaacccgtgaagtggaggttgcgg

SEQ ID NO: 1601287 - DNA, 25 bp, Homo sapien
cgggcatggtggcgcatgcctgtaa

SEQ ID NO: 1601288 - DNA, 25 bp, Homo sapien
cgcgcccggccaaccccatctctat

SEQ ID NO: 1601289 - DNA, 25 bp, Homo sapien
tctctattaaaaatacaaaattagc

SEQ ID NO: 1601290 - DNA, 25 bp, Homo sapien
tctttggtggacctcggctttcaga

SEQ ID NO: 1601291 - DNA, 25 bp, Homo sapien
tggagtactcccgactgcgtggtga

SEQ ID NO: 1601292 - DNA, 25 bp, Homo sapien
cgggtgtacctgcacttacggcaga

SEQ ID NO: 1601293 - DNA, 25 bp, Homo sapien
gcagacctggttggcctttagtgag

SEQ ID NO: 1601294 - DNA, 25 bp, Homo sapien
gcttggagttttcatggctgcccct

SEQ ID NO: 1601295 - DNA, 25 bp, Homo sapien
gaacagttggctcaagggccaccag

SEQ ID NO: 1601296 - DNA, 25 bp, Homo sapien
catgagccagatcccaccagtttct

SEQ ID NO: 1601297 - DNA, 25 bp, Homo sapien
tgaagtcctatcactgccgctctgc

SEQ ID NO: 1601298 - DNA, 25 bp, Homo sapien
attgcgtctgcacacccctgcgtgt

SEQ ID NO: 1601299 - DNA, 25 bp, Homo sapien
tccctcctagctgggagtgacgggt

SEQ ID NO: 1601300 - DNA, 25 bp, Homo sapien
tcctggagagggagaactcctggcc

SEQ ID NO: 1601301 - DNA, 25 bp, Homo sapien
gctgtttaatggaaacctgctgggc

SEQ ID NO: 1601302 - DNA, 25 bp, Homo sapien
gttaatgatacagtcacaggtcatg

SEQ ID NO: 1601303 - DNA, 25 bp, Homo sapien
tttatttagatgtacaccggctcag

SEQ ID NO: 1601304 - DNA, 25 bp, Homo sapien
taaatacaaccattggcaaacagtc

SEQ ID NO: 1601305 - DNA, 25 bp, Homo sapien
gatttgtatctgaaaagctgaccat

SEQ ID NO: 1601306 - DNA, 25 bp, Homo sapien
cccctgccacataatcacatcttta

SEQ ID NO: 1601307 - DNA, 25 bp, Homo sapien
aactttgctccggaggaggctgtct

SEQ ID NO: 1601308 - DNA, 25 bp, Homo sapien
ttcttttcaactttgctccggagga

SEQ ID NO: 1601309 - DNA, 25 bp, Homo sapien
ttcctttggcctcgacttttcagtg

SEQ ID NO: 1601310 - DNA, 25 bp, Homo sapien
tcgtcacgtgatggaggactcccag

SEQ ID NO: 1601311 - DNA, 25 bp, Homo sapien
taaggacaaagcactcggtcacggg

SEQ ID NO: 1601312 - DNA, 25 bp, Homo sapien
ggtacacatgcgtcaaagcctctcg

SEQ ID NO: 1601313 - DNA, 25 bp, Homo sapien
gcatcacgtggtaatggccgctcaa

SEQ ID NO: 1601314 - DNA, 25 bp, Homo sapien
gcccagtggcactaattttaagaca

SEQ ID NO: 1601315 - DNA, 25 bp, Homo sapien
ttacagatatgagccgccttgccca

SEQ ID NO: 1601316 - DNA, 25 bp, Homo sapien
tctcttgtggaatgcgtgatcacca

SEQ ID NO: 1601317 - DNA, 25 bp, Homo sapien
tttactgtctgagggccattctctt

SEQ ID NO: 1601318 - DNA, 25 bp, Homo sapien
cactcatgctgaactaacttgggca

SEQ ID NO: 1601319 - DNA, 25 bp, Homo sapien
tcaatgtgcccttgatggcgtgact

SEQ ID NO: 1601320 - DNA, 25 bp, Homo sapien
atgaaataccccgaagacaggtggg

SEQ ID NO: 1601321 - DNA, 25 bp, Homo sapien
tgcccggccggttgctttctaagaa

SEQ ID NO: 1601322 - DNA, 25 bp, Homo sapien
gagtgtggttgcgcaattatggttc

SEQ ID NO: 1601323 - DNA, 25 bp, Homo sapien
agtgtggttgcgcaattatggttca

SEQ ID NO: 1601324 - DNA, 25 bp, Homo sapien
ctggagtgtggttgcgcaattatgg

SEQ ID NO: 1601325 - DNA, 25 bp, Homo sapien
tgtggttgcgcaattatggttcact

SEQ ID NO: 1601326 - DNA, 25 bp, Homo sapien
ttggctatgagtcccacgtgtgccc

SEQ ID NO: 1601327 - DNA, 25 bp, Homo sapien
tgaggctttgactttacccgactgg

SEQ ID NO: 1601328 - DNA, 25 bp, Homo sapien
ggctcaggcttagccctgaggcttt

SEQ ID NO: 1601329 - DNA, 25 bp, Homo sapien
ccttagcttggtctctgagctcaca

SEQ ID NO: 1601330 - DNA, 25 bp, Homo sapien
aaaaaagcaggaaggtgcagacctc

SEQ ID NO: 1601331 - DNA, 25 bp, Homo sapien
agagcgagaccttgcttaaaatcag

SEQ ID NO: 1601332 - DNA, 25 bp, Homo sapien
ggtgcagacctccactagtgctgct

SEQ ID NO: 1601333 - DNA, 25 bp, Homo sapien
tggtcctgtgaaggctcaccctgaa

SEQ ID NO: 1601334 - DNA, 25 bp, Homo sapien
tcaaccgtggcttttcaccgcagct

SEQ ID NO: 1601335 - DNA, 25 bp, Homo sapien
ggttgatgcctttgacagtgatgaa

SEQ ID NO: 1601336 - DNA, 25 bp, Homo sapien
tagcctgcagaatttaagacaatgg

SEQ ID NO: 1601337 - DNA, 25 bp, Homo sapien
tctagagacagcgttgttcggcatc

SEQ ID NO: 1601338 - DNA, 25 bp, Homo sapien
tgtgccaacacacggagtcattctg

SEQ ID NO: 1601339 - DNA, 25 bp, Homo sapien
tgatcagcggttctttttgcagcaa

SEQ ID NO: 1601340 - DNA, 25 bp, Homo sapien
caaaggcgtagaagtttgtgccaac

SEQ ID NO: 1601341 - DNA, 25 bp, Homo sapien
tatcctgaatgacgttgaaaactcc

SEQ ID NO: 1601342 - DNA, 25 bp, Homo sapien
ccacgttgctgtgtcgtgaggtgca

SEQ ID NO: 1601343 - DNA, 25 bp, Homo sapien
tggtccttagagagggtccagttca

SEQ ID NO: 1601344 - DNA, 25 bp, Homo sapien
catatttagccgtgtttgggactcc

SEQ ID NO: 1601345 - DNA, 25 bp, Homo sapien
aaaactgcgcccgtcttaggcctgg

SEQ ID NO: 1601346 - DNA, 25 bp, Homo sapien
tttctgctccccgattctggtgtag

SEQ ID NO: 1601347 - DNA, 25 bp, Homo sapien
cccgattctggtgtagttctaagta

SEQ ID NO: 1601348 - DNA, 25 bp, Homo sapien
ggtgtagttctaagtacacagtgat

SEQ ID NO: 1601349 - DNA, 25 bp, Homo sapien
tcttggggaacccatcacaaaatag

SEQ ID NO: 1601350 - DNA, 25 bp, Homo sapien
ggtttctgaatgcagacccaccacg

SEQ ID NO: 1601351 - DNA, 25 bp, Homo sapien
gctaaatacctccaaactctgggca

SEQ ID NO: 1601352 - DNA, 25 bp, Homo sapien
cctgctgcagatacatgcggcacag

SEQ ID NO: 1601353 - DNA, 25 bp, Homo sapien
taacagtttccggatcagtgaccac

SEQ ID NO: 1601354 - DNA, 25 bp, Homo sapien
ggacgacaccgggttcaggaatatg

SEQ ID NO: 1601355 - DNA, 25 bp, Homo sapien
tatcaccttgagcactgacagtggc

SEQ ID NO: 1601356 - DNA, 25 bp, Homo sapien
gagacagtatcccagctacaacagg

SEQ ID NO: 1601357 - DNA, 25 bp, Homo sapien
agtgctgatgatgccgtcatgctgc

SEQ ID NO: 1601358 - DNA, 25 bp, Homo sapien
ggcctggcctttgcagcatagttgg

SEQ ID NO: 1601359 - DNA, 25 bp, Homo sapien
tgcagcatagttgggagcttctgga

SEQ ID NO: 1601360 - DNA, 25 bp, Homo sapien
tcactgcatgtacccggacccctag

SEQ ID NO: 1601361 - DNA, 25 bp, Homo sapien
cctttgcagcatagttgggagcttc

SEQ ID NO: 1601362 - DNA, 25 bp, Homo sapien
aaaaaaggcgataagtatgatggaa

SEQ ID NO: 1601363 - DNA, 25 bp, Homo sapien
aggcgataagtatgatggaaaaaag

SEQ ID NO: 1601364 - DNA, 25 bp, Homo sapien
cctgggcggaagaacgagacctcgt

SEQ ID NO: 1601365 - DNA, 25 bp, Homo sapien
gatgagggagagatcacagttggag

SEQ ID NO: 1601366 - DNA, 25 bp, Homo sapien
tggtatactactattaagtgaggcc

SEQ ID NO: 1601367 - DNA, 25 bp, Homo sapien
aaccttggtatactactattaagtg

SEQ ID NO: 1601368 - DNA, 25 bp, Homo sapien
tactattaagtgaggcctggcggga

SEQ ID NO: 1601369 - DNA, 25 bp, Homo sapien
aggcctggcgggatgttgtggctca

SEQ ID NO: 1601370 - DNA, 25 bp, Homo sapien
gagtataggataccaacaagactga

SEQ ID NO: 1601371 - DNA, 25 bp, Homo sapien
tcttctgtgaatcttatcaggagta

SEQ ID NO: 1601372 - DNA, 25 bp, Homo sapien
tattgacagtgataactgatgatgc

SEQ ID NO: 1601373 - DNA, 25 bp, Homo sapien
gatctcttggctgaggtaggcttgc

SEQ ID NO: 1601374 - DNA, 25 bp, Homo sapien
atctgttgattctccctcccatggg

SEQ ID NO: 1601375 - DNA, 25 bp, Homo sapien
gctggaagtcaaaaggcgcctggtg

SEQ ID NO: 1601376 - DNA, 25 bp, Homo sapien
ctgcatcgttcctgcacgtagccgt

SEQ ID NO: 1601377 - DNA, 25 bp, Homo sapien
aggctctgggtttgagcctgcatcg

SEQ ID NO: 1601378 - DNA, 25 bp, Homo sapien
ccaatggtgactagacgaacagact

SEQ ID NO: 1601379 - DNA, 25 bp, Homo sapien
tgcaatggacagattcgaccacgaa

SEQ ID NO: 1601380 - DNA, 25 bp, Homo sapien
cgaaaaggaatgaacgtcagacaca

SEQ ID NO: 1601381 - DNA, 25 bp, Homo sapien
ccagcgccgcatggtttctgagatg

SEQ ID NO: 1601382 - DNA, 25 bp, Homo sapien
gatccggacgcaagagtaatttctg

SEQ ID NO: 1601383 - DNA, 25 bp, Homo sapien
aattgcaagacagagttgctccacc

SEQ ID NO: 1601384 - DNA, 25 bp, Homo sapien
ccctcgatccggacgcaagagtaat

SEQ ID NO: 1601385 - DNA, 25 bp, Homo sapien
gacagagttgctccaccacatgtgg

SEQ ID NO: 1601386 - DNA, 25 bp, Homo sapien
gcagtttgccgaggaattacaggaa

SEQ ID NO: 1601387 - DNA, 25 bp, Homo sapien
ggcctgatcacatgccagctgcgaa

SEQ ID NO: 1601388 - DNA, 25 bp, Homo sapien
aactcagtgttaaggcctctggctg

SEQ ID NO: 1601389 - DNA, 25 bp, Homo sapien
tggtatctggaaatgcctgtctgca

SEQ ID NO: 1601390 - DNA, 25 bp, Homo sapien
tattcacgatgccaataggcaatgc

SEQ ID NO: 1601391 - DNA, 25 bp, Homo sapien
gagagactctttttaagggccaggc

SEQ ID NO: 1601392 - DNA, 25 bp, Homo sapien
gggcgacacatgttattaccacttt

SEQ ID NO: 1601393 - DNA, 25 bp, Homo sapien
cagcccagtaccctaaggagagcaa

SEQ ID NO: 1601394 - DNA, 25 bp, Homo sapien
gagtagcgacgattacaggagcctg

SEQ ID NO: 1601395 - DNA, 25 bp, Homo sapien
gggtgcctataattccacctactcg

SEQ ID NO: 1601396 - DNA, 25 bp, Homo sapien
tagcctggcatgatggtgggtgcct

SEQ ID NO: 1601397 - DNA, 25 bp, Homo sapien
cctggcatgatggtgggtgcctata

SEQ ID NO: 1601398 - DNA, 25 bp, Homo sapien
tgggtgcctataattccacctactc

SEQ ID NO: 1601399 - DNA, 25 bp, Homo sapien
tactctgatgcggtccaggttggct

SEQ ID NO: 1601400 - DNA, 25 bp, Homo sapien
cgtaaccatggcttagtggcctgga

SEQ ID NO: 1601401 - DNA, 25 bp, Homo sapien
cgtctgtaacagaggcccaaaatga

SEQ ID NO: 1601402 - DNA, 25 bp, Homo sapien
ggttggctttcaagagtccctggca

SEQ ID NO: 1601403 - DNA, 25 bp, Homo sapien
gactactgtacacattgagagcctc

SEQ ID NO: 1601404 - DNA, 25 bp, Homo sapien
gcagactactgtacacattgagagc

SEQ ID NO: 1601405 - DNA, 25 bp, Homo sapien
cagactactgtacacattgagagcc

SEQ ID NO: 1601406 - DNA, 25 bp, Homo sapien
agactactgtacacattgagagcct

SEQ ID NO: 1601407 - DNA, 25 bp, Homo sapien
aggtgcctttgctaggcccggagcc

SEQ ID NO: 1601408 - DNA, 25 bp, Homo sapien
catgcctccctgatgggtgggccca

SEQ ID NO: 1601409 - DNA, 25 bp, Homo sapien
ggtgtacatagtccttcccggccat

SEQ ID NO: 1601410 - DNA, 25 bp, Homo sapien
gcaggccttctataagtgcgggcac

SEQ ID NO: 1601411 - DNA, 25 bp, Homo sapien
caactggggctcagttaaactttgc

SEQ ID NO: 1601412 - DNA, 25 bp, Homo sapien
agcagatattctctgaccccctgca

SEQ ID NO: 1601413 - DNA, 25 bp, Homo sapien
tttctcttgtgccaggcgaccacct

SEQ ID NO: 1601414 - DNA, 25 bp, Homo sapien
ttcttctgagcttcgtgggaggccc

SEQ ID NO: 1601415 - DNA, 25 bp, Homo sapien
gaaatccgaggctcacgttccaacg

SEQ ID NO: 1601416 - DNA, 25 bp, Homo sapien
gagatttccaggaccgtcggtgcag

SEQ ID NO: 1601417 - DNA, 25 bp, Homo sapien
ccgctgaggacggaaggagactcat

SEQ ID NO: 1601418 - DNA, 25 bp, Homo sapien
ccctttgttataggaggcttctgcc

SEQ ID NO: 1601419 - DNA, 25 bp, Homo sapien
aagcgcttgagcgtgcagacctgca

SEQ ID NO: 1601420 - DNA, 25 bp, Homo sapien
gccacgttgacagctgaccagaagt

SEQ ID NO: 1601421 - DNA, 25 bp, Homo sapien
accagaagttgacccgctccaagtt

SEQ ID NO: 1601422 - DNA, 25 bp, Homo sapien
cccgcagtagcgtgagcatctggat

SEQ ID NO: 1601423 - DNA, 25 bp, Homo sapien
tataattcagttggagggcacaact

SEQ ID NO: 1601424 - DNA, 25 bp, Homo sapien
gggcaccccaggtgaatcctagaga

SEQ ID NO: 1601425 - DNA, 25 bp, Homo sapien
caggtgaatcctagagatctggaag

SEQ ID NO: 1601426 - DNA, 25 bp, Homo sapien
tcagttggagggcacaactacggag

SEQ ID NO: 1601427 - DNA, 25 bp, Homo sapien
ccagcttctcggagatggtgctgaa

SEQ ID NO: 1601428 - DNA, 25 bp, Homo sapien
tcatcctggaggctgtcaaagatca

SEQ ID NO: 1601429 - DNA, 25 bp, Homo sapien
agcttgtagtccccggcctccgttg

SEQ ID NO: 1601430 - DNA, 25 bp, Homo sapien
tgcccatccttcgacctcctcgtca

SEQ ID NO: 1601431 - DNA, 25 bp, Homo sapien
cagtcagggcggtaacctgaggccg

SEQ ID NO: 1601432 - DNA, 25 bp, Homo sapien
gccagccgactcagcggggcagtca

SEQ ID NO: 1601433 - DNA, 25 bp, Homo sapien
caggcaggcatcaagactgaactca

SEQ ID NO: 1601434 - DNA, 25 bp, Homo sapien
gaagggcagggctgtaactgaaccc

SEQ ID NO: 1601435 - DNA, 25 bp, Homo sapien
ttgcgggactcgctgaccaacagca

SEQ ID NO: 1601436 - DNA, 25 bp, Homo sapien
gtgtgtaccccatcagccttgcggg

SEQ ID NO: 1601437 - DNA, 25 bp, Homo sapien
tccagcgtgaagtccacgtccagtc

SEQ ID NO: 1601438 - DNA, 25 bp, Homo sapien
acgtccagtccagcacctccgatca

SEQ ID NO: 1601439 - DNA, 25 bp, Homo sapien
cacctccactggtggcattagtagc

SEQ ID NO: 1601440 - DNA, 25 bp, Homo sapien
ggcgcggactggtagaaacactgct

SEQ ID NO: 1601441 - DNA, 25 bp, Homo sapien
aggaacgtgaactcaccgtcctgga

SEQ ID NO: 1601442 - DNA, 25 bp, Homo sapien
attcggtctcgaggcttgcgttggc

SEQ ID NO: 1601443 - DNA, 25 bp, Homo sapien
tcttctcggccgctggtggaggaaa

SEQ ID NO: 1601444 - DNA, 25 bp, Homo sapien
caactaaagttacaggcggcagggt

SEQ ID NO: 1601445 - DNA, 25 bp, Homo sapien
gcccgaatgaatgcctgatgtgccc

SEQ ID NO: 1601446 - DNA, 25 bp, Homo sapien
tatgttgtccgtaaccagaggtgcc

SEQ ID NO: 1601447 - DNA, 25 bp, Homo sapien
tgcgtaataggaacaggagccattt

SEQ ID NO: 1601448 - DNA, 25 bp, Homo sapien
cagaaattgccggatacaattagga

SEQ ID NO: 1601449 - DNA, 25 bp, Homo sapien
gtgagatcatccctggagacccaca

SEQ ID NO: 1601450 - DNA, 25 bp, Homo sapien
taggaccaaaatctaacacatgctc

SEQ ID NO: 1601451 - DNA, 25 bp, Homo sapien
cgtctccgcggtgagtggttctttt

SEQ ID NO: 1601452 - DNA, 25 bp, Homo sapien
tcgataactccctgtttaccgtctc

SEQ ID NO: 1601453 - DNA, 25 bp, Homo sapien
tcttggaaccggttttctgctgacc

SEQ ID NO: 1601454 - DNA, 25 bp, Homo sapien
tctgtttcagacatgtccttcgata

SEQ ID NO: 1601455 - DNA, 25 bp, Homo sapien
ccgaattcagcactttccgggcctg

SEQ ID NO: 1601456 - DNA, 25 bp, Homo sapien
tgagacccccgaattcagcactttc

SEQ ID NO: 1601457 - DNA, 25 bp, Homo sapien
attcagcactttccgggcctgccag

SEQ ID NO: 1601458 - DNA, 25 bp, Homo sapien
ggaagaggcccacttccacgtcctc

SEQ ID NO: 1601459 - DNA, 25 bp, Homo sapien
agatccagcggcacgcggagcagca

SEQ ID NO: 1601460 - DNA, 25 bp, Homo sapien
tcgccctctacagccgtgagtacgg

SEQ ID NO: 1601461 - DNA, 25 bp, Homo sapien
catcggcgacgcgaacggcgagatc

SEQ ID NO: 1601462 - DNA, 25 bp, Homo sapien
aggcgctgcgcctcgaggtgcgcgc

SEQ ID NO: 1601463 - DNA, 25 bp, Homo sapien
aacataggtgaatccttggtctcct

SEQ ID NO: 1601464 - DNA, 25 bp, Homo sapien
ctttcgaggattggcccacacccaa

SEQ ID NO: 1601465 - DNA, 25 bp, Homo sapien
cataggtgaatccttggtctcctga

SEQ ID NO: 1601466 - DNA, 25 bp, Homo sapien
ccattaaatggagggggctttcgag

SEQ ID NO: 1601467 - DNA, 25 bp, Homo sapien
tgctgctcctggtccttgtcctgtg

SEQ ID NO: 1601468 - DNA, 25 bp, Homo sapien
tggtccttgtcctgtgtcaccgtgt

SEQ ID NO: 1601469 - DNA, 25 bp, Homo sapien
tccttgtcctgtgtcaccgtgttgg

SEQ ID NO: 1601470 - DNA, 25 bp, Homo sapien
ttgtcctgtgtcaccgtgttggcca

SEQ ID NO: 1601471 - DNA, 25 bp, Homo sapien
ccccttcgcctgtgccacatctgga

SEQ ID NO: 1601472 - DNA, 25 bp, Homo sapien
cacatctggcgaagcagcctgcagg

SEQ ID NO: 1601473 - DNA, 25 bp, Homo sapien
tctttgtggcatcagtagtgtctgc

SEQ ID NO: 1601474 - DNA, 25 bp, Homo sapien
tggaatcacatctggcgaagcagcc

SEQ ID NO: 1601475 - DNA, 25 bp, Homo sapien
caaaatcatgttgtgggagccctcg

SEQ ID NO: 1601476 - DNA, 25 bp, Homo sapien
tgtactggagaagctcgaacacccg

SEQ ID NO: 1601477 - DNA, 25 bp, Homo sapien
tctttgctatgggaactgggacact

SEQ ID NO: 1601478 - DNA, 25 bp, Homo sapien
aacaccatgcactacgggagctagg

SEQ ID NO: 1601479 - DNA, 25 bp, Homo sapien
agtgtcaatccgcagaccctctgtg

SEQ ID NO: 1601480 - DNA, 25 bp, Homo sapien
agaaccagtgtcaatccgcagaccc

SEQ ID NO: 1601481 - DNA, 25 bp, Homo sapien
aatccgcagaccctctgtgaagcca

SEQ ID NO: 1601482 - DNA, 25 bp, Homo sapien
tgaaaagaaccagtgtcaatccgca

SEQ ID NO: 1601483 - DNA, 25 bp, Homo sapien
ctaacgttaggcctgagtagctccc

SEQ ID NO: 1601484 - DNA, 25 bp, Homo sapien
cactcaagagttagagcaggtggct

SEQ ID NO: 1601485 - DNA, 25 bp, Homo sapien
ctcaaggatctgtcacggaaggcgt

SEQ ID NO: 1601486 - DNA, 25 bp, Homo sapien
tactgtgacggcatttccatccctc

SEQ ID NO: 1601487 - DNA, 25 bp, Homo sapien
gagctcaggcccgccgtgtgtgcac

SEQ ID NO: 1601488 - DNA, 25 bp, Homo sapien
cccaaactcagatgctggagctcag

SEQ ID NO: 1601489 - DNA, 25 bp, Homo sapien
gaggaaacgtgttgcagcacaggca

SEQ ID NO: 1601490 - DNA, 25 bp, Homo sapien
caggagcgggcgctgtccaggctgg

SEQ ID NO: 1601491 - DNA, 25 bp, Homo sapien
catctcaaggtgtcaaaggagcctt

SEQ ID NO: 1601492 - DNA, 25 bp, Homo sapien
tcatctcaaggtgtcaaaggagcct

SEQ ID NO: 1601493 - DNA, 25 bp, Homo sapien
aggcagaggggttggtccacttagg

SEQ ID NO: 1601494 - DNA, 25 bp, Homo sapien
gacaggcagaggggttggtccactt

SEQ ID NO: 1601495 - DNA, 25 bp, Homo sapien
acaggcagaggggttggtccactta

SEQ ID NO: 1601496 - DNA, 25 bp, Homo sapien
cagaggggttggtccacttaggtgt

SEQ ID NO: 1601497 - DNA, 25 bp, Homo sapien
cccagaacctctcgccttgactggg

SEQ ID NO: 1601498 - DNA, 25 bp, Homo sapien
agaacctctcgccttgactgggagt

SEQ ID NO: 1601499 - DNA, 25 bp, Homo sapien
gaacctctcgccttgactgggagtg

SEQ ID NO: 1601500 - DNA, 25 bp, Homo sapien
cagaacctctcgccttgactgggag

SEQ ID NO: 1601501 - DNA, 25 bp, Homo sapien
ggactgcggcaaggtaggggacagc

SEQ ID NO: 1601502 - DNA, 25 bp, Homo sapien
gaggcagcgactggaagaagtacaa

SEQ ID NO: 1601503 - DNA, 25 bp, Homo sapien
gagccacgttctccggaggcagcga

SEQ ID NO: 1601504 - DNA, 25 bp, Homo sapien
ggggacagcgcgatgtttgagggca

SEQ ID NO: 1601505 - DNA, 25 bp, Homo sapien
ctgcacaagacccctggggtcagag

SEQ ID NO: 1601506 - DNA, 25 bp, Homo sapien
gggccagcccatgcccccctagccc

SEQ ID NO: 1601507 - DNA, 25 bp, Homo sapien
gggtcagaggcagggccagcccatg

SEQ ID NO: 1601508 - DNA, 25 bp, Homo sapien
gcagggccagcccatgcccccctag

SEQ ID NO: 1601509 - DNA, 25 bp, Homo sapien
acgggccagagggtgaataccagcc

SEQ ID NO: 1601510 - DNA, 25 bp, Homo sapien
gccaccagcctggtgtcctcacgga

SEQ ID NO: 1601511 - DNA, 25 bp, Homo sapien
cgtggagcagcacgaccacggacag

SEQ ID NO: 1601512 - DNA, 25 bp, Homo sapien
gtgtcctcacggaccacgggccaga

SEQ ID NO: 1601513 - DNA, 25 bp, Homo sapien
aaggcacagggatgagccacaggac

SEQ ID NO: 1601514 - DNA, 25 bp, Homo sapien
ctgcagccaaggcacagggatgagc

SEQ ID NO: 1601515 - DNA, 25 bp, Homo sapien
cagccaaggcacagggatgagccac

SEQ ID NO: 1601516 - DNA, 25 bp, Homo sapien
caaggcacagggatgagccacagga

SEQ ID NO: 1601517 - DNA, 25 bp, Homo sapien
aggtgtagggccccatgcgctcctg

SEQ ID NO: 1601518 - DNA, 25 bp, Homo sapien
gatgcacacagtctccaggaaggtg

SEQ ID NO: 1601519 - DNA, 25 bp, Homo sapien
acacccttgcgccaccgcaggaagc

SEQ ID NO: 1601520 - DNA, 25 bp, Homo sapien
gggagtagccgtagatgcacacagt

SEQ ID NO: 1601521 - DNA, 25 bp, Homo sapien
ggcattgggcctgcccgtctgctta

SEQ ID NO: 1601522 - DNA, 25 bp, Homo sapien
gggcaaggtgagcagtcaccccctg

SEQ ID NO: 1601523 - DNA, 25 bp, Homo sapien
caaggtgagcagtcaccccctgtac

SEQ ID NO: 1601524 - DNA, 25 bp, Homo sapien
gccaggcattgggcctgcccgtctg

SEQ ID NO: 1601525 - DNA, 25 bp, Homo sapien
accagcgtcaggttgccagtgacgg

SEQ ID NO: 1601526 - DNA, 25 bp, Homo sapien
gacaaaggccaacgtggcacagatc

SEQ ID NO: 1601527 - DNA, 25 bp, Homo sapien
ggttgccagtgacggccaggacaaa

SEQ ID NO: 1601528 - DNA, 25 bp, Homo sapien
acaaaggccaacgtggcacagatcc

SEQ ID NO: 1601529 - DNA, 25 bp, Homo sapien
attccgcagatggtgccgcacaaag

SEQ ID NO: 1601530 - DNA, 25 bp, Homo sapien
gatggtgccgcacaaagttgtggcc

SEQ ID NO: 1601531 - DNA, 25 bp, Homo sapien
atacagatccggccgattccgcaga

SEQ ID NO: 1601532 - DNA, 25 bp, Homo sapien
ccgcacaaagttgtggccaggccgg

SEQ ID NO: 1601533 - DNA, 25 bp, Homo sapien
aatagttgtatttttaatagagacg

SEQ ID NO: 1601534 - DNA, 25 bp, Homo sapien
tgctctgtcggccaggctggatgga

SEQ ID NO: 1601535 - DNA, 25 bp, Homo sapien
atagttgtatttttaatagagacgg

SEQ ID NO: 1601536 - DNA, 25 bp, Homo sapien
gctggatggagtagtggcatgatct

SEQ ID NO: 1601537 - DNA, 25 bp, Homo sapien
agtgattctcgagcctcagactcct

SEQ ID NO: 1601538 - DNA, 25 bp, Homo sapien
tgattctcgagcctcagactcctga

SEQ ID NO: 1601539 - DNA, 25 bp, Homo sapien
ttctttttgagacagagtctcactc

SEQ ID NO: 1601540 - DNA, 25 bp, Homo sapien
cgcacccggcctcagcacccccttt

SEQ ID NO: 1601541 - DNA, 25 bp, Homo sapien
tgaaggtccagaatcccggctgctg

SEQ ID NO: 1601542 - DNA, 25 bp, Homo sapien
aaagaagctctgatagtagctgaag

SEQ ID NO: 1601543 - DNA, 25 bp, Homo sapien
gatagtagctgaaggtccagaatcc

SEQ ID NO: 1601544 - DNA, 25 bp, Homo sapien
caaagaagctctgatagtagctgaa

SEQ ID NO: 1601545 - DNA, 25 bp, Homo sapien
ctgcacattgcgggcattcagtgcc

SEQ ID NO: 1601546 - DNA, 25 bp, Homo sapien
cattcagtgcctgcccggagagcct

SEQ ID NO: 1601547 - DNA, 25 bp, Homo sapien
tgcctgcccggagagcctgggtcag

SEQ ID NO: 1601548 - DNA, 25 bp, Homo sapien
ttcagtgcctgcccggagagcctgg

SEQ ID NO: 1601549 - DNA, 25 bp, Homo sapien
ctccacctcatcctcggctccatag

SEQ ID NO: 1601550 - DNA, 25 bp, Homo sapien
acctcatcctcggctccatagctgc

SEQ ID NO: 1601551 - DNA, 25 bp, Homo sapien
tccacctcatcctcggctccatagc

SEQ ID NO: 1601552 - DNA, 25 bp, Homo sapien
gccacgtgcccttgtggggtcagct

SEQ ID NO: 1601553 - DNA, 25 bp, Homo sapien
cagctgatcgcttctgctggtggtg

SEQ ID NO: 1601554 - DNA, 25 bp, Homo sapien
cacgtgcccttgtggggtcagctga

SEQ ID NO: 1601555 - DNA, 25 bp, Homo sapien
ccacgtgcccttgtggggtcagctg

SEQ ID NO: 1601556 - DNA, 25 bp, Homo sapien
agccagaagattagtggcctcctcg

SEQ ID NO: 1601557 - DNA, 25 bp, Homo sapien
ccagaagattagtggcctcctcgaa

SEQ ID NO: 1601558 - DNA, 25 bp, Homo sapien
cagaagattagtggcctcctcgaat

SEQ ID NO: 1601559 - DNA, 25 bp, Homo sapien
agaagattagtggcctcctcgaatt

SEQ ID NO: 1601560 - DNA, 25 bp, Homo sapien
tcgactgggcccaagctaaaccgat

SEQ ID NO: 1601561 - DNA, 25 bp, Homo sapien
ggtggaaagaactcgactgggccca

SEQ ID NO: 1601562 - DNA, 25 bp, Homo sapien
aagaactcgactgggcccaagctaa

SEQ ID NO: 1601563 - DNA, 25 bp, Homo sapien
gggcccaagctaaaccgatgctcat

SEQ ID NO: 1601564 - DNA, 25 bp, Homo sapien
ggaaggtcagctcgtcggccgatgc

SEQ ID NO: 1601565 - DNA, 25 bp, Homo sapien
aggtcagctcgtcggccgatgccat

SEQ ID NO: 1601566 - DNA, 25 bp, Homo sapien
atggaaggtcagctcgtcggccgat

SEQ ID NO: 1601567 - DNA, 25 bp, Homo sapien
catggaaggtcagctcgtcggccga

SEQ ID NO: 1601568 - DNA, 25 bp, Homo sapien
cgttcaggggcgtctccgcatccct

SEQ ID NO: 1601569 - DNA, 25 bp, Homo sapien
ttcaggggcgtctccgcatccctcg

SEQ ID NO: 1601570 - DNA, 25 bp, Homo sapien
ggtcgttcaggggcgtctccgcatc

SEQ ID NO: 1601571 - DNA, 25 bp, Homo sapien
gtcgttcaggggcgtctccgcatcc

SEQ ID NO: 1601572 - DNA, 25 bp, Homo sapien
gacagagaccggtcaggcacacttc

SEQ ID NO: 1601573 - DNA, 25 bp, Homo sapien
tgaggacagagaccggtcaggcaca

SEQ ID NO: 1601574 - DNA, 25 bp, Homo sapien
ctgaggacagagaccggtcaggcac

SEQ ID NO: 1601575 - DNA, 25 bp, Homo sapien
aggacagagaccggtcaggcacact

SEQ ID NO: 1601576 - DNA, 25 bp, Homo sapien
tcgtcccgtccccacaggtgcgctc

SEQ ID NO: 1601577 - DNA, 25 bp, Homo sapien
cacccacggaggcttgaactcgtcg

SEQ ID NO: 1601578 - DNA, 25 bp, Homo sapien
ggaggcttgaactcgtcgtcccgtc

SEQ ID NO: 1601579 - DNA, 25 bp, Homo sapien
tggcgaccaactgcacccacggagg

SEQ ID NO: 1601580 - DNA, 25 bp, Homo sapien
tacccgtcagactccaaccgactca

SEQ ID NO: 1601581 - DNA, 25 bp, Homo sapien
gcgcgtctcgcctacccgtcagact

SEQ ID NO: 1601582 - DNA, 25 bp, Homo sapien
tgcgcctgcgcgtctcgcctacccg

SEQ ID NO: 1601583 - DNA, 25 bp, Homo sapien
tccaaccgactcagacctgacagca

SEQ ID NO: 1601584 - DNA, 25 bp, Homo sapien
atcggacgcgcgtgcttcctccggg

SEQ ID NO: 1601585 - DNA, 25 bp, Homo sapien
cagtggcgtccgctctgcgcatgct

SEQ ID NO: 1601586 - DNA, 25 bp, Homo sapien
gcgtcaagacgcgaggcgtgcagaa

SEQ ID NO: 1601587 - DNA, 25 bp, Homo sapien
gcagaaggcgaagcgtgcgcaggcg

SEQ ID NO: 1601588 - DNA, 25 bp, Homo sapien
ggagcacggaggaaatcctttgctg

SEQ ID NO: 1601589 - DNA, 25 bp, Homo sapien
ggcgagtgttttgtcccgatcttga

SEQ ID NO: 1601590 - DNA, 25 bp, Homo sapien
gatgccttgcagttagtgacttcaa

SEQ ID NO: 1601591 - DNA, 25 bp, Homo sapien
tcaacgtggaccttttgggcgagtg

SEQ ID NO: 1601592 - DNA, 25 bp, Homo sapien
gggagggtctgctgtgtgcgaccca

SEQ ID NO: 1601593 - DNA, 25 bp, Homo sapien
gagacttgagggggagggtctgctg

SEQ ID NO: 1601594 - DNA, 25 bp, Homo sapien
tgggagacttgagggggagggtctg

SEQ ID NO: 1601595 - DNA, 25 bp, Homo sapien
ggagggtctgctgtgtgcgacccat

SEQ ID NO: 1601596 - DNA, 25 bp, Homo sapien
cttgctccgaaagtcccagtaaagg

SEQ ID NO: 1601597 - DNA, 25 bp, Homo sapien
cgtgaatttcccctgctagtgactt

SEQ ID NO: 1601598 - DNA, 25 bp, Homo sapien
tagtgacttatcattgagggcccca

SEQ ID NO: 1601599 - DNA, 25 bp, Homo sapien
ttgcaggactctaagcggcaccgtg

SEQ ID NO: 1601600 - DNA, 25 bp, Homo sapien
caccgtgtaagacaccttagggacg

SEQ ID NO: 1601601 - DNA, 25 bp, Homo sapien
ccttcagggagggtgagctggccag

SEQ ID NO: 1601602 - DNA, 25 bp, Homo sapien
gaggttgagggctgagaacaacacc

SEQ ID NO: 1601603 - DNA, 25 bp, Homo sapien
caggaggaggttgagggctgagaac

SEQ ID NO: 1601604 - DNA, 25 bp, Homo sapien
ggttgagggctgagaacaacaccat

SEQ ID NO: 1601605 - DNA, 25 bp, Homo sapien
gaacagaaggttcagctcgtcagac

SEQ ID NO: 1601606 - DNA, 25 bp, Homo sapien
agggcccacggccatgaacagaagg

SEQ ID NO: 1601607 - DNA, 25 bp, Homo sapien
agaaggttcagctcgtcagacccca

SEQ ID NO: 1601608 - DNA, 25 bp, Homo sapien
ccatgaacagaaggttcagctcgtc

SEQ ID NO: 1601609 - DNA, 25 bp, Homo sapien
atgccccgagccagtcaagctgaag

SEQ ID NO: 1601610 - DNA, 25 bp, Homo sapien
gaaatcatcacggaagcgcaagcga

SEQ ID NO: 1601611 - DNA, 25 bp, Homo sapien
gtcccagtgtgtgttatgccccgag

SEQ ID NO: 1601612 - DNA, 25 bp, Homo sapien
ttactactattgaccctgaaggcca

SEQ ID NO: 1601613 - DNA, 25 bp, Homo sapien
caccaagaagatgaagaagattgtg

SEQ ID NO: 1601614 - DNA, 25 bp, Homo sapien
accaagaagatgaagaagattgtgg

SEQ ID NO: 1601615 - DNA, 25 bp, Homo sapien
acccacccaacctcaccaagaagat

SEQ ID NO: 1601616 - DNA, 25 bp, Homo sapien
cacccaacctcaccaagaagatgaa

SEQ ID NO: 1601617 - DNA, 25 bp, Homo sapien
gaataaagtcagacacagctaacag

SEQ ID NO: 1601618 - DNA, 25 bp, Homo sapien
caggtggtgctcatgtcactcggcc

SEQ ID NO: 1601619 - DNA, 25 bp, Homo sapien
gctgagaagagcttgaatggaataa

SEQ ID NO: 1601620 - DNA, 25 bp, Homo sapien
tctgtatgacacatctgtcagatcc

SEQ ID NO: 1601621 - DNA, 25 bp, Homo sapien
tctgaattgatgggttaaaaacaag

SEQ ID NO: 1601622 - DNA, 25 bp, Homo sapien
atgctcctgtgccagaacgcacaga

SEQ ID NO: 1601623 - DNA, 25 bp, Homo sapien
ccgctagctgtggtggttcgtgcct

SEQ ID NO: 1601624 - DNA, 25 bp, Homo sapien
tcctgtgccagaacgcacagacctt

SEQ ID NO: 1601625 - DNA, 25 bp, Homo sapien
taggccttagcagtaacgggtagca

SEQ ID NO: 1601626 - DNA, 25 bp, Homo sapien
tgttgcgccgcagtttggagtcact

SEQ ID NO: 1601627 - DNA, 25 bp, Homo sapien
tgtggatgcatgtgcgtcaccgtcc

SEQ ID NO: 1601628 - DNA, 25 bp, Homo sapien
ttattggacaggtcagactcgccgg

SEQ ID NO: 1601629 - DNA, 25 bp, Homo sapien
ttacagtaagtcttggccggagtgc

SEQ ID NO: 1601630 - DNA, 25 bp, Homo sapien
tacagtaagtcttggccggagtgca

SEQ ID NO: 1601631 - DNA, 25 bp, Homo sapien
acagtaagtcttggccggagtgcag

SEQ ID NO: 1601632 - DNA, 25 bp, Homo sapien
cagtaagtcttggccggagtgcagt

SEQ ID NO: 1601633 - DNA, 25 bp, Homo sapien
agggcatgatgggacctgacacggc

SEQ ID NO: 1601634 - DNA, 25 bp, Homo sapien
ggcatgatgggacctgacacggcct

SEQ ID NO: 1601635 - DNA, 25 bp, Homo sapien
atgatgggacctgacacggcctgga

SEQ ID NO: 1601636 - DNA, 25 bp, Homo sapien
tcagggcatgatgggacctgacacg

SEQ ID NO: 1601637 - DNA, 25 bp, Homo sapien
ctgctggagcgttaatatgaatgag

SEQ ID NO: 1601638 - DNA, 25 bp, Homo sapien
tgtgtccccacctcacaagtggcca

SEQ ID NO: 1601639 - DNA, 25 bp, Homo sapien
cctgatccacccatgtctgattctg

SEQ ID NO: 1601640 - DNA, 25 bp, Homo sapien
cgttaatatgaatgaggtgtccaga

SEQ ID NO: 1601641 - DNA, 25 bp, Homo sapien
accgaggacagagccccaattccag

SEQ ID NO: 1601642 - DNA, 25 bp, Homo sapien
gatgatgtctcctccttgacctaag

SEQ ID NO: 1601643 - DNA, 25 bp, Homo sapien
gggtcgccttgtgaactaagatgca

SEQ ID NO: 1601644 - DNA, 25 bp, Homo sapien
caagttctaaccaattcaaccgagg

SEQ ID NO: 1601645 - DNA, 25 bp, Homo sapien
ttacaggtaaccatcaccacacctg

SEQ ID NO: 1601646 - DNA, 25 bp, Homo sapien
gatcttcctgtctcggtctcccgaa

SEQ ID NO: 1601647 - DNA, 25 bp, Homo sapien
ccactgtgcccggccaatacgacat

SEQ ID NO: 1601648 - DNA, 25 bp, Homo sapien
cacacctggctaaattttgtatttt

SEQ ID NO: 1601649 - DNA, 25 bp, Homo sapien
cacattggtcaggctagcctcaaac

SEQ ID NO: 1601650 - DNA, 25 bp, Homo sapien
tttttttagacagtctctgtcaccc

SEQ ID NO: 1601651 - DNA, 25 bp, Homo sapien
gtgcctgtgaccacgcccggctgat

SEQ ID NO: 1601652 - DNA, 25 bp, Homo sapien
caaactcctgaccccgtgatccttc

SEQ ID NO: 1601653 - DNA, 25 bp, Homo sapien
ggaaatggaagaccttgcagcccag

SEQ ID NO: 1601654 - DNA, 25 bp, Homo sapien
tgccagataacggcgagtctgttcc

SEQ ID NO: 1601655 - DNA, 25 bp, Homo sapien
ccttggcctttggaaccatcagcca

SEQ ID NO: 1601656 - DNA, 25 bp, Homo sapien
cccaggtctttgtagaccaagatta

SEQ ID NO: 1601657 - DNA, 25 bp, Homo sapien
ccagccccgatcaagttcacagagg

SEQ ID NO: 1601658 - DNA, 25 bp, Homo sapien
gctgtgaatggcttcggttcagctg

SEQ ID NO: 1601659 - DNA, 25 bp, Homo sapien
tccttggtctgcagccgagatcttc

SEQ ID NO: 1601660 - DNA, 25 bp, Homo sapien
tacgaggttgaaacgttgcctcaga

SEQ ID NO: 1601661 - DNA, 25 bp, Homo sapien
tgttgtcaaggagactacacccctg

SEQ ID NO: 1601662 - DNA, 25 bp, Homo sapien
tgttggaatctgaaccgcaagcctt

SEQ ID NO: 1601663 - DNA, 25 bp, Homo sapien
tcacgctgtagctggcttcaaggca

SEQ ID NO: 1601664 - DNA, 25 bp, Homo sapien
tgttaaggaagtcttaggcaaggcc

SEQ ID NO: 1601665 - DNA, 25 bp, Homo sapien
acaccctctaggaagtagagactgc

SEQ ID NO: 1601666 - DNA, 25 bp, Homo sapien
ggaagtagagactgccattctcccc

SEQ ID NO: 1601667 - DNA, 25 bp, Homo sapien
accctctaggaagtagagactgcca

SEQ ID NO: 1601668 - DNA, 25 bp, Homo sapien
tctaggaagtagagactgccattct

SEQ ID NO: 1601669 - DNA, 25 bp, Homo sapien
ctgttagcttattgggaaatcactg

SEQ ID NO: 1601670 - DNA, 25 bp, Homo sapien
ccaggctggccgatggttgctgtta

SEQ ID NO: 1601671 - DNA, 25 bp, Homo sapien
tgttagcttattgggaaatcactgt

SEQ ID NO: 1601672 - DNA, 25 bp, Homo sapien
tgggtgaacacaaccacgcacagaa

SEQ ID NO: 1601673 - DNA, 25 bp, Homo sapien
gaacgcaaaccaatacacgtggctg

SEQ ID NO: 1601674 - DNA, 25 bp, Homo sapien
taagtatttcggacactgtgggcca

SEQ ID NO: 1601675 - DNA, 25 bp, Homo sapien
cctctgtggtggatactgaaagacc

SEQ ID NO: 1601676 - DNA, 25 bp, Homo sapien
ctgcaggcacgtggcactcagaaga

SEQ ID NO: 1601677 - DNA, 25 bp, Homo sapien
cccagtgatgggatcataccttgct

SEQ ID NO: 1601678 - DNA, 25 bp, Homo sapien
gagactttcgtcattaggcgcacac

SEQ ID NO: 1601679 - DNA, 25 bp, Homo sapien
gagacatccaccgtcaggctaaagg

SEQ ID NO: 1601680 - DNA, 25 bp, Homo sapien
gctctcgcccatgctgtactgcagt

SEQ ID NO: 1601681 - DNA, 25 bp, Homo sapien
ccatgctgtactgcagtgacgcagt

SEQ ID NO: 1601682 - DNA, 25 bp, Homo sapien
gtactgcagtgacgcagtctgggct

SEQ ID NO: 1601683 - DNA, 25 bp, Homo sapien
cgcccatgctgtactgcagtgacgc

SEQ ID NO: 1601684 - DNA, 25 bp, Homo sapien
tagctggtgcaagccactatacccc

SEQ ID NO: 1601685 - DNA, 25 bp, Homo sapien
tcctggacagaaatctagaagaagt

SEQ ID NO: 1601686 - DNA, 25 bp, Homo sapien
cagtgggcttcaggttagatatttc

SEQ ID NO: 1601687 - DNA, 25 bp, Homo sapien
ccctgtgtgtggctaatcctggaca

SEQ ID NO: 1601688 - DNA, 25 bp, Homo sapien
gacagtgcccatgcaatggcttggg

SEQ ID NO: 1601689 - DNA, 25 bp, Homo sapien
aacgtgtttacctcttctatgcaag

SEQ ID NO: 1601690 - DNA, 25 bp, Homo sapien
gcagaacaggcttcggacagtgccc

SEQ ID NO: 1601691 - DNA, 25 bp, Homo sapien
tagacagccaggttagcctttgccc

SEQ ID NO: 1601692 - DNA, 25 bp, Homo sapien
gaatatcgagaactgccattgtcgt

SEQ ID NO: 1601693 - DNA, 25 bp, Homo sapien
gtcgtctttatgtccgcccacctag

SEQ ID NO: 1601694 - DNA, 25 bp, Homo sapien
tttaaaacatgcacggtgaggccgg

SEQ ID NO: 1601695 - DNA, 25 bp, Homo sapien
caaagccgtgatcgtgaatatcgag

SEQ ID NO: 1601696 - DNA, 25 bp, Homo sapien
taagcctttctggtttcggagcacg

SEQ ID NO: 1601697 - DNA, 25 bp, Homo sapien
taaatgcgtccctgtacagatagtg

SEQ ID NO: 1601698 - DNA, 25 bp, Homo sapien
gactgtgtgcaacgctttttgggag

SEQ ID NO: 1601699 - DNA, 25 bp, Homo sapien
caaagattatttgcacgaactggac

SEQ ID NO: 1601700 - DNA, 25 bp, Homo sapien
cagtcgtagctcaccacggcaactt

SEQ ID NO: 1601701 - DNA, 25 bp, Homo sapien
gatgtggcgcagtcgtagctcacca

SEQ ID NO: 1601702 - DNA, 25 bp, Homo sapien
agtgatgtggcgcagtcgtagctca

SEQ ID NO: 1601703 - DNA, 25 bp, Homo sapien
tggcgcagtcgtagctcaccacggc

SEQ ID NO: 1601704 - DNA, 25 bp, Homo sapien
caccaccagacgctgttaaagctta

SEQ ID NO: 1601705 - DNA, 25 bp, Homo sapien
ttaagttcagtcgtggaaagggaca

SEQ ID NO: 1601706 - DNA, 25 bp, Homo sapien
taaaaacgcccctctctgattaaga

SEQ ID NO: 1601707 - DNA, 25 bp, Homo sapien
gattaagaactgcacttaagttcag

SEQ ID NO: 1601708 - DNA, 25 bp, Homo sapien
tcgtctgtacacgtggcagtatggc

SEQ ID NO: 1601709 - DNA, 25 bp, Homo sapien
tcatccctaaaggacggcactcgtc

SEQ ID NO: 1601710 - DNA, 25 bp, Homo sapien
tttgtgctgatatctggctctgcca

SEQ ID NO: 1601711 - DNA, 25 bp, Homo sapien
gaccttaactataagggcagctggg

SEQ ID NO: 1601712 - DNA, 25 bp, Homo sapien
caggcctggcatagataagtcgact

SEQ ID NO: 1601713 - DNA, 25 bp, Homo sapien
taagtcccggcacaaaagtcgcttc

SEQ ID NO: 1601714 - DNA, 25 bp, Homo sapien
ggagctgtcatcgaataccacggtg

SEQ ID NO: 1601715 - DNA, 25 bp, Homo sapien
tggtgtggctcctgtcgcaatctgg

SEQ ID NO: 1601716 - DNA, 25 bp, Homo sapien
cgctgggtgcaagacgcagccacga

SEQ ID NO: 1601717 - DNA, 25 bp, Homo sapien
cagatgcccgctgggtgcaagacgc

SEQ ID NO: 1601718 - DNA, 25 bp, Homo sapien
aaaaggaagacgtctagctgggcac

SEQ ID NO: 1601719 - DNA, 25 bp, Homo sapien
aggaagacgtctagctgggcacgat

SEQ ID NO: 1601720 - DNA, 25 bp, Homo sapien
cagaggtagtcgctgatgaatttcc

SEQ ID NO: 1601721 - DNA, 25 bp, Homo sapien
tagtcgctgatgaatttcctggaga

SEQ ID NO: 1601722 - DNA, 25 bp, Homo sapien
gactccagaggtagtcgctgatgaa

SEQ ID NO: 1601723 - DNA, 25 bp, Homo sapien
ccaccagactccagaggtagtcgct

SEQ ID NO: 1601724 - DNA, 25 bp, Homo sapien
gcacaagggttaaaatggctcccca

SEQ ID NO: 1601725 - DNA, 25 bp, Homo sapien
ttttatgtccctacctacagtgcac

SEQ ID NO: 1601726 - DNA, 25 bp, Homo sapien
ttactatatttattatagacgtggg

SEQ ID NO: 1601727 - DNA, 25 bp, Homo sapien
cagggtcctgctatgcaccatttta

SEQ ID NO: 1601728 - DNA, 25 bp, Homo sapien
cataatcccactcaattttactaac

SEQ ID NO: 1601729 - DNA, 25 bp, Homo sapien
tcataatcccactcaattttactaa

SEQ ID NO: 1601730 - DNA, 25 bp, Homo sapien
actcataatcccactcaattttact

SEQ ID NO: 1601731 - DNA, 25 bp, Homo sapien
ctcataatcccactcaattttacta

SEQ ID NO: 1601732 - DNA, 25 bp, Homo sapien
ttggtggtaaagttgagccacgtac

SEQ ID NO: 1601733 - DNA, 25 bp, Homo sapien
tgtcgctccagatccgcctcaatct

SEQ ID NO: 1601734 - DNA, 25 bp, Homo sapien
tgactgtcgtgtcctcgtcgacctc

SEQ ID NO: 1601735 - DNA, 25 bp, Homo sapien
gggattgtgactgtcgtgtcctcgt

SEQ ID NO: 1601736 - DNA, 25 bp, Homo sapien
ttctcctgtcgctccagatccgcct

SEQ ID NO: 1601737 - DNA, 25 bp, Homo sapien
ccccggctttcgagagagggctgcc

SEQ ID NO: 1601738 - DNA, 25 bp, Homo sapien
cccggctttcgagagagggctgccc

SEQ ID NO: 1601739 - DNA, 25 bp, Homo sapien
gaccccggctttcgagagagggctg

SEQ ID NO: 1601740 - DNA, 25 bp, Homo sapien
accccggctttcgagagagggctgc

SEQ ID NO: 1601741 - DNA, 25 bp, Homo sapien
tgcagctccacgcctccctggtgca

SEQ ID NO: 1601742 - DNA, 25 bp, Homo sapien
ctgcagctccacgcctccctggtgc

SEQ ID NO: 1601743 - DNA, 25 bp, Homo sapien
gcagctccacgcctccctggtgcac

SEQ ID NO: 1601744 - DNA, 25 bp, Homo sapien
tgctccttcgcattgagaaggctct

SEQ ID NO: 1601745 - DNA, 25 bp, Homo sapien
gctccttcgcattgagaaggctctg

SEQ ID NO: 1601746 - DNA, 25 bp, Homo sapien
ctccttcgcattgagaaggctctgg

SEQ ID NO: 1601747 - DNA, 25 bp, Homo sapien
ctgctccttcgcattgagaaggctc

SEQ ID NO: 1601748 - DNA, 25 bp, Homo sapien
cctcctctatgtcgcggaaggcggc

SEQ ID NO: 1601749 - DNA, 25 bp, Homo sapien
cggcaccgtcttgcgtttccagcag

SEQ ID NO: 1601750 - DNA, 25 bp, Homo sapien
ggctcacctcctctatgtcgcggaa

SEQ ID NO: 1601751 - DNA, 25 bp, Homo sapien
gcctccgcgcggttggcgcccagca

SEQ ID NO: 1601752 - DNA, 25 bp, Homo sapien
caacccgcgcaaatttgactgtccg

SEQ ID NO: 1601753 - DNA, 25 bp, Homo sapien
ccgcgcaaatttgactgtccgcggg

SEQ ID NO: 1601754 - DNA, 25 bp, Homo sapien
caaatttgactgtccgcggggcccg

SEQ ID NO: 1601755 - DNA, 25 bp, Homo sapien
caggctccaacccgcgcaaatttga

SEQ ID NO: 1601756 - DNA, 25 bp, Homo sapien
tagctagcggctacactattgttgg

SEQ ID NO: 1601757 - DNA, 25 bp, Homo sapien
tactgtgatattcttgcaactgttc

SEQ ID NO: 1601758 - DNA, 25 bp, Homo sapien
cagagcatgaaggtgtttactgtga

SEQ ID NO: 1601759 - DNA, 25 bp, Homo sapien
aaaaagagatttgcagcagctcacg

SEQ ID NO: 1601760 - DNA, 25 bp, Homo sapien
ggacgtaccgtgatcagaaagtgaa

SEQ ID NO: 1601761 - DNA, 25 bp, Homo sapien
aagtgtagagagatgcgtggaccca

SEQ ID NO: 1601762 - DNA, 25 bp, Homo sapien
cgagtccagtatcccacggagagaa

SEQ ID NO: 1601763 - DNA, 25 bp, Homo sapien
gggtcacgcattcctgggccaagga

SEQ ID NO: 1601764 - DNA, 25 bp, Homo sapien
ggcagctccggaaagtctctaggtt

SEQ ID NO: 1601765 - DNA, 25 bp, Homo sapien
gttttgccaacaagcgcatgccctg

SEQ ID NO: 1601766 - DNA, 25 bp, Homo sapien
tttaatgaacctgcgagctctcagc

SEQ ID NO: 1601767 - DNA, 25 bp, Homo sapien
ggagcgcactcctgatcacaaagca

SEQ ID NO: 1601768 - DNA, 25 bp, Homo sapien
gccctggcgccaatgtatacaagaa

SEQ ID NO: 1601769 - DNA, 25 bp, Homo sapien
gattgggtccctgtaagtcacagag

SEQ ID NO: 1601770 - DNA, 25 bp, Homo sapien
gactgagttttctgtcccgggtgac

SEQ ID NO: 1601771 - DNA, 25 bp, Homo sapien
cccgggtgacaaggacagaatctgt

SEQ ID NO: 1601772 - DNA, 25 bp, Homo sapien
gatgtagggctctcgtcatctgaca

SEQ ID NO: 1601773 - DNA, 25 bp, Homo sapien
ttctgccgaggatgatgtagggctc

SEQ ID NO: 1601774 - DNA, 25 bp, Homo sapien
tactcttctgccgaggatgatgtag

SEQ ID NO: 1601775 - DNA, 25 bp, Homo sapien
tgatgtagggctctcgtcatctgac

SEQ ID NO: 1601776 - DNA, 25 bp, Homo sapien
tcacagtagccttgactatctgggc

SEQ ID NO: 1601777 - DNA, 25 bp, Homo sapien
tgagtctggcctgaatgctccttaa

SEQ ID NO: 1601778 - DNA, 25 bp, Homo sapien
cttgttcctgctgcccggaagacca

SEQ ID NO: 1601779 - DNA, 25 bp, Homo sapien
tgctccttaaacacgtcagacacac

SEQ ID NO: 1601780 - DNA, 25 bp, Homo sapien
ccgtgcctacccggccggattgaga

SEQ ID NO: 1601781 - DNA, 25 bp, Homo sapien
cctacccggccggattgagactcac

SEQ ID NO: 1601782 - DNA, 25 bp, Homo sapien
gtgcctacccggccggattgagact

SEQ ID NO: 1601783 - DNA, 25 bp, Homo sapien
tgcctacccggccggattgagactc

SEQ ID NO: 1601784 - DNA, 25 bp, Homo sapien
catgcgggaatacagcatggacgca

SEQ ID NO: 1601785 - DNA, 25 bp, Homo sapien
tctgccctgcgtccaaggccaccat

SEQ ID NO: 1601786 - DNA, 25 bp, Homo sapien
gaatacagcatggacgcaatctcac

SEQ ID NO: 1601787 - DNA, 25 bp, Homo sapien
cacttgatgttcatgcgggaataca

SEQ ID NO: 1601788 - DNA, 25 bp, Homo sapien
gcaaagtatccggtgctatgaatga

SEQ ID NO: 1601789 - DNA, 25 bp, Homo sapien
tatccggtgctatgaatgacgtccc

SEQ ID NO: 1601790 - DNA, 25 bp, Homo sapien
cccggggtgcacctggttggagact

SEQ ID NO: 1601791 - DNA, 25 bp, Homo sapien
aaagtatccggtgctatgaatgacg

SEQ ID NO: 1601792 - DNA, 25 bp, Homo sapien
ttgtggccgtgctcacaggcgcaca

SEQ ID NO: 1601793 - DNA, 25 bp, Homo sapien
tgagatgtcacagctgggcacggcc

SEQ ID NO: 1601794 - DNA, 25 bp, Homo sapien
gagggccgtggagccgtcatcatct

SEQ ID NO: 1601795 - DNA, 25 bp, Homo sapien
tcttgcacgttgacatctgcctcac

SEQ ID NO: 1601796 - DNA, 25 bp, Homo sapien
cctcctgaatctcaaacaaccctcc

SEQ ID NO: 1601797 - DNA, 25 bp, Homo sapien
gtgaaatgtaccctcaacttgctga

SEQ ID NO: 1601798 - DNA, 25 bp, Homo sapien
aatgtaccctcaacttgctgatctc

SEQ ID NO: 1601799 - DNA, 25 bp, Homo sapien
atggtgaaatgtaccctcaacttgc

SEQ ID NO: 1601800 - DNA, 25 bp, Homo sapien
tctgcagcagccggggtccccatac

SEQ ID NO: 1601801 - DNA, 25 bp, Homo sapien
atctgcagcagccggggtccccata

SEQ ID NO: 1601802 - DNA, 25 bp, Homo sapien
ggatctgcagcagccggggtcccca

SEQ ID NO: 1601803 - DNA, 25 bp, Homo sapien
ctggatctgcagcagccggggtccc

SEQ ID NO: 1601804 - DNA, 25 bp, Homo sapien
tctcgatgtcgtcctgggtcttcag

SEQ ID NO: 1601805 - DNA, 25 bp, Homo sapien
caagccggaagagctgaaggacagt

SEQ ID NO: 1601806 - DNA, 25 bp, Homo sapien
gccagcacggttctgtttgtccacc

SEQ ID NO: 1601807 - DNA, 25 bp, Homo sapien
tggcattgatgttgccaagccggaa

SEQ ID NO: 1601808 - DNA, 25 bp, Homo sapien
agcagccgcgcagacatggcccgga

SEQ ID NO: 1601809 - DNA, 25 bp, Homo sapien
tgccgttgctgtcggcgatgttgac

SEQ ID NO: 1601810 - DNA, 25 bp, Homo sapien
aagttggcatgagacacggagtagt

SEQ ID NO: 1601811 - DNA, 25 bp, Homo sapien
atggcccggaacgtgaccaggtgcc

SEQ ID NO: 1601812 - DNA, 25 bp, Homo sapien
gagaggatgtgagggcgggggaggc

SEQ ID NO: 1601813 - DNA, 25 bp, Homo sapien
gcatgcgagtcaggtgggagaggat

SEQ ID NO: 1601814 - DNA, 25 bp, Homo sapien
accccagatgcgcccccggagcaaa

SEQ ID NO: 1601815 - DNA, 25 bp, Homo sapien
cagatgcgcccccggagcaaagcgt

SEQ ID NO: 1601816 - DNA, 25 bp, Homo sapien
tgtcagggtccccactaggcaggag

SEQ ID NO: 1601817 - DNA, 25 bp, Homo sapien
tctccgaggcccatgacttgagcac

SEQ ID NO: 1601818 - DNA, 25 bp, Homo sapien
tcgccaaagtcaagtgtagatgccc

SEQ ID NO: 1601819 - DNA, 25 bp, Homo sapien
ccagccctggttataatcgccaaag

SEQ ID NO: 1601820 - DNA, 25 bp, Homo sapien
aggtacttttccagggccaagcagg

SEQ ID NO: 1601821 - DNA, 25 bp, Homo sapien
tctgtgagggcgttgggattgtcca

SEQ ID NO: 1601822 - DNA, 25 bp, Homo sapien
caggtacttttccagggccaagcag

SEQ ID NO: 1601823 - DNA, 25 bp, Homo sapien
agggcgttgggattgtccaggtact

SEQ ID NO: 1601824 - DNA, 25 bp, Homo sapien
tctgcaccacgtcactcacaatagg

SEQ ID NO: 1601825 - DNA, 25 bp, Homo sapien
tgggaagggacttgacattctgcac

SEQ ID NO: 1601826 - DNA, 25 bp, Homo sapien
gaactaagtaagccccgctgcggtg

SEQ ID NO: 1601827 - DNA, 25 bp, Homo sapien
caatagggtcacctgaatggtggca

SEQ ID NO: 1601828 - DNA, 25 bp, Homo sapien
tggagtcctcggatgacgactcata

SEQ ID NO: 1601829 - DNA, 25 bp, Homo sapien
tgtgctgagattctcgagacagctg

SEQ ID NO: 1601830 - DNA, 25 bp, Homo sapien
ggcctcgttctctgtgctgtcgttg

SEQ ID NO: 1601831 - DNA, 25 bp, Homo sapien
tcctccgtgtttgatcctgatgccc

SEQ ID NO: 1601832 - DNA, 25 bp, Homo sapien
cgccgttgacccccacgaactggag

SEQ ID NO: 1601833 - DNA, 25 bp, Homo sapien
gacccccacgaactggaggctcctc

SEQ ID NO: 1601834 - DNA, 25 bp, Homo sapien
ttgacccccacgaactggaggctcc

SEQ ID NO: 1601835 - DNA, 25 bp, Homo sapien
cgttgacccccacgaactggaggct

SEQ ID NO: 1601836 - DNA, 25 bp, Homo sapien
gtttcatgatagatcgcacgcctgc

SEQ ID NO: 1601837 - DNA, 25 bp, Homo sapien
tttccgtttcatgatagatcgcacg

SEQ ID NO: 1601838 - DNA, 25 bp, Homo sapien
cctctttccgtttcatgatagatcg

SEQ ID NO: 1601839 - DNA, 25 bp, Homo sapien
ttcatgatagatcgcacgcctgccg

SEQ ID NO: 1601840 - DNA, 25 bp, Homo sapien
tggaggggaggacagcggaggtgct

SEQ ID NO: 1601841 - DNA, 25 bp, Homo sapien
cctcctcggactcttgggaggctgc

SEQ ID NO: 1601842 - DNA, 25 bp, Homo sapien
ctcctcggactcttgggaggctgct

SEQ ID NO: 1601843 - DNA, 25 bp, Homo sapien
ggcctcctcggactcttgggaggct

SEQ ID NO: 1601844 - DNA, 25 bp, Homo sapien
cccggcctcctcggactcttgggag

SEQ ID NO: 1601845 - DNA, 25 bp, Homo sapien
aagacgattcggcaggaacttctgg

SEQ ID NO: 1601846 - DNA, 25 bp, Homo sapien
gggtgacgaagacgattcggcagga

SEQ ID NO: 1601847 - DNA, 25 bp, Homo sapien
tgacgaagacgattcggcaggaact

SEQ ID NO: 1601848 - DNA, 25 bp, Homo sapien
ctgtgtaagggaggctacctcggac

SEQ ID NO: 1601849 - DNA, 25 bp, Homo sapien
aaagagtaacatagacagggccggc

SEQ ID NO: 1601850 - DNA, 25 bp, Homo sapien
tgagacactcggtcatcggcatggc

SEQ ID NO: 1601851 - DNA, 25 bp, Homo sapien
caactttagtacagaacggtgacca

SEQ ID NO: 1601852 - DNA, 25 bp, Homo sapien
tgcagggcgcctaacttgaaatcct

SEQ ID NO: 1601853 - DNA, 25 bp, Homo sapien
tgcctggaccctggcgttctgagag

SEQ ID NO: 1601854 - DNA, 25 bp, Homo sapien
ccaggatgagccatgggaagaaaga

SEQ ID NO: 1601855 - DNA, 25 bp, Homo sapien
gagagtccaggatgagccatgggaa

SEQ ID NO: 1601856 - DNA, 25 bp, Homo sapien
ggaccctggcgttctgagagtccag

SEQ ID NO: 1601857 - DNA, 25 bp, Homo sapien
cttcttcaccatatggacgttgctg

SEQ ID NO: 1601858 - DNA, 25 bp, Homo sapien
accatatggacgttgctggtagctg

SEQ ID NO: 1601859 - DNA, 25 bp, Homo sapien
tctgtgatgctaatcttcttcacca

SEQ ID NO: 1601860 - DNA, 25 bp, Homo sapien
tgctccatcgcagcttcgctctgtg

SEQ ID NO: 1601861 - DNA, 25 bp, Homo sapien
actccgggtctccagtgccactggg

SEQ ID NO: 1601862 - DNA, 25 bp, Homo sapien
tcctcctggagcaccgagagcttca

SEQ ID NO: 1601863 - DNA, 25 bp, Homo sapien
caagtcccgttctcgaacccaggtg

SEQ ID NO: 1601864 - DNA, 25 bp, Homo sapien
ggactgtatccacgcggaccgggct

SEQ ID NO: 1601865 - DNA, 25 bp, Homo sapien
cactgggaggcaccggtgtggacag

SEQ ID NO: 1601866 - DNA, 25 bp, Homo sapien
gtgtggacagtcctgaactccgtgg

SEQ ID NO: 1601867 - DNA, 25 bp, Homo sapien
gcacgtgggccaggtgcccggcact

SEQ ID NO: 1601868 - DNA, 25 bp, Homo sapien
gcttccgcagggcacccgccatctg

SEQ ID NO: 1601869 - DNA, 25 bp, Homo sapien
tcgagacggcgacgggcatccagca

SEQ ID NO: 1601870 - DNA, 25 bp, Homo sapien
ccgcctggtcctcgagacggcgacg

SEQ ID NO: 1601871 - DNA, 25 bp, Homo sapien
gggcatccagcagcgtgcgctccac

SEQ ID NO: 1601872 - DNA, 25 bp, Homo sapien
agggagcccaggccggtgggtgtgg

SEQ ID NO: 1601873 - DNA, 25 bp, Homo sapien
cagcgtgtggcccttctcgatgtca

SEQ ID NO: 1601874 - DNA, 25 bp, Homo sapien
tggcattggagcacagcgactcagt

SEQ ID NO: 1601875 - DNA, 25 bp, Homo sapien
cacggccgcagtaggaataggctga

SEQ ID NO: 1601876 - DNA, 25 bp, Homo sapien
agtccaggtccaggcggtagccata

SEQ ID NO: 1601877 - DNA, 25 bp, Homo sapien
gggaaggcaggtggggaggctgggc

SEQ ID NO: 1601878 - DNA, 25 bp, Homo sapien
cttggcagggaaggcaggtggggag

SEQ ID NO: 1601879 - DNA, 25 bp, Homo sapien
agggaaggcaggtggggaggctggg

SEQ ID NO: 1601880 - DNA, 25 bp, Homo sapien
tggcagggaaggcaggtggggaggc

SEQ ID NO: 1601881 - DNA, 25 bp, Homo sapien
gaagggagcaggcacgtgcaggacc

SEQ ID NO: 1601882 - DNA, 25 bp, Homo sapien
gggagcaggcacgtgcaggacctgg

SEQ ID NO: 1601883 - DNA, 25 bp, Homo sapien
tgggaagggagcaggcacgtgcagg

SEQ ID NO: 1601884 - DNA, 25 bp, Homo sapien
caggcacgtgcaggacctgggccat

SEQ ID NO: 1601885 - DNA, 25 bp, Homo sapien
cttggaagtcacttgagggactgcg

SEQ ID NO: 1601886 - DNA, 25 bp, Homo sapien
ttggaagtcacttgagggactgcga

SEQ ID NO: 1601887 - DNA, 25 bp, Homo sapien
tgagggactgcgagtcagactgcct

SEQ ID NO: 1601888 - DNA, 25 bp, Homo sapien
agggactgcgagtcagactgcctgc

SEQ ID NO: 1601889 - DNA, 25 bp, Homo sapien
agagaaccacggcgccgggagttag

SEQ ID NO: 1601890 - DNA, 25 bp, Homo sapien
gggaggatgggccaggtagggcacc

SEQ ID NO: 1601891 - DNA, 25 bp, Homo sapien
ggaggatgggccaggtagggcacct

SEQ ID NO: 1601892 - DNA, 25 bp, Homo sapien
tgagcttgtccttgttctcccgtcc

SEQ ID NO: 1601893 - DNA, 25 bp, Homo sapien
gcttgtccttgttctcccgtcctgt

SEQ ID NO: 1601894 - DNA, 25 bp, Homo sapien
tcccgtcctgtcttgctttgtctct

SEQ ID NO: 1601895 - DNA, 25 bp, Homo sapien
tgtccttgttctcccgtcctgtctt

SEQ ID NO: 1601896 - DNA, 25 bp, Homo sapien
tctgtctctctgcgtctctctccac

SEQ ID NO: 1601897 - DNA, 25 bp, Homo sapien
cacgtctctgtcttcgcttctctgt

SEQ ID NO: 1601898 - DNA, 25 bp, Homo sapien
ctgtctttccacgtctctgtcttcg

SEQ ID NO: 1601899 - DNA, 25 bp, Homo sapien
tctctgtcttcgcttctctgtcttt

SEQ ID NO: 1601900 - DNA, 25 bp, Homo sapien
tgtccttctgcgtctctctccgtgt

SEQ ID NO: 1601901 - DNA, 25 bp, Homo sapien
cacatggtcaccaattgcaggaaat

SEQ ID NO: 1601902 - DNA, 25 bp, Homo sapien
tggaacacatggtcaccaattgcag

SEQ ID NO: 1601903 - DNA, 25 bp, Homo sapien
caattgcaggaaattccgttttcca

SEQ ID NO: 1601904 - DNA, 25 bp, Homo sapien
tggtcaccaattgcaggaaattccg

SEQ ID NO: 1601905 - DNA, 25 bp, Homo sapien
atgaacctaagcctggtggatcccc

SEQ ID NO: 1601906 - DNA, 25 bp, Homo sapien
tgggcctgaacatgaacctaagcct

SEQ ID NO: 1601907 - DNA, 25 bp, Homo sapien
gcctaacatcaactcttttaattgt

SEQ ID NO: 1601908 - DNA, 25 bp, Homo sapien
tatgagatgggcacttatcgccccg

SEQ ID NO: 1601909 - DNA, 25 bp, Homo sapien
tgagacccttctctcgccatgggac

SEQ ID NO: 1601910 - DNA, 25 bp, Homo sapien
tgaggaccagcacgtcccgagtaag

SEQ ID NO: 1601911 - DNA, 25 bp, Homo sapien
tctgagggtactcagtcatctcacc

SEQ ID NO: 1601912 - DNA, 25 bp, Homo sapien
tctcaccgccctcgatgaggaccag

SEQ ID NO: 1601913 - DNA, 25 bp, Homo sapien
ctggagcctataagaggggacaggt

SEQ ID NO: 1601914 - DNA, 25 bp, Homo sapien
ggagcctataagaggggacaggtag

SEQ ID NO: 1601915 - DNA, 25 bp, Homo sapien
ggagagactggagcctataagaggg

SEQ ID NO: 1601916 - DNA, 25 bp, Homo sapien
agactggagcctataagaggggaca

SEQ ID NO: 1601917 - DNA, 25 bp, Homo sapien
gatcccgggctaatggcaaacagct

SEQ ID NO: 1601918 - DNA, 25 bp, Homo sapien
caagaccggcctgcacatcgcggag

SEQ ID NO: 1601919 - DNA, 25 bp, Homo sapien
accggcctgcacatcgcggaggtcg

SEQ ID NO: 1601920 - DNA, 25 bp, Homo sapien
aaggaccccgccccgtgcagagagg

SEQ ID NO: 1601921 - DNA, 25 bp, Homo sapien
gcgaggggggacagtgcggggagag

SEQ ID NO: 1601922 - DNA, 25 bp, Homo sapien
aggagggcgaggggggacagtgcgg

SEQ ID NO: 1601923 - DNA, 25 bp, Homo sapien
gaggagggcgaggggggacagtgcg

SEQ ID NO: 1601924 - DNA, 25 bp, Homo sapien
gtcccgccgcccgagcgtcttcgcg

SEQ ID NO: 1601925 - DNA, 25 bp, Homo sapien
cgcccgagcgtcttcgcgcgcgccg

SEQ ID NO: 1601926 - DNA, 25 bp, Homo sapien
cccgagcgtcttcgcgcgcgccgca

SEQ ID NO: 1601927 - DNA, 25 bp, Homo sapien
cgccgcccgagcgtcttcgcgcgcg

SEQ ID NO: 1601928 - DNA, 25 bp, Homo sapien
aggtgtgtgtgcgcgccggggtgtc

SEQ ID NO: 1601929 - DNA, 25 bp, Homo sapien
gtgtgtgtgcgcgccggggtgtccg

SEQ ID NO: 1601930 - DNA, 25 bp, Homo sapien
gtgtgtgcgcgccggggtgtccggc

SEQ ID NO: 1601931 - DNA, 25 bp, Homo sapien
cttcctccctaagtccccgaggcag

SEQ ID NO: 1601932 - DNA, 25 bp, Homo sapien
taaatattattaagccggcgaggtg

SEQ ID NO: 1601933 - DNA, 25 bp, Homo sapien
ttttagtacacagccagccactcag

SEQ ID NO: 1601934 - DNA, 25 bp, Homo sapien
gaagattcactgaccattaggaagg

SEQ ID NO: 1601935 - DNA, 25 bp, Homo sapien
catgttagctacctgataggagcgt

SEQ ID NO: 1601936 - DNA, 25 bp, Homo sapien
ttcctctaggtacagctttggtcct

SEQ ID NO: 1601937 - DNA, 25 bp, Homo sapien
cctctaggtacagctttggtccttg

SEQ ID NO: 1601938 - DNA, 25 bp, Homo sapien
cagggcagactcccctcgcagcaca

SEQ ID NO: 1601939 - DNA, 25 bp, Homo sapien
gcagactcccctcgcagcacagaca

SEQ ID NO: 1601940 - DNA, 25 bp, Homo sapien
ggtctgcctttcggaaacttgctct

SEQ ID NO: 1601941 - DNA, 25 bp, Homo sapien
cagaggtctgcctttcggaaacttg

SEQ ID NO: 1601942 - DNA, 25 bp, Homo sapien
agaggtctgcctttcggaaacttgc

SEQ ID NO: 1601943 - DNA, 25 bp, Homo sapien
gaggtctgcctttcggaaacttgct

SEQ ID NO: 1601944 - DNA, 25 bp, Homo sapien
tctaggatgggggcactaggtcagg

SEQ ID NO: 1601945 - DNA, 25 bp, Homo sapien
ccctctctagtctctaggatggggg

SEQ ID NO: 1601946 - DNA, 25 bp, Homo sapien
cctctctagtctctaggatgggggc

SEQ ID NO: 1601947 - DNA, 25 bp, Homo sapien
aggatgggggcactaggtcaggcac

SEQ ID NO: 1601948 - DNA, 25 bp, Homo sapien
aatcagggccttatttttccgcagc

SEQ ID NO: 1601949 - DNA, 25 bp, Homo sapien
cagctcacggtggtactccttctgg

SEQ ID NO: 1601950 - DNA, 25 bp, Homo sapien
tatttttccgcagcgcatcctcaca

SEQ ID NO: 1601951 - DNA, 25 bp, Homo sapien
tcccgcaggcggcagtagttgcgct

SEQ ID NO: 1601952 - DNA, 25 bp, Homo sapien
gatgctcagagactcgcacacggga

SEQ ID NO: 1601953 - DNA, 25 bp, Homo sapien
caatttgttgtgatgccggaagagc

SEQ ID NO: 1601954 - DNA, 25 bp, Homo sapien
cagaagtccttgaagcagagccgca

SEQ ID NO: 1601955 - DNA, 25 bp, Homo sapien
gaagcagagccgcaatttgttgtga

SEQ ID NO: 1601956 - DNA, 25 bp, Homo sapien
ggtcttccgggatctctgctaaaaa

SEQ ID NO: 1601957 - DNA, 25 bp, Homo sapien
tggggtgagagggactggtgagcca

SEQ ID NO: 1601958 - DNA, 25 bp, Homo sapien
ctgtggggtgagagggactggtgag

SEQ ID NO: 1601959 - DNA, 25 bp, Homo sapien
tgtggggtgagagggactggtgagc

SEQ ID NO: 1601960 - DNA, 25 bp, Homo sapien
gggtgagagggactggtgagccagc

SEQ ID NO: 1601961 - DNA, 25 bp, Homo sapien
cccccgtgcggcttgcatccccctt

SEQ ID NO: 1601962 - DNA, 25 bp, Homo sapien
agtcccccgtgcggcttgcatcccc

SEQ ID NO: 1601963 - DNA, 25 bp, Homo sapien
tggagtcccccgtgcggcttgcatc

SEQ ID NO: 1601964 - DNA, 25 bp, Homo sapien
ctggagtcccccgtgcggcttgcat

SEQ ID NO: 1601965 - DNA, 25 bp, Homo sapien
ggtgggccctacagagccctgaagc

SEQ ID NO: 1601966 - DNA, 25 bp, Homo sapien
atctgtagcatcttagcatctggtg

SEQ ID NO: 1601967 - DNA, 25 bp, Homo sapien
agcatcttagcatctggtgggtcct

SEQ ID NO: 1601968 - DNA, 25 bp, Homo sapien
tgtagcatcttagcatctggtgggt

SEQ ID NO: 1601969 - DNA, 25 bp, Homo sapien
ctggggtctccagacttccttgggt

SEQ ID NO: 1601970 - DNA, 25 bp, Homo sapien
tctggggtctccagacttccttggg

SEQ ID NO: 1601971 - DNA, 25 bp, Homo sapien
ctctggggtctccagacttccttgg

SEQ ID NO: 1601972 - DNA, 25 bp, Homo sapien
taggtcacccggtccttgagctcgt

SEQ ID NO: 1601973 - DNA, 25 bp, Homo sapien
caaagtacggttccacatacgtgat

SEQ ID NO: 1601974 - DNA, 25 bp, Homo sapien
cacacggatgcgagtcttgatgtag

SEQ ID NO: 1601975 - DNA, 25 bp, Homo sapien
tagttgcggtcaaagtaggtcaccc

SEQ ID NO: 1601976 - DNA, 25 bp, Homo sapien
cgtcgccaaatctctccgtgtagaa

SEQ ID NO: 1601977 - DNA, 25 bp, Homo sapien
cttttgtgagtcaagcttggacttg

SEQ ID NO: 1601978 - DNA, 25 bp, Homo sapien
gtgagtcaagcttggacttgtccac

SEQ ID NO: 1601979 - DNA, 25 bp, Homo sapien
ctttgataatctcaacgacgtcgtc

SEQ ID NO: 1601980 - DNA, 25 bp, Homo sapien
gactcggggccacccagggacagcc

SEQ ID NO: 1601981 - DNA, 25 bp, Homo sapien
ctgactcggggccacccagggacag

SEQ ID NO: 1601982 - DNA, 25 bp, Homo sapien
tgactcggggccacccagggacagc

SEQ ID NO: 1601983 - DNA, 25 bp, Homo sapien
gcagccccatgccccgttccacccc

SEQ ID NO: 1601984 - DNA, 25 bp, Homo sapien
ggcagccccatgccccgttccaccc

SEQ ID NO: 1601985 - DNA, 25 bp, Homo sapien
aagtgggcgccgtagaagcccacgc

SEQ ID NO: 1601986 - DNA, 25 bp, Homo sapien
agatctctgccagcttcgtgatcga

SEQ ID NO: 1601987 - DNA, 25 bp, Homo sapien
gcttcgtgatcgatggctccttgta

SEQ ID NO: 1601988 - DNA, 25 bp, Homo sapien
cgcggaaatacgtcccgaacacgcg

SEQ ID NO: 1601989 - DNA, 25 bp, Homo sapien
gtagaatggctggatgttcacttac

SEQ ID NO: 1601990 - DNA, 25 bp, Homo sapien
gaagtagaatggctggatgttcact

SEQ ID NO: 1601991 - DNA, 25 bp, Homo sapien
ggaaaggaagtagaatggctggatg

SEQ ID NO: 1601992 - DNA, 25 bp, Homo sapien
gaaaggaagtagaatggctggatgt

SEQ ID NO: 1601993 - DNA, 25 bp, Homo sapien
cagggtcctggttaacactgccccg

SEQ ID NO: 1601994 - DNA, 25 bp, Homo sapien
gctggagcgggaggacacattaacc

SEQ ID NO: 1601995 - DNA, 25 bp, Homo sapien
aatagacctaagcagggaagaagcg

SEQ ID NO: 1601996 - DNA, 25 bp, Homo sapien
tccccaaactaggagatgcctaaaa

SEQ ID NO: 1601997 - DNA, 25 bp, Homo sapien
gtttgccgtgcaccgcggccagctt

SEQ ID NO: 1601998 - DNA, 25 bp, Homo sapien
ggttcttgtagacctcattcaccgc

SEQ ID NO: 1601999 - DNA, 25 bp, Homo sapien
ttgtagtcacggtgggcttccagga

SEQ ID NO: 1602000 - DNA, 25 bp, Homo sapien
gaaggcctcctgcagtttgccgtgc

SEQ ID NO: 1602001 - DNA, 25 bp, Homo sapien
ccagcgggtgctggcatcaagcctg

SEQ ID NO: 1602002 - DNA, 25 bp, Homo sapien
ttccctcattgatgggagaagcagt

SEQ ID NO: 1602003 - DNA, 25 bp, Homo sapien
aatattctatggcacaggtacgatg

SEQ ID NO: 1602004 - DNA, 25 bp, Homo sapien
ccttctggcatgtggtaatatgccc

SEQ ID NO: 1602005 - DNA, 25 bp, Homo sapien
gaggccttcgtctccaagaatccag

SEQ ID NO: 1602006 - DNA, 25 bp, Homo sapien
cagaaaaacacacggagcaaaggcc

SEQ ID NO: 1602007 - DNA, 25 bp, Homo sapien
taatgtcactaaagggccagcacca

SEQ ID NO: 1602008 - DNA, 25 bp, Homo sapien
cacagtggaaaatcagttgccgggc

SEQ ID NO: 1602009 - DNA, 25 bp, Homo sapien
tgtcgtcggagatggcggactcctc

SEQ ID NO: 1602010 - DNA, 25 bp, Homo sapien
catggtgaagtagccggctgcctgt

SEQ ID NO: 1602011 - DNA, 25 bp, Homo sapien
cagtgaagtgcttcccggagcagaa

SEQ ID NO: 1602012 - DNA, 25 bp, Homo sapien
tcctcgtcgggcgacaggatgtcgt

SEQ ID NO: 1602013 - DNA, 25 bp, Homo sapien
agggcggccgcgtgcaccatgcact

SEQ ID NO: 1602014 - DNA, 25 bp, Homo sapien
tggaaggaaacgcagcccacgggca

SEQ ID NO: 1602015 - DNA, 25 bp, Homo sapien
ctcgagcagggcgaggtactcagcc

SEQ ID NO: 1602016 - DNA, 25 bp, Homo sapien
tctgcaaccaggtcagccgaaggtc

SEQ ID NO: 1602017 - DNA, 25 bp, Homo sapien
ttcatcttcaccgtgtccgtcagga

SEQ ID NO: 1602018 - DNA, 25 bp, Homo sapien
caggatcatgtgcaggttgaacatc

SEQ ID NO: 1602019 - DNA, 25 bp, Homo sapien
catgtgcaggttgaacatcaggtcc

SEQ ID NO: 1602020 - DNA, 25 bp, Homo sapien
accgtgtccgtcaggatcatgtgca

SEQ ID NO: 1602021 - DNA, 25 bp, Homo sapien
gagtgaacgtcgcaggtgctcttca

SEQ ID NO: 1602022 - DNA, 25 bp, Homo sapien
ttcactgaagttctgcgtcgtcccc

SEQ ID NO: 1602023 - DNA, 25 bp, Homo sapien
tcgtccccaccagggacgagagaga

SEQ ID NO: 1602024 - DNA, 25 bp, Homo sapien
cctgcatcttcacacgggcaaagtt

SEQ ID NO: 1602025 - DNA, 25 bp, Homo sapien
tggccgatctcgaagttctgtcgca

SEQ ID NO: 1602026 - DNA, 25 bp, Homo sapien
tctgtcgcatgagcaggtacagcga

SEQ ID NO: 1602027 - DNA, 25 bp, Homo sapien
aggtcggcacacagctccgtgtcct

SEQ ID NO: 1602028 - DNA, 25 bp, Homo sapien
tgccacagtgtcgtaggagcctcag

SEQ ID NO: 1602029 - DNA, 25 bp, Homo sapien
acacaagggccctctgggtggccag

SEQ ID NO: 1602030 - DNA, 25 bp, Homo sapien
ggtggccaggccatgctgcaagaag

SEQ ID NO: 1602031 - DNA, 25 bp, Homo sapien
tggccaggccatgctgcaagaagag

SEQ ID NO: 1602032 - DNA, 25 bp, Homo sapien
cttggacacaagggccctctgggtg

SEQ ID NO: 1602033 - DNA, 25 bp, Homo sapien
cccgggcttctgaaagcatcaccgt

SEQ ID NO: 1602034 - DNA, 25 bp, Homo sapien
tgtacagcacaaccttcagcactgc

SEQ ID NO: 1602035 - DNA, 25 bp, Homo sapien
ggctgtacagcacaaccttcagcac

SEQ ID NO: 1602036 - DNA, 25 bp, Homo sapien
aagacgctctcccgggcttctgaaa

SEQ ID NO: 1602037 - DNA, 25 bp, Homo sapien
ccaaggcctcgtgttccatttcatc

SEQ ID NO: 1602038 - DNA, 25 bp, Homo sapien
gcttgcctcggttgccaggttccct

SEQ ID NO: 1602039 - DNA, 25 bp, Homo sapien
gtgtgtccagaaccactaggcttgc

SEQ ID NO: 1602040 - DNA, 25 bp, Homo sapien
ttccaccaaggcctcgtgttccatt

SEQ ID NO: 1602041 - DNA, 25 bp, Homo sapien
cttccagtgtgtgacgctcttccgc

SEQ ID NO: 1602042 - DNA, 25 bp, Homo sapien
agcgcacattctccggattcccaaa

SEQ ID NO: 1602043 - DNA, 25 bp, Homo sapien
tccacgcggtctgaggtttgcttcc

SEQ ID NO: 1602044 - DNA, 25 bp, Homo sapien
cattctccggattcccaaacgggct

SEQ ID NO: 1602045 - DNA, 25 bp, Homo sapien
tcacagatgcgtaaaaacacagggc

SEQ ID NO: 1602046 - DNA, 25 bp, Homo sapien
tgagacgcgtgggtgcacgatcaca

SEQ ID NO: 1602047 - DNA, 25 bp, Homo sapien
aatgcacaggcatgaagatattcag

SEQ ID NO: 1602048 - DNA, 25 bp, Homo sapien
ggcacacgtgaacatcaggagaaat

SEQ ID NO: 1602049 - DNA, 25 bp, Homo sapien
aacacgagtgacagatggggacgca

SEQ ID NO: 1602050 - DNA, 25 bp, Homo sapien
acgcacaggcgcatgtgtacggtga

SEQ ID NO: 1602051 - DNA, 25 bp, Homo sapien
tacggtgatgatttgtggacttctc

SEQ ID NO: 1602052 - DNA, 25 bp, Homo sapien
agtaagctagggatggcccccttca

SEQ ID NO: 1602053 - DNA, 25 bp, Homo sapien
gaatgtgaggctgttgatgcgttca

SEQ ID NO: 1602054 - DNA, 25 bp, Homo sapien
agaatggcttcctctagccgcgcct

SEQ ID NO: 1602055 - DNA, 25 bp, Homo sapien
gacttcgccgaaccatttcttgtcg

SEQ ID NO: 1602056 - DNA, 25 bp, Homo sapien
gtcgagctccgatggtacccagaat

SEQ ID NO: 1602057 - DNA, 25 bp, Homo sapien
actcagcccgcagcacgctgggtcc

SEQ ID NO: 1602058 - DNA, 25 bp, Homo sapien
agtcctctgcacaaagacagtccac

SEQ ID NO: 1602059 - DNA, 25 bp, Homo sapien
aattctattcacaaaggcacttctg

SEQ ID NO: 1602060 - DNA, 25 bp, Homo sapien
tctgactttattccttgcctcagca

SEQ ID NO: 1602061 - DNA, 25 bp, Homo sapien
cgccagcaaggtccggcttgactca

SEQ ID NO: 1602062 - DNA, 25 bp, Homo sapien
tgtactcaaaggcagctaggcaaag

SEQ ID NO: 1602063 - DNA, 25 bp, Homo sapien
ccggctcggtgtttttcagcaccca

SEQ ID NO: 1602064 - DNA, 25 bp, Homo sapien
ggtacagcaaatccaacagacgtcc

SEQ ID NO: 1602065 - DNA, 25 bp, Homo sapien
agccaggggctagggggccaccagc

SEQ ID NO: 1602066 - DNA, 25 bp, Homo sapien
gagccaggggctagggggccaccag

SEQ ID NO: 1602067 - DNA, 25 bp, Homo sapien
ctagggggccaccagcaatggccat

SEQ ID NO: 1602068 - DNA, 25 bp, Homo sapien
ggagccaggggctagggggccacca

SEQ ID NO: 1602069 - DNA, 25 bp, Homo sapien
gatggtacccgcaatgtccccttcg

SEQ ID NO: 1602070 - DNA, 25 bp, Homo sapien
tctgtgtctgagtcaagcattgagg

SEQ ID NO: 1602071 - DNA, 25 bp, Homo sapien
gggttgatggtacccgcaatgtccc

SEQ ID NO: 1602072 - DNA, 25 bp, Homo sapien
tgaggccagtcttgaccgctgacct

SEQ ID NO: 1602073 - DNA, 25 bp, Homo sapien
atagcagtggcaggtacagctcggc

SEQ ID NO: 1602074 - DNA, 25 bp, Homo sapien
tatcccgtgcaatcgatagcagtgg

SEQ ID NO: 1602075 - DNA, 25 bp, Homo sapien
tgtcatggccacatagcaggctgtg

SEQ ID NO: 1602076 - DNA, 25 bp, Homo sapien
cagcaaagtcatgcagccgtggcaa

SEQ ID NO: 1602077 - DNA, 25 bp, Homo sapien
gcctcaggttcgagggccagtgcca

SEQ ID NO: 1602078 - DNA, 25 bp, Homo sapien
cactcagttcgaacatgctggtcac

SEQ ID NO: 1602079 - DNA, 25 bp, Homo sapien
gtgctgctgccggaatggtccactc

SEQ ID NO: 1602080 - DNA, 25 bp, Homo sapien
cagcctcaggttcgagggccagtgc

SEQ ID NO: 1602081 - DNA, 25 bp, Homo sapien
aatgggggatgccagcggtcaaggg

SEQ ID NO: 1602082 - DNA, 25 bp, Homo sapien
gatgccagcggtcaagggtcagagg

SEQ ID NO: 1602083 - DNA, 25 bp, Homo sapien
gggatgccagcggtcaagggtcaga

SEQ ID NO: 1602084 - DNA, 25 bp, Homo sapien
tgccagcggtcaagggtcagaggtg

SEQ ID NO: 1602085 - DNA, 25 bp, Homo sapien
gctgcacaggatgcgggtgaattcc

SEQ ID NO: 1602086 - DNA, 25 bp, Homo sapien
ggaggttgagggtcacgtagtgctc

SEQ ID NO: 1602087 - DNA, 25 bp, Homo sapien
ggtgaattccatgcgcagggtcagc

SEQ ID NO: 1602088 - DNA, 25 bp, Homo sapien
tcacgtagtgctcgtggctgcacag

SEQ ID NO: 1602089 - DNA, 25 bp, Homo sapien
ttgtagtgggcccggaccaggctga

SEQ ID NO: 1602090 - DNA, 25 bp, Homo sapien
ccagggacagaaggtcactgaggaa

SEQ ID NO: 1602091 - DNA, 25 bp, Homo sapien
gctggcgttgaggtgctcggccagc

SEQ ID NO: 1602092 - DNA, 25 bp, Homo sapien
caaagccccggtccaccagggacag

SEQ ID NO: 1602093 - DNA, 25 bp, Homo sapien
ggctctatgtcctccctcaggtttc

SEQ ID NO: 1602094 - DNA, 25 bp, Homo sapien
cacattgagaccctgcatctctcac

SEQ ID NO: 1602095 - DNA, 25 bp, Homo sapien
tctatgtcctccctcaggtttcttc

SEQ ID NO: 1602096 - DNA, 25 bp, Homo sapien
ttcttcccacattgagaccctgcat

SEQ ID NO: 1602097 - DNA, 25 bp, Homo sapien
cgggtgatgacctccaggcccacag

SEQ ID NO: 1602098 - DNA, 25 bp, Homo sapien
ttgtggacacgggtgatgacctcca

SEQ ID NO: 1602099 - DNA, 25 bp, Homo sapien
agtgatgtcgtccaggaagcgtccg

SEQ ID NO: 1602100 - DNA, 25 bp, Homo sapien
ccaccaaggcagtgatgtcgtccag

SEQ ID NO: 1602101 - DNA, 25 bp, Homo sapien
gccaagcagcaggtgcagcgccata

SEQ ID NO: 1602102 - DNA, 25 bp, Homo sapien
tggccaagcagcaggtgcagcgcca

SEQ ID NO: 1602103 - DNA, 25 bp, Homo sapien
ctggccaagcagcaggtgcagcgcc

SEQ ID NO: 1602104 - DNA, 25 bp, Homo sapien
caagcagcaggtgcagcgccatact

SEQ ID NO: 1602105 - DNA, 25 bp, Homo sapien
gaagaagaaccaggcgtgctggagg

SEQ ID NO: 1602106 - DNA, 25 bp, Homo sapien
tggaggatggcctcgcgtacggcac

SEQ ID NO: 1602107 - DNA, 25 bp, Homo sapien
gaaccaggcgtgctggaggatggcc

SEQ ID NO: 1602108 - DNA, 25 bp, Homo sapien
tcgcgtacggcactgctgctgacca

SEQ ID NO: 1602109 - DNA, 25 bp, Homo sapien
cgaggaggaaccctcgaggtaggag

SEQ ID NO: 1602110 - DNA, 25 bp, Homo sapien
ctcggctagagttgcagtcgatggc

SEQ ID NO: 1602111 - DNA, 25 bp, Homo sapien
ccctcgaggtaggaggaggctcggc

SEQ ID NO: 1602112 - DNA, 25 bp, Homo sapien
ggaggctcggctagagttgcagtcg

SEQ ID NO: 1602113 - DNA, 25 bp, Homo sapien
agaaatgcttccacatggatggacc

SEQ ID NO: 1602114 - DNA, 25 bp, Homo sapien
gaaaagaggtaggttagtgtgaata

SEQ ID NO: 1602115 - DNA, 25 bp, Homo sapien
taaaagagtcgctggagagagctgg

SEQ ID NO: 1602116 - DNA, 25 bp, Homo sapien
acgtgttcacacagacagggatggg

SEQ ID NO: 1602117 - DNA, 25 bp, Homo sapien
acccaggagtgtgagcgatcgatgc

SEQ ID NO: 1602118 - DNA, 25 bp, Homo sapien
actgcctcctggagcataagcggaa

SEQ ID NO: 1602119 - DNA, 25 bp, Homo sapien
taagcggaattcacccaggagtgtg

SEQ ID NO: 1602120 - DNA, 25 bp, Homo sapien
tcctggagcataagcggaattcacc

SEQ ID NO: 1602121 - DNA, 25 bp, Homo sapien
tgatgctcttggaacgcgccaggta

SEQ ID NO: 1602122 - DNA, 25 bp, Homo sapien
gccaggatgcgggaaacctcgtcat

SEQ ID NO: 1602123 - DNA, 25 bp, Homo sapien
gagccacgggccagtgtggcagcct

SEQ ID NO: 1602124 - DNA, 25 bp, Homo sapien
ggaaacctcgtcatccacagagcca

SEQ ID NO: 1602125 - DNA, 25 bp, Homo sapien
ctacatgggccattgcttcaaaggc

SEQ ID NO: 1602126 - DNA, 25 bp, Homo sapien
caggaaggcgaaaggcgtagtggac

SEQ ID NO: 1602127 - DNA, 25 bp, Homo sapien
gtgaacaaggctgactacatgggcc

SEQ ID NO: 1602128 - DNA, 25 bp, Homo sapien
agtgaccgcgggcatcctgggctgc

SEQ ID NO: 1602129 - DNA, 25 bp, Homo sapien
aaatggccagagaggtaaatgggct

SEQ ID NO: 1602130 - DNA, 25 bp, Homo sapien
gcttatagaagatccctcaggacct

SEQ ID NO: 1602131 - DNA, 25 bp, Homo sapien
gctgcacccgggccaaagggtcaca

SEQ ID NO: 1602132 - DNA, 25 bp, Homo sapien
ggtcacagaagaccttctctgggtg

SEQ ID NO: 1602133 - DNA, 25 bp, Homo sapien
gcaccagggtgaagaatttgtccag

SEQ ID NO: 1602134 - DNA, 25 bp, Homo sapien
cacagtgtccttgagccggaatggg

SEQ ID NO: 1602135 - DNA, 25 bp, Homo sapien
tgaccagacgcacgagcttgtccag

SEQ ID NO: 1602136 - DNA, 25 bp, Homo sapien
caggcgcagtgctgcaagactggcc

SEQ ID NO: 1602137 - DNA, 25 bp, Homo sapien
tgaacacgcccttgtgaccgtccac

SEQ ID NO: 1602138 - DNA, 25 bp, Homo sapien
acgcccttgtgaccgtccacccagc

SEQ ID NO: 1602139 - DNA, 25 bp, Homo sapien
ccttgtgaccgtccacccagcgcat

SEQ ID NO: 1602140 - DNA, 25 bp, Homo sapien
acactgaacacgcccttgtgaccgt

SEQ ID NO: 1602141 - DNA, 25 bp, Homo sapien
cacggaatagctgggcggcggctgg

SEQ ID NO: 1602142 - DNA, 25 bp, Homo sapien
agacagaaggggccggtcctcaggc

SEQ ID NO: 1602143 - DNA, 25 bp, Homo sapien
ggtgtgagcacggaatagctgggcg

SEQ ID NO: 1602144 - DNA, 25 bp, Homo sapien
tgagcacggaatagctgggcggcgg

SEQ ID NO: 1602145 - DNA, 25 bp, Homo sapien
aggtgatggttctctgtcacgcagg

SEQ ID NO: 1602146 - DNA, 25 bp, Homo sapien
caggtgatggttctctgtcacgcag

SEQ ID NO: 1602147 - DNA, 25 bp, Homo sapien
gtagaccaccggtgtgaaggcctcg

SEQ ID NO: 1602148 - DNA, 25 bp, Homo sapien
ttgttatggtagaccaccggtgtga

SEQ ID NO: 1602149 - DNA, 25 bp, Homo sapien
cgggtaaattcactgcagctggact

SEQ ID NO: 1602150 - DNA, 25 bp, Homo sapien
gtgtgaaggcctcgcgggtaaattc

SEQ ID NO: 1602151 - DNA, 25 bp, Homo sapien
gcacagcaaggttgcgcacggagcc

SEQ ID NO: 1602152 - DNA, 25 bp, Homo sapien
gcctgtcatgtactgcactcgcaca

SEQ ID NO: 1602153 - DNA, 25 bp, Homo sapien
gggtcctcgcctgtcatgtactgca

SEQ ID NO: 1602154 - DNA, 25 bp, Homo sapien
tgtgcgggtacacgtacagcaggtt

SEQ ID NO: 1602155 - DNA, 25 bp, Homo sapien
acaggggccctgaaggtgcacatac

SEQ ID NO: 1602156 - DNA, 25 bp, Homo sapien
tggggggcaggatgggggtgtcaga

SEQ ID NO: 1602157 - DNA, 25 bp, Homo sapien
gggacaggggccctgaaggtgcaca

SEQ ID NO: 1602158 - DNA, 25 bp, Homo sapien
ggtgtcagagggacaggggccctga

SEQ ID NO: 1602159 - DNA, 25 bp, Homo sapien
agcacagacagtccaggaagagtag

SEQ ID NO: 1602160 - DNA, 25 bp, Homo sapien
gctggctgggagcacagacagtcca

SEQ ID NO: 1602161 - DNA, 25 bp, Homo sapien
tggggtgatgggacaaggctggctg

SEQ ID NO: 1602162 - DNA, 25 bp, Homo sapien
cagacagtccaggaagagtaggtca

SEQ ID NO: 1602163 - DNA, 25 bp, Homo sapien
gttccaaggtacctcaggtggccag

SEQ ID NO: 1602164 - DNA, 25 bp, Homo sapien
ggtggccagtggtcaagcctaagcc

SEQ ID NO: 1602165 - DNA, 25 bp, Homo sapien
tacagaaggacattggaggcactca

SEQ ID NO: 1602166 - DNA, 25 bp, Homo sapien
cccggtgagaggtaatacaggtatc

SEQ ID NO: 1602167 - DNA, 25 bp, Homo sapien
tcacgctgacaagcagagccacatc

SEQ ID NO: 1602168 - DNA, 25 bp, Homo sapien
ggagatggtggcacagcagcatcgg

SEQ ID NO: 1602169 - DNA, 25 bp, Homo sapien
tcacaggccacgtgcagcggcagag

SEQ ID NO: 1602170 - DNA, 25 bp, Homo sapien
agcagagccacatcctatgggccct

SEQ ID NO: 1602171 - DNA, 25 bp, Homo sapien
tcagccagggcgccgggccccactt

SEQ ID NO: 1602172 - DNA, 25 bp, Homo sapien
tccagaatctccttggtgggccggc

SEQ ID NO: 1602173 - DNA, 25 bp, Homo sapien
tccgggtagggcttgatatgaagca

SEQ ID NO: 1602174 - DNA, 25 bp, Homo sapien
cggagaaatgtcgatcttgagctgg

SEQ ID NO: 1602175 - DNA, 25 bp, Homo sapien
tttcaggagccggagaaatgtcgat

SEQ ID NO: 1602176 - DNA, 25 bp, Homo sapien
tacccctacatttgatcaactctgc

SEQ ID NO: 1602177 - DNA, 25 bp, Homo sapien
cttacccctacatttgatcaactct

SEQ ID NO: 1602178 - DNA, 25 bp, Homo sapien
gccttacccctacatttgatcaact

SEQ ID NO: 1602179 - DNA, 25 bp, Homo sapien
ccagccttacccctacatttgatca

SEQ ID NO: 1602180 - DNA, 25 bp, Homo sapien
cttgaagaggtcctcgtcactgagt

SEQ ID NO: 1602181 - DNA, 25 bp, Homo sapien
cagggacgacgggcgcctcatgtca

SEQ ID NO: 1602182 - DNA, 25 bp, Homo sapien
ggtcctcgtcactgagtcgctcagc

SEQ ID NO: 1602183 - DNA, 25 bp, Homo sapien
acgtagtcgccgcagcagggacgac

SEQ ID NO: 1602184 - DNA, 25 bp, Homo sapien
gggagtgggagagtccctggcccca

SEQ ID NO: 1602185 - DNA, 25 bp, Homo sapien
agcggggagtgggagagtccctggc

SEQ ID NO: 1602186 - DNA, 25 bp, Homo sapien
cagccagcggggagtgggagagtcc

SEQ ID NO: 1602187 - DNA, 25 bp, Homo sapien
ctaatgcagccagcggggagtggga

SEQ ID NO: 1602188 - DNA, 25 bp, Homo sapien
gacggcggcggtctgtccaggctgg

SEQ ID NO: 1602189 - DNA, 25 bp, Homo sapien
ttaaagaagtttgtgacagttagcg

SEQ ID NO: 1602190 - DNA, 25 bp, Homo sapien
tgcaggcgtcgtccccactactcgc

SEQ ID NO: 1602191 - DNA, 25 bp, Homo sapien
ttagcgtggctggacggaagccaga

SEQ ID NO: 1602192 - DNA, 25 bp, Homo sapien
gtgcagaactgctcggccgccaggc

SEQ ID NO: 1602193 - DNA, 25 bp, Homo sapien
tccgagtcagagtcccggtccagct

SEQ ID NO: 1602194 - DNA, 25 bp, Homo sapien
aggcgaagggcatgcggtagcggcc

SEQ ID NO: 1602195 - DNA, 25 bp, Homo sapien
tgcccagcgctgctcacgatgttgg

SEQ ID NO: 1602196 - DNA, 25 bp, Homo sapien
caccatgtaaggctcacagcactca

SEQ ID NO: 1602197 - DNA, 25 bp, Homo sapien
tttcaacaccatgtaaggctcacag

SEQ ID NO: 1602198 - DNA, 25 bp, Homo sapien
ttctttcaacaccatgtaaggctca

SEQ ID NO: 1602199 - DNA, 25 bp, Homo sapien
tcaacaccatgtaaggctcacagca

SEQ ID NO: 1602200 - DNA, 25 bp, Homo sapien
cgagttcaggtcgaagtagaagttc

SEQ ID NO: 1602201 - DNA, 25 bp, Homo sapien
tcatggagtccgagttcaggtcgaa

SEQ ID NO: 1602202 - DNA, 25 bp, Homo sapien
agccccttcatggagtccgagttca

SEQ ID NO: 1602203 - DNA, 25 bp, Homo sapien
gggtgggtgccatgagcccgaagca

SEQ ID NO: 1602204 - DNA, 25 bp, Homo sapien
tttttctcccgcacatcatacagag

SEQ ID NO: 1602205 - DNA, 25 bp, Homo sapien
agatcccaaagatgggctcaatttc

SEQ ID NO: 1602206 - DNA, 25 bp, Homo sapien
gatcccaaagatgggctcaatttca

SEQ ID NO: 1602207 - DNA, 25 bp, Homo sapien
tctcccgcacatcatacagagccaa

SEQ ID NO: 1602208 - DNA, 25 bp, Homo sapien
aatgactggatgagcccacagagcc

SEQ ID NO: 1602209 - DNA, 25 bp, Homo sapien
cacttaaggattggagactcgggat

SEQ ID NO: 1602210 - DNA, 25 bp, Homo sapien
cataggtggccacataggtgacagg

SEQ ID NO: 1602211 - DNA, 25 bp, Homo sapien
gatcctggcatacaattggcactta

SEQ ID NO: 1602212 - DNA, 25 bp, Homo sapien
tgagcgacagacacttgaccaagat

SEQ ID NO: 1602213 - DNA, 25 bp, Homo sapien
gatcctttgtccaaagtgctcgcgg

SEQ ID NO: 1602214 - DNA, 25 bp, Homo sapien
ggctacagcgttccacggcttcatc

SEQ ID NO: 1602215 - DNA, 25 bp, Homo sapien
ggctctgggcggctacagcgttcca

SEQ ID NO: 1602216 - DNA, 25 bp, Homo sapien
tagaggcaccactgcttcgaggggt

SEQ ID NO: 1602217 - DNA, 25 bp, Homo sapien
cattgcgccggtccacatcttctgg

SEQ ID NO: 1602218 - DNA, 25 bp, Homo sapien
caggttcctcaggtcgaagatgcta

SEQ ID NO: 1602219 - DNA, 25 bp, Homo sapien
ccggtgctgccgtcgaagggtttca

SEQ ID NO: 1602220 - DNA, 25 bp, Homo sapien
cccttcagtgaccccagccaggggc

SEQ ID NO: 1602221 - DNA, 25 bp, Homo sapien
tgaccccagccaggggcttcctcac

SEQ ID NO: 1602222 - DNA, 25 bp, Homo sapien
ttcagtgaccccagccaggggcttc

SEQ ID NO: 1602223 - DNA, 25 bp, Homo sapien
gtgaccccagccaggggcttcctca

SEQ ID NO: 1602224 - DNA, 25 bp, Homo sapien
gggaggcccttctgtcgctcccgct

SEQ ID NO: 1602225 - DNA, 25 bp, Homo sapien
ggtgacggggctgtatgctgcactc

SEQ ID NO: 1602226 - DNA, 25 bp, Homo sapien
tgtcgctcccgctgtgtgtctgtgg

SEQ ID NO: 1602227 - DNA, 25 bp, Homo sapien
agggccggacctctcgtctccagaa

SEQ ID NO: 1602228 - DNA, 25 bp, Homo sapien
tgagctgcccctaagtcagactcac

SEQ ID NO: 1602229 - DNA, 25 bp, Homo sapien
taggaccggctgcagacatcagctc

SEQ ID NO: 1602230 - DNA, 25 bp, Homo sapien
cagctcagcccttttgggttccgaa

SEQ ID NO: 1602231 - DNA, 25 bp, Homo sapien
gggacaatgggcagatacacagtag

SEQ ID NO: 1602232 - DNA, 25 bp, Homo sapien
tggacaatgacccagtcctcaatat

SEQ ID NO: 1602233 - DNA, 25 bp, Homo sapien
cagtcctcaatatacatctccaccg

SEQ ID NO: 1602234 - DNA, 25 bp, Homo sapien
atatacatctccaccgcggccctca

SEQ ID NO: 1602235 - DNA, 25 bp, Homo sapien
ttctgtggacaatgacccagtcctc

SEQ ID NO: 1602236 - DNA, 25 bp, Homo sapien
aaagcatggcttgtccaacgtcacg

SEQ ID NO: 1602237 - DNA, 25 bp, Homo sapien
gtgaatccttctgctagcctgtaag

SEQ ID NO: 1602238 - DNA, 25 bp, Homo sapien
cctgtaaggttagcactgtcctgcc

SEQ ID NO: 1602239 - DNA, 25 bp, Homo sapien
cagagacagagtggaatcacaggca

SEQ ID NO: 1602240 - DNA, 25 bp, Homo sapien
gctgggaattctaccaggtccctga

SEQ ID NO: 1602241 - DNA, 25 bp, Homo sapien
tccaggggctcgacaacttcagtca

SEQ ID NO: 1602242 - DNA, 25 bp, Homo sapien
aaagtccaggggctcgacaacttca

SEQ ID NO: 1602243 - DNA, 25 bp, Homo sapien
aagtcatcagctgggaattctacca

SEQ ID NO: 1602244 - DNA, 25 bp, Homo sapien
gggagccactgcgttcccgggacac

SEQ ID NO: 1602245 - DNA, 25 bp, Homo sapien
ggggagccactgcgttcccgggaca

SEQ ID NO: 1602246 - DNA, 25 bp, Homo sapien
ggagccactgcgttcccgggacacc

SEQ ID NO: 1602247 - DNA, 25 bp, Homo sapien
gcccaagagcgaagttgctctggaa

SEQ ID NO: 1602248 - DNA, 25 bp, Homo sapien
gaagattgtctaatattcgggttaa

SEQ ID NO: 1602249 - DNA, 25 bp, Homo sapien
cagctctgagtatgtagacacctgg

SEQ ID NO: 1602250 - DNA, 25 bp, Homo sapien
gaacagatgaatataggaccagctc

SEQ ID NO: 1602251 - DNA, 25 bp, Homo sapien
gctcccagccccgacgcgactccca

SEQ ID NO: 1602252 - DNA, 25 bp, Homo sapien
cgctcccagccccgacgcgactccc

SEQ ID NO: 1602253 - DNA, 25 bp, Homo sapien
gcgctcccagccccgacgcgactcc

SEQ ID NO: 1602254 - DNA, 25 bp, Homo sapien
ctcccagccccgacgcgactcccat

SEQ ID NO: 1602255 - DNA, 25 bp, Homo sapien
ctgttgatcttgtgcgcgaaggcgc

SEQ ID NO: 1602256 - DNA, 25 bp, Homo sapien
gcgaaggcgcggcgctcggaggcag

SEQ ID NO: 1602257 - DNA, 25 bp, Homo sapien
aggcgcggcgctcggaggcagccat

SEQ ID NO: 1602258 - DNA, 25 bp, Homo sapien
gaaggcgcggcgctcggaggcagcc

SEQ ID NO: 1602259 - DNA, 25 bp, Homo sapien
attatcaaggatcttggctgggtgt

SEQ ID NO: 1602260 - DNA, 25 bp, Homo sapien
gggccactcgctgcttcctgaactc

SEQ ID NO: 1602261 - DNA, 25 bp, Homo sapien
tcatcactgcctgggtataccttat

SEQ ID NO: 1602262 - DNA, 25 bp, Homo sapien
ctccagtcctcctaacccttcaagg

SEQ ID NO: 1602263 - DNA, 25 bp, Homo sapien
tagggccgcgcttccacgggccgcc

SEQ ID NO: 1602264 - DNA, 25 bp, Homo sapien
gacgcgcgaggctgtagatgcggct

SEQ ID NO: 1602265 - DNA, 25 bp, Homo sapien
cgggcacatttggacgtgtttggca

SEQ ID NO: 1602266 - DNA, 25 bp, Homo sapien
ggcacccgggcacatttggacgtgt

SEQ ID NO: 1602267 - DNA, 25 bp, Homo sapien
ttgcagccaagtttccatctcgcat

SEQ ID NO: 1602268 - DNA, 25 bp, Homo sapien
ctcatttgcagccaagtttccatct

SEQ ID NO: 1602269 - DNA, 25 bp, Homo sapien
ccagctctcttgtatctgagcctca

SEQ ID NO: 1602270 - DNA, 25 bp, Homo sapien
tttaagcccgttttcccactgctca

SEQ ID NO: 1602271 - DNA, 25 bp, Homo sapien
tttcccttgagtccacatttcccag

SEQ ID NO: 1602272 - DNA, 25 bp, Homo sapien
ttctctgcaccctcctttgcacccc

SEQ ID NO: 1602273 - DNA, 25 bp, Homo sapien
tttgccccctacattttccaatgct

SEQ ID NO: 1602274 - DNA, 25 bp, Homo sapien
ctgctttcccttgagtccacatttc

SEQ ID NO: 1602275 - DNA, 25 bp, Homo sapien
tatctttactcaatggcttcgtggc

SEQ ID NO: 1602276 - DNA, 25 bp, Homo sapien
tgttaataggacagcccaagttccc

SEQ ID NO: 1602277 - DNA, 25 bp, Homo sapien
taaaaggcttatgaccagggcaggg

SEQ ID NO: 1602278 - DNA, 25 bp, Homo sapien
caactgtgcaagtggttagctctgg

SEQ ID NO: 1602279 - DNA, 25 bp, Homo sapien
aaatgaaggcagcacgagggacgct

SEQ ID NO: 1602280 - DNA, 25 bp, Homo sapien
cagggtgtaggcgattccaaagagc

SEQ ID NO: 1602281 - DNA, 25 bp, Homo sapien
tacagagagatacgcttggctccag

SEQ ID NO: 1602282 - DNA, 25 bp, Homo sapien
taatggagttacagccacatcgtgg

SEQ ID NO: 1602283 - DNA, 25 bp, Homo sapien
ggccttggaacacaccttcgtgacc

SEQ ID NO: 1602284 - DNA, 25 bp, Homo sapien
gggtactgatcacttcctgtcctct

SEQ ID NO: 1602285 - DNA, 25 bp, Homo sapien
agaacctcggccaatgaacgggcca

SEQ ID NO: 1602286 - DNA, 25 bp, Homo sapien
ctcttgctagttggggtactgatca

SEQ ID NO: 1602287 - DNA, 25 bp, Homo sapien
tccaaacgtcatccaccagaaggta

SEQ ID NO: 1602288 - DNA, 25 bp, Homo sapien
gacggacgcgatgtgtctccaaacg

SEQ ID NO: 1602289 - DNA, 25 bp, Homo sapien
catcggaagtgtgtcctgtgacgga

SEQ ID NO: 1602290 - DNA, 25 bp, Homo sapien
tgtgttgccttgacagacccctgag

SEQ ID NO: 1602291 - DNA, 25 bp, Homo sapien
aaatttacaattataacagaaggca

SEQ ID NO: 1602292 - DNA, 25 bp, Homo sapien
atttacaattataacagaaggcaaa

SEQ ID NO: 1602293 - DNA, 25 bp, Homo sapien
caggaaatttacaattataacagaa

SEQ ID NO: 1602294 - DNA, 25 bp, Homo sapien
ctcaggaaatttacaattataacag

SEQ ID NO: 1602295 - DNA, 25 bp, Homo sapien
gccgagagaaggcggaagaatccct

SEQ ID NO: 1602296 - DNA, 25 bp, Homo sapien
agagccgagagaaggcggaagaatc

SEQ ID NO: 1602297 - DNA, 25 bp, Homo sapien
gaagagccgagagaaggcggaagaa

SEQ ID NO: 1602298 - DNA, 25 bp, Homo sapien
gggaaccgcccccaggattcaatga

SEQ ID NO: 1602299 - DNA, 25 bp, Homo sapien
taaaagataccctcggctgggcgtg

SEQ ID NO: 1602300 - DNA, 25 bp, Homo sapien
ggtgctgcgcccctagagtttggaa

SEQ ID NO: 1602301 - DNA, 25 bp, Homo sapien
taaaccggaggtcaagatgtacatc

SEQ ID NO: 1602302 - DNA, 25 bp, Homo sapien
cacaactatatttgggcacgacgga

SEQ ID NO: 1602303 - DNA, 25 bp, Homo sapien
taattaacttctggccgaaagccca

SEQ ID NO: 1602304 - DNA, 25 bp, Homo sapien
cacactgtgcgaggaagatgaacca

SEQ ID NO: 1602305 - DNA, 25 bp, Homo sapien
tctaagctagaaggcaccacggatg

SEQ ID NO: 1602306 - DNA, 25 bp, Homo sapien
gcttttcgcaagtagagggtctgca

SEQ ID NO: 1602307 - DNA, 25 bp, Homo sapien
gaagacctgcttcacattgatgttc

SEQ ID NO: 1602308 - DNA, 25 bp, Homo sapien
cacggccgggcctttcccgttgctg

SEQ ID NO: 1602309 - DNA, 25 bp, Homo sapien
tccccaccaggatgacctgggcgtt

SEQ ID NO: 1602310 - DNA, 25 bp, Homo sapien
ggcacaacacgttcgtcctccaggt

SEQ ID NO: 1602311 - DNA, 25 bp, Homo sapien
aggtcgtcggcgagcctccggccat

SEQ ID NO: 1602312 - DNA, 25 bp, Homo sapien
tgacctgggcgttgtcccaggagta

SEQ ID NO: 1602313 - DNA, 25 bp, Homo sapien
cagtcctgcacagcggcaaaggatt

SEQ ID NO: 1602314 - DNA, 25 bp, Homo sapien
taggccgtggtgatggtgcggtagc

SEQ ID NO: 1602315 - DNA, 25 bp, Homo sapien
ggattcctgattggcgatgtcatac

SEQ ID NO: 1602316 - DNA, 25 bp, Homo sapien
catggctccccggtagtaggccgtg

SEQ ID NO: 1602317 - DNA, 25 bp, Homo sapien
gagtcgtccgcgtatcggaacagga

SEQ ID NO: 1602318 - DNA, 25 bp, Homo sapien
cacactgctgttgcctatcagtagc

SEQ ID NO: 1602319 - DNA, 25 bp, Homo sapien
gatgcccacagtactgacgaaggcg

SEQ ID NO: 1602320 - DNA, 25 bp, Homo sapien
tcctcttgtcatggcggtagacggt

SEQ ID NO: 1602321 - DNA, 25 bp, Homo sapien
cctgggacagggagacctgaaatcc

SEQ ID NO: 1602322 - DNA, 25 bp, Homo sapien
gacctgaaatcctcagggagaggag

SEQ ID NO: 1602323 - DNA, 25 bp, Homo sapien
cttggcacaagcctcctgggacagg

SEQ ID NO: 1602324 - DNA, 25 bp, Homo sapien
tcctcagggagaggagacgggcgtc

SEQ ID NO: 1602325 - DNA, 25 bp, Homo sapien
caggggttccgcctgtgaactcgct

SEQ ID NO: 1602326 - DNA, 25 bp, Homo sapien
cgcctgtgaactcgctgcggcttgg

SEQ ID NO: 1602327 - DNA, 25 bp, Homo sapien
gggttccgcctgtgaactcgctgcg

SEQ ID NO: 1602328 - DNA, 25 bp, Homo sapien
tgtgaactcgctgcggcttggccct

SEQ ID NO: 1602329 - DNA, 25 bp, Homo sapien
cagcccatggtagcggaagaaattc

SEQ ID NO: 1602330 - DNA, 25 bp, Homo sapien
gacagagcccattgctcaggacgca

SEQ ID NO: 1602331 - DNA, 25 bp, Homo sapien
cagtggccagcgtaaggctcaggaa

SEQ ID NO: 1602332 - DNA, 25 bp, Homo sapien
gattgcaaagagaggacagcccatg

SEQ ID NO: 1602333 - DNA, 25 bp, Homo sapien
tgctctgcactagtccgaaggtatg

SEQ ID NO: 1602334 - DNA, 25 bp, Homo sapien
ggaaggcttcggaaaagcaggaagc

SEQ ID NO: 1602335 - DNA, 25 bp, Homo sapien
gagctgagcccaagcatgctgtgaa

SEQ ID NO: 1602336 - DNA, 25 bp, Homo sapien
ctgtgaagccaagatgcagaggttg

SEQ ID NO: 1602337 - DNA, 25 bp, Homo sapien
gaccacaggggtgttagggcacttc

SEQ ID NO: 1602338 - DNA, 25 bp, Homo sapien
tgacatccaagctgagggtccctac

SEQ ID NO: 1602339 - DNA, 25 bp, Homo sapien
cacaggggtgttagggcacttcccg

SEQ ID NO: 1602340 - DNA, 25 bp, Homo sapien
cccatgacatccaagctgagggtcc

SEQ ID NO: 1602341 - DNA, 25 bp, Homo sapien
acctgacaagaccagtagatggacc

SEQ ID NO: 1602342 - DNA, 25 bp, Homo sapien
cctgacaagaccagtagatggacca

SEQ ID NO: 1602343 - DNA, 25 bp, Homo sapien
ctgacaagaccagtagatggaccat

SEQ ID NO: 1602344 - DNA, 25 bp, Homo sapien
aatcaggcctcctaggttcccgcct

SEQ ID NO: 1602345 - DNA, 25 bp, Homo sapien
cttaatcaggcctcctaggttcccg

SEQ ID NO: 1602346 - DNA, 25 bp, Homo sapien
tcaggcctcctaggttcccgccttc

SEQ ID NO: 1602347 - DNA, 25 bp, Homo sapien
ttaatcaggcctcctaggttcccgc

SEQ ID NO: 1602348 - DNA, 25 bp, Homo sapien
caccgggtggctcagaactttacct

SEQ ID NO: 1602349 - DNA, 25 bp, Homo sapien
cgggtggctcagaactttacctttg

SEQ ID NO: 1602350 - DNA, 25 bp, Homo sapien
gcatcccgggaatgagagtgagaaa

SEQ ID NO: 1602351 - DNA, 25 bp, Homo sapien
tctctccaaatgtcagccctcaaga

SEQ ID NO: 1602352 - DNA, 25 bp, Homo sapien
accccagggatccagttctgacagc

SEQ ID NO: 1602353 - DNA, 25 bp, Homo sapien
gatcatagccctaggtcttcagaga

SEQ ID NO: 1602354 - DNA, 25 bp, Homo sapien
tattaggtgaagatcccgaaagccc

SEQ ID NO: 1602355 - DNA, 25 bp, Homo sapien
gaaaccctaaatctcatcctgagga

SEQ ID NO: 1602356 - DNA, 25 bp, Homo sapien
gtgaagatcccgaaagccccgagga

SEQ ID NO: 1602357 - DNA, 25 bp, Homo sapien
gaaacgccaaatctcatcccgagga

SEQ ID NO: 1602358 - DNA, 25 bp, Homo sapien
ttaggaaccgggacctcaatccgca

SEQ ID NO: 1602359 - DNA, 25 bp, Homo sapien
gagaacagaggcgtcggggccaaat

SEQ ID NO: 1602360 - DNA, 25 bp, Homo sapien
cgcagcacccggattccgagaacag

SEQ ID NO: 1602361 - DNA, 25 bp, Homo sapien
cgtcggggccaaatgggctgaatct

SEQ ID NO: 1602362 - DNA, 25 bp, Homo sapien
gggatgcccggcactcaattaggtg

SEQ ID NO: 1602363 - DNA, 25 bp, Homo sapien
gctactaagcgcagctgaagcgtga

SEQ ID NO: 1602364 - DNA, 25 bp, Homo sapien
gcttttatccaattacgccgcggct

SEQ ID NO: 1602365 - DNA, 25 bp, Homo sapien
gaagccaatcgggtcgtagatctgc

SEQ ID NO: 1602366 - DNA, 25 bp, Homo sapien
ggaagactgagaggacaggagactg

SEQ ID NO: 1602367 - DNA, 25 bp, Homo sapien
gaggccaggtgataggaggctgagt

SEQ ID NO: 1602368 - DNA, 25 bp, Homo sapien
gggaggctggggatcagaaggagag

SEQ ID NO: 1602369 - DNA, 25 bp, Homo sapien
gccaggtgataggaggctgagtggg

SEQ ID NO: 1602370 - DNA, 25 bp, Homo sapien
tagccccgactgttagtcttgctgc

SEQ ID NO: 1602371 - DNA, 25 bp, Homo sapien
tgggcatgcggtccctgacctgcag

SEQ ID NO: 1602372 - DNA, 25 bp, Homo sapien
cacagcttgagcagccgggactgct

SEQ ID NO: 1602373 - DNA, 25 bp, Homo sapien
agatcctgatctgggcatgcggtcc

SEQ ID NO: 1602374 - DNA, 25 bp, Homo sapien
gactatagttgtacagagataaggt

SEQ ID NO: 1602375 - DNA, 25 bp, Homo sapien
agataaggtcatgcgatctcaaact

SEQ ID NO: 1602376 - DNA, 25 bp, Homo sapien
gagataaggtcatgcgatctcaaac

SEQ ID NO: 1602377 - DNA, 25 bp, Homo sapien
cagagataaggtcatgcgatctcaa

SEQ ID NO: 1602378 - DNA, 25 bp, Homo sapien
tcaccccgggcaggcaaaggcagtg

SEQ ID NO: 1602379 - DNA, 25 bp, Homo sapien
gaacctgcccctgttcttcacactg

SEQ ID NO: 1602380 - DNA, 25 bp, Homo sapien
ctctcctaatcccctacttaagtag

SEQ ID NO: 1602381 - DNA, 25 bp, Homo sapien
cctcatacagatgtgccatcatggg

SEQ ID NO: 1602382 - DNA, 25 bp, Homo sapien
cttaggagttggagaatgacctggg

SEQ ID NO: 1602383 - DNA, 25 bp, Homo sapien
caaggtaaatggggcctggtctcca

SEQ ID NO: 1602384 - DNA, 25 bp, Homo sapien
ggtaaatggggcctggtctccacac

SEQ ID NO: 1602385 - DNA, 25 bp, Homo sapien
ttgagcttaggagttggagaatgac

SEQ ID NO: 1602386 - DNA, 25 bp, Homo sapien
aagtcgagactgtcgtgagctgtga

SEQ ID NO: 1602387 - DNA, 25 bp, Homo sapien
agactgtcgtgagctgtgatgatgc

SEQ ID NO: 1602388 - DNA, 25 bp, Homo sapien
ccaggaagtcgagactgtcgtgagc

SEQ ID NO: 1602389 - DNA, 25 bp, Homo sapien
ggaagtcgagactgtcgtgagctgt

SEQ ID NO: 1602390 - DNA, 25 bp, Homo sapien
gcatatttgcacagttcacaccctg

SEQ ID NO: 1602391 - DNA, 25 bp, Homo sapien
tatttgcacagttcacaccctgacc

SEQ ID NO: 1602392 - DNA, 25 bp, Homo sapien
atttgcacagttcacaccctgacct

SEQ ID NO: 1602393 - DNA, 25 bp, Homo sapien
ggccttttctcaaatgtcgccttcc

SEQ ID NO: 1602394 - DNA, 25 bp, Homo sapien
ccatgattctcctctatggtaaatc

SEQ ID NO: 1602395 - DNA, 25 bp, Homo sapien
caagatgtgaagacaggccagacac

SEQ ID NO: 1602396 - DNA, 25 bp, Homo sapien
cttcttctgtcaagatgtgaagaca

SEQ ID NO: 1602397 - DNA, 25 bp, Homo sapien
ctgcaggcaggtacattcctccatg

SEQ ID NO: 1602398 - DNA, 25 bp, Homo sapien
tggcactgctccagcggtattttcc

SEQ ID NO: 1602399 - DNA, 25 bp, Homo sapien
agaaatgatgatcgctccgtggccc

SEQ ID NO: 1602400 - DNA, 25 bp, Homo sapien
gtgggtgactttccgatcagatgga

SEQ ID NO: 1602401 - DNA, 25 bp, Homo sapien
ggaagccgcctacctcattgcctta

SEQ ID NO: 1602402 - DNA, 25 bp, Homo sapien
tcagggacatatgcagatccaaaga

SEQ ID NO: 1602403 - DNA, 25 bp, Homo sapien
ctaaacaatgtaaagtgctttttct

SEQ ID NO: 1602404 - DNA, 25 bp, Homo sapien
aaacaatgtaaagtgctttttctct

SEQ ID NO: 1602405 - DNA, 25 bp, Homo sapien
taaacaatgtaaagtgctttttctc

SEQ ID NO: 1602406 - DNA, 25 bp, Homo sapien
ccttcctgggtgtacagctaaacta

SEQ ID NO: 1602407 - DNA, 25 bp, Homo sapien
gagactagctagtggcccttaaaca

SEQ ID NO: 1602408 - DNA, 25 bp, Homo sapien
tccatctaagtaccctaagagaagg

SEQ ID NO: 1602409 - DNA, 25 bp, Homo sapien
tccagccagtgaggtgtgagaagaa

SEQ ID NO: 1602410 - DNA, 25 bp, Homo sapien
ggattgggcagacaaaatcagcaat

SEQ ID NO: 1602411 - DNA, 25 bp, Homo sapien
ctgagtcatattggatccctgatca

SEQ ID NO: 1602412 - DNA, 25 bp, Homo sapien
ttccataagtcttgagtctgcactg

SEQ ID NO: 1602413 - DNA, 25 bp, Homo sapien
tagcattcagattgcagatccagct

SEQ ID NO: 1602414 - DNA, 25 bp, Homo sapien
cagataggtatcctgggcatgctca

SEQ ID NO: 1602415 - DNA, 25 bp, Homo sapien
caggatagtgtactcaaagctggca

SEQ ID NO: 1602416 - DNA, 25 bp, Homo sapien
taaggctgttctcataagggttgga

SEQ ID NO: 1602417 - DNA, 25 bp, Homo sapien
tgtagtcagttgagatgccagagtc

SEQ ID NO: 1602418 - DNA, 25 bp, Homo sapien
agaagcagggaagcccaggcactga

SEQ ID NO: 1602419 - DNA, 25 bp, Homo sapien
caagaagcagggaagcccaggcact

SEQ ID NO: 1602420 - DNA, 25 bp, Homo sapien
gcaagaagcagggaagcccaggcac

SEQ ID NO: 1602421 - DNA, 25 bp, Homo sapien
aagaagcagggaagcccaggcactg

SEQ ID NO: 1602422 - DNA, 25 bp, Homo sapien
tctctgggctcgggatgccaggcca

SEQ ID NO: 1602423 - DNA, 25 bp, Homo sapien
tgggctcgggatgccaggccagatc

SEQ ID NO: 1602424 - DNA, 25 bp, Homo sapien
ggccttcaaactcgctctctgggct

SEQ ID NO: 1602425 - DNA, 25 bp, Homo sapien
ttcaaactcgctctctgggctcggg

SEQ ID NO: 1602426 - DNA, 25 bp, Homo sapien
tgaagccaatataaatagttacata

SEQ ID NO: 1602427 - DNA, 25 bp, Homo sapien
taaatagttacatagatatgactca

SEQ ID NO: 1602428 - DNA, 25 bp, Homo sapien
aatagttacatagatatgactcatt

SEQ ID NO: 1602429 - DNA, 25 bp, Homo sapien
gttacatagatatgactcattgaat

SEQ ID NO: 1602430 - DNA, 25 bp, Homo sapien
atagaggcacagatacacttggtcc

SEQ ID NO: 1602431 - DNA, 25 bp, Homo sapien
actcccagtcatagaggcacagata

SEQ ID NO: 1602432 - DNA, 25 bp, Homo sapien
cagtcatagaggcacagatacactt

SEQ ID NO: 1602433 - DNA, 25 bp, Homo sapien
tcatagaggcacagatacacttggt

SEQ ID NO: 1602434 - DNA, 25 bp, Homo sapien
tcacaatggaggcagaggagtacat

SEQ ID NO: 1602435 - DNA, 25 bp, Homo sapien
atggaggcagaggagtacatcaggg

SEQ ID NO: 1602436 - DNA, 25 bp, Homo sapien
tacatcagggccaggggacaggggt

SEQ ID NO: 1602437 - DNA, 25 bp, Homo sapien
tgatcacaatggaggcagaggagta

SEQ ID NO: 1602438 - DNA, 25 bp, Homo sapien
gcagtggtttacaccagcactataa

SEQ ID NO: 1602439 - DNA, 25 bp, Homo sapien
tgaagggtgcataggagttcaatat

SEQ ID NO: 1602440 - DNA, 25 bp, Homo sapien
ttacaccagcactataatcccagta

SEQ ID NO: 1602441 - DNA, 25 bp, Homo sapien
aatggaacagggtattgaagggtgc

SEQ ID NO: 1602442 - DNA, 25 bp, Homo sapien
tttccatagtgaaagaggaccgttg

SEQ ID NO: 1602443 - DNA, 25 bp, Homo sapien
ccaagaaatggcagcccctgatgta

SEQ ID NO: 1602444 - DNA, 25 bp, Homo sapien
cgaagagtctgggtctagtctggca

SEQ ID NO: 1602445 - DNA, 25 bp, Homo sapien
gaaaccacctagtgtgtgcttggaa

SEQ ID NO: 1602446 - DNA, 25 bp, Homo sapien
ggatgagggagagcgtcaggatgag

SEQ ID NO: 1602447 - DNA, 25 bp, Homo sapien
agcgtcaggatgagggggtccaggt

SEQ ID NO: 1602448 - DNA, 25 bp, Homo sapien
gtgggagagcagcgcgagcacggtc

SEQ ID NO: 1602449 - DNA, 25 bp, Homo sapien
agagcagcgcgagcacggtcagcag

SEQ ID NO: 1602450 - DNA, 25 bp, Homo sapien
ggcttgccccgtgattcgccctggc

SEQ ID NO: 1602451 - DNA, 25 bp, Homo sapien
tgggcttgccccgtgattcgccctg

SEQ ID NO: 1602452 - DNA, 25 bp, Homo sapien
cttgccccgtgattcgccctggctc

SEQ ID NO: 1602453 - DNA, 25 bp, Homo sapien
ttgccccgtgattcgccctggctcc

SEQ ID NO: 1602454 - DNA, 25 bp, Homo sapien
cgctaggcgtcagcagcgacacagg

SEQ ID NO: 1602455 - DNA, 25 bp, Homo sapien
atacgcgcgcggacggcgaaggtgt

SEQ ID NO: 1602456 - DNA, 25 bp, Homo sapien
acggcgaaggtgtagcgcgtccggc

SEQ ID NO: 1602457 - DNA, 25 bp, Homo sapien
gaagctcggctcagccatacgcgcg

SEQ ID NO: 1602458 - DNA, 25 bp, Homo sapien
cggaatcagggcgagggacgcgtag

SEQ ID NO: 1602459 - DNA, 25 bp, Homo sapien
agacaaaaatagatgacgtgggggc

SEQ ID NO: 1602460 - DNA, 25 bp, Homo sapien
gagggacgcgtagcagacaaaaata

SEQ ID NO: 1602461 - DNA, 25 bp, Homo sapien
atcagggcgagggacgcgtagcaga

SEQ ID NO: 1602462 - DNA, 25 bp, Homo sapien
gggagccagcgcaacactacgtggc

SEQ ID NO: 1602463 - DNA, 25 bp, Homo sapien
atgggtgtctcaggcggcgggagcc

SEQ ID NO: 1602464 - DNA, 25 bp, Homo sapien
ggccgagacgtccacctcgtagcgg

SEQ ID NO: 1602465 - DNA, 25 bp, Homo sapien
gatgtgagacgtcatgggtgtctca

SEQ ID NO: 1602466 - DNA, 25 bp, Homo sapien
cacgaagctcgacgtgtcggctgta

SEQ ID NO: 1602467 - DNA, 25 bp, Homo sapien
atgacacggtgatatcgcggagcgc

SEQ ID NO: 1602468 - DNA, 25 bp, Homo sapien
tacttcattgatgtggatgacacgg

SEQ ID NO: 1602469 - DNA, 25 bp, Homo sapien
aggctgctgtgacgcgcaactctag

SEQ ID NO: 1602470 - DNA, 25 bp, Homo sapien
ggtgcaggcgacacagcttccatgg

SEQ ID NO: 1602471 - DNA, 25 bp, Homo sapien
tggtgcaggcgacacagcttccatg

SEQ ID NO: 1602472 - DNA, 25 bp, Homo sapien
tccagtgaccacgactggaggcgcc

SEQ ID NO: 1602473 - DNA, 25 bp, Homo sapien
gtgccagccctggacccgcaggttt

SEQ ID NO: 1602474 - DNA, 25 bp, Homo sapien
gatttggaggcgttgttatcccagc

SEQ ID NO: 1602475 - DNA, 25 bp, Homo sapien
tccagcggtgatcgcgggagtgttc

SEQ ID NO: 1602476 - DNA, 25 bp, Homo sapien
ggacatacgaggctacgacctccag

SEQ ID NO: 1602477 - DNA, 25 bp, Homo sapien
ttggaggcacccgccggatcggact

SEQ ID NO: 1602478 - DNA, 25 bp, Homo sapien
acgaggctacgacctccagggagct

SEQ ID NO: 1602479 - DNA, 25 bp, Homo sapien
cagcaggggacatacgaggctacga

SEQ ID NO: 1602480 - DNA, 25 bp, Homo sapien
accgctcggtgaagcacagaagctc

SEQ ID NO: 1602481 - DNA, 25 bp, Homo sapien
ctggtaggagaagctgtagttgccc

SEQ ID NO: 1602482 - DNA, 25 bp, Homo sapien
tccaaccgctcggtgaagcacagaa

SEQ ID NO: 1602483 - DNA, 25 bp, Homo sapien
tcctccaaccgctcggtgaagcaca

SEQ ID NO: 1602484 - DNA, 25 bp, Homo sapien
tcccaggggcaagtttctcgcctta

SEQ ID NO: 1602485 - DNA, 25 bp, Homo sapien
gggtctgagctctatcctcgggaga

SEQ ID NO: 1602486 - DNA, 25 bp, Homo sapien
catcttcccaagcgggtcccttgga

SEQ ID NO: 1602487 - DNA, 25 bp, Homo sapien
tgagctctatcctcgggagacagcc

SEQ ID NO: 1602488 - DNA, 25 bp, Homo sapien
caaaccgtgtttacagtagcctgtg

SEQ ID NO: 1602489 - DNA, 25 bp, Homo sapien
cgggaatgttaagcccactctagct

SEQ ID NO: 1602490 - DNA, 25 bp, Homo sapien
cgttcaagacctcgagctcgggact

SEQ ID NO: 1602491 - DNA, 25 bp, Homo sapien
gatttagcatgtcccagactccctg

SEQ ID NO: 1602492 - DNA, 25 bp, Homo sapien
cagagggacgccccgaggtggtcca

SEQ ID NO: 1602493 - DNA, 25 bp, Homo sapien
aggagacaaagggagccgacctggg

SEQ ID NO: 1602494 - DNA, 25 bp, Homo sapien
agagggacgccccgaggtggtccat

SEQ ID NO: 1602495 - DNA, 25 bp, Homo sapien
ctttgctctcgaacttggggtccgg

SEQ ID NO: 1602496 - DNA, 25 bp, Homo sapien
cctctaagtggcagatccccgaggg

SEQ ID NO: 1602497 - DNA, 25 bp, Homo sapien
caacagctcccgttctggcttcaga

SEQ ID NO: 1602498 - DNA, 25 bp, Homo sapien
tcagcctgggtagagataagtgcct

SEQ ID NO: 1602499 - DNA, 25 bp, Homo sapien
tagcctggcacatagcgaacattcc

SEQ ID NO: 1602500 - DNA, 25 bp, Homo sapien
cagtagaaaagaggcatatcacccc

SEQ ID NO: 1602501 - DNA, 25 bp, Homo sapien
acagcccttattgactcatgggtaa

SEQ ID NO: 1602502 - DNA, 25 bp, Homo sapien
gatggaatttcagttagtcactctc

SEQ ID NO: 1602503 - DNA, 25 bp, Homo sapien
cagatgggttatctgtgacaggaag

SEQ ID NO: 1602504 - DNA, 25 bp, Homo sapien
tccaggagaagagtcgcaagcttgc

SEQ ID NO: 1602505 - DNA, 25 bp, Homo sapien
gagggatttgacgtatccatgcccc

SEQ ID NO: 1602506 - DNA, 25 bp, Homo sapien
catttatgggattgagctctccacc

SEQ ID NO: 1602507 - DNA, 25 bp, Homo sapien
ggatctagtaccaacagagtcagaa

SEQ ID NO: 1602508 - DNA, 25 bp, Homo sapien
gggcgactggactcatggcatagaa

SEQ ID NO: 1602509 - DNA, 25 bp, Homo sapien
ctttccgccgcagcatgaagtctct

SEQ ID NO: 1602510 - DNA, 25 bp, Homo sapien
gacgttggcattgtcaggaatcagg

SEQ ID NO: 1602511 - DNA, 25 bp, Homo sapien
agacagacagagtgttccgggtccc

SEQ ID NO: 1602512 - DNA, 25 bp, Homo sapien
tggtaataggccctcacaaccttgt

SEQ ID NO: 1602513 - DNA, 25 bp, Homo sapien
aaccttgtgtcacccccacagagga

SEQ ID NO: 1602514 - DNA, 25 bp, Homo sapien
taataggccctcacaaccttgtgtc

SEQ ID NO: 1602515 - DNA, 25 bp, Homo sapien
gagatggtggtaataggccctcaca

SEQ ID NO: 1602516 - DNA, 25 bp, Homo sapien
caagctcattctgctgtcactggga

SEQ ID NO: 1602517 - DNA, 25 bp, Homo sapien
ctgcagctactgccaagccaagctc

SEQ ID NO: 1602518 - DNA, 25 bp, Homo sapien
gccaagctcattctgctgtcactgg

SEQ ID NO: 1602519 - DNA, 25 bp, Homo sapien
aagccaagctcattctgctgtcact

SEQ ID NO: 1602520 - DNA, 25 bp, Homo sapien
cccttatcataagcctgggcaacct

SEQ ID NO: 1602521 - DNA, 25 bp, Homo sapien
acctgcagtaaaagtttgagcaaac

SEQ ID NO: 1602522 - DNA, 25 bp, Homo sapien
tgaaaacttgcaccacctcatgcct

SEQ ID NO: 1602523 - DNA, 25 bp, Homo sapien
ccctcaccatagagacaaggcaacc

SEQ ID NO: 1602524 - DNA, 25 bp, Homo sapien
gcctgaacaatctcatgatgctaca

SEQ ID NO: 1602525 - DNA, 25 bp, Homo sapien
gatgctacaaacttaagatcagaca

SEQ ID NO: 1602526 - DNA, 25 bp, Homo sapien
gatcagacaaacttctacactccct

SEQ ID NO: 1602527 - DNA, 25 bp, Homo sapien
tcccatcccatcaggttgagcctga

SEQ ID NO: 1602528 - DNA, 25 bp, Homo sapien
ggccggaccctggacaatcttattg

SEQ ID NO: 1602529 - DNA, 25 bp, Homo sapien
gaagatgacctttggtacctctctc

SEQ ID NO: 1602530 - DNA, 25 bp, Homo sapien
ccctacatcgttgggttacaggtat

SEQ ID NO: 1602531 - DNA, 25 bp, Homo sapien
aagacaatctcatgaccctacatcg

SEQ ID NO: 1602532 - DNA, 25 bp, Homo sapien
cttctgcaaggctcgccggaccacg

SEQ ID NO: 1602533 - DNA, 25 bp, Homo sapien
ttgtgcttctgcaaggctcgccgga

SEQ ID NO: 1602534 - DNA, 25 bp, Homo sapien
gtgcttctgcaaggctcgccggacc

SEQ ID NO: 1602535 - DNA, 25 bp, Homo sapien
tgcaaggctcgccggaccacgctgg

SEQ ID NO: 1602536 - DNA, 25 bp, Homo sapien
tgacgcggatgacacgggcctccga

SEQ ID NO: 1602537 - DNA, 25 bp, Homo sapien
aggttcccgtggtcattgtcgatgc

SEQ ID NO: 1602538 - DNA, 25 bp, Homo sapien
cattgtcgatgctgacgcggatgac

SEQ ID NO: 1602539 - DNA, 25 bp, Homo sapien
ctccgagctctgctgcgccgggagg

SEQ ID NO: 1602540 - DNA, 25 bp, Homo sapien
ctgggcaggtccaggctcaggggca

SEQ ID NO: 1602541 - DNA, 25 bp, Homo sapien
gggctgggcaggtccaggctcaggg

SEQ ID NO: 1602542 - DNA, 25 bp, Homo sapien
ctgcccagaggcaaagcgaagggcc

SEQ ID NO: 1602543 - DNA, 25 bp, Homo sapien
cgggggctgggcaggtccaggctca

SEQ ID NO: 1602544 - DNA, 25 bp, Homo sapien
agtaaggggtggaggctacagcttg

SEQ ID NO: 1602545 - DNA, 25 bp, Homo sapien
ggggtggaggctacagcttggccca

SEQ ID NO: 1602546 - DNA, 25 bp, Homo sapien
aaggggtggaggctacagcttggcc

SEQ ID NO: 1602547 - DNA, 25 bp, Homo sapien
gggtggaggctacagcttggcccat

SEQ ID NO: 1602548 - DNA, 25 bp, Homo sapien
cactggtgcattcaatagccccaca

SEQ ID NO: 1602549 - DNA, 25 bp, Homo sapien
ggtgcattcaatagccccacattta

SEQ ID NO: 1602550 - DNA, 25 bp, Homo sapien
tagaaaagcacgaacaccccagcca

SEQ ID NO: 1602551 - DNA, 25 bp, Homo sapien
agccaccactggtgcattcaatagc

SEQ ID NO: 1602552 - DNA, 25 bp, Homo sapien
ttctattttcagtagagacagggtt

SEQ ID NO: 1602553 - DNA, 25 bp, Homo sapien
ctacaggtgtgcgcgaccataccca

SEQ ID NO: 1602554 - DNA, 25 bp, Homo sapien
catacccagctaatttttctatttt

SEQ ID NO: 1602555 - DNA, 25 bp, Homo sapien
actacaggtgtgcgcgaccataccc

SEQ ID NO: 1602556 - DNA, 25 bp, Homo sapien
agcatctctgcttctaggacttgag

SEQ ID NO: 1602557 - DNA, 25 bp, Homo sapien
ctaggacttgaggggggtgaccctg

SEQ ID NO: 1602558 - DNA, 25 bp, Homo sapien
gcaggagcatctctgcttctaggac

SEQ ID NO: 1602559 - DNA, 25 bp, Homo sapien
ccctggagaggccgggggactgcca

SEQ ID NO: 1602560 - DNA, 25 bp, Homo sapien
gatgagcttttctctcgggcaagct

SEQ ID NO: 1602561 - DNA, 25 bp, Homo sapien
cgggactcccactaggtgatgagct

SEQ ID NO: 1602562 - DNA, 25 bp, Homo sapien
gactcccactaggtgatgagctttt

SEQ ID NO: 1602563 - DNA, 25 bp, Homo sapien
tgagcttttctctcgggcaagcttc

SEQ ID NO: 1602564 - DNA, 25 bp, Homo sapien
cgcttggtgaggctgatccgccgtc

SEQ ID NO: 1602565 - DNA, 25 bp, Homo sapien
agacgcttggtgaggctgatccgcc

SEQ ID NO: 1602566 - DNA, 25 bp, Homo sapien
cactgagacgcttggtgaggctgat

SEQ ID NO: 1602567 - DNA, 25 bp, Homo sapien
gctgatccgccgtcggatgcgtggg

SEQ ID NO: 1602568 - DNA, 25 bp, Homo sapien
gtggctcaatgacccgggagagccg

SEQ ID NO: 1602569 - DNA, 25 bp, Homo sapien
aggcagctggtggctcaatgacccg

SEQ ID NO: 1602570 - DNA, 25 bp, Homo sapien
cagctggtggctcaatgacccggga

SEQ ID NO: 1602571 - DNA, 25 bp, Homo sapien
tggtggctcaatgacccgggagagc

SEQ ID NO: 1602572 - DNA, 25 bp, Homo sapien
aaccaccaggcccagtctatttgat

SEQ ID NO: 1602573 - DNA, 25 bp, Homo sapien
ctgggacaggctacagggtggtcac

SEQ ID NO: 1602574 - DNA, 25 bp, Homo sapien
tatttgattcgactggagatactgc

SEQ ID NO: 1602575 - DNA, 25 bp, Homo sapien
gtggaatccagttggtgacccaggc

SEQ ID NO: 1602576 - DNA, 25 bp, Homo sapien
gtgtagctctgacagcgcctctgca

SEQ ID NO: 1602577 - DNA, 25 bp, Homo sapien
agggtgtagctctgacagcgcctct

SEQ ID NO: 1602578 - DNA, 25 bp, Homo sapien
gtagctctgacagcgcctctgcagc

SEQ ID NO: 1602579 - DNA, 25 bp, Homo sapien
gggtgtagctctgacagcgcctctg

SEQ ID NO: 1602580 - DNA, 25 bp, Homo sapien
gagcctctaagaccctacccctgcc

SEQ ID NO: 1602581 - DNA, 25 bp, Homo sapien
tggaggacgagcctctaagacccta

SEQ ID NO: 1602582 - DNA, 25 bp, Homo sapien
acgagcctctaagaccctacccctg

SEQ ID NO: 1602583 - DNA, 25 bp, Homo sapien
gaggacgagcctctaagaccctacc

SEQ ID NO: 1602584 - DNA, 25 bp, Homo sapien
cctcttctcaaagttaatgagatcc

SEQ ID NO: 1602585 - DNA, 25 bp, Homo sapien
tcctcttctcaaagttaatgagatc

SEQ ID NO: 1602586 - DNA, 25 bp, Homo sapien
ttcctcctcttctcaaagttaatga

SEQ ID NO: 1602587 - DNA, 25 bp, Homo sapien
cctcctcttctcaaagttaatgaga

SEQ ID NO: 1602588 - DNA, 25 bp, Homo sapien
caggagccccactgtagtaagggag

SEQ ID NO: 1602589 - DNA, 25 bp, Homo sapien
tacaggtaggatcaagggtggatat

SEQ ID NO: 1602590 - DNA, 25 bp, Homo sapien
tgtcaggagtacaggtaggatcaag

SEQ ID NO: 1602591 - DNA, 25 bp, Homo sapien
tgaattgcagcacccagggtcaagg

SEQ ID NO: 1602592 - DNA, 25 bp, Homo sapien
cagcataaccaggtccgtaaggaag

SEQ ID NO: 1602593 - DNA, 25 bp, Homo sapien
tgtccagcataaccaggtccgtaag

SEQ ID NO: 1602594 - DNA, 25 bp, Homo sapien
ccaggtccgtaaggaaggtgccaag

SEQ ID NO: 1602595 - DNA, 25 bp, Homo sapien
agggctgtgtccagcataaccaggt

SEQ ID NO: 1602596 - DNA, 25 bp, Homo sapien
tcctcttcttgggatccctcagtgg

SEQ ID NO: 1602597 - DNA, 25 bp, Homo sapien
gggtgttgtcctcttcttgggatcc

SEQ ID NO: 1602598 - DNA, 25 bp, Homo sapien
gttgtcctcttcttgggatccctca

SEQ ID NO: 1602599 - DNA, 25 bp, Homo sapien
tcttcttgggatccctcagtggcct

SEQ ID NO: 1602600 - DNA, 25 bp, Homo sapien
tttcctgaaagtagatagcggttcc

SEQ ID NO: 1602601 - DNA, 25 bp, Homo sapien
cgaaagtttcctgaaagtagatagc

SEQ ID NO: 1602602 - DNA, 25 bp, Homo sapien
tcggagaaaatctgcgaaagtttcc

SEQ ID NO: 1602603 - DNA, 25 bp, Homo sapien
tgttctcatcggagaaaatctgcga

SEQ ID NO: 1602604 - DNA, 25 bp, Homo sapien
agaagttccgcagttctcggcagcg

SEQ ID NO: 1602605 - DNA, 25 bp, Homo sapien
ggcggacaggatggcgcgcaaggag

SEQ ID NO: 1602606 - DNA, 25 bp, Homo sapien
gggttagattgcagggcggacagga

SEQ ID NO: 1602607 - DNA, 25 bp, Homo sapien
cagctgcgcttgagccggtagatgg

SEQ ID NO: 1602608 - DNA, 25 bp, Homo sapien
tgatcccgtgacttgtgacgccagg

SEQ ID NO: 1602609 - DNA, 25 bp, Homo sapien
tcacatccgacaagctaccaagact

SEQ ID NO: 1602610 - DNA, 25 bp, Homo sapien
agctcccttgggacctagtcgtgcc

SEQ ID NO: 1602611 - DNA, 25 bp, Homo sapien
tgaacccaagtctcaccctaggtat

SEQ ID NO: 1602612 - DNA, 25 bp, Homo sapien
acacggagcccaagcactcgtagag

SEQ ID NO: 1602613 - DNA, 25 bp, Homo sapien
tcacggtgttgaactgggccacggt

SEQ ID NO: 1602614 - DNA, 25 bp, Homo sapien
ctcgtagagcctcaccttggagaag

SEQ ID NO: 1602615 - DNA, 25 bp, Homo sapien
agcacacagccggtcacggtgttga

SEQ ID NO: 1602616 - DNA, 25 bp, Homo sapien
ggattggtgcttagcagaacctgtc

SEQ ID NO: 1602617 - DNA, 25 bp, Homo sapien
gtgggattggtgcttagcagaacct

SEQ ID NO: 1602618 - DNA, 25 bp, Homo sapien
actgtggctcatcccgaccctgtcc

SEQ ID NO: 1602619 - DNA, 25 bp, Homo sapien
tcccgaccctgtccgggatcctcac

SEQ ID NO: 1602620 - DNA, 25 bp, Homo sapien
tcttcctccgcgcaggcctctgaag

SEQ ID NO: 1602621 - DNA, 25 bp, Homo sapien
tcctccgcgcaggcctctgaagagt

SEQ ID NO: 1602622 - DNA, 25 bp, Homo sapien
ttcctccgcgcaggcctctgaagag

SEQ ID NO: 1602623 - DNA, 25 bp, Homo sapien
tgggtcagaagtttgggcaactctg

SEQ ID NO: 1602624 - DNA, 25 bp, Homo sapien
tcagaagtttgggcaactctgggag

SEQ ID NO: 1602625 - DNA, 25 bp, Homo sapien
gaagtttgggcaactctgggaggtc

SEQ ID NO: 1602626 - DNA, 25 bp, Homo sapien
ctgggtcagaagtttgggcaactct

SEQ ID NO: 1602627 - DNA, 25 bp, Homo sapien
gagtagatctttggatttcaatttg

SEQ ID NO: 1602628 - DNA, 25 bp, Homo sapien
cagctttgatttcccggagtcaaga

SEQ ID NO: 1602629 - DNA, 25 bp, Homo sapien
gatttcccggagtcaagagatcctc

SEQ ID NO: 1602630 - DNA, 25 bp, Homo sapien
cttgagtagatctttggatttcaat

SEQ ID NO: 1602631 - DNA, 25 bp, Homo sapien
gcaggggggtctcggaaatcctgag

SEQ ID NO: 1602632 - DNA, 25 bp, Homo sapien
gacactgcccaggtccgaatgggca

SEQ ID NO: 1602633 - DNA, 25 bp, Homo sapien
ccagcccagaaaggttcggacactg

SEQ ID NO: 1602634 - DNA, 25 bp, Homo sapien
gctttttgagcctcagcactccctg

SEQ ID NO: 1602635 - DNA, 25 bp, Homo sapien
tcttactgtgtcaccaaggctgcag

SEQ ID NO: 1602636 - DNA, 25 bp, Homo sapien
agtcttactgtgtcaccaaggctgc

SEQ ID NO: 1602637 - DNA, 25 bp, Homo sapien
ttactgtgtcaccaaggctgcagtg

SEQ ID NO: 1602638 - DNA, 25 bp, Homo sapien
cagtgcaatggcctgatcttgactc

SEQ ID NO: 1602639 - DNA, 25 bp, Homo sapien
tttcaaaaccccagtccgactgcta

SEQ ID NO: 1602640 - DNA, 25 bp, Homo sapien
cagtccgactgctaacctttgacct

SEQ ID NO: 1602641 - DNA, 25 bp, Homo sapien
tattacccaacctgcaattttcaaa

SEQ ID NO: 1602642 - DNA, 25 bp, Homo sapien
gactcccagtctcttattacccaac

SEQ ID NO: 1602643 - DNA, 25 bp, Homo sapien
gctcagatcttgtaccgctgtcttc

SEQ ID NO: 1602644 - DNA, 25 bp, Homo sapien
tgttgaagctcagatcttgtaccgc

SEQ ID NO: 1602645 - DNA, 25 bp, Homo sapien
gaagctcagatcttgtaccgctgtc

SEQ ID NO: 1602646 - DNA, 25 bp, Homo sapien
gatcttgtaccgctgtcttcttgat

SEQ ID NO: 1602647 - DNA, 25 bp, Homo sapien
aggccccccagcaggtgaagaaggg

SEQ ID NO: 1602648 - DNA, 25 bp, Homo sapien
ctgggaggtgtttccaggttccaca

SEQ ID NO: 1602649 - DNA, 25 bp, Homo sapien
gaagaggccccccagcaggtgaaga

SEQ ID NO: 1602650 - DNA, 25 bp, Homo sapien
gggcttaggaagagggctctgggtc

SEQ ID NO: 1602651 - DNA, 25 bp, Homo sapien
gagaatacggaggttatggttcgct

SEQ ID NO: 1602652 - DNA, 25 bp, Homo sapien
aatacggaggttatggttcgctact

SEQ ID NO: 1602653 - DNA, 25 bp, Homo sapien
acggaggttatggttcgctactgac

SEQ ID NO: 1602654 - DNA, 25 bp, Homo sapien
tctagggtggagaatacggaggtta

SEQ ID NO: 1602655 - DNA, 25 bp, Homo sapien
gctccaggcgcgctgccctcagcac

SEQ ID NO: 1602656 - DNA, 25 bp, Homo sapien
ccttgctggttcgatagtggaggaa

SEQ ID NO: 1602657 - DNA, 25 bp, Homo sapien
ccctcaccttgctggttcgatagtg

SEQ ID NO: 1602658 - DNA, 25 bp, Homo sapien
caccttgctggttcgatagtggagg

SEQ ID NO: 1602659 - DNA, 25 bp, Homo sapien
cggcttcttggagttattgttttgg

SEQ ID NO: 1602660 - DNA, 25 bp, Homo sapien
ccggcttcttggagttattgttttg

SEQ ID NO: 1602661 - DNA, 25 bp, Homo sapien
ccccgcctgtagcaccattctttca

SEQ ID NO: 1602662 - DNA, 25 bp, Homo sapien
acctcgccccgcctgtagcaccatt

SEQ ID NO: 1602663 - DNA, 25 bp, Homo sapien
gagacactgtacaccgcgccgtcct

SEQ ID NO: 1602664 - DNA, 25 bp, Homo sapien
cgtcctcggtctcttcaccccagtc

SEQ ID NO: 1602665 - DNA, 25 bp, Homo sapien
ggctcctgcgctgactgcgctgccg

SEQ ID NO: 1602666 - DNA, 25 bp, Homo sapien
cgctgccgccgcagggagacactgt

SEQ ID NO: 1602667 - DNA, 25 bp, Homo sapien
ctgcgggtcaccagggatgcggggt

SEQ ID NO: 1602668 - DNA, 25 bp, Homo sapien
tgcgggtcaccagggatgcggggtc

SEQ ID NO: 1602669 - DNA, 25 bp, Homo sapien
ggccagctctttgcctgctgtgcgc

SEQ ID NO: 1602670 - DNA, 25 bp, Homo sapien
cagctctttgcctgctgtgcgctcc

SEQ ID NO: 1602671 - DNA, 25 bp, Homo sapien
gctctttgcctgctgtgcgctccat

SEQ ID NO: 1602672 - DNA, 25 bp, Homo sapien
cagggccagctctttgcctgctgtg

SEQ ID NO: 1602673 - DNA, 25 bp, Homo sapien
gtccctctcagtggcgccgctgagt

SEQ ID NO: 1602674 - DNA, 25 bp, Homo sapien
ccgtccctctcagtggcgccgctga

SEQ ID NO: 1602675 - DNA, 25 bp, Homo sapien
ggccggcgcccgtccctctcagtgg

SEQ ID NO: 1602676 - DNA, 25 bp, Homo sapien
gcgcccgtccctctcagtggcgccg

SEQ ID NO: 1602677 - DNA, 25 bp, Homo sapien
catttattgcgcaactctgaggccg

SEQ ID NO: 1602678 - DNA, 25 bp, Homo sapien
gatttactgtgggaacgtctggccc

SEQ ID NO: 1602679 - DNA, 25 bp, Homo sapien
cgggccgcgttcagcccctgaaggg

SEQ ID NO: 1602680 - DNA, 25 bp, Homo sapien
gggcctgcgctagacccggagggat

SEQ ID NO: 1602681 - DNA, 25 bp, Homo sapien
gatcttgagtgatgcgcgggtcact

SEQ ID NO: 1602682 - DNA, 25 bp, Homo sapien
taggacctccgagagcgacggtgct

SEQ ID NO: 1602683 - DNA, 25 bp, Homo sapien
gagagcgacggtgcttcttgtgact

SEQ ID NO: 1602684 - DNA, 25 bp, Homo sapien
tgtgactttcgattaatttctggga

SEQ ID NO: 1602685 - DNA, 25 bp, Homo sapien
gcgatgcgggtgttgtattcgggca

SEQ ID NO: 1602686 - DNA, 25 bp, Homo sapien
gccttccctctaagctggcgaggaa

SEQ ID NO: 1602687 - DNA, 25 bp, Homo sapien
tattcgggcagccttccctctaagc

SEQ ID NO: 1602688 - DNA, 25 bp, Homo sapien
gggtgttgtattcgggcagccttcc

SEQ ID NO: 1602689 - DNA, 25 bp, Homo sapien
ctagatctctggagctctgccccat

SEQ ID NO: 1602690 - DNA, 25 bp, Homo sapien
tcctagatctctggagctctgcccc

SEQ ID NO: 1602691 - DNA, 25 bp, Homo sapien
ggagctctgccccatggctgcaggg

SEQ ID NO: 1602692 - DNA, 25 bp, Homo sapien
gctctgccccatggctgcagggcac

SEQ ID NO: 1602693 - DNA, 25 bp, Homo sapien
atccagctcctttcccgcgaagcgg

SEQ ID NO: 1602694 - DNA, 25 bp, Homo sapien
cagcaggtttggcacatagttatct

SEQ ID NO: 1602695 - DNA, 25 bp, Homo sapien
atctcctgcacgtcgtggccctgga

SEQ ID NO: 1602696 - DNA, 25 bp, Homo sapien
tcgcggttagcgatgtggcacagca

SEQ ID NO: 1602697 - DNA, 25 bp, Homo sapien
ccacttgcatcgcccgcaaggcgcg

SEQ ID NO: 1602698 - DNA, 25 bp, Homo sapien
ttcttgagacgctcctgcgcctcgg

SEQ ID NO: 1602699 - DNA, 25 bp, Homo sapien
cgcaaggcgcgctccagctggtcct

SEQ ID NO: 1602700 - DNA, 25 bp, Homo sapien
cttggcctcggcgtgccgccgctcc

SEQ ID NO: 1602701 - DNA, 25 bp, Homo sapien
ttcagcctcaccaacgtctgctcgt

SEQ ID NO: 1602702 - DNA, 25 bp, Homo sapien
cgttctcgctcttgagcgtctccaa

SEQ ID NO: 1602703 - DNA, 25 bp, Homo sapien
tccaactgcgcgaaggtgtcgccct

SEQ ID NO: 1602704 - DNA, 25 bp, Homo sapien
caacgtctgctcgttctcgctcttg

SEQ ID NO: 1602705 - DNA, 25 bp, Homo sapien
atcacctccatctggtacatgctcc

SEQ ID NO: 1602706 - DNA, 25 bp, Homo sapien
agatcacctccatctggtacatgct

SEQ ID NO: 1602707 - DNA, 25 bp, Homo sapien
gatcacctccatctggtacatgctc

SEQ ID NO: 1602708 - DNA, 25 bp, Homo sapien
ctgtagcagcaggtgctcgcggtgg

SEQ ID NO: 1602709 - DNA, 25 bp, Homo sapien
tgtagcagcaggtgctcgcggtggg

SEQ ID NO: 1602710 - DNA, 25 bp, Homo sapien
gtagcagcaggtgctcgcggtgggt

SEQ ID NO: 1602711 - DNA, 25 bp, Homo sapien
ctgctcgtgggttgaggtcagagcc

SEQ ID NO: 1602712 - DNA, 25 bp, Homo sapien
tgctcgtgggttgaggtcagagcca

SEQ ID NO: 1602713 - DNA, 25 bp, Homo sapien
gctcgtgggttgaggtcagagccag

SEQ ID NO: 1602714 - DNA, 25 bp, Homo sapien
agctataattagtctgagcgacaga

SEQ ID NO: 1602715 - DNA, 25 bp, Homo sapien
agtgagctataattagtctgagcga

SEQ ID NO: 1602716 - DNA, 25 bp, Homo sapien
tgagctataattagtctgagcgaca

SEQ ID NO: 1602717 - DNA, 25 bp, Homo sapien
gagctataattagtctgagcgacag

SEQ ID NO: 1602718 - DNA, 25 bp, Homo sapien
catgcgctcgttctccagtttcttc

SEQ ID NO: 1602719 - DNA, 25 bp, Homo sapien
gtttcttctcctcggcgcgcttctt

SEQ ID NO: 1602720 - DNA, 25 bp, Homo sapien
gctctcgaaccaaggtctcctctag

SEQ ID NO: 1602721 - DNA, 25 bp, Homo sapien
cactcacttatgtagcgttcccgct

SEQ ID NO: 1602722 - DNA, 25 bp, Homo sapien
aatgtcccgggcattgagggcctct

SEQ ID NO: 1602723 - DNA, 25 bp, Homo sapien
gccggttctccaagttgaggctctc

SEQ ID NO: 1602724 - DNA, 25 bp, Homo sapien
ggttctccaagttgaggctctcgtc

SEQ ID NO: 1602725 - DNA, 25 bp, Homo sapien
cttggcaatgtcccgggcattgagg

SEQ ID NO: 1602726 - DNA, 25 bp, Homo sapien
ggcctcctgcgccttcatctgggcc

SEQ ID NO: 1602727 - DNA, 25 bp, Homo sapien
caggtacacgctggtaatgtgctcg

SEQ ID NO: 1602728 - DNA, 25 bp, Homo sapien
tagataggccttgagctgcaggtac

SEQ ID NO: 1602729 - DNA, 25 bp, Homo sapien
ctggtaatgtgctcggcctcctgcg

SEQ ID NO: 1602730 - DNA, 25 bp, Homo sapien
cttggccacctccgtgtgtctgttt

SEQ ID NO: 1602731 - DNA, 25 bp, Homo sapien
cctccgtgtgtctgttttgcgcctc

SEQ ID NO: 1602732 - DNA, 25 bp, Homo sapien
gccacctccgtgtgtctgttttgcg

SEQ ID NO: 1602733 - DNA, 25 bp, Homo sapien
gtgtgtctgttttgcgcctccgcca

SEQ ID NO: 1602734 - DNA, 25 bp, Homo sapien
caccttctccctcagccggtggtct

SEQ ID NO: 1602735 - DNA, 25 bp, Homo sapien
cttctccctcagccggtggtctagg

SEQ ID NO: 1602736 - DNA, 25 bp, Homo sapien
ctccctcagccggtggtctaggtgc

SEQ ID NO: 1602737 - DNA, 25 bp, Homo sapien
tccctcagccggtggtctaggtgct

SEQ ID NO: 1602738 - DNA, 25 bp, Homo sapien
ggcatgtgccactggtcattgtttt

SEQ ID NO: 1602739 - DNA, 25 bp, Homo sapien
gcaattgtggctcattatagtctca

SEQ ID NO: 1602740 - DNA, 25 bp, Homo sapien
agaaacaggttgtactgtcactcag

SEQ ID NO: 1602741 - DNA, 25 bp, Homo sapien
aacaggttgtactgtcactcaggct

SEQ ID NO: 1602742 - DNA, 25 bp, Homo sapien
gctagtgtgcaggaaggattggaga

SEQ ID NO: 1602743 - DNA, 25 bp, Homo sapien
aagatttaattgaatgagcacatga

SEQ ID NO: 1602744 - DNA, 25 bp, Homo sapien
ctagtgtgcaggaaggattggagag

SEQ ID NO: 1602745 - DNA, 25 bp, Homo sapien
agctagtgtgcaggaaggattggag

SEQ ID NO: 1602746 - DNA, 25 bp, Homo sapien
ctgtcctgtcctgttcttcaggtat

SEQ ID NO: 1602747 - DNA, 25 bp, Homo sapien
tcaggtatggcttctcccacttcca

SEQ ID NO: 1602748 - DNA, 25 bp, Homo sapien
tcctgtcctgttcttcaggtatggc

SEQ ID NO: 1602749 - DNA, 25 bp, Homo sapien
tcctgttcttcaggtatggcttctc

SEQ ID NO: 1602750 - DNA, 25 bp, Homo sapien
cactgcctggaccactttctcatct

SEQ ID NO: 1602751 - DNA, 25 bp, Homo sapien
tcgcgaatcactgcctggaccactt

SEQ ID NO: 1602752 - DNA, 25 bp, Homo sapien
gcgaatcactgcctggaccactttc

SEQ ID NO: 1602753 - DNA, 25 bp, Homo sapien
aatcactgcctggaccactttctca

SEQ ID NO: 1602754 - DNA, 25 bp, Homo sapien
agtctccttgcggagctgactgatg

SEQ ID NO: 1602755 - DNA, 25 bp, Homo sapien
gagcaggtccagcagctttagttcc

SEQ ID NO: 1602756 - DNA, 25 bp, Homo sapien
ccttgcggagctgactgatggtctc

SEQ ID NO: 1602757 - DNA, 25 bp, Homo sapien
tttagttccagtgccttagtctcct

SEQ ID NO: 1602758 - DNA, 25 bp, Homo sapien
tgcatgggtgcaacatcccagagga

SEQ ID NO: 1602759 - DNA, 25 bp, Homo sapien
gacacacagttactgggtgggtgca

SEQ ID NO: 1602760 - DNA, 25 bp, Homo sapien
tgggtgcatgggtgcaacatcccag

SEQ ID NO: 1602761 - DNA, 25 bp, Homo sapien
cagacacacagttactgggtgggtg

SEQ ID NO: 1602762 - DNA, 25 bp, Homo sapien
aaatcgttccactgcactcccacct

SEQ ID NO: 1602763 - DNA, 25 bp, Homo sapien
cgttccactgcactcccacctggca

SEQ ID NO: 1602764 - DNA, 25 bp, Homo sapien
cgaaatcgttccactgcactcccac

SEQ ID NO: 1602765 - DNA, 25 bp, Homo sapien
gccgaaatcgttccactgcactccc

SEQ ID NO: 1602766 - DNA, 25 bp, Homo sapien
gcacctctgtggaaggatcctccct

SEQ ID NO: 1602767 - DNA, 25 bp, Homo sapien
tctttttatgtaactcagccacctg

SEQ ID NO: 1602768 - DNA, 25 bp, Homo sapien
aggatcctcccttggaacggcctgg

SEQ ID NO: 1602769 - DNA, 25 bp, Homo sapien
ctttttatgtaactcagccacctga

SEQ ID NO: 1602770 - DNA, 25 bp, Homo sapien
tgaccctggaagagggcgtcgaagc

SEQ ID NO: 1602771 - DNA, 25 bp, Homo sapien
gagggcgtcgaagcctggtcctgag

SEQ ID NO: 1602772 - DNA, 25 bp, Homo sapien
cctgaggaggcagggcgttggcgga

SEQ ID NO: 1602773 - DNA, 25 bp, Homo sapien
ggcgttggcggaggccgccctgcac

SEQ ID NO: 1602774 - DNA, 25 bp, Homo sapien
tgtcagggatccgtcagctcggatt

SEQ ID NO: 1602775 - DNA, 25 bp, Homo sapien
gataactaggagtcagtcgcccctg

SEQ ID NO: 1602776 - DNA, 25 bp, Homo sapien
aaaaatgcactttccgaccgctagg

SEQ ID NO: 1602777 - DNA, 25 bp, Homo sapien
agctcggattcctagggctctgaaa

SEQ ID NO: 1602778 - DNA, 25 bp, Homo sapien
tgtgtctccgcaccgcagagagaag

SEQ ID NO: 1602779 - DNA, 25 bp, Homo sapien
gttgatatctagctccacctcctgg

SEQ ID NO: 1602780 - DNA, 25 bp, Homo sapien
cagacctggtggatcctaagtgccc

SEQ ID NO: 1602781 - DNA, 25 bp, Homo sapien
gaaggatgctgatgttgagagaacc

SEQ ID NO: 1602782 - DNA, 25 bp, Homo sapien
ccgaggctggaatgtggaatgcaat

SEQ ID NO: 1602783 - DNA, 25 bp, Homo sapien
gccgaggctggaatgtggaatgcaa

SEQ ID NO: 1602784 - DNA, 25 bp, Homo sapien
cacacccggccatctcctgcctttt

SEQ ID NO: 1602785 - DNA, 25 bp, Homo sapien
gttgccgaggctggaatgtggaatg

SEQ ID NO: 1602786 - DNA, 25 bp, Homo sapien
aattaggcataaccatgtctcggca

SEQ ID NO: 1602787 - DNA, 25 bp, Homo sapien
taaatagtctaaacgcaacgcgaag

SEQ ID NO: 1602788 - DNA, 25 bp, Homo sapien
ccaggcctgtgatcccggtaataaa

SEQ ID NO: 1602789 - DNA, 25 bp, Homo sapien
tgtaaaagtctgttaccgcggccag

SEQ ID NO: 1602790 - DNA, 25 bp, Homo sapien
tacaagaaagttaactggtgccagt

SEQ ID NO: 1602791 - DNA, 25 bp, Homo sapien
tacagggcaacgaggagaataaata

SEQ ID NO: 1602792 - DNA, 25 bp, Homo sapien
cacagacgtttaataacaacaccgg

SEQ ID NO: 1602793 - DNA, 25 bp, Homo sapien
tgttccttgcagcagaagctccaca

SEQ ID NO: 1602794 - DNA, 25 bp, Homo sapien
tctccctcagctgtgtgggccaagg

SEQ ID NO: 1602795 - DNA, 25 bp, Homo sapien
tagggcgatgcaatgtccagacaga

SEQ ID NO: 1602796 - DNA, 25 bp, Homo sapien
gataggtaggtgacaagtggacggg

SEQ ID NO: 1602797 - DNA, 25 bp, Homo sapien
tgcaatctggaaagacgaaaaaccc

SEQ ID NO: 1602798 - DNA, 25 bp, Homo sapien
cacgcctgtgttcgtgggcgccaag

SEQ ID NO: 1602799 - DNA, 25 bp, Homo sapien
ctcaatgcatgtgcgctgcgtgtgc

SEQ ID NO: 1602800 - DNA, 25 bp, Homo sapien
tgcacgcctgtgttcgtgggcgcca

SEQ ID NO: 1602801 - DNA, 25 bp, Homo sapien
gtggaacgaggtatcgtgtgtctca

SEQ ID NO: 1602802 - DNA, 25 bp, Homo sapien
atatgtctgcgtgttcctgggtggt

SEQ ID NO: 1602803 - DNA, 25 bp, Homo sapien
cgtgacctggtgtccaaatttgatg

SEQ ID NO: 1602804 - DNA, 25 bp, Homo sapien
caggtggatggattcgtgtgcccac

SEQ ID NO: 1602805 - DNA, 25 bp, Homo sapien
aaatatctatcgctacattcacgtg

SEQ ID NO: 1602806 - DNA, 25 bp, Homo sapien
tgtgtccacatggacgtagccccag

SEQ ID NO: 1602807 - DNA, 25 bp, Homo sapien
tggccaaccagtcccttaacgtgtc

SEQ ID NO: 1602808 - DNA, 25 bp, Homo sapien
ccacgtgtctgagtttggccaacca

SEQ ID NO: 1602809 - DNA, 25 bp, Homo sapien
aaaccaagacgagagagtgaacagc

SEQ ID NO: 1602810 - DNA, 25 bp, Homo sapien
aacagctgccacagcacgctctcgt

SEQ ID NO: 1602811 - DNA, 25 bp, Homo sapien
gctcgcccaggcgatagccgttcag

SEQ ID NO: 1602812 - DNA, 25 bp, Homo sapien
tcacgaagccgaaacccttgcactt

SEQ ID NO: 1602813 - DNA, 25 bp, Homo sapien
aaatcacggatgaccttgacgttgg

SEQ ID NO: 1602814 - DNA, 25 bp, Homo sapien
ggttgtacacgaagatgcaccagcc

SEQ ID NO: 1602815 - DNA, 25 bp, Homo sapien
tgacaggttgtacacgaagatgcac

SEQ ID NO: 1602816 - DNA, 25 bp, Homo sapien
tccggtgacaggttgtacacgaaga

SEQ ID NO: 1602817 - DNA, 25 bp, Homo sapien
caggttgtacacgaagatgcaccag

SEQ ID NO: 1602818 - DNA, 25 bp, Homo sapien
ctttgggggtcacgcgggctctgcc

SEQ ID NO: 1602819 - DNA, 25 bp, Homo sapien
ctgaccccccgcatgcttctgaccc

SEQ ID NO: 1602820 - DNA, 25 bp, Homo sapien
ccccgcatgcttctgaccccgttgt

SEQ ID NO: 1602821 - DNA, 25 bp, Homo sapien
gcatgcttctgaccccgttgtgacc

SEQ ID NO: 1602822 - DNA, 25 bp, Homo sapien
gttgtgacccttcacacctttatga

SEQ ID NO: 1602823 - DNA, 25 bp, Homo sapien
ctaagcctgcagccctgggggtgag

SEQ ID NO: 1602824 - DNA, 25 bp, Homo sapien
cgccgtaggccatgttgagcaaatt

SEQ ID NO: 1602825 - DNA, 25 bp, Homo sapien
gacgccgtaggccatgttgagcaaa

SEQ ID NO: 1602826 - DNA, 25 bp, Homo sapien
cttgacgccgtaggccatgttgagc

SEQ ID NO: 1602827 - DNA, 25 bp, Homo sapien
ctcttgacgccgtaggccatgttga

SEQ ID NO: 1602828 - DNA, 25 bp, Homo sapien
ccattcagtcctttgatagcctctt

SEQ ID NO: 1602829 - DNA, 25 bp, Homo sapien
ctgacttgggttgttcgcgaacttg

SEQ ID NO: 1602830 - DNA, 25 bp, Homo sapien
cgcgaacttgactgtgatgggctca

SEQ ID NO: 1602831 - DNA, 25 bp, Homo sapien
tagcgccgggcggatgactggtaga

SEQ ID NO: 1602832 - DNA, 25 bp, Homo sapien
cggatgaatcccacaccccgagaga

SEQ ID NO: 1602833 - DNA, 25 bp, Homo sapien
atgaatcccacaccccgagagacac

SEQ ID NO: 1602834 - DNA, 25 bp, Homo sapien
gcggatgaatcccacaccccgagag

SEQ ID NO: 1602835 - DNA, 25 bp, Homo sapien
ggatgaatcccacaccccgagagac

SEQ ID NO: 1602836 - DNA, 25 bp, Homo sapien
ggagcccgctgacgtacaggttagc

SEQ ID NO: 1602837 - DNA, 25 bp, Homo sapien
ttagcatcccggatggatgctgaac

SEQ ID NO: 1602838 - DNA, 25 bp, Homo sapien
tgatgcggccgtactgggagaagag

SEQ ID NO: 1602839 - DNA, 25 bp, Homo sapien
cctggtccaccaggatgcgggacgt

SEQ ID NO: 1602840 - DNA, 25 bp, Homo sapien
gtcatgtccataataatgattttta

SEQ ID NO: 1602841 - DNA, 25 bp, Homo sapien
taaaatcacagccaggccaggcacg

SEQ ID NO: 1602842 - DNA, 25 bp, Homo sapien
tgatttttaaaatcacagccaggcc

SEQ ID NO: 1602843 - DNA, 25 bp, Homo sapien
tcatgtccataataatgatttttaa

SEQ ID NO: 1602844 - DNA, 25 bp, Homo sapien
aatttgaggccgttgagggtgttga

SEQ ID NO: 1602845 - DNA, 25 bp, Homo sapien
tttgaggccgttgagggtgttgatg

SEQ ID NO: 1602846 - DNA, 25 bp, Homo sapien
ctgtaatttgaggccgttgagggtg

SEQ ID NO: 1602847 - DNA, 25 bp, Homo sapien
taatttgaggccgttgagggtgttg

SEQ ID NO: 1602848 - DNA, 25 bp, Homo sapien
ggtcagaatagttcacaaacccgta

SEQ ID NO: 1602849 - DNA, 25 bp, Homo sapien
catcattggggtcagaatagttcac

SEQ ID NO: 1602850 - DNA, 25 bp, Homo sapien
tcacaaacccgtagccaaggctctg

SEQ ID NO: 1602851 - DNA, 25 bp, Homo sapien
atagttcacaaacccgtagccaagg

SEQ ID NO: 1602852 - DNA, 25 bp, Homo sapien
tgtcgccaatgctgccgaagagact

SEQ ID NO: 1602853 - DNA, 25 bp, Homo sapien
ccgaagagactcttgaactcatcct

SEQ ID NO: 1602854 - DNA, 25 bp, Homo sapien
aaccaacttgcaggactcgatgtcg

SEQ ID NO: 1602855 - DNA, 25 bp, Homo sapien
ctgtgatcttgtcccgaaccaactt

SEQ ID NO: 1602856 - DNA, 25 bp, Homo sapien
ggtagttgacgatgaggttggtctt

SEQ ID NO: 1602857 - DNA, 25 bp, Homo sapien
gggcaggtagttgacgatgaggttg

SEQ ID NO: 1602858 - DNA, 25 bp, Homo sapien
aggtagttgacgatgaggttggtct

SEQ ID NO: 1602859 - DNA, 25 bp, Homo sapien
ttctggggcaggtagttgacgatga

SEQ ID NO: 1602860 - DNA, 25 bp, Homo sapien
tccatttgtaccaaggagtggcccg

SEQ ID NO: 1602861 - DNA, 25 bp, Homo sapien
tggctccatttgtaccaaggagtgg

SEQ ID NO: 1602862 - DNA, 25 bp, Homo sapien
cgtcagtggctccatttgtaccaag

SEQ ID NO: 1602863 - DNA, 25 bp, Homo sapien
catttgtaccaaggagtggcccgtt

SEQ ID NO: 1602864 - DNA, 25 bp, Homo sapien
catttgtgccagagcttagcgggac

SEQ ID NO: 1602865 - DNA, 25 bp, Homo sapien
cagtatctcgtttcctctgtggctg

SEQ ID NO: 1602866 - DNA, 25 bp, Homo sapien
gaggcctagcctgctaatctggcca

SEQ ID NO: 1602867 - DNA, 25 bp, Homo sapien
cagacccaggttcttgaggcctagc

SEQ ID NO: 1602868 - DNA, 25 bp, Homo sapien
tcttgtgtgcccggcgggcgcggtc

SEQ ID NO: 1602869 - DNA, 25 bp, Homo sapien
tgcccggcgggcgcggtccgtgttg

SEQ ID NO: 1602870 - DNA, 25 bp, Homo sapien
cggcgggcgcggtccgtgttgaggg

SEQ ID NO: 1602871 - DNA, 25 bp, Homo sapien
cttgtgtgcccggcgggcgcggtcc

SEQ ID NO: 1602872 - DNA, 25 bp, Homo sapien
aaggcggcggctccctcgagggcca

SEQ ID NO: 1602873 - DNA, 25 bp, Homo sapien
cgggcggcctctggtgcggccgctg

SEQ ID NO: 1602874 - DNA, 25 bp, Homo sapien
atgtggcgatgaaggcggcggctcc

SEQ ID NO: 1602875 - DNA, 25 bp, Homo sapien
ccgctgcagatgtggcgatgaaggc

SEQ ID NO: 1602876 - DNA, 25 bp, Homo sapien
ggaggttgcgcttcccgacagagat

SEQ ID NO: 1602877 - DNA, 25 bp, Homo sapien
ggtcccgtgtgttcaagtcctctcc

SEQ ID NO: 1602878 - DNA, 25 bp, Homo sapien
gagatcgcggcgctctgcctttcgc

SEQ ID NO: 1602879 - DNA, 25 bp, Homo sapien
gtcctgtccggtcccgtgtgttcaa

SEQ ID NO: 1602880 - DNA, 25 bp, Homo sapien
gcaccccttcttgggctggctttcg

SEQ ID NO: 1602881 - DNA, 25 bp, Homo sapien
tcgggccaggagacgggctcccctc

SEQ ID NO: 1602882 - DNA, 25 bp, Homo sapien
ctggcaccccttcttgggctggctt

SEQ ID NO: 1602883 - DNA, 25 bp, Homo sapien
ctggctttcgggccaggagacgggc

SEQ ID NO: 1602884 - DNA, 25 bp, Homo sapien
cagcggccggactcgctcatccttg

SEQ ID NO: 1602885 - DNA, 25 bp, Homo sapien
ggactcgctcatccttgccgattct

SEQ ID NO: 1602886 - DNA, 25 bp, Homo sapien
tccttgccgattcttctgtccccgg

SEQ ID NO: 1602887 - DNA, 25 bp, Homo sapien
cccccggtccgcagcaggaactgag

SEQ ID NO: 1602888 - DNA, 25 bp, Homo sapien
ccagctccgagaaggatgcggtggg

SEQ ID NO: 1602889 - DNA, 25 bp, Homo sapien
tgtccgagcggacgaataaataggg

SEQ ID NO: 1602890 - DNA, 25 bp, Homo sapien
ctcttgacacagttccagcaatgca

SEQ ID NO: 1602891 - DNA, 25 bp, Homo sapien
ccgggcgtggtgtccgagcggacga

SEQ ID NO: 1602892 - DNA, 25 bp, Homo sapien
cgtgtggaacttgacgctgtccagc

SEQ ID NO: 1602893 - DNA, 25 bp, Homo sapien
cttgtgatccgggtggcttttgagc

SEQ ID NO: 1602894 - DNA, 25 bp, Homo sapien
atgtgccagttgagcgacgcgcgct

SEQ ID NO: 1602895 - DNA, 25 bp, Homo sapien
cgatcgcacgtgaagttgtactgca

SEQ ID NO: 1602896 - DNA, 25 bp, Homo sapien
ccacccaatcctctagcggcacggg

SEQ ID NO: 1602897 - DNA, 25 bp, Homo sapien
ctacaaggccgagcgcaggtggaac

SEQ ID NO: 1602898 - DNA, 25 bp, Homo sapien
acactgcgttggggcgaagccgccc

SEQ ID NO: 1602899 - DNA, 25 bp, Homo sapien
aggtggaaccgggcccagacactgc

SEQ ID NO: 1602900 - DNA, 25 bp, Homo sapien
cgccggtgtgggtgcgccgatgtac

SEQ ID NO: 1602901 - DNA, 25 bp, Homo sapien
gtctcgccggtgtgggtgcgccgat

SEQ ID NO: 1602902 - DNA, 25 bp, Homo sapien
tcgccggtgtgggtgcgccgatgta

SEQ ID NO: 1602903 - DNA, 25 bp, Homo sapien
tgcaggggggtctcgccggtgtggg

SEQ ID NO: 1602904 - DNA, 25 bp, Homo sapien
ggtctcgcaggtgaattcacggaca

SEQ ID NO: 1602905 - DNA, 25 bp, Homo sapien
gtctcgcaggtgaattcacggacac

SEQ ID NO: 1602906 - DNA, 25 bp, Homo sapien
tggtctttcctttccgatgcacaag

SEQ ID NO: 1602907 - DNA, 25 bp, Homo sapien
gaatggatgatcatgtgccgccgca

SEQ ID NO: 1602908 - DNA, 25 bp, Homo sapien
tgccgccgcaggtggttggataaat

SEQ ID NO: 1602909 - DNA, 25 bp, Homo sapien
tccgatgcacaagattgacgtggtt

SEQ ID NO: 1602910 - DNA, 25 bp, Homo sapien
acatctcgagcaggccgtcagcatc

SEQ ID NO: 1602911 - DNA, 25 bp, Homo sapien
tatgggcagtggaacatctcgagca

SEQ ID NO: 1602912 - DNA, 25 bp, Homo sapien
ttggctgcagccctcgtatgggcag

SEQ ID NO: 1602913 - DNA, 25 bp, Homo sapien
tcgagcaggccgtcagcatccatca

SEQ ID NO: 1602914 - DNA, 25 bp, Homo sapien
gctgacatgtcgctgccgtccagct

SEQ ID NO: 1602915 - DNA, 25 bp, Homo sapien
tgcgctctcaggcaccgttgttgcc

SEQ ID NO: 1602916 - DNA, 25 bp, Homo sapien
ttgttgccagctccggggctactgg

SEQ ID NO: 1602917 - DNA, 25 bp, Homo sapien
gggatttcatagatgatggctgaca

SEQ ID NO: 1602918 - DNA, 25 bp, Homo sapien
ctacagggtggacacagggtggtgt

SEQ ID NO: 1602919 - DNA, 25 bp, Homo sapien
aggctggctaccctcgggctctgtc

SEQ ID NO: 1602920 - DNA, 25 bp, Homo sapien
atgcctgctactgcggtggcgtcca

SEQ ID NO: 1602921 - DNA, 25 bp, Homo sapien
ctttcttggtctcgatgcctgctac

SEQ ID NO: 1602922 - DNA, 25 bp, Homo sapien
gcgtccatggtgctaggctggctac

SEQ ID NO: 1602923 - DNA, 25 bp, Homo sapien
cctccatcatggcacagggcacctc

SEQ ID NO: 1602924 - DNA, 25 bp, Homo sapien
gcgtcgtaaccagggcccgcaatga

SEQ ID NO: 1602925 - DNA, 25 bp, Homo sapien
aatgatgatcacctgtgagccgggc

SEQ ID NO: 1602926 - DNA, 25 bp, Homo sapien
gccctcggccgtgagagcgtcgtaa

SEQ ID NO: 1602927 - DNA, 25 bp, Homo sapien
ggcatggggcagctggccaccacct

SEQ ID NO: 1602928 - DNA, 25 bp, Homo sapien
catggggcagctggccaccacctca

SEQ ID NO: 1602929 - DNA, 25 bp, Homo sapien
ctggcatggggcagctggccaccac

SEQ ID NO: 1602930 - DNA, 25 bp, Homo sapien
atggggcagctggccaccacctcac

SEQ ID NO: 1602931 - DNA, 25 bp, Homo sapien
tcggccaggctttccacgtggtgga

SEQ ID NO: 1602932 - DNA, 25 bp, Homo sapien
ggcttcaggcccattgcctgctggg

SEQ ID NO: 1602933 - DNA, 25 bp, Homo sapien
ctcctgagtgatgagcccgctgctg

SEQ ID NO: 1602934 - DNA, 25 bp, Homo sapien
aaagggaatgtgcacgccctcctga

SEQ ID NO: 1602935 - DNA, 25 bp, Homo sapien
caagaccgccggacttcagatgtca

SEQ ID NO: 1602936 - DNA, 25 bp, Homo sapien
ggattcaactcagcgacagccaaag

SEQ ID NO: 1602937 - DNA, 25 bp, Homo sapien
tctgacattatcttcccggagtggg

SEQ ID NO: 1602938 - DNA, 25 bp, Homo sapien
ggctaccctgtatgtctgaccaatg

SEQ ID NO: 1602939 - DNA, 25 bp, Homo sapien
ctgtttgtgatgctagcctagggct

SEQ ID NO: 1602940 - DNA, 25 bp, Homo sapien
gcaaggccacgaaggactcagcctg

SEQ ID NO: 1602941 - DNA, 25 bp, Homo sapien
tagcctagggctcgtaagaagcccc

SEQ ID NO: 1602942 - DNA, 25 bp, Homo sapien
agctctgtaaggacgcaaagagggc

SEQ ID NO: 1602943 - DNA, 25 bp, Homo sapien
gcagcggtgcttgtggtcctcgtac

SEQ ID NO: 1602944 - DNA, 25 bp, Homo sapien
cacggccgtggtgtacaggccaaaa

SEQ ID NO: 1602945 - DNA, 25 bp, Homo sapien
agtagcggtggccagcttcgcactg

SEQ ID NO: 1602946 - DNA, 25 bp, Homo sapien
gtgcggctcgtacgggcagcggtgc

SEQ ID NO: 1602947 - DNA, 25 bp, Homo sapien
aggcagttcacgttgcgtcgccgcc

SEQ ID NO: 1602948 - DNA, 25 bp, Homo sapien
tcaggcagttcacgttgcgtcgccg

SEQ ID NO: 1602949 - DNA, 25 bp, Homo sapien
ttcaggcagttcacgttgcgtcgcc

SEQ ID NO: 1602950 - DNA, 25 bp, Homo sapien
cttcaggcagttcacgttgcgtcgc

SEQ ID NO: 1602951 - DNA, 25 bp, Homo sapien
cctcaatgcgctcctcatcccttga

SEQ ID NO: 1602952 - DNA, 25 bp, Homo sapien
tgagggcaacagagtcgtcacccac

SEQ ID NO: 1602953 - DNA, 25 bp, Homo sapien
agtctccaatcatgagggcaacaga

SEQ ID NO: 1602954 - DNA, 25 bp, Homo sapien
agccctttccctcctcaatgcgctc

SEQ ID NO: 1602955 - DNA, 25 bp, Homo sapien
cgctttggctttttggggacctgct

SEQ ID NO: 1602956 - DNA, 25 bp, Homo sapien
tttggggacctgctcccaaggcttc

SEQ ID NO: 1602957 - DNA, 25 bp, Homo sapien
tggctttttggggacctgctcccaa

SEQ ID NO: 1602958 - DNA, 25 bp, Homo sapien
gctttggctttttggggacctgctc

SEQ ID NO: 1602959 - DNA, 25 bp, Homo sapien
gtcacattgcagtggggacagtctt

SEQ ID NO: 1602960 - DNA, 25 bp, Homo sapien
gctgggagtgtcacattgcagtggg

SEQ ID NO: 1602961 - DNA, 25 bp, Homo sapien
ctggaggctgggagtgtcacattgc

SEQ ID NO: 1602962 - DNA, 25 bp, Homo sapien
tgtcacattgcagtggggacagtct

SEQ ID NO: 1602963 - DNA, 25 bp, Homo sapien
ctgtgttttctgtctaaaagtatcc

SEQ ID NO: 1602964 - DNA, 25 bp, Homo sapien
gtgacggcttcactcggcccaacag

SEQ ID NO: 1602965 - DNA, 25 bp, Homo sapien
aggagagcaaccgccacactcaggc

SEQ ID NO: 1602966 - DNA, 25 bp, Homo sapien
aactccttacttcgtgatttgctca

SEQ ID NO: 1602967 - DNA, 25 bp, Homo sapien
acttagggaacccactacctgccag

SEQ ID NO: 1602968 - DNA, 25 bp, Homo sapien
gcggcactgcttgtgatacggaata

SEQ ID NO: 1602969 - DNA, 25 bp, Homo sapien
ccagaacttcaagaagggcagggct

SEQ ID NO: 1602970 - DNA, 25 bp, Homo sapien
catcaacatataaggcaggaaggga

SEQ ID NO: 1602971 - DNA, 25 bp, Homo sapien
gaggtaggcggcgagcttggcgtcg

SEQ ID NO: 1602972 - DNA, 25 bp, Homo sapien
agagagatgaggtaggcggcgagct

SEQ ID NO: 1602973 - DNA, 25 bp, Homo sapien
agagatgaggtaggcggcgagcttg

SEQ ID NO: 1602974 - DNA, 25 bp, Homo sapien
ggtaggcggcgagcttggcgtcgct

SEQ ID NO: 1602975 - DNA, 25 bp, Homo sapien
gccgcacgtcgtacttcttccggga

SEQ ID NO: 1602976 - DNA, 25 bp, Homo sapien
tccgactccgtgagtcgcggccggc

SEQ ID NO: 1602977 - DNA, 25 bp, Homo sapien
aggtacacgcgccgcacgtcgtact

SEQ ID NO: 1602978 - DNA, 25 bp, Homo sapien
acttcttccgggactcgagccgtcg

SEQ ID NO: 1602979 - DNA, 25 bp, Homo sapien
gcctcgggctctagcgcccgctccg

SEQ ID NO: 1602980 - DNA, 25 bp, Homo sapien
tccgcctcgggctctagcgcccgct

SEQ ID NO: 1602981 - DNA, 25 bp, Homo sapien
ccgcctcgggctctagcgcccgctc

SEQ ID NO: 1602982 - DNA, 25 bp, Homo sapien
ctccgcctcgggctctagcgcccgc

SEQ ID NO: 1602983 - DNA, 25 bp, Homo sapien
gcgcatcttcggcgccgccgagaaa

SEQ ID NO: 1602984 - DNA, 25 bp, Homo sapien
agccagaccggaagtggcgcgcatc

SEQ ID NO: 1602985 - DNA, 25 bp, Homo sapien
tcttcggcgccgccgagaaatttct

SEQ ID NO: 1602986 - DNA, 25 bp, Homo sapien
gttgttaggagccagaccggaagtg

SEQ ID NO: 1602987 - DNA, 25 bp, Homo sapien
ccagggcgccaaaaggagaccaaga

SEQ ID NO: 1602988 - DNA, 25 bp, Homo sapien
gggcgccaaaaggagaccaagaatg

SEQ ID NO: 1602989 - DNA, 25 bp, Homo sapien
cgccaaaaggagaccaagaatggaa

SEQ ID NO: 1602990 - DNA, 25 bp, Homo sapien
gccccagggcgccaaaaggagacca

SEQ ID NO: 1602991 - DNA, 25 bp, Homo sapien
gggatgccatactgctagagatgag

SEQ ID NO: 1602992 - DNA, 25 bp, Homo sapien
cagaggcgcctgcagattctggagg

SEQ ID NO: 1602993 - DNA, 25 bp, Homo sapien
ttgaattcggagaaccagaggcgcc

SEQ ID NO: 1602994 - DNA, 25 bp, Homo sapien
atcgctggcagcccgagatcctggg

SEQ ID NO: 1602995 - DNA, 25 bp, Homo sapien
aggatgtctggagctcccgggtgga

SEQ ID NO: 1602996 - DNA, 25 bp, Homo sapien
tgctgctgtcgctgcaggttgtcgt

SEQ ID NO: 1602997 - DNA, 25 bp, Homo sapien
cgctgcaggttgtcgtcttcttcct

SEQ ID NO: 1602998 - DNA, 25 bp, Homo sapien
tgcagaggatgtctggagctcccgg

SEQ ID NO: 1602999 - DNA, 25 bp, Homo sapien
tggtcatgagcacccgccatgcaca

SEQ ID NO: 1603000 - DNA, 25 bp, Homo sapien
catgcacatggcgaagacagggcct

SEQ ID NO: 1603001 - DNA, 25 bp, Homo sapien
aggccctggatccacttagccatcg

SEQ ID NO: 1603002 - DNA, 25 bp, Homo sapien
agccatcgtcgcctggtcatgagca

SEQ ID NO: 1603003 - DNA, 25 bp, Homo sapien
cccacctcagcctgtaggagggctg

SEQ ID NO: 1603004 - DNA, 25 bp, Homo sapien
gggattacgagcacacatgtgagcc

SEQ ID NO: 1603005 - DNA, 25 bp, Homo sapien
cagtggctctataatagttcactgc

SEQ ID NO: 1603006 - DNA, 25 bp, Homo sapien
tggctctataatagttcactgcaac

SEQ ID NO: 1603007 - DNA, 25 bp, Homo sapien
tcattgatgtcaaactcgtagttgt

SEQ ID NO: 1603008 - DNA, 25 bp, Homo sapien
aaactcgtagttgtcccagccactc

SEQ ID NO: 1603009 - DNA, 25 bp, Homo sapien
aggtccagctgcatcgggtagtaga

SEQ ID NO: 1603010 - DNA, 25 bp, Homo sapien
tagtagaggttccactcctccggcg

SEQ ID NO: 1603011 - DNA, 25 bp, Homo sapien
aggccagggctctctcggtctccct

SEQ ID NO: 1603012 - DNA, 25 bp, Homo sapien
cagccccaacacatgctttgcttta

SEQ ID NO: 1603013 - DNA, 25 bp, Homo sapien
tctcccatgcaccctcagggtagtg

SEQ ID NO: 1603014 - DNA, 25 bp, Homo sapien
cacatgctttgctttaagccctcac

SEQ ID NO: 1603015 - DNA, 25 bp, Homo sapien
tctcctccgggggcagcaagtcagc

SEQ ID NO: 1603016 - DNA, 25 bp, Homo sapien
ctctcctccgggggcagcaagtcag

SEQ ID NO: 1603017 - DNA, 25 bp, Homo sapien
ctcctccgggggcagcaagtcagct

SEQ ID NO: 1603018 - DNA, 25 bp, Homo sapien
cctctcctccgggggcagcaagtca

SEQ ID NO: 1603019 - DNA, 25 bp, Homo sapien
ccctcaacaaagacaggccgggctg

SEQ ID NO: 1603020 - DNA, 25 bp, Homo sapien
gagaaggggccctcaacaaagacag

SEQ ID NO: 1603021 - DNA, 25 bp, Homo sapien
caggccgggctggattgtggcgggc

SEQ ID NO: 1603022 - DNA, 25 bp, Homo sapien
gcctgctgatcgggactctggattc

SEQ ID NO: 1603023 - DNA, 25 bp, Homo sapien
tgtggagacatacatgccctgtgcc

SEQ ID NO: 1603024 - DNA, 25 bp, Homo sapien
gtgtggagacatacatgccctgtgc

SEQ ID NO: 1603025 - DNA, 25 bp, Homo sapien
ggtgtggagacatacatgccctgtg

SEQ ID NO: 1603026 - DNA, 25 bp, Homo sapien
ctaggcccagcgagaacctggcagg

SEQ ID NO: 1603027 - DNA, 25 bp, Homo sapien
gtaaggttagagacttggctgcccc

SEQ ID NO: 1603028 - DNA, 25 bp, Homo sapien
gggtaaggttagagacttggctgcc

SEQ ID NO: 1603029 - DNA, 25 bp, Homo sapien
gcctgggtaaggttagagacttggc

SEQ ID NO: 1603030 - DNA, 25 bp, Homo sapien
ctgttgagtctttgggcaaaggaac

SEQ ID NO: 1603031 - DNA, 25 bp, Homo sapien
gcacctgttgagtctttgggcaaag

SEQ ID NO: 1603032 - DNA, 25 bp, Homo sapien
ctgcacctgttgagtctttgggcaa

SEQ ID NO: 1603033 - DNA, 25 bp, Homo sapien
gggatctgctgcacctgttgagtct

SEQ ID NO: 1603034 - DNA, 25 bp, Homo sapien
catccatgctggagaatggtggcat

SEQ ID NO: 1603035 - DNA, 25 bp, Homo sapien
tcatccatgctggagaatggtggca

SEQ ID NO: 1603036 - DNA, 25 bp, Homo sapien
tgtcatccatgctggagaatggtgg

SEQ ID NO: 1603037 - DNA, 25 bp, Homo sapien
tctgtcatccatgctggagaatggt

SEQ ID NO: 1603038 - DNA, 25 bp, Homo sapien
aacaaaacagtggacagctattaga

SEQ ID NO: 1603039 - DNA, 25 bp, Homo sapien
caaaacagtggacagctattagaac

SEQ ID NO: 1603040 - DNA, 25 bp, Homo sapien
aacagtggacagctattagaacata

SEQ ID NO: 1603041 - DNA, 25 bp, Homo sapien
cagtggacagctattagaacatata

SEQ ID NO: 1603042 - DNA, 25 bp, Homo sapien
tgacttctagttgtattaaatgaaa

SEQ ID NO: 1603043 - DNA, 25 bp, Homo sapien
ggatcagtgacttctagttgtatta

SEQ ID NO: 1603044 - DNA, 25 bp, Homo sapien
aaaaatttgagatggatcagtgact

SEQ ID NO: 1603045 - DNA, 25 bp, Homo sapien
aaaatttgagatggatcagtgactt

SEQ ID NO: 1603046 - DNA, 25 bp, Homo sapien
ggagacgggcggcgtcaggggcagc

SEQ ID NO: 1603047 - DNA, 25 bp, Homo sapien
gagacgggcggcgtcaggggcagcg

SEQ ID NO: 1603048 - DNA, 25 bp, Homo sapien
agggagacgggcggcgtcaggggca

SEQ ID NO: 1603049 - DNA, 25 bp, Homo sapien
agacgggcggcgtcaggggcagcgc

SEQ ID NO: 1603050 - DNA, 25 bp, Homo sapien
tctcagaaccactggctcttaagga

SEQ ID NO: 1603051 - DNA, 25 bp, Homo sapien
acagcaccccgggcttctccatctc

SEQ ID NO: 1603052 - DNA, 25 bp, Homo sapien
atagtggtgtgtgactggagtccca

SEQ ID NO: 1603053 - DNA, 25 bp, Homo sapien
aggcatagtggtgtgtgactggagt

SEQ ID NO: 1603054 - DNA, 25 bp, Homo sapien
tcaattcacggccaggcacagtgcc

SEQ ID NO: 1603055 - DNA, 25 bp, Homo sapien
gcatagtggtgtgtgactggagtcc

SEQ ID NO: 1603056 - DNA, 25 bp, Homo sapien
tagatggtgaccctggcactaaggt

SEQ ID NO: 1603057 - DNA, 25 bp, Homo sapien
ttcatgaatcgagggaaccacagct

SEQ ID NO: 1603058 - DNA, 25 bp, Homo sapien
ttcaggcgcaccaacttgagcatgg

SEQ ID NO: 1603059 - DNA, 25 bp, Homo sapien
aggaactccgtctccttgttgggca

SEQ ID NO: 1603060 - DNA, 25 bp, Homo sapien
gatgaagtcaatgtggccccgctta

SEQ ID NO: 1603061 - DNA, 25 bp, Homo sapien
cagggactgttcagagctatgggca

SEQ ID NO: 1603062 - DNA, 25 bp, Homo sapien
gcaaatttctgcaccgtctgcagga

SEQ ID NO: 1603063 - DNA, 25 bp, Homo sapien
gttgcgaggccggaagacctccttg

SEQ ID NO: 1603064 - DNA, 25 bp, Homo sapien
ggaatgtagtggtgctactgtggct

SEQ ID NO: 1603065 - DNA, 25 bp, Homo sapien
cagagacgggagtcgcactattttg

SEQ ID NO: 1603066 - DNA, 25 bp, Homo sapien
gtagtggtgctactgtggcttactg

SEQ ID NO: 1603067 - DNA, 25 bp, Homo sapien
gacgggagtcgcactattttgccca

SEQ ID NO: 1603068 - DNA, 25 bp, Homo sapien
gcgtagccaccttaagtcttgagat

SEQ ID NO: 1603069 - DNA, 25 bp, Homo sapien
gccaccttaagtcttgagattacag

SEQ ID NO: 1603070 - DNA, 25 bp, Homo sapien
caccttaagtcttgagattacaggc

SEQ ID NO: 1603071 - DNA, 25 bp, Homo sapien
cccggcgtagccaccttaagtcttg

SEQ ID NO: 1603072 - DNA, 25 bp, Homo sapien
gtgcaggacactccatcagcatagt

SEQ ID NO: 1603073 - DNA, 25 bp, Homo sapien
aaaacttagtgcaggacactccatc

SEQ ID NO: 1603074 - DNA, 25 bp, Homo sapien
ttagtgcaggacactccatcagcat

SEQ ID NO: 1603075 - DNA, 25 bp, Homo sapien
aacttagtgcaggacactccatcag

SEQ ID NO: 1603076 - DNA, 25 bp, Homo sapien
ctcgggccagtagggtggcctggac

SEQ ID NO: 1603077 - DNA, 25 bp, Homo sapien
aggcctcgggccagtagggtggcct

SEQ ID NO: 1603078 - DNA, 25 bp, Homo sapien
caggccctacagaggcctcgggcca

SEQ ID NO: 1603079 - DNA, 25 bp, Homo sapien
aggccctacagaggcctcgggccag

SEQ ID NO: 1603080 - DNA, 25 bp, Homo sapien
caggctccttttgccggtggcggca

SEQ ID NO: 1603081 - DNA, 25 bp, Homo sapien
gcacactacaagagtacaaggtggt

SEQ ID NO: 1603082 - DNA, 25 bp, Homo sapien
taccacatgcgaatctttgcacctg

SEQ ID NO: 1603083 - DNA, 25 bp, Homo sapien
aaggtggtgggttgctgcctgctca

SEQ ID NO: 1603084 - DNA, 25 bp, Homo sapien
cctagcacgtggaatctgtgaagct

SEQ ID NO: 1603085 - DNA, 25 bp, Homo sapien
aggggaatgggtagcgctctgtaaa

SEQ ID NO: 1603086 - DNA, 25 bp, Homo sapien
ctagcacgtggaatctgtgaagctg

SEQ ID NO: 1603087 - DNA, 25 bp, Homo sapien
ggggaatgggtagcgctctgtaaaa

SEQ ID NO: 1603088 - DNA, 25 bp, Homo sapien
ggtccaggccagctgatcacctgag

SEQ ID NO: 1603089 - DNA, 25 bp, Homo sapien
ggaggtccaggccagctgatcacct

SEQ ID NO: 1603090 - DNA, 25 bp, Homo sapien
agcacgttgggaggtccaggccagc

SEQ ID NO: 1603091 - DNA, 25 bp, Homo sapien
cagcacgttgggaggtccaggccag

SEQ ID NO: 1603092 - DNA, 25 bp, Homo sapien
ctttaaggtcagtagttagaggttg

SEQ ID NO: 1603093 - DNA, 25 bp, Homo sapien
taaggtcagtagttagaggttgcag

SEQ ID NO: 1603094 - DNA, 25 bp, Homo sapien
atcctttaaggtcagtagttagagg

SEQ ID NO: 1603095 - DNA, 25 bp, Homo sapien
tgctttggaagtccaagtggggagg

SEQ ID NO: 1603096 - DNA, 25 bp, Homo sapien
tgaaccccgaggtatggtgtacgta

SEQ ID NO: 1603097 - DNA, 25 bp, Homo sapien
tgcctaacgagtaacaactgaacgg

SEQ ID NO: 1603098 - DNA, 25 bp, Homo sapien
cctggtatatgacagatgcctaacg

SEQ ID NO: 1603099 - DNA, 25 bp, Homo sapien
gaaattcccgacaccattaacgcat

SEQ ID NO: 1603100 - DNA, 25 bp, Homo sapien
gaaaaaggcagacgcggattccaaa

SEQ ID NO: 1603101 - DNA, 25 bp, Homo sapien
ttgaaaccggctgccaggattctgg

SEQ ID NO: 1603102 - DNA, 25 bp, Homo sapien
aaatcctgcccggttgccgacttgc

SEQ ID NO: 1603103 - DNA, 25 bp, Homo sapien
ccactacgaaaggtcatggcgccct

SEQ ID NO: 1603104 - DNA, 25 bp, Homo sapien
attggcccagagagcgtccgggtca

SEQ ID NO: 1603105 - DNA, 25 bp, Homo sapien
gttgctgggcgctgccatattggcc

SEQ ID NO: 1603106 - DNA, 25 bp, Homo sapien
gccatattggcccagagagcgtccg

SEQ ID NO: 1603107 - DNA, 25 bp, Homo sapien
tgttgctgggcgctgccatattggc

SEQ ID NO: 1603108 - DNA, 25 bp, Homo sapien
ccccaaccatgaagaattatccagc

SEQ ID NO: 1603109 - DNA, 25 bp, Homo sapien
taggactaagagagtgctactggca

SEQ ID NO: 1603110 - DNA, 25 bp, Homo sapien
tgtgacgctgaaaaagtgattccaa

SEQ ID NO: 1603111 - DNA, 25 bp, Homo sapien
tcttacaatgaatgcccaaggcagc

SEQ ID NO: 1603112 - DNA, 25 bp, Homo sapien
ctaaggctatagactgttggtatct

SEQ ID NO: 1603113 - DNA, 25 bp, Homo sapien
ggtgctcactaaactaccttgggtg

SEQ ID NO: 1603114 - DNA, 25 bp, Homo sapien
tgttggtatctggagataaacccgg

SEQ ID NO: 1603115 - DNA, 25 bp, Homo sapien
taaacccgggatggtgctcactaaa

SEQ ID NO: 1603116 - DNA, 25 bp, Homo sapien
caacccgggactctaaaaggctgtg

SEQ ID NO: 1603117 - DNA, 25 bp, Homo sapien
ggcaatggccctttactgactggca

SEQ ID NO: 1603118 - DNA, 25 bp, Homo sapien
gcagggtgaaccctttagccccaga

SEQ ID NO: 1603119 - DNA, 25 bp, Homo sapien
cagggcaccatagggcacggttaat

SEQ ID NO: 1603120 - DNA, 25 bp, Homo sapien
agcgcggcacggagctgtcttctcc

SEQ ID NO: 1603121 - DNA, 25 bp, Homo sapien
aggagcgcggcacggagctgtcttc

SEQ ID NO: 1603122 - DNA, 25 bp, Homo sapien
ggagcgcggcacggagctgtcttct

SEQ ID NO: 1603123 - DNA, 25 bp, Homo sapien
gagcgcggcacggagctgtcttctc

SEQ ID NO: 1603124 - DNA, 25 bp, Homo sapien
cttactgactgaataaaacgctggg

SEQ ID NO: 1603125 - DNA, 25 bp, Homo sapien
tattgtgactgctgtaaacacctgg

SEQ ID NO: 1603126 - DNA, 25 bp, Homo sapien
tagcagaccttacctgggatcttgg

SEQ ID NO: 1603127 - DNA, 25 bp, Homo sapien
tagaggtggccctacggtgtcactg

SEQ ID NO: 1603128 - DNA, 25 bp, Homo sapien
tctctggaccagaaccgaacagctg

SEQ ID NO: 1603129 - DNA, 25 bp, Homo sapien
tgattgacagctgtccccatcccag

SEQ ID NO: 1603130 - DNA, 25 bp, Homo sapien
gtgagatcagttcaggcccctcagg

SEQ ID NO: 1603131 - DNA, 25 bp, Homo sapien
gcaactgaacatgaaacgggcttcc

SEQ ID NO: 1603132 - DNA, 25 bp, Homo sapien
caatcactgtacacatccacgggtt

SEQ ID NO: 1603133 - DNA, 25 bp, Homo sapien
tcgcaggcgtctatccaatcactgt

SEQ ID NO: 1603134 - DNA, 25 bp, Homo sapien
tgattggccgcctcgcaggcgtcta

SEQ ID NO: 1603135 - DNA, 25 bp, Homo sapien
tatccaatcactgtacacatccacg

SEQ ID NO: 1603136 - DNA, 25 bp, Homo sapien
gcacctgttcctctggacggctttg

SEQ ID NO: 1603137 - DNA, 25 bp, Homo sapien
agatgagcagggtccggactccagc

SEQ ID NO: 1603138 - DNA, 25 bp, Homo sapien
acggctttggccctgcaccagggca

SEQ ID NO: 1603139 - DNA, 25 bp, Homo sapien
taggtcaagggcgatcattggcatt

SEQ ID NO: 1603140 - DNA, 25 bp, Homo sapien
ggcacacggtacaagagatgactcc

SEQ ID NO: 1603141 - DNA, 25 bp, Homo sapien
cacggtacaagagatgactccggtg

SEQ ID NO: 1603142 - DNA, 25 bp, Homo sapien
tacaagagatgactccggtgttgcg

SEQ ID NO: 1603143 - DNA, 25 bp, Homo sapien
gactccggtgttgcgggcacggtcc

SEQ ID NO: 1603144 - DNA, 25 bp, Homo sapien
tttcacatcacaggatttctcgtgg

SEQ ID NO: 1603145 - DNA, 25 bp, Homo sapien
ttcgttttgactttctgcgccccat

SEQ ID NO: 1603146 - DNA, 25 bp, Homo sapien
ctgggtctcgagggtgcctgtcatc

SEQ ID NO: 1603147 - DNA, 25 bp, Homo sapien
caggatttctcgtggttgcagaagg

SEQ ID NO: 1603148 - DNA, 25 bp, Homo sapien
gtgagacgaggctctaaccccatct

SEQ ID NO: 1603149 - DNA, 25 bp, Homo sapien
cgaggccctcagtcctgatgcagga

SEQ ID NO: 1603150 - DNA, 25 bp, Homo sapien
gctcaatgctctagaaagcaggccg

SEQ ID NO: 1603151 - DNA, 25 bp, Homo sapien
tggtttgaggaaaccacgcagcgcc

SEQ ID NO: 1603152 - DNA, 25 bp, Homo sapien
gttatttaagctctttgtgccacag

SEQ ID NO: 1603153 - DNA, 25 bp, Homo sapien
gggcaggttatttaagctctttgtg

SEQ ID NO: 1603154 - DNA, 25 bp, Homo sapien
caggttatttaagctctttgtgcca

SEQ ID NO: 1603155 - DNA, 25 bp, Homo sapien
ggttatttaagctctttgtgccaca

SEQ ID NO: 1603156 - DNA, 25 bp, Homo sapien
cagtgatgatccagagttatgatcc

SEQ ID NO: 1603157 - DNA, 25 bp, Homo sapien
aggtttcagtgatgatccagagtta

SEQ ID NO: 1603158 - DNA, 25 bp, Homo sapien
ccagagttatgatccaggcactgca

SEQ ID NO: 1603159 - DNA, 25 bp, Homo sapien
gatccagagttatgatccaggcact

SEQ ID NO: 1603160 - DNA, 25 bp, Homo sapien
cctgggcaacagagcaagactccgt

SEQ ID NO: 1603161 - DNA, 25 bp, Homo sapien
ctgaacccaagaggcggagactgca

SEQ ID NO: 1603162 - DNA, 25 bp, Homo sapien
tccagcctgggcaacagagcaagac

SEQ ID NO: 1603163 - DNA, 25 bp, Homo sapien
gtgagccgagatcgcaccattgcac

SEQ ID NO: 1603164 - DNA, 25 bp, Homo sapien
agggtggcacaagagactccaagac

SEQ ID NO: 1603165 - DNA, 25 bp, Homo sapien
gagactccaagacaagccagctgtt

SEQ ID NO: 1603166 - DNA, 25 bp, Homo sapien
tcatcgctggcgccaatacaaggaa

SEQ ID NO: 1603167 - DNA, 25 bp, Homo sapien
tggcacaagagactccaagacaagc

SEQ ID NO: 1603168 - DNA, 25 bp, Homo sapien
gatggcctcgatccagatgacagac

SEQ ID NO: 1603169 - DNA, 25 bp, Homo sapien
ggagtgacactcaggttatctgatg

SEQ ID NO: 1603170 - DNA, 25 bp, Homo sapien
tgacactcaggttatctgatggcct

SEQ ID NO: 1603171 - DNA, 25 bp, Homo sapien
gcctcgatccagatgacagactgca

SEQ ID NO: 1603172 - DNA, 25 bp, Homo sapien
cggtagtcgcgcttggaaggatggg

SEQ ID NO: 1603173 - DNA, 25 bp, Homo sapien
agccaggcgtcccggtagtcgcgct

SEQ ID NO: 1603174 - DNA, 25 bp, Homo sapien
gagtcagtctccccgaccggctttc

SEQ ID NO: 1603175 - DNA, 25 bp, Homo sapien
taaagcttcggcatcgcctcccgac

SEQ ID NO: 1603176 - DNA, 25 bp, Homo sapien
cccgggagatagtgacttccgactc

SEQ ID NO: 1603177 - DNA, 25 bp, Homo sapien
atcccggacagcccagcaaataggc

SEQ ID NO: 1603178 - DNA, 25 bp, Homo sapien
gacttccgactcctgccggaagcgg

SEQ ID NO: 1603179 - DNA, 25 bp, Homo sapien
agctgcgaaagctccgttcacccgg

SEQ ID NO: 1603180 - DNA, 25 bp, Homo sapien
tgtggcaccacagttcatcagctgt

SEQ ID NO: 1603181 - DNA, 25 bp, Homo sapien
tgagccagccacagagcataacact

SEQ ID NO: 1603182 - DNA, 25 bp, Homo sapien
tttcacatacgtgggcatctgtgcc

SEQ ID NO: 1603183 - DNA, 25 bp, Homo sapien
gcataacactgtggctgggacacat

SEQ ID NO: 1603184 - DNA, 25 bp, Homo sapien
tcccatagtggaagcgcagatagcc

SEQ ID NO: 1603185 - DNA, 25 bp, Homo sapien
ccgaggcctcgatgtaagtgacagt

SEQ ID NO: 1603186 - DNA, 25 bp, Homo sapien
tcttaaagagggacttgcccgaggc

SEQ ID NO: 1603187 - DNA, 25 bp, Homo sapien
tgatctccacataggcaaagccacc

SEQ ID NO: 1603188 - DNA, 25 bp, Homo sapien
attgtgatcgtggccgcacaggtag

SEQ ID NO: 1603189 - DNA, 25 bp, Homo sapien
gattgtgatcgtggccgcacaggta

SEQ ID NO: 1603190 - DNA, 25 bp, Homo sapien
cagtggccgtagctgcttgaccagg

SEQ ID NO: 1603191 - DNA, 25 bp, Homo sapien
cactgtgtccagcataaaaatggcc

SEQ ID NO: 1603192 - DNA, 25 bp, Homo sapien
cgtgctcggctatggaccacacggg

SEQ ID NO: 1603193 - DNA, 25 bp, Homo sapien
gatcttgaagtgcaggcggtagaaa

SEQ ID NO: 1603194 - DNA, 25 bp, Homo sapien
taccagggcactttgcgaagggagc

SEQ ID NO: 1603195 - DNA, 25 bp, Homo sapien
tagagtatgcaatctgggcagagac

SEQ ID NO: 1603196 - DNA, 25 bp, Homo sapien
ggagcggtcagagaatacgtcctca

SEQ ID NO: 1603197 - DNA, 25 bp, Homo sapien
caaggtggtcatggtttccggctag

SEQ ID NO: 1603198 - DNA, 25 bp, Homo sapien
ggctatgccgatcctcccaccaagt

SEQ ID NO: 1603199 - DNA, 25 bp, Homo sapien
tggctatgccgatcctcccaccaag

SEQ ID NO: 1603200 - DNA, 25 bp, Homo sapien
gtggctatgccgatcctcccaccaa

SEQ ID NO: 1603201 - DNA, 25 bp, Homo sapien
gctatgccgatcctcccaccaagtc

SEQ ID NO: 1603202 - DNA, 25 bp, Homo sapien
tgcacaccagtgaagtaaaaattgt

SEQ ID NO: 1603203 - DNA, 25 bp, Homo sapien
agtcacccacggctacaaagcgcag

SEQ ID NO: 1603204 - DNA, 25 bp, Homo sapien
aattgtcccctagagacaggatgaa

SEQ ID NO: 1603205 - DNA, 25 bp, Homo sapien
tggcattggccatttcccgggccgt

SEQ ID NO: 1603206 - DNA, 25 bp, Homo sapien
tagagtagaactgccggtccctgag

SEQ ID NO: 1603207 - DNA, 25 bp, Homo sapien
cagtcaccggaggctctgagaggct

SEQ ID NO: 1603208 - DNA, 25 bp, Homo sapien
tctagagtagaactgccggtccctg

SEQ ID NO: 1603209 - DNA, 25 bp, Homo sapien
ccagtcaccggaggctctgagaggc

SEQ ID NO: 1603210 - DNA, 25 bp, Homo sapien
gcttgacacgtccaggtatctctgt

SEQ ID NO: 1603211 - DNA, 25 bp, Homo sapien
gatgcagtttctccgagggctgtcc

SEQ ID NO: 1603212 - DNA, 25 bp, Homo sapien
tctgggcacacgtgtgcagcagcct

SEQ ID NO: 1603213 - DNA, 25 bp, Homo sapien
ttcctgcgtgcagctgagcatgcct

SEQ ID NO: 1603214 - DNA, 25 bp, Homo sapien
tcggctctgtacctgatggtgttgc

SEQ ID NO: 1603215 - DNA, 25 bp, Homo sapien
gcagacatgtatgctgagcctgcga

SEQ ID NO: 1603216 - DNA, 25 bp, Homo sapien
ctgtgtggcttgtctgcgatgcacg

SEQ ID NO: 1603217 - DNA, 25 bp, Homo sapien
tgcgatgcacgcctgtgttctcacg

SEQ ID NO: 1603218 - DNA, 25 bp, Homo sapien
atggatggagttttgtgtgtgtcca

SEQ ID NO: 1603219 - DNA, 25 bp, Homo sapien
tatggatggagttttgtgtgtgtcc

SEQ ID NO: 1603220 - DNA, 25 bp, Homo sapien
tggatggagttttgtgtgtgtccat

SEQ ID NO: 1603221 - DNA, 25 bp, Homo sapien
ctatggatggagttttgtgtgtgtc

SEQ ID NO: 1603222 - DNA, 25 bp, Homo sapien
gacacgtcccgcggacattcaggag

SEQ ID NO: 1603223 - DNA, 25 bp, Homo sapien
acgtcccgcggacattcaggagtcc

SEQ ID NO: 1603224 - DNA, 25 bp, Homo sapien
cgccgcgacacgtcccgcggacatt

SEQ ID NO: 1603225 - DNA, 25 bp, Homo sapien
gcgacacgtcccgcggacattcagg

SEQ ID NO: 1603226 - DNA, 25 bp, Homo sapien
gagagctctcattcaacgctgaggc

SEQ ID NO: 1603227 - DNA, 25 bp, Homo sapien
gtcaccctgcgaagtgcttggtccc

SEQ ID NO: 1603228 - DNA, 25 bp, Homo sapien
tgcgagcgcggacccgggagagagc

SEQ ID NO: 1603229 - DNA, 25 bp, Homo sapien
tctcattcaacgctgaggccactgg

SEQ ID NO: 1603230 - DNA, 25 bp, Homo sapien
cgatccgccctgctcgagggctcag

SEQ ID NO: 1603231 - DNA, 25 bp, Homo sapien
tttaagcaggcagcggccgatccgc

SEQ ID NO: 1603232 - DNA, 25 bp, Homo sapien
ccagctgcagatccgcaggcgatcg

SEQ ID NO: 1603233 - DNA, 25 bp, Homo sapien
cactcctggcggccccagctttaag

SEQ ID NO: 1603234 - DNA, 25 bp, Homo sapien
agggtctggtatcagcctgctccca

SEQ ID NO: 1603235 - DNA, 25 bp, Homo sapien
cagccagatctgttgaagggtctgg

SEQ ID NO: 1603236 - DNA, 25 bp, Homo sapien
tctgttgaagggtctggtatcagcc

SEQ ID NO: 1603237 - DNA, 25 bp, Homo sapien
ggctgtttgggctgacacaggatgc

SEQ ID NO: 1603238 - DNA, 25 bp, Homo sapien
gaacagataatacttagagtttcct

SEQ ID NO: 1603239 - DNA, 25 bp, Homo sapien
tatgccatctgtctatttcacatag

SEQ ID NO: 1603240 - DNA, 25 bp, Homo sapien
cacatagctgtgaatcttccatgaa

SEQ ID NO: 1603241 - DNA, 25 bp, Homo sapien
tccacaggtgattgttttcccctac

SEQ ID NO: 1603242 - DNA, 25 bp, Homo sapien
tgagccaatatgttactaactaaag

SEQ ID NO: 1603243 - DNA, 25 bp, Homo sapien
cctcccaaagtacgtaaatatgata

SEQ ID NO: 1603244 - DNA, 25 bp, Homo sapien
cccaaagtacgtaaatatgatatca

SEQ ID NO: 1603245 - DNA, 25 bp, Homo sapien
tgatgatcagaattggtgagccaat

SEQ ID NO: 1603246 - DNA, 25 bp, Homo sapien
catggattcagacttgggtgggccc

SEQ ID NO: 1603247 - DNA, 25 bp, Homo sapien
tccctgttaaagagagattgcactg

SEQ ID NO: 1603248 - DNA, 25 bp, Homo sapien
gaatggcatgtgtggttcccagctc

SEQ ID NO: 1603249 - DNA, 25 bp, Homo sapien
ccatcactgtaggaggcagtctacc

SEQ ID NO: 1603250 - DNA, 25 bp, Homo sapien
aaactgggtatgtttgaggatctac

SEQ ID NO: 1603251 - DNA, 25 bp, Homo sapien
gaggatctacctgcttctttaaaaa

SEQ ID NO: 1603252 - DNA, 25 bp, Homo sapien
gactagtataggattttagtccaaa

SEQ ID NO: 1603253 - DNA, 25 bp, Homo sapien
gggactagtataggattttagtcca

SEQ ID NO: 1603254 - DNA, 25 bp, Homo sapien
gaagtcagcgttaaccatgtgcata

SEQ ID NO: 1603255 - DNA, 25 bp, Homo sapien
gattcagcctgatagctaccatgct

SEQ ID NO: 1603256 - DNA, 25 bp, Homo sapien
ttgttaagacactgtgaagtcagcg

SEQ ID NO: 1603257 - DNA, 25 bp, Homo sapien
gctaaagaccgcagagaccatacct

SEQ ID NO: 1603258 - DNA, 25 bp, Homo sapien
tcaggcctcatcaccaggttctgat

SEQ ID NO: 1603259 - DNA, 25 bp, Homo sapien
aggttctgatcggttctggggctct

SEQ ID NO: 1603260 - DNA, 25 bp, Homo sapien
tggggctctgtttcagcagtcagaa

SEQ ID NO: 1603261 - DNA, 25 bp, Homo sapien
tttcagcagtcagaacctggctccc

SEQ ID NO: 1603262 - DNA, 25 bp, Homo sapien
ggcattgtgcctagactgaataaaa

SEQ ID NO: 1603263 - DNA, 25 bp, Homo sapien
cctgtgcctgacgttccctgaaagg

SEQ ID NO: 1603264 - DNA, 25 bp, Homo sapien
tagagccaggcagtcacctagttgc

SEQ ID NO: 1603265 - DNA, 25 bp, Homo sapien
ccattaaaatacgtgggattggtca

SEQ ID NO: 1603266 - DNA, 25 bp, Homo sapien
gaatagcactaataccctatgccgt

SEQ ID NO: 1603267 - DNA, 25 bp, Homo sapien
tgacttagtggactccagaaagcct

SEQ ID NO: 1603268 - DNA, 25 bp, Homo sapien
cctatgccgtatctgtggaaaggta

SEQ ID NO: 1603269 - DNA, 25 bp, Homo sapien
ggaatctgatccaaattaactcgtg

SEQ ID NO: 1603270 - DNA, 25 bp, Homo sapien
tctctttcacgggtgagagccgcag

SEQ ID NO: 1603271 - DNA, 25 bp, Homo sapien
catacaagtgctgcgaaagcggcct

SEQ ID NO: 1603272 - DNA, 25 bp, Homo sapien
atatttcgtcgaatcccggctgggc

SEQ ID NO: 1603273 - DNA, 25 bp, Homo sapien
cagcctactcttggcggaagcggaa

SEQ ID NO: 1603274 - DNA, 25 bp, Homo sapien
ctaggagcagttggtcagtacagtc

SEQ ID NO: 1603275 - DNA, 25 bp, Homo sapien
gcctgccttgatcactggcaggaga

SEQ ID NO: 1603276 - DNA, 25 bp, Homo sapien
gatggtgcctatgaggaaggtctga

SEQ ID NO: 1603277 - DNA, 25 bp, Homo sapien
tatgagggcagtactgaaggctgcc

SEQ ID NO: 1603278 - DNA, 25 bp, Homo sapien
tggtacttctcttctgggtacagct

SEQ ID NO: 1603279 - DNA, 25 bp, Homo sapien
cttctcttctgggtacagctgaacc

SEQ ID NO: 1603280 - DNA, 25 bp, Homo sapien
tacttctcttctgggtacagctgaa

SEQ ID NO: 1603281 - DNA, 25 bp, Homo sapien
tctcttctgggtacagctgaaccac

SEQ ID NO: 1603282 - DNA, 25 bp, Homo sapien
ctgggaagagcaagctaagaagttc

SEQ ID NO: 1603283 - DNA, 25 bp, Homo sapien
ggaagagcaagctaagaagttctgg

SEQ ID NO: 1603284 - DNA, 25 bp, Homo sapien
gagcaagctaagaagttctggtgcc

SEQ ID NO: 1603285 - DNA, 25 bp, Homo sapien
gcaagctaagaagttctggtgcccc

SEQ ID NO: 1603286 - DNA, 25 bp, Homo sapien
ggcacaagaggatggggggatgggc

SEQ ID NO: 1603287 - DNA, 25 bp, Homo sapien
tgggcacaagaggatggggggatgg

SEQ ID NO: 1603288 - DNA, 25 bp, Homo sapien
gtgggcacaagaggatggggggatg

SEQ ID NO: 1603289 - DNA, 25 bp, Homo sapien
agtgggcacaagaggatggggggat

SEQ ID NO: 1603290 - DNA, 25 bp, Homo sapien
cagcatggggtgcaaaaagaaatct

SEQ ID NO: 1603291 - DNA, 25 bp, Homo sapien
gcatggggtgcaaaaagaaatctac

SEQ ID NO: 1603292 - DNA, 25 bp, Homo sapien
atggggtgcaaaaagaaatctacgt

SEQ ID NO: 1603293 - DNA, 25 bp, Homo sapien
aacagcatggggtgcaaaaagaaat

SEQ ID NO: 1603294 - DNA, 25 bp, Homo sapien
ctccaaaatttcctcccttcatggg

SEQ ID NO: 1603295 - DNA, 25 bp, Homo sapien
agcttctgcctccaaaatttcctcc

SEQ ID NO: 1603296 - DNA, 25 bp, Homo sapien
ctgcctccaaaatttcctcccttca

SEQ ID NO: 1603297 - DNA, 25 bp, Homo sapien
cgccataggggccagagcttctgcc

SEQ ID NO: 1603298 - DNA, 25 bp, Homo sapien
cactgaagtttcctccacgaccgaa

SEQ ID NO: 1603299 - DNA, 25 bp, Homo sapien
tttcctccacgaccgaagttgtcat

SEQ ID NO: 1603300 - DNA, 25 bp, Homo sapien
cacgaccactgaagtttcctccacg

SEQ ID NO: 1603301 - DNA, 25 bp, Homo sapien
ctgaagtttcctccacgaccgaagt

SEQ ID NO: 1603302 - DNA, 25 bp, Homo sapien
tggatgaagcactagccatctcttg

SEQ ID NO: 1603303 - DNA, 25 bp, Homo sapien
atctcttgctttgacagggcttttc

SEQ ID NO: 1603304 - DNA, 25 bp, Homo sapien
cttgctttgacagggcttttctaac

SEQ ID NO: 1603305 - DNA, 25 bp, Homo sapien
ctcttgctttgacagggcttttcta

SEQ ID NO: 1603306 - DNA, 25 bp, Homo sapien
tcttgccactgcctcggtcagtcat

SEQ ID NO: 1603307 - DNA, 25 bp, Homo sapien
gtcttatccacggagtcatggtcgt

SEQ ID NO: 1603308 - DNA, 25 bp, Homo sapien
aatcacttcaatttttccatactgt

SEQ ID NO: 1603309 - DNA, 25 bp, Homo sapien
ttcaatttttccatactgttcaaaa

SEQ ID NO: 1603310 - DNA, 25 bp, Homo sapien
atcttctctggagacagctctcttt

SEQ ID NO: 1603311 - DNA, 25 bp, Homo sapien
agaatcttctctggagacagctctc

SEQ ID NO: 1603312 - DNA, 25 bp, Homo sapien
tgagaatcttctctggagacagctc

SEQ ID NO: 1603313 - DNA, 25 bp, Homo sapien
tttgagaatcttctctggagacagc

SEQ ID NO: 1603314 - DNA, 25 bp, Homo sapien
attaccacacagtccgtgagcgttc

SEQ ID NO: 1603315 - DNA, 25 bp, Homo sapien
acacagtccgtgagcgttccccatt

SEQ ID NO: 1603316 - DNA, 25 bp, Homo sapien
ttaccacacagtccgtgagcgttcc

SEQ ID NO: 1603317 - DNA, 25 bp, Homo sapien
tccgtgagcgttccccattgctcaa

SEQ ID NO: 1603318 - DNA, 25 bp, Homo sapien
tctttaggagactctgacttagaca

SEQ ID NO: 1603319 - DNA, 25 bp, Homo sapien
ctgttcgggctctttaggagactct

SEQ ID NO: 1603320 - DNA, 25 bp, Homo sapien
ctttaggagactctgacttagacat

SEQ ID NO: 1603321 - DNA, 25 bp, Homo sapien
ggctctttaggagactctgacttag

SEQ ID NO: 1603322 - DNA, 25 bp, Homo sapien
gcagaaaagcgagatttttctaaat

SEQ ID NO: 1603323 - DNA, 25 bp, Homo sapien
ccacgggcagaaaagcgagattttt

SEQ ID NO: 1603324 - DNA, 25 bp, Homo sapien
tccacgggcagaaaagcgagatttt

SEQ ID NO: 1603325 - DNA, 25 bp, Homo sapien
tactggaccacatgtgtagaaatgt

SEQ ID NO: 1603326 - DNA, 25 bp, Homo sapien
tatgcaattgtaacgtaacccaagg

SEQ ID NO: 1603327 - DNA, 25 bp, Homo sapien
gctggacaacaacgacaacgcgatc

SEQ ID NO: 1603328 - DNA, 25 bp, Homo sapien
ccatggatatatttgtctacttgcc

SEQ ID NO: 1603329 - DNA, 25 bp, Homo sapien
ggtcggcagataaacagttgtgaac

SEQ ID NO: 1603330 - DNA, 25 bp, Homo sapien
ggaaggtcggcagataaacagttgt

SEQ ID NO: 1603331 - DNA, 25 bp, Homo sapien
agctaggcatatttgtatgggaagg

SEQ ID NO: 1603332 - DNA, 25 bp, Homo sapien
aaggtcggcagataaacagttgtga

SEQ ID NO: 1603333 - DNA, 25 bp, Homo sapien
gcacagtgaagatgaaccttataaa

SEQ ID NO: 1603334 - DNA, 25 bp, Homo sapien
gccacataagcagtgtgtgaaaacc

SEQ ID NO: 1603335 - DNA, 25 bp, Homo sapien
caaaccttttgaagatacatggtaa

SEQ ID NO: 1603336 - DNA, 25 bp, Homo sapien
aaaccttcagctattgccactcctt

SEQ ID NO: 1603337 - DNA, 25 bp, Homo sapien
aggcacaggttgctgtgatcacacc

SEQ ID NO: 1603338 - DNA, 25 bp, Homo sapien
ttatctgaatttaatatagccgttc

SEQ ID NO: 1603339 - DNA, 25 bp, Homo sapien
tatctgaatttaatatagccgttcc

SEQ ID NO: 1603340 - DNA, 25 bp, Homo sapien
accaaaaaacctgatttatctgaat

SEQ ID NO: 1603341 - DNA, 25 bp, Homo sapien
ttccctagaagggtatggattagca

SEQ ID NO: 1603342 - DNA, 25 bp, Homo sapien
tacacaaacactcgattctaatggg

SEQ ID NO: 1603343 - DNA, 25 bp, Homo sapien
ggcccagaaaacagcgttttgattg

SEQ ID NO: 1603344 - DNA, 25 bp, Homo sapien
gataattagtgcctgtttctcactg

SEQ ID NO: 1603345 - DNA, 25 bp, Homo sapien
ttaactctggttgatattactatca

SEQ ID NO: 1603346 - DNA, 25 bp, Homo sapien
tctggttgatattactatcaggtaa

SEQ ID NO: 1603347 - DNA, 25 bp, Homo sapien
gatattactatcaggtaaatgtccc

SEQ ID NO: 1603348 - DNA, 25 bp, Homo sapien
ttactatcaggtaaatgtcccataa

SEQ ID NO: 1603349 - DNA, 25 bp, Homo sapien
gtgactaggtgctgcatgcactggc

SEQ ID NO: 1603350 - DNA, 25 bp, Homo sapien
gagtacgtgactaggtgctgcatgc

SEQ ID NO: 1603351 - DNA, 25 bp, Homo sapien
gcaaacagggagtacgtgactaggt

SEQ ID NO: 1603352 - DNA, 25 bp, Homo sapien
agtgctcgcaccctgctacccatgt

SEQ ID NO: 1603353 - DNA, 25 bp, Homo sapien
cctgggattcggggaagcatgcaca

SEQ ID NO: 1603354 - DNA, 25 bp, Homo sapien
acacaggcaagcaggaaaaacacga

SEQ ID NO: 1603355 - DNA, 25 bp, Homo sapien
ggcaagcaggaaaaacacgaggatc

SEQ ID NO: 1603356 - DNA, 25 bp, Homo sapien
tgggattcggggaagcatgcacaca

SEQ ID NO: 1603357 - DNA, 25 bp, Homo sapien
aaaggccagtagtaaagtcacaaca

SEQ ID NO: 1603358 - DNA, 25 bp, Homo sapien
tctgacatgtgaacgagatactcta

SEQ ID NO: 1603359 - DNA, 25 bp, Homo sapien
ccagtacctgctacaaaaggccagt

SEQ ID NO: 1603360 - DNA, 25 bp, Homo sapien
gaattaaacttgttgccaggcagca

SEQ ID NO: 1603361 - DNA, 25 bp, Homo sapien
tagacctatatccatggaagtgacg

SEQ ID NO: 1603362 - DNA, 25 bp, Homo sapien
gatgctgcacatggaattagttcta

SEQ ID NO: 1603363 - DNA, 25 bp, Homo sapien
gtacatttacctccagtcgtgtgag

SEQ ID NO: 1603364 - DNA, 25 bp, Homo sapien
tcatcaggaaactctcacacttgtc

SEQ ID NO: 1603365 - DNA, 25 bp, Homo sapien
tgtgcctggacaaaatttaccctct

SEQ ID NO: 1603366 - DNA, 25 bp, Homo sapien
tcatttcatcctaatgtcctcccag

SEQ ID NO: 1603367 - DNA, 25 bp, Homo sapien
tcatcctaatgtcctcccagagatc

SEQ ID NO: 1603368 - DNA, 25 bp, Homo sapien
tcttaaccctattcatgagggccct

SEQ ID NO: 1603369 - DNA, 25 bp, Homo sapien
gataagggtgagagtcaatgtaaca

SEQ ID NO: 1603370 - DNA, 25 bp, Homo sapien
aacaccatcaaaagtcttgactcat

SEQ ID NO: 1603371 - DNA, 25 bp, Homo sapien
catttaaatagcatctgaatcagat

SEQ ID NO: 1603372 - DNA, 25 bp, Homo sapien
tattgtaatctccaccccaatgtat

SEQ ID NO: 1603373 - DNA, 25 bp, Homo sapien
atgcaaatatgccatataacaaagg

SEQ ID NO: 1603374 - DNA, 25 bp, Homo sapien
tacacagtatactggaagatatgca

SEQ ID NO: 1603375 - DNA, 25 bp, Homo sapien
ggttgtgtctgcatcgaacatgtag

SEQ ID NO: 1603376 - DNA, 25 bp, Homo sapien
tctgggtgacatataccacgtaggt

SEQ ID NO: 1603377 - DNA, 25 bp, Homo sapien
cagcttctctccagtgtgagttttt

SEQ ID NO: 1603378 - DNA, 25 bp, Homo sapien
ttctctccagtgtgagttttttcat

SEQ ID NO: 1603379 - DNA, 25 bp, Homo sapien
gcttctctccagtgtgagttttttc

SEQ ID NO: 1603380 - DNA, 25 bp, Homo sapien
attcatacagcttctctccagtgtg

SEQ ID NO: 1603381 - DNA, 25 bp, Homo sapien
tatttgaaacaactgaatgctttcc

SEQ ID NO: 1603382 - DNA, 25 bp, Homo sapien
tcatgtcgtagaaggcaagtgagcc

SEQ ID NO: 1603383 - DNA, 25 bp, Homo sapien
tgagccaagagaatgcttttccaca

SEQ ID NO: 1603384 - DNA, 25 bp, Homo sapien
tgaaaggaagagagatcactaaagg

SEQ ID NO: 1603385 - DNA, 25 bp, Homo sapien
tcttcgaagggaaccggcaagactg

SEQ ID NO: 1603386 - DNA, 25 bp, Homo sapien
cttcgaagggaaccggcaagactga

SEQ ID NO: 1603387 - DNA, 25 bp, Homo sapien
tcatgtagtcgagtgtaatagtaac

SEQ ID NO: 1603388 - DNA, 25 bp, Homo sapien
gataggtactgtaatcaggaaaggc

SEQ ID NO: 1603389 - DNA, 25 bp, Homo sapien
tagtcgagtgtaatagtaacagctg

SEQ ID NO: 1603390 - DNA, 25 bp, Homo sapien
aaagcttgtgtgatgataaaacgtt

SEQ ID NO: 1603391 - DNA, 25 bp, Homo sapien
cgaggagtgttcttgttcacaatac

SEQ ID NO: 1603392 - DNA, 25 bp, Homo sapien
tgatgctcacatgatttgtgtccag

SEQ ID NO: 1603393 - DNA, 25 bp, Homo sapien
tctggaaggagtgctgatgactgat

SEQ ID NO: 1603394 - DNA, 25 bp, Homo sapien
taagagacgaatgacccaagacgac

SEQ ID NO: 1603395 - DNA, 25 bp, Homo sapien
attttggcactgatctccaatgttc

SEQ ID NO: 1603396 - DNA, 25 bp, Homo sapien
ttggcactgatctccaatgttctgg

SEQ ID NO: 1603397 - DNA, 25 bp, Homo sapien
tttggcactgatctccaatgttctg

SEQ ID NO: 1603398 - DNA, 25 bp, Homo sapien
ttttggcactgatctccaatgttct

SEQ ID NO: 1603399 - DNA, 25 bp, Homo sapien
tggtttcctgcatgacatttctgta

SEQ ID NO: 1603400 - DNA, 25 bp, Homo sapien
gagactcttctgtgatggacccagc

SEQ ID NO: 1603401 - DNA, 25 bp, Homo sapien
ttctgtagagactcttctgtgatgg

SEQ ID NO: 1603402 - DNA, 25 bp, Homo sapien
tatacagtccaggttcctaatggtt

SEQ ID NO: 1603403 - DNA, 25 bp, Homo sapien
aaggttgagatggacagcactgaga

SEQ ID NO: 1603404 - DNA, 25 bp, Homo sapien
ggttgagatggacagcactgagaat

SEQ ID NO: 1603405 - DNA, 25 bp, Homo sapien
catactcactgcataaactttgcat

SEQ ID NO: 1603406 - DNA, 25 bp, Homo sapien
cagcactgagaatccatactcactg

SEQ ID NO: 1603407 - DNA, 25 bp, Homo sapien
gagccatacattgctatgtgaaaag

SEQ ID NO: 1603408 - DNA, 25 bp, Homo sapien
aaccaagagatttgctgccagccct

SEQ ID NO: 1603409 - DNA, 25 bp, Homo sapien
gagagacagttagcctggggaaggc

SEQ ID NO: 1603410 - DNA, 25 bp, Homo sapien
agttgctgggaattgatgagagaca

SEQ ID NO: 1603411 - DNA, 25 bp, Homo sapien
tccaaagcacaaagcccacacacac

SEQ ID NO: 1603412 - DNA, 25 bp, Homo sapien
cagtgtgggtcccagcgcgacagac

SEQ ID NO: 1603413 - DNA, 25 bp, Homo sapien
tcccagcgcgacagacgctgataca

SEQ ID NO: 1603414 - DNA, 25 bp, Homo sapien
gatacagaccttccagggcgtctct

SEQ ID NO: 1603415 - DNA, 25 bp, Homo sapien
tcctccttaaaagccagtgtgggtc

SEQ ID NO: 1603416 - DNA, 25 bp, Homo sapien
ttagcgaatgcttctcccacattcc

SEQ ID NO: 1603417 - DNA, 25 bp, Homo sapien
ttatgtccattaaagtaagtgggag

SEQ ID NO: 1603418 - DNA, 25 bp, Homo sapien
gaactgaatgctttttcacatccct

SEQ ID NO: 1603419 - DNA, 25 bp, Homo sapien
ctttagtgagtccttttatgtccat

SEQ ID NO: 1603420 - DNA, 25 bp, Homo sapien
ttttcatgtatacaaagggaactgg

SEQ ID NO: 1603421 - DNA, 25 bp, Homo sapien
caaattgcgtacaatcatggttttg

SEQ ID NO: 1603422 - DNA, 25 bp, Homo sapien
gaaggctttaccaaattgcgtacaa

SEQ ID NO: 1603423 - DNA, 25 bp, Homo sapien
ttaccaaattgcgtacaatcatggt

SEQ ID NO: 1603424 - DNA, 25 bp, Homo sapien
gatccatctccggtgtgcgttttca

SEQ ID NO: 1603425 - DNA, 25 bp, Homo sapien
tgtctgagatccatctccggtgtgc

SEQ ID NO: 1603426 - DNA, 25 bp, Homo sapien
tctgagatccatctccggtgtgcgt

SEQ ID NO: 1603427 - DNA, 25 bp, Homo sapien
tgagatccatctccggtgtgcgttt

SEQ ID NO: 1603428 - DNA, 25 bp, Homo sapien
tttctcttcagtgtgagttctttca

SEQ ID NO: 1603429 - DNA, 25 bp, Homo sapien
ttctcttcagtgtgagttctttcat

SEQ ID NO: 1603430 - DNA, 25 bp, Homo sapien
tgatttctacttccagtgtatgttc

SEQ ID NO: 1603431 - DNA, 25 bp, Homo sapien
gtctttgaactaaactgagataatg

SEQ ID NO: 1603432 - DNA, 25 bp, Homo sapien
tttgaactaaactgagataatgaaa

SEQ ID NO: 1603433 - DNA, 25 bp, Homo sapien
atgatttctacttccagtgtatgtt

SEQ ID NO: 1603434 - DNA, 25 bp, Homo sapien
cagtttgagccttttcaagtatttg

SEQ ID NO: 1603435 - DNA, 25 bp, Homo sapien
gaaatggtctgtgagaattgaagcc

SEQ ID NO: 1603436 - DNA, 25 bp, Homo sapien
ttgaaatggtctgtgagaattgaag

SEQ ID NO: 1603437 - DNA, 25 bp, Homo sapien
aatggtctgtgagaattgaagcctt

SEQ ID NO: 1603438 - DNA, 25 bp, Homo sapien
ctttgaaatggtctgtgagaattga

SEQ ID NO: 1603439 - DNA, 25 bp, Homo sapien
aaagcttctgagacgattaagtact

SEQ ID NO: 1603440 - DNA, 25 bp, Homo sapien
tttgaaagcttctgagacgattaag

SEQ ID NO: 1603441 - DNA, 25 bp, Homo sapien
tgagacgattaagtactttctcaca

SEQ ID NO: 1603442 - DNA, 25 bp, Homo sapien
gcttctgagacgattaagtactttc

SEQ ID NO: 1603443 - DNA, 25 bp, Homo sapien
ttagtgtagtcacatagcacaggct

SEQ ID NO: 1603444 - DNA, 25 bp, Homo sapien
ccattgggatggtaaaatatcctta

SEQ ID NO: 1603445 - DNA, 25 bp, Homo sapien
cagtaaaccagttgctagcttccaa

SEQ ID NO: 1603446 - DNA, 25 bp, Homo sapien
taagaacatatgcaatcttggccct

SEQ ID NO: 1603447 - DNA, 25 bp, Homo sapien
tttatcagattgtcttttggttgag

SEQ ID NO: 1603448 - DNA, 25 bp, Homo sapien
ggtgacctaatatgcccacagttgc

SEQ ID NO: 1603449 - DNA, 25 bp, Homo sapien
aacttcaaagggtgttatgtcttca

SEQ ID NO: 1603450 - DNA, 25 bp, Homo sapien
cttcagcgcactctcctatgttttc

SEQ ID NO: 1603451 - DNA, 25 bp, Homo sapien
tgtagataaccatttgtccctgctt

SEQ ID NO: 1603452 - DNA, 25 bp, Homo sapien
gttcaccacttgtatcattggctgg

SEQ ID NO: 1603453 - DNA, 25 bp, Homo sapien
caatacctggtttgtcatagtttca

SEQ ID NO: 1603454 - DNA, 25 bp, Homo sapien
ttaccttaaacagatgcccagactg

SEQ ID NO: 1603455 - DNA, 25 bp, Homo sapien
ttattccagtgtcggcaacatggca

SEQ ID NO: 1603456 - DNA, 25 bp, Homo sapien
gagattattccagtgtcggcaacat

SEQ ID NO: 1603457 - DNA, 25 bp, Homo sapien
catggcaaactttgcctatacaaaa

SEQ ID NO: 1603458 - DNA, 25 bp, Homo sapien
aaaattacctcgtcattgtgatgtg

SEQ ID NO: 1603459 - DNA, 25 bp, Homo sapien
cacatccctagtgaaggagagttca

SEQ ID NO: 1603460 - DNA, 25 bp, Homo sapien
tttcttcagagctccgcagactgtc

SEQ ID NO: 1603461 - DNA, 25 bp, Homo sapien
tactgaatcagtaagaccatgccta

SEQ ID NO: 1603462 - DNA, 25 bp, Homo sapien
tgggaggactttcgtgtggacatca

SEQ ID NO: 1603463 - DNA, 25 bp, Homo sapien
cttgcatttttaatacacgtcttta

SEQ ID NO: 1603464 - DNA, 25 bp, Homo sapien
gtcatcttatggaatcttctcttat

SEQ ID NO: 1603465 - DNA, 25 bp, Homo sapien
taatacacgtctttatagtagattt

SEQ ID NO: 1603466 - DNA, 25 bp, Homo sapien
tgagtgtttctaatcatcaggagat

SEQ ID NO: 1603467 - DNA, 25 bp, Homo sapien
tatataggcttagaatgggtcagtc

SEQ ID NO: 1603468 - DNA, 25 bp, Homo sapien
tcaggggccactggtcgtggtggct

SEQ ID NO: 1603469 - DNA, 25 bp, Homo sapien
gttgtatataggcttagaatgggtc

SEQ ID NO: 1603470 - DNA, 25 bp, Homo sapien
tgtatataggcttagaatgggtcag

SEQ ID NO: 1603471 - DNA, 25 bp, Homo sapien
taggattttaattagctggttggaa

SEQ ID NO: 1603472 - DNA, 25 bp, Homo sapien
gtgaatagtttgataatgtttgaag

SEQ ID NO: 1603473 - DNA, 25 bp, Homo sapien
gctggttggaaacttagtgaatagt

SEQ ID NO: 1603474 - DNA, 25 bp, Homo sapien
aaatatgaatactcagacacatacc

SEQ ID NO: 1603475 - DNA, 25 bp, Homo sapien
ccaagttttcacgtcccaaattatg

SEQ ID NO: 1603476 - DNA, 25 bp, Homo sapien
cacttttctttccataaggaagcga

SEQ ID NO: 1603477 - DNA, 25 bp, Homo sapien
gtcccaaattatgatagccacaggc

SEQ ID NO: 1603478 - DNA, 25 bp, Homo sapien
tctttccataaggaagcgagcttgc

SEQ ID NO: 1603479 - DNA, 25 bp, Homo sapien
gcagggtttggggtttgacatacat

SEQ ID NO: 1603480 - DNA, 25 bp, Homo sapien
gactcgggtgtggatttcgtccgta

SEQ ID NO: 1603481 - DNA, 25 bp, Homo sapien
cagaagtgtattcagagccgagtag

SEQ ID NO: 1603482 - DNA, 25 bp, Homo sapien
tcacgaatgagaaacacccggtcct

SEQ ID NO: 1603483 - DNA, 25 bp, Homo sapien
tcatgcgcggatttcgactcgggtg

SEQ ID NO: 1603484 - DNA, 25 bp, Homo sapien
agtcctgtttctctagattttatga

SEQ ID NO: 1603485 - DNA, 25 bp, Homo sapien
tcctgtttctctagattttatgaat

SEQ ID NO: 1603486 - DNA, 25 bp, Homo sapien
gtcctgtttctctagattttatgaa

SEQ ID NO: 1603487 - DNA, 25 bp, Homo sapien
gcagcccagccgaggatgcgccact

SEQ ID NO: 1603488 - DNA, 25 bp, Homo sapien
cagcccagccgaggatgcgccactg

SEQ ID NO: 1603489 - DNA, 25 bp, Homo sapien
tctctaggaatgacggctgcagatg

SEQ ID NO: 1603490 - DNA, 25 bp, Homo sapien
taaccgactcctctttatggcctgc

SEQ ID NO: 1603491 - DNA, 25 bp, Homo sapien
tggtgaattccagtggctaaccgac

SEQ ID NO: 1603492 - DNA, 25 bp, Homo sapien
caagccttgttgtaatgcacccatc

SEQ ID NO: 1603493 - DNA, 25 bp, Homo sapien
ggacacaatgccatgttggtgggaa

SEQ ID NO: 1603494 - DNA, 25 bp, Homo sapien
gggtacacaggggacacaatgccat

SEQ ID NO: 1603495 - DNA, 25 bp, Homo sapien
cacaatgccatgttggtgggaaatc

SEQ ID NO: 1603496 - DNA, 25 bp, Homo sapien
tgccatgttggtgggaaatcgtcat

SEQ ID NO: 1603497 - DNA, 25 bp, Homo sapien
tgtatgggcactgttaactagaagg

SEQ ID NO: 1603498 - DNA, 25 bp, Homo sapien
tgaggggaggtcagctatagacttc

SEQ ID NO: 1603499 - DNA, 25 bp, Homo sapien
cagctatagacttctggacctgttt

SEQ ID NO: 1603500 - DNA, 25 bp, Homo sapien
cactgttaactagaaggtaccttag

SEQ ID NO: 1603501 - DNA, 25 bp, Homo sapien
aacatgaaggatctgccgcaacatg

SEQ ID NO: 1603502 - DNA, 25 bp, Homo sapien
gttgtctggcccatagtgcacccct

SEQ ID NO: 1603503 - DNA, 25 bp, Homo sapien
ggcactgtattgacggcagctctgc

SEQ ID NO: 1603504 - DNA, 25 bp, Homo sapien
gtccaaggtcctggcactgtattga

SEQ ID NO: 1603505 - DNA, 25 bp, Homo sapien
tgtaatcagaggttaattggtggat

SEQ ID NO: 1603506 - DNA, 25 bp, Homo sapien
aaattttctagttatgtaatcagag

SEQ ID NO: 1603507 - DNA, 25 bp, Homo sapien
aatcagaggttaattggtggattct

SEQ ID NO: 1603508 - DNA, 25 bp, Homo sapien
agaaattttctagttatgtaatcag

SEQ ID NO: 1603509 - DNA, 25 bp, Homo sapien
ttagtcaagcgtgatggtgcatggc

SEQ ID NO: 1603510 - DNA, 25 bp, Homo sapien
tagtcaagcgtgatggtgcatggct

SEQ ID NO: 1603511 - DNA, 25 bp, Homo sapien
attagtcaagcgtgatggtgcatgg

SEQ ID NO: 1603512 - DNA, 25 bp, Homo sapien
tgtgtgaaaccttattgccaaatcc

SEQ ID NO: 1603513 - DNA, 25 bp, Homo sapien
tgcctggctgctaccatgatttgtt

SEQ ID NO: 1603514 - DNA, 25 bp, Homo sapien
tgcatgttgtagtataggccaagat

SEQ ID NO: 1603515 - DNA, 25 bp, Homo sapien
cacttttttgaattgccgacgtgtg

SEQ ID NO: 1603516 - DNA, 25 bp, Homo sapien
cacttttctttccataaggaagcaa

SEQ ID NO: 1603517 - DNA, 25 bp, Homo sapien
atccaagttttcacgtcccgattgg

SEQ ID NO: 1603518 - DNA, 25 bp, Homo sapien
tctttccataaggaagcaagcttgc

SEQ ID NO: 1603519 - DNA, 25 bp, Homo sapien
aatccaagttttcacgtcccgattg

SEQ ID NO: 1603520 - DNA, 25 bp, Homo sapien
ctggagctgtcttctgggcagggtt

SEQ ID NO: 1603521 - DNA, 25 bp, Homo sapien
ctgggcagggtttggggtttgacat

SEQ ID NO: 1603522 - DNA, 25 bp, Homo sapien
gagctgtcttctgggcagggtttgg

SEQ ID NO: 1603523 - DNA, 25 bp, Homo sapien
tctgggcagggtttggggtttgaca

SEQ ID NO: 1603524 - DNA, 25 bp, Homo sapien
caacgggagggtcatggaggcatcc

SEQ ID NO: 1603525 - DNA, 25 bp, Homo sapien
ctgaggtacgttaacaattaaagag

SEQ ID NO: 1603526 - DNA, 25 bp, Homo sapien
acgaatgagaaacaccccgtcctgg

SEQ ID NO: 1603527 - DNA, 25 bp, Homo sapien
tgtcaacggaaaaagccaaactatg

SEQ ID NO: 1603528 - DNA, 25 bp, Homo sapien
tatatgtgagttgaccacatggagg

SEQ ID NO: 1603529 - DNA, 25 bp, Homo sapien
agagagaaatatcccaaaagacaag

SEQ ID NO: 1603530 - DNA, 25 bp, Homo sapien
ccccaacaaggttgtatttagctgt

SEQ ID NO: 1603531 - DNA, 25 bp, Homo sapien
cctgtcctttggattgtctcaactg

SEQ ID NO: 1603532 - DNA, 25 bp, Homo sapien
atgacaggtagtggattgattattc

SEQ ID NO: 1603533 - DNA, 25 bp, Homo sapien
tattgtatatggagatgacaggtag

SEQ ID NO: 1603534 - DNA, 25 bp, Homo sapien
taaattattgtatatggagatgaca

SEQ ID NO: 1603535 - DNA, 25 bp, Homo sapien
tatatggagatgacaggtagtggat

SEQ ID NO: 1603536 - DNA, 25 bp, Homo sapien
gggattgagggtgtttgtctcatga

SEQ ID NO: 1603537 - DNA, 25 bp, Homo sapien
attgagggtgtttgtctcatgaaac

SEQ ID NO: 1603538 - DNA, 25 bp, Homo sapien
ttgtctcatgaaactgatcaatgaa

SEQ ID NO: 1603539 - DNA, 25 bp, Homo sapien
gtgggattgagggtgtttgtctcat

SEQ ID NO: 1603540 - DNA, 25 bp, Homo sapien
gggcagcagagcctgaggccagtgt

SEQ ID NO: 1603541 - DNA, 25 bp, Homo sapien
gggggcagcagagcctgaggccagt

SEQ ID NO: 1603542 - DNA, 25 bp, Homo sapien
gcagcagagcctgaggccagtgtgg

SEQ ID NO: 1603543 - DNA, 25 bp, Homo sapien
tacagggggcagcagagcctgaggc

SEQ ID NO: 1603544 - DNA, 25 bp, Homo sapien
tatttggagatacatggctggtcag

SEQ ID NO: 1603545 - DNA, 25 bp, Homo sapien
ctggtcagccaattggattttgctc

SEQ ID NO: 1603546 - DNA, 25 bp, Homo sapien
gatacatggctggtcagccaattgg

SEQ ID NO: 1603547 - DNA, 25 bp, Homo sapien
catggctggtcagccaattggattt

SEQ ID NO: 1603548 - DNA, 25 bp, Homo sapien
tgccaccctaaacgcatctgtttgg

SEQ ID NO: 1603549 - DNA, 25 bp, Homo sapien
tgggcctggttagtaaatggatgga

SEQ ID NO: 1603550 - DNA, 25 bp, Homo sapien
aatggatggagaatgcctgggaata

SEQ ID NO: 1603551 - DNA, 25 bp, Homo sapien
tctgtttggcatagctaagcgggat

SEQ ID NO: 1603552 - DNA, 25 bp, Homo sapien
gaaatgatccaaaccaagctactgt

SEQ ID NO: 1603553 - DNA, 25 bp, Homo sapien
tccttttcctcaaccttatatgaag

SEQ ID NO: 1603554 - DNA, 25 bp, Homo sapien
ctgttaggactggtgaaaatgattc

SEQ ID NO: 1603555 - DNA, 25 bp, Homo sapien
gaaggaaaggtgacccgcagactgt

SEQ ID NO: 1603556 - DNA, 25 bp, Homo sapien
gggcttaagcagtccccccacctca

SEQ ID NO: 1603557 - DNA, 25 bp, Homo sapien
ccacctcagcctcctaaagcctggg

SEQ ID NO: 1603558 - DNA, 25 bp, Homo sapien
cagagtctcactatgttgcccaggc

SEQ ID NO: 1603559 - DNA, 25 bp, Homo sapien
tatttaatttttataacagagtctc

SEQ ID NO: 1603560 - DNA, 25 bp, Homo sapien
tatggggtgtctatgcagtgagccc

SEQ ID NO: 1603561 - DNA, 25 bp, Homo sapien
tgtctatgcagtgagcccttccatg

SEQ ID NO: 1603562 - DNA, 25 bp, Homo sapien
ttatggggtgtctatgcagtgagcc

SEQ ID NO: 1603563 - DNA, 25 bp, Homo sapien
gggtgtctatgcagtgagcccttcc

SEQ ID NO: 1603564 - DNA, 25 bp, Homo sapien
cacattggttacatttatagggttt

SEQ ID NO: 1603565 - DNA, 25 bp, Homo sapien
ggtttctctccagtgtgagtccttc

SEQ ID NO: 1603566 - DNA, 25 bp, Homo sapien
tttgagggacatccaaaagctttcc

SEQ ID NO: 1603567 - DNA, 25 bp, Homo sapien
gtttgagggacatccaaaagctttc

SEQ ID NO: 1603568 - DNA, 25 bp, Homo sapien
atgcatttgaagtcgcgaggcacat

SEQ ID NO: 1603569 - DNA, 25 bp, Homo sapien
tgcatttgaagtcgcgaggcacatc

SEQ ID NO: 1603570 - DNA, 25 bp, Homo sapien
gcatttgaagtcgcgaggcacatcc

SEQ ID NO: 1603571 - DNA, 25 bp, Homo sapien
catttgaagtcgcgaggcacatcca

SEQ ID NO: 1603572 - DNA, 25 bp, Homo sapien
atgaaataaactgggcaaactgaat

SEQ ID NO: 1603573 - DNA, 25 bp, Homo sapien
taccatgtgtttgaaggagtgaggc

SEQ ID NO: 1603574 - DNA, 25 bp, Homo sapien
tgatatcgaaaggagctcgaacagt

SEQ ID NO: 1603575 - DNA, 25 bp, Homo sapien
gctcgaacagttgaaggatctgcca

SEQ ID NO: 1603576 - DNA, 25 bp, Homo sapien
ctccagtgtgcattcccaagtggtt

SEQ ID NO: 1603577 - DNA, 25 bp, Homo sapien
tggtaagataagataatactttccc

SEQ ID NO: 1603578 - DNA, 25 bp, Homo sapien
tgtgcattcccaagtggttttgaaa

SEQ ID NO: 1603579 - DNA, 25 bp, Homo sapien
gctggtaagataagataatactttc

SEQ ID NO: 1603580 - DNA, 25 bp, Homo sapien
ttcttttatgagcatgaaggcatgt

SEQ ID NO: 1603581 - DNA, 25 bp, Homo sapien
tcttttatgagcatgaaggcatgtg

SEQ ID NO: 1603582 - DNA, 25 bp, Homo sapien
cttttatgagcatgaaggcatgtgg

SEQ ID NO: 1603583 - DNA, 25 bp, Homo sapien
catctccacggtgcattatcctgtg

SEQ ID NO: 1603584 - DNA, 25 bp, Homo sapien
gcattcctcacaaacatagagtttc

SEQ ID NO: 1603585 - DNA, 25 bp, Homo sapien
aataaatgtttttccgcattcctca

SEQ ID NO: 1603586 - DNA, 25 bp, Homo sapien
tgaaggtttgaatgggaaataaatg

SEQ ID NO: 1603587 - DNA, 25 bp, Homo sapien
ctatgagccctttcatgtgtctgaa

SEQ ID NO: 1603588 - DNA, 25 bp, Homo sapien
cagaggagagacagttgaaaggttt

SEQ ID NO: 1603589 - DNA, 25 bp, Homo sapien
acagaggagagacagttgaaaggtt

SEQ ID NO: 1603590 - DNA, 25 bp, Homo sapien
cttccactatgagccctttcatgtg

SEQ ID NO: 1603591 - DNA, 25 bp, Homo sapien
tgattttactccagtagttgttttc

SEQ ID NO: 1603592 - DNA, 25 bp, Homo sapien
atgattttactccagtagttgtttt

SEQ ID NO: 1603593 - DNA, 25 bp, Homo sapien
tcgtactctacatatatgttctggg

SEQ ID NO: 1603594 - DNA, 25 bp, Homo sapien
ccttagattttcgtactctacatat

SEQ ID NO: 1603595 - DNA, 25 bp, Homo sapien
gattttcgtactctacatatatgtt

SEQ ID NO: 1603596 - DNA, 25 bp, Homo sapien
tctccttagattttcgtactctaca

SEQ ID NO: 1603597 - DNA, 25 bp, Homo sapien
ctatagaggccaggttcctgaaggt

SEQ ID NO: 1603598 - DNA, 25 bp, Homo sapien
ccaggttcctgaaggtttcttgcat

SEQ ID NO: 1603599 - DNA, 25 bp, Homo sapien
agaggccaggttcctgaaggtttct

SEQ ID NO: 1603600 - DNA, 25 bp, Homo sapien
aggccaggttcctgaaggtttcttg

SEQ ID NO: 1603601 - DNA, 25 bp, Homo sapien
ctcttgggtgaaggtcacagccaca

SEQ ID NO: 1603602 - DNA, 25 bp, Homo sapien
cccactcctcttgggtgaaggtcac

SEQ ID NO: 1603603 - DNA, 25 bp, Homo sapien
tttctgggaaggatccagcaaagcc

SEQ ID NO: 1603604 - DNA, 25 bp, Homo sapien
acatctctacagagatttttctggg

SEQ ID NO: 1603605 - DNA, 25 bp, Homo sapien
atagaggaggatggataagactaac

SEQ ID NO: 1603606 - DNA, 25 bp, Homo sapien
ctcacatgtatagaggaggatggat

SEQ ID NO: 1603607 - DNA, 25 bp, Homo sapien
agaggaggatggataagactaacat

SEQ ID NO: 1603608 - DNA, 25 bp, Homo sapien
cacatgtatagaggaggatggataa

SEQ ID NO: 1603609 - DNA, 25 bp, Homo sapien
gggctgcccctaatgtttgtttgta

SEQ ID NO: 1603610 - DNA, 25 bp, Homo sapien
gtaattctgaggctacaactgaacc

SEQ ID NO: 1603611 - DNA, 25 bp, Homo sapien
cccaagaggtttccatgatgctgtg

SEQ ID NO: 1603612 - DNA, 25 bp, Homo sapien
tgtaaagtgggagtacggcacctgc

SEQ ID NO: 1603613 - DNA, 25 bp, Homo sapien
taaacacattattggcattccatac

SEQ ID NO: 1603614 - DNA, 25 bp, Homo sapien
acacattattggcattccatacaat

SEQ ID NO: 1603615 - DNA, 25 bp, Homo sapien
acaattctcaaggatgagccacagt

SEQ ID NO: 1603616 - DNA, 25 bp, Homo sapien
tacaattctcaaggatgagccacag

SEQ ID NO: 1603617 - DNA, 25 bp, Homo sapien
ttcccaggaattctacaaaccatgt

SEQ ID NO: 1603618 - DNA, 25 bp, Homo sapien
ttctacaaaccatgtactaacctgg

SEQ ID NO: 1603619 - DNA, 25 bp, Homo sapien
tacaaaccatgtactaacctggcct

SEQ ID NO: 1603620 - DNA, 25 bp, Homo sapien
ggaattctacaaaccatgtactaac

SEQ ID NO: 1603621 - DNA, 25 bp, Homo sapien
accagatctgtcagcaccttgaaca

SEQ ID NO: 1603622 - DNA, 25 bp, Homo sapien
cttgaacatggacttcataacttcc

SEQ ID NO: 1603623 - DNA, 25 bp, Homo sapien
cagcaccttgaacatggacttcata

SEQ ID NO: 1603624 - DNA, 25 bp, Homo sapien
tctgtcagcaccttgaacatggact

SEQ ID NO: 1603625 - DNA, 25 bp, Homo sapien
cctttccaggcattgatgcatgatt

SEQ ID NO: 1603626 - DNA, 25 bp, Homo sapien
ttccaggcattgatgcatgattctc

SEQ ID NO: 1603627 - DNA, 25 bp, Homo sapien
caggcattgatgcatgattctccct

SEQ ID NO: 1603628 - DNA, 25 bp, Homo sapien
tccaggcattgatgcatgattctcc

SEQ ID NO: 1603629 - DNA, 25 bp, Homo sapien
cgaccagtgcgggtcacagcacagg

SEQ ID NO: 1603630 - DNA, 25 bp, Homo sapien
gaaagccaggctcccaacctcagct

SEQ ID NO: 1603631 - DNA, 25 bp, Homo sapien
tgaaccctctcggaggggaaagcca

SEQ ID NO: 1603632 - DNA, 25 bp, Homo sapien
cgcctggagccgggaaccgaggaga

SEQ ID NO: 1603633 - DNA, 25 bp, Homo sapien
gaaaataacagcctaacacaatagc

SEQ ID NO: 1603634 - DNA, 25 bp, Homo sapien
ccaggagttctagagtaccgtggac

SEQ ID NO: 1603635 - DNA, 25 bp, Homo sapien
tagagtaccgtggacaacataggga

SEQ ID NO: 1603636 - DNA, 25 bp, Homo sapien
taacagcctaacacaatagccaaaa

SEQ ID NO: 1603637 - DNA, 25 bp, Homo sapien
tactcgcaggtacttgacagatctg

SEQ ID NO: 1603638 - DNA, 25 bp, Homo sapien
tctacgaacagaactgggaaacctg

SEQ ID NO: 1603639 - DNA, 25 bp, Homo sapien
tattaagggatgaaagacctatgcc

SEQ ID NO: 1603640 - DNA, 25 bp, Homo sapien
tcttccatgtattgcaaggctactg

SEQ ID NO: 1603641 - DNA, 25 bp, Homo sapien
tctcctaggattttggtgctcatct

SEQ ID NO: 1603642 - DNA, 25 bp, Homo sapien
ttctcctaggattttggtgctcatc

SEQ ID NO: 1603643 - DNA, 25 bp, Homo sapien
ctcctaggattttggtgctcatctt

SEQ ID NO: 1603644 - DNA, 25 bp, Homo sapien
ctaaaatgcggacccagaaaaatag

SEQ ID NO: 1603645 - DNA, 25 bp, Homo sapien
cactgagggaagtaatactgtcatt

SEQ ID NO: 1603646 - DNA, 25 bp, Homo sapien
ctgttctttaattcactgagggaag

SEQ ID NO: 1603647 - DNA, 25 bp, Homo sapien
tgagggaagtaatactgtcattctt

SEQ ID NO: 1603648 - DNA, 25 bp, Homo sapien
aattcactgagggaagtaatactgt

SEQ ID NO: 1603649 - DNA, 25 bp, Homo sapien
atggaggtcaggttcctcaaggttt

SEQ ID NO: 1603650 - DNA, 25 bp, Homo sapien
ctatggaggtcaggttcctcaaggt

SEQ ID NO: 1603651 - DNA, 25 bp, Homo sapien
cacttccctgtagagatttttctgg

SEQ ID NO: 1603652 - DNA, 25 bp, Homo sapien
ctcaaggtttcctgcatcacttccc

SEQ ID NO: 1603653 - DNA, 25 bp, Homo sapien
aggtcacagcgcagtcgacagagca

SEQ ID NO: 1603654 - DNA, 25 bp, Homo sapien
caacagcagctacggcggaagtaac

SEQ ID NO: 1603655 - DNA, 25 bp, Homo sapien
gcggaagtaactggtccctctcgga

SEQ ID NO: 1603656 - DNA, 25 bp, Homo sapien
ggtattctggcgtcctctctaaagg

SEQ ID NO: 1603657 - DNA, 25 bp, Homo sapien
ttcctcactccgtgggccgtccctg

SEQ ID NO: 1603658 - DNA, 25 bp, Homo sapien
ccgaactgctagaagggacactgtt

SEQ ID NO: 1603659 - DNA, 25 bp, Homo sapien
ttgccttcggccaaacttgctccga

SEQ ID NO: 1603660 - DNA, 25 bp, Homo sapien
ctttacttcgaatatttgccttcgg

SEQ ID NO: 1603661 - DNA, 25 bp, Homo sapien
tatccgcgggtcacattgccgttcg

SEQ ID NO: 1603662 - DNA, 25 bp, Homo sapien
cacattgccgttcgcctcagtcttt

SEQ ID NO: 1603663 - DNA, 25 bp, Homo sapien
tgtcgccctgtcgtctgtgttgtga

SEQ ID NO: 1603664 - DNA, 25 bp, Homo sapien
ggttgccaccgccatacttctgtcg

SEQ ID NO: 1603665 - DNA, 25 bp, Homo sapien
tttgagtaggaggtactcccaagaa

SEQ ID NO: 1603666 - DNA, 25 bp, Homo sapien
gatgtttgagtaggaggtactccca

SEQ ID NO: 1603667 - DNA, 25 bp, Homo sapien
gagtaggaggtactcccaagaaatc

SEQ ID NO: 1603668 - DNA, 25 bp, Homo sapien
tgtttgagtaggaggtactcccaag

SEQ ID NO: 1603669 - DNA, 25 bp, Homo sapien
ggaatggaggagaaacaaagacatc

SEQ ID NO: 1603670 - DNA, 25 bp, Homo sapien
tgtaactggttgtgatcaattagtt

SEQ ID NO: 1603671 - DNA, 25 bp, Homo sapien
tgggaatggaggagaaacaaagaca

SEQ ID NO: 1603672 - DNA, 25 bp, Homo sapien
cagtgggaatggaggagaaacaaag

SEQ ID NO: 1603673 - DNA, 25 bp, Homo sapien
atcccagctactcgggagactgagg

SEQ ID NO: 1603674 - DNA, 25 bp, Homo sapien
cggtgagccgagatcccgccgttgc

SEQ ID NO: 1603675 - DNA, 25 bp, Homo sapien
gcctggcgtggtggcgcgtgcttgt

SEQ ID NO: 1603676 - DNA, 25 bp, Homo sapien
caggagaatcgcttgaaccctggag

SEQ ID NO: 1603677 - DNA, 25 bp, Homo sapien
ttttcaaggtatgggctgggtagct

SEQ ID NO: 1603678 - DNA, 25 bp, Homo sapien
caaggtatgggctgggtagcttatt

SEQ ID NO: 1603679 - DNA, 25 bp, Homo sapien
ggctgggtagcttatttagcttacc

SEQ ID NO: 1603680 - DNA, 25 bp, Homo sapien
aaacattttcaaggtatgggctggg

SEQ ID NO: 1603681 - DNA, 25 bp, Homo sapien
ttaaagtaaccattctatcatacat

SEQ ID NO: 1603682 - DNA, 25 bp, Homo sapien
tattaaagtaaccattctatcatac

SEQ ID NO: 1603683 - DNA, 25 bp, Homo sapien
ttatattaaagtaaccattctatca

SEQ ID NO: 1603684 - DNA, 25 bp, Homo sapien
taaagtaaccattctatcatacata

SEQ ID NO: 1603685 - DNA, 25 bp, Homo sapien
taggtagaaccttagtgcactacaa

SEQ ID NO: 1603686 - DNA, 25 bp, Homo sapien
tctgggttgctgaacacatggcgag

SEQ ID NO: 1603687 - DNA, 25 bp, Homo sapien
tgaatgagaatcacccagtcgtggt

SEQ ID NO: 1603688 - DNA, 25 bp, Homo sapien
caaacactttggtccaattgctgct

SEQ ID NO: 1603689 - DNA, 25 bp, Homo sapien
catattggccccataggactcaagg

SEQ ID NO: 1603690 - DNA, 25 bp, Homo sapien
ggccccataggactcaaggtgattt

SEQ ID NO: 1603691 - DNA, 25 bp, Homo sapien
ttcaaaaacatattggccccatagg

SEQ ID NO: 1603692 - DNA, 25 bp, Homo sapien
cccataggactcaaggtgatttttt

SEQ ID NO: 1603693 - DNA, 25 bp, Homo sapien
tcacagtgaccaccggataacatgg

SEQ ID NO: 1603694 - DNA, 25 bp, Homo sapien
tctttgacgacacttatgccactgg

SEQ ID NO: 1603695 - DNA, 25 bp, Homo sapien
aaaatatgcctgacatccacatggc

SEQ ID NO: 1603696 - DNA, 25 bp, Homo sapien
tgttgccaagaaaccgcattagtgt

SEQ ID NO: 1603697 - DNA, 25 bp, Homo sapien
ccatctagttggtttaatcaagaac

SEQ ID NO: 1603698 - DNA, 25 bp, Homo sapien
gtagacctcttaaaccaactcaatc

SEQ ID NO: 1603699 - DNA, 25 bp, Homo sapien
taatccgtagaaacaacaatgcttg

SEQ ID NO: 1603700 - DNA, 25 bp, Homo sapien
acaatgcttgcaatacaaagtagac

SEQ ID NO: 1603701 - DNA, 25 bp, Homo sapien
gaattgtattacgaaaccatccaag

SEQ ID NO: 1603702 - DNA, 25 bp, Homo sapien
tctgaggaacagagacaagtgattt

SEQ ID NO: 1603703 - DNA, 25 bp, Homo sapien
gatattctcgattaacaagccaaag

SEQ ID NO: 1603704 - DNA, 25 bp, Homo sapien
tatctggagacctacaactctgagg

SEQ ID NO: 1603705 - DNA, 25 bp, Homo sapien
tcgacatgaactggcacgaataaag

SEQ ID NO: 1603706 - DNA, 25 bp, Homo sapien
ttctcgacatgaactggcacgaata

SEQ ID NO: 1603707 - DNA, 25 bp, Homo sapien
catgaactggcacgaataaaggctt

SEQ ID NO: 1603708 - DNA, 25 bp, Homo sapien
gacatgaactggcacgaataaaggc

SEQ ID NO: 1603709 - DNA, 25 bp, Homo sapien
gaatttgaagttgtgaagcacatct

SEQ ID NO: 1603710 - DNA, 25 bp, Homo sapien
aatttgaagttgtgaagcacatcta

SEQ ID NO: 1603711 - DNA, 25 bp, Homo sapien
tcatgtactggaagggtagtggaac

SEQ ID NO: 1603712 - DNA, 25 bp, Homo sapien
catgcctttgaaggtccgaggtaca

SEQ ID NO: 1603713 - DNA, 25 bp, Homo sapien
tcacatggtgttattccaggaagag

SEQ ID NO: 1603714 - DNA, 25 bp, Homo sapien
taagagatgaatgacccgtgccaac

SEQ ID NO: 1603715 - DNA, 25 bp, Homo sapien
ccctgttgtccaaattggagtgtag

SEQ ID NO: 1603716 - DNA, 25 bp, Homo sapien
ccagcccagcgtatgttacatttaa

SEQ ID NO: 1603717 - DNA, 25 bp, Homo sapien
tccagcaatcctttggtctgaaagc

SEQ ID NO: 1603718 - DNA, 25 bp, Homo sapien
agtgcccagcccagcgtatgttaca

SEQ ID NO: 1603719 - DNA, 25 bp, Homo sapien
atgttctgaactttccatgtttttc

SEQ ID NO: 1603720 - DNA, 25 bp, Homo sapien
cttcaatgttctgaactttccatgt

SEQ ID NO: 1603721 - DNA, 25 bp, Homo sapien
caatgttctgaactttccatgtttt

SEQ ID NO: 1603722 - DNA, 25 bp, Homo sapien
tcaatgttctgaactttccatgttt

SEQ ID NO: 1603723 - DNA, 25 bp, Homo sapien
tgggaagtaatattgtcattcttac

SEQ ID NO: 1603724 - DNA, 25 bp, Homo sapien
ggtcaggttcttgaaggtttcctgc

SEQ ID NO: 1603725 - DNA, 25 bp, Homo sapien
ctacagaggtcaggttcttgaaggt

SEQ ID NO: 1603726 - DNA, 25 bp, Homo sapien
cagaggtcaggttcttgaaggtttc

SEQ ID NO: 1603727 - DNA, 25 bp, Homo sapien
aggtcaggttcttgaaggtttcctg

SEQ ID NO: 1603728 - DNA, 25 bp, Homo sapien
cacatccctgtagagattcttctgg

SEQ ID NO: 1603729 - DNA, 25 bp, Homo sapien
cctgggtgaagctgacagccacatc

SEQ ID NO: 1603730 - DNA, 25 bp, Homo sapien
cttctgggaaggatccagcaaagcc

SEQ ID NO: 1603731 - DNA, 25 bp, Homo sapien
ccctgtagagattcttctgggaagg

SEQ ID NO: 1603732 - DNA, 25 bp, Homo sapien
agaaggaacagggacagatggttac

SEQ ID NO: 1603733 - DNA, 25 bp, Homo sapien
cagaaggaacagggacagatggtta

SEQ ID NO: 1603734 - DNA, 25 bp, Homo sapien
ccactctgtgttgccctgcaaggtg

SEQ ID NO: 1603735 - DNA, 25 bp, Homo sapien
cccactctgtgttgccctgcaaggt

SEQ ID NO: 1603736 - DNA, 25 bp, Homo sapien
cactctgtgttgccctgcaaggtgt

SEQ ID NO: 1603737 - DNA, 25 bp, Homo sapien
actctgtgttgccctgcaaggtgtg

SEQ ID NO: 1603738 - DNA, 25 bp, Homo sapien
ggctgatattcagtaggccaggaga

SEQ ID NO: 1603739 - DNA, 25 bp, Homo sapien
cattttggttcagccccaggcggtt

SEQ ID NO: 1603740 - DNA, 25 bp, Homo sapien
gagtgtaccaggagtctcctcccat

SEQ ID NO: 1603741 - DNA, 25 bp, Homo sapien
cctcaggctatcctctgggaggact

SEQ ID NO: 1603742 - DNA, 25 bp, Homo sapien
tgcaggcggcagagcgacagaagtt

SEQ ID NO: 1603743 - DNA, 25 bp, Homo sapien
ggaaatctggtatcccgacaacaac

SEQ ID NO: 1603744 - DNA, 25 bp, Homo sapien
tctagggctcccgtgaatagtgcgg

SEQ ID NO: 1603745 - DNA, 25 bp, Homo sapien
ggcctctcggagtaggaaatctggt

SEQ ID NO: 1603746 - DNA, 25 bp, Homo sapien
cacatgagtaatctaaaagaaacac

SEQ ID NO: 1603747 - DNA, 25 bp, Homo sapien
ccacatgagtaatctaaaagaaaca

SEQ ID NO: 1603748 - DNA, 25 bp, Homo sapien
acatgagtaatctaaaagaaacaca

SEQ ID NO: 1603749 - DNA, 25 bp, Homo sapien
ccttctctgattcatcgtagaccca

SEQ ID NO: 1603750 - DNA, 25 bp, Homo sapien
tagacccagaatctgccagtcacca

SEQ ID NO: 1603751 - DNA, 25 bp, Homo sapien
attacggccaacttttatctaagag

SEQ ID NO: 1603752 - DNA, 25 bp, Homo sapien
tctaccaagtcaacatcaagcatta

SEQ ID NO: 1603753 - DNA, 25 bp, Homo sapien
ggctgaatttgtttgtctcttaagt

SEQ ID NO: 1603754 - DNA, 25 bp, Homo sapien
tttggctgaatttgtttgtctctta

SEQ ID NO: 1603755 - DNA, 25 bp, Homo sapien
gcattttcttttggctgaatttgtt

SEQ ID NO: 1603756 - DNA, 25 bp, Homo sapien
ttcttttggctgaatttgtttgtct

SEQ ID NO: 1603757 - DNA, 25 bp, Homo sapien
taagttcagcataactctgcacttg

SEQ ID NO: 1603758 - DNA, 25 bp, Homo sapien
caggtggtacattatgggtgccttt

SEQ ID NO: 1603759 - DNA, 25 bp, Homo sapien
taaccagggaatctacatctatacc

SEQ ID NO: 1603760 - DNA, 25 bp, Homo sapien
ggttcatctgcccatgagttctgta

SEQ ID NO: 1603761 - DNA, 25 bp, Homo sapien
caatgtctgtcttgcgtacagcgac

SEQ ID NO: 1603762 - DNA, 25 bp, Homo sapien
cagcgaccaactccactttctaaga

SEQ ID NO: 1603763 - DNA, 25 bp, Homo sapien
tgtcttgcgtacagcgaccaactcc

SEQ ID NO: 1603764 - DNA, 25 bp, Homo sapien
cagccccaatgtctgtcttgcgtac

SEQ ID NO: 1603765 - DNA, 25 bp, Homo sapien
gaagctctcatgcactaagatcaca

SEQ ID NO: 1603766 - DNA, 25 bp, Homo sapien
gattgtgagcccaggaatatgaagc

SEQ ID NO: 1603767 - DNA, 25 bp, Homo sapien
taatgttcatagatcaactcaggcc

SEQ ID NO: 1603768 - DNA, 25 bp, Homo sapien
tccttctaacatgcacgacttcgtg

SEQ ID NO: 1603769 - DNA, 25 bp, Homo sapien
gaaaactcgtgagaacgaatggcat

SEQ ID NO: 1603770 - DNA, 25 bp, Homo sapien
ccgatagccagccatttattatagg

SEQ ID NO: 1603771 - DNA, 25 bp, Homo sapien
cgaatggcataaaatacgtagtgta

SEQ ID NO: 1603772 - DNA, 25 bp, Homo sapien
aatacgtagtgtacccgatagccag

SEQ ID NO: 1603773 - DNA, 25 bp, Homo sapien
taaggtcttactggaggtgtgtctc

SEQ ID NO: 1603774 - DNA, 25 bp, Homo sapien
cagaataattttgcgatggttccca

SEQ ID NO: 1603775 - DNA, 25 bp, Homo sapien
caaaaatttttgctcctgggctact

SEQ ID NO: 1603776 - DNA, 25 bp, Homo sapien
catgattggattcggtggcttctag

SEQ ID NO: 1603777 - DNA, 25 bp, Homo sapien
agtgttggagctacagggtttttct

SEQ ID NO: 1603778 - DNA, 25 bp, Homo sapien
tcatggattttaacgctcgaggcac

SEQ ID NO: 1603779 - DNA, 25 bp, Homo sapien
gctcgaggcacatccaaaggcttta

SEQ ID NO: 1603780 - DNA, 25 bp, Homo sapien
ctttcgaagtgttggagctacaggg

SEQ ID NO: 1603781 - DNA, 25 bp, Homo sapien
tcatgatatcgaacggaattgaaag

SEQ ID NO: 1603782 - DNA, 25 bp, Homo sapien
gatatcgaacggaattgaaagaaac

SEQ ID NO: 1603783 - DNA, 25 bp, Homo sapien
tgatatcgaacggaattgaaagaaa

SEQ ID NO: 1603784 - DNA, 25 bp, Homo sapien
catgatatcgaacggaattgaaaga

SEQ ID NO: 1603785 - DNA, 25 bp, Homo sapien
ctattaagggatgcatgacccacgc

SEQ ID NO: 1603786 - DNA, 25 bp, Homo sapien
gaatgcttgaacgggaaataaagct

SEQ ID NO: 1603787 - DNA, 25 bp, Homo sapien
catgtgttcgaaagtaggggagatc

SEQ ID NO: 1603788 - DNA, 25 bp, Homo sapien
agtaggggagatcactgaaggcttt

SEQ ID NO: 1603789 - DNA, 25 bp, Homo sapien
gtttctcctgggatttttgtactca

SEQ ID NO: 1603790 - DNA, 25 bp, Homo sapien
tttttgtactcatcttcaattttct

SEQ ID NO: 1603791 - DNA, 25 bp, Homo sapien
tcaattttctgatctttccattttt

SEQ ID NO: 1603792 - DNA, 25 bp, Homo sapien
caattttctgatctttccatttttt

SEQ ID NO: 1603793 - DNA, 25 bp, Homo sapien
aagccaggttcctgaaggtttcctg

SEQ ID NO: 1603794 - DNA, 25 bp, Homo sapien
ggttcctgaaggtttcctgcatcac

SEQ ID NO: 1603795 - DNA, 25 bp, Homo sapien
cctcctgggtgaagttcacatctac

SEQ ID NO: 1603796 - DNA, 25 bp, Homo sapien
gttcacatctacatcctcaaagacc

SEQ ID NO: 1603797 - DNA, 25 bp, Homo sapien
aatctgctcagctgctaagatcagc

SEQ ID NO: 1603798 - DNA, 25 bp, Homo sapien
gctaagatcagctatactcttgtat

SEQ ID NO: 1603799 - DNA, 25 bp, Homo sapien
gcaagcagtattctcatgcattcta

SEQ ID NO: 1603800 - DNA, 25 bp, Homo sapien
cagtaaccaggcttgaatctgctca

SEQ ID NO: 1603801 - DNA, 25 bp, Homo sapien
gatgtgaaccactaaccttgaccat

SEQ ID NO: 1603802 - DNA, 25 bp, Homo sapien
tataggatcaacagcaaacaacaca

SEQ ID NO: 1603803 - DNA, 25 bp, Homo sapien
aatgagactggtgtattctgcaggc

SEQ ID NO: 1603804 - DNA, 25 bp, Homo sapien
catacccgtgatgaagtggcattca

SEQ ID NO: 1603805 - DNA, 25 bp, Homo sapien
gggcgatggagcgacagaagctatg

SEQ ID NO: 1603806 - DNA, 25 bp, Homo sapien
ggatccctctaacagtccagtcaca

SEQ ID NO: 1603807 - DNA, 25 bp, Homo sapien
gagatcccgacctccctttggtgca

SEQ ID NO: 1603808 - DNA, 25 bp, Homo sapien
tccagtcacagtgcgggcgatggag

SEQ ID NO: 1603809 - DNA, 25 bp, Homo sapien
agatgttatacccatgaccaggtgt

SEQ ID NO: 1603810 - DNA, 25 bp, Homo sapien
gagggcctgatgcctagatgttata

SEQ ID NO: 1603811 - DNA, 25 bp, Homo sapien
ctttcaagggatatttcttcattct

SEQ ID NO: 1603812 - DNA, 25 bp, Homo sapien
tttcaagggatatttcttcattctg

SEQ ID NO: 1603813 - DNA, 25 bp, Homo sapien
ttcatctgagttgctcaaatgtgtg

SEQ ID NO: 1603814 - DNA, 25 bp, Homo sapien
ccaccctgtacgatcttgtggtgaa

SEQ ID NO: 1603815 - DNA, 25 bp, Homo sapien
ttattgtccaatcaggcgcgcctca

SEQ ID NO: 1603816 - DNA, 25 bp, Homo sapien
caggagaccccgaagatgggaaatg

SEQ ID NO: 1603817 - DNA, 25 bp, Homo sapien
gagctagactcattacacacggcga

SEQ ID NO: 1603818 - DNA, 25 bp, Homo sapien
taaagggtcactacatctggcaact

SEQ ID NO: 1603819 - DNA, 25 bp, Homo sapien
tcagaaacagctgcgacaggatgcc

SEQ ID NO: 1603820 - DNA, 25 bp, Homo sapien
caactgaggctggaattcgccgcgc

SEQ ID NO: 1603821 - DNA, 25 bp, Homo sapien
gatgacaggctcacccatagcccaa

SEQ ID NO: 1603822 - DNA, 25 bp, Homo sapien
ctcagtgtcacagtgtgcccatgtg

SEQ ID NO: 1603823 - DNA, 25 bp, Homo sapien
aaagaagttttatgaagtgagcagt

SEQ ID NO: 1603824 - DNA, 25 bp, Homo sapien
aagttgttatgcacataaagatggg

SEQ ID NO: 1603825 - DNA, 25 bp, Homo sapien
ccttgcagactaagaatgtacgttg

SEQ ID NO: 1603826 - DNA, 25 bp, Homo sapien
agtcaggagcacttttccttgcaga

SEQ ID NO: 1603827 - DNA, 25 bp, Homo sapien
gggttatcccgaggctagcatttct

SEQ ID NO: 1603828 - DNA, 25 bp, Homo sapien
taaaatgaggcgcttatccacaatg

SEQ ID NO: 1603829 - DNA, 25 bp, Homo sapien
ttttgtagaaggaatgtgagataag

SEQ ID NO: 1603830 - DNA, 25 bp, Homo sapien
ccagccatagatttgtaccactgaa

SEQ ID NO: 1603831 - DNA, 25 bp, Homo sapien
gaggttctaagataacttgggactc

SEQ ID NO: 1603832 - DNA, 25 bp, Homo sapien
ggccagccatagatttgtaccactg

SEQ ID NO: 1603833 - DNA, 25 bp, Homo sapien
gtacagggactgtacatgaaatctg

SEQ ID NO: 1603834 - DNA, 25 bp, Homo sapien
acagggactgtacatgaaatctgag

SEQ ID NO: 1603835 - DNA, 25 bp, Homo sapien
tacagggactgtacatgaaatctga

SEQ ID NO: 1603836 - DNA, 25 bp, Homo sapien
cagggactgtacatgaaatctgagg

SEQ ID NO: 1603837 - DNA, 25 bp, Homo sapien
cagtctcctgcagtttagttcatgc

SEQ ID NO: 1603838 - DNA, 25 bp, Homo sapien
ccagtctcctgcagtttagttcatg

SEQ ID NO: 1603839 - DNA, 25 bp, Homo sapien
agtctcctgcagtttagttcatgca

SEQ ID NO: 1603840 - DNA, 25 bp, Homo sapien
gatgttaacgttccagttggcctct

SEQ ID NO: 1603841 - DNA, 25 bp, Homo sapien
tctgatgttaacgttccagttggcc

SEQ ID NO: 1603842 - DNA, 25 bp, Homo sapien
tagtgtctgatgttaacgttccagt

SEQ ID NO: 1603843 - DNA, 25 bp, Homo sapien
agctggattagtgtctgatgttaac

SEQ ID NO: 1603844 - DNA, 25 bp, Homo sapien
gactcaattcatgagagttcacact

SEQ ID NO: 1603845 - DNA, 25 bp, Homo sapien
tcccagatatgtgtagaggaggaca

SEQ ID NO: 1603846 - DNA, 25 bp, Homo sapien
tacagattcttcacggaaaaatcca

SEQ ID NO: 1603847 - DNA, 25 bp, Homo sapien
caccaagccgtgacatatcccagat

SEQ ID NO: 1603848 - DNA, 25 bp, Homo sapien
tgctggtcaccaccggacagaagct

SEQ ID NO: 1603849 - DNA, 25 bp, Homo sapien
gatcagtgctggtcaccaccggaca

SEQ ID NO: 1603850 - DNA, 25 bp, Homo sapien
agtgctggtcaccaccggacagaag

SEQ ID NO: 1603851 - DNA, 25 bp, Homo sapien
ggtcaccaccggacagaagctgtgg

SEQ ID NO: 1603852 - DNA, 25 bp, Homo sapien
gagccagtacctttgctggaagcta

SEQ ID NO: 1603853 - DNA, 25 bp, Homo sapien
gagcaggcagttccacactccgtgt

SEQ ID NO: 1603854 - DNA, 25 bp, Homo sapien
cacactccgtgtccaattgagccag

SEQ ID NO: 1603855 - DNA, 25 bp, Homo sapien
gatcaggaatttgggataagcggct

SEQ ID NO: 1603856 - DNA, 25 bp, Homo sapien
tattgttaggatgagcatactaccc

SEQ ID NO: 1603857 - DNA, 25 bp, Homo sapien
aagaggcctgtatcttgtacactga

SEQ ID NO: 1603858 - DNA, 25 bp, Homo sapien
tgcccagccccaagttgcgttttta

SEQ ID NO: 1603859 - DNA, 25 bp, Homo sapien
aatcgcaagtaatcccatgttcatg

SEQ ID NO: 1603860 - DNA, 25 bp, Homo sapien
gatcatttgcttgggaggcagcagt

SEQ ID NO: 1603861 - DNA, 25 bp, Homo sapien
tcatttgcttgggaggcagcagttt

SEQ ID NO: 1603862 - DNA, 25 bp, Homo sapien
gaggatcatttgcttgggaggcagc

SEQ ID NO: 1603863 - DNA, 25 bp, Homo sapien
tgggaggatcatttgcttgggaggc

SEQ ID NO: 1603864 - DNA, 25 bp, Homo sapien
gatagtacccatccttgcatgtatg

SEQ ID NO: 1603865 - DNA, 25 bp, Homo sapien
tgtaatgaacatatgcgagtggcag

SEQ ID NO: 1603866 - DNA, 25 bp, Homo sapien
tttaccccttgcagaaaccagtcta

SEQ ID NO: 1603867 - DNA, 25 bp, Homo sapien
cattgatgaccacccatgctgtaca

SEQ ID NO: 1603868 - DNA, 25 bp, Homo sapien
ggttggtcccagattcctagcctca

SEQ ID NO: 1603869 - DNA, 25 bp, Homo sapien
caactcaccacaaggcgaagtctta

SEQ ID NO: 1603870 - DNA, 25 bp, Homo sapien
tggtcaacaatttaactgaggtact

SEQ ID NO: 1603871 - DNA, 25 bp, Homo sapien
tacaacttgttggtgcgtcccaggc

SEQ ID NO: 1603872 - DNA, 25 bp, Homo sapien
aaagctaccaggtgaccataatgga

SEQ ID NO: 1603873 - DNA, 25 bp, Homo sapien
gacaaagctaccaggtgaccataat

SEQ ID NO: 1603874 - DNA, 25 bp, Homo sapien
gctaccaggtgaccataatggatca

SEQ ID NO: 1603875 - DNA, 25 bp, Homo sapien
taccaggtgaccataatggatcaaa

SEQ ID NO: 1603876 - DNA, 25 bp, Homo sapien
gacaaaagcatgctttgttcctgtg

SEQ ID NO: 1603877 - DNA, 25 bp, Homo sapien
ctataggtgtgattctagtggtctc

SEQ ID NO: 1603878 - DNA, 25 bp, Homo sapien
tcacgatctgcctgacctaagacat

SEQ ID NO: 1603879 - DNA, 25 bp, Homo sapien
tttcacatagactgtgtcagagcag

SEQ ID NO: 1603880 - DNA, 25 bp, Homo sapien
cctcaatgttcatttatgaaaataa

SEQ ID NO: 1603881 - DNA, 25 bp, Homo sapien
gcactaagccaggcaacgcagcaca

SEQ ID NO: 1603882 - DNA, 25 bp, Homo sapien
aataagtaggaacccagagtgcaga

SEQ ID NO: 1603883 - DNA, 25 bp, Homo sapien
tttacagaataatctcacctcaatg

SEQ ID NO: 1603884 - DNA, 25 bp, Homo sapien
tacattcatgcaactaccctccagt

SEQ ID NO: 1603885 - DNA, 25 bp, Homo sapien
tctcatgagcctagaagtccgcggc

SEQ ID NO: 1603886 - DNA, 25 bp, Homo sapien
caaaaagggatgtggcactgataaa

SEQ ID NO: 1603887 - DNA, 25 bp, Homo sapien
caagataatgttgcctgtctctaca

SEQ ID NO: 1603888 - DNA, 25 bp, Homo sapien
gattcctttcatgtgctcgagcaga

SEQ ID NO: 1603889 - DNA, 25 bp, Homo sapien
gagacaagtaagttttcccacacag

SEQ ID NO: 1603890 - DNA, 25 bp, Homo sapien
cacatggtattgtaaggatgcacgc

SEQ ID NO: 1603891 - DNA, 25 bp, Homo sapien
catgtcttcgggcagaactgcaaca

SEQ ID NO: 1603892 - DNA, 25 bp, Homo sapien
cagtttgtgtctggtgtaagatcta

SEQ ID NO: 1603893 - DNA, 25 bp, Homo sapien
cttatacagtttgtgtctggtgtaa

SEQ ID NO: 1603894 - DNA, 25 bp, Homo sapien
tacagtttgtgtctggtgtaagatc

SEQ ID NO: 1603895 - DNA, 25 bp, Homo sapien
gtgtctggtgtaagatctaatgtgc

SEQ ID NO: 1603896 - DNA, 25 bp, Homo sapien
gatttgcaatctggctgaaaccttc

SEQ ID NO: 1603897 - DNA, 25 bp, Homo sapien
gctgaaaccttctccgccatgacta

SEQ ID NO: 1603898 - DNA, 25 bp, Homo sapien
tcttgttcagactgagatttgcaat

SEQ ID NO: 1603899 - DNA, 25 bp, Homo sapien
tgaatgatggctcaagacttttcca

SEQ ID NO: 1603900 - DNA, 25 bp, Homo sapien
ctcccctggtttttgtactgctctt

SEQ ID NO: 1603901 - DNA, 25 bp, Homo sapien
acaacatgatggaatgatttcattt

SEQ ID NO: 1603902 - DNA, 25 bp, Homo sapien
caacaacatgatggaatgatttcat

SEQ ID NO: 1603903 - DNA, 25 bp, Homo sapien
aacaacatgatggaatgatttcatt

SEQ ID NO: 1603904 - DNA, 25 bp, Homo sapien
ctatagtggccaggttcctgaaggt

SEQ ID NO: 1603905 - DNA, 25 bp, Homo sapien
ccaggttcctgaaggtttcccacat

SEQ ID NO: 1603906 - DNA, 25 bp, Homo sapien
tggccaggttcctgaaggtttccca

SEQ ID NO: 1603907 - DNA, 25 bp, Homo sapien
tagtggccaggttcctgaaggtttc

SEQ ID NO: 1603908 - DNA, 25 bp, Homo sapien
cacgtctctgtagagttttttctgt

SEQ ID NO: 1603909 - DNA, 25 bp, Homo sapien
ctgtgaaggatccagcaaagtccat

SEQ ID NO: 1603910 - DNA, 25 bp, Homo sapien
tttctgtgaaggatccagcaaagtc

SEQ ID NO: 1603911 - DNA, 25 bp, Homo sapien
agttttttctgtgaaggatccagca

SEQ ID NO: 1603912 - DNA, 25 bp, Homo sapien
agccacatcttcaaaggtcactgag

SEQ ID NO: 1603913 - DNA, 25 bp, Homo sapien
acagccacatcttcaaaggtcactg

SEQ ID NO: 1603914 - DNA, 25 bp, Homo sapien
aagttcacagccacatcttcaaagg

SEQ ID NO: 1603915 - DNA, 25 bp, Homo sapien
gttcacagccacatcttcaaaggtc

SEQ ID NO: 1603916 - DNA, 25 bp, Homo sapien
ggaatccttcatccaactacagcag

SEQ ID NO: 1603917 - DNA, 25 bp, Homo sapien
taagatagactacattgtgggacat

SEQ ID NO: 1603918 - DNA, 25 bp, Homo sapien
tctaaacgacccacggatgaaagta

SEQ ID NO: 1603919 - DNA, 25 bp, Homo sapien
gaaggacacaggtgaactgaatagc

SEQ ID NO: 1603920 - DNA, 25 bp, Homo sapien
ctccaaaataggtgggaccacaggc

SEQ ID NO: 1603921 - DNA, 25 bp, Homo sapien
ccaaaataggtgggaccacaggcac

SEQ ID NO: 1603922 - DNA, 25 bp, Homo sapien
ctcagcctccaaaataggtgggacc

SEQ ID NO: 1603923 - DNA, 25 bp, Homo sapien
agcctccaaaataggtgggaccaca

SEQ ID NO: 1603924 - DNA, 25 bp, Homo sapien
ggcaacataaagaggcacgctctct

SEQ ID NO: 1603925 - DNA, 25 bp, Homo sapien
caatcgagtcgacgttttcaaggtg

SEQ ID NO: 1603926 - DNA, 25 bp, Homo sapien
cattcaagcctcagcgagagggaga

SEQ ID NO: 1603927 - DNA, 25 bp, Homo sapien
ggaattgtaagtctaagccctggaa

SEQ ID NO: 1603928 - DNA, 25 bp, Homo sapien
tgcccggcctgcctactcattttca

SEQ ID NO: 1603929 - DNA, 25 bp, Homo sapien
cccggcctgcctactcattttcagc

SEQ ID NO: 1603930 - DNA, 25 bp, Homo sapien
gcctactcattttcagccaaaaaat

SEQ ID NO: 1603931 - DNA, 25 bp, Homo sapien
gcctgcctactcattttcagccaaa

SEQ ID NO: 1603932 - DNA, 25 bp, Homo sapien
gtgacaaacatattcccaagctggg

SEQ ID NO: 1603933 - DNA, 25 bp, Homo sapien
taactctgggagctcaacatgtcct

SEQ ID NO: 1603934 - DNA, 25 bp, Homo sapien
ccaagagtctatcagtccctggtga

SEQ ID NO: 1603935 - DNA, 25 bp, Homo sapien
cctggagtcagtttaaggttctgcc

SEQ ID NO: 1603936 - DNA, 25 bp, Homo sapien
tagttcatccacacctggatactcc

SEQ ID NO: 1603937 - DNA, 25 bp, Homo sapien
aaccacaagtaaatagttcatccac

SEQ ID NO: 1603938 - DNA, 25 bp, Homo sapien
atctgggaagcactccaaccacaag

SEQ ID NO: 1603939 - DNA, 25 bp, Homo sapien
tgagaatctgggaagcactccaacc

SEQ ID NO: 1603940 - DNA, 25 bp, Homo sapien
tgtggatttaggtatactcagggtg

SEQ ID NO: 1603941 - DNA, 25 bp, Homo sapien
gaatgtgggtaggtacatgcgaata

SEQ ID NO: 1603942 - DNA, 25 bp, Homo sapien
ggaaccaatcttcttgcatatagca

SEQ ID NO: 1603943 - DNA, 25 bp, Homo sapien
gggtaggtacatgcgaatattccat

SEQ ID NO: 1603944 - DNA, 25 bp, Homo sapien
ctattaaaggaactgagagaactga

SEQ ID NO: 1603945 - DNA, 25 bp, Homo sapien
cattccatacacttatagaatatcc

SEQ ID NO: 1603946 - DNA, 25 bp, Homo sapien
ttaccacgtttacattcacaggatt

SEQ ID NO: 1603947 - DNA, 25 bp, Homo sapien
gaatgtgataaaaccaatgaatgct

SEQ ID NO: 1603948 - DNA, 25 bp, Homo sapien
tcatgttctcgacagaaactggaac

SEQ ID NO: 1603949 - DNA, 25 bp, Homo sapien
gttctttcatgttctcgacagaaac

SEQ ID NO: 1603950 - DNA, 25 bp, Homo sapien
tctttcatgttctcgacagaaactg

SEQ ID NO: 1603951 - DNA, 25 bp, Homo sapien
tttcatgttctcgacagaaactgga

SEQ ID NO: 1603952 - DNA, 25 bp, Homo sapien
aggaaagagggccaaaagaatgctt

SEQ ID NO: 1603953 - DNA, 25 bp, Homo sapien
tttcatgtcttagaaggaaagaggg

SEQ ID NO: 1603954 - DNA, 25 bp, Homo sapien
gtcctttcatgtcttagaaggaaag

SEQ ID NO: 1603955 - DNA, 25 bp, Homo sapien
catgtcttagaaggaaagagggcca

SEQ ID NO: 1603956 - DNA, 25 bp, Homo sapien
ccacaaatttgacactcataagatt

SEQ ID NO: 1603957 - DNA, 25 bp, Homo sapien
gaaatacactaggagaatcaaaggc

SEQ ID NO: 1603958 - DNA, 25 bp, Homo sapien
gagtcctttcatggcgacaaaagta

SEQ ID NO: 1603959 - DNA, 25 bp, Homo sapien
tgagcgatgagataacaatttccca

SEQ ID NO: 1603960 - DNA, 25 bp, Homo sapien
ccacatgcatctactctggcgggag

SEQ ID NO: 1603961 - DNA, 25 bp, Homo sapien
gaaaggagtggcgataacttaagcc

SEQ ID NO: 1603962 - DNA, 25 bp, Homo sapien
catatgtcttcgaaggtttccagga

SEQ ID NO: 1603963 - DNA, 25 bp, Homo sapien
catattcatgacactcccggtgttt

SEQ ID NO: 1603964 - DNA, 25 bp, Homo sapien
ctgagattttggtgctgatcatcaa

SEQ ID NO: 1603965 - DNA, 25 bp, Homo sapien
gattttggtgctgatcatcaatgtt

SEQ ID NO: 1603966 - DNA, 25 bp, Homo sapien
tggtgctgatcatcaatgttctggt

SEQ ID NO: 1603967 - DNA, 25 bp, Homo sapien
tttggtgctgatcatcaatgttctg

SEQ ID NO: 1603968 - DNA, 25 bp, Homo sapien
agttcaggttcctaatggtttctcg

SEQ ID NO: 1603969 - DNA, 25 bp, Homo sapien
gttcctaatggtttctcgcatcaca

SEQ ID NO: 1603970 - DNA, 25 bp, Homo sapien
ctatacagttcaggttcctaatggt

SEQ ID NO: 1603971 - DNA, 25 bp, Homo sapien
tcaggttcctaatggtttctcgcat

SEQ ID NO: 1603972 - DNA, 25 bp, Homo sapien
gaaaatacgactcattaatggaaac

SEQ ID NO: 1603973 - DNA, 25 bp, Homo sapien
cagatgtgagcaaccagtggaaaaa

SEQ ID NO: 1603974 - DNA, 25 bp, Homo sapien
aaacatcactaaaggtattcaacag

SEQ ID NO: 1603975 - DNA, 25 bp, Homo sapien
gctgcaagatacaacaacttaaatg

SEQ ID NO: 1603976 - DNA, 25 bp, Homo sapien
cagtagtttatagctcccagttgaa

SEQ ID NO: 1603977 - DNA, 25 bp, Homo sapien
tgaatgctatactacaaactctggg

SEQ ID NO: 1603978 - DNA, 25 bp, Homo sapien
tataccagcactattcctgaagcca

SEQ ID NO: 1603979 - DNA, 25 bp, Homo sapien
gaagaacagtctatcacacttcgga

SEQ ID NO: 1603980 - DNA, 25 bp, Homo sapien
tggaagacctatattacattcagac

SEQ ID NO: 1603981 - DNA, 25 bp, Homo sapien
caagaagtcaatcctacacgacata

SEQ ID NO: 1603982 - DNA, 25 bp, Homo sapien
cagttctgcagaaaatcactaatga

SEQ ID NO: 1603983 - DNA, 25 bp, Homo sapien
gaaatacatgccattctagccctga

SEQ ID NO: 1603984 - DNA, 25 bp, Homo sapien
tcaaattgtatctgcctcaatggcc

SEQ ID NO: 1603985 - DNA, 25 bp, Homo sapien
tccggtatgaatagtcctccagctt

SEQ ID NO: 1603986 - DNA, 25 bp, Homo sapien
catgaaaggcgcaatgtaaccatcc

SEQ ID NO: 1603987 - DNA, 25 bp, Homo sapien
ccagtttcaagagacagacctaaag

SEQ ID NO: 1603988 - DNA, 25 bp, Homo sapien
tatccaccaaataacctccctcatc

SEQ ID NO: 1603989 - DNA, 25 bp, Homo sapien
tgtaaagtcaggcctttcagtgcat

SEQ ID NO: 1603990 - DNA, 25 bp, Homo sapien
cctcatccccatgagtcttcactgt

SEQ ID NO: 1603991 - DNA, 25 bp, Homo sapien
ggagtaccagtgcaattttactaca

SEQ ID NO: 1603992 - DNA, 25 bp, Homo sapien
gcttaccctttcatgccttacgtgg

SEQ ID NO: 1603993 - DNA, 25 bp, Homo sapien
aagcacaagtatctatccatctcag

SEQ ID NO: 1603994 - DNA, 25 bp, Homo sapien
tcagtgtttacaggagggaaggaaa

SEQ ID NO: 1603995 - DNA, 25 bp, Homo sapien
caaaattggcctccacttggagtca

SEQ ID NO: 1603996 - DNA, 25 bp, Homo sapien
caggaacagaccagacttatccact

SEQ ID NO: 1603997 - DNA, 25 bp, Homo sapien
acaggaacagaccagacttatccac

SEQ ID NO: 1603998 - DNA, 25 bp, Homo sapien
ggaacagaccagacttatccactgt

SEQ ID NO: 1603999 - DNA, 25 bp, Homo sapien
aacagaccagacttatccactgtcc

SEQ ID NO: 1604000 - DNA, 25 bp, Homo sapien
gatcgtaccacagcactcctgggtg

SEQ ID NO: 1604001 - DNA, 25 bp, Homo sapien
aaaaaagaaaaaggctgcgtgcagt

SEQ ID NO: 1604002 - DNA, 25 bp, Homo sapien
aaaaagaaaaaggctgcgtgcagtg

SEQ ID NO: 1604003 - DNA, 25 bp, Homo sapien
tgagatcgtaccacagcactcctgg

SEQ ID NO: 1604004 - DNA, 25 bp, Homo sapien
tctgataagccatgcgtcaccaagg

SEQ ID NO: 1604005 - DNA, 25 bp, Homo sapien
agtgctcagcaaccacattcctagg

SEQ ID NO: 1604006 - DNA, 25 bp, Homo sapien
gaaatcatttgtcttgtcccctgaa

SEQ ID NO: 1604007 - DNA, 25 bp, Homo sapien
cacagtcggagagagtccagaaggc

SEQ ID NO: 1604008 - DNA, 25 bp, Homo sapien
gatataccagaagattcctcccacc

SEQ ID NO: 1604009 - DNA, 25 bp, Homo sapien
caggaatgatataccagaagattcc

SEQ ID NO: 1604010 - DNA, 25 bp, Homo sapien
gaatgatataccagaagattcctcc

SEQ ID NO: 1604011 - DNA, 25 bp, Homo sapien
ttacaggaatgatataccagaagat

SEQ ID NO: 1604012 - DNA, 25 bp, Homo sapien
aagagtgacccaagggccgatatcc

SEQ ID NO: 1604013 - DNA, 25 bp, Homo sapien
gccctccatgagattggcagcttcc

SEQ ID NO: 1604014 - DNA, 25 bp, Homo sapien
cagcttccagcatcttagggtagcc

SEQ ID NO: 1604015 - DNA, 25 bp, Homo sapien
tagggtagccccagaaagttccata

SEQ ID NO: 1604016 - DNA, 25 bp, Homo sapien
cctgtaaaggacatactgagaaggc

SEQ ID NO: 1604017 - DNA, 25 bp, Homo sapien
tacagcagtgtcaggtggttattct

SEQ ID NO: 1604018 - DNA, 25 bp, Homo sapien
cagtgtcaggtggttattctcttct

SEQ ID NO: 1604019 - DNA, 25 bp, Homo sapien
gcatctgtgcctaggggagataaaa

SEQ ID NO: 1604020 - DNA, 25 bp, Homo sapien
agaatacggaacagaggtcaccagg

SEQ ID NO: 1604021 - DNA, 25 bp, Homo sapien
actagctcctggaacgtcacaccct

SEQ ID NO: 1604022 - DNA, 25 bp, Homo sapien
cccgtagtcagggtaggtcccagcg

SEQ ID NO: 1604023 - DNA, 25 bp, Homo sapien
tgcctcgcgcctgattgacaattct

SEQ ID NO: 1604024 - DNA, 25 bp, Homo sapien
tgggccattgatcaccacactcagg

SEQ ID NO: 1604025 - DNA, 25 bp, Homo sapien
gagtgtctgtgggccattgatcacc

SEQ ID NO: 1604026 - DNA, 25 bp, Homo sapien
ggagtgtctgtgggccattgatcac

SEQ ID NO: 1604027 - DNA, 25 bp, Homo sapien
agtgtctgtgggccattgatcacca

SEQ ID NO: 1604028 - DNA, 25 bp, Homo sapien
agccagcccatactgctcggggatg

SEQ ID NO: 1604029 - DNA, 25 bp, Homo sapien
tgtgctgaggctgtagcgcttgcac

SEQ ID NO: 1604030 - DNA, 25 bp, Homo sapien
tcagtctgggagtttggtattcagg

SEQ ID NO: 1604031 - DNA, 25 bp, Homo sapien
ggctgtagcgcttgcacatggccac

SEQ ID NO: 1604032 - DNA, 25 bp, Homo sapien
tagattcatgttaagaatgaggcac

SEQ ID NO: 1604033 - DNA, 25 bp, Homo sapien
gaaaacactattcgacttatgaacc

SEQ ID NO: 1604034 - DNA, 25 bp, Homo sapien
tcctattgcaaattctctggagcat

SEQ ID NO: 1604035 - DNA, 25 bp, Homo sapien
tgaagaaacttcaatccagcaaagt

SEQ ID NO: 1604036 - DNA, 25 bp, Homo sapien
ctgagcctgattttgataaactaac

SEQ ID NO: 1604037 - DNA, 25 bp, Homo sapien
tatgcaacaaagtaccccagaaagg

SEQ ID NO: 1604038 - DNA, 25 bp, Homo sapien
tgaatgtggaacactgagttgttac

SEQ ID NO: 1604039 - DNA, 25 bp, Homo sapien
ctgaactaaatgactaccagtggaa

SEQ ID NO: 1604040 - DNA, 25 bp, Homo sapien
taaaaaaggacttggcatgtgtcga

SEQ ID NO: 1604041 - DNA, 25 bp, Homo sapien
gaaccacgctcctgcaaatattagg

SEQ ID NO: 1604042 - DNA, 25 bp, Homo sapien
tgtgtcgatttatgtatgcccaggg

SEQ ID NO: 1604043 - DNA, 25 bp, Homo sapien
tgactgaaggcttccctacatattt

SEQ ID NO: 1604044 - DNA, 25 bp, Homo sapien
tgtctttgacatacactgggataaa

SEQ ID NO: 1604045 - DNA, 25 bp, Homo sapien
catacactgggataaacaaaggctt

SEQ ID NO: 1604046 - DNA, 25 bp, Homo sapien
gacatacactgggataaacaaaggc

SEQ ID NO: 1604047 - DNA, 25 bp, Homo sapien
ctttgacatacactgggataaacaa

SEQ ID NO: 1604048 - DNA, 25 bp, Homo sapien
ttcggcccatctcccgtatgcatta

SEQ ID NO: 1604049 - DNA, 25 bp, Homo sapien
ttgcatttattcggcccatctcccg

SEQ ID NO: 1604050 - DNA, 25 bp, Homo sapien
tattcggcccatctcccgtatgcat

SEQ ID NO: 1604051 - DNA, 25 bp, Homo sapien
atttattcggcccatctcccgtatg

SEQ ID NO: 1604052 - DNA, 25 bp, Homo sapien
cactgtgagacttttcgtgtctttg

SEQ ID NO: 1604053 - DNA, 25 bp, Homo sapien
tcgaactaaactgggacgatcaaag

SEQ ID NO: 1604054 - DNA, 25 bp, Homo sapien
tgtgagacttttcgtgtctttgaca

SEQ ID NO: 1604055 - DNA, 25 bp, Homo sapien
gtgaattcgttcatgatatcgaact

SEQ ID NO: 1604056 - DNA, 25 bp, Homo sapien
tcttatataggaactggaatcaggc

SEQ ID NO: 1604057 - DNA, 25 bp, Homo sapien
ttcatgcatacgtaataaactgggc

SEQ ID NO: 1604058 - DNA, 25 bp, Homo sapien
tcatgcatacgtaataaactgggcc

SEQ ID NO: 1604059 - DNA, 25 bp, Homo sapien
catgcatacgtaataaactgggcca

SEQ ID NO: 1604060 - DNA, 25 bp, Homo sapien
atgcatacgtaataaactgggccaa

SEQ ID NO: 1604061 - DNA, 25 bp, Homo sapien
cacgcgactgaaaggagtgatggta

SEQ ID NO: 1604062 - DNA, 25 bp, Homo sapien
cagcgctttgacatggatcttctcc

SEQ ID NO: 1604063 - DNA, 25 bp, Homo sapien
ccatgtgtcttcgaaggtttctacg

SEQ ID NO: 1604064 - DNA, 25 bp, Homo sapien
tcacaatactatctcgaatgaggct

SEQ ID NO: 1604065 - DNA, 25 bp, Homo sapien
gccctgtttgaacatgaatgaactg

SEQ ID NO: 1604066 - DNA, 25 bp, Homo sapien
atgcaaagtgtaggcttcatgccct

SEQ ID NO: 1604067 - DNA, 25 bp, Homo sapien
gaatgctatgcaagacaacccaaca

SEQ ID NO: 1604068 - DNA, 25 bp, Homo sapien
tatcattaccatgcaaagtgtaggc

SEQ ID NO: 1604069 - DNA, 25 bp, Homo sapien
tgtactgatcttcagtattctgttc

SEQ ID NO: 1604070 - DNA, 25 bp, Homo sapien
tagatttctcctaggatttttgtac

SEQ ID NO: 1604071 - DNA, 25 bp, Homo sapien
gtattctgttcttcccatatcattc

SEQ ID NO: 1604072 - DNA, 25 bp, Homo sapien
cttagatttctcctaggatttttgt

SEQ ID NO: 1604073 - DNA, 25 bp, Homo sapien
tcttgcatcacatatctgtataaat

SEQ ID NO: 1604074 - DNA, 25 bp, Homo sapien
tctttatggcccaagacatggcctt

SEQ ID NO: 1604075 - DNA, 25 bp, Homo sapien
acgcctcaatttatcaaacaccggg

SEQ ID NO: 1604076 - DNA, 25 bp, Homo sapien
tataaaatcacccacaagcctctgc

SEQ ID NO: 1604077 - DNA, 25 bp, Homo sapien
ctggaactcctgtacatgtctaact

SEQ ID NO: 1604078 - DNA, 25 bp, Homo sapien
cagtgcgggtcccactgtgacagag

SEQ ID NO: 1604079 - DNA, 25 bp, Homo sapien
gcgtctctcagcgactgaggctaca

SEQ ID NO: 1604080 - DNA, 25 bp, Homo sapien
cccgctgccagtgcgggtcccactg

SEQ ID NO: 1604081 - DNA, 25 bp, Homo sapien
gtctctcagcgactgaggctacaca

SEQ ID NO: 1604082 - DNA, 25 bp, Homo sapien
tttgaacctggcaccctactgccag

SEQ ID NO: 1604083 - DNA, 25 bp, Homo sapien
acgccgcgggctctttgaacctggc

SEQ ID NO: 1604084 - DNA, 25 bp, Homo sapien
tcagcgagcgactgagtctagagct

SEQ ID NO: 1604085 - DNA, 25 bp, Homo sapien
gcaggggcgtgaagacgccgcgggc

SEQ ID NO: 1604086 - DNA, 25 bp, Homo sapien
cacaagtgttttgcagggaatccca

SEQ ID NO: 1604087 - DNA, 25 bp, Homo sapien
cctcccagggaacatttgcatttat

SEQ ID NO: 1604088 - DNA, 25 bp, Homo sapien
tgcatttatgcagaattacctgccc

SEQ ID NO: 1604089 - DNA, 25 bp, Homo sapien
tcctggagaaggagtcacaagtgtt

SEQ ID NO: 1604090 - DNA, 25 bp, Homo sapien
agtccagtggagccattcccctggc

SEQ ID NO: 1604091 - DNA, 25 bp, Homo sapien
ggcctgatgtccaccgggcatcagg

SEQ ID NO: 1604092 - DNA, 25 bp, Homo sapien
gactcttggcggcaaggttaagcct

SEQ ID NO: 1604093 - DNA, 25 bp, Homo sapien
ccaccgggcatcaggatttgaggat

SEQ ID NO: 1604094 - DNA, 25 bp, Homo sapien
tagaaacccttatgcattgctggag

SEQ ID NO: 1604095 - DNA, 25 bp, Homo sapien
taccagcactgtaagaggcttccag

SEQ ID NO: 1604096 - DNA, 25 bp, Homo sapien
gaaagcagggactcacacagacata

SEQ ID NO: 1604097 - DNA, 25 bp, Homo sapien
tagagcaagtagcacagtaacacgt

SEQ ID NO: 1604098 - DNA, 25 bp, Homo sapien
taatctaggcatgatttatgggatg

SEQ ID NO: 1604099 - DNA, 25 bp, Homo sapien
agaaacatcttaaggctttaccatg

SEQ ID NO: 1604100 - DNA, 25 bp, Homo sapien
catgaggcttatctcctatgtgatt

SEQ ID NO: 1604101 - DNA, 25 bp, Homo sapien
ttatgggatgcaggaggatgtggat

SEQ ID NO: 1604102 - DNA, 25 bp, Homo sapien
gtttttcagccatgtgagtccttct

SEQ ID NO: 1604103 - DNA, 25 bp, Homo sapien
aggtttttcagccatgtgagtcctt

SEQ ID NO: 1604104 - DNA, 25 bp, Homo sapien
ttttcagccatgtgagtccttctat

SEQ ID NO: 1604105 - DNA, 25 bp, Homo sapien
tttttcagccatgtgagtccttcta

SEQ ID NO: 1604106 - DNA, 25 bp, Homo sapien
catatataaggtccacctccacgtt

SEQ ID NO: 1604107 - DNA, 25 bp, Homo sapien
tatgtgtcttcgaaggtttcccgaa

SEQ ID NO: 1604108 - DNA, 25 bp, Homo sapien
agtggtgataattgaaggctgtccc

SEQ ID NO: 1604109 - DNA, 25 bp, Homo sapien
catatgacttcgaaagcttgagtga

SEQ ID NO: 1604110 - DNA, 25 bp, Homo sapien
tcacagtactatctggctggcgact

SEQ ID NO: 1604111 - DNA, 25 bp, Homo sapien
tactatctggctggcgactttcact

SEQ ID NO: 1604112 - DNA, 25 bp, Homo sapien
ggctggcgactttcactaaatctct

SEQ ID NO: 1604113 - DNA, 25 bp, Homo sapien
tcattcacagtactatctggctggc

SEQ ID NO: 1604114 - DNA, 25 bp, Homo sapien
tgtgctgatcttcaatgtttgtgtc

SEQ ID NO: 1604115 - DNA, 25 bp, Homo sapien
cttaggctcctcctgggatttctgt

SEQ ID NO: 1604116 - DNA, 25 bp, Homo sapien
caatgtttgtgtcttcccatttcat

SEQ ID NO: 1604117 - DNA, 25 bp, Homo sapien
taggctcctcctgggatttctgtgc

SEQ ID NO: 1604118 - DNA, 25 bp, Homo sapien
tatacagtccaggttcctaatggtt

SEQ ID NO: 1604119 - DNA, 25 bp, Homo sapien
cagactcttctgtgatggacccagc

SEQ ID NO: 1604120 - DNA, 25 bp, Homo sapien
tccaggttcctaatggtttcccaca

SEQ ID NO: 1604121 - DNA, 25 bp, Homo sapien
tgtacagactcttctgtgatggacc

SEQ ID NO: 1604122 - DNA, 25 bp, Homo sapien
ggaagagatcacttctgtcttctcc

SEQ ID NO: 1604123 - DNA, 25 bp, Homo sapien
cttcattagtctgagagtcaggaag

SEQ ID NO: 1604124 - DNA, 25 bp, Homo sapien
tcttcattagtctgagagtcaggaa

SEQ ID NO: 1604125 - DNA, 25 bp, Homo sapien
ctctcttcattagtctgagagtcag

SEQ ID NO: 1604126 - DNA, 25 bp, Homo sapien
ccagccgtgtgtccccaaggaatgg

SEQ ID NO: 1604127 - DNA, 25 bp, Homo sapien
caactggctgaccagccgtgtgtcc

SEQ ID NO: 1604128 - DNA, 25 bp, Homo sapien
ggctgaccagccgtgtgtccccaag

SEQ ID NO: 1604129 - DNA, 25 bp, Homo sapien
gaccagccgtgtgtccccaaggaat

SEQ ID NO: 1604130 - DNA, 25 bp, Homo sapien
gagctgctcgagttgcccaagttct

SEQ ID NO: 1604131 - DNA, 25 bp, Homo sapien
gaattccaacggaaaggctggcgcc

SEQ ID NO: 1604132 - DNA, 25 bp, Homo sapien
gagggaacccactcagcaggagaat

SEQ ID NO: 1604133 - DNA, 25 bp, Homo sapien
actgaccgccggcttctgcattgtg

SEQ ID NO: 1604134 - DNA, 25 bp, Homo sapien
gactcagcgtgacagtgcctgccac

SEQ ID NO: 1604135 - DNA, 25 bp, Homo sapien
agcataggactcagcgtgacagtgc

SEQ ID NO: 1604136 - DNA, 25 bp, Homo sapien
ataggactcagcgtgacagtgcctg

SEQ ID NO: 1604137 - DNA, 25 bp, Homo sapien
cggcttccgcggtgtcccgtgttct

SEQ ID NO: 1604138 - DNA, 25 bp, Homo sapien
ctgaaagtaagatgtaggaatccat

SEQ ID NO: 1604139 - DNA, 25 bp, Homo sapien
ttctgaaagtaagatgtaggaatcc

SEQ ID NO: 1604140 - DNA, 25 bp, Homo sapien
tctgaaagtaagatgtaggaatcca

SEQ ID NO: 1604141 - DNA, 25 bp, Homo sapien
tgaaagtaagatgtaggaatccata

SEQ ID NO: 1604142 - DNA, 25 bp, Homo sapien
tgccgccagtgtttctgtaagtatg

SEQ ID NO: 1604143 - DNA, 25 bp, Homo sapien
ttctgtaagtatgcgaaggatgtag

SEQ ID NO: 1604144 - DNA, 25 bp, Homo sapien
cagtgtttctgtaagtatgcgaagg

SEQ ID NO: 1604145 - DNA, 25 bp, Homo sapien
tgtaagtatgcgaaggatgtaggtt

SEQ ID NO: 1604146 - DNA, 25 bp, Homo sapien
tttaggtatgatcagggactgctgg

SEQ ID NO: 1604147 - DNA, 25 bp, Homo sapien
ggactgctggaattaatcccctgca

SEQ ID NO: 1604148 - DNA, 25 bp, Homo sapien
caccgtgcccaagccatagagttta

SEQ ID NO: 1604149 - DNA, 25 bp, Homo sapien
tacagggagatgtgggtagataaca

SEQ ID NO: 1604150 - DNA, 25 bp, Homo sapien
cacatagcttctttgcggtatgagt

SEQ ID NO: 1604151 - DNA, 25 bp, Homo sapien
tagcttctttgcggtatgagttctt

SEQ ID NO: 1604152 - DNA, 25 bp, Homo sapien
agcttctttgcggtatgagttcttt

SEQ ID NO: 1604153 - DNA, 25 bp, Homo sapien
gaaggaaacgggaatgagtgaaggc

SEQ ID NO: 1604154 - DNA, 25 bp, Homo sapien
aggaaacgggaatgagtgaaggctt

SEQ ID NO: 1604155 - DNA, 25 bp, Homo sapien
gaaacgggaatgagtgaaggcttta

SEQ ID NO: 1604156 - DNA, 25 bp, Homo sapien
cttgaaggaaacgggaatgagtgaa

SEQ ID NO: 1604157 - DNA, 25 bp, Homo sapien
atcctttcatgttgctttaagtgac

SEQ ID NO: 1604158 - DNA, 25 bp, Homo sapien
tttcatgttgctttaagtgaccaaa

SEQ ID NO: 1604159 - DNA, 25 bp, Homo sapien
cctttcatgttgctttaagtgacca

SEQ ID NO: 1604160 - DNA, 25 bp, Homo sapien
tcatgttgctttaagtgaccaaaat

SEQ ID NO: 1604161 - DNA, 25 bp, Homo sapien
tgaagagaaaggtactggaaacaac

SEQ ID NO: 1604162 - DNA, 25 bp, Homo sapien
ttatgaagagaaaggtactggaaac

SEQ ID NO: 1604163 - DNA, 25 bp, Homo sapien
tatgaagagaaaggtactggaaaca

SEQ ID NO: 1604164 - DNA, 25 bp, Homo sapien
ttttatgaagagaaaggtactggaa

SEQ ID NO: 1604165 - DNA, 25 bp, Homo sapien
aagggaataaagatcactaaaggct

SEQ ID NO: 1604166 - DNA, 25 bp, Homo sapien
atttatagattttctccctagtgtg

SEQ ID NO: 1604167 - DNA, 25 bp, Homo sapien
gattttgaagggaataaagatcact

SEQ ID NO: 1604168 - DNA, 25 bp, Homo sapien
catgattttgaagggaataaagatc

SEQ ID NO: 1604169 - DNA, 25 bp, Homo sapien
aaatccaatgaaataaacaaaggct

SEQ ID NO: 1604170 - DNA, 25 bp, Homo sapien
ctttgaaatccaatgaaataaacaa

SEQ ID NO: 1604171 - DNA, 25 bp, Homo sapien
ttgaaatccaatgaaataaacaaag

SEQ ID NO: 1604172 - DNA, 25 bp, Homo sapien
tccaatgaaataaacaaaggctttc

SEQ ID NO: 1604173 - DNA, 25 bp, Homo sapien
tgcagtgtactggaacaatcaaagc

SEQ ID NO: 1604174 - DNA, 25 bp, Homo sapien
gactttgcagtgtactggaacaatc

SEQ ID NO: 1604175 - DNA, 25 bp, Homo sapien
catgactttgcagtgtactggaaca

SEQ ID NO: 1604176 - DNA, 25 bp, Homo sapien
tttcatgactttgcagtgtactgga

SEQ ID NO: 1604177 - DNA, 25 bp, Homo sapien
agtgtgccttatcatgtgtctttgg

SEQ ID NO: 1604178 - DNA, 25 bp, Homo sapien
ttatgaggtccatctctagtgtgcc

SEQ ID NO: 1604179 - DNA, 25 bp, Homo sapien
ttcccagatgatcaaatgctttccc

SEQ ID NO: 1604180 - DNA, 25 bp, Homo sapien
tggaagcttcccagatgatcaaatg

SEQ ID NO: 1604181 - DNA, 25 bp, Homo sapien
tgcactgtgagtggtttcacgtctt

SEQ ID NO: 1604182 - DNA, 25 bp, Homo sapien
tttcacgtctttgaagggaagtgga

SEQ ID NO: 1604183 - DNA, 25 bp, Homo sapien
ttctctgcactgtgagtggtttcac

SEQ ID NO: 1604184 - DNA, 25 bp, Homo sapien
ttcacgtctttgaagggaagtggaa

SEQ ID NO: 1604185 - DNA, 25 bp, Homo sapien
gaattgaaggacttcctacattcct

SEQ ID NO: 1604186 - DNA, 25 bp, Homo sapien
cgtgtattacgcttctctccatatt

SEQ ID NO: 1604187 - DNA, 25 bp, Homo sapien
ggtttgaaacgagtggcaataactg

SEQ ID NO: 1604188 - DNA, 25 bp, Homo sapien
gatgaaagacccgtgacgacttctc

SEQ ID NO: 1604189 - DNA, 25 bp, Homo sapien
gacgacttctccactcattgttttc

SEQ ID NO: 1604190 - DNA, 25 bp, Homo sapien
tactttcaccgaagcgctctaccat

SEQ ID NO: 1604191 - DNA, 25 bp, Homo sapien
catgtgcttgttcacaacagtatct

SEQ ID NO: 1604192 - DNA, 25 bp, Homo sapien
accgaagcgctctaccatatcgcat

SEQ ID NO: 1604193 - DNA, 25 bp, Homo sapien
tgtctttactttcaccgaagcgctc

SEQ ID NO: 1604194 - DNA, 25 bp, Homo sapien
gtgactttcgtattgatcttccctg

SEQ ID NO: 1604195 - DNA, 25 bp, Homo sapien
tgactttcgtattgatcttccctga

SEQ ID NO: 1604196 - DNA, 25 bp, Homo sapien
actttcgtattgatcttccctgatc

SEQ ID NO: 1604197 - DNA, 25 bp, Homo sapien
ctgtgactttcgtattgatcttccc

SEQ ID NO: 1604198 - DNA, 25 bp, Homo sapien
gatggtttcctgcatcacatcttcg

SEQ ID NO: 1604199 - DNA, 25 bp, Homo sapien
cagtccaggttcctgatggtttcct

SEQ ID NO: 1604200 - DNA, 25 bp, Homo sapien
tgcatcacatcttcgtagagattct

SEQ ID NO: 1604201 - DNA, 25 bp, Homo sapien
ctacacagtccaggttcctgatggt

SEQ ID NO: 1604202 - DNA, 25 bp, Homo sapien
tcactccacccgagaaataacaaca

SEQ ID NO: 1604203 - DNA, 25 bp, Homo sapien
cacccgagaaataacaacatgccta

SEQ ID NO: 1604204 - DNA, 25 bp, Homo sapien
aaagctttcactccacccgagaaat

SEQ ID NO: 1604205 - DNA, 25 bp, Homo sapien
gctttcactccacccgagaaataac

SEQ ID NO: 1604206 - DNA, 25 bp, Homo sapien
tctagacataattgagagtatacaa

SEQ ID NO: 1604207 - DNA, 25 bp, Homo sapien
taatgttctggctgactatactatg

SEQ ID NO: 1604208 - DNA, 25 bp, Homo sapien
catagactcttttccttatcatgag

SEQ ID NO: 1604209 - DNA, 25 bp, Homo sapien
tcttttccttatcatgagtccctaa

SEQ ID NO: 1604210 - DNA, 25 bp, Homo sapien
tctccaatgtgtttcgtacaagtat

SEQ ID NO: 1604211 - DNA, 25 bp, Homo sapien
ttcacagggtctatctccaatgtgt

SEQ ID NO: 1604212 - DNA, 25 bp, Homo sapien
acattcacagggtctatctccaatg

SEQ ID NO: 1604213 - DNA, 25 bp, Homo sapien
caagtgcttacattcacagggtcta

SEQ ID NO: 1604214 - DNA, 25 bp, Homo sapien
tcccacattccatacatttagagag

SEQ ID NO: 1604215 - DNA, 25 bp, Homo sapien
acattccatacatttagagagaatg

SEQ ID NO: 1604216 - DNA, 25 bp, Homo sapien
taaaattaataaatgctttcccaca

SEQ ID NO: 1604217 - DNA, 25 bp, Homo sapien
tgaaataaaattaataaatgctttc

SEQ ID NO: 1604218 - DNA, 25 bp, Homo sapien
tatgcaaggaactgagagaagcaaa

SEQ ID NO: 1604219 - DNA, 25 bp, Homo sapien
tttttatgtctatgcaaggaactga

SEQ ID NO: 1604220 - DNA, 25 bp, Homo sapien
tatgtctatgcaaggaactgagaga

SEQ ID NO: 1604221 - DNA, 25 bp, Homo sapien
gaactgagagaagcaaatgctttcc

SEQ ID NO: 1604222 - DNA, 25 bp, Homo sapien
ccttgaagaaaacgggaatgagtga

SEQ ID NO: 1604223 - DNA, 25 bp, Homo sapien
ttcatgtcgtagaaagcaagtgagc

SEQ ID NO: 1604224 - DNA, 25 bp, Homo sapien
gaaggctttcttacatgtgttacac

SEQ ID NO: 1604225 - DNA, 25 bp, Homo sapien
tctatgcaaggaactgagagaagca

SEQ ID NO: 1604226 - DNA, 25 bp, Homo sapien
aggtccatctctcgtgtgcattacc

SEQ ID NO: 1604227 - DNA, 25 bp, Homo sapien
gtccatctctcgtgtgcattaccat

SEQ ID NO: 1604228 - DNA, 25 bp, Homo sapien
ccatctctcgtgtgcattaccatgt

SEQ ID NO: 1604229 - DNA, 25 bp, Homo sapien
tgagttctttcatgacttttcagtg

SEQ ID NO: 1604230 - DNA, 25 bp, Homo sapien
cactcatacggctttcatatggacc

SEQ ID NO: 1604231 - DNA, 25 bp, Homo sapien
cggctttcatatggacctactccag

SEQ ID NO: 1604232 - DNA, 25 bp, Homo sapien
tgatgacttctccactcatacggct

SEQ ID NO: 1604233 - DNA, 25 bp, Homo sapien
gacttctccactcatacggctttca

SEQ ID NO: 1604234 - DNA, 25 bp, Homo sapien
ggtattaataagtattggatgtaca

SEQ ID NO: 1604235 - DNA, 25 bp, Homo sapien
tcatgcaaagtgcaggcttcgtgtc

SEQ ID NO: 1604236 - DNA, 25 bp, Homo sapien
ctaaaagtcggtctataaataattg

SEQ ID NO: 1604237 - DNA, 25 bp, Homo sapien
gaaatatatcactaaaagtcggtct

SEQ ID NO: 1604238 - DNA, 25 bp, Homo sapien
cctgggatatctatattgatcttca

SEQ ID NO: 1604239 - DNA, 25 bp, Homo sapien
ctgggatatctatattgatcttcaa

SEQ ID NO: 1604240 - DNA, 25 bp, Homo sapien
tttcctgggatatctatattgatct

SEQ ID NO: 1604241 - DNA, 25 bp, Homo sapien
tcctgggatatctatattgatcttc

SEQ ID NO: 1604242 - DNA, 25 bp, Homo sapien
aagcccactcttctcgggtgaagtt

SEQ ID NO: 1604243 - DNA, 25 bp, Homo sapien
cacaatccaggttcctgatggtttc

SEQ ID NO: 1604244 - DNA, 25 bp, Homo sapien
gattcttctgacaaggacccagcaa

SEQ ID NO: 1604245 - DNA, 25 bp, Homo sapien
gccacatcctctaaagccactgagg

SEQ ID NO: 1604246 - DNA, 25 bp, Homo sapien
tgagttcccggtatagaaccctgga

SEQ ID NO: 1604247 - DNA, 25 bp, Homo sapien
gagggccccaggagcgtaactaata

SEQ ID NO: 1604248 - DNA, 25 bp, Homo sapien
cagtccttggcacgataaagtccta

SEQ ID NO: 1604249 - DNA, 25 bp, Homo sapien
tgtgatactctatgccgcctaggga

SEQ ID NO: 1604250 - DNA, 25 bp, Homo sapien
tacagccgcacaatctcgggagacg

SEQ ID NO: 1604251 - DNA, 25 bp, Homo sapien
tgaagtcccaacgagggagcccatt

SEQ ID NO: 1604252 - DNA, 25 bp, Homo sapien
caagagtcgccggagttctcagatc

SEQ ID NO: 1604253 - DNA, 25 bp, Homo sapien
aaggctggcgccaatcaggttgaag

SEQ ID NO: 1604254 - DNA, 25 bp, Homo sapien
aggtcgtctcttagctacagagccg

SEQ ID NO: 1604255 - DNA, 25 bp, Homo sapien
acacaggctgccacggaacttccag

SEQ ID NO: 1604256 - DNA, 25 bp, Homo sapien
gacgccgcgggctttttcaaccaca

SEQ ID NO: 1604257 - DNA, 25 bp, Homo sapien
tgccaatgcgggttcccgcgggaca

SEQ ID NO: 1604258 - DNA, 25 bp, Homo sapien
ggcaactcctggcatacggcataaa

SEQ ID NO: 1604259 - DNA, 25 bp, Homo sapien
gttcctaaccagctacagaccagta

SEQ ID NO: 1604260 - DNA, 25 bp, Homo sapien
taataccgccactggtttgacagca

SEQ ID NO: 1604261 - DNA, 25 bp, Homo sapien
tgacagcatgtgcaggcggtaatgc

SEQ ID NO: 1604262 - DNA, 25 bp, Homo sapien
ctcagtgagctgtgtaatgggacaa

SEQ ID NO: 1604263 - DNA, 25 bp, Homo sapien
actcaggaattcaagcccaacaggg

SEQ ID NO: 1604264 - DNA, 25 bp, Homo sapien
taatgctcctgaatgacacacttaa

SEQ ID NO: 1604265 - DNA, 25 bp, Homo sapien
tatctagaagcactggatggaggtt

SEQ ID NO: 1604266 - DNA, 25 bp, Homo sapien
ttgcaatcagcatattggctcattg

SEQ ID NO: 1604267 - DNA, 25 bp, Homo sapien
tgtttgcaatcagcatattggctca

SEQ ID NO: 1604268 - DNA, 25 bp, Homo sapien
aatcagcatattggctcattgagaa

SEQ ID NO: 1604269 - DNA, 25 bp, Homo sapien
ttgagaaaggtacagccgggtgtgg

SEQ ID NO: 1604270 - DNA, 25 bp, Homo sapien
gtatgtgcccgtccagatcactgaa

SEQ ID NO: 1604271 - DNA, 25 bp, Homo sapien
atggtagtatgtgcccgtccagatc

SEQ ID NO: 1604272 - DNA, 25 bp, Homo sapien
tccagatcactgaatccgtaaaaaa

SEQ ID NO: 1604273 - DNA, 25 bp, Homo sapien
gtagtatgtgcccgtccagatcact

SEQ ID NO: 1604274 - DNA, 25 bp, Homo sapien
tctctactcaaaagacagctgggtg

SEQ ID NO: 1604275 - DNA, 25 bp, Homo sapien
gttcatgagaacaagcgaggcttcg

SEQ ID NO: 1604276 - DNA, 25 bp, Homo sapien
tcaaagtgttagagctgcccctaca

SEQ ID NO: 1604277 - DNA, 25 bp, Homo sapien
gaccacaggagaattggcatcggct

SEQ ID NO: 1604278 - DNA, 25 bp, Homo sapien
gctaagcatctgcaaataagacgga

SEQ ID NO: 1604279 - DNA, 25 bp, Homo sapien
gaggtacgatcctcaaagatcctac

SEQ ID NO: 1604280 - DNA, 25 bp, Homo sapien
acattcaatggttttttcagtaggc

SEQ ID NO: 1604281 - DNA, 25 bp, Homo sapien
gaagaactagcttcctatagctaag

SEQ ID NO: 1604282 - DNA, 25 bp, Homo sapien
catagatgatagtcctgatggcctg

SEQ ID NO: 1604283 - DNA, 25 bp, Homo sapien
gattcaagttaacctgatgtctcac

SEQ ID NO: 1604284 - DNA, 25 bp, Homo sapien
cactatacttgggttatcaagagag

SEQ ID NO: 1604285 - DNA, 25 bp, Homo sapien
ttcaatggttacagatcttcagccc

SEQ ID NO: 1604286 - DNA, 25 bp, Homo sapien
tctagacataattgagactatacaa

SEQ ID NO: 1604287 - DNA, 25 bp, Homo sapien
aaactttaatgttctggctgactac

SEQ ID NO: 1604288 - DNA, 25 bp, Homo sapien
tgggtaagttacatacaaacatgtc

SEQ ID NO: 1604289 - DNA, 25 bp, Homo sapien
catagactcttttccttatcatgat

SEQ ID NO: 1604290 - DNA, 25 bp, Homo sapien
tatgcaaggaactgagagaagcaaa

SEQ ID NO: 1604291 - DNA, 25 bp, Homo sapien
tatgtctatgcaaggaactgagaga

SEQ ID NO: 1604292 - DNA, 25 bp, Homo sapien
tttttatgtctatgcaaggaactga

SEQ ID NO: 1604293 - DNA, 25 bp, Homo sapien
gaactgagagaagcaaatgctttcc

SEQ ID NO: 1604294 - DNA, 25 bp, Homo sapien
ttcatgtcgtagaaagcaagtgagc

SEQ ID NO: 1604295 - DNA, 25 bp, Homo sapien
ttttatgtctatgcaaggaactgag

SEQ ID NO: 1604296 - DNA, 25 bp, Homo sapien
ccttgaagaaaacgggaatgagtga

SEQ ID NO: 1604297 - DNA, 25 bp, Homo sapien
gaactgagagaagcaaatgctttcc

SEQ ID NO: 1604298 - DNA, 25 bp, Homo sapien
tgtcgagaaaggtatctgaaacgac

SEQ ID NO: 1604299 - DNA, 25 bp, Homo sapien
tatgtcgagaaaggtatctgaaacg

SEQ ID NO: 1604300 - DNA, 25 bp, Homo sapien
cgagaaaggtatctgaaacgactga

SEQ ID NO: 1604301 - DNA, 25 bp, Homo sapien
agttatcataatgaccgaaggcttt

SEQ ID NO: 1604302 - DNA, 25 bp, Homo sapien
cattatcatatgacttcgaaagctt

SEQ ID NO: 1604303 - DNA, 25 bp, Homo sapien
tgtgcattatcatatgacttcgaaa

SEQ ID NO: 1604304 - DNA, 25 bp, Homo sapien
ttcatgactttgcagtgaactagga

SEQ ID NO: 1604305 - DNA, 25 bp, Homo sapien
tctctgcactgtgagtggtttcatg

SEQ ID NO: 1604306 - DNA, 25 bp, Homo sapien
ccacgctgcactgccatgtgtcttt

SEQ ID NO: 1604307 - DNA, 25 bp, Homo sapien
tcatgcatatgtaataaactgggcc

SEQ ID NO: 1604308 - DNA, 25 bp, Homo sapien
tccacgctgcactgccatgtgtctt

SEQ ID NO: 1604309 - DNA, 25 bp, Homo sapien
atgcatatgtaataaactgggccaa

SEQ ID NO: 1604310 - DNA, 25 bp, Homo sapien
gctttcccacgttgtttatgcgtat

SEQ ID NO: 1604311 - DNA, 25 bp, Homo sapien
ggctttcccacgttgtttatgcgta

SEQ ID NO: 1604312 - DNA, 25 bp, Homo sapien
tgaaggctttcccacgttgtttatg

SEQ ID NO: 1604313 - DNA, 25 bp, Homo sapien
aaggctttcccacgttgtttatgcg

SEQ ID NO: 1604314 - DNA, 25 bp, Homo sapien
tgctttcacaaggacctactccagg

SEQ ID NO: 1604315 - DNA, 25 bp, Homo sapien
tgaatgacccatgactttttctcct

SEQ ID NO: 1604316 - DNA, 25 bp, Homo sapien
taagggatgaatgacccatgacttt

SEQ ID NO: 1604317 - DNA, 25 bp, Homo sapien
ctgctttcacaaggacctactccag

SEQ ID NO: 1604318 - DNA, 25 bp, Homo sapien
cctgggatatctatattgatcttca

SEQ ID NO: 1604319 - DNA, 25 bp, Homo sapien
ctgggatatctatattgatcttcaa

SEQ ID NO: 1604320 - DNA, 25 bp, Homo sapien
tttcctgggatatctatattgatct

SEQ ID NO: 1604321 - DNA, 25 bp, Homo sapien
tcctgggatatctatattgatcttc

SEQ ID NO: 1604322 - DNA, 25 bp, Homo sapien
cacaatccaggttcctgatggtttc

SEQ ID NO: 1604323 - DNA, 25 bp, Homo sapien
gattcttctgacaaggacccagcaa

SEQ ID NO: 1604324 - DNA, 25 bp, Homo sapien
gccacatcctctaaagccactgagg

SEQ ID NO: 1604325 - DNA, 25 bp, Homo sapien
aagcccactcttctcgggtgaagtt

SEQ ID NO: 1604326 - DNA, 25 bp, Homo sapien
cagctacagaacccagagccgagcg

SEQ ID NO: 1604327 - DNA, 25 bp, Homo sapien
gagccgagcgcaggtgggtggagca

SEQ ID NO: 1604328 - DNA, 25 bp, Homo sapien
cccgctgccaatgcgtgttccagcc

SEQ ID NO: 1604329 - DNA, 25 bp, Homo sapien
ctacagaacccagagccgagcgcag

SEQ ID NO: 1604330 - DNA, 25 bp, Homo sapien
tgaggctctacaaccagtgggtggc

SEQ ID NO: 1604331 - DNA, 25 bp, Homo sapien
taatgactatgactggtggcctatc

SEQ ID NO: 1604332 - DNA, 25 bp, Homo sapien
tcttcagtcagcaggtgatgggtcc

SEQ ID NO: 1604333 - DNA, 25 bp, Homo sapien
gaacactccggtgaaggaacactag

SEQ ID NO: 1604334 - DNA, 25 bp, Homo sapien
gacagaatatagctagttgggccac

SEQ ID NO: 1604335 - DNA, 25 bp, Homo sapien
tggtttaaatcaatggccccggcat

SEQ ID NO: 1604336 - DNA, 25 bp, Homo sapien
ggtttatggacctgagcatgccacc

SEQ ID NO: 1604337 - DNA, 25 bp, Homo sapien
taagaagggcaatcactgggcaaat

SEQ ID NO: 1604338 - DNA, 25 bp, Homo sapien
caagttggattgagctcagaaaagc

SEQ ID NO: 1604339 - DNA, 25 bp, Homo sapien
tgtagtatcaaaagggtgaggtacc

SEQ ID NO: 1604340 - DNA, 25 bp, Homo sapien
cagaggcccgacaaaataccagcaa

SEQ ID NO: 1604341 - DNA, 25 bp, Homo sapien
ttttgaatatagctgcagaggcccg

SEQ ID NO: 1604342 - DNA, 25 bp, Homo sapien
gaaatcacagtgctaagtactaaca

SEQ ID NO: 1604343 - DNA, 25 bp, Homo sapien
tgagtttgggtaggatcctgtgccc

SEQ ID NO: 1604344 - DNA, 25 bp, Homo sapien
tgtgccctgtacttaactttcttca

SEQ ID NO: 1604345 - DNA, 25 bp, Homo sapien
gtggcacacattaggacttcaaaat

SEQ ID NO: 1604346 - DNA, 25 bp, Homo sapien
taataggaaacaccgacaatctgct

SEQ ID NO: 1604347 - DNA, 25 bp, Homo sapien
tacctgccacataaggccagtagga

SEQ ID NO: 1604348 - DNA, 25 bp, Homo sapien
tcaattggcagagcaaaggatcagg

SEQ ID NO: 1604349 - DNA, 25 bp, Homo sapien
caggtgtccctgaagctcctatgca

SEQ ID NO: 1604350 - DNA, 25 bp, Homo sapien
gaaggtattcccatgtcttataggg

SEQ ID NO: 1604351 - DNA, 25 bp, Homo sapien
tagtatgtgggccaactgaaggctt

SEQ ID NO: 1604352 - DNA, 25 bp, Homo sapien
cacacataagggagtatcacatgag

SEQ ID NO: 1604353 - DNA, 25 bp, Homo sapien
atttatacagtacctccctagtggg

SEQ ID NO: 1604354 - DNA, 25 bp, Homo sapien
tttcatgtattcgaaaggaacggga

SEQ ID NO: 1604355 - DNA, 25 bp, Homo sapien
aactctttcatgtattcgaaaggaa

SEQ ID NO: 1604356 - DNA, 25 bp, Homo sapien
ttactctccactatgaactctttca

SEQ ID NO: 1604357 - DNA, 25 bp, Homo sapien
tcatgtattcgaaaggaacgggaac

SEQ ID NO: 1604358 - DNA, 25 bp, Homo sapien
gttcatggattcgaaaggaacgtga

SEQ ID NO: 1604359 - DNA, 25 bp, Homo sapien
gaaaggaacgtgagcaactgaaggc

SEQ ID NO: 1604360 - DNA, 25 bp, Homo sapien
tcatggattcgaaaggaacgtgagc

SEQ ID NO: 1604361 - DNA, 25 bp, Homo sapien
gattcgaaaggaacgtgagcaactg

SEQ ID NO: 1604362 - DNA, 25 bp, Homo sapien
tgatttcgaaaagaactgggatgac

SEQ ID NO: 1604363 - DNA, 25 bp, Homo sapien
acaactaaacgccttaccacactgt

SEQ ID NO: 1604364 - DNA, 25 bp, Homo sapien
tcatgcatccgaaaggaactagaaa

SEQ ID NO: 1604365 - DNA, 25 bp, Homo sapien
ttatcatatgtcttcgatagcttgg

SEQ ID NO: 1604366 - DNA, 25 bp, Homo sapien
gtgtcctcgaaaggttgtgtgataa

SEQ ID NO: 1604367 - DNA, 25 bp, Homo sapien
tgtgtcctcgaaaggttgtgtgata

SEQ ID NO: 1604368 - DNA, 25 bp, Homo sapien
ctttcatgtattcgaaatgaacttc

SEQ ID NO: 1604369 - DNA, 25 bp, Homo sapien
atgtattcgaaatgaacttcgaaag

SEQ ID NO: 1604370 - DNA, 25 bp, Homo sapien
tttcatgtattcgaaatgaacttcg

SEQ ID NO: 1604371 - DNA, 25 bp, Homo sapien
tcatgtattcgaaatgaacttcgaa

SEQ ID NO: 1604372 - DNA, 25 bp, Homo sapien
tctccatatttgtgatattcatatg

SEQ ID NO: 1604373 - DNA, 25 bp, Homo sapien
catatgatttctctccatatttgtg

SEQ ID NO: 1604374 - DNA, 25 bp, Homo sapien
tttctctccatatttgtgatattca

SEQ ID NO: 1604375 - DNA, 25 bp, Homo sapien
tctctccatatttgtgatattcata

SEQ ID NO: 1604376 - DNA, 25 bp, Homo sapien
tatgttcagtatgagatctcatgtg

SEQ ID NO: 1604377 - DNA, 25 bp, Homo sapien
atgttcagtatgagatctcatgtgc

SEQ ID NO: 1604378 - DNA, 25 bp, Homo sapien
ctatgttcagtatgagatctcatgt

SEQ ID NO: 1604379 - DNA, 25 bp, Homo sapien
taagagatgaatgacacatatagtc

SEQ ID NO: 1604380 - DNA, 25 bp, Homo sapien
ttaagagatgaatgacacatatagt

SEQ ID NO: 1604381 - DNA, 25 bp, Homo sapien
aagagatgaatgacacatatagtcc

SEQ ID NO: 1604382 - DNA, 25 bp, Homo sapien
gacacatatagtcctttccacacac

SEQ ID NO: 1604383 - DNA, 25 bp, Homo sapien
gatggtttctccaaactgactacct

SEQ ID NO: 1604384 - DNA, 25 bp, Homo sapien
ctgatggtttctccaaactgactac

SEQ ID NO: 1604385 - DNA, 25 bp, Homo sapien
tggtttctccaaactgactaccttc

SEQ ID NO: 1604386 - DNA, 25 bp, Homo sapien
ttctccaaactgactaccttctttc

SEQ ID NO: 1604387 - DNA, 25 bp, Homo sapien
tctcccctgatttttgtgatcttca

SEQ ID NO: 1604388 - DNA, 25 bp, Homo sapien
tgtgatcttcaatgttcttctcctc

SEQ ID NO: 1604389 - DNA, 25 bp, Homo sapien
tcttcaatgttcttctcctcccagt

SEQ ID NO: 1604390 - DNA, 25 bp, Homo sapien
caatgttcttctcctcccagttttc

SEQ ID NO: 1604391 - DNA, 25 bp, Homo sapien
ctaattgactaagtgagggaataat

SEQ ID NO: 1604392 - DNA, 25 bp, Homo sapien
ttgttctctaattgactaagtgagg

SEQ ID NO: 1604393 - DNA, 25 bp, Homo sapien
gttctctaattgactaagtgaggga

SEQ ID NO: 1604394 - DNA, 25 bp, Homo sapien
tctctaattgactaagtgagggaat

SEQ ID NO: 1604395 - DNA, 25 bp, Homo sapien
ccaagttaacaaaggtttcttgcat

SEQ ID NO: 1604396 - DNA, 25 bp, Homo sapien
caagttaacaaaggtttcttgcatc

SEQ ID NO: 1604397 - DNA, 25 bp, Homo sapien
cacagccacatcctcaaagaccact

SEQ ID NO: 1604398 - DNA, 25 bp, Homo sapien
cagccacatcctcaaagaccactga

SEQ ID NO: 1604399 - DNA, 25 bp, Homo sapien
gccacatcctcaaagaccactgagt

SEQ ID NO: 1604400 - DNA, 25 bp, Homo sapien
agccacatcctcaaagaccactgag

SEQ ID NO: 1604401 - DNA, 25 bp, Homo sapien
gggaggatgggtgagactgacagca

SEQ ID NO: 1604402 - DNA, 25 bp, Homo sapien
acatcccacatgtataggggaggat

SEQ ID NO: 1604403 - DNA, 25 bp, Homo sapien
ctgaaacatcccacatgtatagggg

SEQ ID NO: 1604404 - DNA, 25 bp, Homo sapien
gaaacatcccacatgtataggggag

SEQ ID NO: 1604405 - DNA, 25 bp, Homo sapien
aattgttccttgtacagtggttcta

SEQ ID NO: 1604406 - DNA, 25 bp, Homo sapien
taaaatgagctgatcacgtaagttc

SEQ ID NO: 1604407 - DNA, 25 bp, Homo sapien
tatggcacttgttcaaagaaattcc

SEQ ID NO: 1604408 - DNA, 25 bp, Homo sapien
gttgggtcaaaggagtaaaatgagc

SEQ ID NO: 1604409 - DNA, 25 bp, Homo sapien
cagactctgggatgtcctggtgttc

SEQ ID NO: 1604410 - DNA, 25 bp, Homo sapien
ctctgggatgtcctggtgttctgtt

SEQ ID NO: 1604411 - DNA, 25 bp, Homo sapien
ttcccagactctgggatgtcctggt

SEQ ID NO: 1604412 - DNA, 25 bp, Homo sapien
gactctgggatgtcctggtgttctg

SEQ ID NO: 1604413 - DNA, 25 bp, Homo sapien
ccgcggccagcacaggtcctacctc

SEQ ID NO: 1604414 - DNA, 25 bp, Homo sapien
ctctcccgcggccagcacaggtcct

SEQ ID NO: 1604415 - DNA, 25 bp, Homo sapien
cccgcggccagcacaggtcctacct

SEQ ID NO: 1604416 - DNA, 25 bp, Homo sapien
ctcccgcggccagcacaggtcctac

SEQ ID NO: 1604417 - DNA, 25 bp, Homo sapien
cccgccttcgttgcctgagtgacag

SEQ ID NO: 1604418 - DNA, 25 bp, Homo sapien
ttggacattgcactcttggacccgc

SEQ ID NO: 1604419 - DNA, 25 bp, Homo sapien
ccggcggcgcccctgattggacatt

SEQ ID NO: 1604420 - DNA, 25 bp, Homo sapien
ttggacccgccttcgttgcctgagt

SEQ ID NO: 1604421 - DNA, 25 bp, Homo sapien
cactggtgtcttcctgcagctcctt

SEQ ID NO: 1604422 - DNA, 25 bp, Homo sapien
ggtcgggcactggtgtcttcctgca

SEQ ID NO: 1604423 - DNA, 25 bp, Homo sapien
cggggtcgggcactggtgtcttcct

SEQ ID NO: 1604424 - DNA, 25 bp, Homo sapien
gcactggtgtcttcctgcagctcct

SEQ ID NO: 1604425 - DNA, 25 bp, Homo sapien
agcgaaaaaggacgcccgggccatg

SEQ ID NO: 1604426 - DNA, 25 bp, Homo sapien
ctgagcgcggagacacaagcgtgca

SEQ ID NO: 1604427 - DNA, 25 bp, Homo sapien
cacaagcgtgcacagcgcaggaaat

SEQ ID NO: 1604428 - DNA, 25 bp, Homo sapien
ggctctttgtccacagcgaaaaagg

SEQ ID NO: 1604429 - DNA, 25 bp, Homo sapien
tcagttaaacccaaagccatgagat

SEQ ID NO: 1604430 - DNA, 25 bp, Homo sapien
tgactatgtccctagagaacttttg

SEQ ID NO: 1604431 - DNA, 25 bp, Homo sapien
gccatgagatgtgttcagtaaaact

SEQ ID NO: 1604432 - DNA, 25 bp, Homo sapien
tggaaggatatttatttcggaccag

SEQ ID NO: 1604433 - DNA, 25 bp, Homo sapien
tttctccaaactgggaagaactcca

SEQ ID NO: 1604434 - DNA, 25 bp, Homo sapien
ttctccaaactgggaagaactccat

SEQ ID NO: 1604435 - DNA, 25 bp, Homo sapien
tcctcaaagagtcagtcatcaaggg

SEQ ID NO: 1604436 - DNA, 25 bp, Homo sapien
tgcctggtctctgtgaacctacggg

SEQ ID NO: 1604437 - DNA, 25 bp, Homo sapien
cctgacctccgtctgagatgtgact

SEQ ID NO: 1604438 - DNA, 25 bp, Homo sapien
gaagcttcttcggtaaacgccagtg

SEQ ID NO: 1604439 - DNA, 25 bp, Homo sapien
aggggcattctctgctcccggagtt

SEQ ID NO: 1604440 - DNA, 25 bp, Homo sapien
ggggcattctctgctcccggagttc

SEQ ID NO: 1604441 - DNA, 25 bp, Homo sapien
aaggggcattctctgctcccggagt

SEQ ID NO: 1604442 - DNA, 25 bp, Homo sapien
gaaggggcattctctgctcccggag

SEQ ID NO: 1604443 - DNA, 25 bp, Homo sapien
cacagtgggaggtttaactggaatc

SEQ ID NO: 1604444 - DNA, 25 bp, Homo sapien
aatattaaatgatccgctgccatac

SEQ ID NO: 1604445 - DNA, 25 bp, Homo sapien
tactctgagcactaggcttcatttt

SEQ ID NO: 1604446 - DNA, 25 bp, Homo sapien
ccaattcacagtgggaggtttaact

SEQ ID NO: 1604447 - DNA, 25 bp, Homo sapien
gaggcgccacacagtattaacatca

SEQ ID NO: 1604448 - DNA, 25 bp, Homo sapien
atggctattccactatgagcaggag

SEQ ID NO: 1604449 - DNA, 25 bp, Homo sapien
tgtgtgactaacagccagtattaca

SEQ ID NO: 1604450 - DNA, 25 bp, Homo sapien
caaccaatagccttagctgtgtgac

SEQ ID NO: 1604451 - DNA, 25 bp, Homo sapien
gaggccgtggagtgttttgggtcca

SEQ ID NO: 1604452 - DNA, 25 bp, Homo sapien
ctaataacatccactacccagactt

SEQ ID NO: 1604453 - DNA, 25 bp, Homo sapien
cactacccagacttagtggttggat

SEQ ID NO: 1604454 - DNA, 25 bp, Homo sapien
acccagacttagtggttggatggca

SEQ ID NO: 1604455 - DNA, 25 bp, Homo sapien
ggccgcaaataaactcttaaattca

SEQ ID NO: 1604456 - DNA, 25 bp, Homo sapien
aattacactctgactaaatcaactc

SEQ ID NO: 1604457 - DNA, 25 bp, Homo sapien
cacgcccggccgcaaataaactctt

SEQ ID NO: 1604458 - DNA, 25 bp, Homo sapien
ttgcacaaattacactctgactaaa

SEQ ID NO: 1604459 - DNA, 25 bp, Homo sapien
actcaagtgtcaggtcaggtcatcc

SEQ ID NO: 1604460 - DNA, 25 bp, Homo sapien
aggtagtgctgacttagaacacaga

SEQ ID NO: 1604461 - DNA, 25 bp, Homo sapien
caggtcatcctgtcacatgggacac

SEQ ID NO: 1604462 - DNA, 25 bp, Homo sapien
ggctgaacaaacctcttcaaggtga

SEQ ID NO: 1604463 - DNA, 25 bp, Homo sapien
tctgagaagataaccgaggagctca

SEQ ID NO: 1604464 - DNA, 25 bp, Homo sapien
tcactagatcctgcaagagacttgg

SEQ ID NO: 1604465 - DNA, 25 bp, Homo sapien
ggccccaaacctatctctgagaaga

SEQ ID NO: 1604466 - DNA, 25 bp, Homo sapien
tctttccagccgagggtatccagct

SEQ ID NO: 1604467 - DNA, 25 bp, Homo sapien
gtgtcctggcttccttactacgcct

SEQ ID NO: 1604468 - DNA, 25 bp, Homo sapien
caggtgtcctggcttccttactacg

SEQ ID NO: 1604469 - DNA, 25 bp, Homo sapien
cgtatcccgggttccaggtgtcctg

SEQ ID NO: 1604470 - DNA, 25 bp, Homo sapien
tggcttccttactacgcctcctttg

SEQ ID NO: 1604471 - DNA, 25 bp, Homo sapien
cagacagggactgcagcggcgccac

SEQ ID NO: 1604472 - DNA, 25 bp, Homo sapien
gcagacagggactgcagcggcgcca

SEQ ID NO: 1604473 - DNA, 25 bp, Homo sapien
tgcagaaaggacctgccccgctgac

SEQ ID NO: 1604474 - DNA, 25 bp, Homo sapien
gtggcgtcctctgcagaaaggacct

SEQ ID NO: 1604475 - DNA, 25 bp, Homo sapien
tctgcagaaaggacctgccccgctg

SEQ ID NO: 1604476 - DNA, 25 bp, Homo sapien
ctgtggcgtcctctgcagaaaggac

SEQ ID NO: 1604477 - DNA, 25 bp, Homo sapien
attggactgttcagagctcgcccca

SEQ ID NO: 1604478 - DNA, 25 bp, Homo sapien
ctgttgaccgttgcccaggcatcct

SEQ ID NO: 1604479 - DNA, 25 bp, Homo sapien
ggcggcacaccccattggactgttc

SEQ ID NO: 1604480 - DNA, 25 bp, Homo sapien
gattgggtagattcgggctccaccc

SEQ ID NO: 1604481 - DNA, 25 bp, Homo sapien
gtcatctaataggtggctgcaggga

SEQ ID NO: 1604482 - DNA, 25 bp, Homo sapien
ccaaatcaggctccgctggaggcat

SEQ ID NO: 1604483 - DNA, 25 bp, Homo sapien
aggctgtaaccgcagccaatagcag

SEQ ID NO: 1604484 - DNA, 25 bp, Homo sapien
gctgcagggataggctgtaaccgca

SEQ ID NO: 1604485 - DNA, 25 bp, Homo sapien
ggtacttcatgaaatccactccaag

SEQ ID NO: 1604486 - DNA, 25 bp, Homo sapien
tccattagcagtactcatgttgcgg

SEQ ID NO: 1604487 - DNA, 25 bp, Homo sapien
gaacaagatagaacctggcctggga

SEQ ID NO: 1604488 - DNA, 25 bp, Homo sapien
caccagtcactatttcagtcagagc

SEQ ID NO: 1604489 - DNA, 25 bp, Homo sapien
tctatgcccatgaaataactatcca

SEQ ID NO: 1604490 - DNA, 25 bp, Homo sapien
ggcccatttcacttagcacgtcaag

SEQ ID NO: 1604491 - DNA, 25 bp, Homo sapien
cctttggcaaatggtattgtacttt

SEQ ID NO: 1604492 - DNA, 25 bp, Homo sapien
tgtctttacatgaatggcccatttc

SEQ ID NO: 1604493 - DNA, 25 bp, Homo sapien
gatactactaatcctaatgagatgc

SEQ ID NO: 1604494 - DNA, 25 bp, Homo sapien
tcagcaggcttataccactgtacat

SEQ ID NO: 1604495 - DNA, 25 bp, Homo sapien
aaagatgtcgagcattgttacgtgc

SEQ ID NO: 1604496 - DNA, 25 bp, Homo sapien
cagtgatagtgcacaatgttctcca

SEQ ID NO: 1604497 - DNA, 25 bp, Homo sapien
tatgtagatacttgtagacctgtcc

SEQ ID NO: 1604498 - DNA, 25 bp, Homo sapien
ccaaaggcctcaaaagtctcagtta

SEQ ID NO: 1604499 - DNA, 25 bp, Homo sapien
gatgagactcaattcatgctgaggc

SEQ ID NO: 1604500 - DNA, 25 bp, Homo sapien
tatgaatctgaggtggcatacactc

SEQ ID NO: 1604501 - DNA, 25 bp, Homo sapien
caggtattcgaaggttgtgtgataa

SEQ ID NO: 1604502 - DNA, 25 bp, Homo sapien
ttcacaggtattcgaaggttgtgtg

SEQ ID NO: 1604503 - DNA, 25 bp, Homo sapien
ctttgaaaggaactggaataactga

SEQ ID NO: 1604504 - DNA, 25 bp, Homo sapien
attttcacaggtattcgaaggttgt

SEQ ID NO: 1604505 - DNA, 25 bp, Homo sapien
tccccagtgtgcctaatcatatgac

SEQ ID NO: 1604506 - DNA, 25 bp, Homo sapien
tcatgctttcgaacataactgggaa

SEQ ID NO: 1604507 - DNA, 25 bp, Homo sapien
catgtgttcggacagaactaggaca

SEQ ID NO: 1604508 - DNA, 25 bp, Homo sapien
taaacttgggcgatcaaaggctttc

SEQ ID NO: 1604509 - DNA, 25 bp, Homo sapien
tacattcacatggtcttactatagt

SEQ ID NO: 1604510 - DNA, 25 bp, Homo sapien
cacaaactacattcacatggtctta

SEQ ID NO: 1604511 - DNA, 25 bp, Homo sapien
tcacatggtcttactatagtaggaa

SEQ ID NO: 1604512 - DNA, 25 bp, Homo sapien
tggtcttactatagtaggaattttc

SEQ ID NO: 1604513 - DNA, 25 bp, Homo sapien
tctcccctgatttttgtaccaatct

SEQ ID NO: 1604514 - DNA, 25 bp, Homo sapien
aaaagaaggaatgatgtcatcctta

SEQ ID NO: 1604515 - DNA, 25 bp, Homo sapien
taaaagaaggaatgatgtcatcctt

SEQ ID NO: 1604516 - DNA, 25 bp, Homo sapien
aaagaaggaatgatgtcatccttac

SEQ ID NO: 1604517 - DNA, 25 bp, Homo sapien
ctacacaggccaggtttctaaaggt

SEQ ID NO: 1604518 - DNA, 25 bp, Homo sapien
ctcctcaagtgtgaagttcacagcc

SEQ ID NO: 1604519 - DNA, 25 bp, Homo sapien
ttctaaaggtttcccgcatcacatc

SEQ ID NO: 1604520 - DNA, 25 bp, Homo sapien
aaagcccactcctcaagtgtgaagt

SEQ ID NO: 1604521 - DNA, 25 bp, Homo sapien
taggaagctactgggaagacagaac

SEQ ID NO: 1604522 - DNA, 25 bp, Homo sapien
ttccaggccatcagacgtagacaga

SEQ ID NO: 1604523 - DNA, 25 bp, Homo sapien
tccacgttctgacaaaatccagctg

SEQ ID NO: 1604524 - DNA, 25 bp, Homo sapien
ccagaaggcccgtagaaatccacgt

SEQ ID NO: 1604525 - DNA, 25 bp, Homo sapien
gcagatcatgcctggtgacataggg

SEQ ID NO: 1604526 - DNA, 25 bp, Homo sapien
tatgatcacgccagtgcagatcatg

SEQ ID NO: 1604527 - DNA, 25 bp, Homo sapien
cgccagtgcagatcatgcctggtga

SEQ ID NO: 1604528 - DNA, 25 bp, Homo sapien
gatcacgccagtgcagatcatgcct

SEQ ID NO: 1604529 - DNA, 25 bp, Homo sapien
ataagaaagccagacaggcggctgg

SEQ ID NO: 1604530 - DNA, 25 bp, Homo sapien
ttattttacctataagaaagccaga

SEQ ID NO: 1604531 - DNA, 25 bp, Homo sapien
aagaaagccagacaggcggctgggt

SEQ ID NO: 1604532 - DNA, 25 bp, Homo sapien
gaaagccagacaggcggctgggtgc

SEQ ID NO: 1604533 - DNA, 25 bp, Homo sapien
tctgcctaacctctgggatgcttgc

SEQ ID NO: 1604534 - DNA, 25 bp, Homo sapien
gaaacaactctctcaaatcatggga

SEQ ID NO: 1604535 - DNA, 25 bp, Homo sapien
tatgcctatgtgtgcatccccagct

SEQ ID NO: 1604536 - DNA, 25 bp, Homo sapien
taactattacaacctcagacagggt

SEQ ID NO: 1604537 - DNA, 25 bp, Homo sapien
accatttatgtatataggaggaaag

SEQ ID NO: 1604538 - DNA, 25 bp, Homo sapien
actcaaacttaccatttatgtatat

SEQ ID NO: 1604539 - DNA, 25 bp, Homo sapien
tcactcaaacttaccatttatgtat

SEQ ID NO: 1604540 - DNA, 25 bp, Homo sapien
catttatgtatataggaggaaagga

SEQ ID NO: 1604541 - DNA, 25 bp, Homo sapien
ctacaggcacacaccgccacacccg

SEQ ID NO: 1604542 - DNA, 25 bp, Homo sapien
ctcagccacccagcagctgggacta

SEQ ID NO: 1604543 - DNA, 25 bp, Homo sapien
ctgcctcagccacccagcagctggg

SEQ ID NO: 1604544 - DNA, 25 bp, Homo sapien
gtgagccaccgtgcccggccaattt

SEQ ID NO: 1604545 - DNA, 25 bp, Homo sapien
gaacagttatccattacgacaaaat

SEQ ID NO: 1604546 - DNA, 25 bp, Homo sapien
tacagaacagttatccattacgaca

SEQ ID NO: 1604547 - DNA, 25 bp, Homo sapien
tatccattacgacaaaatctctacc

SEQ ID NO: 1604548 - DNA, 25 bp, Homo sapien
cccatctgataggatttagcattaa

SEQ ID NO: 1604549 - DNA, 25 bp, Homo sapien
gcctgtaatcccagttactcaggag

SEQ ID NO: 1604550 - DNA, 25 bp, Homo sapien
aaagtagccggtcgtggcggcgcat

SEQ ID NO: 1604551 - DNA, 25 bp, Homo sapien
tactcaggaggctgaggcaggagaa

SEQ ID NO: 1604552 - DNA, 25 bp, Homo sapien
attgcttgaacccggaaggcgaagg

SEQ ID NO: 1604553 - DNA, 25 bp, Homo sapien
aaagacgatgtactgggaaggccac

SEQ ID NO: 1604554 - DNA, 25 bp, Homo sapien
acgaaccgcacacccgagacgggat

SEQ ID NO: 1604555 - DNA, 25 bp, Homo sapien
agctgcgccagggaactcgggtccc

SEQ ID NO: 1604556 - DNA, 25 bp, Homo sapien
tcccgtgtcccagtacaaacaatct

SEQ ID NO: 1604557 - DNA, 25 bp, Homo sapien
gggtcctgcctacggctctctccgg

SEQ ID NO: 1604558 - DNA, 25 bp, Homo sapien
caaacgcagcggacacgaaacagga

SEQ ID NO: 1604559 - DNA, 25 bp, Homo sapien
gaagaccccgcggagttgttgaaca

SEQ ID NO: 1604560 - DNA, 25 bp, Homo sapien
ctggagaagcggagaccggaaccca

SEQ ID NO: 1604561 - DNA, 25 bp, Homo sapien
gctgaactactttgccgaggccttg

SEQ ID NO: 1604562 - DNA, 25 bp, Homo sapien
ggagaacctccgctttcatgtggag

SEQ ID NO: 1604563 - DNA, 25 bp, Homo sapien
cttctgggaacaaggctaatgctga

SEQ ID NO: 1604564 - DNA, 25 bp, Homo sapien
tgatgcttttggcactgctcacaga

SEQ ID NO: 1604565 - DNA, 25 bp, Homo sapien
tatcgaggtgaggtggcacatacct

SEQ ID NO: 1604566 - DNA, 25 bp, Homo sapien
accctcctgcgtcgatcccaaaatg

SEQ ID NO: 1604567 - DNA, 25 bp, Homo sapien
gaactgagtcatggaaatttaatca

SEQ ID NO: 1604568 - DNA, 25 bp, Homo sapien
taagattaggaaatagctgggcttg

SEQ ID NO: 1604569 - DNA, 25 bp, Homo sapien
tctggaggtccaaaggaatggagct

SEQ ID NO: 1604570 - DNA, 25 bp, Homo sapien
gaaattctaggcacctagtgaagcc

SEQ ID NO: 1604571 - DNA, 25 bp, Homo sapien
tttattagcggcctgtggaccccaa

SEQ ID NO: 1604572 - DNA, 25 bp, Homo sapien
gaagattgctatggtatgaagacag

SEQ ID NO: 1604573 - DNA, 25 bp, Homo sapien
tatcacaaaagatggctccttgagc

SEQ ID NO: 1604574 - DNA, 25 bp, Homo sapien
tcctgtagcagagataccccttagt

SEQ ID NO: 1604575 - DNA, 25 bp, Homo sapien
tataaccaagtgagatttgtccctg

SEQ ID NO: 1604576 - DNA, 25 bp, Homo sapien
caaatagaaggaccccaggtgttct

SEQ ID NO: 1604577 - DNA, 25 bp, Homo sapien
cagtcggcctctggaccctagtatc

SEQ ID NO: 1604578 - DNA, 25 bp, Homo sapien
tcctggtgagagaagcgaatgttcc

SEQ ID NO: 1604579 - DNA, 25 bp, Homo sapien
agaagcgaaggtgtgcatctcctgg

SEQ ID NO: 1604580 - DNA, 25 bp, Homo sapien
acagtagccgtcacttccactgagg

SEQ ID NO: 1604581 - DNA, 25 bp, Homo sapien
gacccgagcgacacaaagatcactt

SEQ ID NO: 1604582 - DNA, 25 bp, Homo sapien
ggccagaggcctaaagagttccgac

SEQ ID NO: 1604583 - DNA, 25 bp, Homo sapien
taaaacacactgacttgctaagaaa

SEQ ID NO: 1604584 - DNA, 25 bp, Homo sapien
gcctatgcaattcagaaaacggaga

SEQ ID NO: 1604585 - DNA, 25 bp, Homo sapien
tgtgcataggcagatcccacttggg

SEQ ID NO: 1604586 - DNA, 25 bp, Homo sapien
gcatgagtcacgtcttcaaagggaa

SEQ ID NO: 1604587 - DNA, 25 bp, Homo sapien
caatcccgcaggagagtgcaagttc

SEQ ID NO: 1604588 - DNA, 25 bp, Homo sapien
tacatttaagaaggtggctctccag

SEQ ID NO: 1604589 - DNA, 25 bp, Homo sapien
tcgtgcacgtgcaaagactttgagt

SEQ ID NO: 1604590 - DNA, 25 bp, Homo sapien
tagggcttctgtctactatgagtcc

SEQ ID NO: 1604591 - DNA, 25 bp, Homo sapien
ttaccacattgtctacactgaaagg

SEQ ID NO: 1604592 - DNA, 25 bp, Homo sapien
cacattgtctacactgaaagggtct

SEQ ID NO: 1604593 - DNA, 25 bp, Homo sapien
tgaagtaaatgaagacccgaccaca

SEQ ID NO: 1604594 - DNA, 25 bp, Homo sapien
tcatggattcgaaagtgagtggaat

SEQ ID NO: 1604595 - DNA, 25 bp, Homo sapien
cgtgccttcgaaggtgactgaagta

SEQ ID NO: 1604596 - DNA, 25 bp, Homo sapien
tgtgacttctttcgtgccttcgaag

SEQ ID NO: 1604597 - DNA, 25 bp, Homo sapien
catgggttcgaatactggagctgcg

SEQ ID NO: 1604598 - DNA, 25 bp, Homo sapien
catggcgccgaagagcagtgagata

SEQ ID NO: 1604599 - DNA, 25 bp, Homo sapien
gagacctgatgcatgaagacttccc

SEQ ID NO: 1604600 - DNA, 25 bp, Homo sapien
cacaggaactagatgacttgaaggc

SEQ ID NO: 1604601 - DNA, 25 bp, Homo sapien
ttcttccctggtttttgtgttcatc

SEQ ID NO: 1604602 - DNA, 25 bp, Homo sapien
ttccctggtttttgtgttcatcttc

SEQ ID NO: 1604603 - DNA, 25 bp, Homo sapien
tttttgtgttcatcttcaatatcct

SEQ ID NO: 1604604 - DNA, 25 bp, Homo sapien
ggtttttgtgttcatcttcaatatc

SEQ ID NO: 1604605 - DNA, 25 bp, Homo sapien
agccacatcctcaagggagatggag

SEQ ID NO: 1604606 - DNA, 25 bp, Homo sapien
cagccacatcctcaagggagatgga

SEQ ID NO: 1604607 - DNA, 25 bp, Homo sapien
gccacatcctcaagggagatggagt

SEQ ID NO: 1604608 - DNA, 25 bp, Homo sapien
tctttaaatacagacccaagaccat

SEQ ID NO: 1604609 - DNA, 25 bp, Homo sapien
tgctctttaaatacagacccaagac

SEQ ID NO: 1604610 - DNA, 25 bp, Homo sapien
cttattgctctttaaatacagaccc

SEQ ID NO: 1604611 - DNA, 25 bp, Homo sapien
ttattgctctttaaatacagaccca

SEQ ID NO: 1604612 - DNA, 25 bp, Homo sapien
catgctgaacttaaggattggctta

SEQ ID NO: 1604613 - DNA, 25 bp, Homo sapien
tgaacttaaggattggcttattgaa

SEQ ID NO: 1604614 - DNA, 25 bp, Homo sapien
cagcatgctgaacttaaggattggc

SEQ ID NO: 1604615 - DNA, 25 bp, Homo sapien
taaggattggcttattgaaaatgtc

SEQ ID NO: 1604616 - DNA, 25 bp, Homo sapien
ttgactatgggagtgccttcacaaa

SEQ ID NO: 1604617 - DNA, 25 bp, Homo sapien
tgagagcctggttattggccttgac

SEQ ID NO: 1604618 - DNA, 25 bp, Homo sapien
tgccttcacaaagacccgaaagacc

SEQ ID NO: 1604619 - DNA, 25 bp, Homo sapien
gagcctggttattggccttgactat

SEQ ID NO: 1604620 - DNA, 25 bp, Homo sapien
gctttgtccatggtgttcactgttc

SEQ ID NO: 1604621 - DNA, 25 bp, Homo sapien
tgcactaaaagccagacttcgccac

SEQ ID NO: 1604622 - DNA, 25 bp, Homo sapien
tatatccacgtaacacaagtgcatt

SEQ ID NO: 1604623 - DNA, 25 bp, Homo sapien
atatacactctttgggtgatgggtg

SEQ ID NO: 1604624 - DNA, 25 bp, Homo sapien
gacttcgccactatgaaatatatcc

SEQ ID NO: 1604625 - DNA, 25 bp, Homo sapien
tgtgcggccttgactagacgaccac

SEQ ID NO: 1604626 - DNA, 25 bp, Homo sapien
aaactgagactggaattcctgcgca

SEQ ID NO: 1604627 - DNA, 25 bp, Homo sapien
tcgaggggtcgctccatctggaaac

SEQ ID NO: 1604628 - DNA, 25 bp, Homo sapien
gacgaccacttgctctggacttgct

SEQ ID NO: 1604629 - DNA, 25 bp, Homo sapien
aagacttccgtgtccgacccgagat

SEQ ID NO: 1604630 - DNA, 25 bp, Homo sapien
cccgagatccggaacaatttctgct

SEQ ID NO: 1604631 - DNA, 25 bp, Homo sapien
ccctgtccccgcatccagaaacact

SEQ ID NO: 1604632 - DNA, 25 bp, Homo sapien
aacacaattgtccacggagggcacc

SEQ ID NO: 1604633 - DNA, 25 bp, Homo sapien
gagttattcaggatatagccttcac

SEQ ID NO: 1604634 - DNA, 25 bp, Homo sapien
gcatggcctcccacaatttcttgac

SEQ ID NO: 1604635 - DNA, 25 bp, Homo sapien
tgggctcgagcacttctcccgccct

SEQ ID NO: 1604636 - DNA, 25 bp, Homo sapien
gaatgtaatacacgtggagttattc

SEQ ID NO: 1604637 - DNA, 25 bp, Homo sapien
caggactactctggtcaacctagtg

SEQ ID NO: 1604638 - DNA, 25 bp, Homo sapien
tgaaccaagatcacgtgatggcagt

SEQ ID NO: 1604639 - DNA, 25 bp, Homo sapien
tctaagtgtggtagcacaccctgta

SEQ ID NO: 1604640 - DNA, 25 bp, Homo sapien
tgcttgatgccaggactactctggt

SEQ ID NO: 1604641 - DNA, 25 bp, Homo sapien
ataaaatctagagctggacgtggcc

SEQ ID NO: 1604642 - DNA, 25 bp, Homo sapien
cattagtcaggtattggaaccccac

SEQ ID NO: 1604643 - DNA, 25 bp, Homo sapien
cttgcatgagatttgccaggcagaa

SEQ ID NO: 1604644 - DNA, 25 bp, Homo sapien
gagtttgaattcaggaaggacacct

SEQ ID NO: 1604645 - DNA, 25 bp, Homo sapien
aatttattggtgagtattaagaggg

SEQ ID NO: 1604646 - DNA, 25 bp, Homo sapien
tggtgagtattaagaggggggcagc

SEQ ID NO: 1604647 - DNA, 25 bp, Homo sapien
agtattaagaggggggcagcacatt

SEQ ID NO: 1604648 - DNA, 25 bp, Homo sapien
tattggtgagtattaagaggggggc

SEQ ID NO: 1604649 - DNA, 25 bp, Homo sapien
cgattggggatatacttgaccccac

SEQ ID NO: 1604650 - DNA, 25 bp, Homo sapien
ccagagggccacgattggggatata

SEQ ID NO: 1604651 - DNA, 25 bp, Homo sapien
gccacgattggggatatacttgacc

SEQ ID NO: 1604652 - DNA, 25 bp, Homo sapien
cagagggccacgattggggatatac

SEQ ID NO: 1604653 - DNA, 25 bp, Homo sapien
cctgcgcagggcctcaatcacacgc

SEQ ID NO: 1604654 - DNA, 25 bp, Homo sapien
tgcgcagggcctcaatcacacgctc

SEQ ID NO: 1604655 - DNA, 25 bp, Homo sapien
gccctgcgcagggcctcaatcacac

SEQ ID NO: 1604656 - DNA, 25 bp, Homo sapien
cgcagggcctcaatcacacgctcct

SEQ ID NO: 1604657 - DNA, 25 bp, Homo sapien
aggcacctcgcattcctgtttggag

SEQ ID NO: 1604658 - DNA, 25 bp, Homo sapien
aaaggcacctcgcattcctgtttgg

SEQ ID NO: 1604659 - DNA, 25 bp, Homo sapien
tccaaaggcacctcgcattcctgtt

SEQ ID NO: 1604660 - DNA, 25 bp, Homo sapien
tttccaaaggcacctcgcattcctg

SEQ ID NO: 1604661 - DNA, 25 bp, Homo sapien
ccggatatggaagccatctttgcca

SEQ ID NO: 1604662 - DNA, 25 bp, Homo sapien
ttgggtacggcttgttcttacaata

SEQ ID NO: 1604663 - DNA, 25 bp, Homo sapien
gcgacaccaggatcttcagtggcac

SEQ ID NO: 1604664 - DNA, 25 bp, Homo sapien
ggcgacaccaggatcttcagtggca

SEQ ID NO: 1604665 - DNA, 25 bp, Homo sapien
cgacaccaggatcttcagtggcaca

SEQ ID NO: 1604666 - DNA, 25 bp, Homo sapien
gtagcgttttaatggcagcagcccc

SEQ ID NO: 1604667 - DNA, 25 bp, Homo sapien
tagtagcgttttaatggcagcagcc

SEQ ID NO: 1604668 - DNA, 25 bp, Homo sapien
gagtctggtctgcccccggagcagg

SEQ ID NO: 1604669 - DNA, 25 bp, Homo sapien
agtctggtctgcccccggagcagga

SEQ ID NO: 1604670 - DNA, 25 bp, Homo sapien
gaaagtgcggatttccatgggttcc

SEQ ID NO: 1604671 - DNA, 25 bp, Homo sapien
ctgaggccaggaaagtgcggatttc

SEQ ID NO: 1604672 - DNA, 25 bp, Homo sapien
ccgggtccagctggtacggagtttg

SEQ ID NO: 1604673 - DNA, 25 bp, Homo sapien
gtccagctggtacggagtttggtgg

SEQ ID NO: 1604674 - DNA, 25 bp, Homo sapien
cctggtttgccgcacccatttcaga

SEQ ID NO: 1604675 - DNA, 25 bp, Homo sapien
ccgcacccatttcagatcctttaag

SEQ ID NO: 1604676 - DNA, 25 bp, Homo sapien
attcctggtttgccgcacccatttc

SEQ ID NO: 1604677 - DNA, 25 bp, Homo sapien
gtttgccgcacccatttcagatcct

SEQ ID NO: 1604678 - DNA, 25 bp, Homo sapien
ctgtgtttgttgtccacttgagcct

SEQ ID NO: 1604679 - DNA, 25 bp, Homo sapien
ttgttgtccacttgagcctggaggc

SEQ ID NO: 1604680 - DNA, 25 bp, Homo sapien
tgttgtccacttgagcctggaggct

SEQ ID NO: 1604681 - DNA, 25 bp, Homo sapien
tgtttgttgtccacttgagcctgga

SEQ ID NO: 1604682 - DNA, 25 bp, Homo sapien
ttggccaccagcgtggtctcctgca

SEQ ID NO: 1604683 - DNA, 25 bp, Homo sapien
ctcgcggagctggttggccaccagc

SEQ ID NO: 1604684 - DNA, 25 bp, Homo sapien
tgatggtgaaggtggagaacaggtc

SEQ ID NO: 1604685 - DNA, 25 bp, Homo sapien
ctcctgcaggcgggtgatggtgaag

SEQ ID NO: 1604686 - DNA, 25 bp, Homo sapien
gcgctcaggttacgtccggaatcct

SEQ ID NO: 1604687 - DNA, 25 bp, Homo sapien
gtccggaatcctctcctacggcaaa

SEQ ID NO: 1604688 - DNA, 25 bp, Homo sapien
ctcaggttacgtccggaatcctctc

SEQ ID NO: 1604689 - DNA, 25 bp, Homo sapien
gggcgctcaggttacgtccggaatc

SEQ ID NO: 1604690 - DNA, 25 bp, Homo sapien
gcagcaccatttcggggccccagct

SEQ ID NO: 1604691 - DNA, 25 bp, Homo sapien
ccgagggcggcaggtccctgcgcag

SEQ ID NO: 1604692 - DNA, 25 bp, Homo sapien
gcgcagcagcaccatttcggggccc

SEQ ID NO: 1604693 - DNA, 25 bp, Homo sapien
gtgagcaggtgcaccgagggcggca

SEQ ID NO: 1604694 - DNA, 25 bp, Homo sapien
gccaggagccggtgtccggcggctg

SEQ ID NO: 1604695 - DNA, 25 bp, Homo sapien
gacccgttctccattagtggctccg

SEQ ID NO: 1604696 - DNA, 25 bp, Homo sapien
attagtggctccgatactccgcgtc

SEQ ID NO: 1604697 - DNA, 25 bp, Homo sapien
cccgagattgtaggcggcgccgcca

SEQ ID NO: 1604698 - DNA, 25 bp, Homo sapien
gcacagtcagctgcatgtttccatc

SEQ ID NO: 1604699 - DNA, 25 bp, Homo sapien
ccctgggagcggtcagtcagcacag

SEQ ID NO: 1604700 - DNA, 25 bp, Homo sapien
gagctccagcgagccatctctcagg

SEQ ID NO: 1604701 - DNA, 25 bp, Homo sapien
tcagcacagtcagctgcatgtttcc

SEQ ID NO: 1604702 - DNA, 25 bp, Homo sapien
cgtgatgtaaatccgggtgttgact

SEQ ID NO: 1604703 - DNA, 25 bp, Homo sapien
gatagtagtttcctgccacgggctc

SEQ ID NO: 1604704 - DNA, 25 bp, Homo sapien
tttccaggtgggtcgataatcccgc

SEQ ID NO: 1604705 - DNA, 25 bp, Homo sapien
tccgggtgttgactggatagtagtt

SEQ ID NO: 1604706 - DNA, 25 bp, Homo sapien
caccctgcctggctcccccgccctt

SEQ ID NO: 1604707 - DNA, 25 bp, Homo sapien
actgcaccctgcctggctcccccgc

SEQ ID NO: 1604708 - DNA, 25 bp, Homo sapien
cactgcaccctgcctggctcccccg

SEQ ID NO: 1604709 - DNA, 25 bp, Homo sapien
tgcaccctgcctggctcccccgccc

SEQ ID NO: 1604710 - DNA, 25 bp, Homo sapien
ggatctcccggccattgctgtctgt

SEQ ID NO: 1604711 - DNA, 25 bp, Homo sapien
ggtgtgtcaaaacggctgatgacct

SEQ ID NO: 1604712 - DNA, 25 bp, Homo sapien
agaagcgtccctttgtctccagcgg

SEQ ID NO: 1604713 - DNA, 25 bp, Homo sapien
cattgctgtctgtgtagaagcgtcc

SEQ ID NO: 1604714 - DNA, 25 bp, Homo sapien
acaccaagctgagaagttctggtgc

SEQ ID NO: 1604715 - DNA, 25 bp, Homo sapien
ggtgcacctcctgcaccaagggtgt

SEQ ID NO: 1604716 - DNA, 25 bp, Homo sapien
accactctagctccaggtgccgctg

SEQ ID NO: 1604717 - DNA, 25 bp, Homo sapien
acaggcgaaccacctgggaacacca

SEQ ID NO: 1604718 - DNA, 25 bp, Homo sapien
tcttccctgaggctatcagtagctg

SEQ ID NO: 1604719 - DNA, 25 bp, Homo sapien
gtagctgagtgaccagtttgcccca

SEQ ID NO: 1604720 - DNA, 25 bp, Homo sapien
tgccccatagaaagtgatccaagtg

SEQ ID NO: 1604721 - DNA, 25 bp, Homo sapien
caaacacaaatgtggcggctggagc

SEQ ID NO: 1604722 - DNA, 25 bp, Homo sapien
gtggatctgagcccagcggctcaca

SEQ ID NO: 1604723 - DNA, 25 bp, Homo sapien
cacaggcagcggtttctgttggttg

SEQ ID NO: 1604724 - DNA, 25 bp, Homo sapien
ctgttggttgggtctgaagatgtag

SEQ ID NO: 1604725 - DNA, 25 bp, Homo sapien
gtctgaagatgtaggcacctgaggc

SEQ ID NO: 1604726 - DNA, 25 bp, Homo sapien
ctggtcactttcgttgtcacctata

SEQ ID NO: 1604727 - DNA, 25 bp, Homo sapien
tcactttcgttgtcacctatactgg

SEQ ID NO: 1604728 - DNA, 25 bp, Homo sapien
ttcgttgtcacctatactggcgttg

SEQ ID NO: 1604729 - DNA, 25 bp, Homo sapien
gttgtcacctatactggcgttgtac

SEQ ID NO: 1604730 - DNA, 25 bp, Homo sapien
tgtcaggatcaaacgttgcccggat

SEQ ID NO: 1604731 - DNA, 25 bp, Homo sapien
cctgtgtcaggatcaaacgttgccc

SEQ ID NO: 1604732 - DNA, 25 bp, Homo sapien
agccctgtgtcaggatcaaacgttg

SEQ ID NO: 1604733 - DNA, 25 bp, Homo sapien
caggatcaaacgttgcccggatgtg

SEQ ID NO: 1604734 - DNA, 25 bp, Homo sapien
gaacagtcctactgcagaacttctt

SEQ ID NO: 1604735 - DNA, 25 bp, Homo sapien
atgaacagtcctactgcagaacttc

SEQ ID NO: 1604736 - DNA, 25 bp, Homo sapien
ttcttcctaacatgaacagtcctac

SEQ ID NO: 1604737 - DNA, 25 bp, Homo sapien
gatgttttcttcctaacatgaacag

SEQ ID NO: 1604738 - DNA, 25 bp, Homo sapien
ggtcctcataacagtcccaggaaag

SEQ ID NO: 1604739 - DNA, 25 bp, Homo sapien
taaatgtcacctttatcgggaacac

SEQ ID NO: 1604740 - DNA, 25 bp, Homo sapien
cccaaagagctaggagtagacacat

SEQ ID NO: 1604741 - DNA, 25 bp, Homo sapien
tgttggtcctcaaggccctcaaggt

SEQ ID NO: 1604742 - DNA, 25 bp, Homo sapien
aaagcaggggaccaggatcttctgg

SEQ ID NO: 1604743 - DNA, 25 bp, Homo sapien
agcagctccggagggtgcgcctggc

SEQ ID NO: 1604744 - DNA, 25 bp, Homo sapien
gttaaagcaggggaccaggatcttc

SEQ ID NO: 1604745 - DNA, 25 bp, Homo sapien
ctcattttcgatggttaaagcaggg

SEQ ID NO: 1604746 - DNA, 25 bp, Homo sapien
gtattcatggaagcaggcgatatcc

SEQ ID NO: 1604747 - DNA, 25 bp, Homo sapien
actcacaggaggcatatgttcccaa

SEQ ID NO: 1604748 - DNA, 25 bp, Homo sapien
gaaactgagtcaagagtacccatgg

SEQ ID NO: 1604749 - DNA, 25 bp, Homo sapien
cctataatccagcaggcggagtttg

SEQ ID NO: 1604750 - DNA, 25 bp, Homo sapien
tccttcacaacgaaaacgccttcgc

SEQ ID NO: 1604751 - DNA, 25 bp, Homo sapien
ttcacaacgaaaacgccttcgctga

SEQ ID NO: 1604752 - DNA, 25 bp, Homo sapien
cttcacaacgaaaacgccttcgctg

SEQ ID NO: 1604753 - DNA, 25 bp, Homo sapien
tcacaacgaaaacgccttcgctgac

SEQ ID NO: 1604754 - DNA, 25 bp, Homo sapien
gccccaggggattataaacgatgac

SEQ ID NO: 1604755 - DNA, 25 bp, Homo sapien
tcaccttccgccccaggggattata

SEQ ID NO: 1604756 - DNA, 25 bp, Homo sapien
ccgccccaggggattataaacgatg

SEQ ID NO: 1604757 - DNA, 25 bp, Homo sapien
catccaattcaccttccgccccagg

SEQ ID NO: 1604758 - DNA, 25 bp, Homo sapien
ctgagcgggcagatgctgatgttta

SEQ ID NO: 1604759 - DNA, 25 bp, Homo sapien
gcgccagcgcgttgctcagaagaac

SEQ ID NO: 1604760 - DNA, 25 bp, Homo sapien
tttgaagcctctgagccgcgccagc

SEQ ID NO: 1604761 - DNA, 25 bp, Homo sapien
caaaaggtgaagtgatctttgaagc

SEQ ID NO: 1604762 - DNA, 25 bp, Homo sapien
ctgacggcgtcgtgatgctggagca

SEQ ID NO: 1604763 - DNA, 25 bp, Homo sapien
cgcgcgtagtcgttggccacgtgct

SEQ ID NO: 1604764 - DNA, 25 bp, Homo sapien
acgtgctggcgggaggtgccgctga

SEQ ID NO: 1604765 - DNA, 25 bp, Homo sapien
agcctgccgcaagctggcgcgcgta

SEQ ID NO: 1604766 - DNA, 25 bp, Homo sapien
ttaagaaggaactcgaggacggctg

SEQ ID NO: 1604767 - DNA, 25 bp, Homo sapien
acaatgagtccggtgaggttctgtg

SEQ ID NO: 1604768 - DNA, 25 bp, Homo sapien
cgggcaggattcttagaggctttaa

SEQ ID NO: 1604769 - DNA, 25 bp, Homo sapien
ggaagcgaaaggtccggtgctggcg

SEQ ID NO: 1604770 - DNA, 25 bp, Homo sapien
tgcactgtctccggagccatagggt

SEQ ID NO: 1604771 - DNA, 25 bp, Homo sapien
agccatagggtcccacgttggccgc

SEQ ID NO: 1604772 - DNA, 25 bp, Homo sapien
cactgtctccggagccatagggtcc

SEQ ID NO: 1604773 - DNA, 25 bp, Homo sapien
gggtgcactgtctccggagccatag

SEQ ID NO: 1604774 - DNA, 25 bp, Homo sapien
tgcaggaagttgtagctgaggcgct

SEQ ID NO: 1604775 - DNA, 25 bp, Homo sapien
agctgaggcgctcgtagcgtttgag

SEQ ID NO: 1604776 - DNA, 25 bp, Homo sapien
tgagggccggccgactggaaaagta

SEQ ID NO: 1604777 - DNA, 25 bp, Homo sapien
gccatccgcgtaagggaagaagtcg

SEQ ID NO: 1604778 - DNA, 25 bp, Homo sapien
attgagggcagggtcatgacccacg

SEQ ID NO: 1604779 - DNA, 25 bp, Homo sapien
gggcattgagggcagggtcatgacc

SEQ ID NO: 1604780 - DNA, 25 bp, Homo sapien
ggggcatgccaacccccccaagctc

SEQ ID NO: 1604781 - DNA, 25 bp, Homo sapien
gggtcatgacccacggggcatgcca

SEQ ID NO: 1604782 - DNA, 25 bp, Homo sapien
tcagctcccagaggtaacaagcggg

SEQ ID NO: 1604783 - DNA, 25 bp, Homo sapien
gttcagctcccagaggtaacaagcg

SEQ ID NO: 1604784 - DNA, 25 bp, Homo sapien
gagaacatggacactgcttcctttt

SEQ ID NO: 1604785 - DNA, 25 bp, Homo sapien
caagcgggggtggagtagagaacat

SEQ ID NO: 1604786 - DNA, 25 bp, Homo sapien
agtgtgacattatagggcaggaata

SEQ ID NO: 1604787 - DNA, 25 bp, Homo sapien
tttgtggaaaaactaagtgtgacat

SEQ ID NO: 1604788 - DNA, 25 bp, Homo sapien
tatagggcaggaataatcgttttgc

SEQ ID NO: 1604789 - DNA, 25 bp, Homo sapien
tcgttttgcaggactgtcagattgt

SEQ ID NO: 1604790 - DNA, 25 bp, Homo sapien
acagtgtggttggtgcggtaatacc

SEQ ID NO: 1604791 - DNA, 25 bp, Homo sapien
gtccgagcccatggtcatcacagtg

SEQ ID NO: 1604792 - DNA, 25 bp, Homo sapien
tgcgcatttaccagccggatgagct

SEQ ID NO: 1604793 - DNA, 25 bp, Homo sapien
cacatgttggcattctcatattgga

SEQ ID NO: 1604794 - DNA, 25 bp, Homo sapien
accagcggctgatcgacacacagca

SEQ ID NO: 1604795 - DNA, 25 bp, Homo sapien
taggaagtaatcgaccagctccttg

SEQ ID NO: 1604796 - DNA, 25 bp, Homo sapien
cacagattccttggcgggttgtaac

SEQ ID NO: 1604797 - DNA, 25 bp, Homo sapien
tgggcagtggccacatttaggaagt

SEQ ID NO: 1604798 - DNA, 25 bp, Homo sapien
cgcccaaagaagaagccgtcgaagc

SEQ ID NO: 1604799 - DNA, 25 bp, Homo sapien
ttatcttgataatcaaggcgcccaa

SEQ ID NO: 1604800 - DNA, 25 bp, Homo sapien
tcaaggcgcccaaagaagaagccgt

SEQ ID NO: 1604801 - DNA, 25 bp, Homo sapien
tctgcatccgtacccacttatcttg

SEQ ID NO: 1604802 - DNA, 25 bp, Homo sapien
tgggtggctgcctcatcgttcatca

SEQ ID NO: 1604803 - DNA, 25 bp, Homo sapien
gggtcaatgtgccaggccacacggg

SEQ ID NO: 1604804 - DNA, 25 bp, Homo sapien
gggtcgcccatcattgccaaatgtg

SEQ ID NO: 1604805 - DNA, 25 bp, Homo sapien
cccaagtgtcatctggtccacgatg

SEQ ID NO: 1604806 - DNA, 25 bp, Homo sapien
aaggtctcgcacgacttcctgtgtg

SEQ ID NO: 1604807 - DNA, 25 bp, Homo sapien
gatgtactgcacaccggcgtgctgg

SEQ ID NO: 1604808 - DNA, 25 bp, Homo sapien
ggcatttgtctgctggtgccaccaa

SEQ ID NO: 1604809 - DNA, 25 bp, Homo sapien
tctccacgtaaatgaagcgacgggt

SEQ ID NO: 1604810 - DNA, 25 bp, Homo sapien
acggttttgagccagcccacgtcat

SEQ ID NO: 1604811 - DNA, 25 bp, Homo sapien
ccacgtcatcatgtgtgtgaggcag

SEQ ID NO: 1604812 - DNA, 25 bp, Homo sapien
ttgagccagcccacgtcatcatgtg

SEQ ID NO: 1604813 - DNA, 25 bp, Homo sapien
agtactggtccacggttttgagcca

SEQ ID NO: 1604814 - DNA, 25 bp, Homo sapien
caaacacacataccttgtcaataac

SEQ ID NO: 1604815 - DNA, 25 bp, Homo sapien
aaacacacataccttgtcaataacc

SEQ ID NO: 1604816 - DNA, 25 bp, Homo sapien
aacacacataccttgtcaataaccc

SEQ ID NO: 1604817 - DNA, 25 bp, Homo sapien
gtgactcagagaggcctgatctcgc

SEQ ID NO: 1604818 - DNA, 25 bp, Homo sapien
gtgagtgactcagagaggcctgatc

SEQ ID NO: 1604819 - DNA, 25 bp, Homo sapien
ctagaggtgagtgactcagagaggc

SEQ ID NO: 1604820 - DNA, 25 bp, Homo sapien
tgagtgactcagagaggcctgatct

SEQ ID NO: 1604821 - DNA, 25 bp, Homo sapien
cggcagccgccagcaacaaaaggaa

SEQ ID NO: 1604822 - DNA, 25 bp, Homo sapien
ccccggcccgagcaccggcagccgc

SEQ ID NO: 1604823 - DNA, 25 bp, Homo sapien
ctcgtatcccccggcccgagcaccg

SEQ ID NO: 1604824 - DNA, 25 bp, Homo sapien
aaaaagcagagaggcgggagcggtg

SEQ ID NO: 1604825 - DNA, 25 bp, Homo sapien
agtccaggcagccgcgagcgcagac

SEQ ID NO: 1604826 - DNA, 25 bp, Homo sapien
tgagtccaggcagccgcgagcgcag

SEQ ID NO: 1604827 - DNA, 25 bp, Homo sapien
cgcgagcgcagacccccgaagcccg

SEQ ID NO: 1604828 - DNA, 25 bp, Homo sapien
gcgagcgcagacccccgaagcccgc

SEQ ID NO: 1604829 - DNA, 25 bp, Homo sapien
taaaggtgacactggcgtctcacgg

SEQ ID NO: 1604830 - DNA, 25 bp, Homo sapien
taggaaaatgccaccctcagggcac

SEQ ID NO: 1604831 - DNA, 25 bp, Homo sapien
gacggaatgcctcttaatgccggaa

SEQ ID NO: 1604832 - DNA, 25 bp, Homo sapien
gaatgcctcttaatgccggtaggag

SEQ ID NO: 1604833 - DNA, 25 bp, Homo sapien
ggtttcaacgagaaagcaaatgaat

SEQ ID NO: 1604834 - DNA, 25 bp, Homo sapien
acaacaggtttcaacgagaaagcaa

SEQ ID NO: 1604835 - DNA, 25 bp, Homo sapien
tacccctagaaacatggacagcatc

SEQ ID NO: 1604836 - DNA, 25 bp, Homo sapien
ctctatccagctgggggcaccgaga

SEQ ID NO: 1604837 - DNA, 25 bp, Homo sapien
ggcagcaggtttagcagccaaagcc

SEQ ID NO: 1604838 - DNA, 25 bp, Homo sapien
gcaggtttagcagccaaagcccagg

SEQ ID NO: 1604839 - DNA, 25 bp, Homo sapien
tccaggatggcagctgaaggcagca

SEQ ID NO: 1604840 - DNA, 25 bp, Homo sapien
gaaggcagcaggtttagcagccaaa

SEQ ID NO: 1604841 - DNA, 25 bp, Homo sapien
ctagtggatagacagggtccaaaat

SEQ ID NO: 1604842 - DNA, 25 bp, Homo sapien
tggatagacagggtccaaaatgtga

SEQ ID NO: 1604843 - DNA, 25 bp, Homo sapien
atagacagggtccaaaatgtgaccc

SEQ ID NO: 1604844 - DNA, 25 bp, Homo sapien
gacagggtccaaaatgtgacccttc

SEQ ID NO: 1604845 - DNA, 25 bp, Homo sapien
tgcagataggacatcaccacggcag

SEQ ID NO: 1604846 - DNA, 25 bp, Homo sapien
taggacatcaccacggcagagatgg

SEQ ID NO: 1604847 - DNA, 25 bp, Homo sapien
ttctgcagataggacatcaccacgg

SEQ ID NO: 1604848 - DNA, 25 bp, Homo sapien
agataggacatcaccacggcagaga

SEQ ID NO: 1604849 - DNA, 25 bp, Homo sapien
caccccttactcaagagtcacttgt

SEQ ID NO: 1604850 - DNA, 25 bp, Homo sapien
acaggagagaggtgtcagtctagga

SEQ ID NO: 1604851 - DNA, 25 bp, Homo sapien
actcaagagtcacttgttctgtagg

SEQ ID NO: 1604852 - DNA, 25 bp, Homo sapien
tgtcagtctaggatggccaggctgg

SEQ ID NO: 1604853 - DNA, 25 bp, Homo sapien
tccgagctccgagagttggcaaagc

SEQ ID NO: 1604854 - DNA, 25 bp, Homo sapien
ttgcttcgtgtcctccgagctccga

SEQ ID NO: 1604855 - DNA, 25 bp, Homo sapien
gaagctactcatcatttgcttcgtg

SEQ ID NO: 1604856 - DNA, 25 bp, Homo sapien
gatgaaggagcagtagacagcgacc

SEQ ID NO: 1604857 - DNA, 25 bp, Homo sapien
gaatccttgacttcaccaaagactg

SEQ ID NO: 1604858 - DNA, 25 bp, Homo sapien
tcaggtccaactacacccatagaag

SEQ ID NO: 1604859 - DNA, 25 bp, Homo sapien
atcagcaatgacaagacaccccgct

SEQ ID NO: 1604860 - DNA, 25 bp, Homo sapien
gacatcccacatgcttaagaccctg

SEQ ID NO: 1604861 - DNA, 25 bp, Homo sapien
aaggccgggttacattcgctcggcg

SEQ ID NO: 1604862 - DNA, 25 bp, Homo sapien
tgaggccgcacatgctgaagatcat

SEQ ID NO: 1604863 - DNA, 25 bp, Homo sapien
caggttcatgtagtccggcgtcggg

SEQ ID NO: 1604864 - DNA, 25 bp, Homo sapien
gtccaaggccgggttacattcgctc

SEQ ID NO: 1604865 - DNA, 25 bp, Homo sapien
cagggccccgatccacacccacaac

SEQ ID NO: 1604866 - DNA, 25 bp, Homo sapien
cccgggatagacaggcgcttcccag

SEQ ID NO: 1604867 - DNA, 25 bp, Homo sapien
acccgaacccgtgcccacgacgctg

SEQ ID NO: 1604868 - DNA, 25 bp, Homo sapien
acaggctcgagggtcaggggcgctc

SEQ ID NO: 1604869 - DNA, 25 bp, Homo sapien
tgttcggcctccgtgggtccgacat

SEQ ID NO: 1604870 - DNA, 25 bp, Homo sapien
ctcagcactttgttcggcctccgtg

SEQ ID NO: 1604871 - DNA, 25 bp, Homo sapien
gcactttgttcggcctccgtgggtc

SEQ ID NO: 1604872 - DNA, 25 bp, Homo sapien
ttgttcggcctccgtgggtccgaca

SEQ ID NO: 1604873 - DNA, 25 bp, Homo sapien
tcagaccacgagatcctggcagggt

SEQ ID NO: 1604874 - DNA, 25 bp, Homo sapien
tcagggcaggtcgtgcgcaaattcc

SEQ ID NO: 1604875 - DNA, 25 bp, Homo sapien
tattagcgcataggtggtgacacgg

SEQ ID NO: 1604876 - DNA, 25 bp, Homo sapien
aaacggttgaagacgctggactgcg

SEQ ID NO: 1604877 - DNA, 25 bp, Homo sapien
gaatcagaaggactccaagggcttg

SEQ ID NO: 1604878 - DNA, 25 bp, Homo sapien
gcctggagccatgtgagtgtagtca

SEQ ID NO: 1604879 - DNA, 25 bp, Homo sapien
tgatggagtaggacgtaattggccc

SEQ ID NO: 1604880 - DNA, 25 bp, Homo sapien
ggcctgagtctcaaggccagagctt

SEQ ID NO: 1604881 - DNA, 25 bp, Homo sapien
ggtaagaccttcctgggaccgcagc

SEQ ID NO: 1604882 - DNA, 25 bp, Homo sapien
ggacttcagataccatcttattcta

SEQ ID NO: 1604883 - DNA, 25 bp, Homo sapien
ccatcttattctagagacgtagctg

SEQ ID NO: 1604884 - DNA, 25 bp, Homo sapien
agacgtagctgaccaaaaagtaggg

SEQ ID NO: 1604885 - DNA, 25 bp, Homo sapien
tcttctgggcaaaggtttcagccac

SEQ ID NO: 1604886 - DNA, 25 bp, Homo sapien
tcagccacaagcagggggaagacca

SEQ ID NO: 1604887 - DNA, 25 bp, Homo sapien
ctcatgcatgaaggcatccatcttc

SEQ ID NO: 1604888 - DNA, 25 bp, Homo sapien
ttctcatgcatgaaggcatccatct

SEQ ID NO: 1604889 - DNA, 25 bp, Homo sapien
tatgccccacccagccagcgcttac

SEQ ID NO: 1604890 - DNA, 25 bp, Homo sapien
cttgacgggctgtgcatccacccgg

SEQ ID NO: 1604891 - DNA, 25 bp, Homo sapien
ggctgtgcatccacccggatcttgc

SEQ ID NO: 1604892 - DNA, 25 bp, Homo sapien
ccaggagacagcctcgtctggtcgg

SEQ ID NO: 1604893 - DNA, 25 bp, Homo sapien
gagacagcctcgtctggtcgggcac

SEQ ID NO: 1604894 - DNA, 25 bp, Homo sapien
tgagtcagagccatcaaactcctgg

SEQ ID NO: 1604895 - DNA, 25 bp, Homo sapien
ctgagtcagagccatcaaactcctg

SEQ ID NO: 1604896 - DNA, 25 bp, Homo sapien
gagtcagagccatcaaactcctggg

SEQ ID NO: 1604897 - DNA, 25 bp, Homo sapien
atgtaaacagcgtagtcggccccgt

SEQ ID NO: 1604898 - DNA, 25 bp, Homo sapien
tgttgatgtaaacagcgtagtcggc

SEQ ID NO: 1604899 - DNA, 25 bp, Homo sapien
ctgtgttgatgtaaacagcgtagtc

SEQ ID NO: 1604900 - DNA, 25 bp, Homo sapien
ttgatgtaaacagcgtagtcggccc

SEQ ID NO: 1604901 - DNA, 25 bp, Homo sapien
gcaacgatggctgtgtttccccaga

SEQ ID NO: 1604902 - DNA, 25 bp, Homo sapien
gacagggcccatgtcaatgtctggg

SEQ ID NO: 1604903 - DNA, 25 bp, Homo sapien
tgtgtcccagatgaaggaagccctt

SEQ ID NO: 1604904 - DNA, 25 bp, Homo sapien
gaggacaccgtagccaaacaggctg

SEQ ID NO: 1604905 - DNA, 25 bp, Homo sapien
ctggattacttcaggcgccccagag

SEQ ID NO: 1604906 - DNA, 25 bp, Homo sapien
tagtattccccgtagcaatgactgc

SEQ ID NO: 1604907 - DNA, 25 bp, Homo sapien
tggcacgggagacaaccacatagct

SEQ ID NO: 1604908 - DNA, 25 bp, Homo sapien
caaaacctcttgttggacagcaccc

SEQ ID NO: 1604909 - DNA, 25 bp, Homo sapien
ccagaatgatcatcccagtgcactt

SEQ ID NO: 1604910 - DNA, 25 bp, Homo sapien
tcatcccagtgcacttggcaaagat

SEQ ID NO: 1604911 - DNA, 25 bp, Homo sapien
tggcctgtgtgttgatgagcctcag

SEQ ID NO: 1604912 - DNA, 25 bp, Homo sapien
gcattggcaatgtggtgcttgacca

SEQ ID NO: 1604913 - DNA, 25 bp, Homo sapien
gaagagcgccgaagtcaggccttgg

SEQ ID NO: 1604914 - DNA, 25 bp, Homo sapien
agagcgccgaagtcaggccttggac

SEQ ID NO: 1604915 - DNA, 25 bp, Homo sapien
ggggaagagcgccgaagtcaggcct

SEQ ID NO: 1604916 - DNA, 25 bp, Homo sapien
gggaagagcgccgaagtcaggcctt

SEQ ID NO: 1604917 - DNA, 25 bp, Homo sapien
cagcgagccgtctgtaagtgcggga

SEQ ID NO: 1604918 - DNA, 25 bp, Homo sapien
gtcgcccagcgagccgtctgtaagt

SEQ ID NO: 1604919 - DNA, 25 bp, Homo sapien
gcccagcgagccgtctgtaagtgcg

SEQ ID NO: 1604920 - DNA, 25 bp, Homo sapien
cccagcgagccgtctgtaagtgcgg

SEQ ID NO: 1604921 - DNA, 25 bp, Homo sapien
cccagccgggcgatcatcttagaag

SEQ ID NO: 1604922 - DNA, 25 bp, Homo sapien
gactctgggttgttgatctccttgc

SEQ ID NO: 1604923 - DNA, 25 bp, Homo sapien
ttctgggcccagtaatacacggact

SEQ ID NO: 1604924 - DNA, 25 bp, Homo sapien
gggcgatcatcttagaaggcgtcca

SEQ ID NO: 1604925 - DNA, 25 bp, Homo sapien
tggcccctccaggttgccccagccc

SEQ ID NO: 1604926 - DNA, 25 bp, Homo sapien
ctaggagaggatgtgaccttcaggc

SEQ ID NO: 1604927 - DNA, 25 bp, Homo sapien
gaggatgtgaccttcaggccatgcc

SEQ ID NO: 1604928 - DNA, 25 bp, Homo sapien
ctgactcccactgaactggcccctc

SEQ ID NO: 1604929 - DNA, 25 bp, Homo sapien
tcctcaaacttgcagtaattctcat

SEQ ID NO: 1604930 - DNA, 25 bp, Homo sapien
catctggtccagaatgggcatcagc

SEQ ID NO: 1604931 - DNA, 25 bp, Homo sapien
ccatctggtccagaatgggcatcag

SEQ ID NO: 1604932 - DNA, 25 bp, Homo sapien
gtaattctcattgggcaccagcagg

SEQ ID NO: 1604933 - DNA, 25 bp, Homo sapien
cagctgtggtcaccaatacgtccac

SEQ ID NO: 1604934 - DNA, 25 bp, Homo sapien
gcccaagtatgtgggcgccaggcac

SEQ ID NO: 1604935 - DNA, 25 bp, Homo sapien
ccctgaggctaaactcgcccaagta

SEQ ID NO: 1604936 - DNA, 25 bp, Homo sapien
tattgatcccgttctcccggagctc

SEQ ID NO: 1604937 - DNA, 25 bp, Homo sapien
aaggcagtgaatttggcccaagaag

SEQ ID NO: 1604938 - DNA, 25 bp, Homo sapien
ggcagtgaatttggcccaagaagga

SEQ ID NO: 1604939 - DNA, 25 bp, Homo sapien
acttctaacctcatccttgtccagt

SEQ ID NO: 1604940 - DNA, 25 bp, Homo sapien
tctaacctcatccttgtccagtgac

SEQ ID NO: 1604941 - DNA, 25 bp, Homo sapien
tgcttataacagacccctatctgcc

SEQ ID NO: 1604942 - DNA, 25 bp, Homo sapien
aataactgcattgcccattgaccca

SEQ ID NO: 1604943 - DNA, 25 bp, Homo sapien
tctgcttataacagacccctatctg

SEQ ID NO: 1604944 - DNA, 25 bp, Homo sapien
tgcccatctcacttaaacgatcaat

SEQ ID NO: 1604945 - DNA, 25 bp, Homo sapien
tgtgctgcacaaggtagcgaatggt

SEQ ID NO: 1604946 - DNA, 25 bp, Homo sapien
ctgcacaaggtagcgaatggtctca

SEQ ID NO: 1604947 - DNA, 25 bp, Homo sapien
tgctgcacaaggtagcgaatggtct

SEQ ID NO: 1604948 - DNA, 25 bp, Homo sapien
ttgtgctgcacaaggtagcgaatgg

SEQ ID NO: 1604949 - DNA, 25 bp, Homo sapien
tatatcccaggaaaatggtgcagct

SEQ ID NO: 1604950 - DNA, 25 bp, Homo sapien
cctgtgacagtggttccagcttctt

SEQ ID NO: 1604951 - DNA, 25 bp, Homo sapien
gatgcctgaactgatgaggttggat

SEQ ID NO: 1604952 - DNA, 25 bp, Homo sapien
ggtcaggtccgcgtgctggtcttca

SEQ ID NO: 1604953 - DNA, 25 bp, Homo sapien
tcgaactcctcttctcttgatccac

SEQ ID NO: 1604954 - DNA, 25 bp, Homo sapien
aactcctcttctcttgatccacccg

SEQ ID NO: 1604955 - DNA, 25 bp, Homo sapien
aaatgctgggattataggcatgcgc

SEQ ID NO: 1604956 - DNA, 25 bp, Homo sapien
aatgctgggattataggcatgcgcc

SEQ ID NO: 1604957 - DNA, 25 bp, Homo sapien
agcatgtaactaccagagtgcaaaa

SEQ ID NO: 1604958 - DNA, 25 bp, Homo sapien
cagcatgtaactaccagagtgcaaa

SEQ ID NO: 1604959 - DNA, 25 bp, Homo sapien
gcatgtaactaccagagtgcaaaat

SEQ ID NO: 1604960 - DNA, 25 bp, Homo sapien
ctttcgggcggcaacgtcgagctgt

SEQ ID NO: 1604961 - DNA, 25 bp, Homo sapien
tcacaccgcggttgaagtcgtagcc

SEQ ID NO: 1604962 - DNA, 25 bp, Homo sapien
gcctccagcagtgcgcggtaattca

SEQ ID NO: 1604963 - DNA, 25 bp, Homo sapien
tacagcgcgcccgaagttggttgct

SEQ ID NO: 1604964 - DNA, 25 bp, Homo sapien
aagctgcccctaggccgggcttacg

SEQ ID NO: 1604965 - DNA, 25 bp, Homo sapien
ggctctcgagtcaaagctgccccta

SEQ ID NO: 1604966 - DNA, 25 bp, Homo sapien
gacgcgcgcgtctccgcaagagcac

SEQ ID NO: 1604967 - DNA, 25 bp, Homo sapien
gcctatagccggctctcgagtcaaa

SEQ ID NO: 1604968 - DNA, 25 bp, Homo sapien
agacaagagttacacgctcttgtta

SEQ ID NO: 1604969 - DNA, 25 bp, Homo sapien
ggcactcgcccattcgtttctgttc

SEQ ID NO: 1604970 - DNA, 25 bp, Homo sapien
gtttgtttgagctagagtcttgcgc

SEQ ID NO: 1604971 - DNA, 25 bp, Homo sapien
acaagagttacacgctcttgttacg

SEQ ID NO: 1604972 - DNA, 25 bp, Homo sapien
agccgaaatcacgctattgcactct

SEQ ID NO: 1604973 - DNA, 25 bp, Homo sapien
gcaacaagagcgaaataccatctca

SEQ ID NO: 1604974 - DNA, 25 bp, Homo sapien
gccgaaatcacgctattgcactcta

SEQ ID NO: 1604975 - DNA, 25 bp, Homo sapien
gcctgggcaacaagagcgaaatacc

SEQ ID NO: 1604976 - DNA, 25 bp, Homo sapien
accagttggtctgcaggtgtccaaa

SEQ ID NO: 1604977 - DNA, 25 bp, Homo sapien
tggaggcaggcatcgaccaagtgaa

SEQ ID NO: 1604978 - DNA, 25 bp, Homo sapien
cagcaaggtggccatcaacagtgac

SEQ ID NO: 1604979 - DNA, 25 bp, Homo sapien
gtgtccaaagatggccgccgatctg

SEQ ID NO: 1604980 - DNA, 25 bp, Homo sapien
ctgagagcggggcatccaaatcata

SEQ ID NO: 1604981 - DNA, 25 bp, Homo sapien
tccttcgctctcaactgagagcggg

SEQ ID NO: 1604982 - DNA, 25 bp, Homo sapien
gcggggcatccaaatcataacaaaa

SEQ ID NO: 1604983 - DNA, 25 bp, Homo sapien
ttctccttcgctctcaactgagagc

SEQ ID NO: 1604984 - DNA, 25 bp, Homo sapien
ccgaatgtggctgggactccttgtg

SEQ ID NO: 1604985 - DNA, 25 bp, Homo sapien
gtggctgggactccttgtgccctag

SEQ ID NO: 1604986 - DNA, 25 bp, Homo sapien
aatgtggctgggactccttgtgccc

SEQ ID NO: 1604987 - DNA, 25 bp, Homo sapien
gaatgtggctgggactccttgtgcc

SEQ ID NO: 1604988 - DNA, 25 bp, Homo sapien
gcggaggcagcaccaacattgggga

SEQ ID NO: 1604989 - DNA, 25 bp, Homo sapien
cggaggcagcaccaacattggggat

SEQ ID NO: 1604990 - DNA, 25 bp, Homo sapien
ctagcgacaggtctccagagccggc

SEQ ID NO: 1604991 - DNA, 25 bp, Homo sapien
tagcgacaggtctccagagccggcc

SEQ ID NO: 1604992 - DNA, 25 bp, Homo sapien
tcatgccttcgggtgcaaatggtcc

SEQ ID NO: 1604993 - DNA, 25 bp, Homo sapien
ccattgtcatgccttcgggtgcaaa

SEQ ID NO: 1604994 - DNA, 25 bp, Homo sapien
tgccttcgggtgcaaatggtccttg

SEQ ID NO: 1604995 - DNA, 25 bp, Homo sapien
gagcccattgtcatgccttcgggtg

SEQ ID NO: 1604996 - DNA, 25 bp, Homo sapien
tcccacggagtactggatcccagtg

SEQ ID NO: 1604997 - DNA, 25 bp, Homo sapien
agtggatgtggtgtacaaggctccc

SEQ ID NO: 1604998 - DNA, 25 bp, Homo sapien
tggatcccagtgatgggaaagctgt

SEQ ID NO: 1604999 - DNA, 25 bp, Homo sapien
tggtgtacaaggctcccacggagta

SEQ ID NO: 1605000 - DNA, 25 bp, Homo sapien
gttgcggttggcgaagacgtgcagc

SEQ ID NO: 1605001 - DNA, 25 bp, Homo sapien
cggttggcgaagacgtgcagcaggc

SEQ ID NO: 1605002 - DNA, 25 bp, Homo sapien
cagccgttgcggttggcgaagacgt

SEQ ID NO: 1605003 - DNA, 25 bp, Homo sapien
ctggaagcagccgttgcggttggcg

SEQ ID NO: 1605004 - DNA, 25 bp, Homo sapien
ctggggttcctggtaggacatgcag

SEQ ID NO: 1605005 - DNA, 25 bp, Homo sapien
taggacatgcagagcaggtaggagt

SEQ ID NO: 1605006 - DNA, 25 bp, Homo sapien
ggacatgcagagcaggtaggagtcc

SEQ ID NO: 1605007 - DNA, 25 bp, Homo sapien
ggtaggacatgcagagcaggtagga

SEQ ID NO: 1605008 - DNA, 25 bp, Homo sapien
acgctgttggctcggcggtccacca

SEQ ID NO: 1605009 - DNA, 25 bp, Homo sapien
gacgctgcaggacgctgttggctcg

SEQ ID NO: 1605010 - DNA, 25 bp, Homo sapien
cagggtgtggtcctcgctgcctgag

SEQ ID NO: 1605011 - DNA, 25 bp, Homo sapien
tgcaggacgctgttggctcggcggt

SEQ ID NO: 1605012 - DNA, 25 bp, Homo sapien
tcagcacgggtctggagtgtagttg

SEQ ID NO: 1605013 - DNA, 25 bp, Homo sapien
gggtcagcacgggtctggagtgtag

SEQ ID NO: 1605014 - DNA, 25 bp, Homo sapien
agcagggtcagcacgggtctggagt

SEQ ID NO: 1605015 - DNA, 25 bp, Homo sapien
cagcacgggtctggagtgtagttgc

SEQ ID NO: 1605016 - DNA, 25 bp, Homo sapien
ccagtcaccaggatgtcaggcaggt

SEQ ID NO: 1605017 - DNA, 25 bp, Homo sapien
agaggcacagcacggctgagctggc

SEQ ID NO: 1605018 - DNA, 25 bp, Homo sapien
ctctggggtcgtagatggtcacctt

SEQ ID NO: 1605019 - DNA, 25 bp, Homo sapien
tggtcaccttcttgtcataggtgcc

SEQ ID NO: 1605020 - DNA, 25 bp, Homo sapien
caggccccctgcccaggcccccaca

SEQ ID NO: 1605021 - DNA, 25 bp, Homo sapien
tatccccgcaggccccctgcccagg

SEQ ID NO: 1605022 - DNA, 25 bp, Homo sapien
gccccctgcccaggcccccacacac

SEQ ID NO: 1605023 - DNA, 25 bp, Homo sapien
ctatccccgcaggccccctgcccag

SEQ ID NO: 1605024 - DNA, 25 bp, Homo sapien
cacgcggtggtcctgcgctgccagt

SEQ ID NO: 1605025 - DNA, 25 bp, Homo sapien
tttatctcgccgaactgctgcccat

SEQ ID NO: 1605026 - DNA, 25 bp, Homo sapien
tcccaggagccggagcacacgcggt

SEQ ID NO: 1605027 - DNA, 25 bp, Homo sapien
gctgccatgtcccagagcttcactg

SEQ ID NO: 1605028 - DNA, 25 bp, Homo sapien
tgatcagaacctggttggactccgt

SEQ ID NO: 1605029 - DNA, 25 bp, Homo sapien
tagtgcctaaggtcttgatcagaac

SEQ ID NO: 1605030 - DNA, 25 bp, Homo sapien
tctcgggagcccgacagacagagtg

SEQ ID NO: 1605031 - DNA, 25 bp, Homo sapien
caagttgacgttgcgatctcgggag

SEQ ID NO: 1605032 - DNA, 25 bp, Homo sapien
catcctctgcccagcgggacaggtg

SEQ ID NO: 1605033 - DNA, 25 bp, Homo sapien
tcaacggaagccacgtggccttcgg

SEQ ID NO: 1605034 - DNA, 25 bp, Homo sapien
agcagcactgagtcaacggaagcca

SEQ ID NO: 1605035 - DNA, 25 bp, Homo sapien
caggcagaagtattcgacccagcgc

SEQ ID NO: 1605036 - DNA, 25 bp, Homo sapien
ttccaccactgggtagggcgcgcgt

SEQ ID NO: 1605037 - DNA, 25 bp, Homo sapien
acccgcgacaggacgtggagcacga

SEQ ID NO: 1605038 - DNA, 25 bp, Homo sapien
acatggtcagacacgaggtcgcgga

SEQ ID NO: 1605039 - DNA, 25 bp, Homo sapien
caggtaggagcagatctcgagcagc

SEQ ID NO: 1605040 - DNA, 25 bp, Homo sapien
ggctcagaaggcccggctcacttac

SEQ ID NO: 1605041 - DNA, 25 bp, Homo sapien
gggaaggctcagaaggcccggctca

SEQ ID NO: 1605042 - DNA, 25 bp, Homo sapien
aggctcagaaggcccggctcactta

SEQ ID NO: 1605043 - DNA, 25 bp, Homo sapien
gaaggctcagaaggcccggctcact

SEQ ID NO: 1605044 - DNA, 25 bp, Homo sapien
cagcccggattttggcggactgaga

SEQ ID NO: 1605045 - DNA, 25 bp, Homo sapien
caggtgcgggaatcatcgcaccgcc

SEQ ID NO: 1605046 - DNA, 25 bp, Homo sapien
gggtccgagtcatcgtcccaggtgc

SEQ ID NO: 1605047 - DNA, 25 bp, Homo sapien
cacgtaggccttggcctgcgcgtct

SEQ ID NO: 1605048 - DNA, 25 bp, Homo sapien
ccggcctcgcgtcttgtctcctagg

SEQ ID NO: 1605049 - DNA, 25 bp, Homo sapien
ggcgctgccggcctcgcgtcttgtc

SEQ ID NO: 1605050 - DNA, 25 bp, Homo sapien
gctccattgcgaccgggtgggcgct

SEQ ID NO: 1605051 - DNA, 25 bp, Homo sapien
ctaggggaagctccattgcgaccgg

SEQ ID NO: 1605052 - DNA, 25 bp, Homo sapien
gcacagtaacaaatggacagacccg

SEQ ID NO: 1605053 - DNA, 25 bp, Homo sapien
cattcgtctatcttcccactctcaa

SEQ ID NO: 1605054 - DNA, 25 bp, Homo sapien
agtaacaaatggacagacccgggag

SEQ ID NO: 1605055 - DNA, 25 bp, Homo sapien
tactcaacaaagttctacacaagtg

SEQ ID NO: 1605056 - DNA, 25 bp, Homo sapien
tggccaactgggaagtaactacacc

SEQ ID NO: 1605057 - DNA, 25 bp, Homo sapien
gagtgccccttggaatagatgcagg

SEQ ID NO: 1605058 - DNA, 25 bp, Homo sapien
tctagatgcaggttacacggaaggc

SEQ ID NO: 1605059 - DNA, 25 bp, Homo sapien
gggcctgaccctgactatggaaaga

SEQ ID NO: 1605060 - DNA, 25 bp, Homo sapien
ccagggcacagcgacttccggatgc

SEQ ID NO: 1605061 - DNA, 25 bp, Homo sapien
ctccgacgacgacgcagacagaaac

SEQ ID NO: 1605062 - DNA, 25 bp, Homo sapien
gcgcactccccagtaatccctccga

SEQ ID NO: 1605063 - DNA, 25 bp, Homo sapien
agcgacttccggatgcagcgcactc

SEQ ID NO: 1605064 - DNA, 25 bp, Homo sapien
agcagcggcgggaattgctcagaga

SEQ ID NO: 1605065 - DNA, 25 bp, Homo sapien
gagaactgctgccagttatcttccc

SEQ ID NO: 1605066 - DNA, 25 bp, Homo sapien
cccaacttggtctttgaagccgtgg

SEQ ID NO: 1605067 - DNA, 25 bp, Homo sapien
acttggtctttgaagccgtggagaa

SEQ ID NO: 1605068 - DNA, 25 bp, Homo sapien
tacagcatcgcagaagaaaataaag

SEQ ID NO: 1605069 - DNA, 25 bp, Homo sapien
caggaggctacagcatcgcagaaga

SEQ ID NO: 1605070 - DNA, 25 bp, Homo sapien
aaggtcatccttcgggctcacccag

SEQ ID NO: 1605071 - DNA, 25 bp, Homo sapien
tgtcccgaaggtcatccttcgggct

SEQ ID NO: 1605072 - DNA, 25 bp, Homo sapien
gatgccgcggaaggctgagtccttc

SEQ ID NO: 1605073 - DNA, 25 bp, Homo sapien
ggttgacaccgatcatcatgcagat

SEQ ID NO: 1605074 - DNA, 25 bp, Homo sapien
tcatgcagatgccgcggaaggctga

SEQ ID NO: 1605075 - DNA, 25 bp, Homo sapien
cttctcctcgttgtccctgatgttc

SEQ ID NO: 1605076 - DNA, 25 bp, Homo sapien
cacgtagcccaagcggccgatggtg

SEQ ID NO: 1605077 - DNA, 25 bp, Homo sapien
tcctgggggcacacgtagcccaagc

SEQ ID NO: 1605078 - DNA, 25 bp, Homo sapien
tgcagcatgggtgccacctcctggg

SEQ ID NO: 1605079 - DNA, 25 bp, Homo sapien
gggcacacgtagcccaagcggccga

SEQ ID NO: 1605080 - DNA, 25 bp, Homo sapien
tggaatggcagagggactcgtcagg

SEQ ID NO: 1605081 - DNA, 25 bp, Homo sapien
gaatggcagagggactcgtcaggcg

SEQ ID NO: 1605082 - DNA, 25 bp, Homo sapien
aatggcagagggactcgtcaggcga

SEQ ID NO: 1605083 - DNA, 25 bp, Homo sapien
atggcagagggactcgtcaggcgac

SEQ ID NO: 1605084 - DNA, 25 bp, Homo sapien
tccttggttccttgacaaggctctt

SEQ ID NO: 1605085 - DNA, 25 bp, Homo sapien
ctccttggttccttgacaaggctct

SEQ ID NO: 1605086 - DNA, 25 bp, Homo sapien
ccttggttccttgacaaggctcttt

SEQ ID NO: 1605087 - DNA, 25 bp, Homo sapien
ccatctgcacataaggctgcatctc

SEQ ID NO: 1605088 - DNA, 25 bp, Homo sapien
tgggtcggttaatgatttccaccag

SEQ ID NO: 1605089 - DNA, 25 bp, Homo sapien
ggttgttgaggaccatctgcacata

SEQ ID NO: 1605090 - DNA, 25 bp, Homo sapien
gtgttttccagcagtgtcttgggtg

SEQ ID NO: 1605091 - DNA, 25 bp, Homo sapien
gcttctctggagtcgctaaggtgac

SEQ ID NO: 1605092 - DNA, 25 bp, Homo sapien
taaggtgacaacacgctgcccaagt

SEQ ID NO: 1605093 - DNA, 25 bp, Homo sapien
ttagccaactacacaaaacggtcca

SEQ ID NO: 1605094 - DNA, 25 bp, Homo sapien
gactggccaaccactaccagtgagg

SEQ ID NO: 1605095 - DNA, 25 bp, Homo sapien
caccaatggcccaggtggcgttgtt

SEQ ID NO: 1605096 - DNA, 25 bp, Homo sapien
cagacggagatgaactctgggttca

SEQ ID NO: 1605097 - DNA, 25 bp, Homo sapien
gcgttgttgcagacggagatgaact

SEQ ID NO: 1605098 - DNA, 25 bp, Homo sapien
tctgggttcaggttggtgcccagaa

SEQ ID NO: 1605099 - DNA, 25 bp, Homo sapien
caggccccatcagacagtacgaata

SEQ ID NO: 1605100 - DNA, 25 bp, Homo sapien
cagtacgaatacatcccaatgtggt

SEQ ID NO: 1605101 - DNA, 25 bp, Homo sapien
gggtaagctgcaggacctagtccag

SEQ ID NO: 1605102 - DNA, 25 bp, Homo sapien
ccaatgtggtcacagtcatccccgg

SEQ ID NO: 1605103 - DNA, 25 bp, Homo sapien
ggcaaaggagctctgccggacctca

SEQ ID NO: 1605104 - DNA, 25 bp, Homo sapien
aggagggcaaaggagctctgccgga

SEQ ID NO: 1605105 - DNA, 25 bp, Homo sapien
tacagggcttgacatggatgaagca

SEQ ID NO: 1605106 - DNA, 25 bp, Homo sapien
cgatacagggcttgacatggatgaa

SEQ ID NO: 1605107 - DNA, 25 bp, Homo sapien
tccacggatgtgcaagtccttgata

SEQ ID NO: 1605108 - DNA, 25 bp, Homo sapien
ggcatagtgtttgcatatgcaccta

SEQ ID NO: 1605109 - DNA, 25 bp, Homo sapien
cactttccagttctagagctcctag

SEQ ID NO: 1605110 - DNA, 25 bp, Homo sapien
gtaagatcagtgtggctaggctccc

SEQ ID NO: 1605111 - DNA, 25 bp, Homo sapien
actggaacagcaatgtcatgatgtt

SEQ ID NO: 1605112 - DNA, 25 bp, Homo sapien
gcactggaacagcaatgtcatgatg

SEQ ID NO: 1605113 - DNA, 25 bp, Homo sapien
tggaacagcaatgtcatgatgttgc

SEQ ID NO: 1605114 - DNA, 25 bp, Homo sapien
ggaacagcaatgtcatgatgttgct

SEQ ID NO: 1605115 - DNA, 25 bp, Homo sapien
ggagcctcatactgctcagggtgct

SEQ ID NO: 1605116 - DNA, 25 bp, Homo sapien
catgaagtccttgtcgggagcctca

SEQ ID NO: 1605117 - DNA, 25 bp, Homo sapien
tccagtgctacgatcatgaagtcct

SEQ ID NO: 1605118 - DNA, 25 bp, Homo sapien
ggccgctgagcagatccagtgctac

SEQ ID NO: 1605119 - DNA, 25 bp, Homo sapien
aggcaggccaatgcagaagcacagg

SEQ ID NO: 1605120 - DNA, 25 bp, Homo sapien
gggcacgggtaagtggagcaggccc

SEQ ID NO: 1605121 - DNA, 25 bp, Homo sapien
cacgggtaagtggagcaggcccgag

SEQ ID NO: 1605122 - DNA, 25 bp, Homo sapien
ctagacacagatgccgacaggggca

SEQ ID NO: 1605123 - DNA, 25 bp, Homo sapien
tctgcagggcggtggccaccgatga

SEQ ID NO: 1605124 - DNA, 25 bp, Homo sapien
tgacacagcgctggtagacgggctc

SEQ ID NO: 1605125 - DNA, 25 bp, Homo sapien
agacgggctcacagtaaggcaggaa

SEQ ID NO: 1605126 - DNA, 25 bp, Homo sapien
atggcctgagccagtgtcttctgca

SEQ ID NO: 1605127 - DNA, 25 bp, Homo sapien
cttcgtccttgagctcattccactt

SEQ ID NO: 1605128 - DNA, 25 bp, Homo sapien
cacttctggatcagtgggggcatca

SEQ ID NO: 1605129 - DNA, 25 bp, Homo sapien
tccttgagctcattccacttctgga

SEQ ID NO: 1605130 - DNA, 25 bp, Homo sapien
gaagaggtccttgtcttcgtccttg

SEQ ID NO: 1605131 - DNA, 25 bp, Homo sapien
gcctacagagtcggccagggtgcca

SEQ ID NO: 1605132 - DNA, 25 bp, Homo sapien
gggtgtccaggatgtagctgaggta

SEQ ID NO: 1605133 - DNA, 25 bp, Homo sapien
gacaagggtgtccaggatgtagctg

SEQ ID NO: 1605134 - DNA, 25 bp, Homo sapien
gttgaggtggtggcctacagagtcg

SEQ ID NO: 1605135 - DNA, 25 bp, Homo sapien
ccagtacgaatacgcgataaatcag

SEQ ID NO: 1605136 - DNA, 25 bp, Homo sapien
cgcgataaatcagttccacatcaac

SEQ ID NO: 1605137 - DNA, 25 bp, Homo sapien
gaatacgcgataaatcagttccaca

SEQ ID NO: 1605138 - DNA, 25 bp, Homo sapien
aggatcagccagtacgaatacgcga

SEQ ID NO: 1605139 - DNA, 25 bp, Homo sapien
gccttcttatccgacaggcactgga

SEQ ID NO: 1605140 - DNA, 25 bp, Homo sapien
cactggatcaggtgcgggatcagct

SEQ ID NO: 1605141 - DNA, 25 bp, Homo sapien
tccagcaggcgatggagcggaccaa

SEQ ID NO: 1605142 - DNA, 25 bp, Homo sapien
gccatccaggatgcgtttgagcagc

SEQ ID NO: 1605143 - DNA, 25 bp, Homo sapien
ccttcacctcctggttcaaacaatt

SEQ ID NO: 1605144 - DNA, 25 bp, Homo sapien
ctggggcgcagtggtacgatcatgg

SEQ ID NO: 1605145 - DNA, 25 bp, Homo sapien
aggctggggcgcagtggtacgatca

SEQ ID NO: 1605146 - DNA, 25 bp, Homo sapien
accttcacctcctggttcaaacaat

SEQ ID NO: 1605147 - DNA, 25 bp, Homo sapien
tctacataagtgcacgaggcaagca

SEQ ID NO: 1605148 - DNA, 25 bp, Homo sapien
tttgatgaaacaccacctaccacgg

SEQ ID NO: 1605149 - DNA, 25 bp, Homo sapien
tgaaagaactacctgcctgcaagaa

SEQ ID NO: 1605150 - DNA, 25 bp, Homo sapien
catcttcgaaactgggatccggcac

SEQ ID NO: 1605151 - DNA, 25 bp, Homo sapien
attggcgaggacgtccagtgcagcc

SEQ ID NO: 1605152 - DNA, 25 bp, Homo sapien
gaagacattggcgaggacgtccagt

SEQ ID NO: 1605153 - DNA, 25 bp, Homo sapien
gcagcagttcctcccggaagacatt

SEQ ID NO: 1605154 - DNA, 25 bp, Homo sapien
aggaggcctttgagtagtgggagta

SEQ ID NO: 1605155 - DNA, 25 bp, Homo sapien
tgcgcccggccacgatcagcttcta

SEQ ID NO: 1605156 - DNA, 25 bp, Homo sapien
cacgatcagcttctaatcagcttct

SEQ ID NO: 1605157 - DNA, 25 bp, Homo sapien
gccacgatcagcttctaatcagctt

SEQ ID NO: 1605158 - DNA, 25 bp, Homo sapien
ccggccacgatcagcttctaatcag

SEQ ID NO: 1605159 - DNA, 25 bp, Homo sapien
agagggagtccagggcttgccaccc

SEQ ID NO: 1605160 - DNA, 25 bp, Homo sapien
agtccagggcttgccaccccaccac

SEQ ID NO: 1605161 - DNA, 25 bp, Homo sapien
ctcccaagagggagtccagggcttg

SEQ ID NO: 1605162 - DNA, 25 bp, Homo sapien
ccaagagggagtccagggcttgcca

SEQ ID NO: 1605163 - DNA, 25 bp, Homo sapien
gcttgatgtcctgctcactgtcggg

SEQ ID NO: 1605164 - DNA, 25 bp, Homo sapien
tgaccgtgcgtgacttgtggaagcg

SEQ ID NO: 1605165 - DNA, 25 bp, Homo sapien
tcctcggagccatcaggccgctcag

SEQ ID NO: 1605166 - DNA, 25 bp, Homo sapien
gtcggacagagcatcatcatcatcg

SEQ ID NO: 1605167 - DNA, 25 bp, Homo sapien
atttccgagtacttcatcccattca

SEQ ID NO: 1605168 - DNA, 25 bp, Homo sapien
caggatgatgtcaatttccgagtac

SEQ ID NO: 1605169 - DNA, 25 bp, Homo sapien
gatgatgtcaatttccgagtacttc

SEQ ID NO: 1605170 - DNA, 25 bp, Homo sapien
tgtcaatttccgagtacttcatccc

SEQ ID NO: 1605171 - DNA, 25 bp, Homo sapien
agacgcccgttaccaggcggatcat

SEQ ID NO: 1605172 - DNA, 25 bp, Homo sapien
ccgttaccaggcggatcatggtcca

SEQ ID NO: 1605173 - DNA, 25 bp, Homo sapien
gaagacgcccgttaccaggcggatc

SEQ ID NO: 1605174 - DNA, 25 bp, Homo sapien
cgcccgttaccaggcggatcatggt

SEQ ID NO: 1605175 - DNA, 25 bp, Homo sapien
caccacatgtggccattgatttttc

SEQ ID NO: 1605176 - DNA, 25 bp, Homo sapien
gtgtcagccaccacatgtggccatt

SEQ ID NO: 1605177 - DNA, 25 bp, Homo sapien
gccaccacatgtggccattgatttt

SEQ ID NO: 1605178 - DNA, 25 bp, Homo sapien
ccacatgtggccattgatttttcat

SEQ ID NO: 1605179 - DNA, 25 bp, Homo sapien
ggctgctcggccagcgtcagccaga

SEQ ID NO: 1605180 - DNA, 25 bp, Homo sapien
gccagcgtcagccagaactcacagg

SEQ ID NO: 1605181 - DNA, 25 bp, Homo sapien
actcacaggcctcaagggcaacgtt

SEQ ID NO: 1605182 - DNA, 25 bp, Homo sapien
cctcaagggcaacgttctcatcatg

SEQ ID NO: 1605183 - DNA, 25 bp, Homo sapien
ttcttccgcacctcggggtcatcat

SEQ ID NO: 1605184 - DNA, 25 bp, Homo sapien
gggatgagcctgtcaatccgcactt

SEQ ID NO: 1605185 - DNA, 25 bp, Homo sapien
agggcacggcacacattcttccgca

SEQ ID NO: 1605186 - DNA, 25 bp, Homo sapien
tgtcaatccgcacttccagaagcat

SEQ ID NO: 1605187 - DNA, 25 bp, Homo sapien
tcgatgaaggtgtcaatattgtcca

SEQ ID NO: 1605188 - DNA, 25 bp, Homo sapien
aatattgtccatcagcgcctgggcc

SEQ ID NO: 1605189 - DNA, 25 bp, Homo sapien
cgcctgggcccggtccatgatgaac

SEQ ID NO: 1605190 - DNA, 25 bp, Homo sapien
ccatgatgaactggttcacgcaggc

SEQ ID NO: 1605191 - DNA, 25 bp, Homo sapien
gctctgatgagtcttcacagatctt

SEQ ID NO: 1605192 - DNA, 25 bp, Homo sapien
actgcaggaacttggggatcatgat

SEQ ID NO: 1605193 - DNA, 25 bp, Homo sapien
caggaacttggggatcatgatgttg

SEQ ID NO: 1605194 - DNA, 25 bp, Homo sapien
gcctgttgagggcgtcactgtccag

SEQ ID NO: 1605195 - DNA, 25 bp, Homo sapien
tccgagttaagcaggttgcagagct

SEQ ID NO: 1605196 - DNA, 25 bp, Homo sapien
ctcacaagtgttgtaatcctccgag

SEQ ID NO: 1605197 - DNA, 25 bp, Homo sapien
taatcctccgagttaagcaggttgc

SEQ ID NO: 1605198 - DNA, 25 bp, Homo sapien
caagtgttgtaatcctccgagttaa

SEQ ID NO: 1605199 - DNA, 25 bp, Homo sapien
cttggaagcgatggtggtgatgaga

SEQ ID NO: 1605200 - DNA, 25 bp, Homo sapien
gagctggaagcaagctatgaagtaa

SEQ ID NO: 1605201 - DNA, 25 bp, Homo sapien
gacaggtcccttaatagctcagcgc

SEQ ID NO: 1605202 - DNA, 25 bp, Homo sapien
actgtttcaggagggagtggttcca

SEQ ID NO: 1605203 - DNA, 25 bp, Homo sapien
gaaaacctaattccgttgcacctga

SEQ ID NO: 1605204 - DNA, 25 bp, Homo sapien
taatagtactaccatagagggtgcc

SEQ ID NO: 1605205 - DNA, 25 bp, Homo sapien
gccactgagagagcgcgttggctca

SEQ ID NO: 1605206 - DNA, 25 bp, Homo sapien
tgagcgaggaggcatcgccaatgtt

SEQ ID NO: 1605207 - DNA, 25 bp, Homo sapien
ttcttgaggatgaggccactgagag

SEQ ID NO: 1605208 - DNA, 25 bp, Homo sapien
gctctgatagtgtgccttcacgttg

SEQ ID NO: 1605209 - DNA, 25 bp, Homo sapien
ctgacttgagtctggtcaggacgaa

SEQ ID NO: 1605210 - DNA, 25 bp, Homo sapien
gagtctggtcaggacgaaaatcagg

SEQ ID NO: 1605211 - DNA, 25 bp, Homo sapien
tggtcaggacgaaaatcaggtagtt

SEQ ID NO: 1605212 - DNA, 25 bp, Homo sapien
caggaaactgattgagttgtttgag

SEQ ID NO: 1605213 - DNA, 25 bp, Homo sapien
gctgtgttgggcgactgtgagtctt

SEQ ID NO: 1605214 - DNA, 25 bp, Homo sapien
ttgggcgactgtgagtctttgagca

SEQ ID NO: 1605215 - DNA, 25 bp, Homo sapien
atcctgcacgatgcgctgagtggct

SEQ ID NO: 1605216 - DNA, 25 bp, Homo sapien
gcgactgtgagtctttgagcagctg

SEQ ID NO: 1605217 - DNA, 25 bp, Homo sapien
gctgcgccatcctcggccgcgcagt

SEQ ID NO: 1605218 - DNA, 25 bp, Homo sapien
tggccgcatgacgacgggaacgccc

SEQ ID NO: 1605219 - DNA, 25 bp, Homo sapien
gtggagcccctgaggccgcggtggc

SEQ ID NO: 1605220 - DNA, 25 bp, Homo sapien
cggacaggcggaggcctccgatcca

SEQ ID NO: 1605221 - DNA, 25 bp, Homo sapien
atcctcgcgacgtcccccaatcagg

SEQ ID NO: 1605222 - DNA, 25 bp, Homo sapien
ccccagacgcttcccccaatcagat

SEQ ID NO: 1605223 - DNA, 25 bp, Homo sapien
ggccccaagcagtccccagacgctt

SEQ ID NO: 1605224 - DNA, 25 bp, Homo sapien
cgacgtcccccaatcaggccccaag

SEQ ID NO: 1605225 - DNA, 25 bp, Homo sapien
cagcggcggcaactcgcgctgcggc

SEQ ID NO: 1605226 - DNA, 25 bp, Homo sapien
gcggcggcaactcgcgctgcggctt

SEQ ID NO: 1605227 - DNA, 25 bp, Homo sapien
ggcggcaactcgcgctgcggcttct

SEQ ID NO: 1605228 - DNA, 25 bp, Homo sapien
ggcaactcgcgctgcggcttctcca

SEQ ID NO: 1605229 - DNA, 25 bp, Homo sapien
ctcgcgcggaaggagggagccaaag

SEQ ID NO: 1605230 - DNA, 25 bp, Homo sapien
tcgcgcggaaggagggagccaaaga

SEQ ID NO: 1605231 - DNA, 25 bp, Homo sapien
gaaattctggcaagggcagggtcat

SEQ ID NO: 1605232 - DNA, 25 bp, Homo sapien
ctgaagttgaatgaggtggaacagc

SEQ ID NO: 1605233 - DNA, 25 bp, Homo sapien
ttgaatgaggtggaacagcgcagga

SEQ ID NO: 1605234 - DNA, 25 bp, Homo sapien
cagcgcaggaaattctggcaagggc

SEQ ID NO: 1605235 - DNA, 25 bp, Homo sapien
tctgaagacagtagggcaccgtttt

SEQ ID NO: 1605236 - DNA, 25 bp, Homo sapien
tcttcttgatccttgcgacgtctga

SEQ ID NO: 1605237 - DNA, 25 bp, Homo sapien
gaaagaaatcttcttgatccttgcg

SEQ ID NO: 1605238 - DNA, 25 bp, Homo sapien
gatccttgcgacgtctgaagacagt

SEQ ID NO: 1605239 - DNA, 25 bp, Homo sapien
tgccgataacaaagtgggagacctc

SEQ ID NO: 1605240 - DNA, 25 bp, Homo sapien
caatttttgcccctgcctgaaggag

SEQ ID NO: 1605241 - DNA, 25 bp, Homo sapien
caagttaagcatgacctggccagct

SEQ ID NO: 1605242 - DNA, 25 bp, Homo sapien
cagttcgcgcgattagagatcatcc

SEQ ID NO: 1605243 - DNA, 25 bp, Homo sapien
tccactcggagaatcgcggaagaca

SEQ ID NO: 1605244 - DNA, 25 bp, Homo sapien
cctgggctgagaaacacgtgcagaa

SEQ ID NO: 1605245 - DNA, 25 bp, Homo sapien
gtcccggctccgttcattcatgaaa

SEQ ID NO: 1605246 - DNA, 25 bp, Homo sapien
tgggattccgaggtagccagttccg

SEQ ID NO: 1605247 - DNA, 25 bp, Homo sapien
tccgacagcgcaaagaagacaaacc

SEQ ID NO: 1605248 - DNA, 25 bp, Homo sapien
ccaggctttgacaggtacaatgcca

SEQ ID NO: 1605249 - DNA, 25 bp, Homo sapien
ttaggtccgacagcgcaaagaagac

SEQ ID NO: 1605250 - DNA, 25 bp, Homo sapien
gaaggcttaggtccgacagcgcaaa

SEQ ID NO: 1605251 - DNA, 25 bp, Homo sapien
tatgtacatcgcagagagtcccagg

SEQ ID NO: 1605252 - DNA, 25 bp, Homo sapien
tgttctatgaagtctcacgaggcaa

SEQ ID NO: 1605253 - DNA, 25 bp, Homo sapien
ccgctgccgctgcattaaatagtta

SEQ ID NO: 1605254 - DNA, 25 bp, Homo sapien
tctgcttttaagtcctctcagggaa

SEQ ID NO: 1605255 - DNA, 25 bp, Homo sapien
ttatcatcgtcaccgcactggtgag

SEQ ID NO: 1605256 - DNA, 25 bp, Homo sapien
gggccgagttttatcatcgtcaccg

SEQ ID NO: 1605257 - DNA, 25 bp, Homo sapien
gagttttatcatcgtcaccgcactg

SEQ ID NO: 1605258 - DNA, 25 bp, Homo sapien
catcgtcaccgcactggtgagcttt

SEQ ID NO: 1605259 - DNA, 25 bp, Homo sapien
aatgtgggtggaccccctgcaccaa

SEQ ID NO: 1605260 - DNA, 25 bp, Homo sapien
caatgtgggtggaccccctgcacca

SEQ ID NO: 1605261 - DNA, 25 bp, Homo sapien
gggtggaccccctgcaccaagctgg

SEQ ID NO: 1605262 - DNA, 25 bp, Homo sapien
tgtgggtggaccccctgcaccaagc

SEQ ID NO: 1605263 - DNA, 25 bp, Homo sapien
cttgagggctagtttgttcccgcct

SEQ ID NO: 1605264 - DNA, 25 bp, Homo sapien
gctactattcccgtcttgagggcta

SEQ ID NO: 1605265 - DNA, 25 bp, Homo sapien
gtttgttcccgcctctgcgtttgcc

SEQ ID NO: 1605266 - DNA, 25 bp, Homo sapien
tctgcttcttggctactattcccgt

SEQ ID NO: 1605267 - DNA, 25 bp, Homo sapien
actgcaacggttacaggagccggga

SEQ ID NO: 1605268 - DNA, 25 bp, Homo sapien
gggaccgcccttggcggcgctgagg

SEQ ID NO: 1605269 - DNA, 25 bp, Homo sapien
gaagggacagaagactgcaacggtt

SEQ ID NO: 1605270 - DNA, 25 bp, Homo sapien
tacaggagccgggaccgcccttggc

SEQ ID NO: 1605271 - DNA, 25 bp, Homo sapien
gcccggcctggtggcccgtcctgac

SEQ ID NO: 1605272 - DNA, 25 bp, Homo sapien
tacaccttcctagcccggcctggtg

SEQ ID NO: 1605273 - DNA, 25 bp, Homo sapien
ctacaccttcctagcccggcctggt

SEQ ID NO: 1605274 - DNA, 25 bp, Homo sapien
ccgcgcccagctccgccagccggcc

SEQ ID NO: 1605275 - DNA, 25 bp, Homo sapien
gccgcgcccagctccgccagccggc

SEQ ID NO: 1605276 - DNA, 25 bp, Homo sapien
gcgcccagctccgccagccggccga

SEQ ID NO: 1605277 - DNA, 25 bp, Homo sapien
cgcccagctccgccagccggccgac

SEQ ID NO: 1605278 - DNA, 25 bp, Homo sapien
gagaggagcacacgcgactcagcgc

SEQ ID NO: 1605279 - DNA, 25 bp, Homo sapien
tcagagaggagcacacgcgactcag

SEQ ID NO: 1605280 - DNA, 25 bp, Homo sapien
ctgcgcagcaatcagagaggagcac

SEQ ID NO: 1605281 - DNA, 25 bp, Homo sapien
tgcgcagcaatcagagaggagcaca

SEQ ID NO: 1605282 - DNA, 25 bp, Homo sapien
cacagctaccctaagatgaaagtta

SEQ ID NO: 1605283 - DNA, 25 bp, Homo sapien
gaagagtgtccacctcagtagggac

SEQ ID NO: 1605284 - DNA, 25 bp, Homo sapien
ggcaacagctccctttattgagcat

SEQ ID NO: 1605285 - DNA, 25 bp, Homo sapien
ccctagcagggaccacaagaggtgg

SEQ ID NO: 1605286 - DNA, 25 bp, Homo sapien
cccacgcatggtaggaagttgagca

SEQ ID NO: 1605287 - DNA, 25 bp, Homo sapien
acaattagtggtggtcccatgaccc

SEQ ID NO: 1605288 - DNA, 25 bp, Homo sapien
ccagttgtcgggaatccaagttcca

SEQ ID NO: 1605289 - DNA, 25 bp, Homo sapien
gggtaccactcaaacaggaatcctg

SEQ ID NO: 1605290 - DNA, 25 bp, Homo sapien
tcccgctgccaagacaggccgtggc

SEQ ID NO: 1605291 - DNA, 25 bp, Homo sapien
tcagaacggaaagtggacttcggtc

SEQ ID NO: 1605292 - DNA, 25 bp, Homo sapien
cggacgggcccctcattcagaacgg

SEQ ID NO: 1605293 - DNA, 25 bp, Homo sapien
cgggcccctcattcagaacggaaag

SEQ ID NO: 1605294 - DNA, 25 bp, Homo sapien
ggcggcggccgactggtcgggtcgc

SEQ ID NO: 1605295 - DNA, 25 bp, Homo sapien
gcggccgactggtcgggtcgctgcg

SEQ ID NO: 1605296 - DNA, 25 bp, Homo sapien
gaagctaagtgtggagcccggaccg

SEQ ID NO: 1605297 - DNA, 25 bp, Homo sapien
gctaagtgtggagcccggaccgccc

SEQ ID NO: 1605298 - DNA, 25 bp, Homo sapien
gccgtcgttggcgaacaagttcacg

SEQ ID NO: 1605299 - DNA, 25 bp, Homo sapien
caggaagctgccgtcgttggcgaac

SEQ ID NO: 1605300 - DNA, 25 bp, Homo sapien
ttggcgaacaagttcacgccgcccg

SEQ ID NO: 1605301 - DNA, 25 bp, Homo sapien
tctcgggcgacgtccccgatcccga

SEQ ID NO: 1605302 - DNA, 25 bp, Homo sapien
ggccctgaggctccgcccgtctccc

SEQ ID NO: 1605303 - DNA, 25 bp, Homo sapien
ccgcccgtctccctcgggcagccat

SEQ ID NO: 1605304 - DNA, 25 bp, Homo sapien
gaggctccgcccgtctccctcgggc

SEQ ID NO: 1605305 - DNA, 25 bp, Homo sapien
cggccctgaggctccgcccgtctcc

SEQ ID NO: 1605306 - DNA, 25 bp, Homo sapien
aggtgccgcgcaaaggactccggga

SEQ ID NO: 1605307 - DNA, 25 bp, Homo sapien
cgtcccgaacaatgcatgccgggaa

SEQ ID NO: 1605308 - DNA, 25 bp, Homo sapien
gcaaaggactccgggaaggccgctc

SEQ ID NO: 1605309 - DNA, 25 bp, Homo sapien
ccgactcgcctcgtcccgaacaatg

SEQ ID NO: 1605310 - DNA, 25 bp, Homo sapien
gcaagctatgattgttccacagtgg

SEQ ID NO: 1605311 - DNA, 25 bp, Homo sapien
attgttccacagtggtggctcactc

SEQ ID NO: 1605312 - DNA, 25 bp, Homo sapien
aagctatgattgttccacagtggtg

SEQ ID NO: 1605313 - DNA, 25 bp, Homo sapien
tgattgttccacagtggtggctcac

SEQ ID NO: 1605314 - DNA, 25 bp, Homo sapien
aaagcaatgggctaagcctctggcc

SEQ ID NO: 1605315 - DNA, 25 bp, Homo sapien
taaaagcaatgggctaagcctctgg

SEQ ID NO: 1605316 - DNA, 25 bp, Homo sapien
aaaagcaatgggctaagcctctggc

SEQ ID NO: 1605317 - DNA, 25 bp, Homo sapien
ccagagagagaatcaacaacaagaa

SEQ ID NO: 1605318 - DNA, 25 bp, Homo sapien
agaacaggcctatatctacctcccg

SEQ ID NO: 1605319 - DNA, 25 bp, Homo sapien
ttgctaaaaagaacaggcctatatc

SEQ ID NO: 1605320 - DNA, 25 bp, Homo sapien
caaagctctcgagcacctggctgaa

SEQ ID NO: 1605321 - DNA, 25 bp, Homo sapien
gctgggcgccatgtgagctggagga

SEQ ID NO: 1605322 - DNA, 25 bp, Homo sapien
tcccaagggtccacggcgagaattg

SEQ ID NO: 1605323 - DNA, 25 bp, Homo sapien
gttcagagatgccaggcgtcccaag

SEQ ID NO: 1605324 - DNA, 25 bp, Homo sapien
cgagaattggttgccagccgctgct

SEQ ID NO: 1605325 - DNA, 25 bp, Homo sapien
ccaggaatgactgggcatgggcagg

SEQ ID NO: 1605326 - DNA, 25 bp, Homo sapien
tgacttcggcttttctcaaagtcca

SEQ ID NO: 1605327 - DNA, 25 bp, Homo sapien
tgctcccgctgacttcggcttttct

SEQ ID NO: 1605328 - DNA, 25 bp, Homo sapien
ggcactgatgagcagcttttcttcc

SEQ ID NO: 1605329 - DNA, 25 bp, Homo sapien
caggcactgatgagcagcttttctt

SEQ ID NO: 1605330 - DNA, 25 bp, Homo sapien
tggccgctgcttgggttccatggtc

SEQ ID NO: 1605331 - DNA, 25 bp, Homo sapien
ctccaggtgtcggatgcggacatcc

SEQ ID NO: 1605332 - DNA, 25 bp, Homo sapien
ggacatcccgttctcggagctgtgt

SEQ ID NO: 1605333 - DNA, 25 bp, Homo sapien
tgtgtcctcagggaatggagttctg

SEQ ID NO: 1605334 - DNA, 25 bp, Homo sapien
taatgtgacaatcagtagcagtggg

SEQ ID NO: 1605335 - DNA, 25 bp, Homo sapien
tgcaagcaggaggtttgactcaata

SEQ ID NO: 1605336 - DNA, 25 bp, Homo sapien
taggaggcacaaaaagtaagaagcc

SEQ ID NO: 1605337 - DNA, 25 bp, Homo sapien
gtggggaatcatgcagaagtctgtc

SEQ ID NO: 1605338 - DNA, 25 bp, Homo sapien
gtagcggcggtatcgctcctccatg

SEQ ID NO: 1605339 - DNA, 25 bp, Homo sapien
tccacgtagcggcggtatcgctcct

SEQ ID NO: 1605340 - DNA, 25 bp, Homo sapien
aagtccgcgtccttcttctgcaagt

SEQ ID NO: 1605341 - DNA, 25 bp, Homo sapien
atggcccgcaagtccgcgtccttct

SEQ ID NO: 1605342 - DNA, 25 bp, Homo sapien
aagaggtggcccatcagctccacgc

SEQ ID NO: 1605343 - DNA, 25 bp, Homo sapien
cccatcagctccacgctgctgggct

SEQ ID NO: 1605344 - DNA, 25 bp, Homo sapien
ctggcggaagaggtggcccatcagc

SEQ ID NO: 1605345 - DNA, 25 bp, Homo sapien
atcagctccacgctgctgggctctg

SEQ ID NO: 1605346 - DNA, 25 bp, Homo sapien
cctcaatgtactcccgcttcctctg

SEQ ID NO: 1605347 - DNA, 25 bp, Homo sapien
tgctagcttcttctactctcaagca

SEQ ID NO: 1605348 - DNA, 25 bp, Homo sapien
tcttcaatagcagacaggtaaaaga

SEQ ID NO: 1605349 - DNA, 25 bp, Homo sapien
gaggagttccctctttctgcgactt

SEQ ID NO: 1605350 - DNA, 25 bp, Homo sapien
cttagcaggtatgccccggaacagc

SEQ ID NO: 1605351 - DNA, 25 bp, Homo sapien
tcctccagcttccttttcagcaaaa

SEQ ID NO: 1605352 - DNA, 25 bp, Homo sapien
ccagcttccttttcagcaaaatgga

SEQ ID NO: 1605353 - DNA, 25 bp, Homo sapien
gttcctccagcttccttttcagcaa

SEQ ID NO: 1605354 - DNA, 25 bp, Homo sapien
aatgttcctccagcttccttttcag

SEQ ID NO: 1605355 - DNA, 25 bp, Homo sapien
gggatccagagaggccctaattctt

SEQ ID NO: 1605356 - DNA, 25 bp, Homo sapien
tgagggtagggggtgccatcctggg

SEQ ID NO: 1605357 - DNA, 25 bp, Homo sapien
gatccagagaggccctaattcttcc

SEQ ID NO: 1605358 - DNA, 25 bp, Homo sapien
tgccatcctgggcccatggtactta

SEQ ID NO: 1605359 - DNA, 25 bp, Homo sapien
gagaggagggttacttcggggcaca

SEQ ID NO: 1605360 - DNA, 25 bp, Homo sapien
atcttcagtcttgcccccctgctcc

SEQ ID NO: 1605361 - DNA, 25 bp, Homo sapien
tgggcccgcagctcggatagctgct

SEQ ID NO: 1605362 - DNA, 25 bp, Homo sapien
gcccgcagctcggatagctgctgct

SEQ ID NO: 1605363 - DNA, 25 bp, Homo sapien
ccgcagctcggatagctgctgctgg

SEQ ID NO: 1605364 - DNA, 25 bp, Homo sapien
ctgggcccgcagctcggatagctgc

SEQ ID NO: 1605365 - DNA, 25 bp, Homo sapien
ccctgctccgcgcaggtaggtcccc

SEQ ID NO: 1605366 - DNA, 25 bp, Homo sapien
ctccgcgcaggtaggtccccaggcg

SEQ ID NO: 1605367 - DNA, 25 bp, Homo sapien
cgcgcaggtaggtccccaggcgctc

SEQ ID NO: 1605368 - DNA, 25 bp, Homo sapien
tgctccgcgcaggtaggtccccagg

SEQ ID NO: 1605369 - DNA, 25 bp, Homo sapien
tggcgcgcgcggttggcatcctcca

SEQ ID NO: 1605370 - DNA, 25 bp, Homo sapien
ggtgctgcgtctccaacccgtggcg

SEQ ID NO: 1605371 - DNA, 25 bp, Homo sapien
tgcacagccgcttgttctccagctg

SEQ ID NO: 1605372 - DNA, 25 bp, Homo sapien
tctccagctgaagccgcaggagcgt

SEQ ID NO: 1605373 - DNA, 25 bp, Homo sapien
aggagagagcagggccagggtcgag

SEQ ID NO: 1605374 - DNA, 25 bp, Homo sapien
ctgcagacccgggaggagagagcag

SEQ ID NO: 1605375 - DNA, 25 bp, Homo sapien
gagagcagggccagggtcgagtcac

SEQ ID NO: 1605376 - DNA, 25 bp, Homo sapien
gagagagcagggccagggtcgagtc

SEQ ID NO: 1605377 - DNA, 25 bp, Homo sapien
tcgcaggctcgctggggctcaggga

SEQ ID NO: 1605378 - DNA, 25 bp, Homo sapien
tcgctggggctcagggagagtggag

SEQ ID NO: 1605379 - DNA, 25 bp, Homo sapien
ctcgcaggctcgctggggctcaggg

SEQ ID NO: 1605380 - DNA, 25 bp, Homo sapien
ggctcgctggggctcagggagagtg

SEQ ID NO: 1605381 - DNA, 25 bp, Homo sapien
taaagtggacggagctctaagctgg

SEQ ID NO: 1605382 - DNA, 25 bp, Homo sapien
caagagtggattcgaacagctggga

SEQ ID NO: 1605383 - DNA, 25 bp, Homo sapien
gttggagcaccgaggacctactacg

SEQ ID NO: 1605384 - DNA, 25 bp, Homo sapien
ccagggttaaagtggacggagctct

SEQ ID NO: 1605385 - DNA, 25 bp, Homo sapien
gatctctgcggctaagttatccacg

SEQ ID NO: 1605386 - DNA, 25 bp, Homo sapien
agctccgcaggcaggatctctgcgg

SEQ ID NO: 1605387 - DNA, 25 bp, Homo sapien
ctaagttatccacgggtgtggaggt

SEQ ID NO: 1605388 - DNA, 25 bp, Homo sapien
gcaggcaggatctctgcggctaagt

SEQ ID NO: 1605389 - DNA, 25 bp, Homo sapien
ttggcctcccgcaaggagtcccgct

SEQ ID NO: 1605390 - DNA, 25 bp, Homo sapien
tcctcattggcctcccgcaaggagt

SEQ ID NO: 1605391 - DNA, 25 bp, Homo sapien
ggcctgggtcaacccccgcggctgc

SEQ ID NO: 1605392 - DNA, 25 bp, Homo sapien
cagctcctcattggcctcccgcaag

SEQ ID NO: 1605393 - DNA, 25 bp, Homo sapien
aaatagccatttctcggccttcatg

SEQ ID NO: 1605394 - DNA, 25 bp, Homo sapien
ttttcctccaggttgcggcattcaa

SEQ ID NO: 1605395 - DNA, 25 bp, Homo sapien
caggttgcggcattcaaatagccat

SEQ ID NO: 1605396 - DNA, 25 bp, Homo sapien
tcaccgactcatacttttcctccag

SEQ ID NO: 1605397 - DNA, 25 bp, Homo sapien
gcgtggccggcgttgcgttcctcca

SEQ ID NO: 1605398 - DNA, 25 bp, Homo sapien
tcatcctccagttgtcgcgtgcgct

SEQ ID NO: 1605399 - DNA, 25 bp, Homo sapien
gggagcccgctcggcgtagctcatc

SEQ ID NO: 1605400 - DNA, 25 bp, Homo sapien
cggcgccggcaactggtcagcgtgg

SEQ ID NO: 1605401 - DNA, 25 bp, Homo sapien
ccaggctagtcagcgcctggttccg

SEQ ID NO: 1605402 - DNA, 25 bp, Homo sapien
tagtcagcgcctggttccggtgctg

SEQ ID NO: 1605403 - DNA, 25 bp, Homo sapien
gctgcagctccgcaacctccctctc

SEQ ID NO: 1605404 - DNA, 25 bp, Homo sapien
tgggccaggctagtcagcgcctggt

SEQ ID NO: 1605405 - DNA, 25 bp, Homo sapien
gagacctggggtaccctcgccttca

SEQ ID NO: 1605406 - DNA, 25 bp, Homo sapien
gcagccctgcattctcttgcgccag

SEQ ID NO: 1605407 - DNA, 25 bp, Homo sapien
taccctcgccttcaggccggcccat

SEQ ID NO: 1605408 - DNA, 25 bp, Homo sapien
tcccgcagccctgcattctcttgcg

SEQ ID NO: 1605409 - DNA, 25 bp, Homo sapien
cgctccagatccagacagcgctgct

SEQ ID NO: 1605410 - DNA, 25 bp, Homo sapien
cagacagcgctgctgtaattcgtcc

SEQ ID NO: 1605411 - DNA, 25 bp, Homo sapien
gctgctgtaattcgtccccctcctc

SEQ ID NO: 1605412 - DNA, 25 bp, Homo sapien
ccgctccagatccagacagcgctgc

SEQ ID NO: 1605413 - DNA, 25 bp, Homo sapien
ctggctgtcaaagttgccatacgtc

SEQ ID NO: 1605414 - DNA, 25 bp, Homo sapien
tgtcaaagttgccatacgtctctgg

SEQ ID NO: 1605415 - DNA, 25 bp, Homo sapien
tgccatacgtctctggtgacaggga

SEQ ID NO: 1605416 - DNA, 25 bp, Homo sapien
caaagttgccatacgtctctggtga

SEQ ID NO: 1605417 - DNA, 25 bp, Homo sapien
ttcttccagcgtcatgattctctgg

SEQ ID NO: 1605418 - DNA, 25 bp, Homo sapien
acatgctgaaccgattcttccagcg

SEQ ID NO: 1605419 - DNA, 25 bp, Homo sapien
gaaccgattcttccagcgtcatgat

SEQ ID NO: 1605420 - DNA, 25 bp, Homo sapien
gattcttccagcgtcatgattctct

SEQ ID NO: 1605421 - DNA, 25 bp, Homo sapien
agcttgccgagctctgccgggtctg

SEQ ID NO: 1605422 - DNA, 25 bp, Homo sapien
caccagctgaagcagcttgccgagc

SEQ ID NO: 1605423 - DNA, 25 bp, Homo sapien
ttctcgcaactgatggcacagccca

SEQ ID NO: 1605424 - DNA, 25 bp, Homo sapien
ctgagaactctccaatgaggctcac

SEQ ID NO: 1605425 - DNA, 25 bp, Homo sapien
cttctgacacaggatgcgccaggac

SEQ ID NO: 1605426 - DNA, 25 bp, Homo sapien
tcctgggagtactctactaggctcc

SEQ ID NO: 1605427 - DNA, 25 bp, Homo sapien
taggctccgtaagaccatcttcaga

SEQ ID NO: 1605428 - DNA, 25 bp, Homo sapien
tactctactaggctccgtaagacca

SEQ ID NO: 1605429 - DNA, 25 bp, Homo sapien
gggagtactctactaggctccgtaa

SEQ ID NO: 1605430 - DNA, 25 bp, Homo sapien
actctgaatctgtaggtcccatcct

SEQ ID NO: 1605431 - DNA, 25 bp, Homo sapien
agaggcctcccactctgaatctgta

SEQ ID NO: 1605432 - DNA, 25 bp, Homo sapien
ctggctgtctgccccttttgtctgc

SEQ ID NO: 1605433 - DNA, 25 bp, Homo sapien
tcctattctgtctgcgtgcgccttc

SEQ ID NO: 1605434 - DNA, 25 bp, Homo sapien
caaatcacggcctttacatctgcta

SEQ ID NO: 1605435 - DNA, 25 bp, Homo sapien
ggagctttataaagcccaagccagg

SEQ ID NO: 1605436 - DNA, 25 bp, Homo sapien
tttgctctgctaaaaccctgccttg

SEQ ID NO: 1605437 - DNA, 25 bp, Homo sapien
gatgtaatcagccacctatgccctc

SEQ ID NO: 1605438 - DNA, 25 bp, Homo sapien
ccaggacatgtgcctagctggcccg

SEQ ID NO: 1605439 - DNA, 25 bp, Homo sapien
aggacatgtgcctagctggcccgtc

SEQ ID NO: 1605440 - DNA, 25 bp, Homo sapien
caggacatgtgcctagctggcccgt

SEQ ID NO: 1605441 - DNA, 25 bp, Homo sapien
tctgtcctctaatcaggagtccact

SEQ ID NO: 1605442 - DNA, 25 bp, Homo sapien
cagtctgtcctctaatcaggagtcc

SEQ ID NO: 1605443 - DNA, 25 bp, Homo sapien
tgtcctctaatcaggagtccacttg

SEQ ID NO: 1605444 - DNA, 25 bp, Homo sapien
ctctaatcaggagtccacttgtcac

SEQ ID NO: 1605445 - DNA, 25 bp, Homo sapien
ggacctggatcttccgagatgccct

SEQ ID NO: 1605446 - DNA, 25 bp, Homo sapien
gcttccagttgggacctggatcttc

SEQ ID NO: 1605447 - DNA, 25 bp, Homo sapien
tgccctggagccatgcctcgttgaa

SEQ ID NO: 1605448 - DNA, 25 bp, Homo sapien
ctggagccatgcctcgttgaaccag

SEQ ID NO: 1605449 - DNA, 25 bp, Homo sapien
ggtgggatgagcagactgggggaca

SEQ ID NO: 1605450 - DNA, 25 bp, Homo sapien
acttttgggatcctccccttcagct

SEQ ID NO: 1605451 - DNA, 25 bp, Homo sapien
ctgggggcgagaaggtgggatgagc

SEQ ID NO: 1605452 - DNA, 25 bp, Homo sapien
gcagactgggggacacttttgggat

SEQ ID NO: 1605453 - DNA, 25 bp, Homo sapien
ggctggcacagggagacggaacgtg

SEQ ID NO: 1605454 - DNA, 25 bp, Homo sapien
gagacggaacgtggaacgtctgtaa

SEQ ID NO: 1605455 - DNA, 25 bp, Homo sapien
tggttcagcacataggctacggcaa

SEQ ID NO: 1605456 - DNA, 25 bp, Homo sapien
caaggccgctgctcaggtcctgagg

SEQ ID NO: 1605457 - DNA, 25 bp, Homo sapien
ccaggtgagcagagacccgcatagc

SEQ ID NO: 1605458 - DNA, 25 bp, Homo sapien
agagacccgcatagctcagctttgt

SEQ ID NO: 1605459 - DNA, 25 bp, Homo sapien
agcagagacccgcatagctcagctt

SEQ ID NO: 1605460 - DNA, 25 bp, Homo sapien
ggtgagcagagacccgcatagctca

SEQ ID NO: 1605461 - DNA, 25 bp, Homo sapien
tcggattcaatccaggccacggagc

SEQ ID NO: 1605462 - DNA, 25 bp, Homo sapien
ggctcccgatcggattcaatccagg

SEQ ID NO: 1605463 - DNA, 25 bp, Homo sapien
ctccgggtccgccaccagcgagcgc

SEQ ID NO: 1605464 - DNA, 25 bp, Homo sapien
cgatcggattcaatccaggccacgg

SEQ ID NO: 1605465 - DNA, 25 bp, Homo sapien
gcccgctcttgcctccagccccgcc

SEQ ID NO: 1605466 - DNA, 25 bp, Homo sapien
cccgctcttgcctccagccccgcca

SEQ ID NO: 1605467 - DNA, 25 bp, Homo sapien
ccgctcttgcctccagccccgccat

SEQ ID NO: 1605468 - DNA, 25 bp, Homo sapien
tgcctggcgcgatggttcacatctg

SEQ ID NO: 1605469 - DNA, 25 bp, Homo sapien
ttacagcccactcatgcgcagccgt

SEQ ID NO: 1605470 - DNA, 25 bp, Homo sapien
cccactcatgcgcagccgtacgcac

SEQ ID NO: 1605471 - DNA, 25 bp, Homo sapien
ccgattacagcccactcatgcgcag

SEQ ID NO: 1605472 - DNA, 25 bp, Homo sapien
cccagacacccgattacagcccact

SEQ ID NO: 1605473 - DNA, 25 bp, Homo sapien
ggggcctcggatgctcgtccatatc

SEQ ID NO: 1605474 - DNA, 25 bp, Homo sapien
gggcctcggatgctcgtccatatcc

SEQ ID NO: 1605475 - DNA, 25 bp, Homo sapien
tccatatccccacaacctcctcccg

SEQ ID NO: 1605476 - DNA, 25 bp, Homo sapien
atccccacaacctcctcccgcgtgg

SEQ ID NO: 1605477 - DNA, 25 bp, Homo sapien
tgggcccagcctaggttgtactgct

SEQ ID NO: 1605478 - DNA, 25 bp, Homo sapien
tgtactgctgggaagcggctgactc

SEQ ID NO: 1605479 - DNA, 25 bp, Homo sapien
gaaggccgccatttgtagggacaca

SEQ ID NO: 1605480 - DNA, 25 bp, Homo sapien
ggagatccaggcacctttaattcag

SEQ ID NO: 1605481 - DNA, 25 bp, Homo sapien
gactcatacacagctacgggatacg

SEQ ID NO: 1605482 - DNA, 25 bp, Homo sapien
attgtccccaacagcaacggcgtga

SEQ ID NO: 1605483 - DNA, 25 bp, Homo sapien
tacaaactcctgaaaccgagcctgg

SEQ ID NO: 1605484 - DNA, 25 bp, Homo sapien
tacttttctggtcagggctcggaca

SEQ ID NO: 1605485 - DNA, 25 bp, Homo sapien
accaagagcgcatcaaagtggagcg

SEQ ID NO: 1605486 - DNA, 25 bp, Homo sapien
tctctgcaccgtactgtggaaaaga

SEQ ID NO: 1605487 - DNA, 25 bp, Homo sapien
acaaggtgaagacgctcaaggccga

SEQ ID NO: 1605488 - DNA, 25 bp, Homo sapien
ggcccagctcaaacagaaggtcatg

SEQ ID NO: 1605489 - DNA, 25 bp, Homo sapien
agaagtggggtcctgagaaaatcct

SEQ ID NO: 1605490 - DNA, 25 bp, Homo sapien
caccccgctcaactgggagcagctt

SEQ ID NO: 1605491 - DNA, 25 bp, Homo sapien
cagatttgaagaagtggggtcctga

SEQ ID NO: 1605492 - DNA, 25 bp, Homo sapien
agccaccccgctcaactgggagcag

SEQ ID NO: 1605493 - DNA, 25 bp, Homo sapien
cactaagcatgtgataagaccgcca

SEQ ID NO: 1605494 - DNA, 25 bp, Homo sapien
taggaactaggaactgggccctaca

SEQ ID NO: 1605495 - DNA, 25 bp, Homo sapien
tttcagctcgaggaagccgtcttag

SEQ ID NO: 1605496 - DNA, 25 bp, Homo sapien
gacgatcacagctcttaaacggcat

SEQ ID NO: 1605497 - DNA, 25 bp, Homo sapien
tcactattcagcttctaggtggagg

SEQ ID NO: 1605498 - DNA, 25 bp, Homo sapien
gggcgtcactattcagcttctaggt

SEQ ID NO: 1605499 - DNA, 25 bp, Homo sapien
ctattcagcttctaggtggaggcat

SEQ ID NO: 1605500 - DNA, 25 bp, Homo sapien
gggagggcgtcactattcagcttct

SEQ ID NO: 1605501 - DNA, 25 bp, Homo sapien
tttcctgggtcagcatagggcaccc

SEQ ID NO: 1605502 - DNA, 25 bp, Homo sapien
ctggcctttcctgggtcagcatagg

SEQ ID NO: 1605503 - DNA, 25 bp, Homo sapien
aggtggacacccagcacaggcacct

SEQ ID NO: 1605504 - DNA, 25 bp, Homo sapien
acaagctcactatccgttagccagc

SEQ ID NO: 1605505 - DNA, 25 bp, Homo sapien
ttgggcttaatcgtgtcactgccag

SEQ ID NO: 1605506 - DNA, 25 bp, Homo sapien
tgtcatccacgttgggcttaatcgt

SEQ ID NO: 1605507 - DNA, 25 bp, Homo sapien
cgttgggcttaatcgtgtcactgcc

SEQ ID NO: 1605508 - DNA, 25 bp, Homo sapien
tccacgttgggcttaatcgtgtcac

SEQ ID NO: 1605509 - DNA, 25 bp, Homo sapien
accctccaagcccagttcagtattt

SEQ ID NO: 1605510 - DNA, 25 bp, Homo sapien
ccctccaagcccagttcagtatttt

SEQ ID NO: 1605511 - DNA, 25 bp, Homo sapien
agagaccatgttagtcacgcttgtc

SEQ ID NO: 1605512 - DNA, 25 bp, Homo sapien
agaccatgttagtcacgcttgtctc

SEQ ID NO: 1605513 - DNA, 25 bp, Homo sapien
ggctcctttagtcccatctttgtcc

SEQ ID NO: 1605514 - DNA, 25 bp, Homo sapien
cacccatctggacaggtaagaggac

SEQ ID NO: 1605515 - DNA, 25 bp, Homo sapien
atgtttgcatgagtgacggaggcgc

SEQ ID NO: 1605516 - DNA, 25 bp, Homo sapien
tcagtatgtacccatgtgtcatgtg

SEQ ID NO: 1605517 - DNA, 25 bp, Homo sapien
tgaatgtcaggcgttatttgtctcc

SEQ ID NO: 1605518 - DNA, 25 bp, Homo sapien
taacagtgatctggcgaaggacacc

SEQ ID NO: 1605519 - DNA, 25 bp, Homo sapien
ggagcgtcccacaggcaaatcatta

SEQ ID NO: 1605520 - DNA, 25 bp, Homo sapien
cttgccatcgatgataaagaggccc

SEQ ID NO: 1605521 - DNA, 25 bp, Homo sapien
ccccatgctcgtctgtgtactggaa

SEQ ID NO: 1605522 - DNA, 25 bp, Homo sapien
ggttcccagtgaggagctgatagct

SEQ ID NO: 1605523 - DNA, 25 bp, Homo sapien
cccagtgaggagctgatagctccca

SEQ ID NO: 1605524 - DNA, 25 bp, Homo sapien
ttcccagtgaggagctgatagctcc

SEQ ID NO: 1605525 - DNA, 25 bp, Homo sapien
gttcccagtgaggagctgatagctc

SEQ ID NO: 1605526 - DNA, 25 bp, Homo sapien
gggcgctccctgagccgggctgagg

SEQ ID NO: 1605527 - DNA, 25 bp, Homo sapien
gtggtcccagcatcacaggaatggg

SEQ ID NO: 1605528 - DNA, 25 bp, Homo sapien
gctccctgagccgggctgagggtcc

SEQ ID NO: 1605529 - DNA, 25 bp, Homo sapien
gagacaaggaagggactaccaacca

SEQ ID NO: 1605530 - DNA, 25 bp, Homo sapien
aatcctcagacaagcgtctggtcac

SEQ ID NO: 1605531 - DNA, 25 bp, Homo sapien
acaagcgtctggtcacgtcagcaag

SEQ ID NO: 1605532 - DNA, 25 bp, Homo sapien
cctcagacaagcgtctggtcacgtc

SEQ ID NO: 1605533 - DNA, 25 bp, Homo sapien
agacaagcgtctggtcacgtcagca

SEQ ID NO: 1605534 - DNA, 25 bp, Homo sapien
cagagttggggcctcaggatgcctg

SEQ ID NO: 1605535 - DNA, 25 bp, Homo sapien
tagagtaggccgctgggagcctcac

SEQ ID NO: 1605536 - DNA, 25 bp, Homo sapien
ctggaggccggagataaggggcttt

SEQ ID NO: 1605537 - DNA, 25 bp, Homo sapien
ctttagagtaggccgctgggagcct

SEQ ID NO: 1605538 - DNA, 25 bp, Homo sapien
ggagataaggggctttagagtaggc

SEQ ID NO: 1605539 - DNA, 25 bp, Homo sapien
caaggactgtatccccatggctggg

SEQ ID NO: 1605540 - DNA, 25 bp, Homo sapien
ctgggttgggtgcaaggactgtatc

SEQ ID NO: 1605541 - DNA, 25 bp, Homo sapien
ggttgggtgcaaggactgtatcccc

SEQ ID NO: 1605542 - DNA, 25 bp, Homo sapien
tgggtgcaaggactgtatccccatg

SEQ ID NO: 1605543 - DNA, 25 bp, Homo sapien
ctgagtttgagaggcacagctccag

SEQ ID NO: 1605544 - DNA, 25 bp, Homo sapien
cacagctccagctaagtggcttcac

SEQ ID NO: 1605545 - DNA, 25 bp, Homo sapien
aggcacagctccagctaagtggctt

SEQ ID NO: 1605546 - DNA, 25 bp, Homo sapien
agaggcacagctccagctaagtggc

SEQ ID NO: 1605547 - DNA, 25 bp, Homo sapien
acttgtaacttgcagcatcacccag

SEQ ID NO: 1605548 - DNA, 25 bp, Homo sapien
tgtacttgtaacttgcagcatcacc

SEQ ID NO: 1605549 - DNA, 25 bp, Homo sapien
atgtacttgtaacttgcagcatcac

SEQ ID NO: 1605550 - DNA, 25 bp, Homo sapien
tacttgtaacttgcagcatcaccca

SEQ ID NO: 1605551 - DNA, 25 bp, Homo sapien
tcttcatgaaatagggcagcacagc

SEQ ID NO: 1605552 - DNA, 25 bp, Homo sapien
tccctcctgggaactaagtacatag

SEQ ID NO: 1605553 - DNA, 25 bp, Homo sapien
tgcatctgcaactctatataccagg

SEQ ID NO: 1605554 - DNA, 25 bp, Homo sapien
catcctcctctagctgtgtcatggg

SEQ ID NO: 1605555 - DNA, 25 bp, Homo sapien
tgagcaatggccacgaagccacact

SEQ ID NO: 1605556 - DNA, 25 bp, Homo sapien
gccacactgctaggacctgagggtg

SEQ ID NO: 1605557 - DNA, 25 bp, Homo sapien
gacttgggcggcaatgtttccatta

SEQ ID NO: 1605558 - DNA, 25 bp, Homo sapien
tgtgagcttagctgcaacctccctc

SEQ ID NO: 1605559 - DNA, 25 bp, Homo sapien
gcggaagtcctctgcacggttgctg

SEQ ID NO: 1605560 - DNA, 25 bp, Homo sapien
tctgcacggttgctgaacgcgatga

SEQ ID NO: 1605561 - DNA, 25 bp, Homo sapien
cttgcggaagtcctctgcacggttg

SEQ ID NO: 1605562 - DNA, 25 bp, Homo sapien
aagtcctctgcacggttgctgaacg

SEQ ID NO: 1605563 - DNA, 25 bp, Homo sapien
cgatgcgcgcgttaccggaggccat

SEQ ID NO: 1605564 - DNA, 25 bp, Homo sapien
tttgaaggcgccatcaaccaccgct

SEQ ID NO: 1605565 - DNA, 25 bp, Homo sapien
ggctggctttccgatgcgcgcgtta

SEQ ID NO: 1605566 - DNA, 25 bp, Homo sapien
aaggcgccatcaaccaccgctgtgg

SEQ ID NO: 1605567 - DNA, 25 bp, Homo sapien
gcactaaagtcaggatcgggccaaa

SEQ ID NO: 1605568 - DNA, 25 bp, Homo sapien
cgtgctgggccctatgactgagtca

SEQ ID NO: 1605569 - DNA, 25 bp, Homo sapien
gcgatcaggcctgcgctgcaaggct

SEQ ID NO: 1605570 - DNA, 25 bp, Homo sapien
caaaggaggccactatagcggatgg

SEQ ID NO: 1605571 - DNA, 25 bp, Homo sapien
tagacgcacggacgatcacacgcgt

SEQ ID NO: 1605572 - DNA, 25 bp, Homo sapien
cctgggccgcgaagccttttatgcc

SEQ ID NO: 1605573 - DNA, 25 bp, Homo sapien
tatgcccggcccgaaccaagacgtg

SEQ ID NO: 1605574 - DNA, 25 bp, Homo sapien
ttctcagcgccaagtgagccctggg

SEQ ID NO: 1605575 - DNA, 25 bp, Homo sapien
ggtatgcagtgttagataagcagaa

SEQ ID NO: 1605576 - DNA, 25 bp, Homo sapien
gaaaaacttgcactaactcactgaa

SEQ ID NO: 1605577 - DNA, 25 bp, Homo sapien
ctgtgaaaggaatgcatttccgttt

SEQ ID NO: 1605578 - DNA, 25 bp, Homo sapien
tcatcactatattggaattgtttgg

SEQ ID NO: 1605579 - DNA, 25 bp, Homo sapien
agggaggagggacagacatctcaaa

SEQ ID NO: 1605580 - DNA, 25 bp, Homo sapien
aggagggacagacatctcaaaacta

SEQ ID NO: 1605581 - DNA, 25 bp, Homo sapien
ggaggagggacagacatctcaaaac

SEQ ID NO: 1605582 - DNA, 25 bp, Homo sapien
gaggagggacagacatctcaaaact

SEQ ID NO: 1605583 - DNA, 25 bp, Homo sapien
gggtcgctcccccaactcagggcca

SEQ ID NO: 1605584 - DNA, 25 bp, Homo sapien
atggaggtgcgagggctgcgggaac

SEQ ID NO: 1605585 - DNA, 25 bp, Homo sapien
tgggacgaggtaccgcggagatgga

SEQ ID NO: 1605586 - DNA, 25 bp, Homo sapien
cgagggctgcgggaacgccgggagg

SEQ ID NO: 1605587 - DNA, 25 bp, Homo sapien
gccccgtcgtcctggtctgggacga

SEQ ID NO: 1605588 - DNA, 25 bp, Homo sapien
gcgtggcccagagccgagcgacaaa

SEQ ID NO: 1605589 - DNA, 25 bp, Homo sapien
gagcagccaccggtagggcgtggcc

SEQ ID NO: 1605590 - DNA, 25 bp, Homo sapien
agccgagcgacaaaggtccgtcccg

SEQ ID NO: 1605591 - DNA, 25 bp, Homo sapien
ccagagccgagcgacaaaggtccgt

SEQ ID NO: 1605592 - DNA, 25 bp, Homo sapien
tcaaagggcacaacccagtaggagg

SEQ ID NO: 1605593 - DNA, 25 bp, Homo sapien
tctagacacggtaagaaagaacttg

SEQ ID NO: 1605594 - DNA, 25 bp, Homo sapien
tgaatgttcttactgggccctagcg

SEQ ID NO: 1605595 - DNA, 25 bp, Homo sapien
ttaaggccctagtgggcggagtcca

SEQ ID NO: 1605596 - DNA, 25 bp, Homo sapien
tgatatcatcttcgcagttggcgaa

SEQ ID NO: 1605597 - DNA, 25 bp, Homo sapien
ggtgatatcatcttcgcagttggcg

SEQ ID NO: 1605598 - DNA, 25 bp, Homo sapien
aagtcgggccgcaggtgatatcatc

SEQ ID NO: 1605599 - DNA, 25 bp, Homo sapien
tgagagtgggagccaagtcgggccg

SEQ ID NO: 1605600 - DNA, 25 bp, Homo sapien
gctcctcgcagagcggctgtgcctg

SEQ ID NO: 1605601 - DNA, 25 bp, Homo sapien
gagctcctcgcagagcggctgtgcc

SEQ ID NO: 1605602 - DNA, 25 bp, Homo sapien
ctcgcagagcggctgtgcctggcgt

SEQ ID NO: 1605603 - DNA, 25 bp, Homo sapien
cgcagagcggctgtgcctggcgtac

SEQ ID NO: 1605604 - DNA, 25 bp, Homo sapien
ccaatagccgcaggcggaagcgact

SEQ ID NO: 1605605 - DNA, 25 bp, Homo sapien
ggaagcgactgcgaagggcacgttg

SEQ ID NO: 1605606 - DNA, 25 bp, Homo sapien
ccccaatagccgcaggcggaagcga

SEQ ID NO: 1605607 - DNA, 25 bp, Homo sapien
gcgaagggcacgttggaggtgttcc

SEQ ID NO: 1605608 - DNA, 25 bp, Homo sapien
tccagggcccgatgtctctgttgtg

SEQ ID NO: 1605609 - DNA, 25 bp, Homo sapien
ttccagggcccgatgtctctgttgt

SEQ ID NO: 1605610 - DNA, 25 bp, Homo sapien
tagggtcttggatattcaggtaagg

SEQ ID NO: 1605611 - DNA, 25 bp, Homo sapien
gaaccctgtgagctagggtcttgga

SEQ ID NO: 1605612 - DNA, 25 bp, Homo sapien
gctagggtcttggatattcaggtaa

SEQ ID NO: 1605613 - DNA, 25 bp, Homo sapien
ctgtgagctagggtcttggatattc

SEQ ID NO: 1605614 - DNA, 25 bp, Homo sapien
tgccaggtgcagcttgcctttgccc

SEQ ID NO: 1605615 - DNA, 25 bp, Homo sapien
gatccatgccaaggtcagttgcagc

SEQ ID NO: 1605616 - DNA, 25 bp, Homo sapien
cagcacccacgtcaggccgatgggt

SEQ ID NO: 1605617 - DNA, 25 bp, Homo sapien
ctccacaggcttctagcaggatcca

SEQ ID NO: 1605618 - DNA, 25 bp, Homo sapien
tctcctgttcagtaattcctccctc

SEQ ID NO: 1605619 - DNA, 25 bp, Homo sapien
aggtcttccaatccccctctcctgt

SEQ ID NO: 1605620 - DNA, 25 bp, Homo sapien
tttctcagaatgaaggggacctccc

SEQ ID NO: 1605621 - DNA, 25 bp, Homo sapien
tccctctcttctatgcggcctccct

SEQ ID NO: 1605622 - DNA, 25 bp, Homo sapien
ctgttggctggattggggtctagag

SEQ ID NO: 1605623 - DNA, 25 bp, Homo sapien
tgttggctggattggggtctagagg

SEQ ID NO: 1605624 - DNA, 25 bp, Homo sapien
cccgggctcgggcgcccagacgcag

SEQ ID NO: 1605625 - DNA, 25 bp, Homo sapien
cgggctcgggcgcccagacgcagtg

SEQ ID NO: 1605626 - DNA, 25 bp, Homo sapien
ccgggctcgggcgcccagacgcagt

SEQ ID NO: 1605627 - DNA, 25 bp, Homo sapien
gggctcgggcgcccagacgcagtga

SEQ ID NO: 1605628 - DNA, 25 bp, Homo sapien
tcttcctactgccctaattggacag

SEQ ID NO: 1605629 - DNA, 25 bp, Homo sapien
ttcctactgccctaattggacaggc

SEQ ID NO: 1605630 - DNA, 25 bp, Homo sapien
tcctactgccctaattggacaggca

SEQ ID NO: 1605631 - DNA, 25 bp, Homo sapien
cctactgccctaattggacaggcac

SEQ ID NO: 1605632 - DNA, 25 bp, Homo sapien
gagaagcgtcctctgctcgtcttca

SEQ ID NO: 1605633 - DNA, 25 bp, Homo sapien
agggattctgtagccgagaagcgtc

SEQ ID NO: 1605634 - DNA, 25 bp, Homo sapien
tctgtagccgagaagcgtcctctgc

SEQ ID NO: 1605635 - DNA, 25 bp, Homo sapien
cctctgctcgtcttcagctgcgttt

SEQ ID NO: 1605636 - DNA, 25 bp, Homo sapien
caggcttggtaatctggagtttaga

SEQ ID NO: 1605637 - DNA, 25 bp, Homo sapien
ggtgatgatatctgtgccccaaggc

SEQ ID NO: 1605638 - DNA, 25 bp, Homo sapien
tccccagcctgaatcttgggaaaag

SEQ ID NO: 1605639 - DNA, 25 bp, Homo sapien
taaagccgagaatgggcccagactc

SEQ ID NO: 1605640 - DNA, 25 bp, Homo sapien
gaaggaccttccaggcgtctgggta

SEQ ID NO: 1605641 - DNA, 25 bp, Homo sapien
catcattcccgaggttgaaggccaa

SEQ ID NO: 1605642 - DNA, 25 bp, Homo sapien
aggcagctgcggcaaagttagagca

SEQ ID NO: 1605643 - DNA, 25 bp, Homo sapien
gtgatcagactgcaggaaggacctt

SEQ ID NO: 1605644 - DNA, 25 bp, Homo sapien
caggcttgctctgggtccggcgatc

SEQ ID NO: 1605645 - DNA, 25 bp, Homo sapien
taggaactgtcgcatcactgctgag

SEQ ID NO: 1605646 - DNA, 25 bp, Homo sapien
tctggcgggattaaccacttcgctg

SEQ ID NO: 1605647 - DNA, 25 bp, Homo sapien
ggatacacccacatacgttggtgca

SEQ ID NO: 1605648 - DNA, 25 bp, Homo sapien
aataaaataaagcaagaggagagcc

SEQ ID NO: 1605649 - DNA, 25 bp, Homo sapien
gagtgcaatggcaccgtgccggctc

SEQ ID NO: 1605650 - DNA, 25 bp, Homo sapien
tcatgcctgtgacccagcaattttt

SEQ ID NO: 1605651 - DNA, 25 bp, Homo sapien
taaaataaagcaagaggagagccag

SEQ ID NO: 1605652 - DNA, 25 bp, Homo sapien
gctcaggcaccaagcctcaagtggg

SEQ ID NO: 1605653 - DNA, 25 bp, Homo sapien
ggtacccattgtcgtagagcctgcg

SEQ ID NO: 1605654 - DNA, 25 bp, Homo sapien
ctgagcccggtgcaggaacacgaga

SEQ ID NO: 1605655 - DNA, 25 bp, Homo sapien
ctagccccagcgaagtgcagtgcac

SEQ ID NO: 1605656 - DNA, 25 bp, Homo sapien
ttccatttatttactcctcaacaat

SEQ ID NO: 1605657 - DNA, 25 bp, Homo sapien
tatttactcctcaacaatcctgatg

SEQ ID NO: 1605658 - DNA, 25 bp, Homo sapien
tttatttactcctcaacaatcctga

SEQ ID NO: 1605659 - DNA, 25 bp, Homo sapien
ccatttatttactcctcaacaatcc

SEQ ID NO: 1605660 - DNA, 25 bp, Homo sapien
gactgtgtcacagagcggttaaggc

SEQ ID NO: 1605661 - DNA, 25 bp, Homo sapien
ggattcaaaatcaagtccaaactgg

SEQ ID NO: 1605662 - DNA, 25 bp, Homo sapien
tcacagagcggttaaggcacacaat

SEQ ID NO: 1605663 - DNA, 25 bp, Homo sapien
aggcacacaatcaaggtcatacagc

SEQ ID NO: 1605664 - DNA, 25 bp, Homo sapien
gtgccgtggtgttagctcagctcat

SEQ ID NO: 1605665 - DNA, 25 bp, Homo sapien
gtggtgttagctcagctcatgacaa

SEQ ID NO: 1605666 - DNA, 25 bp, Homo sapien
gccgtggtgttagctcagctcatga

SEQ ID NO: 1605667 - DNA, 25 bp, Homo sapien
cgtggtgttagctcagctcatgaca

SEQ ID NO: 1605668 - DNA, 25 bp, Homo sapien
ctatgtgacccaggttggcgtaatc

SEQ ID NO: 1605669 - DNA, 25 bp, Homo sapien
gctatgtgacccaggttggcgtaat

SEQ ID NO: 1605670 - DNA, 25 bp, Homo sapien
catgccattacagggctggtagttc

SEQ ID NO: 1605671 - DNA, 25 bp, Homo sapien
ttagatcttataagctctgctgggc

SEQ ID NO: 1605672 - DNA, 25 bp, Homo sapien
tagatcttataagctctgctgggct

SEQ ID NO: 1605673 - DNA, 25 bp, Homo sapien
gcttcctggccatgccattacaggg

SEQ ID NO: 1605674 - DNA, 25 bp, Homo sapien
aggttggtaccaagggctgctgcca

SEQ ID NO: 1605675 - DNA, 25 bp, Homo sapien
cagatatccgagcagttagagggca

SEQ ID NO: 1605676 - DNA, 25 bp, Homo sapien
ggttccgattcatgtcacccacgca

SEQ ID NO: 1605677 - DNA, 25 bp, Homo sapien
cagaactggacctgcaggttggtac

SEQ ID NO: 1605678 - DNA, 25 bp, Homo sapien
aagctctggaaaacagccccggcct

SEQ ID NO: 1605679 - DNA, 25 bp, Homo sapien
aattcctgggcaaagatcccttcca

SEQ ID NO: 1605680 - DNA, 25 bp, Homo sapien
ttggctaacgtggtggcccttgacc

SEQ ID NO: 1605681 - DNA, 25 bp, Homo sapien
tccagctggtagttatagacccagg

SEQ ID NO: 1605682 - DNA, 25 bp, Homo sapien
agaactgagcgaagggaaaagacac

SEQ ID NO: 1605683 - DNA, 25 bp, Homo sapien
gctatgaggccagctgtatgcagca

SEQ ID NO: 1605684 - DNA, 25 bp, Homo sapien
taggtacactgtggaccagccagaa

SEQ ID NO: 1605685 - DNA, 25 bp, Homo sapien
taggtacaggcgctatgaggccagc

SEQ ID NO: 1605686 - DNA, 25 bp, Homo sapien
atgggacccgagtctctccccagcc

SEQ ID NO: 1605687 - DNA, 25 bp, Homo sapien
aaatgggacccgagtctctccccag

SEQ ID NO: 1605688 - DNA, 25 bp, Homo sapien
aatgggacccgagtctctccccagc

SEQ ID NO: 1605689 - DNA, 25 bp, Homo sapien
ccttcgtgtgcccacgcatggaaga

SEQ ID NO: 1605690 - DNA, 25 bp, Homo sapien
cttcgtgtgcccacgcatggaagag

SEQ ID NO: 1605691 - DNA, 25 bp, Homo sapien
tgctgggttgaggcggttggtcatt

SEQ ID NO: 1605692 - DNA, 25 bp, Homo sapien
aggcggttggtcattgtagagcagg

SEQ ID NO: 1605693 - DNA, 25 bp, Homo sapien
gtgttgctccggtacagcggctgca

SEQ ID NO: 1605694 - DNA, 25 bp, Homo sapien
gagctggcagcttgtagaccacgaa

SEQ ID NO: 1605695 - DNA, 25 bp, Homo sapien
ggagctctcgtccagatacttgtac

SEQ ID NO: 1605696 - DNA, 25 bp, Homo sapien
gctgttgatgagtgccctgccgtcc

SEQ ID NO: 1605697 - DNA, 25 bp, Homo sapien
tgcccggagtccccgtagcaggtca

SEQ ID NO: 1605698 - DNA, 25 bp, Homo sapien
ggggacgcacagcagcgctgccagc

SEQ ID NO: 1605699 - DNA, 25 bp, Homo sapien
cccggagtccccgtagcaggtcagg

SEQ ID NO: 1605700 - DNA, 25 bp, Homo sapien
ggctgcccggagtccccgtagcagg

SEQ ID NO: 1605701 - DNA, 25 bp, Homo sapien
ggactggcacctggcgcctttcact

SEQ ID NO: 1605702 - DNA, 25 bp, Homo sapien
ttcacttccctaaacttgcctggga

SEQ ID NO: 1605703 - DNA, 25 bp, Homo sapien
gggcgctgggttacatcagaggcca

SEQ ID NO: 1605704 - DNA, 25 bp, Homo sapien
tccaggaatctgtgtcgggactgcg

SEQ ID NO: 1605705 - DNA, 25 bp, Homo sapien
ccccagtcactaggagagtccaagt

SEQ ID NO: 1605706 - DNA, 25 bp, Homo sapien
tataggacccataaccattgacagt

SEQ ID NO: 1605707 - DNA, 25 bp, Homo sapien
taatatcagccacaataagggacct

SEQ ID NO: 1605708 - DNA, 25 bp, Homo sapien
gatctttgggaacgcgagtccagga

SEQ ID NO: 1605709 - DNA, 25 bp, Homo sapien
cacgtgcaggcgtatggcttctccc

SEQ ID NO: 1605710 - DNA, 25 bp, Homo sapien
gcagccttcccacgtgcaggcgtat

SEQ ID NO: 1605711 - DNA, 25 bp, Homo sapien
tggtcagagcgcgaaaaagcacgtg

SEQ ID NO: 1605712 - DNA, 25 bp, Homo sapien
gtccgagcgcgcgaatctccagccg

SEQ ID NO: 1605713 - DNA, 25 bp, Homo sapien
tggtgtagctcttgccgcaacccgg

SEQ ID NO: 1605714 - DNA, 25 bp, Homo sapien
cgaacgtcggcctcgcttggatggc

SEQ ID NO: 1605715 - DNA, 25 bp, Homo sapien
gcgcggtctcggctatcacacctgg

SEQ ID NO: 1605716 - DNA, 25 bp, Homo sapien
gaagtgcccttggtactgaggcgcc

SEQ ID NO: 1605717 - DNA, 25 bp, Homo sapien
ccgggcccgagaagttggtgaggag

SEQ ID NO: 1605718 - DNA, 25 bp, Homo sapien
gctccgggcccgagaagttggtgag

SEQ ID NO: 1605719 - DNA, 25 bp, Homo sapien
atattgcgccccggaggcctcgctg

SEQ ID NO: 1605720 - DNA, 25 bp, Homo sapien
cgggcggcggcggatattgcgcccc

SEQ ID NO: 1605721 - DNA, 25 bp, Homo sapien
gtccgcgcccctctcatcgtcctct

SEQ ID NO: 1605722 - DNA, 25 bp, Homo sapien
ccgggctggtcctcagacttcacgt

SEQ ID NO: 1605723 - DNA, 25 bp, Homo sapien
ggcccatgtcctgcgcctcttcgga

SEQ ID NO: 1605724 - DNA, 25 bp, Homo sapien
tggtcctcagacttcacgtggaggg

SEQ ID NO: 1605725 - DNA, 25 bp, Homo sapien
gggagcaggcagctcgaggttcggt

SEQ ID NO: 1605726 - DNA, 25 bp, Homo sapien
gcaggcagctcgaggttcggtggac

SEQ ID NO: 1605727 - DNA, 25 bp, Homo sapien
gagcaggcagctcgaggttcggtgg

SEQ ID NO: 1605728 - DNA, 25 bp, Homo sapien
caggcagctcgaggttcggtggaca

SEQ ID NO: 1605729 - DNA, 25 bp, Homo sapien
tgatttcaggtcaagatgcaggtct

SEQ ID NO: 1605730 - DNA, 25 bp, Homo sapien
ctcagtcctggttaagtctcttgat

SEQ ID NO: 1605731 - DNA, 25 bp, Homo sapien
agcccacctagaccccaccttctag

SEQ ID NO: 1605732 - DNA, 25 bp, Homo sapien
gactgtggccctggattccagccag

SEQ ID NO: 1605733 - DNA, 25 bp, Homo sapien
ggcccagggcggtcagtgtgctgat

SEQ ID NO: 1605734 - DNA, 25 bp, Homo sapien
aagtcatcctgtgtgtccgggaagg

SEQ ID NO: 1605735 - DNA, 25 bp, Homo sapien
tcagtgtgctgatggagggcaaggc

SEQ ID NO: 1605736 - DNA, 25 bp, Homo sapien
gcaaggcggtctcggctgtggccat

SEQ ID NO: 1605737 - DNA, 25 bp, Homo sapien
tcctcggctgcctcgtgaactctga

SEQ ID NO: 1605738 - DNA, 25 bp, Homo sapien
ttcctcggctgcctcgtgaactctg

SEQ ID NO: 1605739 - DNA, 25 bp, Homo sapien
tcttcctcggctgcctcgtgaactc

SEQ ID NO: 1605740 - DNA, 25 bp, Homo sapien
tcctcttcctcggctgcctcgtgaa

SEQ ID NO: 1605741 - DNA, 25 bp, Homo sapien
cgatgaacgcaaactttgtactttt

SEQ ID NO: 1605742 - DNA, 25 bp, Homo sapien
ttgcatcgtggatgccaatctgagt

SEQ ID NO: 1605743 - DNA, 25 bp, Homo sapien
tggaagggttacgtggtcggaatca

SEQ ID NO: 1605744 - DNA, 25 bp, Homo sapien
gagaagatcagttcatggttgcatc

SEQ ID NO: 1605745 - DNA, 25 bp, Homo sapien
agcctctgtggcaaggaagcgtggc

SEQ ID NO: 1605746 - DNA, 25 bp, Homo sapien
agcacgaagcctgggcctatggcag

SEQ ID NO: 1605747 - DNA, 25 bp, Homo sapien
ggctggacttgctacattttgggag

SEQ ID NO: 1605748 - DNA, 25 bp, Homo sapien
caatttctcagtgtggcccaaatgg

SEQ ID NO: 1605749 - DNA, 25 bp, Homo sapien
tgtcactaaggcgtgagtctcccgg

SEQ ID NO: 1605750 - DNA, 25 bp, Homo sapien
tctgttggtctgtacttctgaagca

SEQ ID NO: 1605751 - DNA, 25 bp, Homo sapien
atctctgttggtctgtacttctgaa

SEQ ID NO: 1605752 - DNA, 25 bp, Homo sapien
gttggtctgtacttctgaagcagtg

SEQ ID NO: 1605753 - DNA, 25 bp, Homo sapien
ctctgttggtctgtacttctgaagc

SEQ ID NO: 1605754 - DNA, 25 bp, Homo sapien
cccaaggtgtcaggccggtttactg

SEQ ID NO: 1605755 - DNA, 25 bp, Homo sapien
tgtcaggccggtttactggtaacca

SEQ ID NO: 1605756 - DNA, 25 bp, Homo sapien
gcacatctgaccccaaggtgtcagg

SEQ ID NO: 1605757 - DNA, 25 bp, Homo sapien
cacatctgaccccaaggtgtcaggc

SEQ ID NO: 1605758 - DNA, 25 bp, Homo sapien
ggactttcccctagagtggtctggc

SEQ ID NO: 1605759 - DNA, 25 bp, Homo sapien
aagaaacgaacacgtctgggggctg

SEQ ID NO: 1605760 - DNA, 25 bp, Homo sapien
ctagagtggtctggcccccatctga

SEQ ID NO: 1605761 - DNA, 25 bp, Homo sapien
gggctgtgagttgccgggacgtggt

SEQ ID NO: 1605762 - DNA, 25 bp, Homo sapien
cacgctgtggcagacttgtttgagc

SEQ ID NO: 1605763 - DNA, 25 bp, Homo sapien
gtctccaaatggctgatctttgcca

SEQ ID NO: 1605764 - DNA, 25 bp, Homo sapien
attttctgggtgaactcttggagct

SEQ ID NO: 1605765 - DNA, 25 bp, Homo sapien
ttgtacacagtctccacgctgtggc

SEQ ID NO: 1605766 - DNA, 25 bp, Homo sapien
agtgcatggtccttttgccggctct

SEQ ID NO: 1605767 - DNA, 25 bp, Homo sapien
tccaggaccgtcagctggcaactgg

SEQ ID NO: 1605768 - DNA, 25 bp, Homo sapien
gaggagaagtagagtcccgacttcc

SEQ ID NO: 1605769 - DNA, 25 bp, Homo sapien
caatgcttgagtccagagaggagaa

SEQ ID NO: 1605770 - DNA, 25 bp, Homo sapien
tgacttctcagagtacaggaagcgg

SEQ ID NO: 1605771 - DNA, 25 bp, Homo sapien
gtggcgacacaagggcaagaaacct

SEQ ID NO: 1605772 - DNA, 25 bp, Homo sapien
gaagcggccaggtgtagtcgctcat

SEQ ID NO: 1605773 - DNA, 25 bp, Homo sapien
aggtggcgacacaagggcaagaaac

SEQ ID NO: 1605774 - DNA, 25 bp, Homo sapien
caagagcggctgatctgagagagat

SEQ ID NO: 1605775 - DNA, 25 bp, Homo sapien
ttccatgggtgacacgaggcatgct

SEQ ID NO: 1605776 - DNA, 25 bp, Homo sapien
ggacccgcgttgttgccttccatgg

SEQ ID NO: 1605777 - DNA, 25 bp, Homo sapien
gaaaacagaccaagaggcacgacta

SEQ ID NO: 1605778 - DNA, 25 bp, Homo sapien
cagcctgatgctttcttaagtgacc

SEQ ID NO: 1605779 - DNA, 25 bp, Homo sapien
cccagcctgatgctttcttaagtga

SEQ ID NO: 1605780 - DNA, 25 bp, Homo sapien
gcctgatgctttcttaagtgacctt

SEQ ID NO: 1605781 - DNA, 25 bp, Homo sapien
cctgatgctttcttaagtgaccttc

SEQ ID NO: 1605782 - DNA, 25 bp, Homo sapien
tctcagctatctcaaccaggcacag

SEQ ID NO: 1605783 - DNA, 25 bp, Homo sapien
gctttgtacccagaaggcctgactt

SEQ ID NO: 1605784 - DNA, 25 bp, Homo sapien
gacatgggcttagagtggttacacc

SEQ ID NO: 1605785 - DNA, 25 bp, Homo sapien
tgcttcctactaaggcactcaggcg

SEQ ID NO: 1605786 - DNA, 25 bp, Homo sapien
ctcaagttatctgccagcgccagcc

SEQ ID NO: 1605787 - DNA, 25 bp, Homo sapien
agttctcttcccaccgcggatgctc

SEQ ID NO: 1605788 - DNA, 25 bp, Homo sapien
ttcccaccgcggatgctccttgctc

SEQ ID NO: 1605789 - DNA, 25 bp, Homo sapien
gttctcttcccaccgcggatgctcc

SEQ ID NO: 1605790 - DNA, 25 bp, Homo sapien
ctcttcccaccgcggatgctccttg

SEQ ID NO: 1605791 - DNA, 25 bp, Homo sapien
ctcgatgtgctgctgcgggacggtg

SEQ ID NO: 1605792 - DNA, 25 bp, Homo sapien
ccgcaggaaagacgggcagggctgg

SEQ ID NO: 1605793 - DNA, 25 bp, Homo sapien
cgatgtgctgctgcgggacggtggg

SEQ ID NO: 1605794 - DNA, 25 bp, Homo sapien
gacccgcaggaaagacgggcagggc

SEQ ID NO: 1605795 - DNA, 25 bp, Homo sapien
gtattttcccgccttcaagctcgca

SEQ ID NO: 1605796 - DNA, 25 bp, Homo sapien
cgagtgtgttgtgacgcgtgctccc

SEQ ID NO: 1605797 - DNA, 25 bp, Homo sapien
ttcaagctcgcaccctctgcgcatg

SEQ ID NO: 1605798 - DNA, 25 bp, Homo sapien
ctgcgctcccgcggacgagtgtgtt

SEQ ID NO: 1605799 - DNA, 25 bp, Homo sapien
cccaggctgtagtgcagtggcacaa

SEQ ID NO: 1605800 - DNA, 25 bp, Homo sapien
tttggaacagagtcttcttctgtca

SEQ ID NO: 1605801 - DNA, 25 bp, Homo sapien
tggttcaaacgattctcgtgcctca

SEQ ID NO: 1605802 - DNA, 25 bp, Homo sapien
actgcaacctccacctcctggttca

SEQ ID NO: 1605803 - DNA, 25 bp, Homo sapien
cactgtgcctggctcagtacccata

SEQ ID NO: 1605804 - DNA, 25 bp, Homo sapien
ccactgtgcctggctcagtacccat

SEQ ID NO: 1605805 - DNA, 25 bp, Homo sapien
cgcccagcccagtacccagaatttt

SEQ ID NO: 1605806 - DNA, 25 bp, Homo sapien
tcgcccagcccagtacccagaattt

SEQ ID NO: 1605807 - DNA, 25 bp, Homo sapien
ctcgcccagcccagtacccagaatt

SEQ ID NO: 1605808 - DNA, 25 bp, Homo sapien
tttattagacaataggtggcccaca

SEQ ID NO: 1605809 - DNA, 25 bp, Homo sapien
attagacaataggtggcccacaggt

SEQ ID NO: 1605810 - DNA, 25 bp, Homo sapien
tagacaataggtggcccacaggtct

SEQ ID NO: 1605811 - DNA, 25 bp, Homo sapien
tattagacaataggtggcccacagg

SEQ ID NO: 1605812 - DNA, 25 bp, Homo sapien
aggaacctgctacccagtcctctgt

SEQ ID NO: 1605813 - DNA, 25 bp, Homo sapien
tcacagtagacacaccacacaggac

SEQ ID NO: 1605814 - DNA, 25 bp, Homo sapien
ggacaacagaaggaacctgctaccc

SEQ ID NO: 1605815 - DNA, 25 bp, Homo sapien
ctcacagtagacacaccacacagga

SEQ ID NO: 1605816 - DNA, 25 bp, Homo sapien
gactcggggaggatgacctgtccta

SEQ ID NO: 1605817 - DNA, 25 bp, Homo sapien
agaggcctcataaatacaaggtcac

SEQ ID NO: 1605818 - DNA, 25 bp, Homo sapien
tcactggccagggatgcaaaggagc

SEQ ID NO: 1605819 - DNA, 25 bp, Homo sapien
ggatgcaaaggagcgcagcagcagg

SEQ ID NO: 1605820 - DNA, 25 bp, Homo sapien
cggctcggcatccaggcggcacagg

SEQ ID NO: 1605821 - DNA, 25 bp, Homo sapien
ggctcggcatccaggcggcacaggg

SEQ ID NO: 1605822 - DNA, 25 bp, Homo sapien
cctcggctcggcatccaggcggcac

SEQ ID NO: 1605823 - DNA, 25 bp, Homo sapien
tcggctcggcatccaggcggcacag

SEQ ID NO: 1605824 - DNA, 25 bp, Homo sapien
tcccggatattgttgatgccatatt

SEQ ID NO: 1605825 - DNA, 25 bp, Homo sapien
cagctcccggatattgttgatgcca

SEQ ID NO: 1605826 - DNA, 25 bp, Homo sapien
gcccaccagctcccggatattgttg

SEQ ID NO: 1605827 - DNA, 25 bp, Homo sapien
caccagctcccggatattgttgatg

SEQ ID NO: 1605828 - DNA, 25 bp, Homo sapien
tatcatgaggtcagcacgtgcaccc

SEQ ID NO: 1605829 - DNA, 25 bp, Homo sapien
tgaccacgtagttgccttagccctc

SEQ ID NO: 1605830 - DNA, 25 bp, Homo sapien
tctgctcagatttccatggctccca

SEQ ID NO: 1605831 - DNA, 25 bp, Homo sapien
tctgggcctttgaactgactgtgac

SEQ ID NO: 1605832 - DNA, 25 bp, Homo sapien
caggcaatgaccgacacgttctcgg

SEQ ID NO: 1605833 - DNA, 25 bp, Homo sapien
acacgttctcgggaagccccatggg

SEQ ID NO: 1605834 - DNA, 25 bp, Homo sapien
tgaccgacacgttctcgggaagccc

SEQ ID NO: 1605835 - DNA, 25 bp, Homo sapien
gcagcatctctggacggaagacccc

SEQ ID NO: 1605836 - DNA, 25 bp, Homo sapien
tgctgggctctgtgtatgggttgta

SEQ ID NO: 1605837 - DNA, 25 bp, Homo sapien
ttggtggtagctgaacacctccatg

SEQ ID NO: 1605838 - DNA, 25 bp, Homo sapien
tggtggtagctgaacacctccatgc

SEQ ID NO: 1605839 - DNA, 25 bp, Homo sapien
ggctctgtgtatgggttgtaggctg

SEQ ID NO: 1605840 - DNA, 25 bp, Homo sapien
gagagcaggggtttggaggataatg

SEQ ID NO: 1605841 - DNA, 25 bp, Homo sapien
gcaggagagcaggggtttggaggat

SEQ ID NO: 1605842 - DNA, 25 bp, Homo sapien
aggagagcaggggtttggaggataa

SEQ ID NO: 1605843 - DNA, 25 bp, Homo sapien
tgcaggaagtggggggcgggcagga

SEQ ID NO: 1605844 - DNA, 25 bp, Homo sapien
caccatggcccacccctgcccccct

SEQ ID NO: 1605845 - DNA, 25 bp, Homo sapien
accatggcccacccctgcccccctg

SEQ ID NO: 1605846 - DNA, 25 bp, Homo sapien
tggcccacccctgcccccctgctca

SEQ ID NO: 1605847 - DNA, 25 bp, Homo sapien
catggcccacccctgcccccctgct

SEQ ID NO: 1605848 - DNA, 25 bp, Homo sapien
agaactcccgcagaacgcccatgag

SEQ ID NO: 1605849 - DNA, 25 bp, Homo sapien
gaagaactcccgcagaacgcccatg

SEQ ID NO: 1605850 - DNA, 25 bp, Homo sapien
ttggtgaagaactcccgcagaacgc

SEQ ID NO: 1605851 - DNA, 25 bp, Homo sapien
actcccgcagaacgcccatgaggtg

SEQ ID NO: 1605852 - DNA, 25 bp, Homo sapien
cgccctcgatctggtggaactcagc

SEQ ID NO: 1605853 - DNA, 25 bp, Homo sapien
aactcagccaggtgcgtggcgtcca

SEQ ID NO: 1605854 - DNA, 25 bp, Homo sapien
gcgtccagggtctcattccggaata

SEQ ID NO: 1605855 - DNA, 25 bp, Homo sapien
aaggtgagaccatgatccgccacca

SEQ ID NO: 1605856 - DNA, 25 bp, Homo sapien
gtcagaaggtccctttgacagcacc

SEQ ID NO: 1605857 - DNA, 25 bp, Homo sapien
cagaaggtccctttgacagcaccct

SEQ ID NO: 1605858 - DNA, 25 bp, Homo sapien
gggtcagaaggtccctttgacagca

SEQ ID NO: 1605859 - DNA, 25 bp, Homo sapien
gaaggtccctttgacagcaccctct

SEQ ID NO: 1605860 - DNA, 25 bp, Homo sapien
tgggcaaggcggtagagcgcacggg

SEQ ID NO: 1605861 - DNA, 25 bp, Homo sapien
tgtggtgtgggttcgcagtaggttt

SEQ ID NO: 1605862 - DNA, 25 bp, Homo sapien
ctggctgatgtggtgtgggttcgca

SEQ ID NO: 1605863 - DNA, 25 bp, Homo sapien
agcgcacgggcgctggctgatgtgg

SEQ ID NO: 1605864 - DNA, 25 bp, Homo sapien
ctgtgagccgtagccgccctgagag

SEQ ID NO: 1605865 - DNA, 25 bp, Homo sapien
cgccctgagagtgggtccgcttgac

SEQ ID NO: 1605866 - DNA, 25 bp, Homo sapien
cgctggacatagtccattgggagct

SEQ ID NO: 1605867 - DNA, 25 bp, Homo sapien
cgcttgacccgctggacatagtcca

SEQ ID NO: 1605868 - DNA, 25 bp, Homo sapien
gacagagtcttgttcagttggccca

SEQ ID NO: 1605869 - DNA, 25 bp, Homo sapien
actgcacctgggctttatttatgta

SEQ ID NO: 1605870 - DNA, 25 bp, Homo sapien
agttggcccagctgaagtacaatgg

SEQ ID NO: 1605871 - DNA, 25 bp, Homo sapien
agtgctgggatcatgccaccgcgcc

SEQ ID NO: 1605872 - DNA, 25 bp, Homo sapien
gttatcagtcggcatctcggtgaac

SEQ ID NO: 1605873 - DNA, 25 bp, Homo sapien
tctcaatgaagttatcagtcggcat

SEQ ID NO: 1605874 - DNA, 25 bp, Homo sapien
gggcgtcaaagttccagaaggagct

SEQ ID NO: 1605875 - DNA, 25 bp, Homo sapien
ctggaagagggcgtcaaagttccag

SEQ ID NO: 1605876 - DNA, 25 bp, Homo sapien
gtgggagacacagcctgactgccct

SEQ ID NO: 1605877 - DNA, 25 bp, Homo sapien
ggtgggagacacagcctgactgccc

SEQ ID NO: 1605878 - DNA, 25 bp, Homo sapien
gcaccaggcaccgcccccagccctg

SEQ ID NO: 1605879 - DNA, 25 bp, Homo sapien
agaagcaccaggcaccgcccccagc

SEQ ID NO: 1605880 - DNA, 25 bp, Homo sapien
accaggcaccgcccccagccctgtg

SEQ ID NO: 1605881 - DNA, 25 bp, Homo sapien
ctgtacccagcagaagcaccaggca

SEQ ID NO: 1605882 - DNA, 25 bp, Homo sapien
aggaagatctgtcggaactgggagc

SEQ ID NO: 1605883 - DNA, 25 bp, Homo sapien
caggaagatctgtcggaactgggag

SEQ ID NO: 1605884 - DNA, 25 bp, Homo sapien
gaagatctgtcggaactgggagcgg

SEQ ID NO: 1605885 - DNA, 25 bp, Homo sapien
agatctgtcggaactgggagcggac

SEQ ID NO: 1605886 - DNA, 25 bp, Homo sapien
cttgagcagcgggtgaaggtggccg

SEQ ID NO: 1605887 - DNA, 25 bp, Homo sapien
acaccgtgggccaagaagttgtagg

SEQ ID NO: 1605888 - DNA, 25 bp, Homo sapien
gcttgaagggccggtcccgccaaga

SEQ ID NO: 1605889 - DNA, 25 bp, Homo sapien
gacaccgtgggccaagaagttgtag

SEQ ID NO: 1605890 - DNA, 25 bp, Homo sapien
tgaagggccggtcccgccaagagcc

SEQ ID NO: 1605891 - DNA, 25 bp, Homo sapien
gcttggagatgctggtactaaaggc

SEQ ID NO: 1605892 - DNA, 25 bp, Homo sapien
aaggcactgcctttgctcacccagt

SEQ ID NO: 1605893 - DNA, 25 bp, Homo sapien
cctttgctcacccagtaggtcttca

SEQ ID NO: 1605894 - DNA, 25 bp, Homo sapien
ctgcctttgctcacccagtaggtct

SEQ ID NO: 1605895 - DNA, 25 bp, Homo sapien
tcccccccggaccagctggagccgc

SEQ ID NO: 1605896 - DNA, 25 bp, Homo sapien
gcttctcagcctgtcccccccggac

SEQ ID NO: 1605897 - DNA, 25 bp, Homo sapien
tgtcccccccggaccagctggagcc

SEQ ID NO: 1605898 - DNA, 25 bp, Homo sapien
taaggagtgtgaggggtatgagggc

SEQ ID NO: 1605899 - DNA, 25 bp, Homo sapien
ggccaggggcccatgtgcccgtcca

SEQ ID NO: 1605900 - DNA, 25 bp, Homo sapien
gcccatgtgcccgtccacctgcccc

SEQ ID NO: 1605901 - DNA, 25 bp, Homo sapien
ctgccaggataaggagtgtgagggg

SEQ ID NO: 1605902 - DNA, 25 bp, Homo sapien
cgaatccacttgttggacatggcct

SEQ ID NO: 1605903 - DNA, 25 bp, Homo sapien
tcttgtccacccgaatccacttgtt

SEQ ID NO: 1605904 - DNA, 25 bp, Homo sapien
gcccgtcagccgcactcttgtccac

SEQ ID NO: 1605905 - DNA, 25 bp, Homo sapien
cacccgaatccacttgttggacatg

SEQ ID NO: 1605906 - DNA, 25 bp, Homo sapien
cttcgaaacacacgggcctcatggc

SEQ ID NO: 1605907 - DNA, 25 bp, Homo sapien
gggaatgcttcgaaacacacgggcc

SEQ ID NO: 1605908 - DNA, 25 bp, Homo sapien
tggaccgaagttcagcctcgatgac

SEQ ID NO: 1605909 - DNA, 25 bp, Homo sapien
ccagtgcttggtggaccgaagttca

SEQ ID NO: 1605910 - DNA, 25 bp, Homo sapien
cctgaaggctcttcacggcgcccac

SEQ ID NO: 1605911 - DNA, 25 bp, Homo sapien
agcagttccgccacctgaccatccg

SEQ ID NO: 1605912 - DNA, 25 bp, Homo sapien
tgtccaggccgccatcagacgcctc

SEQ ID NO: 1605913 - DNA, 25 bp, Homo sapien
tccagccgccggagcagcagttccg

SEQ ID NO: 1605914 - DNA, 25 bp, Homo sapien
actccttccagtgtgctcagcgtgt

SEQ ID NO: 1605915 - DNA, 25 bp, Homo sapien
ctccttccagtgtgctcagcgtgtc

SEQ ID NO: 1605916 - DNA, 25 bp, Homo sapien
gactccttccagtgtgctcagcgtg

SEQ ID NO: 1605917 - DNA, 25 bp, Homo sapien
tcaacaaggacatccgttgcaaggt

SEQ ID NO: 1605918 - DNA, 25 bp, Homo sapien
cttcaactacaagggcaagaacgtg

SEQ ID NO: 1605919 - DNA, 25 bp, Homo sapien
caagaacgtgctgatcaacaaggac

SEQ ID NO: 1605920 - DNA, 25 bp, Homo sapien
tcatgtcatcttcaactacaagggc

SEQ ID NO: 1605921 - DNA, 25 bp, Homo sapien
cggccagacaacacctatgaggtga

SEQ ID NO: 1605922 - DNA, 25 bp, Homo sapien
tggagtccggctccttggaagacga

SEQ ID NO: 1605923 - DNA, 25 bp, Homo sapien
gaggtgaagattgacaacagccagg

SEQ ID NO: 1605924 - DNA, 25 bp, Homo sapien
tacacactgattgtgcggccagaca

SEQ ID NO: 1605925 - DNA, 25 bp, Homo sapien
ctggccgcgccaaataatgtctctg

SEQ ID NO: 1605926 - DNA, 25 bp, Homo sapien
ccaggccaaggacgagctgtagaga

SEQ ID NO: 1605927 - DNA, 25 bp, Homo sapien
gaacggggctcttctcatttcaccc

SEQ ID NO: 1605928 - DNA, 25 bp, Homo sapien
ctgtgagactcgagaactttcattt

SEQ ID NO: 1605929 - DNA, 25 bp, Homo sapien
tgcttggtggcctttcaggtatttc

SEQ ID NO: 1605930 - DNA, 25 bp, Homo sapien
tgctctacaagggttcctgccagga

SEQ ID NO: 1605931 - DNA, 25 bp, Homo sapien
tgccaggatacccagaccagaataa

SEQ ID NO: 1605932 - DNA, 25 bp, Homo sapien
tgagtaactttcactttgactgctc

SEQ ID NO: 1605933 - DNA, 25 bp, Homo sapien
cccacagcgcggagtttagtctgcg

SEQ ID NO: 1605934 - DNA, 25 bp, Homo sapien
tgacgtcaccgataacgggcatggc

SEQ ID NO: 1605935 - DNA, 25 bp, Homo sapien
tggcgtcactcaggagaccacgtgt

SEQ ID NO: 1605936 - DNA, 25 bp, Homo sapien
agttgcatgttgtgtgaggatcccg

SEQ ID NO: 1605937 - DNA, 25 bp, Homo sapien
ggcagatgactaaaaagcactttct

SEQ ID NO: 1605938 - DNA, 25 bp, Homo sapien
acttttcaaccatgaggcagatgac

SEQ ID NO: 1605939 - DNA, 25 bp, Homo sapien
tctaagacttagaacagacctcccc

SEQ ID NO: 1605940 - DNA, 25 bp, Homo sapien
cctccccgatctctgcaaggattag

SEQ ID NO: 1605941 - DNA, 25 bp, Homo sapien
actttgatgacgagtgatgccagga

SEQ ID NO: 1605942 - DNA, 25 bp, Homo sapien
gaactttgatgacgagtgatgccag

SEQ ID NO: 1605943 - DNA, 25 bp, Homo sapien
caccctacccttattccatgaaagt

SEQ ID NO: 1605944 - DNA, 25 bp, Homo sapien
tttgatgacgagtgatgccaggaag

SEQ ID NO: 1605945 - DNA, 25 bp, Homo sapien
gcagattgaggcttccggtgtctcc

SEQ ID NO: 1605946 - DNA, 25 bp, Homo sapien
taaaaactagccctatggtctgtgc

SEQ ID NO: 1605947 - DNA, 25 bp, Homo sapien
taacatcagctcattgtcaaggcca

SEQ ID NO: 1605948 - DNA, 25 bp, Homo sapien
ccagttagtcagcagggcctagagt

SEQ ID NO: 1605949 - DNA, 25 bp, Homo sapien
tactgccaggtagcaggctttattg

SEQ ID NO: 1605950 - DNA, 25 bp, Homo sapien
actgccaggtagcaggctttattgg

SEQ ID NO: 1605951 - DNA, 25 bp, Homo sapien
ccaggtagcaggctttattgggaag

SEQ ID NO: 1605952 - DNA, 25 bp, Homo sapien
ggtagcaggctttattgggaaggga

SEQ ID NO: 1605953 - DNA, 25 bp, Homo sapien
cagctcgcgcctccttcttccgttt

SEQ ID NO: 1605954 - DNA, 25 bp, Homo sapien
ttttcctccttgaggcgcttgcgct

SEQ ID NO: 1605955 - DNA, 25 bp, Homo sapien
catgcactctgcgatgtgctgctcc

SEQ ID NO: 1605956 - DNA, 25 bp, Homo sapien
ctggaagcgggcactccttgggtcc

SEQ ID NO: 1605957 - DNA, 25 bp, Homo sapien
gcttcacccgcagcgactcctgcat

SEQ ID NO: 1605958 - DNA, 25 bp, Homo sapien
ctgcttcacccgcagcgactcctgc

SEQ ID NO: 1605959 - DNA, 25 bp, Homo sapien
gacgcttctgctcttcggccagctg

SEQ ID NO: 1605960 - DNA, 25 bp, Homo sapien
ctctcccgacgcttctgctcttcgg

SEQ ID NO: 1605961 - DNA, 25 bp, Homo sapien
gcggcgccgtaacgcgcgaactgct

SEQ ID NO: 1605962 - DNA, 25 bp, Homo sapien
caggctcgggtaccattcgcgttct

SEQ ID NO: 1605963 - DNA, 25 bp, Homo sapien
ctgctccggcgacggccataacgaa

SEQ ID NO: 1605964 - DNA, 25 bp, Homo sapien
tgcttagccgcgtagcgcggtccca

SEQ ID NO: 1605965 - DNA, 25 bp, Homo sapien
tgccaccgcggggtcaggaggtcct

SEQ ID NO: 1605966 - DNA, 25 bp, Homo sapien
ccaccgcggggtcaggaggtcctcg

SEQ ID NO: 1605967 - DNA, 25 bp, Homo sapien
caccgcggggtcaggaggtcctcgg

SEQ ID NO: 1605968 - DNA, 25 bp, Homo sapien
ctgccaccgcggggtcaggaggtcc

SEQ ID NO: 1605969 - DNA, 25 bp, Homo sapien
tcccggcctgcggcgcgggggcggc

SEQ ID NO: 1605970 - DNA, 25 bp, Homo sapien
tgcggcgcgggggcggccgcgcccg

SEQ ID NO: 1605971 - DNA, 25 bp, Homo sapien
ctggccaccggggtcccggcctgcg

SEQ ID NO: 1605972 - DNA, 25 bp, Homo sapien
gcggccgcgcccggtagccacggga

SEQ ID NO: 1605973 - DNA, 25 bp, Homo sapien
taggctgcgtgcctgtcgcacggac

SEQ ID NO: 1605974 - DNA, 25 bp, Homo sapien
ctagtaggctgcgtgcctgtcgcac

SEQ ID NO: 1605975 - DNA, 25 bp, Homo sapien
ctgcgtgcctgtcgcacggacgccg

SEQ ID NO: 1605976 - DNA, 25 bp, Homo sapien
cgtgcctgtcgcacggacgccgcca

SEQ ID NO: 1605977 - DNA, 25 bp, Homo sapien
ctcccaggtgagagtacagtgatgc

SEQ ID NO: 1605978 - DNA, 25 bp, Homo sapien
ggagttattgcttataatgtataat

SEQ ID NO: 1605979 - DNA, 25 bp, Homo sapien
cagaaagtagattaggagttccagg

SEQ ID NO: 1605980 - DNA, 25 bp, Homo sapien
attctgtcacatgctgtgacatgga

SEQ ID NO: 1605981 - DNA, 25 bp, Homo sapien
taataggggcttctagaccaccctg

SEQ ID NO: 1605982 - DNA, 25 bp, Homo sapien
ctaagtacggggacatcaggccctc

SEQ ID NO: 1605983 - DNA, 25 bp, Homo sapien
caaattgagtccctaataggggctt

SEQ ID NO: 1605984 - DNA, 25 bp, Homo sapien
cacagatcatgcctaccacgctaag

SEQ ID NO: 1605985 - DNA, 25 bp, Homo sapien
tgtgctttgtgttcgaaggcggaac

SEQ ID NO: 1605986 - DNA, 25 bp, Homo sapien
gcactggtgtccgagtgtgctttgt

SEQ ID NO: 1605987 - DNA, 25 bp, Homo sapien
tcgtgggtgttttcccagactgctg

SEQ ID NO: 1605988 - DNA, 25 bp, Homo sapien
caggcgttctggacgtgacatgtgt

SEQ ID NO: 1605989 - DNA, 25 bp, Homo sapien
tgtttgcggggttgacagagtggca

SEQ ID NO: 1605990 - DNA, 25 bp, Homo sapien
cgtggtcgctggcagtgtttgcggg

SEQ ID NO: 1605991 - DNA, 25 bp, Homo sapien
gggacactgggtcccgcgacgcttc

SEQ ID NO: 1605992 - DNA, 25 bp, Homo sapien
agggtggtcccgagggcgcagaggg

SEQ ID NO: 1605993 - DNA, 25 bp, Homo sapien
gcagtggccggcgtgcgtggcggcg

SEQ ID NO: 1605994 - DNA, 25 bp, Homo sapien
gccggcgtgcgtggcggcggccctt

SEQ ID NO: 1605995 - DNA, 25 bp, Homo sapien
agggtggcagtggccggcgtgcgtg

SEQ ID NO: 1605996 - DNA, 25 bp, Homo sapien
gcgtggcggcggcccttgcgtgcgg

SEQ ID NO: 1605997 - DNA, 25 bp, Homo sapien
ctgcagcgaagttccctgcgcggcg

SEQ ID NO: 1605998 - DNA, 25 bp, Homo sapien
cggcgcacggctgcggcaaaagctt

SEQ ID NO: 1605999 - DNA, 25 bp, Homo sapien
ttggcgcgttgctagagcgcgtccc

SEQ ID NO: 1606000 - DNA, 25 bp, Homo sapien
tcgaggatgcctgtcgggccaccca

SEQ ID NO: 1606001 - DNA, 25 bp, Homo sapien
ctaagagggcacagaagctgcccag

SEQ ID NO: 1606002 - DNA, 25 bp, Homo sapien
cagagtcccacagtggccctgacag

SEQ ID NO: 1606003 - DNA, 25 bp, Homo sapien
ggcacagaagctgcccagagtccca

SEQ ID NO: 1606004 - DNA, 25 bp, Homo sapien
tcccacagtggccctgacagcgttg

SEQ ID NO: 1606005 - DNA, 25 bp, Homo sapien
gctgggcctctttggtgctacactt

SEQ ID NO: 1606006 - DNA, 25 bp, Homo sapien
tgagctgggcctctttggtgctaca

SEQ ID NO: 1606007 - DNA, 25 bp, Homo sapien
tctgagctgggcctctttggtgcta

SEQ ID NO: 1606008 - DNA, 25 bp, Homo sapien
gagctgggcctctttggtgctacac

SEQ ID NO: 1606009 - DNA, 25 bp, Homo sapien
aaagtcaataaatgattgagcagga

SEQ ID NO: 1606010 - DNA, 25 bp, Homo sapien
aataaatgattgagcaggaacgagc

SEQ ID NO: 1606011 - DNA, 25 bp, Homo sapien
tcaataaatgattgagcaggaacga

SEQ ID NO: 1606012 - DNA, 25 bp, Homo sapien
taaatgattgagcaggaacgagctt

SEQ ID NO: 1606013 - DNA, 25 bp, Homo sapien
cacgaccatcgacgagcctacagac

SEQ ID NO: 1606014 - DNA, 25 bp, Homo sapien
caagatggggatgtaagtgtcctgt

SEQ ID NO: 1606015 - DNA, 25 bp, Homo sapien
caccatcaccgccaagatggggatg

SEQ ID NO: 1606016 - DNA, 25 bp, Homo sapien
tgtcctgttcacaccgatgtccaga

SEQ ID NO: 1606017 - DNA, 25 bp, Homo sapien
gaaactgtggacttgtgttcacaac

SEQ ID NO: 1606018 - DNA, 25 bp, Homo sapien
tacagatagcgacgaaggcacatgg

SEQ ID NO: 1606019 - DNA, 25 bp, Homo sapien
aacccctcgagatgatacagatagc

SEQ ID NO: 1606020 - DNA, 25 bp, Homo sapien
tgacgcacgtatggacacaggaaac

SEQ ID NO: 1606021 - DNA, 25 bp, Homo sapien
tctgccaccgtcaaatgcagcccca

SEQ ID NO: 1606022 - DNA, 25 bp, Homo sapien
ggctctgccaccgtcaaatgcagcc

SEQ ID NO: 1606023 - DNA, 25 bp, Homo sapien
caggctctgccaccgtcaaatgcag

SEQ ID NO: 1606024 - DNA, 25 bp, Homo sapien
acaggctctgccaccgtcaaatgca

SEQ ID NO: 1606025 - DNA, 25 bp, Homo sapien
cataggcgccaacctcacttccaaa

SEQ ID NO: 1606026 - DNA, 25 bp, Homo sapien
ctcacttccaaacccgccgccatcg

SEQ ID NO: 1606027 - DNA, 25 bp, Homo sapien
gccgccatcgttggctctctggcct

SEQ ID NO: 1606028 - DNA, 25 bp, Homo sapien
cccataggcgccaacctcacttcca

SEQ ID NO: 1606029 - DNA, 25 bp, Homo sapien
gacgttactcgcttgctccaatctt

SEQ ID NO: 1606030 - DNA, 25 bp, Homo sapien
tgctccaatcttcccgtctctgtga

SEQ ID NO: 1606031 - DNA, 25 bp, Homo sapien
aggagcccatgctgacgttactcgc

SEQ ID NO: 1606032 - DNA, 25 bp, Homo sapien
catgctgacgttactcgcttgctcc

SEQ ID NO: 1606033 - DNA, 25 bp, Homo sapien
aaaccaacagggctccaacgacatc

SEQ ID NO: 1606034 - DNA, 25 bp, Homo sapien
ccccattggagttgcctcggccaaa

SEQ ID NO: 1606035 - DNA, 25 bp, Homo sapien
ccctccgaggtccagggcgcttcct

SEQ ID NO: 1606036 - DNA, 25 bp, Homo sapien
tgcaacccgcttttcccttgctttc

SEQ ID NO: 1606037 - DNA, 25 bp, Homo sapien
gccgctcagggcatctggcttcaaa

SEQ ID NO: 1606038 - DNA, 25 bp, Homo sapien
caaagcggcattcaggttgttgcgg

SEQ ID NO: 1606039 - DNA, 25 bp, Homo sapien
tctggcttcaaagcggcattcaggt

SEQ ID NO: 1606040 - DNA, 25 bp, Homo sapien
ggttgttgcgggagccggcagggaa

SEQ ID NO: 1606041 - DNA, 25 bp, Homo sapien
tttcgaccgtttgtgccgccagagt

SEQ ID NO: 1606042 - DNA, 25 bp, Homo sapien
tggaggttctcaaggcgcctggcat

SEQ ID NO: 1606043 - DNA, 25 bp, Homo sapien
tgtcacttgcatcgcacactgaggg

SEQ ID NO: 1606044 - DNA, 25 bp, Homo sapien
caaaatgggtgctgacggtcactgt

SEQ ID NO: 1606045 - DNA, 25 bp, Homo sapien
aaatacgtgccggtgacgcttcgtg

SEQ ID NO: 1606046 - DNA, 25 bp, Homo sapien
tgagatctccgccactgaaaaggcg

SEQ ID NO: 1606047 - DNA, 25 bp, Homo sapien
gctgaatggtagaaacaggctgtta

SEQ ID NO: 1606048 - DNA, 25 bp, Homo sapien
gattctctagtagaccctggcgtgg

SEQ ID NO: 1606049 - DNA, 25 bp, Homo sapien
gcgagcttctgcgctgcctctgtcg

SEQ ID NO: 1606050 - DNA, 25 bp, Homo sapien
tctgtcgtcggagcccgggtttgcc

SEQ ID NO: 1606051 - DNA, 25 bp, Homo sapien
tcggagcccgggtttgccacggcaa

SEQ ID NO: 1606052 - DNA, 25 bp, Homo sapien
ctgcctctgtcgtcggagcccgggt

SEQ ID NO: 1606053 - DNA, 25 bp, Homo sapien
tccgctccggtctgattcgcaaatc

SEQ ID NO: 1606054 - DNA, 25 bp, Homo sapien
tctggtaccccgatgccagccgagg

SEQ ID NO: 1606055 - DNA, 25 bp, Homo sapien
actgcctggtttgcgctagagccgt

SEQ ID NO: 1606056 - DNA, 25 bp, Homo sapien
ttctccccgagttggagacagccct

SEQ ID NO: 1606057 - DNA, 25 bp, Homo sapien
tggtaggcgaggtggctgcggtggc

SEQ ID NO: 1606058 - DNA, 25 bp, Homo sapien
tggtggtaggcgaggtggctgcggt

SEQ ID NO: 1606059 - DNA, 25 bp, Homo sapien
ccaggtgtggggtagaccgcttaga

SEQ ID NO: 1606060 - DNA, 25 bp, Homo sapien
gtggctgcggtggcccttccgccag

SEQ ID NO: 1606061 - DNA, 25 bp, Homo sapien
acagtgtatcccagtgggtgcccat

SEQ ID NO: 1606062 - DNA, 25 bp, Homo sapien
ggggacagtgtatcccagtgggtgc

SEQ ID NO: 1606063 - DNA, 25 bp, Homo sapien
ggacagtgtatcccagtgggtgccc

SEQ ID NO: 1606064 - DNA, 25 bp, Homo sapien
gacagtgtatcccagtgggtgccca

SEQ ID NO: 1606065 - DNA, 25 bp, Homo sapien
tgactacagagccccttctcgttgg

SEQ ID NO: 1606066 - DNA, 25 bp, Homo sapien
tgcattttccggtttccattcctgg

SEQ ID NO: 1606067 - DNA, 25 bp, Homo sapien
tatccgagctccctcgcaaagtgca

SEQ ID NO: 1606068 - DNA, 25 bp, Homo sapien
gtttccagacttttggatgattttg

SEQ ID NO: 1606069 - DNA, 25 bp, Homo sapien
catctctggccgctgtctggccact

SEQ ID NO: 1606070 - DNA, 25 bp, Homo sapien
tctctggccgctgtctggccactgt

SEQ ID NO: 1606071 - DNA, 25 bp, Homo sapien
ttcccatctctggccgctgtctggc

SEQ ID NO: 1606072 - DNA, 25 bp, Homo sapien
ctggccgctgtctggccactgtctt

SEQ ID NO: 1606073 - DNA, 25 bp, Homo sapien
tgtaaagcggtctgatctcctgcct

SEQ ID NO: 1606074 - DNA, 25 bp, Homo sapien
gccttgaatcgtatgagggattttt

SEQ ID NO: 1606075 - DNA, 25 bp, Homo sapien
tcttgattctggtctttggtgcagg

SEQ ID NO: 1606076 - DNA, 25 bp, Homo sapien
tggagaagccttgaatcgtatgagg

SEQ ID NO: 1606077 - DNA, 25 bp, Homo sapien
tgtgaagtggaacatgccaggattc

SEQ ID NO: 1606078 - DNA, 25 bp, Homo sapien
gattcaacccatgtcgagcatgtct

SEQ ID NO: 1606079 - DNA, 25 bp, Homo sapien
gtcgagcatgtctcttctactgtgg

SEQ ID NO: 1606080 - DNA, 25 bp, Homo sapien
gaagtggaacatgccaggattctcc

SEQ ID NO: 1606081 - DNA, 25 bp, Homo sapien
tctctgcttgctatccctgaccttt

SEQ ID NO: 1606082 - DNA, 25 bp, Homo sapien
ttggcttttgtttacctggcgtgtg

SEQ ID NO: 1606083 - DNA, 25 bp, Homo sapien
tctgcttgctatccctgacctttct

SEQ ID NO: 1606084 - DNA, 25 bp, Homo sapien
tgtttacctggcgtgtgtggcagcc

SEQ ID NO: 1606085 - DNA, 25 bp, Homo sapien
ccgagatcaagcagaagtgggcatc

SEQ ID NO: 1606086 - DNA, 25 bp, Homo sapien
gagttccgcgaggacttcgtgctga

SEQ ID NO: 1606087 - DNA, 25 bp, Homo sapien
catgaaaagcggatgtcgaaggacg

SEQ ID NO: 1606088 - DNA, 25 bp, Homo sapien
tgctgaccatcacgggcaagaagcc

SEQ ID NO: 1606089 - DNA, 25 bp, Homo sapien
cttggtttcggcactctagtttagg

SEQ ID NO: 1606090 - DNA, 25 bp, Homo sapien
ggagggcattgttcagctgtgtcca

SEQ ID NO: 1606091 - DNA, 25 bp, Homo sapien
tgtggggttgccttctcaggtatga

SEQ ID NO: 1606092 - DNA, 25 bp, Homo sapien
tcaggtatgagagcttcttggtttc

SEQ ID NO: 1606093 - DNA, 25 bp, Homo sapien
ggttccccaagcctttgctggatgc

SEQ ID NO: 1606094 - DNA, 25 bp, Homo sapien
agcgaggttccccaagcctttgctg

SEQ ID NO: 1606095 - DNA, 25 bp, Homo sapien
gctggatgcccaacccgactgttgg

SEQ ID NO: 1606096 - DNA, 25 bp, Homo sapien
tggtgccagcgaggttccccaagcc

SEQ ID NO: 1606097 - DNA, 25 bp, Homo sapien
gtgagtatgtgggagggtccacagg

SEQ ID NO: 1606098 - DNA, 25 bp, Homo sapien
gtccacaggagcacccgccgctttc

SEQ ID NO: 1606099 - DNA, 25 bp, Homo sapien
gagcacccgccgctttctccaggtc

SEQ ID NO: 1606100 - DNA, 25 bp, Homo sapien
gggtgagtatgtgggagggtccaca

SEQ ID NO: 1606101 - DNA, 25 bp, Homo sapien
taggcgtgaacctgcagtgacccat

SEQ ID NO: 1606102 - DNA, 25 bp, Homo sapien
gcttcctcccgtaggcgtaggcgtg

SEQ ID NO: 1606103 - DNA, 25 bp, Homo sapien
caggctttgggtaaaggcccgatga

SEQ ID NO: 1606104 - DNA, 25 bp, Homo sapien
tgatatcttctagaaggcttcctcc

SEQ ID NO: 1606105 - DNA, 25 bp, Homo sapien
tgtgcccattgggtgagggggggct

SEQ ID NO: 1606106 - DNA, 25 bp, Homo sapien
aggtggtcacgggcatcagcaacag

SEQ ID NO: 1606107 - DNA, 25 bp, Homo sapien
ggcaggtggtcacgggcatcagcaa

SEQ ID NO: 1606108 - DNA, 25 bp, Homo sapien
tcaggcaggtggtcacgggcatcag

SEQ ID NO: 1606109 - DNA, 25 bp, Homo sapien
cttgcccgcatcatcccaagtgcag

SEQ ID NO: 1606110 - DNA, 25 bp, Homo sapien
ccttgcccgcatcatcccaagtgca

SEQ ID NO: 1606111 - DNA, 25 bp, Homo sapien
ttgcccgcatcatcccaagtgcaga

SEQ ID NO: 1606112 - DNA, 25 bp, Homo sapien
tgcagttgacttggcgccctctggc

SEQ ID NO: 1606113 - DNA, 25 bp, Homo sapien
gctgcagttgacttggcgccctctg

SEQ ID NO: 1606114 - DNA, 25 bp, Homo sapien
ctggctgcagttgacttggcgccct

SEQ ID NO: 1606115 - DNA, 25 bp, Homo sapien
tggctgcagttgacttggcgccctc

SEQ ID NO: 1606116 - DNA, 25 bp, Homo sapien
cctcggacagggcccacagatgaag

SEQ ID NO: 1606117 - DNA, 25 bp, Homo sapien
atcgtttctgctggcctcggacagg

SEQ ID NO: 1606118 - DNA, 25 bp, Homo sapien
agcgtggccaactgggtcatcgttt

SEQ ID NO: 1606119 - DNA, 25 bp, Homo sapien
caactgggtcatcgtttctgctggc

SEQ ID NO: 1606120 - DNA, 25 bp, Homo sapien
ttggctgtccctgctaaatagtcat

SEQ ID NO: 1606121 - DNA, 25 bp, Homo sapien
ggctgtccctgctaaatagtcatct

SEQ ID NO: 1606122 - DNA, 25 bp, Homo sapien
gtccctgctaaatagtcatctttgg

SEQ ID NO: 1606123 - DNA, 25 bp, Homo sapien
tcatctttggggacatcctcccttt

SEQ ID NO: 1606124 - DNA, 25 bp, Homo sapien
cctgccacgctagcctggtggatgc

SEQ ID NO: 1606125 - DNA, 25 bp, Homo sapien
ttccctgccacgctagcctggtgga

SEQ ID NO: 1606126 - DNA, 25 bp, Homo sapien
gggtctcttcccgtgccagatcttc

SEQ ID NO: 1606127 - DNA, 25 bp, Homo sapien
ggagcagccaaactcactcgtgaca

SEQ ID NO: 1606128 - DNA, 25 bp, Homo sapien
gtgaacctgcctcgctattaatcta

SEQ ID NO: 1606129 - DNA, 25 bp, Homo sapien
tctttgtgaacctgcctcgctatta

SEQ ID NO: 1606130 - DNA, 25 bp, Homo sapien
ttctgagtcagagggcgtgcatgct

SEQ ID NO: 1606131 - DNA, 25 bp, Homo sapien
tgtgagaagtgtcaggcctttcccg

SEQ ID NO: 1606132 - DNA, 25 bp, Homo sapien
gcacactgggttgacaactgcactg

SEQ ID NO: 1606133 - DNA, 25 bp, Homo sapien
ctgtggttgcgcctgtccgttctcc

SEQ ID NO: 1606134 - DNA, 25 bp, Homo sapien
ggagaatttgctcttgcccacctct

SEQ ID NO: 1606135 - DNA, 25 bp, Homo sapien
tccatgtcctcgttgccgactgagg

SEQ ID NO: 1606136 - DNA, 25 bp, Homo sapien
ctttttccttgcatacactcttttt

SEQ ID NO: 1606137 - DNA, 25 bp, Homo sapien
cttctttttccttgcatacactctt

SEQ ID NO: 1606138 - DNA, 25 bp, Homo sapien
ttccttgcatacactctttttcttc

SEQ ID NO: 1606139 - DNA, 25 bp, Homo sapien
ccgttcctggggcttttgccattca

SEQ ID NO: 1606140 - DNA, 25 bp, Homo sapien
tagagttgttcatagcctggcctta

SEQ ID NO: 1606141 - DNA, 25 bp, Homo sapien
tcatctcgacccagttgaggctgtg

SEQ ID NO: 1606142 - DNA, 25 bp, Homo sapien
cagtgcacacatgtctggcaggaga

SEQ ID NO: 1606143 - DNA, 25 bp, Homo sapien
tgtgcttcttggaacggctcggctc

SEQ ID NO: 1606144 - DNA, 25 bp, Homo sapien
tcccttccgcctggaggcgaggata

SEQ ID NO: 1606145 - DNA, 25 bp, Homo sapien
gggagcaatagacaaactctccaaa

SEQ ID NO: 1606146 - DNA, 25 bp, Homo sapien
tttgactttactctctatcccctag

SEQ ID NO: 1606147 - DNA, 25 bp, Homo sapien
tcttggctgtagctccctcacaggg

SEQ ID NO: 1606148 - DNA, 25 bp, Homo sapien
aacctgggacggtggtctccctgct

SEQ ID NO: 1606149 - DNA, 25 bp, Homo sapien
gaaacaggaggttccacctgcttgt

SEQ ID NO: 1606150 - DNA, 25 bp, Homo sapien
gccctgatctgaaacaggaggttcc

SEQ ID NO: 1606151 - DNA, 25 bp, Homo sapien
tagagatgttgcttagggaggaggg

SEQ ID NO: 1606152 - DNA, 25 bp, Homo sapien
ggcccagccagtagcgggtcagtgg

SEQ ID NO: 1606153 - DNA, 25 bp, Homo sapien
ctgacagtggaaccatatccctggt

SEQ ID NO: 1606154 - DNA, 25 bp, Homo sapien
cagtagcgggtcagtgggaccttcc

SEQ ID NO: 1606155 - DNA, 25 bp, Homo sapien
gacagtggaaccatatccctggtga

SEQ ID NO: 1606156 - DNA, 25 bp, Homo sapien
caatgacaagttctgacggctgtgc

SEQ ID NO: 1606157 - DNA, 25 bp, Homo sapien
tgacaagttctgacggctgtgcctg

SEQ ID NO: 1606158 - DNA, 25 bp, Homo sapien
ggggagcgagcaggagtgcttggag

SEQ ID NO: 1606159 - DNA, 25 bp, Homo sapien
gacggctgtgcctgtgcagagcggg

SEQ ID NO: 1606160 - DNA, 25 bp, Homo sapien
ggctgttcagggatcctggagggct

SEQ ID NO: 1606161 - DNA, 25 bp, Homo sapien
gaaactcggccctcatatcacggga

SEQ ID NO: 1606162 - DNA, 25 bp, Homo sapien
tgggtatgcagagggaaccacatcc

SEQ ID NO: 1606163 - DNA, 25 bp, Homo sapien
cctagctatggcgtccaggagtgca

SEQ ID NO: 1606164 - DNA, 25 bp, Homo sapien
taatcaatgcgaacgggaaactcgg

SEQ ID NO: 1606165 - DNA, 25 bp, Homo sapien
ggggtattgagtgctctctcacagg

SEQ ID NO: 1606166 - DNA, 25 bp, Homo sapien
aggggtattgagtgctctctcacag

SEQ ID NO: 1606167 - DNA, 25 bp, Homo sapien
gggtattgagtgctctctcacaggg

SEQ ID NO: 1606168 - DNA, 25 bp, Homo sapien
tttcagcatgcccccttcggcccct

SEQ ID NO: 1606169 - DNA, 25 bp, Homo sapien
atttcagcatgcccccttcggcccc

SEQ ID NO: 1606170 - DNA, 25 bp, Homo sapien
gttgtaccccctcagtggacacagg

SEQ ID NO: 1606171 - DNA, 25 bp, Homo sapien
ccaggatagggtatccacagtggta

SEQ ID NO: 1606172 - DNA, 25 bp, Homo sapien
gggtatccacagtggtagagcactg

SEQ ID NO: 1606173 - DNA, 25 bp, Homo sapien
agcactgtgttgtaccccctcagtg

SEQ ID NO: 1606174 - DNA, 25 bp, Homo sapien
ccacttgttccctccatagtcaggt

SEQ ID NO: 1606175 - DNA, 25 bp, Homo sapien
ctccatagtcaggtatctgaggtgc

SEQ ID NO: 1606176 - DNA, 25 bp, Homo sapien
tatctgaggtgctaggtttggtgct

SEQ ID NO: 1606177 - DNA, 25 bp, Homo sapien
catgccctgggtccacttgttccct

SEQ ID NO: 1606178 - DNA, 25 bp, Homo sapien
ctgcaggcccactcgcatgtcccat

SEQ ID NO: 1606179 - DNA, 25 bp, Homo sapien
agcctgcaggcccactcgcatgtcc

SEQ ID NO: 1606180 - DNA, 25 bp, Homo sapien
cttgccatgggcagacacaggagga

SEQ ID NO: 1606181 - DNA, 25 bp, Homo sapien
gagcctgcaggcccactcgcatgtc

SEQ ID NO: 1606182 - DNA, 25 bp, Homo sapien
ctcatttattaactgttgggctgat

SEQ ID NO: 1606183 - DNA, 25 bp, Homo sapien
ttgggctgatcctggagtggccatt

SEQ ID NO: 1606184 - DNA, 25 bp, Homo sapien
ttattaactgttgggctgatcctgg

SEQ ID NO: 1606185 - DNA, 25 bp, Homo sapien
taactgttgggctgatcctggagtg

SEQ ID NO: 1606186 - DNA, 25 bp, Homo sapien
agtggtgtgcagatgaatacagagt

SEQ ID NO: 1606187 - DNA, 25 bp, Homo sapien
tggtgtgcagatgaatacagagtgg

SEQ ID NO: 1606188 - DNA, 25 bp, Homo sapien
cagtggtgtgcagatgaatacagag

SEQ ID NO: 1606189 - DNA, 25 bp, Homo sapien
gtggtgtgcagatgaatacagagtg

SEQ ID NO: 1606190 - DNA, 25 bp, Homo sapien
attgcctgctccttcgtagccctcc

SEQ ID NO: 1606191 - DNA, 25 bp, Homo sapien
ctggagccaaatcccgtttcaaagg

SEQ ID NO: 1606192 - DNA, 25 bp, Homo sapien
cccatgcggagggagtccagtctta

SEQ ID NO: 1606193 - DNA, 25 bp, Homo sapien
tcagcagagcccacttgggcccatg

SEQ ID NO: 1606194 - DNA, 25 bp, Homo sapien
cgcgttgtgccagccaacactgtcc

SEQ ID NO: 1606195 - DNA, 25 bp, Homo sapien
cctccactggcccataggccaccag

SEQ ID NO: 1606196 - DNA, 25 bp, Homo sapien
ctgcccgcgttgtgccagccaacac

SEQ ID NO: 1606197 - DNA, 25 bp, Homo sapien
gttgtgccagccaacactgtccctg

SEQ ID NO: 1606198 - DNA, 25 bp, Homo sapien
caaggtctaaaatggctgccagcag

SEQ ID NO: 1606199 - DNA, 25 bp, Homo sapien
ggagccctttcaccatggacctagt

SEQ ID NO: 1606200 - DNA, 25 bp, Homo sapien
tagccacctttgagtagagctgcgg

SEQ ID NO: 1606201 - DNA, 25 bp, Homo sapien
ggagaacaccacttgagcagatcag

SEQ ID NO: 1606202 - DNA, 25 bp, Homo sapien
ctgggctgggtacgcgcatgcgcat

SEQ ID NO: 1606203 - DNA, 25 bp, Homo sapien
gggtacgcgcatgcgcatccacacg

SEQ ID NO: 1606204 - DNA, 25 bp, Homo sapien
gcatgcgcatccacacgcgtgtgca

SEQ ID NO: 1606205 - DNA, 25 bp, Homo sapien
gcgcatgcgcatccacacgcgtgtg

SEQ ID NO: 1606206 - DNA, 25 bp, Homo sapien
cacttggtctttcgcagtgggtagg

SEQ ID NO: 1606207 - DNA, 25 bp, Homo sapien
cctgattccactgatccagctctgg

SEQ ID NO: 1606208 - DNA, 25 bp, Homo sapien
catggggtggactgtgaagcttcct

SEQ ID NO: 1606209 - DNA, 25 bp, Homo sapien
catctccacttggtctttcgcagtg

SEQ ID NO: 1606210 - DNA, 25 bp, Homo sapien
cacatgggtcctgaggttgtgccct

SEQ ID NO: 1606211 - DNA, 25 bp, Homo sapien
gggttcatagcagagagacccctgg

SEQ ID NO: 1606212 - DNA, 25 bp, Homo sapien
ttggctgtcactcccggactggctg

SEQ ID NO: 1606213 - DNA, 25 bp, Homo sapien
catgatttagagcaaccacaggact

SEQ ID NO: 1606214 - DNA, 25 bp, Homo sapien
agtgctttcagccccagacatggtg

SEQ ID NO: 1606215 - DNA, 25 bp, Homo sapien
gtgctttcagccccagacatggtgg

SEQ ID NO: 1606216 - DNA, 25 bp, Homo sapien
ccattacactaaggcaggcagcctg

SEQ ID NO: 1606217 - DNA, 25 bp, Homo sapien
catttggatgctatggccactgggc

SEQ ID NO: 1606218 - DNA, 25 bp, Homo sapien
tcaaacaaggtgttctctgtgccct

SEQ ID NO: 1606219 - DNA, 25 bp, Homo sapien
gagccctgaaattatccatcctatg

SEQ ID NO: 1606220 - DNA, 25 bp, Homo sapien
gcctgggcacaaccttaaagctcag

SEQ ID NO: 1606221 - DNA, 25 bp, Homo sapien
aggttccagtgagatcaagaatgtc

SEQ ID NO: 1606222 - DNA, 25 bp, Homo sapien
agtggcctgttttgaaggttccagt

SEQ ID NO: 1606223 - DNA, 25 bp, Homo sapien
gagtgctgcatgcttctgccgactt

SEQ ID NO: 1606224 - DNA, 25 bp, Homo sapien
ttagtggtacttgagtgctgcatgc

SEQ ID NO: 1606225 - DNA, 25 bp, Homo sapien
aagcaaccagcacaattctgaaggg

SEQ ID NO: 1606226 - DNA, 25 bp, Homo sapien
catggactctgtcaagtagaggaca

SEQ ID NO: 1606227 - DNA, 25 bp, Homo sapien
aaattacacgtcgtcagccactcag

SEQ ID NO: 1606228 - DNA, 25 bp, Homo sapien
gcagccaagcagaaagaaacacgcg

SEQ ID NO: 1606229 - DNA, 25 bp, Homo sapien
tctttgagccagacgccaacttgac

SEQ ID NO: 1606230 - DNA, 25 bp, Homo sapien
tgttgtaatgtcctcgcggctctgg

SEQ ID NO: 1606231 - DNA, 25 bp, Homo sapien
taagtcgttttcctgcgttgacgag

SEQ ID NO: 1606232 - DNA, 25 bp, Homo sapien
gcgtgacgcgcggtcaaagtgcaat

SEQ ID NO: 1606233 - DNA, 25 bp, Homo sapien
gttttcagtgtcctagcggaatgca

SEQ ID NO: 1606234 - DNA, 25 bp, Homo sapien
gcttctgttataccatctttgcctg

SEQ ID NO: 1606235 - DNA, 25 bp, Homo sapien
aagtaggcagccagcccgtctgttc

SEQ ID NO: 1606236 - DNA, 25 bp, Homo sapien
tctccggcttctccattgaatggct

SEQ ID NO: 1606237 - DNA, 25 bp, Homo sapien
tgcgcctctgtccaagcgccgggag

SEQ ID NO: 1606238 - DNA, 25 bp, Homo sapien
ggtgagaaaagcgaagcctccccag

SEQ ID NO: 1606239 - DNA, 25 bp, Homo sapien
gggtgcgtccccgacttggattctg

SEQ ID NO: 1606240 - DNA, 25 bp, Homo sapien
tcgacgagcgtctgcccctgggtct

SEQ ID NO: 1606241 - DNA, 25 bp, Homo sapien
gcaccacttgggtcctatgactgct

SEQ ID NO: 1606242 - DNA, 25 bp, Homo sapien
gggtcgatgatcacccttccggacc

SEQ ID NO: 1606243 - DNA, 25 bp, Homo sapien
gcaaggccacttccagagggttgtg

SEQ ID NO: 1606244 - DNA, 25 bp, Homo sapien
gagttcgctcccgaacatgcgcagc

SEQ ID NO: 1606245 - DNA, 25 bp, Homo sapien
gaaggcgccgttaacgttctgctgc

SEQ ID NO: 1606246 - DNA, 25 bp, Homo sapien
tacttcatggctaggcggagcacct

SEQ ID NO: 1606247 - DNA, 25 bp, Homo sapien
ctgttggtgaacacgcgccgggcca

SEQ ID NO: 1606248 - DNA, 25 bp, Homo sapien
aagcggtttgctccatcttgatggg

SEQ ID NO: 1606249 - DNA, 25 bp, Homo sapien
agtggcttggtctccgcttcaaccg

SEQ ID NO: 1606250 - DNA, 25 bp, Homo sapien
ggaagatgctaaaaggtcctgctgg

SEQ ID NO: 1606251 - DNA, 25 bp, Homo sapien
cgcttcaaccggctgctagggaaga

SEQ ID NO: 1606252 - DNA, 25 bp, Homo sapien
ccagctcacagtggcttggtctccg

SEQ ID NO: 1606253 - DNA, 25 bp, Homo sapien
gggcgaggagcctcctcggtggccc

SEQ ID NO: 1606254 - DNA, 25 bp, Homo sapien
cactggtacaccaggtggcagcctg

SEQ ID NO: 1606255 - DNA, 25 bp, Homo sapien
agggtggtagtgcagggccaaagtg

SEQ ID NO: 1606256 - DNA, 25 bp, Homo sapien
ccagctctgtggtgggcatggctac

SEQ ID NO: 1606257 - DNA, 25 bp, Homo sapien
gggcccaggcgaggcaggcttaggg

SEQ ID NO: 1606258 - DNA, 25 bp, Homo sapien
ctgcgggggcccaggcgaggcaggc

SEQ ID NO: 1606259 - DNA, 25 bp, Homo sapien
cgaggcaggcttagggggtggggca

SEQ ID NO: 1606260 - DNA, 25 bp, Homo sapien
caggcgaggcaggcttagggggtgg

SEQ ID NO: 1606261 - DNA, 25 bp, Homo sapien
ggtggggcccacctctgcctgtgcc

SEQ ID NO: 1606262 - DNA, 25 bp, Homo sapien
gggcccacctctgcctgtgcctgag

SEQ ID NO: 1606263 - DNA, 25 bp, Homo sapien
cctctgcctgtgcctgaggcgggca

SEQ ID NO: 1606264 - DNA, 25 bp, Homo sapien
ctgcctgtgcctgaggcgggcacat

SEQ ID NO: 1606265 - DNA, 25 bp, Homo sapien
ggtttccagcgtcaggccaggctct

SEQ ID NO: 1606266 - DNA, 25 bp, Homo sapien
caggctctgctgtctcgcgagggtc

SEQ ID NO: 1606267 - DNA, 25 bp, Homo sapien
tttccagcgtcaggccaggctctgc

SEQ ID NO: 1606268 - DNA, 25 bp, Homo sapien
ctccaggccccggcgttgggccgcg

SEQ ID NO: 1606269 - DNA, 25 bp, Homo sapien
cgcgcctgataaggagcctggctga

SEQ ID NO: 1606270 - DNA, 25 bp, Homo sapien
tcttatgtccgagtctgccctttgg

SEQ ID NO: 1606271 - DNA, 25 bp, Homo sapien
atagccgaggtctccgcgtaggtcc

SEQ ID NO: 1606272 - DNA, 25 bp, Homo sapien
aggatgctggcccagtgcagataag

SEQ ID NO: 1606273 - DNA, 25 bp, Homo sapien
tggagagctgggccaaagaaaccag

SEQ ID NO: 1606274 - DNA, 25 bp, Homo sapien
tgcacagggcgcctggttccggtcc

SEQ ID NO: 1606275 - DNA, 25 bp, Homo sapien
gttccggtccagcttccgccactgt

SEQ ID NO: 1606276 - DNA, 25 bp, Homo sapien
aggagcgccccactatgcgcaagcc

SEQ ID NO: 1606277 - DNA, 25 bp, Homo sapien
tgtgggagtagcagcactggtcccc

SEQ ID NO: 1606278 - DNA, 25 bp, Homo sapien
tgggagtagcagcactggtccccgc

SEQ ID NO: 1606279 - DNA, 25 bp, Homo sapien
ggctgtgggagtagcagcactggtc

SEQ ID NO: 1606280 - DNA, 25 bp, Homo sapien
ctgtgggagtagcagcactggtccc

SEQ ID NO: 1606281 - DNA, 25 bp, Homo sapien
cgcttgttctgaagcagcctgcgtc

SEQ ID NO: 1606282 - DNA, 25 bp, Homo sapien
tgggccacatcttccggcggctcct

SEQ ID NO: 1606283 - DNA, 25 bp, Homo sapien
cttaaacctcttgcaaggaaatgtc

SEQ ID NO: 1606284 - DNA, 25 bp, Homo sapien
ctccatagcttcgtcggccgccttg

SEQ ID NO: 1606285 - DNA, 25 bp, Homo sapien
ggagtaggtgggaccccatctgccc

SEQ ID NO: 1606286 - DNA, 25 bp, Homo sapien
taggtgggaccccatctgcccttta

SEQ ID NO: 1606287 - DNA, 25 bp, Homo sapien
ggaggagtaggtgggaccccatctg

SEQ ID NO: 1606288 - DNA, 25 bp, Homo sapien
tgtgcgaggggaggagtaggtggga

SEQ ID NO: 1606289 - DNA, 25 bp, Homo sapien
ttggcctccgggttagcctggaagc

SEQ ID NO: 1606290 - DNA, 25 bp, Homo sapien
tggaagcgcttgagtcctcgctgtc

SEQ ID NO: 1606291 - DNA, 25 bp, Homo sapien
ctggaagcgcttgagtcctcgctgt

SEQ ID NO: 1606292 - DNA, 25 bp, Homo sapien
ctccgggttagcctggaagcgcttg

SEQ ID NO: 1606293 - DNA, 25 bp, Homo sapien
tagtctctgatagtcgctcccgttt

SEQ ID NO: 1606294 - DNA, 25 bp, Homo sapien
aacgctgggctagtctctgatagtc

SEQ ID NO: 1606295 - DNA, 25 bp, Homo sapien
gggctagtctctgatagtcgctccc

SEQ ID NO: 1606296 - DNA, 25 bp, Homo sapien
cggaacgctgggctagtctctgata

SEQ ID NO: 1606297 - DNA, 25 bp, Homo sapien
agaggtcagaggttagggaatacta

SEQ ID NO: 1606298 - DNA, 25 bp, Homo sapien
gaatactaggcccaagggacctcca

SEQ ID NO: 1606299 - DNA, 25 bp, Homo sapien
tcccacctgcatgaggtcagccctg

SEQ ID NO: 1606300 - DNA, 25 bp, Homo sapien
ggacctccaggtgaccaccacctgc

SEQ ID NO: 1606301 - DNA, 25 bp, Homo sapien
acagcgttcttacaggcgtgggaga

SEQ ID NO: 1606302 - DNA, 25 bp, Homo sapien
tcttcacagcgttcttacaggcgtg

SEQ ID NO: 1606303 - DNA, 25 bp, Homo sapien
cgtcttcacagcgttcttacaggcg

SEQ ID NO: 1606304 - DNA, 25 bp, Homo sapien
ttcacagcgttcttacaggcgtggg

SEQ ID NO: 1606305 - DNA, 25 bp, Homo sapien
ggaatgagacagtgcaccgggttct

SEQ ID NO: 1606306 - DNA, 25 bp, Homo sapien
cccctcgcaagttctatgcatgaga

SEQ ID NO: 1606307 - DNA, 25 bp, Homo sapien
aatgagacagtgcaccgggttctcc

SEQ ID NO: 1606308 - DNA, 25 bp, Homo sapien
tatgcatgagaatccctggacttgc

SEQ ID NO: 1606309 - DNA, 25 bp, Homo sapien
tagtacagaggcacgtccgggagct

SEQ ID NO: 1606310 - DNA, 25 bp, Homo sapien
gtagtacagaggcacgtccgggagc

SEQ ID NO: 1606311 - DNA, 25 bp, Homo sapien
cttccccgtcacagcccggctctca

SEQ ID NO: 1606312 - DNA, 25 bp, Homo sapien
cccttccccgtcacagcccggctct

SEQ ID NO: 1606313 - DNA, 25 bp, Homo sapien
ctgcgatgggggacaggatgggcat

SEQ ID NO: 1606314 - DNA, 25 bp, Homo sapien
ttccccgtcacagcccggctctcac

SEQ ID NO: 1606315 - DNA, 25 bp, Homo sapien
cggccggggttagcgctcacagcct

SEQ ID NO: 1606316 - DNA, 25 bp, Homo sapien
gctccgaggtgtggaagcggccggg

SEQ ID NO: 1606317 - DNA, 25 bp, Homo sapien
atccgctccgaggtgtggaagcggc

SEQ ID NO: 1606318 - DNA, 25 bp, Homo sapien
aagcggccggggttagcgctcacag

SEQ ID NO: 1606319 - DNA, 25 bp, Homo sapien
gggactatgaccttcaagaccctct

SEQ ID NO: 1606320 - DNA, 25 bp, Homo sapien
caggtgagcagggactatgaccttc

SEQ ID NO: 1606321 - DNA, 25 bp, Homo sapien
tatgaccttcaagaccctcttgctc

SEQ ID NO: 1606322 - DNA, 25 bp, Homo sapien
agcagggactatgaccttcaagacc

SEQ ID NO: 1606323 - DNA, 25 bp, Homo sapien
cgttgcccacagtgttcacactcgg

SEQ ID NO: 1606324 - DNA, 25 bp, Homo sapien
tcacactcgggggtcacagggggac

SEQ ID NO: 1606325 - DNA, 25 bp, Homo sapien
agtgttcacactcgggggtcacagg

SEQ ID NO: 1606326 - DNA, 25 bp, Homo sapien
ccacagtgttcacactcgggggtca

SEQ ID NO: 1606327 - DNA, 25 bp, Homo sapien
ccccttcttctccttcctccctgct

SEQ ID NO: 1606328 - DNA, 25 bp, Homo sapien
ctccccttcttctccttcctccctg

SEQ ID NO: 1606329 - DNA, 25 bp, Homo sapien
ccttcttctccttcctccctgctca

SEQ ID NO: 1606330 - DNA, 25 bp, Homo sapien
cttcttctccttcctccctgctcac

SEQ ID NO: 1606331 - DNA, 25 bp, Homo sapien
ctcctgacgctttgccgagacgctg

SEQ ID NO: 1606332 - DNA, 25 bp, Homo sapien
tgacgctttgccgagacgctgaagg

SEQ ID NO: 1606333 - DNA, 25 bp, Homo sapien
ggactcctgacgctttgccgagacg

SEQ ID NO: 1606334 - DNA, 25 bp, Homo sapien
acgctttgccgagacgctgaaggtg

SEQ ID NO: 1606335 - DNA, 25 bp, Homo sapien
aactcctcccttagactggctctgt

SEQ ID NO: 1606336 - DNA, 25 bp, Homo sapien
tctctcaatccaccaccgctctctg

SEQ ID NO: 1606337 - DNA, 25 bp, Homo sapien
gcgtgaccacgacaccccaactcct

SEQ ID NO: 1606338 - DNA, 25 bp, Homo sapien
ggtaccagtggccacgagttcccag

SEQ ID NO: 1606339 - DNA, 25 bp, Homo sapien
ctggccggtgaagacacggacaaaa

SEQ ID NO: 1606340 - DNA, 25 bp, Homo sapien
gtgaagacacggacaaaaacacgca

SEQ ID NO: 1606341 - DNA, 25 bp, Homo sapien
cggtgaagacacggacaaaaacacg

SEQ ID NO: 1606342 - DNA, 25 bp, Homo sapien
gccggtgaagacacggacaaaaaca

SEQ ID NO: 1606343 - DNA, 25 bp, Homo sapien
aacaagtgagtatcccctctctgtg

SEQ ID NO: 1606344 - DNA, 25 bp, Homo sapien
tactcacaagtacaggctcagggcc

SEQ ID NO: 1606345 - DNA, 25 bp, Homo sapien
cactaaacgagtgaggaaagcatag

SEQ ID NO: 1606346 - DNA, 25 bp, Homo sapien
gcatgtactgaggacccacgttcca

SEQ ID NO: 1606347 - DNA, 25 bp, Homo sapien
tgcccagagctaccagcaaagctag

SEQ ID NO: 1606348 - DNA, 25 bp, Homo sapien
gatgcaaaaaaacccgaggaccaga

SEQ ID NO: 1606349 - DNA, 25 bp, Homo sapien
cttgcccagagctaccagcaaagct

SEQ ID NO: 1606350 - DNA, 25 bp, Homo sapien
cttcagaccatcattgtgcccattt

SEQ ID NO: 1606351 - DNA, 25 bp, Homo sapien
tgctgtagcacgtctccccgctgtt

SEQ ID NO: 1606352 - DNA, 25 bp, Homo sapien
aacaccgccatgtctgtgcaggtca

SEQ ID NO: 1606353 - DNA, 25 bp, Homo sapien
ggccatggccccgtacttgctgtag

SEQ ID NO: 1606354 - DNA, 25 bp, Homo sapien
gccaacaccgccatgtctgtgcagg

SEQ ID NO: 1606355 - DNA, 25 bp, Homo sapien
gatcgatgacgtcaaacctctccga

SEQ ID NO: 1606356 - DNA, 25 bp, Homo sapien
agatcgatgacgtcaaacctctccg

SEQ ID NO: 1606357 - DNA, 25 bp, Homo sapien
cagatcgatgacgtcaaacctctcc

SEQ ID NO: 1606358 - DNA, 25 bp, Homo sapien
atcgatgacgtcaaacctctccgac

SEQ ID NO: 1606359 - DNA, 25 bp, Homo sapien
gtgggccacgtcattgagctggaca

SEQ ID NO: 1606360 - DNA, 25 bp, Homo sapien
gggtggaggcatcgtttgcaaccac

SEQ ID NO: 1606361 - DNA, 25 bp, Homo sapien
acgtcattgagctggacattccggc

SEQ ID NO: 1606362 - DNA, 25 bp, Homo sapien
cacagcccgggtggaggcatcgttt

SEQ ID NO: 1606363 - DNA, 25 bp, Homo sapien
ctagggcaaatcgaatggaacgtag

SEQ ID NO: 1606364 - DNA, 25 bp, Homo sapien
atcgaatggaacgtaggcctgaagc

SEQ ID NO: 1606365 - DNA, 25 bp, Homo sapien
caaatcgaatggaacgtaggcctga

SEQ ID NO: 1606366 - DNA, 25 bp, Homo sapien
aagctgccaggccttccagcacatg

SEQ ID NO: 1606367 - DNA, 25 bp, Homo sapien
tcccgctaaattccagggctgccag

SEQ ID NO: 1606368 - DNA, 25 bp, Homo sapien
ggagccctctgtctcccgctaaatt

SEQ ID NO: 1606369 - DNA, 25 bp, Homo sapien
ctctgtctcccgctaaattccaggg

SEQ ID NO: 1606370 - DNA, 25 bp, Homo sapien
taagcagaaaacctccctcacatct

SEQ ID NO: 1606371 - DNA, 25 bp, Homo sapien
caagtccacgaccactttttgcgtg

SEQ ID NO: 1606372 - DNA, 25 bp, Homo sapien
cgaccactttttgcgtgtccttctc

SEQ ID NO: 1606373 - DNA, 25 bp, Homo sapien
tccacgaccactttttgcgtgtcct

SEQ ID NO: 1606374 - DNA, 25 bp, Homo sapien
ccacggccgctgtgcgaggttggtc

SEQ ID NO: 1606375 - DNA, 25 bp, Homo sapien
ggcagggagataaacttgtgtgacc

SEQ ID NO: 1606376 - DNA, 25 bp, Homo sapien
gaataacaaggtcccctctgagaaa

SEQ ID NO: 1606377 - DNA, 25 bp, Homo sapien
gaaatccctgcggaaaggctgaagg

SEQ ID NO: 1606378 - DNA, 25 bp, Homo sapien
ccctctggatttgggcggcagaaga

SEQ ID NO: 1606379 - DNA, 25 bp, Homo sapien
ggccccaagctgaatgcgagcaaac

SEQ ID NO: 1606380 - DNA, 25 bp, Homo sapien
gagcaaactcggtgatcacagcaca

SEQ ID NO: 1606381 - DNA, 25 bp, Homo sapien
gaatgcgagcaaactcggtgatcac

SEQ ID NO: 1606382 - DNA, 25 bp, Homo sapien
gctgaatgcgagcaaactcggtgat

SEQ ID NO: 1606383 - DNA, 25 bp, Homo sapien
gacccactagccgatgccaggctaa

SEQ ID NO: 1606384 - DNA, 25 bp, Homo sapien
agacagaggactagctcataccccg

SEQ ID NO: 1606385 - DNA, 25 bp, Homo sapien
gatgccaggctaacgtctgacccct

SEQ ID NO: 1606386 - DNA, 25 bp, Homo sapien
gtgggagacagaggactagctcata

SEQ ID NO: 1606387 - DNA, 25 bp, Homo sapien
aggtcccgattgaattcctgcaccg

SEQ ID NO: 1606388 - DNA, 25 bp, Homo sapien
tgggaaaggcgattttggcagcccc

SEQ ID NO: 1606389 - DNA, 25 bp, Homo sapien
cacgtggacgttcttctccgtaggg

SEQ ID NO: 1606390 - DNA, 25 bp, Homo sapien
cgtctcctggacttcacgtggacgt

SEQ ID NO: 1606391 - DNA, 25 bp, Homo sapien
ctcgttggcactgggaaaggcgatt

SEQ ID NO: 1606392 - DNA, 25 bp, Homo sapien
tggagactgccactcgaaaaaccgg

SEQ ID NO: 1606393 - DNA, 25 bp, Homo sapien
agactgccactcgaaaaaccgggct

SEQ ID NO: 1606394 - DNA, 25 bp, Homo sapien
ccctggagactgccactcgaaaaac

SEQ ID NO: 1606395 - DNA, 25 bp, Homo sapien
gagactgccactcgaaaaaccgggc

SEQ ID NO: 1606396 - DNA, 25 bp, Homo sapien
ttagccacagagacgatccttgcat

SEQ ID NO: 1606397 - DNA, 25 bp, Homo sapien
gcttagccacagagacgatccttgc

SEQ ID NO: 1606398 - DNA, 25 bp, Homo sapien
gagcggaaagtgaggcttagccaca

SEQ ID NO: 1606399 - DNA, 25 bp, Homo sapien
agcacccgggcggagcggaaagtga

SEQ ID NO: 1606400 - DNA, 25 bp, Homo sapien
gacatccgctggcgcctccgcccgc

SEQ ID NO: 1606401 - DNA, 25 bp, Homo sapien
ccgctggcgcctccgcccgccaagc

SEQ ID NO: 1606402 - DNA, 25 bp, Homo sapien
gagacatccgctggcgcctccgccc

SEQ ID NO: 1606403 - DNA, 25 bp, Homo sapien
atccgctggcgcctccgcccgccaa

SEQ ID NO: 1606404 - DNA, 25 bp, Homo sapien
ctgtggagccgatgccctcgtgcag

SEQ ID NO: 1606405 - DNA, 25 bp, Homo sapien
aaaacctgcggcctcggtaagctga

SEQ ID NO: 1606406 - DNA, 25 bp, Homo sapien
gtaagctgatatcccctcgttttgg

SEQ ID NO: 1606407 - DNA, 25 bp, Homo sapien
tgaggtagggactaggaaaacctgc

SEQ ID NO: 1606408 - DNA, 25 bp, Homo sapien
caaggtgcacgtttcccgaattagg

SEQ ID NO: 1606409 - DNA, 25 bp, Homo sapien
tcgtagccacagaaaaccgaattag

SEQ ID NO: 1606410 - DNA, 25 bp, Homo sapien
gtcaaggtgcacgtttcccgaatta

SEQ ID NO: 1606411 - DNA, 25 bp, Homo sapien
aaaaccgaattagtcaaggtgcacg

SEQ ID NO: 1606412 - DNA, 25 bp, Homo sapien
gcttgcctagactgtttttgcccca

SEQ ID NO: 1606413 - DNA, 25 bp, Homo sapien
ctaattgcaaggctgttaccagggt

SEQ ID NO: 1606414 - DNA, 25 bp, Homo sapien
ttctgggctaattgcaaggctgtta

SEQ ID NO: 1606415 - DNA, 25 bp, Homo sapien
actttggcccccagtcggatggcag

SEQ ID NO: 1606416 - DNA, 25 bp, Homo sapien
cgagctccatgaggacggaggcaga

SEQ ID NO: 1606417 - DNA, 25 bp, Homo sapien
cacgcagggagtgggatgtaactcc

SEQ ID NO: 1606418 - DNA, 25 bp, Homo sapien
agcgggcaggctgcgagctccatga

SEQ ID NO: 1606419 - DNA, 25 bp, Homo sapien
ggtatgatctgattacacgcaggga

SEQ ID NO: 1606420 - DNA, 25 bp, Homo sapien
agggaggccagattgccgagggctg

SEQ ID NO: 1606421 - DNA, 25 bp, Homo sapien
ggccagattgccgagggctgcgagg

SEQ ID NO: 1606422 - DNA, 25 bp, Homo sapien
ggaggccagattgccgagggctgcg

SEQ ID NO: 1606423 - DNA, 25 bp, Homo sapien
ccagattgccgagggctgcgaggag

SEQ ID NO: 1606424 - DNA, 25 bp, Homo sapien
gccccactccgctcgtccccagcag

SEQ ID NO: 1606425 - DNA, 25 bp, Homo sapien
ccactccgctcgtccccagcagcat

SEQ ID NO: 1606426 - DNA, 25 bp, Homo sapien
ccccactccgctcgtccccagcagc

SEQ ID NO: 1606427 - DNA, 25 bp, Homo sapien
agccggacatgatgggtgtggagca

SEQ ID NO: 1606428 - DNA, 25 bp, Homo sapien
cgggcaagatcgagccggacatgat

SEQ ID NO: 1606429 - DNA, 25 bp, Homo sapien
tgaaacgggcaagatcgagccggac

SEQ ID NO: 1606430 - DNA, 25 bp, Homo sapien
caccttcatcagtgaaacgggcaag

SEQ ID NO: 1606431 - DNA, 25 bp, Homo sapien
tttccaggttggcacgtgtataagg

SEQ ID NO: 1606432 - DNA, 25 bp, Homo sapien
ttttatttccaggttggcacgtgta

SEQ ID NO: 1606433 - DNA, 25 bp, Homo sapien
attttatttccaggttggcacgtgt

SEQ ID NO: 1606434 - DNA, 25 bp, Homo sapien
caggttggcacgtgtataaggcaca

SEQ ID NO: 1606435 - DNA, 25 bp, Homo sapien
cccctaagtgcacttgagacaggac

SEQ ID NO: 1606436 - DNA, 25 bp, Homo sapien
taagtgcacttgagacaggaccagt

SEQ ID NO: 1606437 - DNA, 25 bp, Homo sapien
aagtgcacttgagacaggaccagtg

SEQ ID NO: 1606438 - DNA, 25 bp, Homo sapien
cctaagtgcacttgagacaggacca

SEQ ID NO: 1606439 - DNA, 25 bp, Homo sapien
tggtggctccccaggcttaagggac

SEQ ID NO: 1606440 - DNA, 25 bp, Homo sapien
tccaaagtgcttggtggctccccag

SEQ ID NO: 1606441 - DNA, 25 bp, Homo sapien
cttaagggaccagcctgccagggag

SEQ ID NO: 1606442 - DNA, 25 bp, Homo sapien
ggcgggaccctctactctccagcta

SEQ ID NO: 1606443 - DNA, 25 bp, Homo sapien
gcgatggcacaccactgtcggcggt

SEQ ID NO: 1606444 - DNA, 25 bp, Homo sapien
actagcacggcgatggcacaccact

SEQ ID NO: 1606445 - DNA, 25 bp, Homo sapien
agatgagaacgaggagaagcacccc

SEQ ID NO: 1606446 - DNA, 25 bp, Homo sapien
tcagagagagaatagtaagatgaga

SEQ ID NO: 1606447 - DNA, 25 bp, Homo sapien
gagagggtaccacctacaacctgcc

SEQ ID NO: 1606448 - DNA, 25 bp, Homo sapien
ctgggaacgagaaggtcaggggtca

SEQ ID NO: 1606449 - DNA, 25 bp, Homo sapien
tgggaacgagaaggtcaggggtcac

SEQ ID NO: 1606450 - DNA, 25 bp, Homo sapien
tcacggggagagggtaccacctaca

SEQ ID NO: 1606451 - DNA, 25 bp, Homo sapien
catctcttgggcgaaggcatccagc

SEQ ID NO: 1606452 - DNA, 25 bp, Homo sapien
actgggtgtggtccatctcttgggc

SEQ ID NO: 1606453 - DNA, 25 bp, Homo sapien
cactcgtcatgtgggatactttggc

SEQ ID NO: 1606454 - DNA, 25 bp, Homo sapien
tgaggaccccgtccatgcgggactg

SEQ ID NO: 1606455 - DNA, 25 bp, Homo sapien
gaacctggatgctcccagacaccat

SEQ ID NO: 1606456 - DNA, 25 bp, Homo sapien
gccggacatgtgcttcagaacctgg

SEQ ID NO: 1606457 - DNA, 25 bp, Homo sapien
tctccagctgttgatcctgttcatc

SEQ ID NO: 1606458 - DNA, 25 bp, Homo sapien
ccagctcttctccaacgcggccgga

SEQ ID NO: 1606459 - DNA, 25 bp, Homo sapien
caggtcgctgggtgacttctgggca

SEQ ID NO: 1606460 - DNA, 25 bp, Homo sapien
cctcgatgtagcgagatgtggccga

SEQ ID NO: 1606461 - DNA, 25 bp, Homo sapien
ggcctgctgctcctcgatgtagcga

SEQ ID NO: 1606462 - DNA, 25 bp, Homo sapien
cgagatgtggccgagactgcgctgg

SEQ ID NO: 1606463 - DNA, 25 bp, Homo sapien
tgctacggctgttgggctgaccata

SEQ ID NO: 1606464 - DNA, 25 bp, Homo sapien
ggctgttgggctgaccatatggtcc

SEQ ID NO: 1606465 - DNA, 25 bp, Homo sapien
tcctctccaaaaatgctacggctgt

SEQ ID NO: 1606466 - DNA, 25 bp, Homo sapien
ggctgaccatatggtccttcatttc

SEQ ID NO: 1606467 - DNA, 25 bp, Homo sapien
tgcctctcgcatccgctccacgaac

SEQ ID NO: 1606468 - DNA, 25 bp, Homo sapien
ctggactgcctctcgcatccgctcc

SEQ ID NO: 1606469 - DNA, 25 bp, Homo sapien
tcgcatccgctccacgaacaccttt

SEQ ID NO: 1606470 - DNA, 25 bp, Homo sapien
tccgctccacgaacacctttctctc

SEQ ID NO: 1606471 - DNA, 25 bp, Homo sapien
gatatcatccccgtccctaggggtc

SEQ ID NO: 1606472 - DNA, 25 bp, Homo sapien
caaggccggagccagatatcatccc

SEQ ID NO: 1606473 - DNA, 25 bp, Homo sapien
ggccggagccagatatcatccccgt

SEQ ID NO: 1606474 - DNA, 25 bp, Homo sapien
gtcaaggccggagccagatatcatc

SEQ ID NO: 1606475 - DNA, 25 bp, Homo sapien
aaggtgggctgccaccgcaatgggc

SEQ ID NO: 1606476 - DNA, 25 bp, Homo sapien
gggctgccaccgcaatgggctctcc

SEQ ID NO: 1606477 - DNA, 25 bp, Homo sapien
tgccaccgcaatgggctctcccatg

SEQ ID NO: 1606478 - DNA, 25 bp, Homo sapien
ccgaaggtgggctgccaccgcaatg

SEQ ID NO: 1606479 - DNA, 25 bp, Homo sapien
gcgcaggccattccgcagctcattg

SEQ ID NO: 1606480 - DNA, 25 bp, Homo sapien
gctcattggtcgtccagtccagctc

SEQ ID NO: 1606481 - DNA, 25 bp, Homo sapien
tcgaggtcccactcgatgctgcgca

SEQ ID NO: 1606482 - DNA, 25 bp, Homo sapien
cgatgctgcgcaggccattccgcag

SEQ ID NO: 1606483 - DNA, 25 bp, Homo sapien
tggtacagcccgcgggccgtgttca

SEQ ID NO: 1606484 - DNA, 25 bp, Homo sapien
cgtgttcaccgccttctgcacctcg

SEQ ID NO: 1606485 - DNA, 25 bp, Homo sapien
cgcgggccgtgttcaccgccttctg

SEQ ID NO: 1606486 - DNA, 25 bp, Homo sapien
agcgctggtacagcccgcgggccgt

SEQ ID NO: 1606487 - DNA, 25 bp, Homo sapien
cactggctggcttgggtacagagca

SEQ ID NO: 1606488 - DNA, 25 bp, Homo sapien
ggagacccctatatacccctgcgtg

SEQ ID NO: 1606489 - DNA, 25 bp, Homo sapien
tggcttgggtacagagcaccctccg

SEQ ID NO: 1606490 - DNA, 25 bp, Homo sapien
tgcaaacccaaacgcatgggggact

SEQ ID NO: 1606491 - DNA, 25 bp, Homo sapien
caaaaaaggggtcttcgagagacat

SEQ ID NO: 1606492 - DNA, 25 bp, Homo sapien
ctcccaaccgaggagaacgcgccgc

SEQ ID NO: 1606493 - DNA, 25 bp, Homo sapien
cccaaccgaggagaacgcgccgcca

SEQ ID NO: 1606494 - DNA, 25 bp, Homo sapien
cctcccaaccgaggagaacgcgccg

SEQ ID NO: 1606495 - DNA, 25 bp, Homo sapien
caaccgaggagaacgcgccgccacc

SEQ ID NO: 1606496 - DNA, 25 bp, Homo sapien
tcggaggcccgacgtgcggacactt

SEQ ID NO: 1606497 - DNA, 25 bp, Homo sapien
ttagccctctcgtgccgcaccgtag

SEQ ID NO: 1606498 - DNA, 25 bp, Homo sapien
agaggcagcttccggtgcacatgcc

SEQ ID NO: 1606499 - DNA, 25 bp, Homo sapien
ggcggtgtcggagttctgtctgggc

SEQ ID NO: 1606500 - DNA, 25 bp, Homo sapien
tctggcggctgggtattatggctgg

SEQ ID NO: 1606501 - DNA, 25 bp, Homo sapien
gggctcattcgattcgttgaagctt

SEQ ID NO: 1606502 - DNA, 25 bp, Homo sapien
ggaaggggctcattcgattcgttga

SEQ ID NO: 1606503 - DNA, 25 bp, Homo sapien
tgtaaataatgatagcctccctcat

SEQ ID NO: 1606504 - DNA, 25 bp, Homo sapien
tctttcctgagaagtggcggagttg

SEQ ID NO: 1606505 - DNA, 25 bp, Homo sapien
ccgagtgtcaggtttggctagggtc

SEQ ID NO: 1606506 - DNA, 25 bp, Homo sapien
gggagatcgtcccatcccagggtcc

SEQ ID NO: 1606507 - DNA, 25 bp, Homo sapien
tcctccggggagttctgccgcattc

SEQ ID NO: 1606508 - DNA, 25 bp, Homo sapien
cgtcgagtcgccatggaagtgcaga

SEQ ID NO: 1606509 - DNA, 25 bp, Homo sapien
gtttccggagccaatggacacgcag

SEQ ID NO: 1606510 - DNA, 25 bp, Homo sapien
gcatcatgaccctgtcggtgtggaa

SEQ ID NO: 1606511 - DNA, 25 bp, Homo sapien
tggaagatgtatcactcccgcatgc

SEQ ID NO: 1606512 - DNA, 25 bp, Homo sapien
ctgtcttagtggactgggacgtgaa

SEQ ID NO: 1606513 - DNA, 25 bp, Homo sapien
ttccgcagagacctgcgcccacagg

SEQ ID NO: 1606514 - DNA, 25 bp, Homo sapien
tggactgggacgtgaacctttcgct

SEQ ID NO: 1606515 - DNA, 25 bp, Homo sapien
ggacgtgaacctttcgctctccttc

SEQ ID NO: 1606516 - DNA, 25 bp, Homo sapien
taagcggtcatcgttgcgtcatggg

SEQ ID NO: 1606517 - DNA, 25 bp, Homo sapien
tttccaacctcggagaattccaggc

SEQ ID NO: 1606518 - DNA, 25 bp, Homo sapien
tttaaagatctcctcagggtcggac

SEQ ID NO: 1606519 - DNA, 25 bp, Homo sapien
gcttcctgtcgccttgcgtgggtgt

SEQ ID NO: 1606520 - DNA, 25 bp, Homo sapien
catctgcattagaggtgcccagtag

SEQ ID NO: 1606521 - DNA, 25 bp, Homo sapien
tgctggtgaaactgggccaatctgg

SEQ ID NO: 1606522 - DNA, 25 bp, Homo sapien
gacacacggacacaatcagccgaga

SEQ ID NO: 1606523 - DNA, 25 bp, Homo sapien
gaagttcctggtctgaatcacgaga

SEQ ID NO: 1606524 - DNA, 25 bp, Homo sapien
ttttcttgggtcactccccagctct

SEQ ID NO: 1606525 - DNA, 25 bp, Homo sapien
agccctttcaatataccccacgtag

SEQ ID NO: 1606526 - DNA, 25 bp, Homo sapien
cgaaacgagaaagccctttcaatat

SEQ ID NO: 1606527 - DNA, 25 bp, Homo sapien
cagctctagaataaccaccccgaaa

SEQ ID NO: 1606528 - DNA, 25 bp, Homo sapien
ttctccagccaagctcgcccccacg

SEQ ID NO: 1606529 - DNA, 25 bp, Homo sapien
tcgcccccacggctgcctgattcct

SEQ ID NO: 1606530 - DNA, 25 bp, Homo sapien
tccagccaagctcgcccccacggct

SEQ ID NO: 1606531 - DNA, 25 bp, Homo sapien
gcccccacggctgcctgattccttc

SEQ ID NO: 1606532 - DNA, 25 bp, Homo sapien
ccccgcgagcgtggcaaggctcagg

SEQ ID NO: 1606533 - DNA, 25 bp, Homo sapien
cttgccgcgcatcctgtcgcaggaa

SEQ ID NO: 1606534 - DNA, 25 bp, Homo sapien
ttccttccgcgggaagcggcttggc

SEQ ID NO: 1606535 - DNA, 25 bp, Homo sapien
tcaatgcacccgcgtcggagttcct

SEQ ID NO: 1606536 - DNA, 25 bp, Homo sapien
gaggcctggactaattgattggaca

SEQ ID NO: 1606537 - DNA, 25 bp, Homo sapien
cacagcaaataacattggtgaggcc

SEQ ID NO: 1606538 - DNA, 25 bp, Homo sapien
cactggacccatcagaaaaggcagc

SEQ ID NO: 1606539 - DNA, 25 bp, Homo sapien
ggcagcattgaaccttgtcacagca

SEQ ID NO: 1606540 - DNA, 25 bp, Homo sapien
catctatgatgtcacgagggtggcg

SEQ ID NO: 1606541 - DNA, 25 bp, Homo sapien
tcatctatgatgtcacgagggtggc

SEQ ID NO: 1606542 - DNA, 25 bp, Homo sapien
tatgatgtcacgagggtggcggcca

SEQ ID NO: 1606543 - DNA, 25 bp, Homo sapien
tctatgatgtcacgagggtggcggc

SEQ ID NO: 1606544 - DNA, 25 bp, Homo sapien
ctaaagatcggtgccacatctgtcg

SEQ ID NO: 1606545 - DNA, 25 bp, Homo sapien
agatcggtgccacatctgtcgagta

SEQ ID NO: 1606546 - DNA, 25 bp, Homo sapien
attacggcctacagactgggcagtc

SEQ ID NO: 1606547 - DNA, 25 bp, Homo sapien
ctctggctaaagatcggtgccacat

SEQ ID NO: 1606548 - DNA, 25 bp, Homo sapien
cagaggcagaaggcaccacctcaat

SEQ ID NO: 1606549 - DNA, 25 bp, Homo sapien
ctttaatgatcagggcagaggcaga

SEQ ID NO: 1606550 - DNA, 25 bp, Homo sapien
aaggcaccacctcaatctgggcctg

SEQ ID NO: 1606551 - DNA, 25 bp, Homo sapien
gggcctgtctgttctgaatggtcag

SEQ ID NO: 1606552 - DNA, 25 bp, Homo sapien
gcccttccagtcaccccattgcctt

SEQ ID NO: 1606553 - DNA, 25 bp, Homo sapien
tcaggcccttccagtcaccccattg

SEQ ID NO: 1606554 - DNA, 25 bp, Homo sapien
tcctcaggcccttccagtcacccca

SEQ ID NO: 1606555 - DNA, 25 bp, Homo sapien
aggcccttccagtcaccccattgcc

SEQ ID NO: 1606556 - DNA, 25 bp, Homo sapien
tggcacccccttcaccccgagtgca

SEQ ID NO: 1606557 - DNA, 25 bp, Homo sapien
agtggcacccccttcaccccgagtg

SEQ ID NO: 1606558 - DNA, 25 bp, Homo sapien
gtggcacccccttcaccccgagtgc

SEQ ID NO: 1606559 - DNA, 25 bp, Homo sapien
tctcgttggggttgaactttggcag

SEQ ID NO: 1606560 - DNA, 25 bp, Homo sapien
ctcaggtatacaaatttgatctcgt

SEQ ID NO: 1606561 - DNA, 25 bp, Homo sapien
ggtatacaaatttgatctcgttggg

SEQ ID NO: 1606562 - DNA, 25 bp, Homo sapien
cgttggggttgaactttggcagcat

SEQ ID NO: 1606563 - DNA, 25 bp, Homo sapien
tggacaaccgaagaaagctgcacct

SEQ ID NO: 1606564 - DNA, 25 bp, Homo sapien
acctggattctggacaaccgaagaa

SEQ ID NO: 1606565 - DNA, 25 bp, Homo sapien
gattctggacaaccgaagaaagctg

SEQ ID NO: 1606566 - DNA, 25 bp, Homo sapien
tctggacaaccgaagaaagctgcac

SEQ ID NO: 1606567 - DNA, 25 bp, Homo sapien
ggagagactccacggccccttggaa

SEQ ID NO: 1606568 - DNA, 25 bp, Homo sapien
gtgcacactctcccgatgggctggc

SEQ ID NO: 1606569 - DNA, 25 bp, Homo sapien
ctgtgcacactctcccgatgggctg

SEQ ID NO: 1606570 - DNA, 25 bp, Homo sapien
tcctgtgcacactctcccgatgggc

SEQ ID NO: 1606571 - DNA, 25 bp, Homo sapien
cagacactttccaaatccctgcgga

SEQ ID NO: 1606572 - DNA, 25 bp, Homo sapien
ggaggccactaaagtctgcgcgctg

SEQ ID NO: 1606573 - DNA, 25 bp, Homo sapien
tgcgcgctgccttccacgcgttctc

SEQ ID NO: 1606574 - DNA, 25 bp, Homo sapien
tgcctggtctgtgcgggctgcagct

SEQ ID NO: 1606575 - DNA, 25 bp, Homo sapien
aattccctcccatgagggttggata

SEQ ID NO: 1606576 - DNA, 25 bp, Homo sapien
agtactgtcatgctgtttgggacca

SEQ ID NO: 1606577 - DNA, 25 bp, Homo sapien
caaagtactgtcatgctgtttggga

SEQ ID NO: 1606578 - DNA, 25 bp, Homo sapien
gaaattccctcccatgagggttgga

SEQ ID NO: 1606579 - DNA, 25 bp, Homo sapien
tcttcattggcatggaaaagacgtt

SEQ ID NO: 1606580 - DNA, 25 bp, Homo sapien
aaagacgttggtgtgatttggaggc

SEQ ID NO: 1606581 - DNA, 25 bp, Homo sapien
ctgattcaggccgtcccaggatcat

SEQ ID NO: 1606582 - DNA, 25 bp, Homo sapien
gactgatccttaacactggatgccc

SEQ ID NO: 1606583 - DNA, 25 bp, Homo sapien
tgctcctgtccaccatcactgtttg

SEQ ID NO: 1606584 - DNA, 25 bp, Homo sapien
gtccaccatcactgtttgcaccagg

SEQ ID NO: 1606585 - DNA, 25 bp, Homo sapien
catcactgtttgcaccaggctccat

SEQ ID NO: 1606586 - DNA, 25 bp, Homo sapien
tcactgtttgcaccaggctccatct

SEQ ID NO: 1606587 - DNA, 25 bp, Homo sapien
actgccacctcaggtcaaccaaggg

SEQ ID NO: 1606588 - DNA, 25 bp, Homo sapien
tcctcctccacttgtacagactgcc

SEQ ID NO: 1606589 - DNA, 25 bp, Homo sapien
aggtgacgctgtcgacctgcctcct

SEQ ID NO: 1606590 - DNA, 25 bp, Homo sapien
tccaggtgacgctgtcgacctgcct

SEQ ID NO: 1606591 - DNA, 25 bp, Homo sapien
agaagcaaaggaatcggtggtgatg

SEQ ID NO: 1606592 - DNA, 25 bp, Homo sapien
aagaagcaaaggaatcggtggtgat

SEQ ID NO: 1606593 - DNA, 25 bp, Homo sapien
tcacagtcccaagcccacggttttc

SEQ ID NO: 1606594 - DNA, 25 bp, Homo sapien
taattcaaatcccttggctgtgtgg

SEQ ID NO: 1606595 - DNA, 25 bp, Homo sapien
ggtttggtataaccggcaagcactc

SEQ ID NO: 1606596 - DNA, 25 bp, Homo sapien
ttctgcaggcagtaatagtagggtt

SEQ ID NO: 1606597 - DNA, 25 bp, Homo sapien
tgtttcaagcaggaccaaatgtcag

SEQ ID NO: 1606598 - DNA, 25 bp, Homo sapien
tgtagggttcgtgcaggcccttcct

SEQ ID NO: 1606599 - DNA, 25 bp, Homo sapien
gtcgccggccgtgccgagaaggcga

SEQ ID NO: 1606600 - DNA, 25 bp, Homo sapien
ttagcaccaatcatcgtcactctcg

SEQ ID NO: 1606601 - DNA, 25 bp, Homo sapien
tccgtgcgccgggtagtagccgttg

SEQ ID NO: 1606602 - DNA, 25 bp, Homo sapien
atcggcctcgtcgtagtcggagccc

SEQ ID NO: 1606603 - DNA, 25 bp, Homo sapien
gtggcgcgtcgtaggccccggccat

SEQ ID NO: 1606604 - DNA, 25 bp, Homo sapien
gcgagcgcccggtggcgcccgagga

SEQ ID NO: 1606605 - DNA, 25 bp, Homo sapien
tcggagccccggtagtagccatggt

SEQ ID NO: 1606606 - DNA, 25 bp, Homo sapien
ggccccgccgtgtcgacaggccctg

SEQ ID NO: 1606607 - DNA, 25 bp, Homo sapien
tgggcggccgatctccggccagagg

SEQ ID NO: 1606608 - DNA, 25 bp, Homo sapien
gggcgagcggccgctgctgtggccc

SEQ ID NO: 1606609 - DNA, 25 bp, Homo sapien
acacgtgcgggccagatgccggcca

SEQ ID NO: 1606610 - DNA, 25 bp, Homo sapien
ctgggtacctccgagggccgctggt

SEQ ID NO: 1606611 - DNA, 25 bp, Homo sapien
ccgcggagtgctggtaccagatgtt

SEQ ID NO: 1606612 - DNA, 25 bp, Homo sapien
aggggaataggacacgtgtggccgg

SEQ ID NO: 1606613 - DNA, 25 bp, Homo sapien
cccgccgcggagtgctggtaccaga

SEQ ID NO: 1606614 - DNA, 25 bp, Homo sapien
gccgccggccttacggatcacaggg

SEQ ID NO: 1606615 - DNA, 25 bp, Homo sapien
aaagatacaacaaaatcaaaggaga

SEQ ID NO: 1606616 - DNA, 25 bp, Homo sapien
caaaatcaaaggagacacgggattg

SEQ ID NO: 1606617 - DNA, 25 bp, Homo sapien
gatacaacaaaatcaaaggagacac

SEQ ID NO: 1606618 - DNA, 25 bp, Homo sapien
caacaaaatcaaaggagacacggga

SEQ ID NO: 1606619 - DNA, 25 bp, Homo sapien
tgatccacaaccgaggagcaagcag

SEQ ID NO: 1606620 - DNA, 25 bp, Homo sapien
caaatatgatccacaaccgaggagc

SEQ ID NO: 1606621 - DNA, 25 bp, Homo sapien
tatgatccacaaccgaggagcaagc

SEQ ID NO: 1606622 - DNA, 25 bp, Homo sapien
aatatgatccacaaccgaggagcaa

SEQ ID NO: 1606623 - DNA, 25 bp, Homo sapien
gtgcgccatgtgctctcggccctcg

SEQ ID NO: 1606624 - DNA, 25 bp, Homo sapien
ctgccggtgcgccatgtgctctcgg

SEQ ID NO: 1606625 - DNA, 25 bp, Homo sapien
tgccggtgcgccatgtgctctcggc

SEQ ID NO: 1606626 - DNA, 25 bp, Homo sapien
cggtgcgccatgtgctctcggccct

SEQ ID NO: 1606627 - DNA, 25 bp, Homo sapien
ccggccgttcctgggcatagcggtc

SEQ ID NO: 1606628 - DNA, 25 bp, Homo sapien
tggtccggccgttcctgggcatagc

SEQ ID NO: 1606629 - DNA, 25 bp, Homo sapien
tccggccgttcctgggcatagcggt

SEQ ID NO: 1606630 - DNA, 25 bp, Homo sapien
gccgtggtccggccgttcctgggca

SEQ ID NO: 1606631 - DNA, 25 bp, Homo sapien
tggtcccgctccttcgacggcaggt

SEQ ID NO: 1606632 - DNA, 25 bp, Homo sapien
gctgtcgatgcttccgatccttggg

SEQ ID NO: 1606633 - DNA, 25 bp, Homo sapien
gtggtgctgtcgatgcttccgatcc

SEQ ID NO: 1606634 - DNA, 25 bp, Homo sapien
gatgcttccgatccttgggccggcc

SEQ ID NO: 1606635 - DNA, 25 bp, Homo sapien
ctggtggtgccgctggttctcctcg

SEQ ID NO: 1606636 - DNA, 25 bp, Homo sapien
ggtgtagcggcccagggagcgctca

SEQ ID NO: 1606637 - DNA, 25 bp, Homo sapien
agtaatcgtccaggcgtcgggcctt

SEQ ID NO: 1606638 - DNA, 25 bp, Homo sapien
gggacccgctccagcgagtaatcgt

SEQ ID NO: 1606639 - DNA, 25 bp, Homo sapien
ctgaggttattcccacgtggccggc

SEQ ID NO: 1606640 - DNA, 25 bp, Homo sapien
tgaggttattcccacgtggccggcc

SEQ ID NO: 1606641 - DNA, 25 bp, Homo sapien
actgaggttattcccacgtggccgg

SEQ ID NO: 1606642 - DNA, 25 bp, Homo sapien
tgcccatctctcgcatctccacgga

SEQ ID NO: 1606643 - DNA, 25 bp, Homo sapien
gggaggtagtgctcgctgtcggagt

SEQ ID NO: 1606644 - DNA, 25 bp, Homo sapien
gctgtcggagtagccatctctgccc

SEQ ID NO: 1606645 - DNA, 25 bp, Homo sapien
tcggagtagccatctctgcccatct

SEQ ID NO: 1606646 - DNA, 25 bp, Homo sapien
gatggcaaagccagatgagctctgg

SEQ ID NO: 1606647 - DNA, 25 bp, Homo sapien
ttggggagttgggggacagaggcac

SEQ ID NO: 1606648 - DNA, 25 bp, Homo sapien
ggccctgggagccattggggagttg

SEQ ID NO: 1606649 - DNA, 25 bp, Homo sapien
ccgggccctgggagccattggggag

SEQ ID NO: 1606650 - DNA, 25 bp, Homo sapien
cattggggagttgggggacagaggc

SEQ ID NO: 1606651 - DNA, 25 bp, Homo sapien
ttaggctggctgttgggcatgtcgg

SEQ ID NO: 1606652 - DNA, 25 bp, Homo sapien
ccttgaggccgctttcgtgagccat

SEQ ID NO: 1606653 - DNA, 25 bp, Homo sapien
ggtcacccaggacgggctctccttg

SEQ ID NO: 1606654 - DNA, 25 bp, Homo sapien
tgttccggactccatgtgcccgtct

SEQ ID NO: 1606655 - DNA, 25 bp, Homo sapien
gctggaacatgaggggtgtccggtc

SEQ ID NO: 1606656 - DNA, 25 bp, Homo sapien
gaggggagggcgttctggccaggtc

SEQ ID NO: 1606657 - DNA, 25 bp, Homo sapien
atgcgctggaacatgaggggtgtcc

SEQ ID NO: 1606658 - DNA, 25 bp, Homo sapien
tggaggggagggcgttctggccagg

SEQ ID NO: 1606659 - DNA, 25 bp, Homo sapien
ccacaggtgcatggcgccacatgca

SEQ ID NO: 1606660 - DNA, 25 bp, Homo sapien
ttcccgtggtgacatgcaagccact

SEQ ID NO: 1606661 - DNA, 25 bp, Homo sapien
tgtgcacagcccctacttttcaggg

SEQ ID NO: 1606662 - DNA, 25 bp, Homo sapien
tcatattccagttggttcccgtggt

SEQ ID NO: 1606663 - DNA, 25 bp, Homo sapien
tgctctgccggtagtactccatgat

SEQ ID NO: 1606664 - DNA, 25 bp, Homo sapien
tggccttgctctgccggtagtactc

SEQ ID NO: 1606665 - DNA, 25 bp, Homo sapien
tctgccggtagtactccatgatcat

SEQ ID NO: 1606666 - DNA, 25 bp, Homo sapien
ggccttgctctgccggtagtactcc

SEQ ID NO: 1606667 - DNA, 25 bp, Homo sapien
gcacacacacggtgagctcaccaag

SEQ ID NO: 1606668 - DNA, 25 bp, Homo sapien
cacacacacggtgagctcaccaagg

SEQ ID NO: 1606669 - DNA, 25 bp, Homo sapien
acacacacggtgagctcaccaaggg

SEQ ID NO: 1606670 - DNA, 25 bp, Homo sapien
cacacacggtgagctcaccaagggc

SEQ ID NO: 1606671 - DNA, 25 bp, Homo sapien
tcctggtggattggatcccagggct

SEQ ID NO: 1606672 - DNA, 25 bp, Homo sapien
cctggtggattggatcccagggctg

SEQ ID NO: 1606673 - DNA, 25 bp, Homo sapien
gtcctggtggattggatcccagggc

SEQ ID NO: 1606674 - DNA, 25 bp, Homo sapien
ctggtggattggatcccagggctgg

SEQ ID NO: 1606675 - DNA, 25 bp, Homo sapien
agcaggtctagcgtcttctgggaca

SEQ ID NO: 1606676 - DNA, 25 bp, Homo sapien
agcgtccatctgctgtttgtcggct

SEQ ID NO: 1606677 - DNA, 25 bp, Homo sapien
gattgggccaaatcgccatcatctc

SEQ ID NO: 1606678 - DNA, 25 bp, Homo sapien
gtccatctgctgtttgtcggctcct

SEQ ID NO: 1606679 - DNA, 25 bp, Homo sapien
tgagtaactacgtcagccctgccta

SEQ ID NO: 1606680 - DNA, 25 bp, Homo sapien
taagcgttgtctgtgcaactccact

SEQ ID NO: 1606681 - DNA, 25 bp, Homo sapien
tggaggcagacaactggaagctcgc

SEQ ID NO: 1606682 - DNA, 25 bp, Homo sapien
tacacggtgcgtgttgtcacacact

SEQ ID NO: 1606683 - DNA, 25 bp, Homo sapien
acggtgttgtcatctgcgacgggca

SEQ ID NO: 1606684 - DNA, 25 bp, Homo sapien
acgggcaggtccatccgcagaagcc

SEQ ID NO: 1606685 - DNA, 25 bp, Homo sapien
aattgaagtggacggtgttgtcatc

SEQ ID NO: 1606686 - DNA, 25 bp, Homo sapien
cagggctgtgcggatcagagccatg

SEQ ID NO: 1606687 - DNA, 25 bp, Homo sapien
ggcaagcgcagtcattcccaggcat

SEQ ID NO: 1606688 - DNA, 25 bp, Homo sapien
taggttacctgtcccagtactcagt

SEQ ID NO: 1606689 - DNA, 25 bp, Homo sapien
gaaaacccaaggcaagcgcagtcat

SEQ ID NO: 1606690 - DNA, 25 bp, Homo sapien
gcggctgaggtgtctcttacttagg

SEQ ID NO: 1606691 - DNA, 25 bp, Homo sapien
tgtaagccactctggccggacactt

SEQ ID NO: 1606692 - DNA, 25 bp, Homo sapien
cttgtaagccactctggccggacac

SEQ ID NO: 1606693 - DNA, 25 bp, Homo sapien
ttgtaagccactctggccggacact

SEQ ID NO: 1606694 - DNA, 25 bp, Homo sapien
ctcagcatctgatacatgtccaggt

SEQ ID NO: 1606695 - DNA, 25 bp, Homo sapien
gtctcagcatctgatacatgtccag

SEQ ID NO: 1606696 - DNA, 25 bp, Homo sapien
tctcagcatctgatacatgtccagg

SEQ ID NO: 1606697 - DNA, 25 bp, Homo sapien
tcagcatctgatacatgtccaggta

SEQ ID NO: 1606698 - DNA, 25 bp, Homo sapien
cacgttctctggtttggctgaggct

SEQ ID NO: 1606699 - DNA, 25 bp, Homo sapien
tctacagttgggtcacgttctctgg

SEQ ID NO: 1606700 - DNA, 25 bp, Homo sapien
tgggtcacgttctctggtttggctg

SEQ ID NO: 1606701 - DNA, 25 bp, Homo sapien
atttctacagttgggtcacgttctc

SEQ ID NO: 1606702 - DNA, 25 bp, Homo sapien
gacatttcttgcctaagccgagagg

SEQ ID NO: 1606703 - DNA, 25 bp, Homo sapien
catttcttgcctaagccgagagggg

SEQ ID NO: 1606704 - DNA, 25 bp, Homo sapien
tttcttgcctaagccgagaggggga

SEQ ID NO: 1606705 - DNA, 25 bp, Homo sapien
ggacatttcttgcctaagccgagag

SEQ ID NO: 1606706 - DNA, 25 bp, Homo sapien
tgtacatatccttataatgaatccg

SEQ ID NO: 1606707 - DNA, 25 bp, Homo sapien
tactcgtaataaactgtacatatcc

SEQ ID NO: 1606708 - DNA, 25 bp, Homo sapien
catatccttataatgaatccgaccg

SEQ ID NO: 1606709 - DNA, 25 bp, Homo sapien
tacatatccttataatgaatccgac

SEQ ID NO: 1606710 - DNA, 25 bp, Homo sapien
gtgaaggtccccagtacattcccag

SEQ ID NO: 1606711 - DNA, 25 bp, Homo sapien
gaagagttaggaaccagccaaagcc

SEQ ID NO: 1606712 - DNA, 25 bp, Homo sapien
tccacagtctacatgggctacaggg

SEQ ID NO: 1606713 - DNA, 25 bp, Homo sapien
taggatgtcagtcgagttcgggact

SEQ ID NO: 1606714 - DNA, 25 bp, Homo sapien
cttcctcgtgacggcctcctctctg

SEQ ID NO: 1606715 - DNA, 25 bp, Homo sapien
cctcgtgacggcctcctctctggtg

SEQ ID NO: 1606716 - DNA, 25 bp, Homo sapien
tcctcgtgacggcctcctctctggt

SEQ ID NO: 1606717 - DNA, 25 bp, Homo sapien
ttcctcgtgacggcctcctctctgg

SEQ ID NO: 1606718 - DNA, 25 bp, Homo sapien
actaaatcctcagttagtggctggt

SEQ ID NO: 1606719 - DNA, 25 bp, Homo sapien
ctcagttagtggctggtgggttcca

SEQ ID NO: 1606720 - DNA, 25 bp, Homo sapien
tgagggccccccagtaatgcttctt

SEQ ID NO: 1606721 - DNA, 25 bp, Homo sapien
aagaccagcctgaactaaatcctca

SEQ ID NO: 1606722 - DNA, 25 bp, Homo sapien
gtctcgggtgaggtactcaaagttg

SEQ ID NO: 1606723 - DNA, 25 bp, Homo sapien
aggagtctcgggtgaggtactcaaa

SEQ ID NO: 1606724 - DNA, 25 bp, Homo sapien
tcatactcggcccagacacgcacgt

SEQ ID NO: 1606725 - DNA, 25 bp, Homo sapien
gacacgcacgtactcatccaggtgg

SEQ ID NO: 1606726 - DNA, 25 bp, Homo sapien
tatcacacggtttcccgctgaggca

SEQ ID NO: 1606727 - DNA, 25 bp, Homo sapien
gcaggaaagcatgatgttgtgccaa

SEQ ID NO: 1606728 - DNA, 25 bp, Homo sapien
tgttgtgccaagcttccccggtggc

SEQ ID NO: 1606729 - DNA, 25 bp, Homo sapien
cacactctcgagtcaggatgccaga

SEQ ID NO: 1606730 - DNA, 25 bp, Homo sapien
accccacggaaacagaattatcaga

SEQ ID NO: 1606731 - DNA, 25 bp, Homo sapien
ccccacggaaacagaattatcagag

SEQ ID NO: 1606732 - DNA, 25 bp, Homo sapien
ccaccccacggaaacagaattatca

SEQ ID NO: 1606733 - DNA, 25 bp, Homo sapien
caccccacggaaacagaattatcag

SEQ ID NO: 1606734 - DNA, 25 bp, Homo sapien
cgtcctccacgtcgatgccaatgtt

SEQ ID NO: 1606735 - DNA, 25 bp, Homo sapien
tgtgctcagtgatttggaactcatc

SEQ ID NO: 1606736 - DNA, 25 bp, Homo sapien
acgtcgatgccaatgttaccaaaca

SEQ ID NO: 1606737 - DNA, 25 bp, Homo sapien
gaagaaggtccggaagttattgtgc

SEQ ID NO: 1606738 - DNA, 25 bp, Homo sapien
agagcatggcgatcagcagacagac

SEQ ID NO: 1606739 - DNA, 25 bp, Homo sapien
catggcgatcagcagacagacataa

SEQ ID NO: 1606740 - DNA, 25 bp, Homo sapien
aagaagagcatggcgatcagcagac

SEQ ID NO: 1606741 - DNA, 25 bp, Homo sapien
gcatggcgatcagcagacagacata

SEQ ID NO: 1606742 - DNA, 25 bp, Homo sapien
agaagtttgatgagccgggcagctc

SEQ ID NO: 1606743 - DNA, 25 bp, Homo sapien
cacaaaggtccagagaagaatgcgg

SEQ ID NO: 1606744 - DNA, 25 bp, Homo sapien
cggagaaagctcaggttgatgaagt

SEQ ID NO: 1606745 - DNA, 25 bp, Homo sapien
gtgtaaccctgacggagaagtttga

SEQ ID NO: 1606746 - DNA, 25 bp, Homo sapien
gccagaccccaaataaggagggaga

SEQ ID NO: 1606747 - DNA, 25 bp, Homo sapien
ccagaccccaaataaggagggagag

SEQ ID NO: 1606748 - DNA, 25 bp, Homo sapien
cagaccccaaataaggagggagaga

SEQ ID NO: 1606749 - DNA, 25 bp, Homo sapien
agccagaccccaaataaggagggag

SEQ ID NO: 1606750 - DNA, 25 bp, Homo sapien
actgttcggctgcagggtgagtcct

SEQ ID NO: 1606751 - DNA, 25 bp, Homo sapien
ggtgagtcctcgctgcccgctgagt

SEQ ID NO: 1606752 - DNA, 25 bp, Homo sapien
ccgctgagtcggagaagatgcattt

SEQ ID NO: 1606753 - DNA, 25 bp, Homo sapien
tgggtggagtagcacgggaccaggc

SEQ ID NO: 1606754 - DNA, 25 bp, Homo sapien
caaactcagtcacgaggatatcggt

SEQ ID NO: 1606755 - DNA, 25 bp, Homo sapien
cagaacagtcacaaagtcgaagatg

SEQ ID NO: 1606756 - DNA, 25 bp, Homo sapien
tgttccaggcatcgcggaaataatt

SEQ ID NO: 1606757 - DNA, 25 bp, Homo sapien
acgaggatatcggtgatgctgccca

SEQ ID NO: 1606758 - DNA, 25 bp, Homo sapien
acgatgttgaacacccgcagggcat

SEQ ID NO: 1606759 - DNA, 25 bp, Homo sapien
cacccgcagggcattttcataagca

SEQ ID NO: 1606760 - DNA, 25 bp, Homo sapien
gttgaacacccgcagggcattttca

SEQ ID NO: 1606761 - DNA, 25 bp, Homo sapien
gtgaagacgatgttgaacacccgca

SEQ ID NO: 1606762 - DNA, 25 bp, Homo sapien
tgagccaccgtccccggcttcctta

SEQ ID NO: 1606763 - DNA, 25 bp, Homo sapien
cctaaccttgtgatcgccctcctcg

SEQ ID NO: 1606764 - DNA, 25 bp, Homo sapien
gcctctcacgcagctggtattatag

SEQ ID NO: 1606765 - DNA, 25 bp, Homo sapien
tcagcctctcacgcagctggtatta

SEQ ID NO: 1606766 - DNA, 25 bp, Homo sapien
gagacaccacgaactgccacatgcg

SEQ ID NO: 1606767 - DNA, 25 bp, Homo sapien
tgagggcgatcatggccatgatcgt

SEQ ID NO: 1606768 - DNA, 25 bp, Homo sapien
catgtgtcgggtcagcggcttggcg

SEQ ID NO: 1606769 - DNA, 25 bp, Homo sapien
tgccacatgcggtactggaagctct

SEQ ID NO: 1606770 - DNA, 25 bp, Homo sapien
catctccatgcggtacccggggctg

SEQ ID NO: 1606771 - DNA, 25 bp, Homo sapien
tcaaaggtggcgtccaccgaatgct

SEQ ID NO: 1606772 - DNA, 25 bp, Homo sapien
gacgacgtagaaaatggacatctcc

SEQ ID NO: 1606773 - DNA, 25 bp, Homo sapien
tggcgtccaccgaatgcttgaggac

SEQ ID NO: 1606774 - DNA, 25 bp, Homo sapien
ttccactcccggtctcgcgccttca

SEQ ID NO: 1606775 - DNA, 25 bp, Homo sapien
ccacagcacattgtcgtaatggaat

SEQ ID NO: 1606776 - DNA, 25 bp, Homo sapien
ccggtctcgcgccttcacctcattc

SEQ ID NO: 1606777 - DNA, 25 bp, Homo sapien
ttcttctcgtagaggaggtatttgc

SEQ ID NO: 1606778 - DNA, 25 bp, Homo sapien
ctgctggttccaatgggaatgtgct

SEQ ID NO: 1606779 - DNA, 25 bp, Homo sapien
tgctggttccaatgggaatgtgctg

SEQ ID NO: 1606780 - DNA, 25 bp, Homo sapien
aatgtgctggaaagtggagacccac

SEQ ID NO: 1606781 - DNA, 25 bp, Homo sapien
gggaatgtgctggaaagtggagacc

SEQ ID NO: 1606782 - DNA, 25 bp, Homo sapien
ctcaaactctttggactcgtcagtg

SEQ ID NO: 1606783 - DNA, 25 bp, Homo sapien
tcagtgcagtggaagaatttcccct

SEQ ID NO: 1606784 - DNA, 25 bp, Homo sapien
catgaatagcatgtagacgatgagg

SEQ ID NO: 1606785 - DNA, 25 bp, Homo sapien
cgatgaggatgttgaagacgttttt

SEQ ID NO: 1606786 - DNA, 25 bp, Homo sapien
atttaatcgtgttgatgtcttttcc

SEQ ID NO: 1606787 - DNA, 25 bp, Homo sapien
ctttggcagccgcttgatggtttta

SEQ ID NO: 1606788 - DNA, 25 bp, Homo sapien
gatggttttaagaggtcgtagcacc

SEQ ID NO: 1606789 - DNA, 25 bp, Homo sapien
gactcggagggatttaatcgtgttg

SEQ ID NO: 1606790 - DNA, 25 bp, Homo sapien
taggtgggaagaagggaagagagga

SEQ ID NO: 1606791 - DNA, 25 bp, Homo sapien
ctgtggaggaatgtttaggtgggaa

SEQ ID NO: 1606792 - DNA, 25 bp, Homo sapien
gaagaagggaagagaggaagcagag

SEQ ID NO: 1606793 - DNA, 25 bp, Homo sapien
tgggaagaagggaagagaggaagca

SEQ ID NO: 1606794 - DNA, 25 bp, Homo sapien
ctcgggagccagtaagtacgtggct

SEQ ID NO: 1606795 - DNA, 25 bp, Homo sapien
gcctgagcagctgtattgggtgtcc

SEQ ID NO: 1606796 - DNA, 25 bp, Homo sapien
tggttgagggccctttgccatctgg

SEQ ID NO: 1606797 - DNA, 25 bp, Homo sapien
tctggtcccagggttggttgagggc

SEQ ID NO: 1606798 - DNA, 25 bp, Homo sapien
tgagtgggaccatgaatagcttgtg

SEQ ID NO: 1606799 - DNA, 25 bp, Homo sapien
tgagagtcatggtcaactgcctgcc

SEQ ID NO: 1606800 - DNA, 25 bp, Homo sapien
tgcacagaagttcagtccaaggtct

SEQ ID NO: 1606801 - DNA, 25 bp, Homo sapien
catctttgccagagaggactgcaca

SEQ ID NO: 1606802 - DNA, 25 bp, Homo sapien
acacgcacccctgagcacccccgag

SEQ ID NO: 1606803 - DNA, 25 bp, Homo sapien
agcagttgggggagcctcaggctca

SEQ ID NO: 1606804 - DNA, 25 bp, Homo sapien
ctgagcacccccgagtcccgcccgg

SEQ ID NO: 1606805 - DNA, 25 bp, Homo sapien
cgagtcccgcccgggcagcagttgg

SEQ ID NO: 1606806 - DNA, 25 bp, Homo sapien
ccgtgcattgctctagtagtcaaat

SEQ ID NO: 1606807 - DNA, 25 bp, Homo sapien
aagccaccgtgcattgctctagtag

SEQ ID NO: 1606808 - DNA, 25 bp, Homo sapien
gctctagtagtcaaatagacactga

SEQ ID NO: 1606809 - DNA, 25 bp, Homo sapien
tgtaagccaccgtgcattgctctag

SEQ ID NO: 1606810 - DNA, 25 bp, Homo sapien
cgccatcttggagctgcaggatgac

SEQ ID NO: 1606811 - DNA, 25 bp, Homo sapien
caactggggcgccatcttggagctg

SEQ ID NO: 1606812 - DNA, 25 bp, Homo sapien
atgacacatggcctttcagagggca

SEQ ID NO: 1606813 - DNA, 25 bp, Homo sapien
gctgcaggatgacacatggcctttc

SEQ ID NO: 1606814 - DNA, 25 bp, Homo sapien
ttcctggtggcatgctgatatctcc

SEQ ID NO: 1606815 - DNA, 25 bp, Homo sapien
tgtgaggaggtagaaggttggcagg

SEQ ID NO: 1606816 - DNA, 25 bp, Homo sapien
gctgaggcccgttgctgtgtgagga

SEQ ID NO: 1606817 - DNA, 25 bp, Homo sapien
ccagtgatgtggctgaggcccgttg

SEQ ID NO: 1606818 - DNA, 25 bp, Homo sapien
cagaggtcacggaagtaggcaccct

SEQ ID NO: 1606819 - DNA, 25 bp, Homo sapien
cactatgaagtcgagaatattccag

SEQ ID NO: 1606820 - DNA, 25 bp, Homo sapien
acggaagtaggcaccctgatgcagg

SEQ ID NO: 1606821 - DNA, 25 bp, Homo sapien
ggccccactgaccactatgaagtcg

SEQ ID NO: 1606822 - DNA, 25 bp, Homo sapien
taaaaacgtagtcaaagtatcgcag

SEQ ID NO: 1606823 - DNA, 25 bp, Homo sapien
aaaaacgtagtcaaagtatcgcagc

SEQ ID NO: 1606824 - DNA, 25 bp, Homo sapien
ctgtaaaaacgtagtcaaagtatcg

SEQ ID NO: 1606825 - DNA, 25 bp, Homo sapien
aaacgtagtcaaagtatcgcagcac

SEQ ID NO: 1606826 - DNA, 25 bp, Homo sapien
gttgttccgaggtgcgttgggctgc

SEQ ID NO: 1606827 - DNA, 25 bp, Homo sapien
tccgaggtgcgttgggctgcacagg

SEQ ID NO: 1606828 - DNA, 25 bp, Homo sapien
aggtgcgttgggctgcacagggtcc

SEQ ID NO: 1606829 - DNA, 25 bp, Homo sapien
gtgcgttgggctgcacagggtcctc

SEQ ID NO: 1606830 - DNA, 25 bp, Homo sapien
ggatgtaatggcacaggcggcgaag

SEQ ID NO: 1606831 - DNA, 25 bp, Homo sapien
caggatgtaatggcacaggcggcga

SEQ ID NO: 1606832 - DNA, 25 bp, Homo sapien
aggatgtaatggcacaggcggcgaa

SEQ ID NO: 1606833 - DNA, 25 bp, Homo sapien
gatgtaatggcacaggcggcgaagg

SEQ ID NO: 1606834 - DNA, 25 bp, Homo sapien
tcattgccctctatctggcctgact

SEQ ID NO: 1606835 - DNA, 25 bp, Homo sapien
attgccctctatctggcctgacttc

SEQ ID NO: 1606836 - DNA, 25 bp, Homo sapien
cctctatctggcctgacttccgcca

SEQ ID NO: 1606837 - DNA, 25 bp, Homo sapien
tgccctctatctggcctgacttccg

SEQ ID NO: 1606838 - DNA, 25 bp, Homo sapien
tatagggaggcattggcttagggcc

SEQ ID NO: 1606839 - DNA, 25 bp, Homo sapien
gggttggtcgtggacaggatgaaca

SEQ ID NO: 1606840 - DNA, 25 bp, Homo sapien
tagggaggcattggcttagggccgt

SEQ ID NO: 1606841 - DNA, 25 bp, Homo sapien
gagctatagggaggcattggcttag

SEQ ID NO: 1606842 - DNA, 25 bp, Homo sapien
cagtgggtctgggttggcgtttttg

SEQ ID NO: 1606843 - DNA, 25 bp, Homo sapien
tgcaggcaggtagggagagtgccaa

SEQ ID NO: 1606844 - DNA, 25 bp, Homo sapien
caggtagggagagtgccaagagacc

SEQ ID NO: 1606845 - DNA, 25 bp, Homo sapien
aggcaggtagggagagtgccaagag

SEQ ID NO: 1606846 - DNA, 25 bp, Homo sapien
ttgcaggcaggtagggagagtgcca

SEQ ID NO: 1606847 - DNA, 25 bp, Homo sapien
tccactgtggtgtggtcgggtttcc

SEQ ID NO: 1606848 - DNA, 25 bp, Homo sapien
ggttggtgacgataaggctattctc

SEQ ID NO: 1606849 - DNA, 25 bp, Homo sapien
gtcttagctgaattggtctgggtgc

SEQ ID NO: 1606850 - DNA, 25 bp, Homo sapien
tccgcggtggccagcttgttgttct

SEQ ID NO: 1606851 - DNA, 25 bp, Homo sapien
ctgaggaaggcaagtgaatgaaaaa

SEQ ID NO: 1606852 - DNA, 25 bp, Homo sapien
caagtgaatgaaaaagaaccaacaa

SEQ ID NO: 1606853 - DNA, 25 bp, Homo sapien
aggcaagtgaatgaaaaagaaccaa

SEQ ID NO: 1606854 - DNA, 25 bp, Homo sapien
tgaggaaggcaagtgaatgaaaaag

SEQ ID NO: 1606855 - DNA, 25 bp, Homo sapien
tcgtacgtggctggagcgccatgcc

SEQ ID NO: 1606856 - DNA, 25 bp, Homo sapien
gtgcgcgcgatgacgtcgatgctcc

SEQ ID NO: 1606857 - DNA, 25 bp, Homo sapien
gcgtccccctcgtacgtggctggag

SEQ ID NO: 1606858 - DNA, 25 bp, Homo sapien
tgccggtgccttctcctgcgctcgc

SEQ ID NO: 1606859 - DNA, 25 bp, Homo sapien
tctccctgctgcccccctgccggtg

SEQ ID NO: 1606860 - DNA, 25 bp, Homo sapien
ccctgctgcccccctgccggtgcac

SEQ ID NO: 1606861 - DNA, 25 bp, Homo sapien
tccctgctgcccccctgccggtgca

SEQ ID NO: 1606862 - DNA, 25 bp, Homo sapien
ctctccctgctgcccccctgccggt

SEQ ID NO: 1606863 - DNA, 25 bp, Homo sapien
cccggccttgcctcgctcggcctcg

SEQ ID NO: 1606864 - DNA, 25 bp, Homo sapien
gccttgcctcgctcggcctcgccct

SEQ ID NO: 1606865 - DNA, 25 bp, Homo sapien
gtccccggccttgcctcgctcggcc

SEQ ID NO: 1606866 - DNA, 25 bp, Homo sapien
ggtccccggccttgcctcgctcggc

SEQ ID NO: 1606867 - DNA, 25 bp, Homo sapien
tggtggtccgactcgcggccgtagg

SEQ ID NO: 1606868 - DNA, 25 bp, Homo sapien
tgtttcctgaggaagtcctcggcgc

SEQ ID NO: 1606869 - DNA, 25 bp, Homo sapien
ccgaggcgctggtccacggtgggct

SEQ ID NO: 1606870 - DNA, 25 bp, Homo sapien
ccgatcgtggtagcgggcctgtttc

SEQ ID NO: 1606871 - DNA, 25 bp, Homo sapien
cgctcgtccgggtccatttcgttat

SEQ ID NO: 1606872 - DNA, 25 bp, Homo sapien
gctttcgcatctcactggtccgctg

SEQ ID NO: 1606873 - DNA, 25 bp, Homo sapien
caggtgccgcgtgtaggcagccttc

SEQ ID NO: 1606874 - DNA, 25 bp, Homo sapien
gtccatttcgttatacagggcctcc

SEQ ID NO: 1606875 - DNA, 25 bp, Homo sapien
atgttggccgcggacagaggactca

SEQ ID NO: 1606876 - DNA, 25 bp, Homo sapien
acagctatagacatgttggccgcgg

SEQ ID NO: 1606877 - DNA, 25 bp, Homo sapien
gacagaggactcacttctgccacct

SEQ ID NO: 1606878 - DNA, 25 bp, Homo sapien
tatagacatgttggccgcggacaga

SEQ ID NO: 1606879 - DNA, 25 bp, Homo sapien
accttggaaatggtcagatcaggac

SEQ ID NO: 1606880 - DNA, 25 bp, Homo sapien
ccttggaaatggtcagatcaggaca

SEQ ID NO: 1606881 - DNA, 25 bp, Homo sapien
caccttggaaatggtcagatcagga

SEQ ID NO: 1606882 - DNA, 25 bp, Homo sapien
ggcaggtggtaactttgccagagaa

SEQ ID NO: 1606883 - DNA, 25 bp, Homo sapien
ccatgggcaggtggtaactttgcca

SEQ ID NO: 1606884 - DNA, 25 bp, Homo sapien
taactttgccagagaaacattctcc

SEQ ID NO: 1606885 - DNA, 25 bp, Homo sapien
ggtggtaactttgccagagaaacat

SEQ ID NO: 1606886 - DNA, 25 bp, Homo sapien
tgagctcctgggcgttggccagatt

SEQ ID NO: 1606887 - DNA, 25 bp, Homo sapien
gagctcctgggcgttggccagattg

SEQ ID NO: 1606888 - DNA, 25 bp, Homo sapien
agtaccctcccttgagcccctgcaa

SEQ ID NO: 1606889 - DNA, 25 bp, Homo sapien
ttgagcccctgcaacctctcctctg

SEQ ID NO: 1606890 - DNA, 25 bp, Homo sapien
tcccttgagcccctgcaacctctcc

SEQ ID NO: 1606891 - DNA, 25 bp, Homo sapien
tcagtaccctcccttgagcccctgc

SEQ ID NO: 1606892 - DNA, 25 bp, Homo sapien
tcccaaagagcgtcagtacaatgaa

SEQ ID NO: 1606893 - DNA, 25 bp, Homo sapien
cccaaagagcgtcagtacaatgaaa

SEQ ID NO: 1606894 - DNA, 25 bp, Homo sapien
agttcccaaagagcgtcagtacaat

SEQ ID NO: 1606895 - DNA, 25 bp, Homo sapien
ttcccaaagagcgtcagtacaatga

SEQ ID NO: 1606896 - DNA, 25 bp, Homo sapien
tgatcccgtcgtacatgacctcgtt

SEQ ID NO: 1606897 - DNA, 25 bp, Homo sapien
ccctgagacttgatcccgtcgtaca

SEQ ID NO: 1606898 - DNA, 25 bp, Homo sapien
tacatgacctcgttccagtcttcgc

SEQ ID NO: 1606899 - DNA, 25 bp, Homo sapien
tcgttccagtcttcgcccgtcagga

SEQ ID NO: 1606900 - DNA, 25 bp, Homo sapien
gttgcttctctgcttggtcctgcat

SEQ ID NO: 1606901 - DNA, 25 bp, Homo sapien
tgctccttctctgaggatctgtgag

SEQ ID NO: 1606902 - DNA, 25 bp, Homo sapien
tcttcctgcttgaccctgttgcttc

SEQ ID NO: 1606903 - DNA, 25 bp, Homo sapien
gctaggaggtatgtatcaccatgcc

SEQ ID NO: 1606904 - DNA, 25 bp, Homo sapien
tgctggaaaagtatcgaagttggtg

SEQ ID NO: 1606905 - DNA, 25 bp, Homo sapien
ctgaaacaccgtcattattgctgct

SEQ ID NO: 1606906 - DNA, 25 bp, Homo sapien
attattgctgctggaaaagtatcga

SEQ ID NO: 1606907 - DNA, 25 bp, Homo sapien
gaggagtcccttcatcgaaattaaa

SEQ ID NO: 1606908 - DNA, 25 bp, Homo sapien
caggtttctgagagatgcccagtac

SEQ ID NO: 1606909 - DNA, 25 bp, Homo sapien
tggccgccgaagagttgcattccca

SEQ ID NO: 1606910 - DNA, 25 bp, Homo sapien
gagagacgaccaggtttctgagaga

SEQ ID NO: 1606911 - DNA, 25 bp, Homo sapien
aaagggcgaagacgacaatgaacag

SEQ ID NO: 1606912 - DNA, 25 bp, Homo sapien
tgagggctcgtaacacgctgattcc

SEQ ID NO: 1606913 - DNA, 25 bp, Homo sapien
tgtgccaggttttatgacagcccag

SEQ ID NO: 1606914 - DNA, 25 bp, Homo sapien
gcccagatgacctcgaagatgctcc

SEQ ID NO: 1606915 - DNA, 25 bp, Homo sapien
gaaaatacgcaataacctgagggct

SEQ ID NO: 1606916 - DNA, 25 bp, Homo sapien
cccacagtcaaagcagttgaaggaa

SEQ ID NO: 1606917 - DNA, 25 bp, Homo sapien
aggccgcgtcccaagcccgtacatt

SEQ ID NO: 1606918 - DNA, 25 bp, Homo sapien
ggaagagtggaagtaaggccgcgtc

SEQ ID NO: 1606919 - DNA, 25 bp, Homo sapien
taaacatttcggacataaagagtcc

SEQ ID NO: 1606920 - DNA, 25 bp, Homo sapien
aagagaagtggaaaaagggtgtgag

SEQ ID NO: 1606921 - DNA, 25 bp, Homo sapien
gagggagggatcagggagttggcag

SEQ ID NO: 1606922 - DNA, 25 bp, Homo sapien
agaagatacacatactaccagagaa

SEQ ID NO: 1606923 - DNA, 25 bp, Homo sapien
caaagaagatacacatactaccaga

SEQ ID NO: 1606924 - DNA, 25 bp, Homo sapien
tgagtacagtccagtagaaggcctg

SEQ ID NO: 1606925 - DNA, 25 bp, Homo sapien
cacacagcgtgttgagagctaccaa

SEQ ID NO: 1606926 - DNA, 25 bp, Homo sapien
gaaggcctgagttttgaccatgcgg

SEQ ID NO: 1606927 - DNA, 25 bp, Homo sapien
cacttttaatgctggctcgggcgaa

SEQ ID NO: 1606928 - DNA, 25 bp, Homo sapien
gcttttctttatggtggttctccgc

SEQ ID NO: 1606929 - DNA, 25 bp, Homo sapien
tatatcagccagctgatcctcagcc

SEQ ID NO: 1606930 - DNA, 25 bp, Homo sapien
cacagaggctatatcagccagctga

SEQ ID NO: 1606931 - DNA, 25 bp, Homo sapien
gcctcttcggggttgagcaaatctg

SEQ ID NO: 1606932 - DNA, 25 bp, Homo sapien
aacaatggaaacatggcaagagaaa

SEQ ID NO: 1606933 - DNA, 25 bp, Homo sapien
aaacatggcaagagaaaaagacgtt

SEQ ID NO: 1606934 - DNA, 25 bp, Homo sapien
caacaatggaaacatggcaagagaa

SEQ ID NO: 1606935 - DNA, 25 bp, Homo sapien
catggcaagagaaaaagacgttacc

SEQ ID NO: 1606936 - DNA, 25 bp, Homo sapien
cctgaggtgggtttagagcagttac

SEQ ID NO: 1606937 - DNA, 25 bp, Homo sapien
ccctgaggtgggtttagagcagtta

SEQ ID NO: 1606938 - DNA, 25 bp, Homo sapien
cagtttcatcctcggcgaggatcac

SEQ ID NO: 1606939 - DNA, 25 bp, Homo sapien
cccgtcagtttcatcctcggcgagg

SEQ ID NO: 1606940 - DNA, 25 bp, Homo sapien
tcatcctcggcgaggatcacctctt

SEQ ID NO: 1606941 - DNA, 25 bp, Homo sapien
tgctccccgtcagtttcatcctcgg

SEQ ID NO: 1606942 - DNA, 25 bp, Homo sapien
gcatgactctctttgtactccgtgg

SEQ ID NO: 1606943 - DNA, 25 bp, Homo sapien
gccgggatgtaaaccagcgtctgat

SEQ ID NO: 1606944 - DNA, 25 bp, Homo sapien
agcttagccttctccaaactgcatg

SEQ ID NO: 1606945 - DNA, 25 bp, Homo sapien
tcaagttacgtgatgtcagatcctg

SEQ ID NO: 1606946 - DNA, 25 bp, Homo sapien
tgagatccactccatgtacccattg

SEQ ID NO: 1606947 - DNA, 25 bp, Homo sapien
tcacgttcaatctgttgttgccgcc

SEQ ID NO: 1606948 - DNA, 25 bp, Homo sapien
tcagcttcagaaaagcccgccggtt

SEQ ID NO: 1606949 - DNA, 25 bp, Homo sapien
ttgccgcctcagcttcagaaaagcc

SEQ ID NO: 1606950 - DNA, 25 bp, Homo sapien
ctggagaagcatagaaaagccagag

SEQ ID NO: 1606951 - DNA, 25 bp, Homo sapien
gaagcatagaaaagccagagtatgg

SEQ ID NO: 1606952 - DNA, 25 bp, Homo sapien
gagaagcatagaaaagccagagtat

SEQ ID NO: 1606953 - DNA, 25 bp, Homo sapien
tggagaagcatagaaaagccagagt

SEQ ID NO: 1606954 - DNA, 25 bp, Homo sapien
aaccagttccaagtgttccctgagg

SEQ ID NO: 1606955 - DNA, 25 bp, Homo sapien
gaagtacaaccagttccaagtgttc

SEQ ID NO: 1606956 - DNA, 25 bp, Homo sapien
gggatgaagtacaaccagttccaag

SEQ ID NO: 1606957 - DNA, 25 bp, Homo sapien
aagtgttccctgaggcatcgttgct

SEQ ID NO: 1606958 - DNA, 25 bp, Homo sapien
gggaagctcggttctcttgtggctc

SEQ ID NO: 1606959 - DNA, 25 bp, Homo sapien
gaagctcggttctcttgtggctctg

SEQ ID NO: 1606960 - DNA, 25 bp, Homo sapien
gagttgactgggactcagatagaac

SEQ ID NO: 1606961 - DNA, 25 bp, Homo sapien
cagatagaacctgacaggtgaggga

SEQ ID NO: 1606962 - DNA, 25 bp, Homo sapien
catccaaagggtaaagctctctctt

SEQ ID NO: 1606963 - DNA, 25 bp, Homo sapien
tatgttctcctcacataacataatt

SEQ ID NO: 1606964 - DNA, 25 bp, Homo sapien
aaacatccaaagggtaaagctctct

SEQ ID NO: 1606965 - DNA, 25 bp, Homo sapien
atgttctcctcacataacataattg

SEQ ID NO: 1606966 - DNA, 25 bp, Homo sapien
ctgcatagtaggtgagggaaggtga

SEQ ID NO: 1606967 - DNA, 25 bp, Homo sapien
tgcatagtaggtgagggaaggtgaa

SEQ ID NO: 1606968 - DNA, 25 bp, Homo sapien
gagtgatcccgttgttgggcccttc

SEQ ID NO: 1606969 - DNA, 25 bp, Homo sapien
tgtagaggagatcagtccacccttc

SEQ ID NO: 1606970 - DNA, 25 bp, Homo sapien
aaacaggatgttgtcgaactgagtg

SEQ ID NO: 1606971 - DNA, 25 bp, Homo sapien
tgggcccttcccagtagggctgaca

SEQ ID NO: 1606972 - DNA, 25 bp, Homo sapien
aaaaaataggaggaggccgatctgc

SEQ ID NO: 1606973 - DNA, 25 bp, Homo sapien
ggtggtatgaaattttcccatataa

SEQ ID NO: 1606974 - DNA, 25 bp, Homo sapien
caaagcaggtggtatgaaattttcc

SEQ ID NO: 1606975 - DNA, 25 bp, Homo sapien
taaaattctaaccctatgattgcaa

SEQ ID NO: 1606976 - DNA, 25 bp, Homo sapien
gatcgacttcaggacgacttgtaaa

SEQ ID NO: 1606977 - DNA, 25 bp, Homo sapien
atcgacttcaggacgacttgtaaac

SEQ ID NO: 1606978 - DNA, 25 bp, Homo sapien
gggggtattgtcatcaatcagggac

SEQ ID NO: 1606979 - DNA, 25 bp, Homo sapien
gggtattgtcatcaatcagggaccc

SEQ ID NO: 1606980 - DNA, 25 bp, Homo sapien
tattgtcatcaatcagggaccccat

SEQ ID NO: 1606981 - DNA, 25 bp, Homo sapien
agacctaaatctgggggtattgtca

SEQ ID NO: 1606982 - DNA, 25 bp, Homo sapien
actcgaactgccctcagcgtccgta

SEQ ID NO: 1606983 - DNA, 25 bp, Homo sapien
agacaccagcttgagcggccgcagc

SEQ ID NO: 1606984 - DNA, 25 bp, Homo sapien
tgagcggccgcagcactcgaactgc

SEQ ID NO: 1606985 - DNA, 25 bp, Homo sapien
aggtcaaactccgtcccaactgtcg

SEQ ID NO: 1606986 - DNA, 25 bp, Homo sapien
catctcagacgggttaaatcctggc

SEQ ID NO: 1606987 - DNA, 25 bp, Homo sapien
ccaatgagtgagtgagagattcaac

SEQ ID NO: 1606988 - DNA, 25 bp, Homo sapien
cattatcgcagagctcatgtccggg

SEQ ID NO: 1606989 - DNA, 25 bp, Homo sapien
gcagcatagcacagtcagaacatct

SEQ ID NO: 1606990 - DNA, 25 bp, Homo sapien
atcagggtcacgtcagtcttgcggg

SEQ ID NO: 1606991 - DNA, 25 bp, Homo sapien
cgggggctgatggttgagggagaac

SEQ ID NO: 1606992 - DNA, 25 bp, Homo sapien
atgcatttcatacggcatcagggtc

SEQ ID NO: 1606993 - DNA, 25 bp, Homo sapien
catttcatacggcatcagggtcacg

SEQ ID NO: 1606994 - DNA, 25 bp, Homo sapien
tcagctccccttatatagatggtgc

SEQ ID NO: 1606995 - DNA, 25 bp, Homo sapien
gcccctaacagacctggtaagaatg

SEQ ID NO: 1606996 - DNA, 25 bp, Homo sapien
taagcattctcgtacctgcccctaa

SEQ ID NO: 1606997 - DNA, 25 bp, Homo sapien
tcattctggtgctccatgggtgccg

SEQ ID NO: 1606998 - DNA, 25 bp, Homo sapien
tcttgaacaattttggctttaacga

SEQ ID NO: 1606999 - DNA, 25 bp, Homo sapien
tgaacaattttggctttaacgacca

SEQ ID NO: 1607000 - DNA, 25 bp, Homo sapien
agaaaggaactcttcctgcttcttc

SEQ ID NO: 1607001 - DNA, 25 bp, Homo sapien
tcttctcttgaacaattttggcttt

SEQ ID NO: 1607002 - DNA, 25 bp, Homo sapien
gttcctatctctttaaggagtctct

SEQ ID NO: 1607003 - DNA, 25 bp, Homo sapien
cctatctctttaaggagtctcttca

SEQ ID NO: 1607004 - DNA, 25 bp, Homo sapien
tcctatctctttaaggagtctcttc

SEQ ID NO: 1607005 - DNA, 25 bp, Homo sapien
ctatctctttaaggagtctcttcat

SEQ ID NO: 1607006 - DNA, 25 bp, Homo sapien
ttttccccacaaagcccaggctctc

SEQ ID NO: 1607007 - DNA, 25 bp, Homo sapien
ctccacctttctttttctgcttcgt

SEQ ID NO: 1607008 - DNA, 25 bp, Homo sapien
tgcttcgttttccccacaaagccca

SEQ ID NO: 1607009 - DNA, 25 bp, Homo sapien
ttctgcttcgttttccccacaaagc

SEQ ID NO: 1607010 - DNA, 25 bp, Homo sapien
ctttgaattcagacatcatggtcat

SEQ ID NO: 1607011 - DNA, 25 bp, Homo sapien
aaggggactgtgtactgaaggaaca

SEQ ID NO: 1607012 - DNA, 25 bp, Homo sapien
aggctcgattgtgttgtaggatgaa

SEQ ID NO: 1607013 - DNA, 25 bp, Homo sapien
actgaaggaacagtaaggtgtcctt

SEQ ID NO: 1607014 - DNA, 25 bp, Homo sapien
ttgaagggttcctggtgaggctcga

SEQ ID NO: 1607015 - DNA, 25 bp, Homo sapien
gaactttgctttcccgaatgatgga

SEQ ID NO: 1607016 - DNA, 25 bp, Homo sapien
tagagacaggtccattgatacaatc

SEQ ID NO: 1607017 - DNA, 25 bp, Homo sapien
ttgcttggctcattcaggactgttg

SEQ ID NO: 1607018 - DNA, 25 bp, Homo sapien
cccgaatgatggagtattggccgtg

SEQ ID NO: 1607019 - DNA, 25 bp, Homo sapien
tgatagggtgtgaggcgaagagagt

SEQ ID NO: 1607020 - DNA, 25 bp, Homo sapien
gtgatagggtgtgaggcgaagagag

SEQ ID NO: 1607021 - DNA, 25 bp, Homo sapien
gatagggtgtgaggcgaagagagtt

SEQ ID NO: 1607022 - DNA, 25 bp, Homo sapien
tgtgatagggtgtgaggcgaagaga

SEQ ID NO: 1607023 - DNA, 25 bp, Homo sapien
ctgggagttgaggtataaagactta

SEQ ID NO: 1607024 - DNA, 25 bp, Homo sapien
tgggagttgaggtataaagacttaa

SEQ ID NO: 1607025 - DNA, 25 bp, Homo sapien
gcagccactcgtccaggtcagaaag

SEQ ID NO: 1607026 - DNA, 25 bp, Homo sapien
aggtcagaaagcgactgccaagaac

SEQ ID NO: 1607027 - DNA, 25 bp, Homo sapien
cagaaagcgactgccaagaactcac

SEQ ID NO: 1607028 - DNA, 25 bp, Homo sapien
agccactcgtccaggtcagaaagcg

SEQ ID NO: 1607029 - DNA, 25 bp, Homo sapien
gaagcgctgtgttaactgtgcaact

SEQ ID NO: 1607030 - DNA, 25 bp, Homo sapien
aatctgtcagcttgcatccggaggg

SEQ ID NO: 1607031 - DNA, 25 bp, Homo sapien
agtcagccagctgccaatctgtcag

SEQ ID NO: 1607032 - DNA, 25 bp, Homo sapien
tgcacgctcggtatgtgggtcccga

SEQ ID NO: 1607033 - DNA, 25 bp, Homo sapien
ggatgtcacagccaatcacgtagac

SEQ ID NO: 1607034 - DNA, 25 bp, Homo sapien
atgtcacagccaatcacgtagaccc

SEQ ID NO: 1607035 - DNA, 25 bp, Homo sapien
acagccaatcacgtagaccccgaga

SEQ ID NO: 1607036 - DNA, 25 bp, Homo sapien
agccaatcacgtagaccccgagagc

SEQ ID NO: 1607037 - DNA, 25 bp, Homo sapien
tctgaagttgatctctacgccggcc

SEQ ID NO: 1607038 - DNA, 25 bp, Homo sapien
atgctctctgaagttgatctctacg

SEQ ID NO: 1607039 - DNA, 25 bp, Homo sapien
tctacgccggcctcggtttccataa

SEQ ID NO: 1607040 - DNA, 25 bp, Homo sapien
agttgatctctacgccggcctcggt

SEQ ID NO: 1607041 - DNA, 25 bp, Homo sapien
cactgaccggctatcttaggcataa

SEQ ID NO: 1607042 - DNA, 25 bp, Homo sapien
gattgcaaaaccaaacactgaccgg

SEQ ID NO: 1607043 - DNA, 25 bp, Homo sapien
gaaatcagcaggaacaatgtagcca

SEQ ID NO: 1607044 - DNA, 25 bp, Homo sapien
ggatttttaggaaactcagataatc

SEQ ID NO: 1607045 - DNA, 25 bp, Homo sapien
acttccattgcccaaaaagccaggg

SEQ ID NO: 1607046 - DNA, 25 bp, Homo sapien
taaaatccaatgatgcggcccggtg

SEQ ID NO: 1607047 - DNA, 25 bp, Homo sapien
ctggacctgccagaatccatggagc

SEQ ID NO: 1607048 - DNA, 25 bp, Homo sapien
catgagaggtgtatggtcaagacac

SEQ ID NO: 1607049 - DNA, 25 bp, Homo sapien
gtgaacacccaagcccatgagagct

SEQ ID NO: 1607050 - DNA, 25 bp, Homo sapien
aagtgcccagtaccataatatgccc

SEQ ID NO: 1607051 - DNA, 25 bp, Homo sapien
gagagctagcccagagtccttacaa

SEQ ID NO: 1607052 - DNA, 25 bp, Homo sapien
tgcatgggatcttgctaggttaccc

SEQ ID NO: 1607053 - DNA, 25 bp, Homo sapien
aaaattccaatgaagtatggttctg

SEQ ID NO: 1607054 - DNA, 25 bp, Homo sapien
tgattttaattccagcctcgaaaca

SEQ ID NO: 1607055 - DNA, 25 bp, Homo sapien
tccagcctcgaaacaaaaaattcca

SEQ ID NO: 1607056 - DNA, 25 bp, Homo sapien
gagcctttgtggaaggcaaacccaa

SEQ ID NO: 1607057 - DNA, 25 bp, Homo sapien
cagacatcggggtcttgtcatcatc

SEQ ID NO: 1607058 - DNA, 25 bp, Homo sapien
ctgctccagtgcgaggacgatgcaa

SEQ ID NO: 1607059 - DNA, 25 bp, Homo sapien
cagccgttcagacatcggggtcttg

SEQ ID NO: 1607060 - DNA, 25 bp, Homo sapien
tccagtgcgaggacgatgcaattcg

SEQ ID NO: 1607061 - DNA, 25 bp, Homo sapien
cctttggaccggctctggcactgaa

SEQ ID NO: 1607062 - DNA, 25 bp, Homo sapien
actcctccggttccctggtctcctg

SEQ ID NO: 1607063 - DNA, 25 bp, Homo sapien
gcccctcaatggcagggatgtgact

SEQ ID NO: 1607064 - DNA, 25 bp, Homo sapien
gtgacttcctttggaccggctctgg

SEQ ID NO: 1607065 - DNA, 25 bp, Homo sapien
ccgcacccccgcaagtgtccacaga

SEQ ID NO: 1607066 - DNA, 25 bp, Homo sapien
gcacccccgcaagtgtccacagaca

SEQ ID NO: 1607067 - DNA, 25 bp, Homo sapien
cacccccgcaagtgtccacagacat

SEQ ID NO: 1607068 - DNA, 25 bp, Homo sapien
cgcacccccgcaagtgtccacagac

SEQ ID NO: 1607069 - DNA, 25 bp, Homo sapien
gaatctgtcggtagcaagcctgttg

SEQ ID NO: 1607070 - DNA, 25 bp, Homo sapien
tacatcaacgaatctgtcggtagca

SEQ ID NO: 1607071 - DNA, 25 bp, Homo sapien
caagcctgttgcttcttgtgtggga

SEQ ID NO: 1607072 - DNA, 25 bp, Homo sapien
tctatatttacatcaacgaatctgt

SEQ ID NO: 1607073 - DNA, 25 bp, Homo sapien
ttctacatcatgttcagtgggagac

SEQ ID NO: 1607074 - DNA, 25 bp, Homo sapien
ccagtgttcctccgatggcctgagt

SEQ ID NO: 1607075 - DNA, 25 bp, Homo sapien
cagtgttcctccgatggcctgagtt

SEQ ID NO: 1607076 - DNA, 25 bp, Homo sapien
tgagtttctacatcatgttcagtgg

SEQ ID NO: 1607077 - DNA, 25 bp, Homo sapien
cagggagggctggaaagatgacatt

SEQ ID NO: 1607078 - DNA, 25 bp, Homo sapien
gagggctggaaagatgacattcacc

SEQ ID NO: 1607079 - DNA, 25 bp, Homo sapien
gctggaaagatgacattcaccttgg

SEQ ID NO: 1607080 - DNA, 25 bp, Homo sapien
tggaaagatgacattcaccttggca

SEQ ID NO: 1607081 - DNA, 25 bp, Homo sapien
ggccctatttgaatcacaattccag

SEQ ID NO: 1607082 - DNA, 25 bp, Homo sapien
tgagctcttcggcaatcatcagaga

SEQ ID NO: 1607083 - DNA, 25 bp, Homo sapien
tcatcagagaccctcatggccctat

SEQ ID NO: 1607084 - DNA, 25 bp, Homo sapien
aaggtgtgtggtcaagacggcttgc

SEQ ID NO: 1607085 - DNA, 25 bp, Homo sapien
cattgatggcttcaagtttgaccca

SEQ ID NO: 1607086 - DNA, 25 bp, Homo sapien
ttaattgtcattgatggcttcaagt

SEQ ID NO: 1607087 - DNA, 25 bp, Homo sapien
tgtcattgatggcttcaagtttgac

SEQ ID NO: 1607088 - DNA, 25 bp, Homo sapien
taattgtcattgatggcttcaagtt

SEQ ID NO: 1607089 - DNA, 25 bp, Homo sapien
ccagggacccatccagcccgttcat

SEQ ID NO: 1607090 - DNA, 25 bp, Homo sapien
gataggggactcatcgctgagcccc

SEQ ID NO: 1607091 - DNA, 25 bp, Homo sapien
ggaactgtgcggagaagcggcacat

SEQ ID NO: 1607092 - DNA, 25 bp, Homo sapien
ctggttggaactgtgcggagaagcg

SEQ ID NO: 1607093 - DNA, 25 bp, Homo sapien
gctgctggggttcgggcaaaaggat

SEQ ID NO: 1607094 - DNA, 25 bp, Homo sapien
tgctgctggggttcgggcaaaagga

SEQ ID NO: 1607095 - DNA, 25 bp, Homo sapien
gtgatctttttggcgtattttctca

SEQ ID NO: 1607096 - DNA, 25 bp, Homo sapien
cggtgatctttttggcgtattttct

SEQ ID NO: 1607097 - DNA, 25 bp, Homo sapien
ggtgatctttttggcgtattttctc

SEQ ID NO: 1607098 - DNA, 25 bp, Homo sapien
taaccgtgaggcagttctgtcggac

SEQ ID NO: 1607099 - DNA, 25 bp, Homo sapien
ggcatctcgtctccgaagcgggcca

SEQ ID NO: 1607100 - DNA, 25 bp, Homo sapien
tgcgccattgactgcttgtacatcc

SEQ ID NO: 1607101 - DNA, 25 bp, Homo sapien
ttgtacatcctttgcgccccgggct

SEQ ID NO: 1607102 - DNA, 25 bp, Homo sapien
tgcaaagagcaaagggctccgggtt

SEQ ID NO: 1607103 - DNA, 25 bp, Homo sapien
gcaaagagcaaagggctccgggtta

SEQ ID NO: 1607104 - DNA, 25 bp, Homo sapien
ctgcaaagagcaaagggctccgggt

SEQ ID NO: 1607105 - DNA, 25 bp, Homo sapien
gccggggatagcagctcgggacatc

SEQ ID NO: 1607106 - DNA, 25 bp, Homo sapien
gggctcagaaggcggctgcccgggc

SEQ ID NO: 1607107 - DNA, 25 bp, Homo sapien
tggagctacgactgcggagacgctc

SEQ ID NO: 1607108 - DNA, 25 bp, Homo sapien
ctgcggcgaacgatgcggaagacgc

SEQ ID NO: 1607109 - DNA, 25 bp, Homo sapien
tagtgatgttaacctcgatcccttg

SEQ ID NO: 1607110 - DNA, 25 bp, Homo sapien
ttgagagaagaccattgcacagagg

SEQ ID NO: 1607111 - DNA, 25 bp, Homo sapien
tgcacagaggtgcagtgccgttctc

SEQ ID NO: 1607112 - DNA, 25 bp, Homo sapien
ctctttgcatcagatcagggtgtaa

SEQ ID NO: 1607113 - DNA, 25 bp, Homo sapien
gaactttccaaaacctgcgcatttg

SEQ ID NO: 1607114 - DNA, 25 bp, Homo sapien
tcacaaagtgaggaagattcggtgt

SEQ ID NO: 1607115 - DNA, 25 bp, Homo sapien
gacttgtcacatggtctaatcagga

SEQ ID NO: 1607116 - DNA, 25 bp, Homo sapien
ctggcatacagctttcatcctgggc

SEQ ID NO: 1607117 - DNA, 25 bp, Homo sapien
tatagaattctggtttggagatcat

SEQ ID NO: 1607118 - DNA, 25 bp, Homo sapien
aaatgtgaagtattgctccaacgta

SEQ ID NO: 1607119 - DNA, 25 bp, Homo sapien
tgggtatagaattctggtttggaga

SEQ ID NO: 1607120 - DNA, 25 bp, Homo sapien
tagaattctggtttggagatcattt

SEQ ID NO: 1607121 - DNA, 25 bp, Homo sapien
gaatagaggtaaagggatacagaga

SEQ ID NO: 1607122 - DNA, 25 bp, Homo sapien
gaaaggcatatgatgctagaaaaat

SEQ ID NO: 1607123 - DNA, 25 bp, Homo sapien
gagcggccagtccttatctttatac

SEQ ID NO: 1607124 - DNA, 25 bp, Homo sapien
caataagagcgaattagaatgttga

SEQ ID NO: 1607125 - DNA, 25 bp, Homo sapien
tcatcccaggcacctaatttttatt

SEQ ID NO: 1607126 - DNA, 25 bp, Homo sapien
ccaccacgctggcaaaactctttaa

SEQ ID NO: 1607127 - DNA, 25 bp, Homo sapien
taagtgcacaggttagtagattaag

SEQ ID NO: 1607128 - DNA, 25 bp, Homo sapien
tctctctttctaattgtggcaaaat

SEQ ID NO: 1607129 - DNA, 25 bp, Homo sapien
cttccatgggcttcctgtcccatgt

SEQ ID NO: 1607130 - DNA, 25 bp, Homo sapien
gggcttcctgtcccatgtagatggc

SEQ ID NO: 1607131 - DNA, 25 bp, Homo sapien
ttccatgggcttcctgtcccatgta

SEQ ID NO: 1607132 - DNA, 25 bp, Homo sapien
cctgtcccatgtagatggccaccat

SEQ ID NO: 1607133 - DNA, 25 bp, Homo sapien
ctagcagctaggacccaatgccggg

SEQ ID NO: 1607134 - DNA, 25 bp, Homo sapien
ttgctgtccactgaaagcgcctact

SEQ ID NO: 1607135 - DNA, 25 bp, Homo sapien
gccagggtggccttctggtcatgca

SEQ ID NO: 1607136 - DNA, 25 bp, Homo sapien
gtggccttctggtcatgcagatgga

SEQ ID NO: 1607137 - DNA, 25 bp, Homo sapien
taggttgcagtttaattgtgatgtc

SEQ ID NO: 1607138 - DNA, 25 bp, Homo sapien
tggcagctaatcacagtgggtccct

SEQ ID NO: 1607139 - DNA, 25 bp, Homo sapien
ttaattgtgatgtctaaacaaaaca

SEQ ID NO: 1607140 - DNA, 25 bp, Homo sapien
aaagagagctctgatttctaagtag

SEQ ID NO: 1607141 - DNA, 25 bp, Homo sapien
gatgacatctcggtgatccaccacg

SEQ ID NO: 1607142 - DNA, 25 bp, Homo sapien
ctgtggattttgtgggcctggtggg

SEQ ID NO: 1607143 - DNA, 25 bp, Homo sapien
tgggccaagatgacatctcggtgat

SEQ ID NO: 1607144 - DNA, 25 bp, Homo sapien
caagatgacatctcggtgatccacc

SEQ ID NO: 1607145 - DNA, 25 bp, Homo sapien
tgggcgtgccccgagctgcggttgt

SEQ ID NO: 1607146 - DNA, 25 bp, Homo sapien
cccgagctgcggttgtgcagggcgt

SEQ ID NO: 1607147 - DNA, 25 bp, Homo sapien
gcgtgccccgagctgcggttgtgca

SEQ ID NO: 1607148 - DNA, 25 bp, Homo sapien
tgcggttgtgcagggcgtcatagta

SEQ ID NO: 1607149 - DNA, 25 bp, Homo sapien
ctcgctcagaaatcccagggtcttc

SEQ ID NO: 1607150 - DNA, 25 bp, Homo sapien
acatccacgggcctcgctcagaaat

SEQ ID NO: 1607151 - DNA, 25 bp, Homo sapien
ggaagacttcaacatccacgggcct

SEQ ID NO: 1607152 - DNA, 25 bp, Homo sapien
caggaagacttcaacatccacgggc

SEQ ID NO: 1607153 - DNA, 25 bp, Homo sapien
ggactggcctgaattgccatggcaa

SEQ ID NO: 1607154 - DNA, 25 bp, Homo sapien
atacgccaggtatcggtggtcccca

SEQ ID NO: 1607155 - DNA, 25 bp, Homo sapien
gctgccaagcctggactggcctgaa

SEQ ID NO: 1607156 - DNA, 25 bp, Homo sapien
caaccggatggcacctggagatgct

SEQ ID NO: 1607157 - DNA, 25 bp, Homo sapien
catggcccacccagtggaaagaaga

SEQ ID NO: 1607158 - DNA, 25 bp, Homo sapien
ggtcccgagggtcccatctcgtcag

SEQ ID NO: 1607159 - DNA, 25 bp, Homo sapien
agtggtcagcactgcgagtcctcca

SEQ ID NO: 1607160 - DNA, 25 bp, Homo sapien
gggtccgagctatctgaagtccatg

SEQ ID NO: 1607161 - DNA, 25 bp, Homo sapien
ttgtgcagaaaaggcagcctgaaag

SEQ ID NO: 1607162 - DNA, 25 bp, Homo sapien
agggacgcacacaacccatagcaac

SEQ ID NO: 1607163 - DNA, 25 bp, Homo sapien
agagggacgcacacaacccatagca

SEQ ID NO: 1607164 - DNA, 25 bp, Homo sapien
gagaattgtgcagaaaaggcagcct

SEQ ID NO: 1607165 - DNA, 25 bp, Homo sapien
tgcatccctgcaattcaggtcatct

SEQ ID NO: 1607166 - DNA, 25 bp, Homo sapien
ctgcatccctgcaattcaggtcatc

SEQ ID NO: 1607167 - DNA, 25 bp, Homo sapien
tcagcagaatgaatgcctttgccat

SEQ ID NO: 1607168 - DNA, 25 bp, Homo sapien
atcagcagaatgaatgcctttgcca

SEQ ID NO: 1607169 - DNA, 25 bp, Homo sapien
catcagcagaatgaatgcctttgcc

SEQ ID NO: 1607170 - DNA, 25 bp, Homo sapien
tggatcattaaagatgttgcaggtg

SEQ ID NO: 1607171 - DNA, 25 bp, Homo sapien
gtcaaggagtttggacttctttcca

SEQ ID NO: 1607172 - DNA, 25 bp, Homo sapien
cagccaaccaaatttggcccgtggg

SEQ ID NO: 1607173 - DNA, 25 bp, Homo sapien
taatttgtcaaaccctggtcaagga

SEQ ID NO: 1607174 - DNA, 25 bp, Homo sapien
catagagacacaagggaggaacacc

SEQ ID NO: 1607175 - DNA, 25 bp, Homo sapien
cgagacatagagacacaagggagga

SEQ ID NO: 1607176 - DNA, 25 bp, Homo sapien
gacatagagacacaagggaggaaca

SEQ ID NO: 1607177 - DNA, 25 bp, Homo sapien
gagacgagacatagagacacaaggg

SEQ ID NO: 1607178 - DNA, 25 bp, Homo sapien
gcagaatcctgcaacatagtgtggg

SEQ ID NO: 1607179 - DNA, 25 bp, Homo sapien
gcgaggagatgttgaggtcctccat

SEQ ID NO: 1607180 - DNA, 25 bp, Homo sapien
cgcagaatcctgcaacatagtgtgg

SEQ ID NO: 1607181 - DNA, 25 bp, Homo sapien
tagtgtgggaagcttgtagcgagga

SEQ ID NO: 1607182 - DNA, 25 bp, Homo sapien
gcgtcattcatcacttgcacccaga

SEQ ID NO: 1607183 - DNA, 25 bp, Homo sapien
cattcactcgcaagagcgtcattca

SEQ ID NO: 1607184 - DNA, 25 bp, Homo sapien
taactgagtcattatccacacacca

SEQ ID NO: 1607185 - DNA, 25 bp, Homo sapien
aattaagcccgggcggcccatgcct

SEQ ID NO: 1607186 - DNA, 25 bp, Homo sapien
gccattctgatggagttatagttaa

SEQ ID NO: 1607187 - DNA, 25 bp, Homo sapien
aagtaccttattgtatattggtcac

SEQ ID NO: 1607188 - DNA, 25 bp, Homo sapien
tttctctactctgcaagggtgttaa

SEQ ID NO: 1607189 - DNA, 25 bp, Homo sapien
tctgcaagggtgttaagtaccttat

SEQ ID NO: 1607190 - DNA, 25 bp, Homo sapien
caaaagatggagattctcctttgat

SEQ ID NO: 1607191 - DNA, 25 bp, Homo sapien
cagttgaagtcgtgtttggcaaaga

SEQ ID NO: 1607192 - DNA, 25 bp, Homo sapien
tcctttgatggtgtcagcgggtgca

SEQ ID NO: 1607193 - DNA, 25 bp, Homo sapien
gatattgacagcctgctagtttcca

SEQ ID NO: 1607194 - DNA, 25 bp, Homo sapien
aagggaggtggggagctgccaactc

SEQ ID NO: 1607195 - DNA, 25 bp, Homo sapien
gggagctgccaactcctccacgacc

SEQ ID NO: 1607196 - DNA, 25 bp, Homo sapien
ggaggtggggagctgccaactcctc

SEQ ID NO: 1607197 - DNA, 25 bp, Homo sapien
agctgccaactcctccacgacccat

SEQ ID NO: 1607198 - DNA, 25 bp, Homo sapien
gccccagaagggtcgaaggcgccgc

SEQ ID NO: 1607199 - DNA, 25 bp, Homo sapien
tttcagcgggcagcggagctgtctc

SEQ ID NO: 1607200 - DNA, 25 bp, Homo sapien
gatttcagcgggcagcggagctgtc

SEQ ID NO: 1607201 - DNA, 25 bp, Homo sapien
ccgaccgccgggaggatggatttca

SEQ ID NO: 1607202 - DNA, 25 bp, Homo sapien
ccgcccgaccgccgggaggatggat

SEQ ID NO: 1607203 - DNA, 25 bp, Homo sapien
gcatgcatcaaagctgtccagctgg

SEQ ID NO: 1607204 - DNA, 25 bp, Homo sapien
atcaaagctgtccagctggtcccca

SEQ ID NO: 1607205 - DNA, 25 bp, Homo sapien
ccacatcagccaagtcctcagacat

SEQ ID NO: 1607206 - DNA, 25 bp, Homo sapien
aggccaaagcatgcatcaaagctgt

SEQ ID NO: 1607207 - DNA, 25 bp, Homo sapien
cacacttggtgttagaaggcccgta

SEQ ID NO: 1607208 - DNA, 25 bp, Homo sapien
catttttcactggacggacggtgcc

SEQ ID NO: 1607209 - DNA, 25 bp, Homo sapien
tacacctggctacaatgaaggctgg

SEQ ID NO: 1607210 - DNA, 25 bp, Homo sapien
agcaaactttggtctgggcacggtg

SEQ ID NO: 1607211 - DNA, 25 bp, Homo sapien
gatcacgccacaggactccagcttg

SEQ ID NO: 1607212 - DNA, 25 bp, Homo sapien
agcttgggcaacagagacttagtct

SEQ ID NO: 1607213 - DNA, 25 bp, Homo sapien
acgccacaggactccagcttgggca

SEQ ID NO: 1607214 - DNA, 25 bp, Homo sapien
cttgggcaacagagacttagtctca

SEQ ID NO: 1607215 - DNA, 25 bp, Homo sapien
tggctgggctacgaattaaattgac

SEQ ID NO: 1607216 - DNA, 25 bp, Homo sapien
ggctctaagagaagtatccacccac

SEQ ID NO: 1607217 - DNA, 25 bp, Homo sapien
tgtaaacagacagggcaaaagccat

SEQ ID NO: 1607218 - DNA, 25 bp, Homo sapien
caaaagccattcacctgtgcagaag

SEQ ID NO: 1607219 - DNA, 25 bp, Homo sapien
acatggcggacaatgagcaggtgct

SEQ ID NO: 1607220 - DNA, 25 bp, Homo sapien
ggctctacacggcacacagtgggtg

SEQ ID NO: 1607221 - DNA, 25 bp, Homo sapien
aactacatcgagatgcagacggacc

SEQ ID NO: 1607222 - DNA, 25 bp, Homo sapien
actacgtgatcgtgagtggcgccca

SEQ ID NO: 1607223 - DNA, 25 bp, Homo sapien
gacagggccttccatctagagccca

SEQ ID NO: 1607224 - DNA, 25 bp, Homo sapien
cacttgttcctagtgcagggagctc

SEQ ID NO: 1607225 - DNA, 25 bp, Homo sapien
ctcagacagggccttccatctagag

SEQ ID NO: 1607226 - DNA, 25 bp, Homo sapien
acttgttcctagtgcagggagctca

SEQ ID NO: 1607227 - DNA, 25 bp, Homo sapien
aaaaatccatgatgaggccaggctt

SEQ ID NO: 1607228 - DNA, 25 bp, Homo sapien
gagtgccacaccctaacctagtctg

SEQ ID NO: 1607229 - DNA, 25 bp, Homo sapien
ttttgaagaggctagaaccccgcac

SEQ ID NO: 1607230 - DNA, 25 bp, Homo sapien
gagacaccatgttagtcgtggctgg

SEQ ID NO: 1607231 - DNA, 25 bp, Homo sapien
gaaaggcgactgagccaccagtttg

SEQ ID NO: 1607232 - DNA, 25 bp, Homo sapien
ggttttgccccacgcttgtgcctta

SEQ ID NO: 1607233 - DNA, 25 bp, Homo sapien
cagtccgtcggaactcagaatggca

SEQ ID NO: 1607234 - DNA, 25 bp, Homo sapien
cacgccggatcccatgcagtttagg

SEQ ID NO: 1607235 - DNA, 25 bp, Homo sapien
gcctccacaggtttaacccagaaca

SEQ ID NO: 1607236 - DNA, 25 bp, Homo sapien
agcactgggcttcacctagaacttc

SEQ ID NO: 1607237 - DNA, 25 bp, Homo sapien
tcctgaggacgctggccccagtgca

SEQ ID NO: 1607238 - DNA, 25 bp, Homo sapien
caatgaccaggaagatacagtcact

SEQ ID NO: 1607239 - DNA, 25 bp, Homo sapien
ctatcatgagacaacactaagggaa

SEQ ID NO: 1607240 - DNA, 25 bp, Homo sapien
caactctggggatcataattcaaca

SEQ ID NO: 1607241 - DNA, 25 bp, Homo sapien
tgagacaacactaagggaatggtgc

SEQ ID NO: 1607242 - DNA, 25 bp, Homo sapien
agagcgaagggggagacactacaca

SEQ ID NO: 1607243 - DNA, 25 bp, Homo sapien
accagcggtgtgaccctgtgcaagc

SEQ ID NO: 1607244 - DNA, 25 bp, Homo sapien
aaaggctgcgagttgcaacttccga

SEQ ID NO: 1607245 - DNA, 25 bp, Homo sapien
gagtcatcacgcctgaccctctaat

SEQ ID NO: 1607246 - DNA, 25 bp, Homo sapien
tgtgcaagccgtgttatgtctctgt

SEQ ID NO: 1607247 - DNA, 25 bp, Homo sapien
tccttgagcccctaggaagggccaa

SEQ ID NO: 1607248 - DNA, 25 bp, Homo sapien
gaagggcacctagctaggacgtttg

SEQ ID NO: 1607249 - DNA, 25 bp, Homo sapien
gaagacaccccgatcaaaagcggga

SEQ ID NO: 1607250 - DNA, 25 bp, Homo sapien
gctaggacgtttgatttaggacctg

SEQ ID NO: 1607251 - DNA, 25 bp, Homo sapien
gcatttaacggtctggaggcccaag

SEQ ID NO: 1607252 - DNA, 25 bp, Homo sapien
ggtcaacccagcctgataccggaag

SEQ ID NO: 1607253 - DNA, 25 bp, Homo sapien
ttctgtccacgactacccagggtgg

SEQ ID NO: 1607254 - DNA, 25 bp, Homo sapien
taattccggcgcattgggagactaa

SEQ ID NO: 1607255 - DNA, 25 bp, Homo sapien
gtacacaaaccaactgtgtttcagc

SEQ ID NO: 1607256 - DNA, 25 bp, Homo sapien
cacaaaccaactgtgtttcagctca

SEQ ID NO: 1607257 - DNA, 25 bp, Homo sapien
agctcagtaggcacgggaggcagag

SEQ ID NO: 1607258 - DNA, 25 bp, Homo sapien
aaaccaactgtgtttcagctcagta

SEQ ID NO: 1607259 - DNA, 25 bp, Homo sapien
ttggtgtggaccctgctcacaagca

SEQ ID NO: 1607260 - DNA, 25 bp, Homo sapien
ctggggggcggaacttagccactgt

SEQ ID NO: 1607261 - DNA, 25 bp, Homo sapien
gtggaccctgctcacaagcagctaa

SEQ ID NO: 1607262 - DNA, 25 bp, Homo sapien
tgtgaacacgacttggtgtggaccc

SEQ ID NO: 1607263 - DNA, 25 bp, Homo sapien
tgacaggaagcaaatcccatcccca

SEQ ID NO: 1607264 - DNA, 25 bp, Homo sapien
tggcaatgtgatttgtgacaggaag

SEQ ID NO: 1607265 - DNA, 25 bp, Homo sapien
ggtcggttggaaatccctggcaatg

SEQ ID NO: 1607266 - DNA, 25 bp, Homo sapien
gtcggttggaaatccctggcaatgt

SEQ ID NO: 1607267 - DNA, 25 bp, Homo sapien
caaggcattctcagggtgtgggcca

SEQ ID NO: 1607268 - DNA, 25 bp, Homo sapien
taacgctttgcctaatgggcccaga

SEQ ID NO: 1607269 - DNA, 25 bp, Homo sapien
caatcatggtgcacttctcaggctc

SEQ ID NO: 1607270 - DNA, 25 bp, Homo sapien
taaacatgatcacgacagagctgct

SEQ ID NO: 1607271 - DNA, 25 bp, Homo sapien
agaaggacattacacggtggcccca

SEQ ID NO: 1607272 - DNA, 25 bp, Homo sapien
cgtgacaaactcaattgcctggtgt

SEQ ID NO: 1607273 - DNA, 25 bp, Homo sapien
tccccacatccggagaaggacatta

SEQ ID NO: 1607274 - DNA, 25 bp, Homo sapien
ggtggccccagctcaccgtgacaaa

SEQ ID NO: 1607275 - DNA, 25 bp, Homo sapien
tcgagccagcgaggggattggcgcc

SEQ ID NO: 1607276 - DNA, 25 bp, Homo sapien
caggatctgagagccctcgagccag

SEQ ID NO: 1607277 - DNA, 25 bp, Homo sapien
ggattggcgcccagatgagggacag

SEQ ID NO: 1607278 - DNA, 25 bp, Homo sapien
gggacagcgaggccacgacccacat

SEQ ID NO: 1607279 - DNA, 25 bp, Homo sapien
gagggggaggagactgcgctgagag

SEQ ID NO: 1607280 - DNA, 25 bp, Homo sapien
ctaccgtggagtgggaggtggcggg

SEQ ID NO: 1607281 - DNA, 25 bp, Homo sapien
gggaggagactgcgctgagagctga

SEQ ID NO: 1607282 - DNA, 25 bp, Homo sapien
gaggagactgcgctgagagctgaga

SEQ ID NO: 1607283 - DNA, 25 bp, Homo sapien
agtcccgccggcctccacagctggg

SEQ ID NO: 1607284 - DNA, 25 bp, Homo sapien
ccacagctgggagggcgctggactc

SEQ ID NO: 1607285 - DNA, 25 bp, Homo sapien
ctgggagggcgctggactctgctgc

SEQ ID NO: 1607286 - DNA, 25 bp, Homo sapien
cggcctccacagctgggagggcgct

SEQ ID NO: 1607287 - DNA, 25 bp, Homo sapien
tcagcgagcaggacagctggccggt

SEQ ID NO: 1607288 - DNA, 25 bp, Homo sapien
cagcgagcaggacagctggccggtc

SEQ ID NO: 1607289 - DNA, 25 bp, Homo sapien
tgaaggcagctggacgatgtgggag

SEQ ID NO: 1607290 - DNA, 25 bp, Homo sapien
gacatccactctcctggacctggaa

SEQ ID NO: 1607291 - DNA, 25 bp, Homo sapien
ggagacatccactctcctggacctg

SEQ ID NO: 1607292 - DNA, 25 bp, Homo sapien
agctggacgatgtgggagggtgaac

SEQ ID NO: 1607293 - DNA, 25 bp, Homo sapien
agccgcggtggccactgcgggcagg

SEQ ID NO: 1607294 - DNA, 25 bp, Homo sapien
ggagcctcagccagggtacgatcat

SEQ ID NO: 1607295 - DNA, 25 bp, Homo sapien
ccgcggtggccactgcgggcagggg

SEQ ID NO: 1607296 - DNA, 25 bp, Homo sapien
gccgcggtggccactgcgggcaggg

SEQ ID NO: 1607297 - DNA, 25 bp, Homo sapien
cgcgcgcgttcgtgaaggctgctcc

SEQ ID NO: 1607298 - DNA, 25 bp, Homo sapien
gggcgctcggaaatcgaatgccaga

SEQ ID NO: 1607299 - DNA, 25 bp, Homo sapien
ctcgggcctgcggagaccgatcctg

SEQ ID NO: 1607300 - DNA, 25 bp, Homo sapien
ggcggcatctctgcgtctcgccttt

SEQ ID NO: 1607301 - DNA, 25 bp, Homo sapien
cctaaaatttgcaaatccggacagg

SEQ ID NO: 1607302 - DNA, 25 bp, Homo sapien
tgaaccatccatacttggctcagga

SEQ ID NO: 1607303 - DNA, 25 bp, Homo sapien
cctttgtgttgtccatggaagacca

SEQ ID NO: 1607304 - DNA, 25 bp, Homo sapien
gaagaccaacttccgggcaactgaa

SEQ ID NO: 1607305 - DNA, 25 bp, Homo sapien
tcttccggtagttaaggcgcttgaa

SEQ ID NO: 1607306 - DNA, 25 bp, Homo sapien
gagggatattcccaggccccttgga

SEQ ID NO: 1607307 - DNA, 25 bp, Homo sapien
cttgaaagcttccaggtcccggtgg

SEQ ID NO: 1607308 - DNA, 25 bp, Homo sapien
tgggtcccctcgagggatattccca

SEQ ID NO: 1607309 - DNA, 25 bp, Homo sapien
ctcagtggtcaccaggtgacagagg

SEQ ID NO: 1607310 - DNA, 25 bp, Homo sapien
gtcaccaatgactcaggtgcacaca

SEQ ID NO: 1607311 - DNA, 25 bp, Homo sapien
agccacatggtcaccaatgactcag

SEQ ID NO: 1607312 - DNA, 25 bp, Homo sapien
ggggccgcgcctcacagccacatgg

SEQ ID NO: 1607313 - DNA, 25 bp, Homo sapien
tgtagcacaggctgggcctgttgca

SEQ ID NO: 1607314 - DNA, 25 bp, Homo sapien
gctgggcctgttgcagcctttcttc

SEQ ID NO: 1607315 - DNA, 25 bp, Homo sapien
tgcacataaccagaaagggcctgtt

SEQ ID NO: 1607316 - DNA, 25 bp, Homo sapien
ccagaaagggcctgttgtagcacag

SEQ ID NO: 1607317 - DNA, 25 bp, Homo sapien
cagcagcagtgaggtgcctgaccct

SEQ ID NO: 1607318 - DNA, 25 bp, Homo sapien
acctaggggcttcacacttcagtcc

SEQ ID NO: 1607319 - DNA, 25 bp, Homo sapien
ccacctaggggcttcacacttcagt

SEQ ID NO: 1607320 - DNA, 25 bp, Homo sapien
cctgaccctcgctgcccacctaggg

SEQ ID NO: 1607321 - DNA, 25 bp, Homo sapien
acgatgaggccacgcacgacgttgg

SEQ ID NO: 1607322 - DNA, 25 bp, Homo sapien
gttggagagctcaacgatgaggcca

SEQ ID NO: 1607323 - DNA, 25 bp, Homo sapien
ttcaggttggagagctcaacgatga

SEQ ID NO: 1607324 - DNA, 25 bp, Homo sapien
gagagctcaacgatgaggccacgca

SEQ ID NO: 1607325 - DNA, 25 bp, Homo sapien
tggaggcctcagaggcctggatccc

SEQ ID NO: 1607326 - DNA, 25 bp, Homo sapien
agaggcctggatccccacgaaggtc

SEQ ID NO: 1607327 - DNA, 25 bp, Homo sapien
ctggaggcctcagaggcctggatcc

SEQ ID NO: 1607328 - DNA, 25 bp, Homo sapien
ctcagaggcctggatccccacgaag

SEQ ID NO: 1607329 - DNA, 25 bp, Homo sapien
agaggcaggttcaagtgccaggtaa

SEQ ID NO: 1607330 - DNA, 25 bp, Homo sapien
gcgggggagagggtgccctcctcac

SEQ ID NO: 1607331 - DNA, 25 bp, Homo sapien
ttcaagtgccaggtaacagagaggg

SEQ ID NO: 1607332 - DNA, 25 bp, Homo sapien
gcaggttcaagtgccaggtaacaga

SEQ ID NO: 1607333 - DNA, 25 bp, Homo sapien
ggccactgcaacagggtctccattg

SEQ ID NO: 1607334 - DNA, 25 bp, Homo sapien
ggaaccagaagtcacgctgatgctt

SEQ ID NO: 1607335 - DNA, 25 bp, Homo sapien
gcctgggtcgggcaagctctgcaca

SEQ ID NO: 1607336 - DNA, 25 bp, Homo sapien
ctggaaagagagcacaaggtgtgag

SEQ ID NO: 1607337 - DNA, 25 bp, Homo sapien
ggtgtgagtggtcgaggcctgggtc

SEQ ID NO: 1607338 - DNA, 25 bp, Homo sapien
aaacacaaagcgggggcaactgcgg

SEQ ID NO: 1607339 - DNA, 25 bp, Homo sapien
aaagcgggggcaactgcggtgaagt

SEQ ID NO: 1607340 - DNA, 25 bp, Homo sapien
tctttacgggtacagagaaaacaca

SEQ ID NO: 1607341 - DNA, 25 bp, Homo sapien
tgtctttacgggtacagagaaaaca

SEQ ID NO: 1607342 - DNA, 25 bp, Homo sapien
cttggctgaatgtgccacagacatc

SEQ ID NO: 1607343 - DNA, 25 bp, Homo sapien
caggagaatgaacgccaacggctgg

SEQ ID NO: 1607344 - DNA, 25 bp, Homo sapien
tatgtcgacaaccaccaaaaggcag

SEQ ID NO: 1607345 - DNA, 25 bp, Homo sapien
tgtaaatggtaagccctgagcccca

SEQ ID NO: 1607346 - DNA, 25 bp, Homo sapien
gaggcaaagcccttacacgttctgg

SEQ ID NO: 1607347 - DNA, 25 bp, Homo sapien
gggcttcgaagtcagaggcgtccag

SEQ ID NO: 1607348 - DNA, 25 bp, Homo sapien
gcaggaagtcgagttccacagctaa

SEQ ID NO: 1607349 - DNA, 25 bp, Homo sapien
aagtcagaggcgtccagggcatcct

SEQ ID NO: 1607350 - DNA, 25 bp, Homo sapien
tgtccagcaggaagtcgagttccac

SEQ ID NO: 1607351 - DNA, 25 bp, Homo sapien
tgcttctgattgacacatggacctg

SEQ ID NO: 1607352 - DNA, 25 bp, Homo sapien
tggtgtctggaatgccctgctgagc

SEQ ID NO: 1607353 - DNA, 25 bp, Homo sapien
ggtctcgttcgaggttctggccacc

SEQ ID NO: 1607354 - DNA, 25 bp, Homo sapien
tggtttccccagtgagcgaggtgca

SEQ ID NO: 1607355 - DNA, 25 bp, Homo sapien
cagaatcaatgcttggtaggtgttc

SEQ ID NO: 1607356 - DNA, 25 bp, Homo sapien
ctccccttcagaatcaatgcttggt

SEQ ID NO: 1607357 - DNA, 25 bp, Homo sapien
ccgggttccaggcaccaagaggcag

SEQ ID NO: 1607358 - DNA, 25 bp, Homo sapien
caatgcttggtaggtgttccttttg

SEQ ID NO: 1607359 - DNA, 25 bp, Homo sapien
gcactgtctgcctgcgttgggtccc

SEQ ID NO: 1607360 - DNA, 25 bp, Homo sapien
tcatcggccccttgttctgacaggt

SEQ ID NO: 1607361 - DNA, 25 bp, Homo sapien
tctgtctcaggcttgctgtcatcgg

SEQ ID NO: 1607362 - DNA, 25 bp, Homo sapien
gcatcctggactctgggcgctggac

SEQ ID NO: 1607363 - DNA, 25 bp, Homo sapien
ctgtggacagaaaaagactcagccc

SEQ ID NO: 1607364 - DNA, 25 bp, Homo sapien
gtggacagaaaaagactcagccccg

SEQ ID NO: 1607365 - DNA, 25 bp, Homo sapien
tgtggacagaaaaagactcagcccc

SEQ ID NO: 1607366 - DNA, 25 bp, Homo sapien
tggacagaaaaagactcagccccgg

SEQ ID NO: 1607367 - DNA, 25 bp, Homo sapien
tgccaaagaactccagggttaaatg

SEQ ID NO: 1607368 - DNA, 25 bp, Homo sapien
tgcacctgcgctgggctcagcctgg

SEQ ID NO: 1607369 - DNA, 25 bp, Homo sapien
ctccagggttaaatggggctgccga

SEQ ID NO: 1607370 - DNA, 25 bp, Homo sapien
agcctggctgattttagagccttac

SEQ ID NO: 1607371 - DNA, 25 bp, Homo sapien
actcccacggtcctcatccttcatc

SEQ ID NO: 1607372 - DNA, 25 bp, Homo sapien
ctggggaacaaacctcccgaatgag

SEQ ID NO: 1607373 - DNA, 25 bp, Homo sapien
gctccttttctggttgacggaggag

SEQ ID NO: 1607374 - DNA, 25 bp, Homo sapien
tggttgacggaggagccggcaggga

SEQ ID NO: 1607375 - DNA, 25 bp, Homo sapien
ctggttgacggaggagccggcaggg

SEQ ID NO: 1607376 - DNA, 25 bp, Homo sapien
ccttttctggttgacggaggagccg

SEQ ID NO: 1607377 - DNA, 25 bp, Homo sapien
cccgtgctgctgtgtagagggaaca

SEQ ID NO: 1607378 - DNA, 25 bp, Homo sapien
aacaggtcccaatttgccctctggc

SEQ ID NO: 1607379 - DNA, 25 bp, Homo sapien
cctcagggtgatgtaaacagcccaa

SEQ ID NO: 1607380 - DNA, 25 bp, Homo sapien
taaacagcccaacatggaactctgg

SEQ ID NO: 1607381 - DNA, 25 bp, Homo sapien
aagaggtgatgctttggccacgtcc

SEQ ID NO: 1607382 - DNA, 25 bp, Homo sapien
agccaccgggtgctgaagaggtgat

SEQ ID NO: 1607383 - DNA, 25 bp, Homo sapien
cccttgcatttctgcactaacttcc

SEQ ID NO: 1607384 - DNA, 25 bp, Homo sapien
tgcatttctgcactaacttccccat

SEQ ID NO: 1607385 - DNA, 25 bp, Homo sapien
tccgcagcttcttcctcttagtcat

SEQ ID NO: 1607386 - DNA, 25 bp, Homo sapien
ggtccgcagcttcttcctcttagtc

SEQ ID NO: 1607387 - DNA, 25 bp, Homo sapien
gaggtccgcagcttcttcctcttag

SEQ ID NO: 1607388 - DNA, 25 bp, Homo sapien
tgaggtccgcagcttcttcctctta

SEQ ID NO: 1607389 - DNA, 25 bp, Homo sapien
tgccccaggggtcagatggctccca

SEQ ID NO: 1607390 - DNA, 25 bp, Homo sapien
tgaggaccctctgtccttatcagaa

SEQ ID NO: 1607391 - DNA, 25 bp, Homo sapien
tcagttgggaataagtcgcttgaat

SEQ ID NO: 1607392 - DNA, 25 bp, Homo sapien
tgaattatccgcgttactctttttg

SEQ ID NO: 1607393 - DNA, 25 bp, Homo sapien
tcagaaacgagctctgcctggatca

SEQ ID NO: 1607394 - DNA, 25 bp, Homo sapien
caccgagaagtgaggactccacagg

SEQ ID NO: 1607395 - DNA, 25 bp, Homo sapien
tccggaggtgaaagatggaaaggcc

SEQ ID NO: 1607396 - DNA, 25 bp, Homo sapien
tccacaggccgagagcccacgtgaa

SEQ ID NO: 1607397 - DNA, 25 bp, Homo sapien
gagcccgtcggtgactgacagacgc

SEQ ID NO: 1607398 - DNA, 25 bp, Homo sapien
ccccacagatgtcgccgcccctcac

SEQ ID NO: 1607399 - DNA, 25 bp, Homo sapien
ctgaaccccacagatgtcgccgccc

SEQ ID NO: 1607400 - DNA, 25 bp, Homo sapien
aaccccacagatgtcgccgcccctc

SEQ ID NO: 1607401 - DNA, 25 bp, Homo sapien
tgaaccccacagatgtcgccgcccc

SEQ ID NO: 1607402 - DNA, 25 bp, Homo sapien
tgcctctttcccgcgccccgcgagg

SEQ ID NO: 1607403 - DNA, 25 bp, Homo sapien
tctgcctctttcccgcgccccgcga

SEQ ID NO: 1607404 - DNA, 25 bp, Homo sapien
ctctgcctctttcccgcgccccgcg

SEQ ID NO: 1607405 - DNA, 25 bp, Homo sapien
ctgcctctttcccgcgccccgcgag

SEQ ID NO: 1607406 - DNA, 25 bp, Homo sapien
gagcgacgcaaacaccgccctcgca

SEQ ID NO: 1607407 - DNA, 25 bp, Homo sapien
agcgacgcaaacaccgccctcgcag

SEQ ID NO: 1607408 - DNA, 25 bp, Homo sapien
gcgacagtcagcaccgccccagcca

SEQ ID NO: 1607409 - DNA, 25 bp, Homo sapien
ctcgcagcccgcgacagtcagcacc

SEQ ID NO: 1607410 - DNA, 25 bp, Homo sapien
gagttgtagtttcggctcggcagac

SEQ ID NO: 1607411 - DNA, 25 bp, Homo sapien
ggccaagcagggaagcgagggctcg

SEQ ID NO: 1607412 - DNA, 25 bp, Homo sapien
ccgacgaggagtgcaggactcagga

SEQ ID NO: 1607413 - DNA, 25 bp, Homo sapien
ctcaggaagggcgagtgcgcggcga

SEQ ID NO: 1607414 - DNA, 25 bp, Homo sapien
gatgcacaagaggaaaggacccccg

SEQ ID NO: 1607415 - DNA, 25 bp, Homo sapien
ccagccttgaagatgcacaagagga

SEQ ID NO: 1607416 - DNA, 25 bp, Homo sapien
ttgaagatgcacaagaggaaaggac

SEQ ID NO: 1607417 - DNA, 25 bp, Homo sapien
gaagatgcacaagaggaaaggaccc

SEQ ID NO: 1607418 - DNA, 25 bp, Homo sapien
cgagttgattgttagggattggacc

SEQ ID NO: 1607419 - DNA, 25 bp, Homo sapien
tggacccagctccaattatgtcagc

SEQ ID NO: 1607420 - DNA, 25 bp, Homo sapien
gattgaatgggagaaacgagttgat

SEQ ID NO: 1607421 - DNA, 25 bp, Homo sapien
tatgtcagcaagaggtacatttctg

SEQ ID NO: 1607422 - DNA, 25 bp, Homo sapien
aatcacacgtggctaggtcgcacag

SEQ ID NO: 1607423 - DNA, 25 bp, Homo sapien
aattcagtcctgacccacttagcat

SEQ ID NO: 1607424 - DNA, 25 bp, Homo sapien
tgctgtttggtgaccccagtgtgtg

SEQ ID NO: 1607425 - DNA, 25 bp, Homo sapien
ggtccctatatctgtcacccagtgt

SEQ ID NO: 1607426 - DNA, 25 bp, Homo sapien
ccaggccggcgtggtctgtgagcct

SEQ ID NO: 1607427 - DNA, 25 bp, Homo sapien
tgcctctgtgtctcggccagtggca

SEQ ID NO: 1607428 - DNA, 25 bp, Homo sapien
gcccctggtgggcgttgtctcctca

SEQ ID NO: 1607429 - DNA, 25 bp, Homo sapien
gagtatgccagctgtgtgcctctgt

SEQ ID NO: 1607430 - DNA, 25 bp, Homo sapien
gtccaccacacgcaggtttgggagc

SEQ ID NO: 1607431 - DNA, 25 bp, Homo sapien
ctgctccggattccctgccgtgtcc

SEQ ID NO: 1607432 - DNA, 25 bp, Homo sapien
aggaaggcctcagccgcgatgctcg

SEQ ID NO: 1607433 - DNA, 25 bp, Homo sapien
gctcgtcatgtgaagcctgttggcc

SEQ ID NO: 1607434 - DNA, 25 bp, Homo sapien
acagagaggcggtcatgaccctccc

SEQ ID NO: 1607435 - DNA, 25 bp, Homo sapien
cacagagaggcggtcatgaccctcc

SEQ ID NO: 1607436 - DNA, 25 bp, Homo sapien
gcacagagaggcggtcatgaccctc

SEQ ID NO: 1607437 - DNA, 25 bp, Homo sapien
cacgtggccgatgcggttgccctcg

SEQ ID NO: 1607438 - DNA, 25 bp, Homo sapien
caaaggacagctcattgtggctgag

SEQ ID NO: 1607439 - DNA, 25 bp, Homo sapien
gcccacgtggccgatgcggttgccc

SEQ ID NO: 1607440 - DNA, 25 bp, Homo sapien
atgcggttgccctcgaggtgcagct

SEQ ID NO: 1607441 - DNA, 25 bp, Homo sapien
acaggtccccacttgattaaatgag

SEQ ID NO: 1607442 - DNA, 25 bp, Homo sapien
acccatagcctaaagcgattctcct

SEQ ID NO: 1607443 - DNA, 25 bp, Homo sapien
gagtcagtcattgaatcgcaccata

SEQ ID NO: 1607444 - DNA, 25 bp, Homo sapien
tgcagaggtaaactaaggcccttcc

SEQ ID NO: 1607445 - DNA, 25 bp, Homo sapien
tggggacagtgtggctaaccagcct

SEQ ID NO: 1607446 - DNA, 25 bp, Homo sapien
ttaccagctaactagaatgtttggg

SEQ ID NO: 1607447 - DNA, 25 bp, Homo sapien
aactagaatgtttgggacgtggcag

SEQ ID NO: 1607448 - DNA, 25 bp, Homo sapien
cagctaactagaatgtttgggacgt

SEQ ID NO: 1607449 - DNA, 25 bp, Homo sapien
gatccaggtattcaaggctatgcag

SEQ ID NO: 1607450 - DNA, 25 bp, Homo sapien
tataggccaggttaagctccgtcag

SEQ ID NO: 1607451 - DNA, 25 bp, Homo sapien
agcccattgccatagaggtgcagcg

SEQ ID NO: 1607452 - DNA, 25 bp, Homo sapien
ggttagctgattccctgccaggtcg

SEQ ID NO: 1607453 - DNA, 25 bp, Homo sapien
tcacggagttgagtctggcggctca

SEQ ID NO: 1607454 - DNA, 25 bp, Homo sapien
ggaggtagagctcacggagttgagt

SEQ ID NO: 1607455 - DNA, 25 bp, Homo sapien
tagagctcacggagttgagtctggc

SEQ ID NO: 1607456 - DNA, 25 bp, Homo sapien
caggccactgtctgtcagctggttg

SEQ ID NO: 1607457 - DNA, 25 bp, Homo sapien
ctggagaaggaagaagagaatgaga

SEQ ID NO: 1607458 - DNA, 25 bp, Homo sapien
gagccgctcgagtgagggcggcagg

SEQ ID NO: 1607459 - DNA, 25 bp, Homo sapien
tgcaggtggagccgctcgagtgagg

SEQ ID NO: 1607460 - DNA, 25 bp, Homo sapien
tagctgagctggttgttggagaggc

SEQ ID NO: 1607461 - DNA, 25 bp, Homo sapien
aggtggagccgctcgagtgagggcg

SEQ ID NO: 1607462 - DNA, 25 bp, Homo sapien
agccagatccgcgacacggagggac

SEQ ID NO: 1607463 - DNA, 25 bp, Homo sapien
gggaagatctccatcacttggttgg

SEQ ID NO: 1607464 - DNA, 25 bp, Homo sapien
ctccatcacttggttggcagccaga

SEQ ID NO: 1607465 - DNA, 25 bp, Homo sapien
ttggttggcagccagatccgcgaca

SEQ ID NO: 1607466 - DNA, 25 bp, Homo sapien
cttgttgtgagccacgcagaggtgc

SEQ ID NO: 1607467 - DNA, 25 bp, Homo sapien
gactcgaaggcctcgtcaggcaggc

SEQ ID NO: 1607468 - DNA, 25 bp, Homo sapien
ttgttgtgagccacgcagaggtgct

SEQ ID NO: 1607469 - DNA, 25 bp, Homo sapien
gctgcagctgggtgagggactcgaa

SEQ ID NO: 1607470 - DNA, 25 bp, Homo sapien
gaggagatgaggttgttgtggaggt

SEQ ID NO: 1607471 - DNA, 25 bp, Homo sapien
tcattgtaggggagttcctggagct

SEQ ID NO: 1607472 - DNA, 25 bp, Homo sapien
tgtggaggttgagggttcgcaggcc

SEQ ID NO: 1607473 - DNA, 25 bp, Homo sapien
cactgaggcgggacagctcattgta

SEQ ID NO: 1607474 - DNA, 25 bp, Homo sapien
tggtgatgttgtccgggaacactcg

SEQ ID NO: 1607475 - DNA, 25 bp, Homo sapien
cacagtccacagtgtcgactcgggg

SEQ ID NO: 1607476 - DNA, 25 bp, Homo sapien
acactcgaaggtccaagccatcaca

SEQ ID NO: 1607477 - DNA, 25 bp, Homo sapien
agtccacagtgtcgactcgggggca

SEQ ID NO: 1607478 - DNA, 25 bp, Homo sapien
aggcagcgtcttccaagccggcgac

SEQ ID NO: 1607479 - DNA, 25 bp, Homo sapien
gggaaggcagcgtcttccaagccgg

SEQ ID NO: 1607480 - DNA, 25 bp, Homo sapien
ggcagcgtcttccaagccggcgacg

SEQ ID NO: 1607481 - DNA, 25 bp, Homo sapien
agcgtcttccaagccggcgacgggc

SEQ ID NO: 1607482 - DNA, 25 bp, Homo sapien
gtcgccatggtgactggagcatccc

SEQ ID NO: 1607483 - DNA, 25 bp, Homo sapien
ggtcgccatggtgactggagcatcc

SEQ ID NO: 1607484 - DNA, 25 bp, Homo sapien
tcgccatggtgactggagcatcccc

SEQ ID NO: 1607485 - DNA, 25 bp, Homo sapien
ccaggctgggcgcagggtcgccatg

SEQ ID NO: 1607486 - DNA, 25 bp, Homo sapien
caccccatctctgctttcgtaacct

SEQ ID NO: 1607487 - DNA, 25 bp, Homo sapien
aggacttcctaatggaaaccaggcg

SEQ ID NO: 1607488 - DNA, 25 bp, Homo sapien
tgaggacaggccagcccgtcccctt

SEQ ID NO: 1607489 - DNA, 25 bp, Homo sapien
ctgctttcgtaacctcagccagcct

SEQ ID NO: 1607490 - DNA, 25 bp, Homo sapien
tacagacgtgctaccacacaccaga

SEQ ID NO: 1607491 - DNA, 25 bp, Homo sapien
gagacgaggtcttaacagttgccga

SEQ ID NO: 1607492 - DNA, 25 bp, Homo sapien
tcccacgtacataggactacagacg

SEQ ID NO: 1607493 - DNA, 25 bp, Homo sapien
tgccgaggctggtcaaattcttctc

SEQ ID NO: 1607494 - DNA, 25 bp, Homo sapien
gcataattggcacaacagggccctg

SEQ ID NO: 1607495 - DNA, 25 bp, Homo sapien
gaaacaagctttcatcgaatcccat

SEQ ID NO: 1607496 - DNA, 25 bp, Homo sapien
gaaccgtgtctgtcacatgtggagc

SEQ ID NO: 1607497 - DNA, 25 bp, Homo sapien
gattctcgagccttggtggaccaca

SEQ ID NO: 1607498 - DNA, 25 bp, Homo sapien
ctccatcagactggaaactcccaga

SEQ ID NO: 1607499 - DNA, 25 bp, Homo sapien
ggtgggcctccccattgaaagtgtg

SEQ ID NO: 1607500 - DNA, 25 bp, Homo sapien
gagagttaccgaagcaggctctgtc

SEQ ID NO: 1607501 - DNA, 25 bp, Homo sapien
agggactgcgccttctccgtgaggc

SEQ ID NO: 1607502 - DNA, 25 bp, Homo sapien
caggttccttgggtgtaaaatgatc

SEQ ID NO: 1607503 - DNA, 25 bp, Homo sapien
gctggcccttcagatggtgtggttc

SEQ ID NO: 1607504 - DNA, 25 bp, Homo sapien
tgtggttcagcaggtcacagcaacc

SEQ ID NO: 1607505 - DNA, 25 bp, Homo sapien
tacatctaccatctgtactggtggg

SEQ ID NO: 1607506 - DNA, 25 bp, Homo sapien
tcgagacagtcagtgtaggcgacct

SEQ ID NO: 1607507 - DNA, 25 bp, Homo sapien
tcaaggtggcatgggacctcaacac

SEQ ID NO: 1607508 - DNA, 25 bp, Homo sapien
tgtccctctccactgtagaccaaag

SEQ ID NO: 1607509 - DNA, 25 bp, Homo sapien
tcaacacagggatcttcgagacagt

SEQ ID NO: 1607510 - DNA, 25 bp, Homo sapien
ttcctgagcgctgatgaaatgggtg

SEQ ID NO: 1607511 - DNA, 25 bp, Homo sapien
ccaatgaggcgctgcacaaaggtgg

SEQ ID NO: 1607512 - DNA, 25 bp, Homo sapien
ggctggtcactcattcacgctacat

SEQ ID NO: 1607513 - DNA, 25 bp, Homo sapien
accccgtgatggtcagggtcaccag

SEQ ID NO: 1607514 - DNA, 25 bp, Homo sapien
caccgactgatgaccggcactagtg

SEQ ID NO: 1607515 - DNA, 25 bp, Homo sapien
cggacagcgagcgatatacgtggat

SEQ ID NO: 1607516 - DNA, 25 bp, Homo sapien
gcactagtgttagcctgcggaacgg

SEQ ID NO: 1607517 - DNA, 25 bp, Homo sapien
tacagctgtggacgttgccctcggg

SEQ ID NO: 1607518 - DNA, 25 bp, Homo sapien
tagcacgcggagcacacaaaatagt

SEQ ID NO: 1607519 - DNA, 25 bp, Homo sapien
aaaaggtagaaaacagctcggcaca

SEQ ID NO: 1607520 - DNA, 25 bp, Homo sapien
tcggcacactagactaccacacgtg

SEQ ID NO: 1607521 - DNA, 25 bp, Homo sapien
tggacactttcaccaccgggagagg

SEQ ID NO: 1607522 - DNA, 25 bp, Homo sapien
ttaccaactccgctcgggcggcgct

SEQ ID NO: 1607523 - DNA, 25 bp, Homo sapien
cacggaggagaagcgtggtctccgg

SEQ ID NO: 1607524 - DNA, 25 bp, Homo sapien
tctccgggaagataggggcacagaa

SEQ ID NO: 1607525 - DNA, 25 bp, Homo sapien
tcacgaatcgcacaatagtcatggg

SEQ ID NO: 1607526 - DNA, 25 bp, Homo sapien
ggtctgtgggcactccccggctccg

SEQ ID NO: 1607527 - DNA, 25 bp, Homo sapien
tccgcggctcgctgctctttggaag

SEQ ID NO: 1607528 - DNA, 25 bp, Homo sapien
cagtgaccacgaagccacagaagct

SEQ ID NO: 1607529 - DNA, 25 bp, Homo sapien
gctgtgcaaagccagcgagctgaat

SEQ ID NO: 1607530 - DNA, 25 bp, Homo sapien
gatgcgacacccacggctttaattg

SEQ ID NO: 1607531 - DNA, 25 bp, Homo sapien
taaggcacgtcttttgtgtcagagt

SEQ ID NO: 1607532 - DNA, 25 bp, Homo sapien
agcgcctgcacgaagaggccgcgcg

SEQ ID NO: 1607533 - DNA, 25 bp, Homo sapien
cgcctgcacgaagaggccgcgcgcg

SEQ ID NO: 1607534 - DNA, 25 bp, Homo sapien
gcgcctgcacgaagaggccgcgcgc

SEQ ID NO: 1607535 - DNA, 25 bp, Homo sapien
ccgcgccagcttggccggcggctcc

SEQ ID NO: 1607536 - DNA, 25 bp, Homo sapien
gtccgcgccagcttggccggcggct

SEQ ID NO: 1607537 - DNA, 25 bp, Homo sapien
tcgccgccagccgccagtgagatgt

SEQ ID NO: 1607538 - DNA, 25 bp, Homo sapien
tcagtccgcgccagcttggccggcg

SEQ ID NO: 1607539 - DNA, 25 bp, Homo sapien
tgcggcagctcgtcctcgctctcct

SEQ ID NO: 1607540 - DNA, 25 bp, Homo sapien
gcggcagctcgtcctcgctctcctc

SEQ ID NO: 1607541 - DNA, 25 bp, Homo sapien
ctgcggcagctcgtcctcgctctcc

SEQ ID NO: 1607542 - DNA, 25 bp, Homo sapien
ctgggtgggaacacgcctcgcctac

SEQ ID NO: 1607543 - DNA, 25 bp, Homo sapien
ccctgggtgggaacacgcctcgcct

SEQ ID NO: 1607544 - DNA, 25 bp, Homo sapien
cctgggtgggaacacgcctcgccta

SEQ ID NO: 1607545 - DNA, 25 bp, Homo sapien
tccagggggttcagggaggtggcca

SEQ ID NO: 1607546 - DNA, 25 bp, Homo sapien
ggttcagggaggtggccagattggc

SEQ ID NO: 1607547 - DNA, 25 bp, Homo sapien
ccagggggttcagggaggtggccag

SEQ ID NO: 1607548 - DNA, 25 bp, Homo sapien
tcagggaggtggccagattggcgaa

SEQ ID NO: 1607549 - DNA, 25 bp, Homo sapien
ccttggcctgggctacgcggtgctc

SEQ ID NO: 1607550 - DNA, 25 bp, Homo sapien
cggtgctcgatcaggtagtacatgt

SEQ ID NO: 1607551 - DNA, 25 bp, Homo sapien
gctacgcggtgctcgatcaggtagt

SEQ ID NO: 1607552 - DNA, 25 bp, Homo sapien
ccatgacggcgatgggggtctcgcc

SEQ ID NO: 1607553 - DNA, 25 bp, Homo sapien
gctgctgcagcgtcaccttgaagtc

SEQ ID NO: 1607554 - DNA, 25 bp, Homo sapien
ctgcaccacgcggtcctcgcagcgg

SEQ ID NO: 1607555 - DNA, 25 bp, Homo sapien
ccggcgctgccctggtagggcttga

SEQ ID NO: 1607556 - DNA, 25 bp, Homo sapien
gctgccctggtagggcttgagcacc

SEQ ID NO: 1607557 - DNA, 25 bp, Homo sapien
gcgccgcagtgtctgcgcgaaggcg

SEQ ID NO: 1607558 - DNA, 25 bp, Homo sapien
tggttgatctgtgcggtgttctgca

SEQ ID NO: 1607559 - DNA, 25 bp, Homo sapien
ggtgttctgcagcacagcgcgcgcc

SEQ ID NO: 1607560 - DNA, 25 bp, Homo sapien
cagtgtctgcgcgaaggcgccagcc

SEQ ID NO: 1607561 - DNA, 25 bp, Homo sapien
accatggcgtgggtgagccagctct

SEQ ID NO: 1607562 - DNA, 25 bp, Homo sapien
gatgttgaccatggcgtgggtgagc

SEQ ID NO: 1607563 - DNA, 25 bp, Homo sapien
gttccggatcgcttgggtcaaggca

SEQ ID NO: 1607564 - DNA, 25 bp, Homo sapien
cttggcaaagttccggatcgcttgg

SEQ ID NO: 1607565 - DNA, 25 bp, Homo sapien
atggctttgggcagtcgcttctcgg

SEQ ID NO: 1607566 - DNA, 25 bp, Homo sapien
cagcacgtcgggaatgaggatttcc

SEQ ID NO: 1607567 - DNA, 25 bp, Homo sapien
tggtccattggagcacgggctcgaa

SEQ ID NO: 1607568 - DNA, 25 bp, Homo sapien
ggccctggtacagcacgttgtcaca

SEQ ID NO: 1607569 - DNA, 25 bp, Homo sapien
gcgcctcactgggctggctgaggtt

SEQ ID NO: 1607570 - DNA, 25 bp, Homo sapien
ctcactgggctggctgaggttgtac

SEQ ID NO: 1607571 - DNA, 25 bp, Homo sapien
gcctcactgggctggctgaggttgt

SEQ ID NO: 1607572 - DNA, 25 bp, Homo sapien
acagccagcggtggcgcctcactgg

SEQ ID NO: 1607573 - DNA, 25 bp, Homo sapien
cagaaggtcttccacagcgtctcca

SEQ ID NO: 1607574 - DNA, 25 bp, Homo sapien
ggttcaccatgacgtcgacaatggc

SEQ ID NO: 1607575 - DNA, 25 bp, Homo sapien
gcgtctccaccagggtgaactgcag

SEQ ID NO: 1607576 - DNA, 25 bp, Homo sapien
gaactgcaggttcaccatgacgtcg

SEQ ID NO: 1607577 - DNA, 25 bp, Homo sapien
caccttgccctggaggtcgagctct

SEQ ID NO: 1607578 - DNA, 25 bp, Homo sapien
ggcccgacgccctcaggcagcacct

SEQ ID NO: 1607579 - DNA, 25 bp, Homo sapien
tcacagtgttcccggtacaggacct

SEQ ID NO: 1607580 - DNA, 25 bp, Homo sapien
cctggaggtcgagctctgtgaagtc

SEQ ID NO: 1607581 - DNA, 25 bp, Homo sapien
aaagtaaccatgtccaactgggtgg

SEQ ID NO: 1607582 - DNA, 25 bp, Homo sapien
ccttcttggcgagtgagtggtccta

SEQ ID NO: 1607583 - DNA, 25 bp, Homo sapien
gaaatctcatgtatgccgggcatgg

SEQ ID NO: 1607584 - DNA, 25 bp, Homo sapien
gacctgccgtcatatctccaaaaag

SEQ ID NO: 1607585 - DNA, 25 bp, Homo sapien
acctgggcgctgatgtccgacagcc

SEQ ID NO: 1607586 - DNA, 25 bp, Homo sapien
tgggcgctgatgtccgacagccccg

SEQ ID NO: 1607587 - DNA, 25 bp, Homo sapien
tgcacctgggcgctgatgtccgaca

SEQ ID NO: 1607588 - DNA, 25 bp, Homo sapien
gggcgctgatgtccgacagccccgt

SEQ ID NO: 1607589 - DNA, 25 bp, Homo sapien
tccatcagccgcagcaggggtgagc

SEQ ID NO: 1607590 - DNA, 25 bp, Homo sapien
agctggccttgatgcgcaggccata

SEQ ID NO: 1607591 - DNA, 25 bp, Homo sapien
gcaggccatagtagtggtacttgga

SEQ ID NO: 1607592 - DNA, 25 bp, Homo sapien
tgatgcgcaggccatagtagtggta

SEQ ID NO: 1607593 - DNA, 25 bp, Homo sapien
ccctcagccgtctcatagttgtcca

SEQ ID NO: 1607594 - DNA, 25 bp, Homo sapien
ccagacggcgggttcgcaggcccat

SEQ ID NO: 1607595 - DNA, 25 bp, Homo sapien
cagtgcagtaagtagtggcagtaga

SEQ ID NO: 1607596 - DNA, 25 bp, Homo sapien
cccatgaagacggagcggatgagct

SEQ ID NO: 1607597 - DNA, 25 bp, Homo sapien
cacaaatgtcgaagggcccggttgg

SEQ ID NO: 1607598 - DNA, 25 bp, Homo sapien
tcacacaaatgtcgaagggcccggt

SEQ ID NO: 1607599 - DNA, 25 bp, Homo sapien
cccacaatcacacaaatgtcgaagg

SEQ ID NO: 1607600 - DNA, 25 bp, Homo sapien
aatcacacaaatgtcgaagggcccg

SEQ ID NO: 1607601 - DNA, 25 bp, Homo sapien
ggctggcgaggcacgggtggtgtga

SEQ ID NO: 1607602 - DNA, 25 bp, Homo sapien
gagagtaagactggctggcactgcc

SEQ ID NO: 1607603 - DNA, 25 bp, Homo sapien
gccgccttggatcacgtaggtgcct

SEQ ID NO: 1607604 - DNA, 25 bp, Homo sapien
catgtagccgccttggatcacgtag

SEQ ID NO: 1607605 - DNA, 25 bp, Homo sapien
ctggctgccggacacgtacatgggc

SEQ ID NO: 1607606 - DNA, 25 bp, Homo sapien
ccggacacgtacatgggcatggagc

SEQ ID NO: 1607607 - DNA, 25 bp, Homo sapien
tgccggacacgtacatgggcatgga

SEQ ID NO: 1607608 - DNA, 25 bp, Homo sapien
gctgccggacacgtacatgggcatg

SEQ ID NO: 1607609 - DNA, 25 bp, Homo sapien
tagtagctggtgcttgccgtctgcg

SEQ ID NO: 1607610 - DNA, 25 bp, Homo sapien
cgtgcctgcggcctcgtagtagctg

SEQ ID NO: 1607611 - DNA, 25 bp, Homo sapien
cctgcggcctcgtagtagctggtgc

SEQ ID NO: 1607612 - DNA, 25 bp, Homo sapien
ttgccgtctgcgtgtacagcggcgt

SEQ ID NO: 1607613 - DNA, 25 bp, Homo sapien
tcgggataggagtaggtgctggaac

SEQ ID NO: 1607614 - DNA, 25 bp, Homo sapien
cgggataggagtaggtgctggaacg

SEQ ID NO: 1607615 - DNA, 25 bp, Homo sapien
ctcgggataggagtaggtgctggaa

SEQ ID NO: 1607616 - DNA, 25 bp, Homo sapien
gggataggagtaggtgctggaacgg

SEQ ID NO: 1607617 - DNA, 25 bp, Homo sapien
gtgggacgggcacctgctggagctg

SEQ ID NO: 1607618 - DNA, 25 bp, Homo sapien
gctggagtacacgtgtgggacgggc

SEQ ID NO: 1607619 - DNA, 25 bp, Homo sapien
ccgtgtagctggcatcgccgccctc

SEQ ID NO: 1607620 - DNA, 25 bp, Homo sapien
atcgccgccctccacatactgcacc

SEQ ID NO: 1607621 - DNA, 25 bp, Homo sapien
ctgaccctctggtcggggctggctc

SEQ ID NO: 1607622 - DNA, 25 bp, Homo sapien
gccgtgccgaacactagcacctggg

SEQ ID NO: 1607623 - DNA, 25 bp, Homo sapien
ccgggacagtggctcgaagaccact

SEQ ID NO: 1607624 - DNA, 25 bp, Homo sapien
gccgtggcggccgtgccgaacacta

SEQ ID NO: 1607625 - DNA, 25 bp, Homo sapien
ggcgcccggctcgtaatggggcggc

SEQ ID NO: 1607626 - DNA, 25 bp, Homo sapien
gcgcccggctcgtaatggggcggcg

SEQ ID NO: 1607627 - DNA, 25 bp, Homo sapien
tctgccttcctagcgggaaactgac

SEQ ID NO: 1607628 - DNA, 25 bp, Homo sapien
cctagcgggaaactgactgcctgag

SEQ ID NO: 1607629 - DNA, 25 bp, Homo sapien
ggccggggatctcgctgctctgcct

SEQ ID NO: 1607630 - DNA, 25 bp, Homo sapien
ctgctctgccttcctagcgggaaac

SEQ ID NO: 1607631 - DNA, 25 bp, Homo sapien
cgcacgcagccacccgagggaagat

SEQ ID NO: 1607632 - DNA, 25 bp, Homo sapien
tgacccagggccacgcaagaaagaa

SEQ ID NO: 1607633 - DNA, 25 bp, Homo sapien
tccacccaccgggttgctgagcgcg

SEQ ID NO: 1607634 - DNA, 25 bp, Homo sapien
caccgggttgctgagcgcgcacgca

SEQ ID NO: 1607635 - DNA, 25 bp, Homo sapien
cgggtttgggcgcttgtggagtggc

SEQ ID NO: 1607636 - DNA, 25 bp, Homo sapien
aggccctgcacggtcagcggctgca

SEQ ID NO: 1607637 - DNA, 25 bp, Homo sapien
tcttgagccacgtggactggctgga

SEQ ID NO: 1607638 - DNA, 25 bp, Homo sapien
tggaggccctgcacggtcagcggct

SEQ ID NO: 1607639 - DNA, 25 bp, Homo sapien
gagctgttggcctgcaccggcgact

SEQ ID NO: 1607640 - DNA, 25 bp, Homo sapien
cactctgctggacgccgtggacctg

SEQ ID NO: 1607641 - DNA, 25 bp, Homo sapien
gctgctgtggcactgtgcccgtggg

SEQ ID NO: 1607642 - DNA, 25 bp, Homo sapien
tgacggggacactctgctggacgcc

SEQ ID NO: 1607643 - DNA, 25 bp, Homo sapien
gacactgcactgagcgctttaaatg

SEQ ID NO: 1607644 - DNA, 25 bp, Homo sapien
tctggtgtgatattgggccgactcc

SEQ ID NO: 1607645 - DNA, 25 bp, Homo sapien
aatgtactcactggaatctcatggc

SEQ ID NO: 1607646 - DNA, 25 bp, Homo sapien
gttatagcaatgacgacagcagcct

SEQ ID NO: 1607647 - DNA, 25 bp, Homo sapien
ctgctgggtaccatggaccgtcagg

SEQ ID NO: 1607648 - DNA, 25 bp, Homo sapien
cctggggctgcgctctgcaccacca

SEQ ID NO: 1607649 - DNA, 25 bp, Homo sapien
acctgctgggtaccatggaccgtca

SEQ ID NO: 1607650 - DNA, 25 bp, Homo sapien
ggtaccatggaccgtcagggagacc

SEQ ID NO: 1607651 - DNA, 25 bp, Homo sapien
agggagccttccagggtggtggcca

SEQ ID NO: 1607652 - DNA, 25 bp, Homo sapien
gagggagccttccagggtggtggcc

SEQ ID NO: 1607653 - DNA, 25 bp, Homo sapien
tgagggagccttccagggtggtggc

SEQ ID NO: 1607654 - DNA, 25 bp, Homo sapien
cctgagggagccttccagggtggtg

SEQ ID NO: 1607655 - DNA, 25 bp, Homo sapien
gaggggcgacacgtggcctggcttg

SEQ ID NO: 1607656 - DNA, 25 bp, Homo sapien
ctggcttggcctgcacgctcgtctg

SEQ ID NO: 1607657 - DNA, 25 bp, Homo sapien
gggcacttggatgttggtcagctgg

SEQ ID NO: 1607658 - DNA, 25 bp, Homo sapien
gcttggcctgcacgctcgtctggac

SEQ ID NO: 1607659 - DNA, 25 bp, Homo sapien
gaacgccggtctggctggcggtgga

SEQ ID NO: 1607660 - DNA, 25 bp, Homo sapien
tggcctccgacactgtctcgctggc

SEQ ID NO: 1607661 - DNA, 25 bp, Homo sapien
ctgaaccacctgagtaggaacgccg

SEQ ID NO: 1607662 - DNA, 25 bp, Homo sapien
acctgagtaggaacgccggtctggc

SEQ ID NO: 1607663 - DNA, 25 bp, Homo sapien
cctaagggagacaagaggcaagctc

SEQ ID NO: 1607664 - DNA, 25 bp, Homo sapien
tcctggcagagggtaccgagagtgc

SEQ ID NO: 1607665 - DNA, 25 bp, Homo sapien
tcagaaaggtagtgtctgagcagcg

SEQ ID NO: 1607666 - DNA, 25 bp, Homo sapien
agcctggcgggtttgtggagctgta

SEQ ID NO: 1607667 - DNA, 25 bp, Homo sapien
actcaaggaggagtaggacagaaac

SEQ ID NO: 1607668 - DNA, 25 bp, Homo sapien
gcagaattcaatgtggctgcactgg

SEQ ID NO: 1607669 - DNA, 25 bp, Homo sapien
aattcaacaccaagtggatgagtca

SEQ ID NO: 1607670 - DNA, 25 bp, Homo sapien
gatgagaaagccttgaaggagagat

SEQ ID NO: 1607671 - DNA, 25 bp, Homo sapien
cagagacagtgaccacgatgtactg

SEQ ID NO: 1607672 - DNA, 25 bp, Homo sapien
caggcgaaggggtgggtgcaccggt

SEQ ID NO: 1607673 - DNA, 25 bp, Homo sapien
ccgggagctccgtcacgtactgctt

SEQ ID NO: 1607674 - DNA, 25 bp, Homo sapien
tgcagctcggtgacatattggggct

SEQ ID NO: 1607675 - DNA, 25 bp, Homo sapien
agctccgtcacgtactgcttctggc

SEQ ID NO: 1607676 - DNA, 25 bp, Homo sapien
ggtacagccgggagctccgtcacgt

SEQ ID NO: 1607677 - DNA, 25 bp, Homo sapien
gcctgtagctcagtatacgcctgtg

SEQ ID NO: 1607678 - DNA, 25 bp, Homo sapien
gggctgcctgtagctcagtatacgc

SEQ ID NO: 1607679 - DNA, 25 bp, Homo sapien
tagctcagtatacgcctgtgttgcc

SEQ ID NO: 1607680 - DNA, 25 bp, Homo sapien
gcggggctgcctgtagctcagtata

SEQ ID NO: 1607681 - DNA, 25 bp, Homo sapien
tggggaaaatgataataaataaggc

SEQ ID NO: 1607682 - DNA, 25 bp, Homo sapien
gccaacggtggggaaaatgataata

SEQ ID NO: 1607683 - DNA, 25 bp, Homo sapien
tacaggagcctactaccacatccag

SEQ ID NO: 1607684 - DNA, 25 bp, Homo sapien
gcgactacaggagcctactaccaca

SEQ ID NO: 1607685 - DNA, 25 bp, Homo sapien
gctgcgactacaggagcctactacc

SEQ ID NO: 1607686 - DNA, 25 bp, Homo sapien
ctacaggagcctactaccacatcca

SEQ ID NO: 1607687 - DNA, 25 bp, Homo sapien
taaagtaagtacacggcatcttgcc

SEQ ID NO: 1607688 - DNA, 25 bp, Homo sapien
tgacttttgaggagagcccctacgg

SEQ ID NO: 1607689 - DNA, 25 bp, Homo sapien
catcttgccggtcttccaacaggga

SEQ ID NO: 1607690 - DNA, 25 bp, Homo sapien
gatgccaaactcaagaggtgtccga

SEQ ID NO: 1607691 - DNA, 25 bp, Homo sapien
ctgccttgaacaaggcgaagaccat

SEQ ID NO: 1607692 - DNA, 25 bp, Homo sapien
ctgctgcctgccttgaacaaggcga

SEQ ID NO: 1607693 - DNA, 25 bp, Homo sapien
tgcctgccttgaacaaggcgaagac

SEQ ID NO: 1607694 - DNA, 25 bp, Homo sapien
cgtgagagggaaaaggctgctgcct

SEQ ID NO: 1607695 - DNA, 25 bp, Homo sapien
gtggctcacacctataattccagca

SEQ ID NO: 1607696 - DNA, 25 bp, Homo sapien
tgaggcctaggcaggtggatcagct

SEQ ID NO: 1607697 - DNA, 25 bp, Homo sapien
tgtgaggcctaggcaggtggatcag

SEQ ID NO: 1607698 - DNA, 25 bp, Homo sapien
gatccaatgagatcaggccgggcac

SEQ ID NO: 1607699 - DNA, 25 bp, Homo sapien
actcgcacacatctcctaatgactg

SEQ ID NO: 1607700 - DNA, 25 bp, Homo sapien
acatctcctaatgactgggcgcagt

SEQ ID NO: 1607701 - DNA, 25 bp, Homo sapien
gcacacatctcctaatgactgggcg

SEQ ID NO: 1607702 - DNA, 25 bp, Homo sapien
caaagtgacgccttatctctataaa

SEQ ID NO: 1607703 - DNA, 25 bp, Homo sapien
gagaaagtctttctcgcctaggaag

SEQ ID NO: 1607704 - DNA, 25 bp, Homo sapien
caaaggcaggttccagtctatcaac

SEQ ID NO: 1607705 - DNA, 25 bp, Homo sapien
taaatgatgcaccagaacacactgc

SEQ ID NO: 1607706 - DNA, 25 bp, Homo sapien
ggaagaccacgtcctgtacagctgc

SEQ ID NO: 1607707 - DNA, 25 bp, Homo sapien
tgcggaaacgcttttcggaggtctc

SEQ ID NO: 1607708 - DNA, 25 bp, Homo sapien
ttgccgggttgcttggtcgccacga

SEQ ID NO: 1607709 - DNA, 25 bp, Homo sapien
gttgttgttgttgactcgcgttgcc

SEQ ID NO: 1607710 - DNA, 25 bp, Homo sapien
cccacttctgtctgcggaaacgctt

SEQ ID NO: 1607711 - DNA, 25 bp, Homo sapien
ccagacttctctctcgctcggtggg

SEQ ID NO: 1607712 - DNA, 25 bp, Homo sapien
aatgcagtgacgcagcgcagcccct

SEQ ID NO: 1607713 - DNA, 25 bp, Homo sapien
ccggactcgggattcgatgacgtca

SEQ ID NO: 1607714 - DNA, 25 bp, Homo sapien
agcccctctgtgacgacagcggcga

SEQ ID NO: 1607715 - DNA, 25 bp, Homo sapien
gtaacagaactgaatttggacccca

SEQ ID NO: 1607716 - DNA, 25 bp, Homo sapien
catgaaattgagagtggcagctgcc

SEQ ID NO: 1607717 - DNA, 25 bp, Homo sapien
gccaaaatctgttccgctgtaacag

SEQ ID NO: 1607718 - DNA, 25 bp, Homo sapien
tacatgaaattgagagtggcagctg

SEQ ID NO: 1607719 - DNA, 25 bp, Homo sapien
caagaggccgaggtagctgtgagag

SEQ ID NO: 1607720 - DNA, 25 bp, Homo sapien
tcccaggtgccatggccagtcctgt

SEQ ID NO: 1607721 - DNA, 25 bp, Homo sapien
aagcccaggtttaggtggacgtgca

SEQ ID NO: 1607722 - DNA, 25 bp, Homo sapien
caagtataaaggcttcatcgcagaa

SEQ ID NO: 1607723 - DNA, 25 bp, Homo sapien
cactggcacgtcttttgcttagggc

SEQ ID NO: 1607724 - DNA, 25 bp, Homo sapien
cccctgaagcagtggctggcattcg

SEQ ID NO: 1607725 - DNA, 25 bp, Homo sapien
aggctgccgggcaggcgcgtaggtg

SEQ ID NO: 1607726 - DNA, 25 bp, Homo sapien
tgcttagggccacttgcctcttcac

SEQ ID NO: 1607727 - DNA, 25 bp, Homo sapien
aggtgtggcatcccccaaggggcct

SEQ ID NO: 1607728 - DNA, 25 bp, Homo sapien
agaggtgtggcatcccccaaggggc

SEQ ID NO: 1607729 - DNA, 25 bp, Homo sapien
gaggtgtggcatcccccaaggggcc

SEQ ID NO: 1607730 - DNA, 25 bp, Homo sapien
aagaggtgtggcatcccccaagggg

SEQ ID NO: 1607731 - DNA, 25 bp, Homo sapien
cctccagtggttctttggttgcctc

SEQ ID NO: 1607732 - DNA, 25 bp, Homo sapien
tctggccttgtctccgtgttagcct

SEQ ID NO: 1607733 - DNA, 25 bp, Homo sapien
tctctctatgcccagtggttcctca

SEQ ID NO: 1607734 - DNA, 25 bp, Homo sapien
ccctagacccttgttctagattcag

SEQ ID NO: 1607735 - DNA, 25 bp, Homo sapien
cctattcccatggattcttccgctt

SEQ ID NO: 1607736 - DNA, 25 bp, Homo sapien
agctagtctgcacgacctcagggac

SEQ ID NO: 1607737 - DNA, 25 bp, Homo sapien
ctctcctggagcctaggcgagctag

SEQ ID NO: 1607738 - DNA, 25 bp, Homo sapien
ccactggtgacatctccgcttcatc

SEQ ID NO: 1607739 - DNA, 25 bp, Homo sapien
cccttcctgtctccgatggcttcca

SEQ ID NO: 1607740 - DNA, 25 bp, Homo sapien
ttcctgtctccgatggcttccagca

SEQ ID NO: 1607741 - DNA, 25 bp, Homo sapien
tcccttcctgtctccgatggcttcc

SEQ ID NO: 1607742 - DNA, 25 bp, Homo sapien
cttcctgtctccgatggcttccagc

SEQ ID NO: 1607743 - DNA, 25 bp, Homo sapien
ccacccgcccttcggatggcactgc

SEQ ID NO: 1607744 - DNA, 25 bp, Homo sapien
cacccacccgcccttcggatggcac

SEQ ID NO: 1607745 - DNA, 25 bp, Homo sapien
acccgcccttcggatggcactgccc

SEQ ID NO: 1607746 - DNA, 25 bp, Homo sapien
ccgcccttcggatggcactgccctc

SEQ ID NO: 1607747 - DNA, 25 bp, Homo sapien
ggcagggaggctctcttgttcagat

SEQ ID NO: 1607748 - DNA, 25 bp, Homo sapien
cccactagtccagccggcagggagg

SEQ ID NO: 1607749 - DNA, 25 bp, Homo sapien
gactctggaggcgtgcccactagtc

SEQ ID NO: 1607750 - DNA, 25 bp, Homo sapien
ccggcagggaggctctcttgttcag

SEQ ID NO: 1607751 - DNA, 25 bp, Homo sapien
ctgcctcgacaatggactgggagag

SEQ ID NO: 1607752 - DNA, 25 bp, Homo sapien
agaacctgcctcgacaatggactgg

SEQ ID NO: 1607753 - DNA, 25 bp, Homo sapien
tacagaacctgcctcgacaatggac

SEQ ID NO: 1607754 - DNA, 25 bp, Homo sapien
aacctgcctcgacaatggactggga

SEQ ID NO: 1607755 - DNA, 25 bp, Homo sapien
gcagagatggcggagacaaggtcag

SEQ ID NO: 1607756 - DNA, 25 bp, Homo sapien
tgcagagatggcggagacaaggtca

SEQ ID NO: 1607757 - DNA, 25 bp, Homo sapien
ctgcagagatggcggagacaaggtc

SEQ ID NO: 1607758 - DNA, 25 bp, Homo sapien
ctttgcaacagttgcagctgggact

SEQ ID NO: 1607759 - DNA, 25 bp, Homo sapien
tttgcaacagttgcagctgggactg

SEQ ID NO: 1607760 - DNA, 25 bp, Homo sapien
gcactttgcaacagttgcagctggg

SEQ ID NO: 1607761 - DNA, 25 bp, Homo sapien
gaagcactttgcaacagttgcagct

SEQ ID NO: 1607762 - DNA, 25 bp, Homo sapien
gctgccccatccattagccaacgtt

SEQ ID NO: 1607763 - DNA, 25 bp, Homo sapien
ggtcttcggatggctctggcactgc

SEQ ID NO: 1607764 - DNA, 25 bp, Homo sapien
tgtcttccaggttccggattcgggc

SEQ ID NO: 1607765 - DNA, 25 bp, Homo sapien
cattagccaacgttcccggagagac

SEQ ID NO: 1607766 - DNA, 25 bp, Homo sapien
gtcccctcccgacctctgcaggctg

SEQ ID NO: 1607767 - DNA, 25 bp, Homo sapien
tgggcatacagactaccccggtcca

SEQ ID NO: 1607768 - DNA, 25 bp, Homo sapien
gtaaagtcccctcccgacctctgca

SEQ ID NO: 1607769 - DNA, 25 bp, Homo sapien
cagactaccccggtccatgtaaagt

SEQ ID NO: 1607770 - DNA, 25 bp, Homo sapien
tgagacgctccacgcggagtttctc

SEQ ID NO: 1607771 - DNA, 25 bp, Homo sapien
gctccacgcggagtttctcctcctc

SEQ ID NO: 1607772 - DNA, 25 bp, Homo sapien
acgctccacgcggagtttctcctcc

SEQ ID NO: 1607773 - DNA, 25 bp, Homo sapien
cttgagacgctccacgcggagtttc

SEQ ID NO: 1607774 - DNA, 25 bp, Homo sapien
ctccgcggggctcaccggagctccc

SEQ ID NO: 1607775 - DNA, 25 bp, Homo sapien
cctccgcggggctcaccggagctcc

SEQ ID NO: 1607776 - DNA, 25 bp, Homo sapien
tccgcggggctcaccggagctcccg

SEQ ID NO: 1607777 - DNA, 25 bp, Homo sapien
tcctccgcggggctcaccggagctc

SEQ ID NO: 1607778 - DNA, 25 bp, Homo sapien
agccgctgccggtagagggagctct

SEQ ID NO: 1607779 - DNA, 25 bp, Homo sapien
ccgctgccggtagagggagctctcc

SEQ ID NO: 1607780 - DNA, 25 bp, Homo sapien
cgctgccggtagagggagctctccg

SEQ ID NO: 1607781 - DNA, 25 bp, Homo sapien
gccgctgccggtagagggagctctc

SEQ ID NO: 1607782 - DNA, 25 bp, Homo sapien
aaattgccccgagcccagcactttg

SEQ ID NO: 1607783 - DNA, 25 bp, Homo sapien
agtatggaaattgccccgagcccag

SEQ ID NO: 1607784 - DNA, 25 bp, Homo sapien
cccctcttggccaagatccctgagc

SEQ ID NO: 1607785 - DNA, 25 bp, Homo sapien
agatccctgagcagtatggaaattg

SEQ ID NO: 1607786 - DNA, 25 bp, Homo sapien
atgggtgtggccagagaccacacct

SEQ ID NO: 1607787 - DNA, 25 bp, Homo sapien
ggtgtggccagagaccacacctggc

SEQ ID NO: 1607788 - DNA, 25 bp, Homo sapien
gtgtggccagagaccacacctggct

SEQ ID NO: 1607789 - DNA, 25 bp, Homo sapien
tgggtgtggccagagaccacacctg

SEQ ID NO: 1607790 - DNA, 25 bp, Homo sapien
ccgcttgcctgaaggtgccccggag

SEQ ID NO: 1607791 - DNA, 25 bp, Homo sapien
tcactttctggtctccgagttctgg

SEQ ID NO: 1607792 - DNA, 25 bp, Homo sapien
gggccatctctgcccagaagttcac

SEQ ID NO: 1607793 - DNA, 25 bp, Homo sapien
caccacccgcttgcctgaaggtgcc

SEQ ID NO: 1607794 - DNA, 25 bp, Homo sapien
atgtgtgcgcgtgcgtaaggccctg

SEQ ID NO: 1607795 - DNA, 25 bp, Homo sapien
gtatgtgtgcgcgtgcgtaaggccc

SEQ ID NO: 1607796 - DNA, 25 bp, Homo sapien
tgtgtgcgcgtgcgtaaggccctgc

SEQ ID NO: 1607797 - DNA, 25 bp, Homo sapien
tatgtgtgcgcgtgcgtaaggccct

SEQ ID NO: 1607798 - DNA, 25 bp, Homo sapien
tcaaagtgctggcatcacgggcatg

SEQ ID NO: 1607799 - DNA, 25 bp, Homo sapien
tgctggcatcacgggcatgagcctc

SEQ ID NO: 1607800 - DNA, 25 bp, Homo sapien
tggcatcacgggcatgagcctccat

SEQ ID NO: 1607801 - DNA, 25 bp, Homo sapien
gtgctggcatcacgggcatgagcct

SEQ ID NO: 1607802 - DNA, 25 bp, Homo sapien
cgtgaactcgtcgagctgcgcgtgc

SEQ ID NO: 1607803 - DNA, 25 bp, Homo sapien
agacgcccatcgagcgcgaaatccg

SEQ ID NO: 1607804 - DNA, 25 bp, Homo sapien
atccgccgcagctgcgaacgcgagg

SEQ ID NO: 1607805 - DNA, 25 bp, Homo sapien
ggagcggttcatggagacgcccatc

SEQ ID NO: 1607806 - DNA, 25 bp, Homo sapien
gactccctcaaagcggtatcaggga

SEQ ID NO: 1607807 - DNA, 25 bp, Homo sapien
tatcagggagcatcaggatttcctt

SEQ ID NO: 1607808 - DNA, 25 bp, Homo sapien
gcggtatcagggagcatcaggattt

SEQ ID NO: 1607809 - DNA, 25 bp, Homo sapien
agggactccctcaaagcggtatcag

SEQ ID NO: 1607810 - DNA, 25 bp, Homo sapien
tgtccgcaccccggataccccaaga

SEQ ID NO: 1607811 - DNA, 25 bp, Homo sapien
ataccccaagaaagacgacgacctg

SEQ ID NO: 1607812 - DNA, 25 bp, Homo sapien
caagaaagacgacgacctgtccggc

SEQ ID NO: 1607813 - DNA, 25 bp, Homo sapien
cccaagaaagacgacgacctgtccg

SEQ ID NO: 1607814 - DNA, 25 bp, Homo sapien
gaaactgatcgagggcactttcctg

SEQ ID NO: 1607815 - DNA, 25 bp, Homo sapien
tcctccagtggacgttgaatttccc

SEQ ID NO: 1607816 - DNA, 25 bp, Homo sapien
gcgcgtcgggaaaagtagtcttcta

SEQ ID NO: 1607817 - DNA, 25 bp, Homo sapien
ggagtgggcgtagccttaagtctct

SEQ ID NO: 1607818 - DNA, 25 bp, Homo sapien
ctattggcgaattccaggcttcttt

SEQ ID NO: 1607819 - DNA, 25 bp, Homo sapien
gcgaattccaggcttctttcaaaag

SEQ ID NO: 1607820 - DNA, 25 bp, Homo sapien
tggcgaattccaggcttctttcaaa

SEQ ID NO: 1607821 - DNA, 25 bp, Homo sapien
tattggcgaattccaggcttctttc

SEQ ID NO: 1607822 - DNA, 25 bp, Homo sapien
gggctgcactgcgagaacgagtgag

SEQ ID NO: 1607823 - DNA, 25 bp, Homo sapien
actgcgagaacgagtgagcccctcc

SEQ ID NO: 1607824 - DNA, 25 bp, Homo sapien
cctgccccctattctggagtttgga

SEQ ID NO: 1607825 - DNA, 25 bp, Homo sapien
tgcactgcgagaacgagtgagcccc

SEQ ID NO: 1607826 - DNA, 25 bp, Homo sapien
tggcctgcctggcccgtgaggatct

SEQ ID NO: 1607827 - DNA, 25 bp, Homo sapien
cctgcctggcccgtgaggatctgca

SEQ ID NO: 1607828 - DNA, 25 bp, Homo sapien
gcctgcctggcccgtgaggatctgc

SEQ ID NO: 1607829 - DNA, 25 bp, Homo sapien
cccggctgcgctcggaggccgggcc

SEQ ID NO: 1607830 - DNA, 25 bp, Homo sapien
ctgctggtagtccccaagcggctgc

SEQ ID NO: 1607831 - DNA, 25 bp, Homo sapien
ccccaagcggctgcgggcacaaaat

SEQ ID NO: 1607832 - DNA, 25 bp, Homo sapien
ctcgaagccgatggtcagcagctgc

SEQ ID NO: 1607833 - DNA, 25 bp, Homo sapien
gtgggctcctcgaagccgatggtca

SEQ ID NO: 1607834 - DNA, 25 bp, Homo sapien
cagcttctggatctgtgggcacgaa

SEQ ID NO: 1607835 - DNA, 25 bp, Homo sapien
aaaggtcatcctcggctggtcctag

SEQ ID NO: 1607836 - DNA, 25 bp, Homo sapien
ggcacgaattggctggactctggcc

SEQ ID NO: 1607837 - DNA, 25 bp, Homo sapien
atcggccgatggaccacagcttctg

SEQ ID NO: 1607838 - DNA, 25 bp, Homo sapien
cgcatcttcttatagaggtagcggg

SEQ ID NO: 1607839 - DNA, 25 bp, Homo sapien
caagggaatcttgtccccgaccagg

SEQ ID NO: 1607840 - DNA, 25 bp, Homo sapien
ggtggcttccaggtgccagcgcatc

SEQ ID NO: 1607841 - DNA, 25 bp, Homo sapien
cacaagggaatcttgtccccgacca

SEQ ID NO: 1607842 - DNA, 25 bp, Homo sapien
gatggagaacctcccgcaaaagaaa

SEQ ID NO: 1607843 - DNA, 25 bp, Homo sapien
acctcccgcaaaagaaacaggagat

SEQ ID NO: 1607844 - DNA, 25 bp, Homo sapien
cctcccgcaaaagaaacaggagatg

SEQ ID NO: 1607845 - DNA, 25 bp, Homo sapien
aaaggaagcgtacatgaggaccagc

SEQ ID NO: 1607846 - DNA, 25 bp, Homo sapien
tcagctgttgggagatctctaacag

SEQ ID NO: 1607847 - DNA, 25 bp, Homo sapien
tccacgaacccaaaggaagcgtaca

SEQ ID NO: 1607848 - DNA, 25 bp, Homo sapien
tgttccaggcgcagggtcagctgtt

SEQ ID NO: 1607849 - DNA, 25 bp, Homo sapien
catagatggggggtatgcttctcgc

SEQ ID NO: 1607850 - DNA, 25 bp, Homo sapien
tagggctcacacatctgtaagaagg

SEQ ID NO: 1607851 - DNA, 25 bp, Homo sapien
ctccaggtacaggaagtagggctca

SEQ ID NO: 1607852 - DNA, 25 bp, Homo sapien
catctgtaagaaggtgggcatggcc

SEQ ID NO: 1607853 - DNA, 25 bp, Homo sapien
tcggcatcttcaggatccggctcag

SEQ ID NO: 1607854 - DNA, 25 bp, Homo sapien
tcttcagtaggtagcgcagctgttg

SEQ ID NO: 1607855 - DNA, 25 bp, Homo sapien
ctgtagagcaagtagctctggaaat

SEQ ID NO: 1607856 - DNA, 25 bp, Homo sapien
cccaggttccaaggcgtctggaggc

SEQ ID NO: 1607857 - DNA, 25 bp, Homo sapien
accttcggtgcaatattaaaaagca

SEQ ID NO: 1607858 - DNA, 25 bp, Homo sapien
tcaacagaaagaaaagagggaggag

SEQ ID NO: 1607859 - DNA, 25 bp, Homo sapien
caacagaaagaaaagagggaggaga

SEQ ID NO: 1607860 - DNA, 25 bp, Homo sapien
aacagaaagaaaagagggaggagag

SEQ ID NO: 1607861 - DNA, 25 bp, Homo sapien
cagaaagaaaagagggaggagagaa

SEQ ID NO: 1607862 - DNA, 25 bp, Homo sapien
caacccagctagtcccctaggggct

SEQ ID NO: 1607863 - DNA, 25 bp, Homo sapien
aacccagctagtcccctaggggctg

SEQ ID NO: 1607864 - DNA, 25 bp, Homo sapien
tggaggccaggggcagactgagaag

SEQ ID NO: 1607865 - DNA, 25 bp, Homo sapien
ccagctagtcccctaggggctggag

SEQ ID NO: 1607866 - DNA, 25 bp, Homo sapien
caccgacgtgctgaggagcagatgt

SEQ ID NO: 1607867 - DNA, 25 bp, Homo sapien
catttatacaggaaacatctggctg

SEQ ID NO: 1607868 - DNA, 25 bp, Homo sapien
ccttggaatctgttatgagggctga

SEQ ID NO: 1607869 - DNA, 25 bp, Homo sapien
cctaaaatgtcctggactgggtggg

SEQ ID NO: 1607870 - DNA, 25 bp, Homo sapien
gacaggccggtgagcacatctgtgc

SEQ ID NO: 1607871 - DNA, 25 bp, Homo sapien
tggtgctcgtagattttcagggctg

SEQ ID NO: 1607872 - DNA, 25 bp, Homo sapien
atcctcaaagtggccttgctgaagc

SEQ ID NO: 1607873 - DNA, 25 bp, Homo sapien
gctgcatgagcagcaaagatttgcc

SEQ ID NO: 1607874 - DNA, 25 bp, Homo sapien
taaaatattcgacgacatccatcac

SEQ ID NO: 1607875 - DNA, 25 bp, Homo sapien
cggtccactcgacgggatcagatgg

SEQ ID NO: 1607876 - DNA, 25 bp, Homo sapien
atccatcacggtccactcgacggga

SEQ ID NO: 1607877 - DNA, 25 bp, Homo sapien
cctcagtaaaatattcgacgacatc

SEQ ID NO: 1607878 - DNA, 25 bp, Homo sapien
tcggccccaggtagggctggtttgc

SEQ ID NO: 1607879 - DNA, 25 bp, Homo sapien
ggacggggagtctggcccggtggca

SEQ ID NO: 1607880 - DNA, 25 bp, Homo sapien
gacggggagtctggcccggtggcaa

SEQ ID NO: 1607881 - DNA, 25 bp, Homo sapien
gagtctggcccggtggcaacagaag

SEQ ID NO: 1607882 - DNA, 25 bp, Homo sapien
ggggagtctggcccggtggcaacag

SEQ ID NO: 1607883 - DNA, 25 bp, Homo sapien
tggagaacacctggcgggtgccgct

SEQ ID NO: 1607884 - DNA, 25 bp, Homo sapien
ggtgcggtccgcagggggtccactc

SEQ ID NO: 1607885 - DNA, 25 bp, Homo sapien
catggagaacacctggcgggtgccg

SEQ ID NO: 1607886 - DNA, 25 bp, Homo sapien
tcctggccctggtgcggtccgcagg

SEQ ID NO: 1607887 - DNA, 25 bp, Homo sapien
acctgcaggacggtcactctcgggc

SEQ ID NO: 1607888 - DNA, 25 bp, Homo sapien
ctgcaggacggtcactctcgggcac

SEQ ID NO: 1607889 - DNA, 25 bp, Homo sapien
tgggcacctgcaggacggtcactct

SEQ ID NO: 1607890 - DNA, 25 bp, Homo sapien
gcacctgcaggacggtcactctcgg

SEQ ID NO: 1607891 - DNA, 25 bp, Homo sapien
tttctcaagtactcgctcttctcca

SEQ ID NO: 1607892 - DNA, 25 bp, Homo sapien
tcttctttctcaagtactcgctctt

SEQ ID NO: 1607893 - DNA, 25 bp, Homo sapien
tctttctcaagtactcgctcttctc

SEQ ID NO: 1607894 - DNA, 25 bp, Homo sapien
tcaagtactcgctcttctccacctc

SEQ ID NO: 1607895 - DNA, 25 bp, Homo sapien
gcagcgcaagcgctccgagacgggt

SEQ ID NO: 1607896 - DNA, 25 bp, Homo sapien
gctccgagacgggtgcgctccagac

SEQ ID NO: 1607897 - DNA, 25 bp, Homo sapien
cttgctgcgagacgggcgggcgctg

SEQ ID NO: 1607898 - DNA, 25 bp, Homo sapien
caagcgctccgagacgggtgcgctc

SEQ ID NO: 1607899 - DNA, 25 bp, Homo sapien
cgaggtagcgcacgacttcccgcag

SEQ ID NO: 1607900 - DNA, 25 bp, Homo sapien
cacgcggccgcgggttaggcgaccg

SEQ ID NO: 1607901 - DNA, 25 bp, Homo sapien
cctgcacgcggccgcgggttaggcg

SEQ ID NO: 1607902 - DNA, 25 bp, Homo sapien
gaggtagcgcacgacttcccgcagg

SEQ ID NO: 1607903 - DNA, 25 bp, Homo sapien
gggtggctccgcgccggggcggctg

SEQ ID NO: 1607904 - DNA, 25 bp, Homo sapien
cgcaccgcgcccccctccggcggcg

SEQ ID NO: 1607905 - DNA, 25 bp, Homo sapien
tggctccgcgccggggcggctggac

SEQ ID NO: 1607906 - DNA, 25 bp, Homo sapien
cgcccccctccggcggcggctgtgg

SEQ ID NO: 1607907 - DNA, 25 bp, Homo sapien
cggagcacggcgcgctgctggatca

SEQ ID NO: 1607908 - DNA, 25 bp, Homo sapien
tggatcagtttctcgagctcggcgc

SEQ ID NO: 1607909 - DNA, 25 bp, Homo sapien
gcgctgctggatcagtttctcgagc

SEQ ID NO: 1607910 - DNA, 25 bp, Homo sapien
agtttctcgagctcggcgcgcgtgc

SEQ ID NO: 1607911 - DNA, 25 bp, Homo sapien
ggcagatgcgctccaggtccggccg

SEQ ID NO: 1607912 - DNA, 25 bp, Homo sapien
tccggccgcgccttgcgcgagcgca

SEQ ID NO: 1607913 - DNA, 25 bp, Homo sapien
agcgcagcgagtcgatggtgtccag

SEQ ID NO: 1607914 - DNA, 25 bp, Homo sapien
atccggcagatgcgctccaggtccg

SEQ ID NO: 1607915 - DNA, 25 bp, Homo sapien
gtagtgcggggaagcggcggacgac

SEQ ID NO: 1607916 - DNA, 25 bp, Homo sapien
ggaagcggcggacgacgaggcggcg

SEQ ID NO: 1607917 - DNA, 25 bp, Homo sapien
cttggtagtgcggggaagcggcgga

SEQ ID NO: 1607918 - DNA, 25 bp, Homo sapien
gtgcggggaagcggcggacgacgag

SEQ ID NO: 1607919 - DNA, 25 bp, Homo sapien
cccggctgcaccgtgcgcgctgcct

SEQ ID NO: 1607920 - DNA, 25 bp, Homo sapien
gcccggctgcaccgtgcgcgctgcc

SEQ ID NO: 1607921 - DNA, 25 bp, Homo sapien
agaggaaaaaacagtgagagagaaa

SEQ ID NO: 1607922 - DNA, 25 bp, Homo sapien
gagagaaaaaaatatgcacacactc

SEQ ID NO: 1607923 - DNA, 25 bp, Homo sapien
gagaaaaaaatatgcacacactcac

SEQ ID NO: 1607924 - DNA, 25 bp, Homo sapien
aaaaaaatatgcacacactcactca

SEQ ID NO: 1607925 - DNA, 25 bp, Homo sapien
gtgggtgatcgaagtcgagaacacc

SEQ ID NO: 1607926 - DNA, 25 bp, Homo sapien
tgtgtgggtgggtgatcgaagtcga

SEQ ID NO: 1607927 - DNA, 25 bp, Homo sapien
atcgaagtcgagaacaccagcgaca

SEQ ID NO: 1607928 - DNA, 25 bp, Homo sapien
tgcacgctggggtccgaaattccct

SEQ ID NO: 1607929 - DNA, 25 bp, Homo sapien
ttcgcagcacacaggttgaatcgcc

SEQ ID NO: 1607930 - DNA, 25 bp, Homo sapien
acagcacactgttcaagaggaagtc

SEQ ID NO: 1607931 - DNA, 25 bp, Homo sapien
agaggaagtctcgtccttcgcagca

SEQ ID NO: 1607932 - DNA, 25 bp, Homo sapien
caacagcacactgttcaagaggaag

SEQ ID NO: 1607933 - DNA, 25 bp, Homo sapien
cccaccccaggcctgagaactcctc

SEQ ID NO: 1607934 - DNA, 25 bp, Homo sapien
ccccaccccaggcctgagaactcct

SEQ ID NO: 1607935 - DNA, 25 bp, Homo sapien
ggccccaccccaggcctgagaactc

SEQ ID NO: 1607936 - DNA, 25 bp, Homo sapien
gccccaccccaggcctgagaactcc

SEQ ID NO: 1607937 - DNA, 25 bp, Homo sapien
gcccaagggtgaagacaggtctgtt

SEQ ID NO: 1607938 - DNA, 25 bp, Homo sapien
gggtgagtaaaacaggcagcccctc

SEQ ID NO: 1607939 - DNA, 25 bp, Homo sapien
tagaccctcgcaggattggcagaga

SEQ ID NO: 1607940 - DNA, 25 bp, Homo sapien
tagcaagcaacccactgaacatgtc

SEQ ID NO: 1607941 - DNA, 25 bp, Homo sapien
ctaaaactcagaaaactccttgcca

SEQ ID NO: 1607942 - DNA, 25 bp, Homo sapien
aaaactcagaaaactccttgccaca

SEQ ID NO: 1607943 - DNA, 25 bp, Homo sapien
aaactcagaaaactccttgccacac

SEQ ID NO: 1607944 - DNA, 25 bp, Homo sapien
taaaactcagaaaactccttgccac

SEQ ID NO: 1607945 - DNA, 25 bp, Homo sapien
tcaaagttactcgtatccccagggc

SEQ ID NO: 1607946 - DNA, 25 bp, Homo sapien
ttcttcctcatagtcgtcaaagtta

SEQ ID NO: 1607947 - DNA, 25 bp, Homo sapien
taaactttggtatgaagggagcttc

SEQ ID NO: 1607948 - DNA, 25 bp, Homo sapien
tagtcgtcaaagttactcgtatccc

SEQ ID NO: 1607949 - DNA, 25 bp, Homo sapien
ttacaacaataaatgcgaatggcct

SEQ ID NO: 1607950 - DNA, 25 bp, Homo sapien
tcatggaatggccaaatgaccccag

SEQ ID NO: 1607951 - DNA, 25 bp, Homo sapien
cagcccgaaactcttaatgtagcaa

SEQ ID NO: 1607952 - DNA, 25 bp, Homo sapien
gaggcatctgttgcacaaggtcatg

SEQ ID NO: 1607953 - DNA, 25 bp, Homo sapien
gcaggcttaaggaggggaggcccac

SEQ ID NO: 1607954 - DNA, 25 bp, Homo sapien
cctcagcaggcttaaggaggggagg

SEQ ID NO: 1607955 - DNA, 25 bp, Homo sapien
cagcaggcttaaggaggggaggccc

SEQ ID NO: 1607956 - DNA, 25 bp, Homo sapien
tcagcaggcttaaggaggggaggcc

SEQ ID NO: 1607957 - DNA, 25 bp, Homo sapien
tggtgagatctacctgcaggaggtt

SEQ ID NO: 1607958 - DNA, 25 bp, Homo sapien
gtggttcttgatatcgttgacccca

SEQ ID NO: 1607959 - DNA, 25 bp, Homo sapien
gatggcaatccagtcagttgtggca

SEQ ID NO: 1607960 - DNA, 25 bp, Homo sapien
cccaaagcgcttggtgagatctacc

SEQ ID NO: 1607961 - DNA, 25 bp, Homo sapien
ggattacaggctcacgccaagacac

SEQ ID NO: 1607962 - DNA, 25 bp, Homo sapien
tacaggctcacgccaagacacctgg

SEQ ID NO: 1607963 - DNA, 25 bp, Homo sapien
aggctcacgccaagacacctggcta

SEQ ID NO: 1607964 - DNA, 25 bp, Homo sapien
attacaggctcacgccaagacacct

SEQ ID NO: 1607965 - DNA, 25 bp, Homo sapien
tagtgatgctatgtgtccagctggg

SEQ ID NO: 1607966 - DNA, 25 bp, Homo sapien
tggcagtttcttttggtccggtggc

SEQ ID NO: 1607967 - DNA, 25 bp, Homo sapien
gctggggcaccccacttgcctgaat

SEQ ID NO: 1607968 - DNA, 25 bp, Homo sapien
tccggtggcagatgcctcatctttc

SEQ ID NO: 1607969 - DNA, 25 bp, Homo sapien
gaagcccatgggattctggaaccgc

SEQ ID NO: 1607970 - DNA, 25 bp, Homo sapien
tacagagggtgccactatctcaggg

SEQ ID NO: 1607971 - DNA, 25 bp, Homo sapien
caaagtttcaaagccagtcggtggc

SEQ ID NO: 1607972 - DNA, 25 bp, Homo sapien
cacactaactgggatgaggagcgaa

SEQ ID NO: 1607973 - DNA, 25 bp, Homo sapien
ggcgggtagccagcggccatttcat

SEQ ID NO: 1607974 - DNA, 25 bp, Homo sapien
ttcatagataagaacccccagggcc

SEQ ID NO: 1607975 - DNA, 25 bp, Homo sapien
agaagggcgggtagccagcggccat

SEQ ID NO: 1607976 - DNA, 25 bp, Homo sapien
tttcatagataagaacccccagggc

SEQ ID NO: 1607977 - DNA, 25 bp, Homo sapien
caagatgggggggcacagggtgagg

SEQ ID NO: 1607978 - DNA, 25 bp, Homo sapien
gcaagatgggggggcacagggtgag

SEQ ID NO: 1607979 - DNA, 25 bp, Homo sapien
acaaggtccaagtgcggcccttcac

SEQ ID NO: 1607980 - DNA, 25 bp, Homo sapien
cgcacaaggtccaagtgcggccctt

SEQ ID NO: 1607981 - DNA, 25 bp, Homo sapien
caagtgcggcccttcacgcgcttgg

SEQ ID NO: 1607982 - DNA, 25 bp, Homo sapien
cttcacgcgcttggcgaaaccgaag

SEQ ID NO: 1607983 - DNA, 25 bp, Homo sapien
tcaaaggtcaggacgatctgggccg

SEQ ID NO: 1607984 - DNA, 25 bp, Homo sapien
atctgggccgcgtagaaacgggcat

SEQ ID NO: 1607985 - DNA, 25 bp, Homo sapien
tgaatgtagccctgctggtcaatga

SEQ ID NO: 1607986 - DNA, 25 bp, Homo sapien
gatccagcgagtgcagatactcaaa

SEQ ID NO: 1607987 - DNA, 25 bp, Homo sapien
cctgacagcctgatgtgatgggggg

SEQ ID NO: 1607988 - DNA, 25 bp, Homo sapien
ggcttggtcgtgcactgccacctgt

SEQ ID NO: 1607989 - DNA, 25 bp, Homo sapien
tgttgaagtatgctggactcctctg

SEQ ID NO: 1607990 - DNA, 25 bp, Homo sapien
cctgatgtgatggggggtggcccgc

SEQ ID NO: 1607991 - DNA, 25 bp, Homo sapien
tgaaccttccgatccgccgtaggtg

SEQ ID NO: 1607992 - DNA, 25 bp, Homo sapien
gtaggtgtgagaacatctccccgcc

SEQ ID NO: 1607993 - DNA, 25 bp, Homo sapien
tccatgaccatgtataagtttgagt

SEQ ID NO: 1607994 - DNA, 25 bp, Homo sapien
cgtactccatgaccatgtataagtt

SEQ ID NO: 1607995 - DNA, 25 bp, Homo sapien
gggcgacccttatcctgctgttaat

SEQ ID NO: 1607996 - DNA, 25 bp, Homo sapien
gacttggacccgatctgaaggcctt

SEQ ID NO: 1607997 - DNA, 25 bp, Homo sapien
cattaaatgacaacagcgatcctgg

SEQ ID NO: 1607998 - DNA, 25 bp, Homo sapien
gctggctcagaggtatgtcaggacc

SEQ ID NO: 1607999 - DNA, 25 bp, Homo sapien
cagggtgtgttcgatctgtttcagt

SEQ ID NO: 1608000 - DNA, 25 bp, Homo sapien
cgaggaacggaaagttgacagcttg

SEQ ID NO: 1608001 - DNA, 25 bp, Homo sapien
acagcttgcaggatgcgcttttcat

SEQ ID NO: 1608002 - DNA, 25 bp, Homo sapien
tgaaggagaactcgagtttgacgag

SEQ ID NO: 1608003 - DNA, 25 bp, Homo sapien
gtccttgcacggcactaagtccagg

SEQ ID NO: 1608004 - DNA, 25 bp, Homo sapien
taagtccagggcaaagaatacatgg

SEQ ID NO: 1608005 - DNA, 25 bp, Homo sapien
taatgcctggaactagggatgccgg

SEQ ID NO: 1608006 - DNA, 25 bp, Homo sapien
gaagcccatgtaaagtacctggcgt

SEQ ID NO: 1608007 - DNA, 25 bp, Homo sapien
gagcgagactccgtctcaaaaaaaa

SEQ ID NO: 1608008 - DNA, 25 bp, Homo sapien
aaacaacaaccagccaggccaaaat

SEQ ID NO: 1608009 - DNA, 25 bp, Homo sapien
gagcccgtgccgagggtcttgattc

SEQ ID NO: 1608010 - DNA, 25 bp, Homo sapien
ttcaaactgatccaagtgggctgtg

SEQ ID NO: 1608011 - DNA, 25 bp, Homo sapien
ggcatagtggttcccggtctccttg

SEQ ID NO: 1608012 - DNA, 25 bp, Homo sapien
tcttcatggcatagtggttcccggt

SEQ ID NO: 1608013 - DNA, 25 bp, Homo sapien
ttggctttggctaagaattctttca

SEQ ID NO: 1608014 - DNA, 25 bp, Homo sapien
ttctttggctttggctaagaattct

SEQ ID NO: 1608015 - DNA, 25 bp, Homo sapien
cttctttggctttggctaagaattc

SEQ ID NO: 1608016 - DNA, 25 bp, Homo sapien
ctttggctttggctaagaattcttt

SEQ ID NO: 1608017 - DNA, 25 bp, Homo sapien
cctctccgtggcaatcgcaagggca

SEQ ID NO: 1608018 - DNA, 25 bp, Homo sapien
ttcctctccgtggcaatcgcaaggg

SEQ ID NO: 1608019 - DNA, 25 bp, Homo sapien
tcctctccgtggcaatcgcaagggc

SEQ ID NO: 1608020 - DNA, 25 bp, Homo sapien
ctctccgtggcaatcgcaagggcat

SEQ ID NO: 1608021 - DNA, 25 bp, Homo sapien
ctggctgtggcttaggcccccggaa

SEQ ID NO: 1608022 - DNA, 25 bp, Homo sapien
gaaggtgcggtgcaggtagcccagg

SEQ ID NO: 1608023 - DNA, 25 bp, Homo sapien
gtgctggctgtggcttaggcccccg

SEQ ID NO: 1608024 - DNA, 25 bp, Homo sapien
tggctgtggcttaggcccccggaag

SEQ ID NO: 1608025 - DNA, 25 bp, Homo sapien
tggaaggtggtctccaagtccccac

SEQ ID NO: 1608026 - DNA, 25 bp, Homo sapien
gccaggtgggcccagaggagcagct

SEQ ID NO: 1608027 - DNA, 25 bp, Homo sapien
agctggaaggtggtctccaagtccc

SEQ ID NO: 1608028 - DNA, 25 bp, Homo sapien
tggctgctgcctgatcccagatcca

SEQ ID NO: 1608029 - DNA, 25 bp, Homo sapien
cttgggctctccctggaatcttcct

SEQ ID NO: 1608030 - DNA, 25 bp, Homo sapien
gcccccttgggctctccctggaatc

SEQ ID NO: 1608031 - DNA, 25 bp, Homo sapien
ggctctccctggaatcttccttttg

SEQ ID NO: 1608032 - DNA, 25 bp, Homo sapien
ccccttgggctctccctggaatctt

SEQ ID NO: 1608033 - DNA, 25 bp, Homo sapien
tcagggcaccggcactacggtggct

SEQ ID NO: 1608034 - DNA, 25 bp, Homo sapien
gccgtgtctgttcggctgtctgtcc

SEQ ID NO: 1608035 - DNA, 25 bp, Homo sapien
ggctcatgagacctgccgtgtctgt

SEQ ID NO: 1608036 - DNA, 25 bp, Homo sapien
gctgggaaggctcatgagacctgcc

SEQ ID NO: 1608037 - DNA, 25 bp, Homo sapien
cctggggccgctgctccctctccat

SEQ ID NO: 1608038 - DNA, 25 bp, Homo sapien
cccctggggccgctgctccctctcc

SEQ ID NO: 1608039 - DNA, 25 bp, Homo sapien
ctgggcgcctgccccctggggccgc

SEQ ID NO: 1608040 - DNA, 25 bp, Homo sapien
gggcgcctgccccctggggccgctg

SEQ ID NO: 1608041 - DNA, 25 bp, Homo sapien
tgtcatcaggcactcagctacaggc

SEQ ID NO: 1608042 - DNA, 25 bp, Homo sapien
tcatcaggcactcagctacaggcat

SEQ ID NO: 1608043 - DNA, 25 bp, Homo sapien
gtcatcaggcactcagctacaggca

SEQ ID NO: 1608044 - DNA, 25 bp, Homo sapien
ctgtcatcaggcactcagctacagg

SEQ ID NO: 1608045 - DNA, 25 bp, Homo sapien
ggaagcactgaagcaattctctacg

SEQ ID NO: 1608046 - DNA, 25 bp, Homo sapien
gttcataaacagtctgctaccccag

SEQ ID NO: 1608047 - DNA, 25 bp, Homo sapien
tgaatcccaacaagaccagctcaaa

SEQ ID NO: 1608048 - DNA, 25 bp, Homo sapien
cccaacgcaggaaagaggatgcaat

SEQ ID NO: 1608049 - DNA, 25 bp, Homo sapien
gctctcctgctcgctgcccttcttg

SEQ ID NO: 1608050 - DNA, 25 bp, Homo sapien
tctcctgctcgctgcccttcttggc

SEQ ID NO: 1608051 - DNA, 25 bp, Homo sapien
cctgctcgctgcccttcttggcggc

SEQ ID NO: 1608052 - DNA, 25 bp, Homo sapien
tgctcgctgcccttcttggcggcgg

SEQ ID NO: 1608053 - DNA, 25 bp, Homo sapien
ctcgggctggctgcgctagctgcgg

SEQ ID NO: 1608054 - DNA, 25 bp, Homo sapien
gtcccggagctgcggcgcggcgggt

SEQ ID NO: 1608055 - DNA, 25 bp, Homo sapien
cgggctggctgcgctagctgcggcg

SEQ ID NO: 1608056 - DNA, 25 bp, Homo sapien
cctgcttcccgcgtctctccgcgcc

SEQ ID NO: 1608057 - DNA, 25 bp, Homo sapien
actcgctcgcgaggccgcagctggg

SEQ ID NO: 1608058 - DNA, 25 bp, Homo sapien
gcgggcagacgcgtccgattggccg

SEQ ID NO: 1608059 - DNA, 25 bp, Homo sapien
tccgattggccgagacgctggactg

SEQ ID NO: 1608060 - DNA, 25 bp, Homo sapien
tctcggccattcactcgctcgcgag

SEQ ID NO: 1608061 - DNA, 25 bp, Homo sapien
cgattggcggaggtgccgggtccgc

SEQ ID NO: 1608062 - DNA, 25 bp, Homo sapien
cccagcagaacgctcagtgtcaatc

SEQ ID NO: 1608063 - DNA, 25 bp, Homo sapien
gcagaacgctcagtgtcaatccggg

SEQ ID NO: 1608064 - DNA, 25 bp, Homo sapien
cgccgattggcggaggtgccgggtc

SEQ ID NO: 1608065 - DNA, 25 bp, Homo sapien
tataggcctgtagaggaaaagcgag

SEQ ID NO: 1608066 - DNA, 25 bp, Homo sapien
gaccaagaaagcctctaggtgggcc

SEQ ID NO: 1608067 - DNA, 25 bp, Homo sapien
aaagcgagatcatccttctggccag

SEQ ID NO: 1608068 - DNA, 25 bp, Homo sapien
tcctgctgatcacacctctgggagg

SEQ ID NO: 1608069 - DNA, 25 bp, Homo sapien
cagttgatatggaagcgggtcaccc

SEQ ID NO: 1608070 - DNA, 25 bp, Homo sapien
ggttcgaggccaagatgttccgctg

SEQ ID NO: 1608071 - DNA, 25 bp, Homo sapien
ccaagcccttgataggagtgcagtt

SEQ ID NO: 1608072 - DNA, 25 bp, Homo sapien
tagatgcagtccatggagttctcag

SEQ ID NO: 1608073 - DNA, 25 bp, Homo sapien
tttctcctcttctaacacagtactg

SEQ ID NO: 1608074 - DNA, 25 bp, Homo sapien
tgaaaaccttaagaagtgaccttga

SEQ ID NO: 1608075 - DNA, 25 bp, Homo sapien
gacatgcctttgagagacaaaggtc

SEQ ID NO: 1608076 - DNA, 25 bp, Homo sapien
caagtataaagaacggccttgtggg

SEQ ID NO: 1608077 - DNA, 25 bp, Homo sapien
tactcgttgttgacgtagtagccca

SEQ ID NO: 1608078 - DNA, 25 bp, Homo sapien
gcagctcagggttgaggtactcgtt

SEQ ID NO: 1608079 - DNA, 25 bp, Homo sapien
cttcatgggcgggttctcacgcagc

SEQ ID NO: 1608080 - DNA, 25 bp, Homo sapien
gatgaactcctgtccatggtaggtg

SEQ ID NO: 1608081 - DNA, 25 bp, Homo sapien
cttccgccccctggattcaaataat

SEQ ID NO: 1608082 - DNA, 25 bp, Homo sapien
aggcctgcatcactatgcctggtta

SEQ ID NO: 1608083 - DNA, 25 bp, Homo sapien
cgagtagctaggataacaaatgtgc

SEQ ID NO: 1608084 - DNA, 25 bp, Homo sapien
ggcactacaggcctgcatcactatg

SEQ ID NO: 1608085 - DNA, 25 bp, Homo sapien
cagcaccgagtctaggatctgatca

SEQ ID NO: 1608086 - DNA, 25 bp, Homo sapien
ggcccaccagcaccgagtctaggat

SEQ ID NO: 1608087 - DNA, 25 bp, Homo sapien
tcactctcagccgagccaacataaa

SEQ ID NO: 1608088 - DNA, 25 bp, Homo sapien
tcagccgagccaacataaatgatct

SEQ ID NO: 1608089 - DNA, 25 bp, Homo sapien
taagcctagctatgacaggtgacct

SEQ ID NO: 1608090 - DNA, 25 bp, Homo sapien
tgtgcagcgggatgttcatggctca

SEQ ID NO: 1608091 - DNA, 25 bp, Homo sapien
aacggcagggagttgggtcatttca

SEQ ID NO: 1608092 - DNA, 25 bp, Homo sapien
gggaattctgtcttgtaagcctagc

SEQ ID NO: 1608093 - DNA, 25 bp, Homo sapien
gcagattccaatccggcaggagagc

SEQ ID NO: 1608094 - DNA, 25 bp, Homo sapien
cagggtggcagattccaatccggca

SEQ ID NO: 1608095 - DNA, 25 bp, Homo sapien
aacgaagtggatccctcgacaactg

SEQ ID NO: 1608096 - DNA, 25 bp, Homo sapien
agggaccggtgccactcaacgaagt

SEQ ID NO: 1608097 - DNA, 25 bp, Homo sapien
gaaaggatttaactcggcatattct

SEQ ID NO: 1608098 - DNA, 25 bp, Homo sapien
ccagaaaggatttaactcggcatat

SEQ ID NO: 1608099 - DNA, 25 bp, Homo sapien
catattctatagttagccacaagta

SEQ ID NO: 1608100 - DNA, 25 bp, Homo sapien
tctatagttagccacaagtagactc

SEQ ID NO: 1608101 - DNA, 25 bp, Homo sapien
ttcactgcactcgaagctgatctcg

SEQ ID NO: 1608102 - DNA, 25 bp, Homo sapien
ctgtggaaagggctcgggttctcca

SEQ ID NO: 1608103 - DNA, 25 bp, Homo sapien
cgaagctgatctcgaaccggaaggg

SEQ ID NO: 1608104 - DNA, 25 bp, Homo sapien
aggaccgccacgttcagcaccgaca

SEQ ID NO: 1608105 - DNA, 25 bp, Homo sapien
gggtagggctgaccaggtccactcc

SEQ ID NO: 1608106 - DNA, 25 bp, Homo sapien
tagtccgcgcgccgccttcaaatag

SEQ ID NO: 1608107 - DNA, 25 bp, Homo sapien
cgcctcttctctccgagaactgaag

SEQ ID NO: 1608108 - DNA, 25 bp, Homo sapien
actgaagtgcgcacctagtccgcgc

SEQ ID NO: 1608109 - DNA, 25 bp, Homo sapien
tctccgacttggatgtcaacggcgg

SEQ ID NO: 1608110 - DNA, 25 bp, Homo sapien
tagcgtgtccgctggaaaccaatcc

SEQ ID NO: 1608111 - DNA, 25 bp, Homo sapien
tgtgaggagggcgaaactatctcca

SEQ ID NO: 1608112 - DNA, 25 bp, Homo sapien
agactcctcggaccaatcagcggag

SEQ ID NO: 1608113 - DNA, 25 bp, Homo sapien
cctcgcctcgcttttccgggagatg

SEQ ID NO: 1608114 - DNA, 25 bp, Homo sapien
tcgcttttccgggagatgcatcccg

SEQ ID NO: 1608115 - DNA, 25 bp, Homo sapien
tttccgggagatgcatcccgcagcg

SEQ ID NO: 1608116 - DNA, 25 bp, Homo sapien
cgggagatgcatcccgcagcgcgca

SEQ ID NO: 1608117 - DNA, 25 bp, Homo sapien
gcagaccagtgttcagagtccgggc

SEQ ID NO: 1608118 - DNA, 25 bp, Homo sapien
gccgtggcaattccctgacatgatt

SEQ ID NO: 1608119 - DNA, 25 bp, Homo sapien
tcaagcggacggtactgaaaatggg

SEQ ID NO: 1608120 - DNA, 25 bp, Homo sapien
gggctctgctactcagcgcccgagg

SEQ ID NO: 1608121 - DNA, 25 bp, Homo sapien
ttaggagcaaacgagttcaggagcc

SEQ ID NO: 1608122 - DNA, 25 bp, Homo sapien
tccgggaagggccatggaactgtcc

SEQ ID NO: 1608123 - DNA, 25 bp, Homo sapien
taaatgcactcgacccaaaattggt

SEQ ID NO: 1608124 - DNA, 25 bp, Homo sapien
gaggcccgaatggacagaaagttga

SEQ ID NO: 1608125 - DNA, 25 bp, Homo sapien
gaggatagggaaggtgatctctcac

SEQ ID NO: 1608126 - DNA, 25 bp, Homo sapien
gccatcaacctctctaggtgggaaa

SEQ ID NO: 1608127 - DNA, 25 bp, Homo sapien
cagcaggctgagacccgaagatgtt

SEQ ID NO: 1608128 - DNA, 25 bp, Homo sapien
acctggcttcgtcttccctgcggga

SEQ ID NO: 1608129 - DNA, 25 bp, Homo sapien
tagggaaagatccaagcccaggacc

SEQ ID NO: 1608130 - DNA, 25 bp, Homo sapien
tacagcgcaggaggaacctgtccat

SEQ ID NO: 1608131 - DNA, 25 bp, Homo sapien
gatgcacgtacacggagaagtcctg

SEQ ID NO: 1608132 - DNA, 25 bp, Homo sapien
gagtctggaagtgggctgcaccctt

SEQ ID NO: 1608133 - DNA, 25 bp, Homo sapien
caaaggccgccgcatcggctaggtt

SEQ ID NO: 1608134 - DNA, 25 bp, Homo sapien
gagggaaatccccacttcgcaagga

SEQ ID NO: 1608135 - DNA, 25 bp, Homo sapien
agaagttcaatctcggcccggtcag

SEQ ID NO: 1608136 - DNA, 25 bp, Homo sapien
gcaggttgttgtgcaccagctctga

SEQ ID NO: 1608137 - DNA, 25 bp, Homo sapien
aaggcaaggatgagctcgaaatgca

SEQ ID NO: 1608138 - DNA, 25 bp, Homo sapien
ggcaaggatgagctcgaaatgcaag

SEQ ID NO: 1608139 - DNA, 25 bp, Homo sapien
caaggatgagctcgaaatgcaagtc

SEQ ID NO: 1608140 - DNA, 25 bp, Homo sapien
tgagctcgaaatgcaagtccaggct

SEQ ID NO: 1608141 - DNA, 25 bp, Homo sapien
cgaggagggattgaagcccactgac

SEQ ID NO: 1608142 - DNA, 25 bp, Homo sapien
cgatgagggtgttgtagggactggt

SEQ ID NO: 1608143 - DNA, 25 bp, Homo sapien
agcccactgactcggcgatgagggt

SEQ ID NO: 1608144 - DNA, 25 bp, Homo sapien
ggattgaagcccactgactcggcga

SEQ ID NO: 1608145 - DNA, 25 bp, Homo sapien
tgtcattccacatcctccgaattcg

SEQ ID NO: 1608146 - DNA, 25 bp, Homo sapien
gggtgctgttgatgtcacccgccat

SEQ ID NO: 1608147 - DNA, 25 bp, Homo sapien
gtcattccacatcctccgaattcgg

SEQ ID NO: 1608148 - DNA, 25 bp, Homo sapien
ctgttgatgtcacccgccatgaagg

SEQ ID NO: 1608149 - DNA, 25 bp, Homo sapien
gcgtctttctgagactgctcacctg

SEQ ID NO: 1608150 - DNA, 25 bp, Homo sapien
ggaacacaacccaaatgtgagggga

SEQ ID NO: 1608151 - DNA, 25 bp, Homo sapien
caccctctggcgtctttctgagact

SEQ ID NO: 1608152 - DNA, 25 bp, Homo sapien
caacccaaatgtgaggggatccttg

SEQ ID NO: 1608153 - DNA, 25 bp, Homo sapien
cccagggagtcctgtctggcccgat

SEQ ID NO: 1608154 - DNA, 25 bp, Homo sapien
ccccagggagtcctgtctggcccga

SEQ ID NO: 1608155 - DNA, 25 bp, Homo sapien
ccagggagtcctgtctggcccgata

SEQ ID NO: 1608156 - DNA, 25 bp, Homo sapien
cagggagtcctgtctggcccgatac

SEQ ID NO: 1608157 - DNA, 25 bp, Homo sapien
ccctgtgtagtagcgggtgttgctt

SEQ ID NO: 1608158 - DNA, 25 bp, Homo sapien
tgtagtagcgggtgttgcttcgcat

SEQ ID NO: 1608159 - DNA, 25 bp, Homo sapien
ctgggtccctgtgtagtagcgggtg

SEQ ID NO: 1608160 - DNA, 25 bp, Homo sapien
cgggtgttgcttcgcatggctgagg

SEQ ID NO: 1608161 - DNA, 25 bp, Homo sapien
cttgagggatccgtgagtgcccccg

SEQ ID NO: 1608162 - DNA, 25 bp, Homo sapien
ggagcggatgcagcagtaggagtga

SEQ ID NO: 1608163 - DNA, 25 bp, Homo sapien
atgcagcagtaggagtgacgcaggc

SEQ ID NO: 1608164 - DNA, 25 bp, Homo sapien
agtgacgcaggcacttgctgtactc

SEQ ID NO: 1608165 - DNA, 25 bp, Homo sapien
taaggcgcagtgaaagacgaagatg

SEQ ID NO: 1608166 - DNA, 25 bp, Homo sapien
aagaggaggccgaaagcccaggtga

SEQ ID NO: 1608167 - DNA, 25 bp, Homo sapien
cttcttctgtaaggcgcagtgaaag

SEQ ID NO: 1608168 - DNA, 25 bp, Homo sapien
tgaccaccgactccttgttgatgaa

SEQ ID NO: 1608169 - DNA, 25 bp, Homo sapien
gagcttcggatcatcttgtgcaggg

SEQ ID NO: 1608170 - DNA, 25 bp, Homo sapien
tgagcacagatgagcttcggatcat

SEQ ID NO: 1608171 - DNA, 25 bp, Homo sapien
gatgagcttcggatcatcttgtgca

SEQ ID NO: 1608172 - DNA, 25 bp, Homo sapien
gtcgggcttgagcacagatgagctt

SEQ ID NO: 1608173 - DNA, 25 bp, Homo sapien
cacgataacgaaggagactggcccg

SEQ ID NO: 1608174 - DNA, 25 bp, Homo sapien
atgaagtaattgtccactcggagcc

SEQ ID NO: 1608175 - DNA, 25 bp, Homo sapien
agatgaagtaattgtccactcggag

SEQ ID NO: 1608176 - DNA, 25 bp, Homo sapien
gagactggcccgatgaaactccaga

SEQ ID NO: 1608177 - DNA, 25 bp, Homo sapien
tagctgcggtagtcaatggcagccg

SEQ ID NO: 1608178 - DNA, 25 bp, Homo sapien
aagaaatagtgcagcaggccggcga

SEQ ID NO: 1608179 - DNA, 25 bp, Homo sapien
tagtagcaggtagaggtgcacgccc

SEQ ID NO: 1608180 - DNA, 25 bp, Homo sapien
tacttggtgcgggaatactcgctct

SEQ ID NO: 1608181 - DNA, 25 bp, Homo sapien
tggccgtcacctgccctagagtccc

SEQ ID NO: 1608182 - DNA, 25 bp, Homo sapien
caggcgctggccgtcacctgcccta

SEQ ID NO: 1608183 - DNA, 25 bp, Homo sapien
gctggccgtcacctgccctagagtc

SEQ ID NO: 1608184 - DNA, 25 bp, Homo sapien
ggcccccaggcgctggccgtcacct

SEQ ID NO: 1608185 - DNA, 25 bp, Homo sapien
gaagaggttgatgcacaggttcttg

SEQ ID NO: 1608186 - DNA, 25 bp, Homo sapien
cttgtggatggtgttgcggtcggtc

SEQ ID NO: 1608187 - DNA, 25 bp, Homo sapien
tcatactgagtcttgtcgatcccga

SEQ ID NO: 1608188 - DNA, 25 bp, Homo sapien
gacagcagcagctcgttgatgcggc

SEQ ID NO: 1608189 - DNA, 25 bp, Homo sapien
ggacaggaacagggggcacgctcag

SEQ ID NO: 1608190 - DNA, 25 bp, Homo sapien
gacaggaacagggggcacgctcagg

SEQ ID NO: 1608191 - DNA, 25 bp, Homo sapien
acaggaacagggggcacgctcaggg

SEQ ID NO: 1608192 - DNA, 25 bp, Homo sapien
ggttttgcacgctgggctcagccag

SEQ ID NO: 1608193 - DNA, 25 bp, Homo sapien
tttggttttgcacgctgggctcagc

SEQ ID NO: 1608194 - DNA, 25 bp, Homo sapien
ttggttttgcacgctgggctcagcc

SEQ ID NO: 1608195 - DNA, 25 bp, Homo sapien
tggttttgcacgctgggctcagcca

SEQ ID NO: 1608196 - DNA, 25 bp, Homo sapien
cttgggagacggtgggatcatggcc

SEQ ID NO: 1608197 - DNA, 25 bp, Homo sapien
tctaggatgccatgcaaagccaggc

SEQ ID NO: 1608198 - DNA, 25 bp, Homo sapien
gatgaccaacgtaacaccaacttgc

SEQ ID NO: 1608199 - DNA, 25 bp, Homo sapien
tagaggaccagacgcatggcctcat

SEQ ID NO: 1608200 - DNA, 25 bp, Homo sapien
agtagcccagcatggaacgctccga

SEQ ID NO: 1608201 - DNA, 25 bp, Homo sapien
gagcagttagcattgaagtggttct

SEQ ID NO: 1608202 - DNA, 25 bp, Homo sapien
gtcttgttggactccaccaggcggc

SEQ ID NO: 1608203 - DNA, 25 bp, Homo sapien
agccttgggtcgaccagtagcccag

SEQ ID NO: 1608204 - DNA, 25 bp, Homo sapien
ttgatggatgctgcgatgacctgtg

SEQ ID NO: 1608205 - DNA, 25 bp, Homo sapien
gacctgtgagttcaccactagagag

SEQ ID NO: 1608206 - DNA, 25 bp, Homo sapien
cattctccgtggacaggaagaggcc

SEQ ID NO: 1608207 - DNA, 25 bp, Homo sapien
tccatgaggaagacgcggctggact

SEQ ID NO: 1608208 - DNA, 25 bp, Homo sapien
cattgcggctgttctgcttgatggt

SEQ ID NO: 1608209 - DNA, 25 bp, Homo sapien
tggagttctttctcgggtactcctc

SEQ ID NO: 1608210 - DNA, 25 bp, Homo sapien
agctggatggagttctttctcgggt

SEQ ID NO: 1608211 - DNA, 25 bp, Homo sapien
ttctgcttgatggttttggcagaca

SEQ ID NO: 1608212 - DNA, 25 bp, Homo sapien
acattgtcggccagcaggaaggcgc

SEQ ID NO: 1608213 - DNA, 25 bp, Homo sapien
caggactccagagcttctggccgga

SEQ ID NO: 1608214 - DNA, 25 bp, Homo sapien
tctggccggagcagattgtccactg

SEQ ID NO: 1608215 - DNA, 25 bp, Homo sapien
ttctccttggcagccaggaagcggg

SEQ ID NO: 1608216 - DNA, 25 bp, Homo sapien
tccttacaagttctctctcgcttgt

SEQ ID NO: 1608217 - DNA, 25 bp, Homo sapien
ccttacaagttctctctcgcttgtg

SEQ ID NO: 1608218 - DNA, 25 bp, Homo sapien
atccttacaagttctctctcgcttg

SEQ ID NO: 1608219 - DNA, 25 bp, Homo sapien
ggtcagcgccaccgccaggccccac

SEQ ID NO: 1608220 - DNA, 25 bp, Homo sapien
aggtcagcgccaccgccaggcccca

SEQ ID NO: 1608221 - DNA, 25 bp, Homo sapien
caggtcagcgccaccgccaggcccc

SEQ ID NO: 1608222 - DNA, 25 bp, Homo sapien
ttcacagaggaggagacgtcccccg

SEQ ID NO: 1608223 - DNA, 25 bp, Homo sapien
ggtgtgtcgggccagctcgctggcg

SEQ ID NO: 1608224 - DNA, 25 bp, Homo sapien
ctgactcgcgctcgatgggccgcag

SEQ ID NO: 1608225 - DNA, 25 bp, Homo sapien
cttgttgtagttcttgccggctgac

SEQ ID NO: 1608226 - DNA, 25 bp, Homo sapien
gcagttgctgaggtcagggccccgg

SEQ ID NO: 1608227 - DNA, 25 bp, Homo sapien
tctgggccacctggttgacccaggg

SEQ ID NO: 1608228 - DNA, 25 bp, Homo sapien
ggtgcagttgctgaggtcagggccc

SEQ ID NO: 1608229 - DNA, 25 bp, Homo sapien
cttctgggccacctggttgacccag

SEQ ID NO: 1608230 - DNA, 25 bp, Homo sapien
gtggccggccactggacccgccgta

SEQ ID NO: 1608231 - DNA, 25 bp, Homo sapien
tgggtggccggccactggacccgcc

SEQ ID NO: 1608232 - DNA, 25 bp, Homo sapien
tggccggccactggacccgccgtac

SEQ ID NO: 1608233 - DNA, 25 bp, Homo sapien
tgctgggtggccggccactggaccc

SEQ ID NO: 1608234 - DNA, 25 bp, Homo sapien
cagaagagctcaggggacacgtgta

SEQ ID NO: 1608235 - DNA, 25 bp, Homo sapien
ggtcccagctggttgatggcaccca

SEQ ID NO: 1608236 - DNA, 25 bp, Homo sapien
gacacgtgtagattcggggctgggg

SEQ ID NO: 1608237 - DNA, 25 bp, Homo sapien
gctggaggcagatcaggtcccagct

SEQ ID NO: 1608238 - DNA, 25 bp, Homo sapien
tgtggtggtcgtgctgaggggtggg

SEQ ID NO: 1608239 - DNA, 25 bp, Homo sapien
ctgtggtggtcgtgctgaggggtgg

SEQ ID NO: 1608240 - DNA, 25 bp, Homo sapien
ggcctggctgtggtggtcgtgctga

SEQ ID NO: 1608241 - DNA, 25 bp, Homo sapien
catgggcccatataaagtagcaaag

SEQ ID NO: 1608242 - DNA, 25 bp, Homo sapien
aaatccacgatgtgtaccataaggt

SEQ ID NO: 1608243 - DNA, 25 bp, Homo sapien
gagtggtaaaaatccacgatgtgta

SEQ ID NO: 1608244 - DNA, 25 bp, Homo sapien
catataaagtagcaaagagtggtaa

SEQ ID NO: 1608245 - DNA, 25 bp, Homo sapien
cgatccccaagagctcacaggatgg

SEQ ID NO: 1608246 - DNA, 25 bp, Homo sapien
ctcccgatccccaagagctcacagg

SEQ ID NO: 1608247 - DNA, 25 bp, Homo sapien
gatccccaagagctcacaggatggg

SEQ ID NO: 1608248 - DNA, 25 bp, Homo sapien
cccgatccccaagagctcacaggat

SEQ ID NO: 1608249 - DNA, 25 bp, Homo sapien
aggctccatgcctggaagtgagtcg

SEQ ID NO: 1608250 - DNA, 25 bp, Homo sapien
caagcaggctccatgcctggaagtg

SEQ ID NO: 1608251 - DNA, 25 bp, Homo sapien
catgcctggaagtgagtcgtcctca

SEQ ID NO: 1608252 - DNA, 25 bp, Homo sapien
ggcaagcaggctccatgcctggaag

SEQ ID NO: 1608253 - DNA, 25 bp, Homo sapien
tgttgaaggcatagtccacgcggtt

SEQ ID NO: 1608254 - DNA, 25 bp, Homo sapien
catactcagtcagtgtgtccgtgcg

SEQ ID NO: 1608255 - DNA, 25 bp, Homo sapien
catacttgacgatgttgcgcgtgcg

SEQ ID NO: 1608256 - DNA, 25 bp, Homo sapien
gctgtagcgcaccacgaaatagttg

SEQ ID NO: 1608257 - DNA, 25 bp, Homo sapien
aggtagagtggtgtttccataccca

SEQ ID NO: 1608258 - DNA, 25 bp, Homo sapien
cacccagtacccacgaagtcagtag

SEQ ID NO: 1608259 - DNA, 25 bp, Homo sapien
cccagccggcagggtctctcatggg

SEQ ID NO: 1608260 - DNA, 25 bp, Homo sapien
gtcagtagccgaggaagggattccc

SEQ ID NO: 1608261 - DNA, 25 bp, Homo sapien
gggaaccaggcgctaggataaagac

SEQ ID NO: 1608262 - DNA, 25 bp, Homo sapien
gagcagagaattcactccaaggccc

SEQ ID NO: 1608263 - DNA, 25 bp, Homo sapien
aagaaagggttagtgctggcggagg

SEQ ID NO: 1608264 - DNA, 25 bp, Homo sapien
caggcgctaggataaagacccagcc

SEQ ID NO: 1608265 - DNA, 25 bp, Homo sapien
gagggaccaaggcagcgctgatgtc

SEQ ID NO: 1608266 - DNA, 25 bp, Homo sapien
tgatgtcagaaaggtggggggcccc

SEQ ID NO: 1608267 - DNA, 25 bp, Homo sapien
gaccaaggcagcgctgatgtcagaa

SEQ ID NO: 1608268 - DNA, 25 bp, Homo sapien
ccaaggcagcgctgatgtcagaaag

SEQ ID NO: 1608269 - DNA, 25 bp, Homo sapien
gccctggccctcgaagagaaaatct

SEQ ID NO: 1608270 - DNA, 25 bp, Homo sapien
aaatctccagtggtgccgcatccaa

SEQ ID NO: 1608271 - DNA, 25 bp, Homo sapien
cagtggtgccgcatccaaaccagtg

SEQ ID NO: 1608272 - DNA, 25 bp, Homo sapien
cctgccctggccctcgaagagaaaa

SEQ ID NO: 1608273 - DNA, 25 bp, Homo sapien
gggcggcgggtgaagacgaagcctc

SEQ ID NO: 1608274 - DNA, 25 bp, Homo sapien
tcctgaaccaggcatgggtctgggc

SEQ ID NO: 1608275 - DNA, 25 bp, Homo sapien
ttactgagcacatcctgaaccaggc

SEQ ID NO: 1608276 - DNA, 25 bp, Homo sapien
gggtgaagacgaagcctctgccctt

SEQ ID NO: 1608277 - DNA, 25 bp, Homo sapien
cctgccaccaggagcgactttgtgg

SEQ ID NO: 1608278 - DNA, 25 bp, Homo sapien
catgtcatctcatggactcacacct

SEQ ID NO: 1608279 - DNA, 25 bp, Homo sapien
tgggccaagcgcttctcacatgtca

SEQ ID NO: 1608280 - DNA, 25 bp, Homo sapien
caggagcgactttgtggccggccct

SEQ ID NO: 1608281 - DNA, 25 bp, Homo sapien
agaaaattacggaagcacagaaggg

SEQ ID NO: 1608282 - DNA, 25 bp, Homo sapien
aagaaaattacggaagcacagaagg

SEQ ID NO: 1608283 - DNA, 25 bp, Homo sapien
agaagaaaattacggaagcacagaa

SEQ ID NO: 1608284 - DNA, 25 bp, Homo sapien
aaagaagaaaattacggaagcacag

SEQ ID NO: 1608285 - DNA, 25 bp, Homo sapien
tcactcatgcgagaagggcccgcat

SEQ ID NO: 1608286 - DNA, 25 bp, Homo sapien
actggtgtctgggattagagaatgt

SEQ ID NO: 1608287 - DNA, 25 bp, Homo sapien
gcccaggccccatgcatgtgtgcac

SEQ ID NO: 1608288 - DNA, 25 bp, Homo sapien
cccgcatccgcacaaggaacaagat

SEQ ID NO: 1608289 - DNA, 25 bp, Homo sapien
gggacacagtcgtactgcacctcca

SEQ ID NO: 1608290 - DNA, 25 bp, Homo sapien
aggtacttgtaggtcccaggacagg

SEQ ID NO: 1608291 - DNA, 25 bp, Homo sapien
cacgcactgggtgcggttgttacac

SEQ ID NO: 1608292 - DNA, 25 bp, Homo sapien
tcaggaaaggcatccgagccggcga

SEQ ID NO: 1608293 - DNA, 25 bp, Homo sapien
tccggcaggtagcactgcacattct

SEQ ID NO: 1608294 - DNA, 25 bp, Homo sapien
agcatcgcaaatcttgtcgtccgtg

SEQ ID NO: 1608295 - DNA, 25 bp, Homo sapien
catctggaaagggtcagcatcgcaa

SEQ ID NO: 1608296 - DNA, 25 bp, Homo sapien
tctgtgacatgatcttgaaggcgtc

SEQ ID NO: 1608297 - DNA, 25 bp, Homo sapien
gttggggatggtgtcactcctgggc

SEQ ID NO: 1608298 - DNA, 25 bp, Homo sapien
agcagggattcagccagggacccag

SEQ ID NO: 1608299 - DNA, 25 bp, Homo sapien
cttctgtgacgctggttccagccag

SEQ ID NO: 1608300 - DNA, 25 bp, Homo sapien
cacctgctgtacgaggtttcgggag

SEQ ID NO: 1608301 - DNA, 25 bp, Homo sapien
accgtcgcttgtaggtgaaggaagt

SEQ ID NO: 1608302 - DNA, 25 bp, Homo sapien
ccagccgacttgttggaggtaagag

SEQ ID NO: 1608303 - DNA, 25 bp, Homo sapien
cccagccgacttgttggaggtaaga

SEQ ID NO: 1608304 - DNA, 25 bp, Homo sapien
ggcccagccgacttgttggaggtaa

SEQ ID NO: 1608305 - DNA, 25 bp, Homo sapien
ctggcccagccgacttgttggaggt

SEQ ID NO: 1608306 - DNA, 25 bp, Homo sapien
ggcggtgacacacagattccagagc

SEQ ID NO: 1608307 - DNA, 25 bp, Homo sapien
tgggtggccgaggtgaccaggacgg

SEQ ID NO: 1608308 - DNA, 25 bp, Homo sapien
accaggacggcggtgacacacagat

SEQ ID NO: 1608309 - DNA, 25 bp, Homo sapien
attccagagcactgcggctaggcgg

SEQ ID NO: 1608310 - DNA, 25 bp, Homo sapien
cagccgggtgcgtgtccggagctct

SEQ ID NO: 1608311 - DNA, 25 bp, Homo sapien
ggtggcagccgggtgcgtgtccgga

SEQ ID NO: 1608312 - DNA, 25 bp, Homo sapien
ggtgcgtgtccggagctctcagtgg

SEQ ID NO: 1608313 - DNA, 25 bp, Homo sapien
cctgtgcggggggctttgccccaca

SEQ ID NO: 1608314 - DNA, 25 bp, Homo sapien
agcagccagacccagctatctgggc

SEQ ID NO: 1608315 - DNA, 25 bp, Homo sapien
ggcaaagagactgccaactcttccc

SEQ ID NO: 1608316 - DNA, 25 bp, Homo sapien
ctgggcaaagagactgccaactctt

SEQ ID NO: 1608317 - DNA, 25 bp, Homo sapien
cagctcacggggagatcccaggcag

SEQ ID NO: 1608318 - DNA, 25 bp, Homo sapien
gttgaatgaatctcagatcccaaag

SEQ ID NO: 1608319 - DNA, 25 bp, Homo sapien
tgttgtcttcatatcctcaactttt

SEQ ID NO: 1608320 - DNA, 25 bp, Homo sapien
ttgtcttcatatcctcaacttttag

SEQ ID NO: 1608321 - DNA, 25 bp, Homo sapien
gatcccaaagctgagactctgcctt

SEQ ID NO: 1608322 - DNA, 25 bp, Homo sapien
cgtacccactaaacaataatgccca

SEQ ID NO: 1608323 - DNA, 25 bp, Homo sapien
tccgtacccactaaacaataatgcc

SEQ ID NO: 1608324 - DNA, 25 bp, Homo sapien
ctccgtacccactaaacaataatgc

SEQ ID NO: 1608325 - DNA, 25 bp, Homo sapien
ccaggttcatccattccagaggggt

SEQ ID NO: 1608326 - DNA, 25 bp, Homo sapien
ggttcatccattccagaggggtgtt

SEQ ID NO: 1608327 - DNA, 25 bp, Homo sapien
catccattccagaggggtgttttaa

SEQ ID NO: 1608328 - DNA, 25 bp, Homo sapien
ttaaaagacaatcttggccgggcgc

SEQ ID NO: 1608329 - DNA, 25 bp, Homo sapien
tacactcacgctgggagtcagggct

SEQ ID NO: 1608330 - DNA, 25 bp, Homo sapien
cgcctcaagtgattcaagaacctcg

SEQ ID NO: 1608331 - DNA, 25 bp, Homo sapien
cagggcttcaacctctgcatttggg

SEQ ID NO: 1608332 - DNA, 25 bp, Homo sapien
tcttcttattgggataccagtcctc

SEQ ID NO: 1608333 - DNA, 25 bp, Homo sapien
gaaatcagatccgtgagaggaaccc

SEQ ID NO: 1608334 - DNA, 25 bp, Homo sapien
ggccacatgtctcgccagggagaaa

SEQ ID NO: 1608335 - DNA, 25 bp, Homo sapien
gaacccacacagaaacgagagcctt

SEQ ID NO: 1608336 - DNA, 25 bp, Homo sapien
caggcagaggacacctatgcacagg

SEQ ID NO: 1608337 - DNA, 25 bp, Homo sapien
tcccaggaccgtcagatgggaggat

SEQ ID NO: 1608338 - DNA, 25 bp, Homo sapien
actcgggtcccaggaccgtcagatg

SEQ ID NO: 1608339 - DNA, 25 bp, Homo sapien
ggaccgtcagatgggaggatgacaa

SEQ ID NO: 1608340 - DNA, 25 bp, Homo sapien
ggtcccaggaccgtcagatgggagg

SEQ ID NO: 1608341 - DNA, 25 bp, Homo sapien
gctgtcctcaaagcacgaataatcc

SEQ ID NO: 1608342 - DNA, 25 bp, Homo sapien
caaagcacgaataatccgagtggat

SEQ ID NO: 1608343 - DNA, 25 bp, Homo sapien
tcctcaaagcacgaataatccgagt

SEQ ID NO: 1608344 - DNA, 25 bp, Homo sapien
gaataatccgagtggatcaaacctg

SEQ ID NO: 1608345 - DNA, 25 bp, Homo sapien
ggggtcggcccagcgtgtctctcct

SEQ ID NO: 1608346 - DNA, 25 bp, Homo sapien
agcgtgtctctcctgcggctcggcg

SEQ ID NO: 1608347 - DNA, 25 bp, Homo sapien
ctggggtcggcccagcgtgtctctc

SEQ ID NO: 1608348 - DNA, 25 bp, Homo sapien
cgtgtctctcctgcggctcggcgaa

SEQ ID NO: 1608349 - DNA, 25 bp, Homo sapien
gcggattacacggatccaaaggcgg

SEQ ID NO: 1608350 - DNA, 25 bp, Homo sapien
gaggcggattacacggatccaaagg

SEQ ID NO: 1608351 - DNA, 25 bp, Homo sapien
ggattacacggatccaaaggcggcc

SEQ ID NO: 1608352 - DNA, 25 bp, Homo sapien
aaaagaggcggattacacggatcca

SEQ ID NO: 1608353 - DNA, 25 bp, Homo sapien
gactgggggcgatcgggtctgcgcc

SEQ ID NO: 1608354 - DNA, 25 bp, Homo sapien
ggcaccagcaatgacaagccgcctg

SEQ ID NO: 1608355 - DNA, 25 bp, Homo sapien
ccagcaatgacaagccgcctgctcg

SEQ ID NO: 1608356 - DNA, 25 bp, Homo sapien
ctggccgccgcaacccgcttgagcg

SEQ ID NO: 1608357 - DNA, 25 bp, Homo sapien
gcaacccgcttgagcgccccaggag

SEQ ID NO: 1608358 - DNA, 25 bp, Homo sapien
gccgcaacccgcttgagcgccccag

SEQ ID NO: 1608359 - DNA, 25 bp, Homo sapien
cggagtcgccgcccgggactggccg

SEQ ID NO: 1608360 - DNA, 25 bp, Homo sapien
tcaggcctaacgcagtggaaacaag

SEQ ID NO: 1608361 - DNA, 25 bp, Homo sapien
ggcacgcaaatttcgggccggattc

SEQ ID NO: 1608362 - DNA, 25 bp, Homo sapien
cggattctttctcgggagacggagt

SEQ ID NO: 1608363 - DNA, 25 bp, Homo sapien
gagacggagtaatgcgtcaggccta

SEQ ID NO: 1608364 - DNA, 25 bp, Homo sapien
cggttgccgtgttgttttaataatg

SEQ ID NO: 1608365 - DNA, 25 bp, Homo sapien
tgccgtgttgttttaataatggttc

SEQ ID NO: 1608366 - DNA, 25 bp, Homo sapien
aagggattcagctggggccggctgg

SEQ ID NO: 1608367 - DNA, 25 bp, Homo sapien
agggattcagctggggccggctggg

SEQ ID NO: 1608368 - DNA, 25 bp, Homo sapien
aaagggattcagctggggccggctg

SEQ ID NO: 1608369 - DNA, 25 bp, Homo sapien
caccgtatggggagctgcttttccc

SEQ ID NO: 1608370 - DNA, 25 bp, Homo sapien
tcaccgtatggggagctgcttttcc

SEQ ID NO: 1608371 - DNA, 25 bp, Homo sapien
aatccccgatcttggaatccacttc

SEQ ID NO: 1608372 - DNA, 25 bp, Homo sapien
gcgaggacaccgctcgtttttgccc

SEQ ID NO: 1608373 - DNA, 25 bp, Homo sapien
atccccgatcttggaatccacttct

SEQ ID NO: 1608374 - DNA, 25 bp, Homo sapien
ctgtgggcgaggacaccgctcgttt

SEQ ID NO: 1608375 - DNA, 25 bp, Homo sapien
agttgccagcgcttttcgggccccg

SEQ ID NO: 1608376 - DNA, 25 bp, Homo sapien
attaggatgcgtcctccgagggcgc

SEQ ID NO: 1608377 - DNA, 25 bp, Homo sapien
tggctcggctctttgccgaggtgat

SEQ ID NO: 1608378 - DNA, 25 bp, Homo sapien
ggcgcacggctttaacccgagttgc

SEQ ID NO: 1608379 - DNA, 25 bp, Homo sapien
gctgttagttggacgccattcgttc

SEQ ID NO: 1608380 - DNA, 25 bp, Homo sapien
tagttggacgccattcgttctgttg

SEQ ID NO: 1608381 - DNA, 25 bp, Homo sapien
acaagatgctgttagttggacgcca

SEQ ID NO: 1608382 - DNA, 25 bp, Homo sapien
ttggacgccattcgttctgttggcc

SEQ ID NO: 1608383 - DNA, 25 bp, Homo sapien
gagctcaagccttctactttcctca

SEQ ID NO: 1608384 - DNA, 25 bp, Homo sapien
ctgagctcaagccttctactttcct

SEQ ID NO: 1608385 - DNA, 25 bp, Homo sapien
tgagctcaagccttctactttcctc

SEQ ID NO: 1608386 - DNA, 25 bp, Homo sapien
ttccagcgtgacagcaagcaatgtt

SEQ ID NO: 1608387 - DNA, 25 bp, Homo sapien
tccttccagcgtgacagcaagcaat

SEQ ID NO: 1608388 - DNA, 25 bp, Homo sapien
tccagcgtgacagcaagcaatgttt

SEQ ID NO: 1608389 - DNA, 25 bp, Homo sapien
cagcgtgacagcaagcaatgtttca

SEQ ID NO: 1608390 - DNA, 25 bp, Homo sapien
cccagtggtgtgggcctagaggtca

SEQ ID NO: 1608391 - DNA, 25 bp, Homo sapien
caaagcagagggcaatggagcccag

SEQ ID NO: 1608392 - DNA, 25 bp, Homo sapien
catagaacaggatggttggccggac

SEQ ID NO: 1608393 - DNA, 25 bp, Homo sapien
accccaaagcagagggcaatggagc

SEQ ID NO: 1608394 - DNA, 25 bp, Homo sapien
tcctccagattcatgcacgttgttg

SEQ ID NO: 1608395 - DNA, 25 bp, Homo sapien
caggcttagtttacttcgcataatg

SEQ ID NO: 1608396 - DNA, 25 bp, Homo sapien
gtctttctgcgccaggcttagttta

SEQ ID NO: 1608397 - DNA, 25 bp, Homo sapien
tcttttatcaggctgaacagtactc

SEQ ID NO: 1608398 - DNA, 25 bp, Homo sapien
ccactgcactcggcctaatttttgt

SEQ ID NO: 1608399 - DNA, 25 bp, Homo sapien
tcagacagggtctcagtctgctgcc

SEQ ID NO: 1608400 - DNA, 25 bp, Homo sapien
cactgcacccagctgttttgttttt

SEQ ID NO: 1608401 - DNA, 25 bp, Homo sapien
tttcagacagggtctcagtctgctg

SEQ ID NO: 1608402 - DNA, 25 bp, Homo sapien
tgactaaggcgactccaggaacatc

SEQ ID NO: 1608403 - DNA, 25 bp, Homo sapien
ccagcttgggtctggacattccttg

SEQ ID NO: 1608404 - DNA, 25 bp, Homo sapien
aagctgccctgtgactaaggcgact

SEQ ID NO: 1608405 - DNA, 25 bp, Homo sapien
gggtctggacattccttgttttgaa

SEQ ID NO: 1608406 - DNA, 25 bp, Homo sapien
tggtcacgtgcttcagcgggtcagc

SEQ ID NO: 1608407 - DNA, 25 bp, Homo sapien
tggttggtccaaatccatctaatgc

SEQ ID NO: 1608408 - DNA, 25 bp, Homo sapien
tatttccatcctgagtggtcacgtg

SEQ ID NO: 1608409 - DNA, 25 bp, Homo sapien
tgcagcagggcaaatctatttccat

SEQ ID NO: 1608410 - DNA, 25 bp, Homo sapien
ttcgcagtggataagccctggctgg

SEQ ID NO: 1608411 - DNA, 25 bp, Homo sapien
ttacggtgaggtggacggagagcag

SEQ ID NO: 1608412 - DNA, 25 bp, Homo sapien
gaaaggacagggtgaccttcgagtc

SEQ ID NO: 1608413 - DNA, 25 bp, Homo sapien
gggttccccgttgagcaggcaccag

SEQ ID NO: 1608414 - DNA, 25 bp, Homo sapien
tgaaagatgagttaagtgggcagaa

SEQ ID NO: 1608415 - DNA, 25 bp, Homo sapien
cagaaatgagctccgggctgagaaa

SEQ ID NO: 1608416 - DNA, 25 bp, Homo sapien
gcagcaaagacactcccggagcagg

SEQ ID NO: 1608417 - DNA, 25 bp, Homo sapien
agcaaagccaatttcaggtgaaaga

SEQ ID NO: 1608418 - DNA, 25 bp, Homo sapien
ggcttgcagatggccgccttcttgc

SEQ ID NO: 1608419 - DNA, 25 bp, Homo sapien
cctcacatggcctttcctctgtgtg

SEQ ID NO: 1608420 - DNA, 25 bp, Homo sapien
tggcttgcagatggccgccttcttg

SEQ ID NO: 1608421 - DNA, 25 bp, Homo sapien
gtgtcctcacatggcctttcctctg

SEQ ID NO: 1608422 - DNA, 25 bp, Homo sapien
ttttgggctcagttcggaggctagc

SEQ ID NO: 1608423 - DNA, 25 bp, Homo sapien
tccaattccagcaaccggattttgg

SEQ ID NO: 1608424 - DNA, 25 bp, Homo sapien
tagcctgcaagccttgctggtgggt

SEQ ID NO: 1608425 - DNA, 25 bp, Homo sapien
tcggaggctagcctgcaagccttgc

SEQ ID NO: 1608426 - DNA, 25 bp, Homo sapien
gattccccttgtcccggaggctgga

SEQ ID NO: 1608427 - DNA, 25 bp, Homo sapien
cggctgcgctttggaggctggacca

SEQ ID NO: 1608428 - DNA, 25 bp, Homo sapien
ggctgcgctttggaggctggaccat

SEQ ID NO: 1608429 - DNA, 25 bp, Homo sapien
gagattccccttgtcccggaggctg

SEQ ID NO: 1608430 - DNA, 25 bp, Homo sapien
atctcagcactgagggagcctgaag

SEQ ID NO: 1608431 - DNA, 25 bp, Homo sapien
tctcagcactgagggagcctgaagc

SEQ ID NO: 1608432 - DNA, 25 bp, Homo sapien
tgaaatctcagcactgagggagcct

SEQ ID NO: 1608433 - DNA, 25 bp, Homo sapien
aaatctcagcactgagggagcctga

SEQ ID NO: 1608434 - DNA, 25 bp, Homo sapien
tcagtgatcatagcagtgtccctgg

SEQ ID NO: 1608435 - DNA, 25 bp, Homo sapien
ctcagtgatcatagcagtgtccctg

SEQ ID NO: 1608436 - DNA, 25 bp, Homo sapien
tagcagcgcgtggaggacaattttg

SEQ ID NO: 1608437 - DNA, 25 bp, Homo sapien
ggatttggaacatctccccggacca

SEQ ID NO: 1608438 - DNA, 25 bp, Homo sapien
aattttggctgtgacaacgtcacgc

SEQ ID NO: 1608439 - DNA, 25 bp, Homo sapien
ggaaggaacttttatgccaccacca

SEQ ID NO: 1608440 - DNA, 25 bp, Homo sapien
aatgctttcccatcgcttctttctg

SEQ ID NO: 1608441 - DNA, 25 bp, Homo sapien
tgtggccctatttctcgggaaccca

SEQ ID NO: 1608442 - DNA, 25 bp, Homo sapien
gggaacccacaagcccacaacagaa

SEQ ID NO: 1608443 - DNA, 25 bp, Homo sapien
gctttcccatcgcttctttctggga

SEQ ID NO: 1608444 - DNA, 25 bp, Homo sapien
tgccccaaatcttggtgatctctgg

SEQ ID NO: 1608445 - DNA, 25 bp, Homo sapien
ttgctttgaaggattaatgatgccc

SEQ ID NO: 1608446 - DNA, 25 bp, Homo sapien
taaagttaccgctgaggaagtgcta

SEQ ID NO: 1608447 - DNA, 25 bp, Homo sapien
tcaaaaaattgcacacccctggagt

SEQ ID NO: 1608448 - DNA, 25 bp, Homo sapien
cacctgagcagctttgcgatcctta

SEQ ID NO: 1608449 - DNA, 25 bp, Homo sapien
caagtgcccacaggtaatgaggtcc

SEQ ID NO: 1608450 - DNA, 25 bp, Homo sapien
tatatctgcatggttgcacagccca

SEQ ID NO: 1608451 - DNA, 25 bp, Homo sapien
tgtccatcccgtaccagttgtgaga

SEQ ID NO: 1608452 - DNA, 25 bp, Homo sapien
gacttcagtaggatccatcgttaag

SEQ ID NO: 1608453 - DNA, 25 bp, Homo sapien
gcaccactttctgtacgtgacttca

SEQ ID NO: 1608454 - DNA, 25 bp, Homo sapien
cagtaggatccatcgttaagctggg

SEQ ID NO: 1608455 - DNA, 25 bp, Homo sapien
tctgtacgtgacttcagtaggatcc

SEQ ID NO: 1608456 - DNA, 25 bp, Homo sapien
tatagtctggcaccaaagtccagga

SEQ ID NO: 1608457 - DNA, 25 bp, Homo sapien
gtactcgggacagactaagggcgct

SEQ ID NO: 1608458 - DNA, 25 bp, Homo sapien
taagggcgcttgtcccatcctggac

SEQ ID NO: 1608459 - DNA, 25 bp, Homo sapien
tggagtcggagccactggtcctgct

SEQ ID NO: 1608460 - DNA, 25 bp, Homo sapien
gccaagatgaccaagaaatagatgg

SEQ ID NO: 1608461 - DNA, 25 bp, Homo sapien
ccgtgaaaggccaagatgaccaaga

SEQ ID NO: 1608462 - DNA, 25 bp, Homo sapien
cccagggtgtccgtgaaaggccaag

SEQ ID NO: 1608463 - DNA, 25 bp, Homo sapien
caagatgaccaagaaatagatgggg

SEQ ID NO: 1608464 - DNA, 25 bp, Homo sapien
caatctctagcttctcaacagtggc

SEQ ID NO: 1608465 - DNA, 25 bp, Homo sapien
tacaatctctagcttctcaacagtg

SEQ ID NO: 1608466 - DNA, 25 bp, Homo sapien
atctctagcttctcaacagtggcgc

SEQ ID NO: 1608467 - DNA, 25 bp, Homo sapien
tcatacaatctctagcttctcaaca

SEQ ID NO: 1608468 - DNA, 25 bp, Homo sapien
aggtgaagctgcatgcgggcggctc

SEQ ID NO: 1608469 - DNA, 25 bp, Homo sapien
gaggtgaagctgcatgcgggcggct

SEQ ID NO: 1608470 - DNA, 25 bp, Homo sapien
gtgaagctgcatgcgggcggctccg

SEQ ID NO: 1608471 - DNA, 25 bp, Homo sapien
gggaggtgaagctgcatgcgggcgg

SEQ ID NO: 1608472 - DNA, 25 bp, Homo sapien
ctgtaagacatgagatgcagtgaac

SEQ ID NO: 1608473 - DNA, 25 bp, Homo sapien
tgtaagacatgagatgcagtgaact

SEQ ID NO: 1608474 - DNA, 25 bp, Homo sapien
cacattaacttcaaaccggtcctgg

SEQ ID NO: 1608475 - DNA, 25 bp, Homo sapien
tggagatgtcgatttcctctggaag

SEQ ID NO: 1608476 - DNA, 25 bp, Homo sapien
cctggacgtcattgaggattttggc

SEQ ID NO: 1608477 - DNA, 25 bp, Homo sapien
aagtgatggctaggcctttggtgcc

SEQ ID NO: 1608478 - DNA, 25 bp, Homo sapien
ggtgtccgagtcctcaggcatgtcg

SEQ ID NO: 1608479 - DNA, 25 bp, Homo sapien
ccggtgcaggtaggtgtccgagtcc

SEQ ID NO: 1608480 - DNA, 25 bp, Homo sapien
gtgcaggtaggtgtccgagtcctca

SEQ ID NO: 1608481 - DNA, 25 bp, Homo sapien
gtccgagtcctcaggcatgtcgtag

SEQ ID NO: 1608482 - DNA, 25 bp, Homo sapien
aggatccgccgctggaaatccttga

SEQ ID NO: 1608483 - DNA, 25 bp, Homo sapien
attggtggccaccaggatccgccgc

SEQ ID NO: 1608484 - DNA, 25 bp, Homo sapien
ttaaagacgatgttgactcgctcga

SEQ ID NO: 1608485 - DNA, 25 bp, Homo sapien
catcccccggccaaacagattggtg

SEQ ID NO: 1608486 - DNA, 25 bp, Homo sapien
ggtgcaggagaaacaagtggaggcc

SEQ ID NO: 1608487 - DNA, 25 bp, Homo sapien
caggagaaacaagtggaggccgtca

SEQ ID NO: 1608488 - DNA, 25 bp, Homo sapien
ggaggccgtcagacactgggctcct

SEQ ID NO: 1608489 - DNA, 25 bp, Homo sapien
gaaacaagtggaggccgtcagacac

SEQ ID NO: 1608490 - DNA, 25 bp, Homo sapien
gcactgacttgacgaagattatcac

SEQ ID NO: 1608491 - DNA, 25 bp, Homo sapien
ccagggccatgcagcgctgcactga

SEQ ID NO: 1608492 - DNA, 25 bp, Homo sapien
ggccatgccccggtggatggcgatg

SEQ ID NO: 1608493 - DNA, 25 bp, Homo sapien
gccatgcagcgctgcactgacttga

SEQ ID NO: 1608494 - DNA, 25 bp, Homo sapien
cagtcagggccacacagtccctgtg

SEQ ID NO: 1608495 - DNA, 25 bp, Homo sapien
gcagtcagggccacacagtccctgt

SEQ ID NO: 1608496 - DNA, 25 bp, Homo sapien
ggcagtcagggccacacagtccctg

SEQ ID NO: 1608497 - DNA, 25 bp, Homo sapien
cccgaaggtcctgagccccaggaca

SEQ ID NO: 1608498 - DNA, 25 bp, Homo sapien
ctcccgaaggtcctgagccccagga

SEQ ID NO: 1608499 - DNA, 25 bp, Homo sapien
tcccgaaggtcctgagccccaggac

SEQ ID NO: 1608500 - DNA, 25 bp, Homo sapien
actgtctttgagtttgacgtagtac

SEQ ID NO: 1608501 - DNA, 25 bp, Homo sapien
ctgtctttgagtttgacgtagtact

SEQ ID NO: 1608502 - DNA, 25 bp, Homo sapien
tcactgtctttgagtttgacgtagt

SEQ ID NO: 1608503 - DNA, 25 bp, Homo sapien
cactgtctttgagtttgacgtagta

SEQ ID NO: 1608504 - DNA, 25 bp, Homo sapien
ggcgactcctttgtgcgacacttcc

SEQ ID NO: 1608505 - DNA, 25 bp, Homo sapien
agaaccttccagtgggcgactcctt

SEQ ID NO: 1608506 - DNA, 25 bp, Homo sapien
tgggcatctcgcctgcccagaacct

SEQ ID NO: 1608507 - DNA, 25 bp, Homo sapien
ctttgtgcgacacttcccagaggac

SEQ ID NO: 1608508 - DNA, 25 bp, Homo sapien
tctggcccgactcaggtgtggacca

SEQ ID NO: 1608509 - DNA, 25 bp, Homo sapien
atcccagcatcctccgtgccatgtg

SEQ ID NO: 1608510 - DNA, 25 bp, Homo sapien
cagtaaacatcgctcaaaagctgga

SEQ ID NO: 1608511 - DNA, 25 bp, Homo sapien
gccatgtgggccgtgcgggtgtcct

SEQ ID NO: 1608512 - DNA, 25 bp, Homo sapien
actgcttctcgtgtggtgtcaggcg

SEQ ID NO: 1608513 - DNA, 25 bp, Homo sapien
ctcagggtggcgctgaacatcatgc

SEQ ID NO: 1608514 - DNA, 25 bp, Homo sapien
gtgtcaggcggaagatctcctgcac

SEQ ID NO: 1608515 - DNA, 25 bp, Homo sapien
tcctgcatgaacttcctgcacacag

SEQ ID NO: 1608516 - DNA, 25 bp, Homo sapien
atgggtgggcatgagcgtctgccat

SEQ ID NO: 1608517 - DNA, 25 bp, Homo sapien
tgggtgggcatgagcgtctgccatg

SEQ ID NO: 1608518 - DNA, 25 bp, Homo sapien
ggcagagtgagccgcgggagtggcc

SEQ ID NO: 1608519 - DNA, 25 bp, Homo sapien
gcgggaggagctgcaatccacttac

SEQ ID NO: 1608520 - DNA, 25 bp, Homo sapien
ggagccagtggcaccgtgacgaggg

SEQ ID NO: 1608521 - DNA, 25 bp, Homo sapien
gcgcgggaggagctgcaatccactt

SEQ ID NO: 1608522 - DNA, 25 bp, Homo sapien
gctggcgcggagcagccgtgcccgt

SEQ ID NO: 1608523 - DNA, 25 bp, Homo sapien
tggcgcggagcagccgtgcccgtgc

SEQ ID NO: 1608524 - DNA, 25 bp, Homo sapien
acgctggcgcggagcagccgtgccc

SEQ ID NO: 1608525 - DNA, 25 bp, Homo sapien
cgcggagcagccgtgcccgtgcgcc

SEQ ID NO: 1608526 - DNA, 25 bp, Homo sapien
ctgaggcagagacagccgctggggt

SEQ ID NO: 1608527 - DNA, 25 bp, Homo sapien
tgaggcagagacagccgctggggtg

SEQ ID NO: 1608528 - DNA, 25 bp, Homo sapien
gaggcagagacagccgctggggtga

SEQ ID NO: 1608529 - DNA, 25 bp, Homo sapien
tgtgtgcatgcctttacgtccagga

SEQ ID NO: 1608530 - DNA, 25 bp, Homo sapien
ctcatactcccagaggtatgtgtgc

SEQ ID NO: 1608531 - DNA, 25 bp, Homo sapien
tggaaccaacccaacaggtggcaga

SEQ ID NO: 1608532 - DNA, 25 bp, Homo sapien
gctcgggctcagaaacagcacatcc

SEQ ID NO: 1608533 - DNA, 25 bp, Homo sapien
agctttccccaagatcaccacagga

SEQ ID NO: 1608534 - DNA, 25 bp, Homo sapien
gccgcccatgtaacccactcaagag

SEQ ID NO: 1608535 - DNA, 25 bp, Homo sapien
ctgccggccgcccatgtaacccact

SEQ ID NO: 1608536 - DNA, 25 bp, Homo sapien
cagagctttccccaagatcaccaca

SEQ ID NO: 1608537 - DNA, 25 bp, Homo sapien
tgtcacactcgtccagcacaaagtg

SEQ ID NO: 1608538 - DNA, 25 bp, Homo sapien
gctgaagctcctattccgcacgagc

SEQ ID NO: 1608539 - DNA, 25 bp, Homo sapien
tattccgcacgagcgccaggatgcg

SEQ ID NO: 1608540 - DNA, 25 bp, Homo sapien
catggggacagttcttcttcaacac

SEQ ID NO: 1608541 - DNA, 25 bp, Homo sapien
cttcttgatggagagaccaccgaag

SEQ ID NO: 1608542 - DNA, 25 bp, Homo sapien
tgatggagagaccaccgaagaacac

SEQ ID NO: 1608543 - DNA, 25 bp, Homo sapien
cttgatggagagaccaccgaagaac

SEQ ID NO: 1608544 - DNA, 25 bp, Homo sapien
atggagagaccaccgaagaacacag

SEQ ID NO: 1608545 - DNA, 25 bp, Homo sapien
gagccgaggctaacaaagctgcaga

SEQ ID NO: 1608546 - DNA, 25 bp, Homo sapien
ggatgaggaggaaaccgctccatgc

SEQ ID NO: 1608547 - DNA, 25 bp, Homo sapien
tccatgctgatacacggcccaaggc

SEQ ID NO: 1608548 - DNA, 25 bp, Homo sapien
agcacctgcgaacaggaggcctcag

SEQ ID NO: 1608549 - DNA, 25 bp, Homo sapien
cttgacgctgggcatgtacttggaa

SEQ ID NO: 1608550 - DNA, 25 bp, Homo sapien
tgggcatgtacttggaaaagcgctc

SEQ ID NO: 1608551 - DNA, 25 bp, Homo sapien
gctgggcatgtacttggaaaagcgc

SEQ ID NO: 1608552 - DNA, 25 bp, Homo sapien
gacgctgggcatgtacttggaaaag

SEQ ID NO: 1608553 - DNA, 25 bp, Homo sapien
agataacgagggcacgggcgccaat

SEQ ID NO: 1608554 - DNA, 25 bp, Homo sapien
ggcacgggcgccaatatgaagccca

SEQ ID NO: 1608555 - DNA, 25 bp, Homo sapien
gcgccaatatgaagcccaaagatgt

SEQ ID NO: 1608556 - DNA, 25 bp, Homo sapien
gcccaaagatgtgcacctggcctga

SEQ ID NO: 1608557 - DNA, 25 bp, Homo sapien
caggctcaatctgctgtagggtggc

SEQ ID NO: 1608558 - DNA, 25 bp, Homo sapien
tcaatctgctgtagggtggccagca

SEQ ID NO: 1608559 - DNA, 25 bp, Homo sapien
ggatggcctggggaatgcactcatg

SEQ ID NO: 1608560 - DNA, 25 bp, Homo sapien
gctgtcttgcccatcccggacttgg

SEQ ID NO: 1608561 - DNA, 25 bp, Homo sapien
ctgcaggagaagcagagcgtgaggg

SEQ ID NO: 1608562 - DNA, 25 bp, Homo sapien
gaagcagagcgtgagggacgagaac

SEQ ID NO: 1608563 - DNA, 25 bp, Homo sapien
aggagaagcagagcgtgagggacga

SEQ ID NO: 1608564 - DNA, 25 bp, Homo sapien
gcaggagaagcagagcgtgagggac

SEQ ID NO: 1608565 - DNA, 25 bp, Homo sapien
tggatgcacccccgtgcaggatcct

SEQ ID NO: 1608566 - DNA, 25 bp, Homo sapien
gatgcacccccgtgcaggatcctca

SEQ ID NO: 1608567 - DNA, 25 bp, Homo sapien
ctggatgcacccccgtgcaggatcc

SEQ ID NO: 1608568 - DNA, 25 bp, Homo sapien
atgcacccccgtgcaggatcctcac

SEQ ID NO: 1608569 - DNA, 25 bp, Homo sapien
aagaggccgagtccggacaaggcca

SEQ ID NO: 1608570 - DNA, 25 bp, Homo sapien
ggcccacagtgagggcaatcagaag

SEQ ID NO: 1608571 - DNA, 25 bp, Homo sapien
gcaatcagaagaggccgagtccgga

SEQ ID NO: 1608572 - DNA, 25 bp, Homo sapien
agtccggacaaggccacagacacct

SEQ ID NO: 1608573 - DNA, 25 bp, Homo sapien
tgatccgcgggacagacgggcccct

SEQ ID NO: 1608574 - DNA, 25 bp, Homo sapien
tggtcaaagcagaacgccccactgc

SEQ ID NO: 1608575 - DNA, 25 bp, Homo sapien
cgctgggcacaactgatccgcggga

SEQ ID NO: 1608576 - DNA, 25 bp, Homo sapien
ctggtcaaagcagaacgccccactg

SEQ ID NO: 1608577 - DNA, 25 bp, Homo sapien
ccacggcaaactggaggcggcaccg

SEQ ID NO: 1608578 - DNA, 25 bp, Homo sapien
aagaggataacacccagaaggcgta

SEQ ID NO: 1608579 - DNA, 25 bp, Homo sapien
agaggataacacccagaaggcgtac

SEQ ID NO: 1608580 - DNA, 25 bp, Homo sapien
acagtccacgatggcccgcaggagc

SEQ ID NO: 1608581 - DNA, 25 bp, Homo sapien
caaaagatcgttttccacatcctgt

SEQ ID NO: 1608582 - DNA, 25 bp, Homo sapien
ggagctggtgtgctctcttgaggag

SEQ ID NO: 1608583 - DNA, 25 bp, Homo sapien
ttcatcgtaatccaaaagatcgttt

SEQ ID NO: 1608584 - DNA, 25 bp, Homo sapien
tagtagcaggagctacatgcgcccg

SEQ ID NO: 1608585 - DNA, 25 bp, Homo sapien
catggtcacctaatgttccatctca

SEQ ID NO: 1608586 - DNA, 25 bp, Homo sapien
attttgcttaaccactgtcagctgg

SEQ ID NO: 1608587 - DNA, 25 bp, Homo sapien
tctcaccaacatactacattttgct

SEQ ID NO: 1608588 - DNA, 25 bp, Homo sapien
tcaatcaggatctgcccaagagtac

SEQ ID NO: 1608589 - DNA, 25 bp, Homo sapien
tgtaacttactcctccgatgaaggg

SEQ ID NO: 1608590 - DNA, 25 bp, Homo sapien
tattctgggctccaaatctaggtgg

SEQ ID NO: 1608591 - DNA, 25 bp, Homo sapien
tggacaataagtcgagaccgcgtct

SEQ ID NO: 1608592 - DNA, 25 bp, Homo sapien
cggccccgcgcccgggatccgctgc

SEQ ID NO: 1608593 - DNA, 25 bp, Homo sapien
ggccccgcgcccgggatccgctgct

SEQ ID NO: 1608594 - DNA, 25 bp, Homo sapien
ctggctccccgttcttctccgcgcg

SEQ ID NO: 1608595 - DNA, 25 bp, Homo sapien
ccttttcattcaagagaggccgaag

SEQ ID NO: 1608596 - DNA, 25 bp, Homo sapien
agacacgagttgctgcgcttcctgc

SEQ ID NO: 1608597 - DNA, 25 bp, Homo sapien
ttcctgcctcttgcgtcgggctgct

SEQ ID NO: 1608598 - DNA, 25 bp, Homo sapien
ttccgccgggcgctcagacacgagt

SEQ ID NO: 1608599 - DNA, 25 bp, Homo sapien
agttgctatcaatctgcggcctggg

SEQ ID NO: 1608600 - DNA, 25 bp, Homo sapien
cttttcgaagagtggcgtctgcgct

SEQ ID NO: 1608601 - DNA, 25 bp, Homo sapien
gaaaccagaactgtcccagttgcta

SEQ ID NO: 1608602 - DNA, 25 bp, Homo sapien
tgcgctgggcgctgaaaccagaact

SEQ ID NO: 1608603 - DNA, 25 bp, Homo sapien
cctcgcctggtttccgaaggagtga

SEQ ID NO: 1608604 - DNA, 25 bp, Homo sapien
tcgggtcccaaagggcgccaatgtg

SEQ ID NO: 1608605 - DNA, 25 bp, Homo sapien
ggccacgaacaaagctgcacgctct

SEQ ID NO: 1608606 - DNA, 25 bp, Homo sapien
gagatcccctagaaattccgcagag

SEQ ID NO: 1608607 - DNA, 25 bp, Homo sapien
gctgctgtgaagtcgttactggtaa

SEQ ID NO: 1608608 - DNA, 25 bp, Homo sapien
ggtgcgatcctatgtcaccgcagcc

SEQ ID NO: 1608609 - DNA, 25 bp, Homo sapien
ctggtaagcgtcctggtcagcagct

SEQ ID NO: 1608610 - DNA, 25 bp, Homo sapien
gcagcctcgatttccaatttccggg

SEQ ID NO: 1608611 - DNA, 25 bp, Homo sapien
tctgaagaggatcaaggggcggcgt

SEQ ID NO: 1608612 - DNA, 25 bp, Homo sapien
tgcttggaggtgtggacgtttgcgg

SEQ ID NO: 1608613 - DNA, 25 bp, Homo sapien
caggtggctgggtggtcgtgggagt

SEQ ID NO: 1608614 - DNA, 25 bp, Homo sapien
gagcgtgggtgagccgagatgggag

SEQ ID NO: 1608615 - DNA, 25 bp, Homo sapien
tcggaagtccgttagggcagcggca

SEQ ID NO: 1608616 - DNA, 25 bp, Homo sapien
ccagtggatgccgaagccccgacgg

SEQ ID NO: 1608617 - DNA, 25 bp, Homo sapien
gcaaggtcaggaaacgccccacaca

SEQ ID NO: 1608618 - DNA, 25 bp, Homo sapien
tggtaggccccggaactgcatccac

SEQ ID NO: 1608619 - DNA, 25 bp, Homo sapien
tgggctggcttagtcgttgggcctc

SEQ ID NO: 1608620 - DNA, 25 bp, Homo sapien
aggctctgcgccgcgcacctgggcc

SEQ ID NO: 1608621 - DNA, 25 bp, Homo sapien
agggtgggctggcttagtcgttggg

SEQ ID NO: 1608622 - DNA, 25 bp, Homo sapien
tggctttttattcccaaaggctctg

SEQ ID NO: 1608623 - DNA, 25 bp, Homo sapien
caagaggcgaagcagttggcgcagc

SEQ ID NO: 1608624 - DNA, 25 bp, Homo sapien
tgtgccgggagctgcgcagcgagct

SEQ ID NO: 1608625 - DNA, 25 bp, Homo sapien
cagtaggatgtacacccaagggtcc

SEQ ID NO: 1608626 - DNA, 25 bp, Homo sapien
caggcgctcggtgttaggcccagcc

SEQ ID NO: 1608627 - DNA, 25 bp, Homo sapien
caggtgtcctgggacgacaaagggc

SEQ ID NO: 1608628 - DNA, 25 bp, Homo sapien
tagaggagtctcaggtgtcccggaa

SEQ ID NO: 1608629 - DNA, 25 bp, Homo sapien
tgaagcgcggcgacttataacggtg

SEQ ID NO: 1608630 - DNA, 25 bp, Homo sapien
agatgagaaacggatgcggaaaaaa

SEQ ID NO: 1608631 - DNA, 25 bp, Homo sapien
accatgataccgacaagctggccca

SEQ ID NO: 1608632 - DNA, 25 bp, Homo sapien
tccgagagccgccaaagaaggtgga

SEQ ID NO: 1608633 - DNA, 25 bp, Homo sapien
cggcgcccagcgtcatggagaagat

SEQ ID NO: 1608634 - DNA, 25 bp, Homo sapien
agcagatgcacgacaccaccatgat

SEQ ID NO: 1608635 - DNA, 25 bp, Homo sapien
atcaccggccgctcagccctgccgc

SEQ ID NO: 1608636 - DNA, 25 bp, Homo sapien
agcggctccctccacgaggagtgag

SEQ ID NO: 1608637 - DNA, 25 bp, Homo sapien
ctggctctccggcaagccgcttcct

SEQ ID NO: 1608638 - DNA, 25 bp, Homo sapien
ggatgtggggtccccatcaccggcc

SEQ ID NO: 1608639 - DNA, 25 bp, Homo sapien
tgcgcccgggtcatcatcgcagggt

SEQ ID NO: 1608640 - DNA, 25 bp, Homo sapien
tccctgcgtcaggaaactaggaagg

SEQ ID NO: 1608641 - DNA, 25 bp, Homo sapien
ggtcctgacgtcagtgtccctgctg

SEQ ID NO: 1608642 - DNA, 25 bp, Homo sapien
tgtcaaatgcggaggtaacaggctc

SEQ ID NO: 1608643 - DNA, 25 bp, Homo sapien
ttggcgtccccaatggcgccccaga

SEQ ID NO: 1608644 - DNA, 25 bp, Homo sapien
agacgaactcgtcagggaaggcaaa

SEQ ID NO: 1608645 - DNA, 25 bp, Homo sapien
cagctcatccgggttccttttgtcc

SEQ ID NO: 1608646 - DNA, 25 bp, Homo sapien
aaggcaaagtcacccagccgttcgt

SEQ ID NO: 1608647 - DNA, 25 bp, Homo sapien
ctccgtgtccctgatacccatgtaa

SEQ ID NO: 1608648 - DNA, 25 bp, Homo sapien
tccgtgtccctgatacccatgtaac

SEQ ID NO: 1608649 - DNA, 25 bp, Homo sapien
ggccacccgctgaacgctggctgat

SEQ ID NO: 1608650 - DNA, 25 bp, Homo sapien
cagtgcccagttgtgggccagagcc

SEQ ID NO: 1608651 - DNA, 25 bp, Homo sapien
gagccgcagggtccctcggccagtg

SEQ ID NO: 1608652 - DNA, 25 bp, Homo sapien
cccgctgaacgctggctgatcatgt

SEQ ID NO: 1608653 - DNA, 25 bp, Homo sapien
ttagcacgttctgggcaggaacttg

SEQ ID NO: 1608654 - DNA, 25 bp, Homo sapien
agggcaggaatcctgactcaggcct

SEQ ID NO: 1608655 - DNA, 25 bp, Homo sapien
gccaggaataggaaatgctggaggg

SEQ ID NO: 1608656 - DNA, 25 bp, Homo sapien
tggttttagcacgttctgggcagga

SEQ ID NO: 1608657 - DNA, 25 bp, Homo sapien
gaagctaggtgtgagggcaacttcc

SEQ ID NO: 1608658 - DNA, 25 bp, Homo sapien
cactgagcagtcaagcctggcctgt

SEQ ID NO: 1608659 - DNA, 25 bp, Homo sapien
tgcccagggaagtgatttagtcccc

SEQ ID NO: 1608660 - DNA, 25 bp, Homo sapien
ttccctttcggcaggccaggcttgg

SEQ ID NO: 1608661 - DNA, 25 bp, Homo sapien
cgagcagcgccactggggaggtcca

SEQ ID NO: 1608662 - DNA, 25 bp, Homo sapien
accgcctgcgcccatgcgagcagcg

SEQ ID NO: 1608663 - DNA, 25 bp, Homo sapien
cccatgcgagcagcgccactgggga

SEQ ID NO: 1608664 - DNA, 25 bp, Homo sapien
tgcgcccatgcgagcagcgccactg

SEQ ID NO: 1608665 - DNA, 25 bp, Homo sapien
ggctctgcccgttaatggcctcgat

SEQ ID NO: 1608666 - DNA, 25 bp, Homo sapien
tgtcgcccacgctgatgaggtggat

SEQ ID NO: 1608667 - DNA, 25 bp, Homo sapien
gcttcagcgtgaaggtacggcctcg

SEQ ID NO: 1608668 - DNA, 25 bp, Homo sapien
gccttgcgaggctccgtgagcttca

SEQ ID NO: 1608669 - DNA, 25 bp, Homo sapien
ggggcggggagtcatcagcccttgg

SEQ ID NO: 1608670 - DNA, 25 bp, Homo sapien
tgcgggggcggggagtcatcagccc

SEQ ID NO: 1608671 - DNA, 25 bp, Homo sapien
ctgccctggtttccggggtcccatg

SEQ ID NO: 1608672 - DNA, 25 bp, Homo sapien
agtcatcagcccttggggctctgcc

SEQ ID NO: 1608673 - DNA, 25 bp, Homo sapien
ccgacttgaacacctccacctcctt

SEQ ID NO: 1608674 - DNA, 25 bp, Homo sapien
tttgtgggtgttcagggtgcagaac

SEQ ID NO: 1608675 - DNA, 25 bp, Homo sapien
gagcccgagtgcatcctccgacttg

SEQ ID NO: 1608676 - DNA, 25 bp, Homo sapien
gttgtccgtgatggtgagcccgagt

SEQ ID NO: 1608677 - DNA, 25 bp, Homo sapien
gaggactagggggattccatcccag

SEQ ID NO: 1608678 - DNA, 25 bp, Homo sapien
ctcatcacccactgagcctgagcca

SEQ ID NO: 1608679 - DNA, 25 bp, Homo sapien
ttttctaatcaccactggagggcga

SEQ ID NO: 1608680 - DNA, 25 bp, Homo sapien
ggtgggagacgctgaaacctcttcc

SEQ ID NO: 1608681 - DNA, 25 bp, Homo sapien
ggatttcggtcctagcaaaaattca

SEQ ID NO: 1608682 - DNA, 25 bp, Homo sapien
tgctcaaacccactattgccctcct

SEQ ID NO: 1608683 - DNA, 25 bp, Homo sapien
tcccatctatccccacagtgcttgg

SEQ ID NO: 1608684 - DNA, 25 bp, Homo sapien
atcccacttagggagacccctgcgt

SEQ ID NO: 1608685 - DNA, 25 bp, Homo sapien
gagacccctgcgtctacttcttgct

SEQ ID NO: 1608686 - DNA, 25 bp, Homo sapien
gcatctcgtatctggcctctagcct

SEQ ID NO: 1608687 - DNA, 25 bp, Homo sapien
ctccaaggcatcacggagaagtgca

SEQ ID NO: 1608688 - DNA, 25 bp, Homo sapien
cggagaagtgcatctcgtatctggc

SEQ ID NO: 1608689 - DNA, 25 bp, Homo sapien
gcatcacggagaagtgcatctcgta

SEQ ID NO: 1608690 - DNA, 25 bp, Homo sapien
tgtctgatgggaactcagcatttaa

SEQ ID NO: 1608691 - DNA, 25 bp, Homo sapien
ctcccacagtctgtagaggtgcagg

SEQ ID NO: 1608692 - DNA, 25 bp, Homo sapien
tccccacaatctactggggtgcagg

SEQ ID NO: 1608693 - DNA, 25 bp, Homo sapien
tgcaggcctcccaacgcctgatggg

SEQ ID NO: 1608694 - DNA, 25 bp, Homo sapien
cacagtccattggagctcaggtctc

SEQ ID NO: 1608695 - DNA, 25 bp, Homo sapien
agtccattggagctcaggtctctca

SEQ ID NO: 1608696 - DNA, 25 bp, Homo sapien
gtccattggagctcaggtctctcag

SEQ ID NO: 1608697 - DNA, 25 bp, Homo sapien
cagtccattggagctcaggtctctc

SEQ ID NO: 1608698 - DNA, 25 bp, Homo sapien
aggtctcccagtgcctgatgggaac

SEQ ID NO: 1608699 - DNA, 25 bp, Homo sapien
actggggcacaggtctcccagtgcc

SEQ ID NO: 1608700 - DNA, 25 bp, Homo sapien
gatgggaactcagcatccagccctg

SEQ ID NO: 1608701 - DNA, 25 bp, Homo sapien
tgatgggaactcagcatccagccct

SEQ ID NO: 1608702 - DNA, 25 bp, Homo sapien
atccagcccaggccattggccccca

SEQ ID NO: 1608703 - DNA, 25 bp, Homo sapien
catccagcccaggccattggccccc

SEQ ID NO: 1608704 - DNA, 25 bp, Homo sapien
ctgagccccagctcatgaacaggat

SEQ ID NO: 1608705 - DNA, 25 bp, Homo sapien
ctctggtccaccatcagggaccctg

SEQ ID NO: 1608706 - DNA, 25 bp, Homo sapien
tggtccaccatcagggaccctggtg

SEQ ID NO: 1608707 - DNA, 25 bp, Homo sapien
ctggtgcccggctccccagtggata

SEQ ID NO: 1608708 - DNA, 25 bp, Homo sapien
tggtgcccggctccccagtggatac

SEQ ID NO: 1608709 - DNA, 25 bp, Homo sapien
ccagctgggtgtggaacacgaggcg

SEQ ID NO: 1608710 - DNA, 25 bp, Homo sapien
gtgaagccctcgatgcggccagtgg

SEQ ID NO: 1608711 - DNA, 25 bp, Homo sapien
gcctcggcgatcttgccatacagct

SEQ ID NO: 1608712 - DNA, 25 bp, Homo sapien
tgcggccagtgggactgccatgggc

SEQ ID NO: 1608713 - DNA, 25 bp, Homo sapien
tcctcattttccactagagggggcg

SEQ ID NO: 1608714 - DNA, 25 bp, Homo sapien
agcctcctcattttccactagaggg

SEQ ID NO: 1608715 - DNA, 25 bp, Homo sapien
cattttccactagagggggcgcctt

SEQ ID NO: 1608716 - DNA, 25 bp, Homo sapien
cccagccctccacggcctggctcag

SEQ ID NO: 1608717 - DNA, 25 bp, Homo sapien
gagcagcgagaagtggggtcaccag

SEQ ID NO: 1608718 - DNA, 25 bp, Homo sapien
gcagcgagaagtggggtcaccagaa

SEQ ID NO: 1608719 - DNA, 25 bp, Homo sapien
gcgagaagtggggtcaccagaagat

SEQ ID NO: 1608720 - DNA, 25 bp, Homo sapien
cagcgagaagtggggtcaccagaag

SEQ ID NO: 1608721 - DNA, 25 bp, Homo sapien
tagtgacaggacacttatataaaag

SEQ ID NO: 1608722 - DNA, 25 bp, Homo sapien
catctcttgtatagtgacaggacac

SEQ ID NO: 1608723 - DNA, 25 bp, Homo sapien
ctactcgaaccatacaggcccaagg

SEQ ID NO: 1608724 - DNA, 25 bp, Homo sapien
aaattggcctcggttgaaatcctca

SEQ ID NO: 1608725 - DNA, 25 bp, Homo sapien
ggcacaagaatagcttgaactggag

SEQ ID NO: 1608726 - DNA, 25 bp, Homo sapien
cacaagaatagcttgaactggagag

SEQ ID NO: 1608727 - DNA, 25 bp, Homo sapien
aagaatagcttgaactggagaggtg

SEQ ID NO: 1608728 - DNA, 25 bp, Homo sapien
caagaatagcttgaactggagaggt

SEQ ID NO: 1608729 - DNA, 25 bp, Homo sapien
attacatgtctgtgccaccacaccg

SEQ ID NO: 1608730 - DNA, 25 bp, Homo sapien
tctcttgcctcccgggtacaagcga

SEQ ID NO: 1608731 - DNA, 25 bp, Homo sapien
caccacaccggggtaatttctacat

SEQ ID NO: 1608732 - DNA, 25 bp, Homo sapien
gctcactcactgcaatctcttgcct

SEQ ID NO: 1608733 - DNA, 25 bp, Homo sapien
gaccgtgccattgcctgggtgacag

SEQ ID NO: 1608734 - DNA, 25 bp, Homo sapien
gctgagaccgtgccattgcctgggt

SEQ ID NO: 1608735 - DNA, 25 bp, Homo sapien
tgagaccgtgccattgcctgggtga

SEQ ID NO: 1608736 - DNA, 25 bp, Homo sapien
gagaccgtgccattgcctgggtgac

SEQ ID NO: 1608737 - DNA, 25 bp, Homo sapien
gtggggtgatcacgataatggctca

SEQ ID NO: 1608738 - DNA, 25 bp, Homo sapien
agtggggtgatcacgataatggctc

SEQ ID NO: 1608739 - DNA, 25 bp, Homo sapien
cagtggggtgatcacgataatggct

SEQ ID NO: 1608740 - DNA, 25 bp, Homo sapien
aaatggaggctgaaagcgactacgc

SEQ ID NO: 1608741 - DNA, 25 bp, Homo sapien
aagcgactacgcttctattttcctc

SEQ ID NO: 1608742 - DNA, 25 bp, Homo sapien
aagctctggcatgacaggtatgggc

SEQ ID NO: 1608743 - DNA, 25 bp, Homo sapien
cagggatcacgttatgctacaatta

SEQ ID NO: 1608744 - DNA, 25 bp, Homo sapien
tggcgactctatgaggccgggccct

SEQ ID NO: 1608745 - DNA, 25 bp, Homo sapien
gaatgactacggtgaatggtgcccc

SEQ ID NO: 1608746 - DNA, 25 bp, Homo sapien
cctgctgagccgcaatggaagtgta

SEQ ID NO: 1608747 - DNA, 25 bp, Homo sapien
cacatttgatatggtggcgactcta

SEQ ID NO: 1608748 - DNA, 25 bp, Homo sapien
cactgcctgccaagctatatttctt

SEQ ID NO: 1608749 - DNA, 25 bp, Homo sapien
tactagaccaaggtggcaagtagga

SEQ ID NO: 1608750 - DNA, 25 bp, Homo sapien
gctatatttcttggtgtggtgtctg

SEQ ID NO: 1608751 - DNA, 25 bp, Homo sapien
gaaattcggtctgtgcactgcctgc

SEQ ID NO: 1608752 - DNA, 25 bp, Homo sapien
gcaagaacgtcccaagtagagagaa

SEQ ID NO: 1608753 - DNA, 25 bp, Homo sapien
catggactcctaacgagctgggatt

SEQ ID NO: 1608754 - DNA, 25 bp, Homo sapien
gagaacagccagtagaaaggccctg

SEQ ID NO: 1608755 - DNA, 25 bp, Homo sapien
gaagctgaacttgagacctgaacca

SEQ ID NO: 1608756 - DNA, 25 bp, Homo sapien
gaagccgtgcgttctgttccaaggc

SEQ ID NO: 1608757 - DNA, 25 bp, Homo sapien
gctatggtttggataaggtttgccc

SEQ ID NO: 1608758 - DNA, 25 bp, Homo sapien
gattggctaacgaggtcgatgacgc

SEQ ID NO: 1608759 - DNA, 25 bp, Homo sapien
tttgccccattgaaactcatgctcg

SEQ ID NO: 1608760 - DNA, 25 bp, Homo sapien
cgacttcttgtccagacagcagcca

SEQ ID NO: 1608761 - DNA, 25 bp, Homo sapien
tggttgcctcctgtgggtttcccag

SEQ ID NO: 1608762 - DNA, 25 bp, Homo sapien
cctacgacttcttgtccagacagca

SEQ ID NO: 1608763 - DNA, 25 bp, Homo sapien
ctaaactagtgtggttgcctcctgt

SEQ ID NO: 1608764 - DNA, 25 bp, Homo sapien
aagtcacttcacatcacagggcctc

SEQ ID NO: 1608765 - DNA, 25 bp, Homo sapien
cggctcggccctccgcaaactccag

SEQ ID NO: 1608766 - DNA, 25 bp, Homo sapien
gtgcgcacccggctcggccctccgc

SEQ ID NO: 1608767 - DNA, 25 bp, Homo sapien
gccctccgcaaactccagaccgggc

SEQ ID NO: 1608768 - DNA, 25 bp, Homo sapien
cctccccgtgcgcacccggctcggc

SEQ ID NO: 1608769 - DNA, 25 bp, Homo sapien
ggaaatgggtcctctctacagtggg

SEQ ID NO: 1608770 - DNA, 25 bp, Homo sapien
gcagctttagtagcctgcaaataaa

SEQ ID NO: 1608771 - DNA, 25 bp, Homo sapien
tcccataaatagctggccctacagg

SEQ ID NO: 1608772 - DNA, 25 bp, Homo sapien
tacaggtgtacgctgcattctccgg

SEQ ID NO: 1608773 - DNA, 25 bp, Homo sapien
ttgagctccggtttggccagccttc

SEQ ID NO: 1608774 - DNA, 25 bp, Homo sapien
tgagctccggtttggccagccttca

SEQ ID NO: 1608775 - DNA, 25 bp, Homo sapien
gagctccggtttggccagccttcag

SEQ ID NO: 1608776 - DNA, 25 bp, Homo sapien
tctgctgaaaaagccagggaccctg

SEQ ID NO: 1608777 - DNA, 25 bp, Homo sapien
tccaacccacttatggctgaggaag

SEQ ID NO: 1608778 - DNA, 25 bp, Homo sapien
gagacttacgtttcccttgcagggc

SEQ ID NO: 1608779 - DNA, 25 bp, Homo sapien
ttaagaggccagaccctgggttggc

SEQ ID NO: 1608780 - DNA, 25 bp, Homo sapien
tcaggaaggccccttgctgaggcca

SEQ ID NO: 1608781 - DNA, 25 bp, Homo sapien
tgctgtcgcacttcattgactagtc

SEQ ID NO: 1608782 - DNA, 25 bp, Homo sapien
gccaggctcccagaccatcaaggga

SEQ ID NO: 1608783 - DNA, 25 bp, Homo sapien
ttaatgctgtcgcacttcattgact

SEQ ID NO: 1608784 - DNA, 25 bp, Homo sapien
attgcttgtggacgccaaccaggca

SEQ ID NO: 1608785 - DNA, 25 bp, Homo sapien
ttggtcctgctggaacgagaggtat

SEQ ID NO: 1608786 - DNA, 25 bp, Homo sapien
cctgctggaacgagaggtattgctt

SEQ ID NO: 1608787 - DNA, 25 bp, Homo sapien
aacgagaggtattgcttgtggacgc

SEQ ID NO: 1608788 - DNA, 25 bp, Homo sapien
aaccactgaagtctagtgtgcgact

SEQ ID NO: 1608789 - DNA, 25 bp, Homo sapien
gactgcaggttgacattatctacca

SEQ ID NO: 1608790 - DNA, 25 bp, Homo sapien
acagggtctgggaatcaagactgca

SEQ ID NO: 1608791 - DNA, 25 bp, Homo sapien
gccctatagctcgaaaaaccactga

SEQ ID NO: 1608792 - DNA, 25 bp, Homo sapien
aatacgacgggtatcgtcctgccgt

SEQ ID NO: 1608793 - DNA, 25 bp, Homo sapien
tctttgaatacgacgggtatcgtcc

SEQ ID NO: 1608794 - DNA, 25 bp, Homo sapien
gcctgataacatctttgaatacgac

SEQ ID NO: 1608795 - DNA, 25 bp, Homo sapien
tgataacatctttgaatacgacggg

SEQ ID NO: 1608796 - DNA, 25 bp, Homo sapien
cagcattagatggaagctggctcaa

SEQ ID NO: 1608797 - DNA, 25 bp, Homo sapien
gaagctggctcaagaggctcagctc

SEQ ID NO: 1608798 - DNA, 25 bp, Homo sapien
cttgaaaagcaaaaggacagcatta

SEQ ID NO: 1608799 - DNA, 25 bp, Homo sapien
ggctcagctcttgcccagaggccgt

SEQ ID NO: 1608800 - DNA, 25 bp, Homo sapien
atagataagacccatcaggcctctg

SEQ ID NO: 1608801 - DNA, 25 bp, Homo sapien
ccaacacattggttcagcaaatact

SEQ ID NO: 1608802 - DNA, 25 bp, Homo sapien
aggcctctgcagctaagacctggcc

SEQ ID NO: 1608803 - DNA, 25 bp, Homo sapien
gaaagctccacaacagcgccctggt

SEQ ID NO: 1608804 - DNA, 25 bp, Homo sapien
aaggtgtcaaagggatttctgccac

SEQ ID NO: 1608805 - DNA, 25 bp, Homo sapien
aaaggtgtcaaagggatttctgcca

SEQ ID NO: 1608806 - DNA, 25 bp, Homo sapien
aaagtcagctccagatcaagcccag

SEQ ID NO: 1608807 - DNA, 25 bp, Homo sapien
tggctgaacagcagactctctctcg

SEQ ID NO: 1608808 - DNA, 25 bp, Homo sapien
gactcatgcggttaggtgttcacct

SEQ ID NO: 1608809 - DNA, 25 bp, Homo sapien
agtatttccgcgtagcctgacagtg

SEQ ID NO: 1608810 - DNA, 25 bp, Homo sapien
ctccggacctgggcggccgctgcct

SEQ ID NO: 1608811 - DNA, 25 bp, Homo sapien
ccgctctccggacctgggcggccgc

SEQ ID NO: 1608812 - DNA, 25 bp, Homo sapien
tctccggacctgggcggccgctgcc

SEQ ID NO: 1608813 - DNA, 25 bp, Homo sapien
cgctctccggacctgggcggccgct

SEQ ID NO: 1608814 - DNA, 25 bp, Homo sapien
gcagccccagacatgctagaagctt

SEQ ID NO: 1608815 - DNA, 25 bp, Homo sapien
gcggccgccaatccgagggcggagg

SEQ ID NO: 1608816 - DNA, 25 bp, Homo sapien
gccaggtcatcacttcccgggaatt

SEQ ID NO: 1608817 - DNA, 25 bp, Homo sapien
agtttccctgtctgtcaaaaggcgg

SEQ ID NO: 1608818 - DNA, 25 bp, Homo sapien
cgtcgtaggcctcagcgatctcctt

SEQ ID NO: 1608819 - DNA, 25 bp, Homo sapien
ttgcgcgggtcgctgagcacgtcgt

SEQ ID NO: 1608820 - DNA, 25 bp, Homo sapien
cacgtcgtaggcctcagcgatctcc

SEQ ID NO: 1608821 - DNA, 25 bp, Homo sapien
cgggtcgctgagcacgtcgtaggcc

SEQ ID NO: 1608822 - DNA, 25 bp, Homo sapien
gccgaccagtcccggactctatata

SEQ ID NO: 1608823 - DNA, 25 bp, Homo sapien
cagtcccggactctatatacccgtc

SEQ ID NO: 1608824 - DNA, 25 bp, Homo sapien
tctatatacccgtccggcggaagct

SEQ ID NO: 1608825 - DNA, 25 bp, Homo sapien
cggactctatatacccgtccggcgg

SEQ ID NO: 1608826 - DNA, 25 bp, Homo sapien
gacagcctggttaccggaagccaga

SEQ ID NO: 1608827 - DNA, 25 bp, Homo sapien
catggatgggtcttagggtttcaac

SEQ ID NO: 1608828 - DNA, 25 bp, Homo sapien
tgtatgttccggttgacacgcagca

SEQ ID NO: 1608829 - DNA, 25 bp, Homo sapien
aagtggccagtcttcattccaaggg

SEQ ID NO: 1608830 - DNA, 25 bp, Homo sapien
caaatctggatgactgagttccaag

SEQ ID NO: 1608831 - DNA, 25 bp, Homo sapien
caaaggctacagcttcagaagtttc

SEQ ID NO: 1608832 - DNA, 25 bp, Homo sapien
tccccaaaggctacagcttcagaag

SEQ ID NO: 1608833 - DNA, 25 bp, Homo sapien
gccaaatctggatgactgagttcca

SEQ ID NO: 1608834 - DNA, 25 bp, Homo sapien
ggacttctcatcgtgtctctcatga

SEQ ID NO: 1608835 - DNA, 25 bp, Homo sapien
catgacaggcctgtgaattccagat

SEQ ID NO: 1608836 - DNA, 25 bp, Homo sapien
ttcaacagctcatgaaagctcaggg

SEQ ID NO: 1608837 - DNA, 25 bp, Homo sapien
gcctgctcccctgtgaatcagtgat

SEQ ID NO: 1608838 - DNA, 25 bp, Homo sapien
ctggaaacaagagtaaggagaggag

SEQ ID NO: 1608839 - DNA, 25 bp, Homo sapien
ttcaagcgattctcagcctccctag

SEQ ID NO: 1608840 - DNA, 25 bp, Homo sapien
tacaggtgcccaccattacacctgg

SEQ ID NO: 1608841 - DNA, 25 bp, Homo sapien
acaggtgcccaccattacacctggc

SEQ ID NO: 1608842 - DNA, 25 bp, Homo sapien
gattacaggtgcccaccattacacc

SEQ ID NO: 1608843 - DNA, 25 bp, Homo sapien
ccttcggcgccgcctgtcatgtgga

SEQ ID NO: 1608844 - DNA, 25 bp, Homo sapien
tcggcgccgcctgtcatgtggatgc

SEQ ID NO: 1608845 - DNA, 25 bp, Homo sapien
gtggatgctgccttgcctgtcactc

SEQ ID NO: 1608846 - DNA, 25 bp, Homo sapien
ctcagaatttaccccttcggcgccg

SEQ ID NO: 1608847 - DNA, 25 bp, Homo sapien
tagtctatcgctgcggttgcgagcg

SEQ ID NO: 1608848 - DNA, 25 bp, Homo sapien
gggccactcgtaaattccaatgcgc

SEQ ID NO: 1608849 - DNA, 25 bp, Homo sapien
tacgaggtaagaagcgagaaacagg

SEQ ID NO: 1608850 - DNA, 25 bp, Homo sapien
tgtgccgcgcagttaggcagcagca

SEQ ID NO: 1608851 - DNA, 25 bp, Homo sapien
gaggtcatctacgtcaacccttggg

SEQ ID NO: 1608852 - DNA, 25 bp, Homo sapien
tttgtcatgggagccacgaaggtgc

SEQ ID NO: 1608853 - DNA, 25 bp, Homo sapien
ggagaaatcttatacccacccacag

SEQ ID NO: 1608854 - DNA, 25 bp, Homo sapien
aatccgagggagtcttgcacaaatc

SEQ ID NO: 1608855 - DNA, 25 bp, Homo sapien
gtttggtcgggaatcctgcactttc

SEQ ID NO: 1608856 - DNA, 25 bp, Homo sapien
cagaggagggttgacagccttgagt

SEQ ID NO: 1608857 - DNA, 25 bp, Homo sapien
cggtgcttggaaaggccttgcgact

SEQ ID NO: 1608858 - DNA, 25 bp, Homo sapien
aaggccttgcgactctgataaggtg

SEQ ID NO: 1608859 - DNA, 25 bp, Homo sapien
gactgcaggtgtgtatcactatgtc

SEQ ID NO: 1608860 - DNA, 25 bp, Homo sapien
ggtgtgtatcactatgtctggctgc

SEQ ID NO: 1608861 - DNA, 25 bp, Homo sapien
ctgcaggtgtgtatcactatgtctg

SEQ ID NO: 1608862 - DNA, 25 bp, Homo sapien
tgtatcactatgtctggctgctttt

SEQ ID NO: 1608863 - DNA, 25 bp, Homo sapien
gctggtccaggccttttcccgtcat

SEQ ID NO: 1608864 - DNA, 25 bp, Homo sapien
cgcacaggttgtgggcaggtcctgc

SEQ ID NO: 1608865 - DNA, 25 bp, Homo sapien
aggtcctgctggtccaggccttttc

SEQ ID NO: 1608866 - DNA, 25 bp, Homo sapien
cctgctggtccaggccttttcccgt

SEQ ID NO: 1608867 - DNA, 25 bp, Homo sapien
ggaccctgcctctgttttccagtcc

SEQ ID NO: 1608868 - DNA, 25 bp, Homo sapien
aggaccctgcctctgttttccagtc

SEQ ID NO: 1608869 - DNA, 25 bp, Homo sapien
gtagtttgctgacccatttgtctaa

SEQ ID NO: 1608870 - DNA, 25 bp, Homo sapien
tttgtctaagccatcattaccttca

SEQ ID NO: 1608871 - DNA, 25 bp, Homo sapien
ttcaaaagccggcagtagaccagag

SEQ ID NO: 1608872 - DNA, 25 bp, Homo sapien
ccagagttgccctatcggctgtagt

SEQ ID NO: 1608873 - DNA, 25 bp, Homo sapien
gtcagtttgtatctgcagggctcag

SEQ ID NO: 1608874 - DNA, 25 bp, Homo sapien
tgtctgctggactcgggcagtcggg

SEQ ID NO: 1608875 - DNA, 25 bp, Homo sapien
tcctggtccgacagcgccttcctgc

SEQ ID NO: 1608876 - DNA, 25 bp, Homo sapien
ggttggcccggatgagctcctcctg

SEQ ID NO: 1608877 - DNA, 25 bp, Homo sapien
cagcattgaggacgcgcccctgctt

SEQ ID NO: 1608878 - DNA, 25 bp, Homo sapien
gaggacgcgcccctgcttttctagg

SEQ ID NO: 1608879 - DNA, 25 bp, Homo sapien
aggacgcgcccctgcttttctaggc

SEQ ID NO: 1608880 - DNA, 25 bp, Homo sapien
attgaggacgcgcccctgcttttct

SEQ ID NO: 1608881 - DNA, 25 bp, Homo sapien
tattttattgtaggagctttgggcc

SEQ ID NO: 1608882 - DNA, 25 bp, Homo sapien
ggcgagggcttcctcgttcccaagc

SEQ ID NO: 1608883 - DNA, 25 bp, Homo sapien
tctctgttgcacatagccctgctct

SEQ ID NO: 1608884 - DNA, 25 bp, Homo sapien
tgggcacttccaggctacttacctt

SEQ ID NO: 1608885 - DNA, 25 bp, Homo sapien
acctctcgtcttgccagcacaggta

SEQ ID NO: 1608886 - DNA, 25 bp, Homo sapien
ctggcctcggatccgagagcccaga

SEQ ID NO: 1608887 - DNA, 25 bp, Homo sapien
gccagcacaggtagaagacaggagc

SEQ ID NO: 1608888 - DNA, 25 bp, Homo sapien
tggccctggcctcggatccgagagc

SEQ ID NO: 1608889 - DNA, 25 bp, Homo sapien
gagcctgccggagctttgagctcaa

SEQ ID NO: 1608890 - DNA, 25 bp, Homo sapien
tcccctgcggggtccgagagagcct

SEQ ID NO: 1608891 - DNA, 25 bp, Homo sapien
gctttgagctcaacaggtgggctgt

SEQ ID NO: 1608892 - DNA, 25 bp, Homo sapien
gtgcggcaccacatcagctctgcaa

SEQ ID NO: 1608893 - DNA, 25 bp, Homo sapien
ccagctcggcaacttctccatccac

SEQ ID NO: 1608894 - DNA, 25 bp, Homo sapien
agctcggcaacttctccatccacat

SEQ ID NO: 1608895 - DNA, 25 bp, Homo sapien
cagctcggcaacttctccatccaca

SEQ ID NO: 1608896 - DNA, 25 bp, Homo sapien
ctgaaggcttttatttgactggtcc

SEQ ID NO: 1608897 - DNA, 25 bp, Homo sapien
ttatttgactggtccatagggtggg

SEQ ID NO: 1608898 - DNA, 25 bp, Homo sapien
gggcctgaaggcttttatttgactg

SEQ ID NO: 1608899 - DNA, 25 bp, Homo sapien
ttttatttgactggtccatagggtg

SEQ ID NO: 1608900 - DNA, 25 bp, Homo sapien
ccgctcccgctcaaactccttcatg

SEQ ID NO: 1608901 - DNA, 25 bp, Homo sapien
tttggccaactctgccgccttcttc

SEQ ID NO: 1608902 - DNA, 25 bp, Homo sapien
cctccgctcccgctcaaactccttc

SEQ ID NO: 1608903 - DNA, 25 bp, Homo sapien
aaactccttcatgcgcatcacatag

SEQ ID NO: 1608904 - DNA, 25 bp, Homo sapien
tgggggaaaagcacgagaggggctg

SEQ ID NO: 1608905 - DNA, 25 bp, Homo sapien
ctgggggaaaagcacgagaggggct

SEQ ID NO: 1608906 - DNA, 25 bp, Homo sapien
tcgcggtgctcgcagtagtcccagt

SEQ ID NO: 1608907 - DNA, 25 bp, Homo sapien
gtggtgggcgcagtagtcccgcagc

SEQ ID NO: 1608908 - DNA, 25 bp, Homo sapien
tgtcacgcttgcacttgagcagccg

SEQ ID NO: 1608909 - DNA, 25 bp, Homo sapien
tggagcctcagctgcgcgtccatca

SEQ ID NO: 1608910 - DNA, 25 bp, Homo sapien
gctccttgcgttcggggaagccgta

SEQ ID NO: 1608911 - DNA, 25 bp, Homo sapien
aagccgtagtctggcgggaaggttg

SEQ ID NO: 1608912 - DNA, 25 bp, Homo sapien
agggggtcgggctccaccgaggcat

SEQ ID NO: 1608913 - DNA, 25 bp, Homo sapien
atcgcccaggtagcgccggaccagg

SEQ ID NO: 1608914 - DNA, 25 bp, Homo sapien
gagggtcacctagctcctacccgga

SEQ ID NO: 1608915 - DNA, 25 bp, Homo sapien
ctgcagcagccgagggtcacctagc

SEQ ID NO: 1608916 - DNA, 25 bp, Homo sapien
cgagggtcacctagctcctacccgg

SEQ ID NO: 1608917 - DNA, 25 bp, Homo sapien
gcagccgagggtcacctagctccta

SEQ ID NO: 1608918 - DNA, 25 bp, Homo sapien
agcaagactttctttcgtttgtttg

SEQ ID NO: 1608919 - DNA, 25 bp, Homo sapien
taagatagtccctgcctaatgtgcc

SEQ ID NO: 1608920 - DNA, 25 bp, Homo sapien
tttttgagcgcaagcgtgacccact

SEQ ID NO: 1608921 - DNA, 25 bp, Homo sapien
ccaagtcatgggatgaggcccggat

SEQ ID NO: 1608922 - DNA, 25 bp, Homo sapien
gacattgcccgtgtaagagctgaca

SEQ ID NO: 1608923 - DNA, 25 bp, Homo sapien
cagtggcatttcacaggcacgaccc

SEQ ID NO: 1608924 - DNA, 25 bp, Homo sapien
aagagatgggttctcaggacgtggc

SEQ ID NO: 1608925 - DNA, 25 bp, Homo sapien
gcatttcacaggcacgaccccacta

SEQ ID NO: 1608926 - DNA, 25 bp, Homo sapien
agatgggttctcaggacgtggccca

SEQ ID NO: 1608927 - DNA, 25 bp, Homo sapien
gttgagagcctattgtggagaacaa

SEQ ID NO: 1608928 - DNA, 25 bp, Homo sapien
tttgttgagagcctattgtggagaa

SEQ ID NO: 1608929 - DNA, 25 bp, Homo sapien
cagcttgggaagtaaaggttgatta

SEQ ID NO: 1608930 - DNA, 25 bp, Homo sapien
ggttgattacttcctctccaaggat

SEQ ID NO: 1608931 - DNA, 25 bp, Homo sapien
ttttctcttcacttgtcctggaaaa

SEQ ID NO: 1608932 - DNA, 25 bp, Homo sapien
ttaatattttctcttcacttgtcct

SEQ ID NO: 1608933 - DNA, 25 bp, Homo sapien
cttcacttgtcctggaaaaacatcc

SEQ ID NO: 1608934 - DNA, 25 bp, Homo sapien
ttctcttcacttgtcctggaaaaac

SEQ ID NO: 1608935 - DNA, 25 bp, Homo sapien
cctaaagctacctaactgtgactat

SEQ ID NO: 1608936 - DNA, 25 bp, Homo sapien
aagctacctaactgtgactatggaa

SEQ ID NO: 1608937 - DNA, 25 bp, Homo sapien
taaagctacctaactgtgactatgg

SEQ ID NO: 1608938 - DNA, 25 bp, Homo sapien
tgccctaaagctacctaactgtgac

SEQ ID NO: 1608939 - DNA, 25 bp, Homo sapien
caaccacaccagctacaattggaat

SEQ ID NO: 1608940 - DNA, 25 bp, Homo sapien
tagcaaactcccttctgtcatgaat

SEQ ID NO: 1608941 - DNA, 25 bp, Homo sapien
tacggcactcttataaataggattt

SEQ ID NO: 1608942 - DNA, 25 bp, Homo sapien
aaagcttccatatcagcagtaatgc

SEQ ID NO: 1608943 - DNA, 25 bp, Homo sapien
tagaaccaacagtcgtcaacatcct

SEQ ID NO: 1608944 - DNA, 25 bp, Homo sapien
cacaacatgaaccatgacctcgttg

SEQ ID NO: 1608945 - DNA, 25 bp, Homo sapien
gaaacttcggatctgtacacttaca

SEQ ID NO: 1608946 - DNA, 25 bp, Homo sapien
cacacgtttgcccttgaaacttcgg

SEQ ID NO: 1608947 - DNA, 25 bp, Homo sapien
tattttgaaaataatgttgtaattc

SEQ ID NO: 1608948 - DNA, 25 bp, Homo sapien
ttttgaaaataatgttgtaattcat

SEQ ID NO: 1608949 - DNA, 25 bp, Homo sapien
tacaaaggccatgggaaaaattcag

SEQ ID NO: 1608950 - DNA, 25 bp, Homo sapien
taaatgtcctgctagctagttaagg

SEQ ID NO: 1608951 - DNA, 25 bp, Homo sapien
caagccttagataaaagaaccgagc

SEQ ID NO: 1608952 - DNA, 25 bp, Homo sapien
gctatttgcctgttagacatgactg

SEQ ID NO: 1608953 - DNA, 25 bp, Homo sapien
tgagttagtgccataacagaccact

SEQ ID NO: 1608954 - DNA, 25 bp, Homo sapien
gaagttatactgtggctatgcaaca

SEQ ID NO: 1608955 - DNA, 25 bp, Homo sapien
gagttgcccatcttgtttcacacta

SEQ ID NO: 1608956 - DNA, 25 bp, Homo sapien
atgcaacagctctcacctacgcgag

SEQ ID NO: 1608957 - DNA, 25 bp, Homo sapien
gaatacatatgaaaaccagcttaag

SEQ ID NO: 1608958 - DNA, 25 bp, Homo sapien
tcacacagcaagaatacatatgaaa

SEQ ID NO: 1608959 - DNA, 25 bp, Homo sapien
tctgatgatatgtttcacccataca

SEQ ID NO: 1608960 - DNA, 25 bp, Homo sapien
ttagattgcattggttctgatgata

SEQ ID NO: 1608961 - DNA, 25 bp, Homo sapien
gattttgattttacgatctctctaa

SEQ ID NO: 1608962 - DNA, 25 bp, Homo sapien
gagtcaggacccatcttgctggaaa

SEQ ID NO: 1608963 - DNA, 25 bp, Homo sapien
aaagtgtgtatgtctcagactcaga

SEQ ID NO: 1608964 - DNA, 25 bp, Homo sapien
ttacgatctctctaaaccacttttg

SEQ ID NO: 1608965 - DNA, 25 bp, Homo sapien
gctgttccatggtttgagatgtgag

SEQ ID NO: 1608966 - DNA, 25 bp, Homo sapien
gcccctgcagacagccagtgttaca

SEQ ID NO: 1608967 - DNA, 25 bp, Homo sapien
tcatcatgcccactgctgttccatg

SEQ ID NO: 1608968 - DNA, 25 bp, Homo sapien
tgcagacagccagtgttacaaggaa

SEQ ID NO: 1608969 - DNA, 25 bp, Homo sapien
cttaaatccccattgaactccattt

SEQ ID NO: 1608970 - DNA, 25 bp, Homo sapien
tcaacttaaatccccattgaactcc

SEQ ID NO: 1608971 - DNA, 25 bp, Homo sapien
acttaaatccccattgaactccatt

SEQ ID NO: 1608972 - DNA, 25 bp, Homo sapien
aacttaaatccccattgaactccat

SEQ ID NO: 1608973 - DNA, 25 bp, Homo sapien
ggcagctggacccacctgtagcaag

SEQ ID NO: 1608974 - DNA, 25 bp, Homo sapien
agctggacccacctgtagcaagccc

SEQ ID NO: 1608975 - DNA, 25 bp, Homo sapien
gcagctggacccacctgtagcaagc

SEQ ID NO: 1608976 - DNA, 25 bp, Homo sapien
tgggcagctggacccacctgtagca

SEQ ID NO: 1608977 - DNA, 25 bp, Homo sapien
cttgtgttctggatggttgacactt

SEQ ID NO: 1608978 - DNA, 25 bp, Homo sapien
tgtgttctggatggttgacacttca

SEQ ID NO: 1608979 - DNA, 25 bp, Homo sapien
ttgtgttctggatggttgacacttc

SEQ ID NO: 1608980 - DNA, 25 bp, Homo sapien
caaaagaccaagataaacaatacta

SEQ ID NO: 1608981 - DNA, 25 bp, Homo sapien
ccaagataaacaatactaaattcgc

SEQ ID NO: 1608982 - DNA, 25 bp, Homo sapien
aagaccaagataaacaatactaaat

SEQ ID NO: 1608983 - DNA, 25 bp, Homo sapien
gaccaagataaacaatactaaattc

SEQ ID NO: 1608984 - DNA, 25 bp, Homo sapien
cacagactgggccaaggaaactcca

SEQ ID NO: 1608985 - DNA, 25 bp, Homo sapien
aactccacatgaatccctggtccag

SEQ ID NO: 1608986 - DNA, 25 bp, Homo sapien
tgggccaaggaaactccacatgaat

SEQ ID NO: 1608987 - DNA, 25 bp, Homo sapien
aaggaaactccacatgaatccctgg

SEQ ID NO: 1608988 - DNA, 25 bp, Homo sapien
tagccgactgggaacatgatccact

SEQ ID NO: 1608989 - DNA, 25 bp, Homo sapien
cgactgggaacatgatccacttcat

SEQ ID NO: 1608990 - DNA, 25 bp, Homo sapien
ggccacagtcacagcgggaacgcca

SEQ ID NO: 1608991 - DNA, 25 bp, Homo sapien
cgggaacgccatagccgactgggaa

SEQ ID NO: 1608992 - DNA, 25 bp, Homo sapien
ggaagaggtgcacaccctccagcag

SEQ ID NO: 1608993 - DNA, 25 bp, Homo sapien
tgaggaagaggtgcacaccctccag

SEQ ID NO: 1608994 - DNA, 25 bp, Homo sapien
aggaagaggtgcacaccctccagca

SEQ ID NO: 1608995 - DNA, 25 bp, Homo sapien
aagaggtgcacaccctccagcagca

SEQ ID NO: 1608996 - DNA, 25 bp, Homo sapien
tcagttcgatcaatccccacgagga

SEQ ID NO: 1608997 - DNA, 25 bp, Homo sapien
ggttcagttcgatcaatccccacga

SEQ ID NO: 1608998 - DNA, 25 bp, Homo sapien
cttgggttcagttcgatcaatcccc

SEQ ID NO: 1608999 - DNA, 25 bp, Homo sapien
agttcgatcaatccccacgaggaag

SEQ ID NO: 1609000 - DNA, 25 bp, Homo sapien
ctcagccccacgtaggtgatgacag

SEQ ID NO: 1609001 - DNA, 25 bp, Homo sapien
tgacagtcagcacgggatcctcctc

SEQ ID NO: 1609002 - DNA, 25 bp, Homo sapien
atgacagtcagcacgggatcctcct

SEQ ID NO: 1609003 - DNA, 25 bp, Homo sapien
agccccacgtaggtgatgacagtca

SEQ ID NO: 1609004 - DNA, 25 bp, Homo sapien
ggtgactgcaattacacatggtgtg

SEQ ID NO: 1609005 - DNA, 25 bp, Homo sapien
cagggccatcaggacagcgaagctg

SEQ ID NO: 1609006 - DNA, 25 bp, Homo sapien
cagcgaagctggacaggtgactgca

SEQ ID NO: 1609007 - DNA, 25 bp, Homo sapien
tgactcttgttcacgtgtatcagga

SEQ ID NO: 1609008 - DNA, 25 bp, Homo sapien
taaagtctctctaagccaaatgtcc

SEQ ID NO: 1609009 - DNA, 25 bp, Homo sapien
aataaaatgagcctttgaagccggg

SEQ ID NO: 1609010 - DNA, 25 bp, Homo sapien
gaaccttgccccaaccatgggagga

SEQ ID NO: 1609011 - DNA, 25 bp, Homo sapien
gatttctattttatgcggccaccag

SEQ ID NO: 1609012 - DNA, 25 bp, Homo sapien
gagataaaggcaatggcactgggac

SEQ ID NO: 1609013 - DNA, 25 bp, Homo sapien
gagagacacgttccttttgggtcca

SEQ ID NO: 1609014 - DNA, 25 bp, Homo sapien
tgggtccaatagcagcactcacaac

SEQ ID NO: 1609015 - DNA, 25 bp, Homo sapien
ttcacgtgctggaaagtcagcgtca

SEQ ID NO: 1609016 - DNA, 25 bp, Homo sapien
gcaacggatgtccattgagttcatt

SEQ ID NO: 1609017 - DNA, 25 bp, Homo sapien
gatgatgtcactgcaacggatgtcc

SEQ ID NO: 1609018 - DNA, 25 bp, Homo sapien
catttggacgttcaagttgaatgtc

SEQ ID NO: 1609019 - DNA, 25 bp, Homo sapien
gagcaattgtctgtaatcgcttgag

SEQ ID NO: 1609020 - DNA, 25 bp, Homo sapien
gaactttcgattccacatcccggag

SEQ ID NO: 1609021 - DNA, 25 bp, Homo sapien
cactatcgttttggattttcaggac

SEQ ID NO: 1609022 - DNA, 25 bp, Homo sapien
taaagtctgattggtgagaagtgac

SEQ ID NO: 1609023 - DNA, 25 bp, Homo sapien
catcccggagaatagtggtagctgt

SEQ ID NO: 1609024 - DNA, 25 bp, Homo sapien
tcaaatttgtccacaatcttttgca

SEQ ID NO: 1609025 - DNA, 25 bp, Homo sapien
cctgccctcggttgtctttgaggag

SEQ ID NO: 1609026 - DNA, 25 bp, Homo sapien
ctgccctcggttgtctttgaggagg

SEQ ID NO: 1609027 - DNA, 25 bp, Homo sapien
ccctcggttgtctttgaggaggtgg

SEQ ID NO: 1609028 - DNA, 25 bp, Homo sapien
tgccctcggttgtctttgaggaggt

SEQ ID NO: 1609029 - DNA, 25 bp, Homo sapien
ctgagagtgaccaggcagaggggtg

SEQ ID NO: 1609030 - DNA, 25 bp, Homo sapien
gcaggtggggtaagtaatggggtga

SEQ ID NO: 1609031 - DNA, 25 bp, Homo sapien
gtggggtaagtaatggggtgagcaa

SEQ ID NO: 1609032 - DNA, 25 bp, Homo sapien
cagaggggtgggcaggtggggtaag

SEQ ID NO: 1609033 - DNA, 25 bp, Homo sapien
tcccatccatgttttccatgggagt

SEQ ID NO: 1609034 - DNA, 25 bp, Homo sapien
ccatccatgttttccatgggagtgg

SEQ ID NO: 1609035 - DNA, 25 bp, Homo sapien
atccatgttttccatgggagtggtc

SEQ ID NO: 1609036 - DNA, 25 bp, Homo sapien
ctcatgggtggtctaccaagtctca

SEQ ID NO: 1609037 - DNA, 25 bp, Homo sapien
gaatgcagtctatatcctgggacac

SEQ ID NO: 1609038 - DNA, 25 bp, Homo sapien
cttcgacattgtaacacacagcgtt

SEQ ID NO: 1609039 - DNA, 25 bp, Homo sapien
tgacaggtgttctcattggaattac

SEQ ID NO: 1609040 - DNA, 25 bp, Homo sapien
tacactatagggtggtgtacattca

SEQ ID NO: 1609041 - DNA, 25 bp, Homo sapien
agtatatccatggttgcaggtgcag

SEQ ID NO: 1609042 - DNA, 25 bp, Homo sapien
gcaggtgcagtgagtgttattgaca

SEQ ID NO: 1609043 - DNA, 25 bp, Homo sapien
ggaatgtgaatagtttctgcccaga

SEQ ID NO: 1609044 - DNA, 25 bp, Homo sapien
tgcccagatccagaagtatatccat

SEQ ID NO: 1609045 - DNA, 25 bp, Homo sapien
ggagaccatgagtggctccaggtcc

SEQ ID NO: 1609046 - DNA, 25 bp, Homo sapien
ttcccaaatattgctctcagaacag

SEQ ID NO: 1609047 - DNA, 25 bp, Homo sapien
aggtccagcccttggtccacaagtt

SEQ ID NO: 1609048 - DNA, 25 bp, Homo sapien
tccagcccactggagaccatgagtg

SEQ ID NO: 1609049 - DNA, 25 bp, Homo sapien
ggttttctgagtcacagctccaaag

SEQ ID NO: 1609050 - DNA, 25 bp, Homo sapien
tggttttctgagtcacagctccaaa

SEQ ID NO: 1609051 - DNA, 25 bp, Homo sapien
ttttctgagtcacagctccaaagag

SEQ ID NO: 1609052 - DNA, 25 bp, Homo sapien
ttctgagtcacagctccaaagaggc

SEQ ID NO: 1609053 - DNA, 25 bp, Homo sapien
cccagtagcgggatttctgggtcca

SEQ ID NO: 1609054 - DNA, 25 bp, Homo sapien
cccagcccaatgactattattattt

SEQ ID NO: 1609055 - DNA, 25 bp, Homo sapien
ctgggtccaacagtagttctatctt

SEQ ID NO: 1609056 - DNA, 25 bp, Homo sapien
ggtccaacagtagttctatctttag

SEQ ID NO: 1609057 - DNA, 25 bp, Homo sapien
ggaagtgctgttcagattgtagaca

SEQ ID NO: 1609058 - DNA, 25 bp, Homo sapien
tgtttattgtgacagtgacttgtcc

SEQ ID NO: 1609059 - DNA, 25 bp, Homo sapien
tgtagacactgtaggttggcatgtt

SEQ ID NO: 1609060 - DNA, 25 bp, Homo sapien
ttttcccccggcagatgccactcac

SEQ ID NO: 1609061 - DNA, 25 bp, Homo sapien
tcccgtagagagtggtatgtgactt

SEQ ID NO: 1609062 - DNA, 25 bp, Homo sapien
tagagagtggtatgtgacttggtca

SEQ ID NO: 1609063 - DNA, 25 bp, Homo sapien
tggagcctcaaagtcccgtagagag

SEQ ID NO: 1609064 - DNA, 25 bp, Homo sapien
cctcaaagtcccgtagagagtggta

SEQ ID NO: 1609065 - DNA, 25 bp, Homo sapien
ctggaagaagcaatggtccctgcat

SEQ ID NO: 1609066 - DNA, 25 bp, Homo sapien
gccagccctggaagctctctactgt

SEQ ID NO: 1609067 - DNA, 25 bp, Homo sapien
tctgtggtacgggtatcccacgcca

SEQ ID NO: 1609068 - DNA, 25 bp, Homo sapien
actgtgccgtaagccaaccaccttt

SEQ ID NO: 1609069 - DNA, 25 bp, Homo sapien
tggaagctctctactgtgccgtaag

SEQ ID NO: 1609070 - DNA, 25 bp, Homo sapien
ggtcagctgactcatgaaattgcta

SEQ ID NO: 1609071 - DNA, 25 bp, Homo sapien
ctgcttttcgtttatttgctgtacc

SEQ ID NO: 1609072 - DNA, 25 bp, Homo sapien
tcgccatcagactcatggttctgct

SEQ ID NO: 1609073 - DNA, 25 bp, Homo sapien
gaagtatgtatcttaggtcagctga

SEQ ID NO: 1609074 - DNA, 25 bp, Homo sapien
cagtggcctcggttttagagaccca

SEQ ID NO: 1609075 - DNA, 25 bp, Homo sapien
gatgggtgtcagcatcagagcgtca

SEQ ID NO: 1609076 - DNA, 25 bp, Homo sapien
cagggtcagtgagaaccccgggatc

SEQ ID NO: 1609077 - DNA, 25 bp, Homo sapien
caaagtttgagttcccattcctgag

SEQ ID NO: 1609078 - DNA, 25 bp, Homo sapien
ttaggtctggtgtggcttattcttc

SEQ ID NO: 1609079 - DNA, 25 bp, Homo sapien
tctggaaggttcctgcatgttatat

SEQ ID NO: 1609080 - DNA, 25 bp, Homo sapien
ttacatggtgagaagagtatgtggc

SEQ ID NO: 1609081 - DNA, 25 bp, Homo sapien
tcttctagctgccaacccaaattac

SEQ ID NO: 1609082 - DNA, 25 bp, Homo sapien
tatatgtctatacccaccacggtct

SEQ ID NO: 1609083 - DNA, 25 bp, Homo sapien
taaatcttagggtacaccttggtga

SEQ ID NO: 1609084 - DNA, 25 bp, Homo sapien
tggaaccataaacagccctcttgtg

SEQ ID NO: 1609085 - DNA, 25 bp, Homo sapien
tagtccatagtctgaatataccaca

SEQ ID NO: 1609086 - DNA, 25 bp, Homo sapien
tctgtttctgtacagctaagaatag

SEQ ID NO: 1609087 - DNA, 25 bp, Homo sapien
tatgggcagtgagtcaaatctgacc

SEQ ID NO: 1609088 - DNA, 25 bp, Homo sapien
catcatggtctggaaactatgggca

SEQ ID NO: 1609089 - DNA, 25 bp, Homo sapien
gtcacatgactgatatatgaagttc

SEQ ID NO: 1609090 - DNA, 25 bp, Homo sapien
tcagattttccacgggcaaagaggg

SEQ ID NO: 1609091 - DNA, 25 bp, Homo sapien
gcagataaaacagctcgggcacaga

SEQ ID NO: 1609092 - DNA, 25 bp, Homo sapien
tctatatcaagcaaagggcacgcag

SEQ ID NO: 1609093 - DNA, 25 bp, Homo sapien
cattgagcttatacggacaggcaca

SEQ ID NO: 1609094 - DNA, 25 bp, Homo sapien
cagtgaaatggggttagaattacac

SEQ ID NO: 1609095 - DNA, 25 bp, Homo sapien
tgaaatggggttagaattacacata

SEQ ID NO: 1609096 - DNA, 25 bp, Homo sapien
tcagtgaaatggggttagaattaca

SEQ ID NO: 1609097 - DNA, 25 bp, Homo sapien
agtgaaatggggttagaattacaca

SEQ ID NO: 1609098 - DNA, 25 bp, Homo sapien
gcgtactcagatgcgagcctttcta

SEQ ID NO: 1609099 - DNA, 25 bp, Homo sapien
ggttaatgagtcaaggcgtactcag

SEQ ID NO: 1609100 - DNA, 25 bp, Homo sapien
ctcctcaggtgggtcggttagtgaa

SEQ ID NO: 1609101 - DNA, 25 bp, Homo sapien
gctctggagcaatgcgtgatcttac

SEQ ID NO: 1609102 - DNA, 25 bp, Homo sapien
tgggtttggaggtgtcagccttagc

SEQ ID NO: 1609103 - DNA, 25 bp, Homo sapien
agcactgctggagagtgtgtgcatc

SEQ ID NO: 1609104 - DNA, 25 bp, Homo sapien
cagttttcaatttcctgatcccttt

SEQ ID NO: 1609105 - DNA, 25 bp, Homo sapien
tttggaccatttcccatattgctcc

SEQ ID NO: 1609106 - DNA, 25 bp, Homo sapien
ggacaggaagagtcctgggtgggag

SEQ ID NO: 1609107 - DNA, 25 bp, Homo sapien
agctcacagagagcagtgaggacag

SEQ ID NO: 1609108 - DNA, 25 bp, Homo sapien
agcagtgaggacaggaagagtcctg

SEQ ID NO: 1609109 - DNA, 25 bp, Homo sapien
caggaagagtcctgggtgggagctg

SEQ ID NO: 1609110 - DNA, 25 bp, Homo sapien
caagatgcccagacaccacgtgcag

SEQ ID NO: 1609111 - DNA, 25 bp, Homo sapien
ctgcaagatgcccagacaccacgtg

SEQ ID NO: 1609112 - DNA, 25 bp, Homo sapien
aagatgcccagacaccacgtgcagc

SEQ ID NO: 1609113 - DNA, 25 bp, Homo sapien
tgcaagatgcccagacaccacgtgc

SEQ ID NO: 1609114 - DNA, 25 bp, Homo sapien
atttactgtcaactatagcccacag

SEQ ID NO: 1609115 - DNA, 25 bp, Homo sapien
gctatttcatctgtgcccatggagt

SEQ ID NO: 1609116 - DNA, 25 bp, Homo sapien
gatgatttctcagactgggctgtgg

SEQ ID NO: 1609117 - DNA, 25 bp, Homo sapien
tgccctcccctgtagatgatttctc

SEQ ID NO: 1609118 - DNA, 25 bp, Homo sapien
aaatccagagagtcaccagaaagag

SEQ ID NO: 1609119 - DNA, 25 bp, Homo sapien
gagagtcaccagaaagagaactaaa

SEQ ID NO: 1609120 - DNA, 25 bp, Homo sapien
cagagagtcaccagaaagagaacta

SEQ ID NO: 1609121 - DNA, 25 bp, Homo sapien
tccagagagtcaccagaaagagaac

SEQ ID NO: 1609122 - DNA, 25 bp, Homo sapien
tggcgcagacaggtccaaggaagcc

SEQ ID NO: 1609123 - DNA, 25 bp, Homo sapien
agatggcgcagacaggtccaaggaa

SEQ ID NO: 1609124 - DNA, 25 bp, Homo sapien
aagatggcgcagacaggtccaagga

SEQ ID NO: 1609125 - DNA, 25 bp, Homo sapien
gagaagatggcgcagacaggtccaa

SEQ ID NO: 1609126 - DNA, 25 bp, Homo sapien
ggccatggttatgccggagaagata

SEQ ID NO: 1609127 - DNA, 25 bp, Homo sapien
agataaggattgtgagaatttgcac

SEQ ID NO: 1609128 - DNA, 25 bp, Homo sapien
tctagcaatggccatggttatgccg

SEQ ID NO: 1609129 - DNA, 25 bp, Homo sapien
tatgccggagaagataaggattgtg

SEQ ID NO: 1609130 - DNA, 25 bp, Homo sapien
acagctgggactccgtagcccacag

SEQ ID NO: 1609131 - DNA, 25 bp, Homo sapien
agctgggactccgtagcccacaggg

SEQ ID NO: 1609132 - DNA, 25 bp, Homo sapien
agcccacagggaacatgagcttctt

SEQ ID NO: 1609133 - DNA, 25 bp, Homo sapien
ctgggactccgtagcccacagggaa

SEQ ID NO: 1609134 - DNA, 25 bp, Homo sapien
cagagcggcgatcagatttgagtgt

SEQ ID NO: 1609135 - DNA, 25 bp, Homo sapien
ctggcggagaagtaaaagacgccca

SEQ ID NO: 1609136 - DNA, 25 bp, Homo sapien
taaaagacgcccagagcggcgatca

SEQ ID NO: 1609137 - DNA, 25 bp, Homo sapien
agaagtaaaagacgcccagagcggc

SEQ ID NO: 1609138 - DNA, 25 bp, Homo sapien
taaggaatcaaatgccgcatcattc

SEQ ID NO: 1609139 - DNA, 25 bp, Homo sapien
ttaaggaatcaaatgccgcatcatt

SEQ ID NO: 1609140 - DNA, 25 bp, Homo sapien
aatcaaatgccgcatcattccatga

SEQ ID NO: 1609141 - DNA, 25 bp, Homo sapien
caaatgccgcatcattccatgagcc

SEQ ID NO: 1609142 - DNA, 25 bp, Homo sapien
gagccctctggaacaccgctgtcaa

SEQ ID NO: 1609143 - DNA, 25 bp, Homo sapien
ctgcgtcaaggaagggagccctctg

SEQ ID NO: 1609144 - DNA, 25 bp, Homo sapien
aggaagggagccctctggaacaccg

SEQ ID NO: 1609145 - DNA, 25 bp, Homo sapien
agggagccctctggaacaccgctgt

SEQ ID NO: 1609146 - DNA, 25 bp, Homo sapien
ggtttgatcaattgccacgaggaag

SEQ ID NO: 1609147 - DNA, 25 bp, Homo sapien
tgatcaattgccacgaggaagagga

SEQ ID NO: 1609148 - DNA, 25 bp, Homo sapien
gtttgatcaattgccacgaggaaga

SEQ ID NO: 1609149 - DNA, 25 bp, Homo sapien
ttgatcaattgccacgaggaagagg

SEQ ID NO: 1609150 - DNA, 25 bp, Homo sapien
ctgcacatcgtagtgggccatgagg

SEQ ID NO: 1609151 - DNA, 25 bp, Homo sapien
gcacatcgtagtgggccatgaggac

SEQ ID NO: 1609152 - DNA, 25 bp, Homo sapien
tcgtagtgggccatgaggacggcaa

SEQ ID NO: 1609153 - DNA, 25 bp, Homo sapien
gtagtgggccatgaggacggcaaag

SEQ ID NO: 1609154 - DNA, 25 bp, Homo sapien
gggtgcaacggcagatggtgctggt

SEQ ID NO: 1609155 - DNA, 25 bp, Homo sapien
gcaccttctgtctcgggatcactga

SEQ ID NO: 1609156 - DNA, 25 bp, Homo sapien
ctggtgcctattgtgctgcagcctg

SEQ ID NO: 1609157 - DNA, 25 bp, Homo sapien
ggtgggtgcaacggcagatggtgct

SEQ ID NO: 1609158 - DNA, 25 bp, Homo sapien
gccggcttgggaaggactgactttc

SEQ ID NO: 1609159 - DNA, 25 bp, Homo sapien
aagccggcttgggaaggactgactt

SEQ ID NO: 1609160 - DNA, 25 bp, Homo sapien
ccaaagccggcttgggaaggactga

SEQ ID NO: 1609161 - DNA, 25 bp, Homo sapien
caaagccggcttgggaaggactgac

SEQ ID NO: 1609162 - DNA, 25 bp, Homo sapien
aggcagagatcacatctgagagcag

SEQ ID NO: 1609163 - DNA, 25 bp, Homo sapien
gcaagccctggtgtgtctcatgcag

SEQ ID NO: 1609164 - DNA, 25 bp, Homo sapien
gaaaggcagagatcacatctgagag

SEQ ID NO: 1609165 - DNA, 25 bp, Homo sapien
ctggtgtgtctcatgcagaagcatc

SEQ ID NO: 1609166 - DNA, 25 bp, Homo sapien
ggagacaaggcccaccacagaaggg

SEQ ID NO: 1609167 - DNA, 25 bp, Homo sapien
ctggaatggagacaaggcccaccac

SEQ ID NO: 1609168 - DNA, 25 bp, Homo sapien
gaatggagacaaggcccaccacaga

SEQ ID NO: 1609169 - DNA, 25 bp, Homo sapien
tggagacaaggcccaccacagaagg

SEQ ID NO: 1609170 - DNA, 25 bp, Homo sapien
tgattccagtcgagctgcatcactg

SEQ ID NO: 1609171 - DNA, 25 bp, Homo sapien
gacactcctgtctacttgcttctgc

SEQ ID NO: 1609172 - DNA, 25 bp, Homo sapien
caccagatttctgtgcctgattcca

SEQ ID NO: 1609173 - DNA, 25 bp, Homo sapien
tctgtctcaaggtgacactcctgtc

SEQ ID NO: 1609174 - DNA, 25 bp, Homo sapien
aactgaagttcaacagcccattgga

SEQ ID NO: 1609175 - DNA, 25 bp, Homo sapien
attggaaaggttcttgctcaggcct

SEQ ID NO: 1609176 - DNA, 25 bp, Homo sapien
gctcatccagcgcctgtaagatgct

SEQ ID NO: 1609177 - DNA, 25 bp, Homo sapien
caggataactgaagttcaacagccc

SEQ ID NO: 1609178 - DNA, 25 bp, Homo sapien
tggatggtgttattggccaagcctg

SEQ ID NO: 1609179 - DNA, 25 bp, Homo sapien
cggggtccaggtggagaaagtcata

SEQ ID NO: 1609180 - DNA, 25 bp, Homo sapien
ggggtccaggtggagaaagtcatat

SEQ ID NO: 1609181 - DNA, 25 bp, Homo sapien
cttcacagacagtgtccttttggtt

SEQ ID NO: 1609182 - DNA, 25 bp, Homo sapien
cagtgtccttttggttattcgggat

SEQ ID NO: 1609183 - DNA, 25 bp, Homo sapien
ttattcgggattccgtgtctgggct

SEQ ID NO: 1609184 - DNA, 25 bp, Homo sapien
tggttattcgggattccgtgtctgg

SEQ ID NO: 1609185 - DNA, 25 bp, Homo sapien
tatgaacccacggtgttgaagcaga

SEQ ID NO: 1609186 - DNA, 25 bp, Homo sapien
gctgtatgaacccacggtgttgaag

SEQ ID NO: 1609187 - DNA, 25 bp, Homo sapien
gcagctgtatgaacccacggtgttg

SEQ ID NO: 1609188 - DNA, 25 bp, Homo sapien
acccacggtgttgaagcagacggtg

SEQ ID NO: 1609189 - DNA, 25 bp, Homo sapien
ctcagaagaatgaacgcctgacaca

SEQ ID NO: 1609190 - DNA, 25 bp, Homo sapien
gaacgcctgacacagtcgggcgcct

SEQ ID NO: 1609191 - DNA, 25 bp, Homo sapien
aagaatgaacgcctgacacagtcgg

SEQ ID NO: 1609192 - DNA, 25 bp, Homo sapien
aatgaacgcctgacacagtcgggcg

SEQ ID NO: 1609193 - DNA, 25 bp, Homo sapien
tctctgggaacgtgggatctgagct

SEQ ID NO: 1609194 - DNA, 25 bp, Homo sapien
cattctgcttggtttgtgtgggcgc

SEQ ID NO: 1609195 - DNA, 25 bp, Homo sapien
tgtgggcgccgttgaacatgtgatc

SEQ ID NO: 1609196 - DNA, 25 bp, Homo sapien
atcagatgtttgtgggtctctggga

SEQ ID NO: 1609197 - DNA, 25 bp, Homo sapien
gaatcggttgccagcccgggcggca

SEQ ID NO: 1609198 - DNA, 25 bp, Homo sapien
cagcggcactgatagctgcccacgt

SEQ ID NO: 1609199 - DNA, 25 bp, Homo sapien
ttttgtccggaggtgcattcattca

SEQ ID NO: 1609200 - DNA, 25 bp, Homo sapien
gatagctgcccacgttgttgaggca

SEQ ID NO: 1609201 - DNA, 25 bp, Homo sapien
caggtgccgtagcttttacagagcc

SEQ ID NO: 1609202 - DNA, 25 bp, Homo sapien
gacgcaggtgccgtagcttttacag

SEQ ID NO: 1609203 - DNA, 25 bp, Homo sapien
cgcaggtgccgtagcttttacagag

SEQ ID NO: 1609204 - DNA, 25 bp, Homo sapien
ttgacgcaggtgccgtagcttttac

SEQ ID NO: 1609205 - DNA, 25 bp, Homo sapien
gagggtgaagaatgcccgtagctgt

SEQ ID NO: 1609206 - DNA, 25 bp, Homo sapien
gctttcggggctgagggtccgccat

SEQ ID NO: 1609207 - DNA, 25 bp, Homo sapien
aatgcccgtagctgtgagcagcttt

SEQ ID NO: 1609208 - DNA, 25 bp, Homo sapien
tgaagaatgcccgtagctgtgagca

SEQ ID NO: 1609209 - DNA, 25 bp, Homo sapien
ggacctgtcttggttcccagtggca

SEQ ID NO: 1609210 - DNA, 25 bp, Homo sapien
caggctgtgtaagatgcatggctcc

SEQ ID NO: 1609211 - DNA, 25 bp, Homo sapien
tgagttatcagaatcccggtggccc

SEQ ID NO: 1609212 - DNA, 25 bp, Homo sapien
cagcagcctatgcaactgtacatgg

SEQ ID NO: 1609213 - DNA, 25 bp, Homo sapien
ctcccatgggatctgggttgacctc

SEQ ID NO: 1609214 - DNA, 25 bp, Homo sapien
tatttctgaatggttccactcccat

SEQ ID NO: 1609215 - DNA, 25 bp, Homo sapien
gacctatttctgaatggttccactc

SEQ ID NO: 1609216 - DNA, 25 bp, Homo sapien
cacagacctatttctgaatggttcc

SEQ ID NO: 1609217 - DNA, 25 bp, Homo sapien
ccaggtgtttgggacggccctgtga

SEQ ID NO: 1609218 - DNA, 25 bp, Homo sapien
tttggatagcgacaggtgaccaggt

SEQ ID NO: 1609219 - DNA, 25 bp, Homo sapien
cctctgtggagggttctgaaccttg

SEQ ID NO: 1609220 - DNA, 25 bp, Homo sapien
tctgaaccttgaggtttggatagcg

SEQ ID NO: 1609221 - DNA, 25 bp, Homo sapien
aacatctcggtgctgtccttgggtc

SEQ ID NO: 1609222 - DNA, 25 bp, Homo sapien
tgagttctcgccttgttagttccca

SEQ ID NO: 1609223 - DNA, 25 bp, Homo sapien
accacctgtgcatgcggtgatacag

SEQ ID NO: 1609224 - DNA, 25 bp, Homo sapien
taacatggcaacacacctcctcaat

SEQ ID NO: 1609225 - DNA, 25 bp, Homo sapien
tgcaatgtagcatctgttcacaggg

SEQ ID NO: 1609226 - DNA, 25 bp, Homo sapien
atgtgcatgcaatgtagcatctgtt

SEQ ID NO: 1609227 - DNA, 25 bp, Homo sapien
catgcaatgtagcatctgttcacag

SEQ ID NO: 1609228 - DNA, 25 bp, Homo sapien
tgcatgcaatgtagcatctgttcac

SEQ ID NO: 1609229 - DNA, 25 bp, Homo sapien
cctcccaccagggaggctctactga

SEQ ID NO: 1609230 - DNA, 25 bp, Homo sapien
aagctccctcccgcacccaactagt

SEQ ID NO: 1609231 - DNA, 25 bp, Homo sapien
tctgaagctccctcccgcacccaac

SEQ ID NO: 1609232 - DNA, 25 bp, Homo sapien
ctgtgtactctgtgttaatctccct

SEQ ID NO: 1609233 - DNA, 25 bp, Homo sapien
gctccctcccgcacccaactagttc

SEQ ID NO: 1609234 - DNA, 25 bp, Homo sapien
gtgttctcgctctcattcttgaatg

SEQ ID NO: 1609235 - DNA, 25 bp, Homo sapien
ctgcacacgcagtcgtagctcccct

SEQ ID NO: 1609236 - DNA, 25 bp, Homo sapien
attttccgcatgacactttcgacag

SEQ ID NO: 1609237 - DNA, 25 bp, Homo sapien
tgacactttcgacagtgttgcacac

SEQ ID NO: 1609238 - DNA, 25 bp, Homo sapien
tccagcagtccgagaattttccgca

SEQ ID NO: 1609239 - DNA, 25 bp, Homo sapien
ctgtgttccagcagtccgagaattt

SEQ ID NO: 1609240 - DNA, 25 bp, Homo sapien
accctggattgcagcgacaggcggt

SEQ ID NO: 1609241 - DNA, 25 bp, Homo sapien
acaggcggtggcattgacacacgag

SEQ ID NO: 1609242 - DNA, 25 bp, Homo sapien
gaaaaagagctgaaccctggattgc

SEQ ID NO: 1609243 - DNA, 25 bp, Homo sapien
cagcgacaggcggtggcattgacac

SEQ ID NO: 1609244 - DNA, 25 bp, Homo sapien
ctggagtcctgggtttcagctcccg

SEQ ID NO: 1609245 - DNA, 25 bp, Homo sapien
gtcctgggtttcagctcccggcaga

SEQ ID NO: 1609246 - DNA, 25 bp, Homo sapien
ggagtcctgggtttcagctcccggc

SEQ ID NO: 1609247 - DNA, 25 bp, Homo sapien
tgggtttcagctcccggcagagtca

SEQ ID NO: 1609248 - DNA, 25 bp, Homo sapien
cgagaaagacgagaaagacgcggcc

SEQ ID NO: 1609249 - DNA, 25 bp, Homo sapien
gagaaagacgagaaagacgcggcct

SEQ ID NO: 1609250 - DNA, 25 bp, Homo sapien
gaaagacgagaaagacgcggcctcc

SEQ ID NO: 1609251 - DNA, 25 bp, Homo sapien
agacgagaaagacgcggcctcccat

SEQ ID NO: 1609252 - DNA, 25 bp, Homo sapien
ccgaggccaggactttataaaggag

SEQ ID NO: 1609253 - DNA, 25 bp, Homo sapien
ggccctccccggaactggcggtgca

SEQ ID NO: 1609254 - DNA, 25 bp, Homo sapien
ggacagggctgtcccgtctccgcag

SEQ ID NO: 1609255 - DNA, 25 bp, Homo sapien
agctgtgcgggctgtcccgaggcca

SEQ ID NO: 1609256 - DNA, 25 bp, Homo sapien
gacgtctgtggtcccagctgctact

SEQ ID NO: 1609257 - DNA, 25 bp, Homo sapien
cgtctgtggtcccagctgctactac

SEQ ID NO: 1609258 - DNA, 25 bp, Homo sapien
gggcttggtggcagacgtctgtggt

SEQ ID NO: 1609259 - DNA, 25 bp, Homo sapien
ctgggcttggtggcagacgtctgtg

SEQ ID NO: 1609260 - DNA, 25 bp, Homo sapien
agagaagcttcaccgcacagagcag

SEQ ID NO: 1609261 - DNA, 25 bp, Homo sapien
ggcaggaagaatcacccgagctggg

SEQ ID NO: 1609262 - DNA, 25 bp, Homo sapien
ctgaggcattacagtgtccacataa

SEQ ID NO: 1609263 - DNA, 25 bp, Homo sapien
agaaggggccctcttccgatgccag

SEQ ID NO: 1609264 - DNA, 25 bp, Homo sapien
ggcggcccacagatggcgctggctc

SEQ ID NO: 1609265 - DNA, 25 bp, Homo sapien
cctctgtccacgcatgctctgattt

SEQ ID NO: 1609266 - DNA, 25 bp, Homo sapien
ctctgtccacgcatgctctgatttc

SEQ ID NO: 1609267 - DNA, 25 bp, Homo sapien
taaaactagttcagcagctccatgc

SEQ ID NO: 1609268 - DNA, 25 bp, Homo sapien
cctaaaactagttcagcagctccat

SEQ ID NO: 1609269 - DNA, 25 bp, Homo sapien
tcctaaaactagttcagcagctcca

SEQ ID NO: 1609270 - DNA, 25 bp, Homo sapien
ctaaaactagttcagcagctccatg

SEQ ID NO: 1609271 - DNA, 25 bp, Homo sapien
caggagcgtgggaaccggaaatcct

SEQ ID NO: 1609272 - DNA, 25 bp, Homo sapien
ggaaatccttgcttccgataccgga

SEQ ID NO: 1609273 - DNA, 25 bp, Homo sapien
tttgcagggagcgaaattgaggtcc

SEQ ID NO: 1609274 - DNA, 25 bp, Homo sapien
ttccgataccggaagtcagagacca

SEQ ID NO: 1609275 - DNA, 25 bp, Homo sapien
cagagtctattgactgtaatcttgc

SEQ ID NO: 1609276 - DNA, 25 bp, Homo sapien
atattcagagtctattgactgtaat

SEQ ID NO: 1609277 - DNA, 25 bp, Homo sapien
ttcagagtctattgactgtaatctt

SEQ ID NO: 1609278 - DNA, 25 bp, Homo sapien
tattcagagtctattgactgtaatc

SEQ ID NO: 1609279 - DNA, 25 bp, Homo sapien
cttatattcgatccttggcacccag

SEQ ID NO: 1609280 - DNA, 25 bp, Homo sapien
gtgcttatattcgatccttggcacc

SEQ ID NO: 1609281 - DNA, 25 bp, Homo sapien
ctgtgcttatattcgatccttggca

SEQ ID NO: 1609282 - DNA, 25 bp, Homo sapien
atattcgatccttggcacccagcct

SEQ ID NO: 1609283 - DNA, 25 bp, Homo sapien
ctggattgttgggtatattttggaa

SEQ ID NO: 1609284 - DNA, 25 bp, Homo sapien
aactcttttatctccgaacattgaa

SEQ ID NO: 1609285 - DNA, 25 bp, Homo sapien
acattgaatgagataaatttccaga

SEQ ID NO: 1609286 - DNA, 25 bp, Homo sapien
tgccagaattggtgaacggaagagt

SEQ ID NO: 1609287 - DNA, 25 bp, Homo sapien
tgaaagtcctgcagtgatgtcacca

SEQ ID NO: 1609288 - DNA, 25 bp, Homo sapien
gaaagtcctgcagtgatgtcaccat

SEQ ID NO: 1609289 - DNA, 25 bp, Homo sapien
tgatgtcaccattaaaaaatgttgc

SEQ ID NO: 1609290 - DNA, 25 bp, Homo sapien
ttatgaaagtcctgcagtgatgtca

SEQ ID NO: 1609291 - DNA, 25 bp, Homo sapien
tggaaaacgctttgtgctttctccc

SEQ ID NO: 1609292 - DNA, 25 bp, Homo sapien
ggaaatcctcagtatagagaaaaca

SEQ ID NO: 1609293 - DNA, 25 bp, Homo sapien
ccagggccctcttcatgtccgtgtt

SEQ ID NO: 1609294 - DNA, 25 bp, Homo sapien
tcccagctgaggaaatcctcagtat

SEQ ID NO: 1609295 - DNA, 25 bp, Homo sapien
ggacgccagttgcaaagtatatcac

SEQ ID NO: 1609296 - DNA, 25 bp, Homo sapien
ccaggacgccagttgcaaagtatat

SEQ ID NO: 1609297 - DNA, 25 bp, Homo sapien
caggacgccagttgcaaagtatatc

SEQ ID NO: 1609298 - DNA, 25 bp, Homo sapien
aggacgccagttgcaaagtatatca

SEQ ID NO: 1609299 - DNA, 25 bp, Homo sapien
acagtcaaggtctcgagcagggaac

SEQ ID NO: 1609300 - DNA, 25 bp, Homo sapien
tcaggacttcaagtagatcacaaaa

SEQ ID NO: 1609301 - DNA, 25 bp, Homo sapien
aacaggcgagcttcaggacttcaag

SEQ ID NO: 1609302 - DNA, 25 bp, Homo sapien
ttccatttcggtgcagaaggacagc

SEQ ID NO: 1609303 - DNA, 25 bp, Homo sapien
aaaatctgactgagacagcctgcat

SEQ ID NO: 1609304 - DNA, 25 bp, Homo sapien
tctgtgtcagtatattcagtaacat

SEQ ID NO: 1609305 - DNA, 25 bp, Homo sapien
cggtcaagagtaaattgtccaggca

SEQ ID NO: 1609306 - DNA, 25 bp, Homo sapien
cagtcgtggaggtaaaacagaggtc

SEQ ID NO: 1609307 - DNA, 25 bp, Homo sapien
agaggaacagcccaaagagaatgaa

SEQ ID NO: 1609308 - DNA, 25 bp, Homo sapien
tggagaggaacagcccaaagagaat

SEQ ID NO: 1609309 - DNA, 25 bp, Homo sapien
catggagaggaacagcccaaagaga

SEQ ID NO: 1609310 - DNA, 25 bp, Homo sapien
gtacatggagaggaacagcccaaag

SEQ ID NO: 1609311 - DNA, 25 bp, Homo sapien
attcttgggcatgtgtttgatttcc

SEQ ID NO: 1609312 - DNA, 25 bp, Homo sapien
ttcttgggcatgtgtttgatttcct

SEQ ID NO: 1609313 - DNA, 25 bp, Homo sapien
tcttgggcatgtgtttgatttcctg

SEQ ID NO: 1609314 - DNA, 25 bp, Homo sapien
gagaaaaaagcaacagtcaattatc

SEQ ID NO: 1609315 - DNA, 25 bp, Homo sapien
aaagcaacagtcaattatcaacaca

SEQ ID NO: 1609316 - DNA, 25 bp, Homo sapien
aaaaagcaacagtcaattatcaaca

SEQ ID NO: 1609317 - DNA, 25 bp, Homo sapien
gaaaaaagcaacagtcaattatcaa

SEQ ID NO: 1609318 - DNA, 25 bp, Homo sapien
ctccttaaactcactgttgtgctga

SEQ ID NO: 1609319 - DNA, 25 bp, Homo sapien
tgtaagaaacatctctggggtcagg

SEQ ID NO: 1609320 - DNA, 25 bp, Homo sapien
tgatgagggattgatccacagaatg

SEQ ID NO: 1609321 - DNA, 25 bp, Homo sapien
aactcactgttgtgctgatgaggga

SEQ ID NO: 1609322 - DNA, 25 bp, Homo sapien
tatccctcaatggacttggctctgt

SEQ ID NO: 1609323 - DNA, 25 bp, Homo sapien
tcttgatatccctcaatggacttgg

SEQ ID NO: 1609324 - DNA, 25 bp, Homo sapien
caatggacttggctctgttgacctt

SEQ ID NO: 1609325 - DNA, 25 bp, Homo sapien
gctctgttgaccttccctccttgca

SEQ ID NO: 1609326 - DNA, 25 bp, Homo sapien
gaaggtgctcttggtctggggctgg

SEQ ID NO: 1609327 - DNA, 25 bp, Homo sapien
ttttttatagtggagatagcgtttc

SEQ ID NO: 1609328 - DNA, 25 bp, Homo sapien
tttttatagtggagatagcgtttca

SEQ ID NO: 1609329 - DNA, 25 bp, Homo sapien
ccctggagtccggagataatgtcag

SEQ ID NO: 1609330 - DNA, 25 bp, Homo sapien
gatcaggggtctgatgtgaattctg

SEQ ID NO: 1609331 - DNA, 25 bp, Homo sapien
aattctgtaatgaggcaagtggatc

SEQ ID NO: 1609332 - DNA, 25 bp, Homo sapien
gataatgtcagttctacgctggcta

SEQ ID NO: 1609333 - DNA, 25 bp, Homo sapien
acagtgtggctcttctcttgagctc

SEQ ID NO: 1609334 - DNA, 25 bp, Homo sapien
ccagtgtctgttgatcccaacttta

SEQ ID NO: 1609335 - DNA, 25 bp, Homo sapien
ttggggtatggctgaacccatcacc

SEQ ID NO: 1609336 - DNA, 25 bp, Homo sapien
tctctccatgtagctacaaaggaca

SEQ ID NO: 1609337 - DNA, 25 bp, Homo sapien
tgtagctacaaaggacatgtttttt

SEQ ID NO: 1609338 - DNA, 25 bp, Homo sapien
gacctgcactttaatgtttacgaca

SEQ ID NO: 1609339 - DNA, 25 bp, Homo sapien
tatgcaagtttgtctttcagtgggc

SEQ ID NO: 1609340 - DNA, 25 bp, Homo sapien
ggattcgtatttgtagggagcacta

SEQ ID NO: 1609341 - DNA, 25 bp, Homo sapien
tgggcattgcactcggaacatattt

SEQ ID NO: 1609342 - DNA, 25 bp, Homo sapien
cgtactatgccagggagtatggcag

SEQ ID NO: 1609343 - DNA, 25 bp, Homo sapien
tatgccagggagtatggcagatact

SEQ ID NO: 1609344 - DNA, 25 bp, Homo sapien
catgatgtcctaatgaggacaacac

SEQ ID NO: 1609345 - DNA, 25 bp, Homo sapien
ctgacaaagacatgatgtcctaatg

SEQ ID NO: 1609346 - DNA, 25 bp, Homo sapien
tgcaaaatacacaagtatgttcagg

SEQ ID NO: 1609347 - DNA, 25 bp, Homo sapien
tacacaagtatgttcaggtctacat

SEQ ID NO: 1609348 - DNA, 25 bp, Homo sapien
ggtctacattatcaggaggagcatt

SEQ ID NO: 1609349 - DNA, 25 bp, Homo sapien
tatgttcaggtctacattatcagga

SEQ ID NO: 1609350 - DNA, 25 bp, Homo sapien
caattgccaagtgtagtctatgcca

SEQ ID NO: 1609351 - DNA, 25 bp, Homo sapien
caaagtgtttctgatccaaagtcgg

SEQ ID NO: 1609352 - DNA, 25 bp, Homo sapien
gaatgacagttactacctctgaagc

SEQ ID NO: 1609353 - DNA, 25 bp, Homo sapien
tatgccacaggagacatacaactct

SEQ ID NO: 1609354 - DNA, 25 bp, Homo sapien
tgggcacttcttgaaaaattgccct

SEQ ID NO: 1609355 - DNA, 25 bp, Homo sapien
gccctttcattgttccccacaacaa

SEQ ID NO: 1609356 - DNA, 25 bp, Homo sapien
tcatgggcacttcttgaaaaattgc

SEQ ID NO: 1609357 - DNA, 25 bp, Homo sapien
catgggcacttcttgaaaaattgcc

SEQ ID NO: 1609358 - DNA, 25 bp, Homo sapien
cacttgagtgtgagttgcgggtggc

SEQ ID NO: 1609359 - DNA, 25 bp, Homo sapien
cacccctaggattgcaccataaaat

SEQ ID NO: 1609360 - DNA, 25 bp, Homo sapien
ctaggattgcaccataaaataagga

SEQ ID NO: 1609361 - DNA, 25 bp, Homo sapien
aaggtacacccctaggattgcacca

SEQ ID NO: 1609362 - DNA, 25 bp, Homo sapien
gattaagaaagctatcagaacaagc

SEQ ID NO: 1609363 - DNA, 25 bp, Homo sapien
tgtgattaagaaagctatcagaaca

SEQ ID NO: 1609364 - DNA, 25 bp, Homo sapien
gcagcgcaactgtaaaatatatcac

SEQ ID NO: 1609365 - DNA, 25 bp, Homo sapien
ctccacccagcagcgcaactgtaaa

SEQ ID NO: 1609366 - DNA, 25 bp, Homo sapien
aggacagccgtactaccattaagat

SEQ ID NO: 1609367 - DNA, 25 bp, Homo sapien
gcactcatggtccaggatgctagaa

SEQ ID NO: 1609368 - DNA, 25 bp, Homo sapien
tgcagaaggacagccgtactaccat

SEQ ID NO: 1609369 - DNA, 25 bp, Homo sapien
tttgtagcaaggaatacagagcact

SEQ ID NO: 1609370 - DNA, 25 bp, Homo sapien
ctatgtaggtgatgactttgttctg

SEQ ID NO: 1609371 - DNA, 25 bp, Homo sapien
aggaagggttgcagtccaggttctt

SEQ ID NO: 1609372 - DNA, 25 bp, Homo sapien
ggcaggctatgtaggtgatgacttt

SEQ ID NO: 1609373 - DNA, 25 bp, Homo sapien
ggccatcacggacaggaggaagttt

SEQ ID NO: 1609374 - DNA, 25 bp, Homo sapien
tttgtgtatcatttcctggttccat

SEQ ID NO: 1609375 - DNA, 25 bp, Homo sapien
aatttgtgtatcatttcctggttcc

SEQ ID NO: 1609376 - DNA, 25 bp, Homo sapien
atttgtgtatcatttcctggttcca

SEQ ID NO: 1609377 - DNA, 25 bp, Homo sapien
ggaaacgagacaggcatgcattgct

SEQ ID NO: 1609378 - DNA, 25 bp, Homo sapien
agaaagagggaaacgagacaggcat

SEQ ID NO: 1609379 - DNA, 25 bp, Homo sapien
agggaaacgagacaggcatgcattg

SEQ ID NO: 1609380 - DNA, 25 bp, Homo sapien
aacgagacaggcatgcattgctaac

SEQ ID NO: 1609381 - DNA, 25 bp, Homo sapien
ccttaactgaagacagcgtacattc

SEQ ID NO: 1609382 - DNA, 25 bp, Homo sapien
ctctttaagggatctccatgtcatc

SEQ ID NO: 1609383 - DNA, 25 bp, Homo sapien
gaagacagcgtacattctgcagtta

SEQ ID NO: 1609384 - DNA, 25 bp, Homo sapien
atctggttctctttaagggatctcc

SEQ ID NO: 1609385 - DNA, 25 bp, Homo sapien
tctctccgaggaagagttccttgtg

SEQ ID NO: 1609386 - DNA, 25 bp, Homo sapien
cgaggaagagttccttgtgtaagtg

SEQ ID NO: 1609387 - DNA, 25 bp, Homo sapien
gggatctctccgaggaagagttcct

SEQ ID NO: 1609388 - DNA, 25 bp, Homo sapien
caggaggggatctctccgaggaaga

SEQ ID NO: 1609389 - DNA, 25 bp, Homo sapien
aaagaaacaatgatattccattcaa

SEQ ID NO: 1609390 - DNA, 25 bp, Homo sapien
tgtctctgagctagacttaggactt

SEQ ID NO: 1609391 - DNA, 25 bp, Homo sapien
gatattccattcaacccaggggtgc

SEQ ID NO: 1609392 - DNA, 25 bp, Homo sapien
ctctgagctagacttaggacttcaa

SEQ ID NO: 1609393 - DNA, 25 bp, Homo sapien
gttttcatagcaccctttatgtgtt

SEQ ID NO: 1609394 - DNA, 25 bp, Homo sapien
tgttttcatagcaccctttatgtgt

SEQ ID NO: 1609395 - DNA, 25 bp, Homo sapien
ttttcatagcaccctttatgtgttt

SEQ ID NO: 1609396 - DNA, 25 bp, Homo sapien
cctaagcatgtaccataaaataagg

SEQ ID NO: 1609397 - DNA, 25 bp, Homo sapien
ccctaagcatgtaccataaaataag

SEQ ID NO: 1609398 - DNA, 25 bp, Homo sapien
acccctaagcatgtaccataaaata

SEQ ID NO: 1609399 - DNA, 25 bp, Homo sapien
cccctaagcatgtaccataaaataa

SEQ ID NO: 1609400 - DNA, 25 bp, Homo sapien
gcccagcagcgctactgcaaaatac

SEQ ID NO: 1609401 - DNA, 25 bp, Homo sapien
ctttgtaacatggaattcagaacac

SEQ ID NO: 1609402 - DNA, 25 bp, Homo sapien
taacatggaattcagaacactcatg

SEQ ID NO: 1609403 - DNA, 25 bp, Homo sapien
ggaccacctgattaatttcacagaa

SEQ ID NO: 1609404 - DNA, 25 bp, Homo sapien
ggccatcacggtcagaaggaagtta

SEQ ID NO: 1609405 - DNA, 25 bp, Homo sapien
tccaatcctacaaagagtaagaaaa

SEQ ID NO: 1609406 - DNA, 25 bp, Homo sapien
gaagttatccaatcctacaaagagt

SEQ ID NO: 1609407 - DNA, 25 bp, Homo sapien
cggtcagaaggaagttatccaatcc

SEQ ID NO: 1609408 - DNA, 25 bp, Homo sapien
tctaaaattattgtattgttccatg

SEQ ID NO: 1609409 - DNA, 25 bp, Homo sapien
aggaaggcctgcaattctggttcct

SEQ ID NO: 1609410 - DNA, 25 bp, Homo sapien
attattgtattgttccatgatttca

SEQ ID NO: 1609411 - DNA, 25 bp, Homo sapien
tggttcctctgaaattcccaggaga

SEQ ID NO: 1609412 - DNA, 25 bp, Homo sapien
gaagcgtttcagagcatcctttagg

SEQ ID NO: 1609413 - DNA, 25 bp, Homo sapien
tgaagaagcgtttcagagcatcctt

SEQ ID NO: 1609414 - DNA, 25 bp, Homo sapien
gcgtttcagagcatcctttaggtct

SEQ ID NO: 1609415 - DNA, 25 bp, Homo sapien
ttattgcttccttctgaagaagcgt

SEQ ID NO: 1609416 - DNA, 25 bp, Homo sapien
agaactaaggtacattcctaggctt

SEQ ID NO: 1609417 - DNA, 25 bp, Homo sapien
cattcctaggcttgtaccataaaac

SEQ ID NO: 1609418 - DNA, 25 bp, Homo sapien
aggtacattcctaggcttgtaccat

SEQ ID NO: 1609419 - DNA, 25 bp, Homo sapien
tacattcctaggcttgtaccataaa

SEQ ID NO: 1609420 - DNA, 25 bp, Homo sapien
gtctgtatagaagggcagtggcaac

SEQ ID NO: 1609421 - DNA, 25 bp, Homo sapien
gggattgctatgtctgtatagaagg

SEQ ID NO: 1609422 - DNA, 25 bp, Homo sapien
cccagcagcacagttgcacaatata

SEQ ID NO: 1609423 - DNA, 25 bp, Homo sapien
cagttgcacaatatatcatgatgtc

SEQ ID NO: 1609424 - DNA, 25 bp, Homo sapien
gggttcatgatgattgtgtagtaca

SEQ ID NO: 1609425 - DNA, 25 bp, Homo sapien
taagaatccagtctatagaactgag

SEQ ID NO: 1609426 - DNA, 25 bp, Homo sapien
catgatgattgtgtagtacagagga

SEQ ID NO: 1609427 - DNA, 25 bp, Homo sapien
gaactgagggttcatgatgattgtg

SEQ ID NO: 1609428 - DNA, 25 bp, Homo sapien
acagctaggagaaggctgtccaaca

SEQ ID NO: 1609429 - DNA, 25 bp, Homo sapien
catcacagctaggagaaggctgtcc

SEQ ID NO: 1609430 - DNA, 25 bp, Homo sapien
cacagctaggagaaggctgtccaac

SEQ ID NO: 1609431 - DNA, 25 bp, Homo sapien
tcacagctaggagaaggctgtccaa

SEQ ID NO: 1609432 - DNA, 25 bp, Homo sapien
tgcaaatagtaggaaaaagcacatc

SEQ ID NO: 1609433 - DNA, 25 bp, Homo sapien
gcataggtgatgactctgctctgcg

SEQ ID NO: 1609434 - DNA, 25 bp, Homo sapien
taggtgatgactctgctctgcgtct

SEQ ID NO: 1609435 - DNA, 25 bp, Homo sapien
ctgcaaatagtaggaaaaagcacat

SEQ ID NO: 1609436 - DNA, 25 bp, Homo sapien
tcgggacagtggtagacacaaaact

SEQ ID NO: 1609437 - DNA, 25 bp, Homo sapien
catcttcgggacagtggtagacaca

SEQ ID NO: 1609438 - DNA, 25 bp, Homo sapien
cagcatcttcgggacagtggtagac

SEQ ID NO: 1609439 - DNA, 25 bp, Homo sapien
gacagtggtagacacaaaactgata

SEQ ID NO: 1609440 - DNA, 25 bp, Homo sapien
ggacaggttggagaggaagaagtac

SEQ ID NO: 1609441 - DNA, 25 bp, Homo sapien
ctgcaaaggacaggttggagaggaa

SEQ ID NO: 1609442 - DNA, 25 bp, Homo sapien
caaaggacaggttggagaggaagaa

SEQ ID NO: 1609443 - DNA, 25 bp, Homo sapien
aaggacaggttggagaggaagaagt

SEQ ID NO: 1609444 - DNA, 25 bp, Homo sapien
tgggagtctgagattgtggccagga

SEQ ID NO: 1609445 - DNA, 25 bp, Homo sapien
ggagtctgagattgtggccaggatg

SEQ ID NO: 1609446 - DNA, 25 bp, Homo sapien
agtctgagattgtggccaggatgat

SEQ ID NO: 1609447 - DNA, 25 bp, Homo sapien
ggtgggagtctgagattgtggccag

SEQ ID NO: 1609448 - DNA, 25 bp, Homo sapien
aagaaattctgaaattcgtgtatca

SEQ ID NO: 1609449 - DNA, 25 bp, Homo sapien
attcgtgtatcattccctggtttca

SEQ ID NO: 1609450 - DNA, 25 bp, Homo sapien
attctgaaattcgtgtatcattccc

SEQ ID NO: 1609451 - DNA, 25 bp, Homo sapien
ctgaaattcgtgtatcattccctgg

SEQ ID NO: 1609452 - DNA, 25 bp, Homo sapien
gcatgccttacaatcctaacaatat

SEQ ID NO: 1609453 - DNA, 25 bp, Homo sapien
tgacacaagcatgccttacaatcct

SEQ ID NO: 1609454 - DNA, 25 bp, Homo sapien
aatatgacacaagcatgccttacaa

SEQ ID NO: 1609455 - DNA, 25 bp, Homo sapien
tacaatcctaacaatataaatgttg

SEQ ID NO: 1609456 - DNA, 25 bp, Homo sapien
atggattttctggaaggaaggtgtc

SEQ ID NO: 1609457 - DNA, 25 bp, Homo sapien
gattttctggaaggaaggtgtcgtc

SEQ ID NO: 1609458 - DNA, 25 bp, Homo sapien
tttctggaaggaaggtgtcgtccat

SEQ ID NO: 1609459 - DNA, 25 bp, Homo sapien
cctgatggattttctggaaggaagg

SEQ ID NO: 1609460 - DNA, 25 bp, Homo sapien
tggttgatgatggaaactgaagctc

SEQ ID NO: 1609461 - DNA, 25 bp, Homo sapien
ggatggttgatgatggaaactgaag

SEQ ID NO: 1609462 - DNA, 25 bp, Homo sapien
ggttgatgatggaaactgaagctct

SEQ ID NO: 1609463 - DNA, 25 bp, Homo sapien
gatggttgatgatggaaactgaagc

SEQ ID NO: 1609464 - DNA, 25 bp, Homo sapien
gtactcgagccagattgaggactcc

SEQ ID NO: 1609465 - DNA, 25 bp, Homo sapien
catcagtactcgagccagattgagg

SEQ ID NO: 1609466 - DNA, 25 bp, Homo sapien
ggtcaggcatcagtactcgagccag

SEQ ID NO: 1609467 - DNA, 25 bp, Homo sapien
aaggtcaggcatcagtactcgagcc

SEQ ID NO: 1609468 - DNA, 25 bp, Homo sapien
tttccctctgaagaattgtgtcaga

SEQ ID NO: 1609469 - DNA, 25 bp, Homo sapien
gtacatcaccgaggcgacagcagtt

SEQ ID NO: 1609470 - DNA, 25 bp, Homo sapien
tgggtcatagtagagctaaggtaca

SEQ ID NO: 1609471 - DNA, 25 bp, Homo sapien
gcagttgagtgtaagttttgggtca

SEQ ID NO: 1609472 - DNA, 25 bp, Homo sapien
tcatagtagagctaaggtacacccc

SEQ ID NO: 1609473 - DNA, 25 bp, Homo sapien
ggaaagtgccttgtacttcccctga

SEQ ID NO: 1609474 - DNA, 25 bp, Homo sapien
taaaatatggagacaactgagaggt

SEQ ID NO: 1609475 - DNA, 25 bp, Homo sapien
ccctgagttgacgagattgcacgta

SEQ ID NO: 1609476 - DNA, 25 bp, Homo sapien
gacgagattgcacgtatggaggaaa

SEQ ID NO: 1609477 - DNA, 25 bp, Homo sapien
aagaataaaggatcccaacgagagg

SEQ ID NO: 1609478 - DNA, 25 bp, Homo sapien
gaataaaggatcccaacgagaggac

SEQ ID NO: 1609479 - DNA, 25 bp, Homo sapien
agtaagaataaaggatcccaacgag

SEQ ID NO: 1609480 - DNA, 25 bp, Homo sapien
taagaataaaggatcccaacgagag

SEQ ID NO: 1609481 - DNA, 25 bp, Homo sapien
tgttgttcacaaaggtgtcagaaca

SEQ ID NO: 1609482 - DNA, 25 bp, Homo sapien
cagaaggacaactgcaatgtcacta

SEQ ID NO: 1609483 - DNA, 25 bp, Homo sapien
gaaggacaactgcaatgtcactaag

SEQ ID NO: 1609484 - DNA, 25 bp, Homo sapien
catgttgttcacaaaggtgtcagaa

SEQ ID NO: 1609485 - DNA, 25 bp, Homo sapien
agagctgagggctcatgatgaccgt

SEQ ID NO: 1609486 - DNA, 25 bp, Homo sapien
gtccacagagctgagggctcatgat

SEQ ID NO: 1609487 - DNA, 25 bp, Homo sapien
acggtcaggagtaagctgtccaaca

SEQ ID NO: 1609488 - DNA, 25 bp, Homo sapien
ggccatcacggtcaggagtaagctg

SEQ ID NO: 1609489 - DNA, 25 bp, Homo sapien
ctataaagagtacaaaaaagcacat

SEQ ID NO: 1609490 - DNA, 25 bp, Homo sapien
caaaaaagcacatctgggtgatgca

SEQ ID NO: 1609491 - DNA, 25 bp, Homo sapien
aaaaagcacatctgggtgatgcaac

SEQ ID NO: 1609492 - DNA, 25 bp, Homo sapien
tacaaaaaagcacatctgggtgatg

SEQ ID NO: 1609493 - DNA, 25 bp, Homo sapien
caacatctttgggaccatggtggag

SEQ ID NO: 1609494 - DNA, 25 bp, Homo sapien
ggaggcaaaacagatatctacgaag

SEQ ID NO: 1609495 - DNA, 25 bp, Homo sapien
gtggaggcaaaacagatatctacga

SEQ ID NO: 1609496 - DNA, 25 bp, Homo sapien
atgttcaccaacatctttgggacca

SEQ ID NO: 1609497 - DNA, 25 bp, Homo sapien
aggaagggctgcaattcttgtttct

SEQ ID NO: 1609498 - DNA, 25 bp, Homo sapien
agaggaagggctgcaattcttgttt

SEQ ID NO: 1609499 - DNA, 25 bp, Homo sapien
gtggaggcaggagtctgagattgcg

SEQ ID NO: 1609500 - DNA, 25 bp, Homo sapien
gcaggagtctgagattgcggccagg

SEQ ID NO: 1609501 - DNA, 25 bp, Homo sapien
tgaaatttgtgtctcattccctgct

SEQ ID NO: 1609502 - DNA, 25 bp, Homo sapien
tcattccctgctttcacctggttga

SEQ ID NO: 1609503 - DNA, 25 bp, Homo sapien
tgtctcattccctgctttcacctgg

SEQ ID NO: 1609504 - DNA, 25 bp, Homo sapien
atttgtgtctcattccctgctttca

SEQ ID NO: 1609505 - DNA, 25 bp, Homo sapien
aattcctccctgaatggttgttggt

SEQ ID NO: 1609506 - DNA, 25 bp, Homo sapien
gaattcctccctgaatggttgttgg

SEQ ID NO: 1609507 - DNA, 25 bp, Homo sapien
catcactgaggctgttgcacttgtg

SEQ ID NO: 1609508 - DNA, 25 bp, Homo sapien
tctgaaggacattttcagagccctc

SEQ ID NO: 1609509 - DNA, 25 bp, Homo sapien
acttgtgtgtgagttgtgggttgca

SEQ ID NO: 1609510 - DNA, 25 bp, Homo sapien
gttgcagcagaagtaaggtacacac

SEQ ID NO: 1609511 - DNA, 25 bp, Homo sapien
aatgccttgtacttcccctgagctg

SEQ ID NO: 1609512 - DNA, 25 bp, Homo sapien
gagctgatgagattgcacgtatgga

SEQ ID NO: 1609513 - DNA, 25 bp, Homo sapien
tatggaggaaactatcttagagtaa

SEQ ID NO: 1609514 - DNA, 25 bp, Homo sapien
tcccctgagctgatgagattgcacg

SEQ ID NO: 1609515 - DNA, 25 bp, Homo sapien
gctgtctaaccctccaaaaagtaca

SEQ ID NO: 1609516 - DNA, 25 bp, Homo sapien
acagccaggagtaagctgtctaacc

SEQ ID NO: 1609517 - DNA, 25 bp, Homo sapien
cagccacaataccattaagctttgt

SEQ ID NO: 1609518 - DNA, 25 bp, Homo sapien
gacaaggaattcagggcagcaatca

SEQ ID NO: 1609519 - DNA, 25 bp, Homo sapien
tgggagtctgagattgtggccagga

SEQ ID NO: 1609520 - DNA, 25 bp, Homo sapien
ggagtctgagattgtggccaggatg

SEQ ID NO: 1609521 - DNA, 25 bp, Homo sapien
agtctgagattgtggccaggatgat

SEQ ID NO: 1609522 - DNA, 25 bp, Homo sapien
ggtgggagtctgagattgtggccag

SEQ ID NO: 1609523 - DNA, 25 bp, Homo sapien
ctgcaattctggttcctcagaaagt

SEQ ID NO: 1609524 - DNA, 25 bp, Homo sapien
attctgaaatccctgtgtcattctc

SEQ ID NO: 1609525 - DNA, 25 bp, Homo sapien
tgcaattctggttcctcagaaagtc

SEQ ID NO: 1609526 - DNA, 25 bp, Homo sapien
aatccctgtgtcattctctggttcc

SEQ ID NO: 1609527 - DNA, 25 bp, Homo sapien
atggggggatttccaagtttgtgca

SEQ ID NO: 1609528 - DNA, 25 bp, Homo sapien
cacagtccaaagatcccaggattca

SEQ ID NO: 1609529 - DNA, 25 bp, Homo sapien
aggaattcagggcactcatgctcca

SEQ ID NO: 1609530 - DNA, 25 bp, Homo sapien
cagctgcaacacattctgctttgca

SEQ ID NO: 1609531 - DNA, 25 bp, Homo sapien
ctctgaaatctcaagaacttctgga

SEQ ID NO: 1609532 - DNA, 25 bp, Homo sapien
gctctgaaatctcaagaacttctgg

SEQ ID NO: 1609533 - DNA, 25 bp, Homo sapien
gagctctgaaatctcaagaacttct

SEQ ID NO: 1609534 - DNA, 25 bp, Homo sapien
agctctgaaatctcaagaacttctg

SEQ ID NO: 1609535 - DNA, 25 bp, Homo sapien
gcagcatttgagagtgagttatggg

SEQ ID NO: 1609536 - DNA, 25 bp, Homo sapien
cagcatttgagagtgagttatgggt

SEQ ID NO: 1609537 - DNA, 25 bp, Homo sapien
tgcagcatttgagagtgagttatgg

SEQ ID NO: 1609538 - DNA, 25 bp, Homo sapien
agcatttgagagtgagttatgggtt

SEQ ID NO: 1609539 - DNA, 25 bp, Homo sapien
atgagatcgaacatatgcaacaaag

SEQ ID NO: 1609540 - DNA, 25 bp, Homo sapien
gagctgatgagatcgaacatatgca

SEQ ID NO: 1609541 - DNA, 25 bp, Homo sapien
ctgagctgatgagatcgaacatatg

SEQ ID NO: 1609542 - DNA, 25 bp, Homo sapien
gctgatgagatcgaacatatgcaac

SEQ ID NO: 1609543 - DNA, 25 bp, Homo sapien
agtaaaatattccagcgaggcatcc

SEQ ID NO: 1609544 - DNA, 25 bp, Homo sapien
aaatattccagcgaggcatccccca

SEQ ID NO: 1609545 - DNA, 25 bp, Homo sapien
aatattccagcgaggcatcccccac

SEQ ID NO: 1609546 - DNA, 25 bp, Homo sapien
taaaatattccagcgaggcatcccc

SEQ ID NO: 1609547 - DNA, 25 bp, Homo sapien
catgtcattaataaaagtgtcggaa

SEQ ID NO: 1609548 - DNA, 25 bp, Homo sapien
ccagcagcacacttgtaaaattcat

SEQ ID NO: 1609549 - DNA, 25 bp, Homo sapien
aaaaatgagggattttcaattctgt

SEQ ID NO: 1609550 - DNA, 25 bp, Homo sapien
caattctgtacagaaggacagctgc

SEQ ID NO: 1609551 - DNA, 25 bp, Homo sapien
cacagagccaggagttcataatgac

SEQ ID NO: 1609552 - DNA, 25 bp, Homo sapien
acagagccaggagttcataatgact

SEQ ID NO: 1609553 - DNA, 25 bp, Homo sapien
cagagccaggagttcataatgactg

SEQ ID NO: 1609554 - DNA, 25 bp, Homo sapien
tgggagtctgagattgtggccagga

SEQ ID NO: 1609555 - DNA, 25 bp, Homo sapien
ggagtctgagattgtggccaggatg

SEQ ID NO: 1609556 - DNA, 25 bp, Homo sapien
agtctgagattgtggccaggatgat

SEQ ID NO: 1609557 - DNA, 25 bp, Homo sapien
ggtgggagtctgagattgtggccag

SEQ ID NO: 1609558 - DNA, 25 bp, Homo sapien
agaaatagcccaaagaggaagggct

SEQ ID NO: 1609559 - DNA, 25 bp, Homo sapien
ggacagaaatagcccaaagaggaag

SEQ ID NO: 1609560 - DNA, 25 bp, Homo sapien
agaggaagggctgcaattctggttc

SEQ ID NO: 1609561 - DNA, 25 bp, Homo sapien
aggaagggctgcaattctggttcct

SEQ ID NO: 1609562 - DNA, 25 bp, Homo sapien
atttgtgtctcattccctggtttca

SEQ ID NO: 1609563 - DNA, 25 bp, Homo sapien
ccaggagaaggaattgtgaaatttg

SEQ ID NO: 1609564 - DNA, 25 bp, Homo sapien
tcccaggagaaggaattgtgaaatt

SEQ ID NO: 1609565 - DNA, 25 bp, Homo sapien
gtgaaatttgtgtctcattccctgg

SEQ ID NO: 1609566 - DNA, 25 bp, Homo sapien
tatggggtctcagagatgaaggtct

SEQ ID NO: 1609567 - DNA, 25 bp, Homo sapien
gtagttgatgatgcagactgaagct

SEQ ID NO: 1609568 - DNA, 25 bp, Homo sapien
cctccctgggtagttgatgatgcag

SEQ ID NO: 1609569 - DNA, 25 bp, Homo sapien
ccctgggtagttgatgatgcagact

SEQ ID NO: 1609570 - DNA, 25 bp, Homo sapien
attgacttgtggttggaacacagct

SEQ ID NO: 1609571 - DNA, 25 bp, Homo sapien
tgacttgtggttggaacacagctgc

SEQ ID NO: 1609572 - DNA, 25 bp, Homo sapien
cattgacttgtggttggaacacagc

SEQ ID NO: 1609573 - DNA, 25 bp, Homo sapien
ttgacttgtggttggaacacagctg

SEQ ID NO: 1609574 - DNA, 25 bp, Homo sapien
cttctgaagaattgttttagagccc

SEQ ID NO: 1609575 - DNA, 25 bp, Homo sapien
tagagccccctttatgtctttattc

SEQ ID NO: 1609576 - DNA, 25 bp, Homo sapien
tccttctgaagaattgttttagagc

SEQ ID NO: 1609577 - DNA, 25 bp, Homo sapien
tcttccttctgaagaattgttttag

SEQ ID NO: 1609578 - DNA, 25 bp, Homo sapien
ggtgaccacagtgtacatcagaggc

SEQ ID NO: 1609579 - DNA, 25 bp, Homo sapien
ccacagtgtacatcagaggctgttg

SEQ ID NO: 1609580 - DNA, 25 bp, Homo sapien
acagtgtacatcagaggctgttgca

SEQ ID NO: 1609581 - DNA, 25 bp, Homo sapien
tgaccacagtgtacatcagaggctg

SEQ ID NO: 1609582 - DNA, 25 bp, Homo sapien
aggtacaccccaaggctcatacaat

SEQ ID NO: 1609583 - DNA, 25 bp, Homo sapien
aaggtacaccccaaggctcatacaa

SEQ ID NO: 1609584 - DNA, 25 bp, Homo sapien
taaggtacaccccaaggctcataca

SEQ ID NO: 1609585 - DNA, 25 bp, Homo sapien
ggtacaccccaaggctcatacaata

SEQ ID NO: 1609586 - DNA, 25 bp, Homo sapien
tcaaggaattcagggcactcatgat

SEQ ID NO: 1609587 - DNA, 25 bp, Homo sapien
agtctgtacaaaagagcagtggcaa

SEQ ID NO: 1609588 - DNA, 25 bp, Homo sapien
ttttcaagtctgtacaaaagagcag

SEQ ID NO: 1609589 - DNA, 25 bp, Homo sapien
aagctttctatcaaggaattcaggg

SEQ ID NO: 1609590 - DNA, 25 bp, Homo sapien
tgatgactttactctgtgtccggat

SEQ ID NO: 1609591 - DNA, 25 bp, Homo sapien
tccggatgtttgacagtgtctttgg

SEQ ID NO: 1609592 - DNA, 25 bp, Homo sapien
ctttactctgtgtccggatgtttga

SEQ ID NO: 1609593 - DNA, 25 bp, Homo sapien
gactgtggtggaggtaacacagatg

SEQ ID NO: 1609594 - DNA, 25 bp, Homo sapien
ggaagagtccaaacataacgggctg

SEQ ID NO: 1609595 - DNA, 25 bp, Homo sapien
tgaggtgactaccagtcagagaaag

SEQ ID NO: 1609596 - DNA, 25 bp, Homo sapien
tactcaaaagggcatcactcacatt

SEQ ID NO: 1609597 - DNA, 25 bp, Homo sapien
cacagttgtcagatacatggagagg

SEQ ID NO: 1609598 - DNA, 25 bp, Homo sapien
ctgttttgtaatgtgaaacatctat

SEQ ID NO: 1609599 - DNA, 25 bp, Homo sapien
gttttgtaatgtgaaacatctatca

SEQ ID NO: 1609600 - DNA, 25 bp, Homo sapien
ttttgtaatgtgaaacatctatcat

SEQ ID NO: 1609601 - DNA, 25 bp, Homo sapien
tgttttgtaatgtgaaacatctatc

SEQ ID NO: 1609602 - DNA, 25 bp, Homo sapien
caagcagaacgtgtgttcagcccac

SEQ ID NO: 1609603 - DNA, 25 bp, Homo sapien
acagatgtgtcaccaggactcccct

SEQ ID NO: 1609604 - DNA, 25 bp, Homo sapien
ccctaaatgagtcaagcagaacgtg

SEQ ID NO: 1609605 - DNA, 25 bp, Homo sapien
ccacggtcagttgggcaacagatgt

SEQ ID NO: 1609606 - DNA, 25 bp, Homo sapien
gccatgagggacttgtagggtttcc

SEQ ID NO: 1609607 - DNA, 25 bp, Homo sapien
agctcccgctgagacaagtgctcga

SEQ ID NO: 1609608 - DNA, 25 bp, Homo sapien
gatgacggccgctccaattgagtcc

SEQ ID NO: 1609609 - DNA, 25 bp, Homo sapien
gttggtcattgtgcgaagccggtca

SEQ ID NO: 1609610 - DNA, 25 bp, Homo sapien
cgaccgacgtaagcacaatgaccat

SEQ ID NO: 1609611 - DNA, 25 bp, Homo sapien
aagccgaccgacgtaagcacaatga

SEQ ID NO: 1609612 - DNA, 25 bp, Homo sapien
gtgggcaagccgaccgacgtaagca

SEQ ID NO: 1609613 - DNA, 25 bp, Homo sapien
gtcttccgtgggcaagccgaccgac

SEQ ID NO: 1609614 - DNA, 25 bp, Homo sapien
cccaacactggctgctgtggccgtg

SEQ ID NO: 1609615 - DNA, 25 bp, Homo sapien
ctgggggatgccagcagccccaaca

SEQ ID NO: 1609616 - DNA, 25 bp, Homo sapien
ggtgaccagacccgcctgggggatg

SEQ ID NO: 1609617 - DNA, 25 bp, Homo sapien
cagcagccccaacactggctgctgt

SEQ ID NO: 1609618 - DNA, 25 bp, Homo sapien
ctaagttggaaccactggatgatgg

SEQ ID NO: 1609619 - DNA, 25 bp, Homo sapien
agttggaaccactggatgatgggac

SEQ ID NO: 1609620 - DNA, 25 bp, Homo sapien
aagttggaaccactggatgatggga

SEQ ID NO: 1609621 - DNA, 25 bp, Homo sapien
taagttggaaccactggatgatggg

SEQ ID NO: 1609622 - DNA, 25 bp, Homo sapien
cccacgggcaggacgaacctggtga

SEQ ID NO: 1609623 - DNA, 25 bp, Homo sapien
gtgatgcggcggtccacacccaggc

SEQ ID NO: 1609624 - DNA, 25 bp, Homo sapien
tccatgttgaccgtggcgcccacgg

SEQ ID NO: 1609625 - DNA, 25 bp, Homo sapien
cccaggttgagctcgtagttgttaa

SEQ ID NO: 1609626 - DNA, 25 bp, Homo sapien
ccacgatgacggtcagggtgtacat

SEQ ID NO: 1609627 - DNA, 25 bp, Homo sapien
gtgatgagggcttgtagcatgcccc

SEQ ID NO: 1609628 - DNA, 25 bp, Homo sapien
catggaggaacaggcccacgatgac

SEQ ID NO: 1609629 - DNA, 25 bp, Homo sapien
gaagacgtgcccatagcggtgatga

SEQ ID NO: 1609630 - DNA, 25 bp, Homo sapien
aagtgaatcacccaatacgtaaatg

SEQ ID NO: 1609631 - DNA, 25 bp, Homo sapien
gagtgagatattccatgaactaacc

SEQ ID NO: 1609632 - DNA, 25 bp, Homo sapien
tagtgagttggccagtgatttaacc

SEQ ID NO: 1609633 - DNA, 25 bp, Homo sapien
taaatgaatgaccaaaagtccccag

SEQ ID NO: 1609634 - DNA, 25 bp, Homo sapien
agctggttccgttctccactgagaa

SEQ ID NO: 1609635 - DNA, 25 bp, Homo sapien
tcattgaggctgtcgaagaagtccc

SEQ ID NO: 1609636 - DNA, 25 bp, Homo sapien
tgtgtttcatgccaccaatgaccag

SEQ ID NO: 1609637 - DNA, 25 bp, Homo sapien
ccctcgtgctgtactgcgtcttgaa

SEQ ID NO: 1609638 - DNA, 25 bp, Homo sapien
cacaaggtttggtggaaacatattt

SEQ ID NO: 1609639 - DNA, 25 bp, Homo sapien
ccacaaggtttggtggaaacatatt

SEQ ID NO: 1609640 - DNA, 25 bp, Homo sapien
tccacaaggtttggtggaaacatat

SEQ ID NO: 1609641 - DNA, 25 bp, Homo sapien
cttcccgggatggatgatggtgacc

SEQ ID NO: 1609642 - DNA, 25 bp, Homo sapien
catgaggatgccgatgaagaccgcg

SEQ ID NO: 1609643 - DNA, 25 bp, Homo sapien
tgccgatgaagaccgcgatgatggt

SEQ ID NO: 1609644 - DNA, 25 bp, Homo sapien
gatggtctcgatccggccctcccgg

SEQ ID NO: 1609645 - DNA, 25 bp, Homo sapien
tcaccccatcctctattgagtcttg

SEQ ID NO: 1609646 - DNA, 25 bp, Homo sapien
cggactctccttcgcccagactgga

SEQ ID NO: 1609647 - DNA, 25 bp, Homo sapien
gccagctctcctagcatccgttcca

SEQ ID NO: 1609648 - DNA, 25 bp, Homo sapien
caagcagcactccactatcctactg

SEQ ID NO: 1609649 - DNA, 25 bp, Homo sapien
ctgatatgggcgcagggcaaaggcc

SEQ ID NO: 1609650 - DNA, 25 bp, Homo sapien
ggagacaatgagaggtaacaccagc

SEQ ID NO: 1609651 - DNA, 25 bp, Homo sapien
cttgatctggcggtaggtgagctga

SEQ ID NO: 1609652 - DNA, 25 bp, Homo sapien
aggaaaagagaagtacttgatctgg

SEQ ID NO: 1609653 - DNA, 25 bp, Homo sapien
cagcagaatgaaggcgtttcggcgc

SEQ ID NO: 1609654 - DNA, 25 bp, Homo sapien
aggcgcgtgcgcagtgctctctgct

SEQ ID NO: 1609655 - DNA, 25 bp, Homo sapien
cggcgctgaccgtcagcagaatgaa

SEQ ID NO: 1609656 - DNA, 25 bp, Homo sapien
gcgcaggcgcgtgcgcagtgctctc

SEQ ID NO: 1609657 - DNA, 25 bp, Homo sapien
ggcccagccgctggccgctctcccg

SEQ ID NO: 1609658 - DNA, 25 bp, Homo sapien
agccgctggccgctctcccgcagga

SEQ ID NO: 1609659 - DNA, 25 bp, Homo sapien
gaacaggctgttgccatggctgctc

SEQ ID NO: 1609660 - DNA, 25 bp, Homo sapien
cgctctcccgcaggaacaggctgtt

SEQ ID NO: 1609661 - DNA, 25 bp, Homo sapien
tgtacgggccacaaagctcaaaatg

SEQ ID NO: 1609662 - DNA, 25 bp, Homo sapien
taccaagggagatcattcagctaag

SEQ ID NO: 1609663 - DNA, 25 bp, Homo sapien
aattcaaccaggtcgagctgcaggt

SEQ ID NO: 1609664 - DNA, 25 bp, Homo sapien
gaagttgcctgtagataccaaggga

SEQ ID NO: 1609665 - DNA, 25 bp, Homo sapien
aaaatgtcccttctagtgttcccag

SEQ ID NO: 1609666 - DNA, 25 bp, Homo sapien
ttggttctcccgacctctagacact

SEQ ID NO: 1609667 - DNA, 25 bp, Homo sapien
ctagacacttagatctgatgagatg

SEQ ID NO: 1609668 - DNA, 25 bp, Homo sapien
tgtcccttctagtgttcccagtttc

SEQ ID NO: 1609669 - DNA, 25 bp, Homo sapien
gcctggcttcctccgctaaacaagg

SEQ ID NO: 1609670 - DNA, 25 bp, Homo sapien
tgagaaaattaaagcgcgtgaggct

SEQ ID NO: 1609671 - DNA, 25 bp, Homo sapien
ttgcgggtgcaccttccggccttgg

SEQ ID NO: 1609672 - DNA, 25 bp, Homo sapien
aacaaggaagatggcttggccgacc

SEQ ID NO: 1609673 - DNA, 25 bp, Homo sapien
gatttcacagcgaagggcatctcca

SEQ ID NO: 1609674 - DNA, 25 bp, Homo sapien
gggtctctgataattacctgccaag

SEQ ID NO: 1609675 - DNA, 25 bp, Homo sapien
taaaagtagaacctggtgtcccaga

SEQ ID NO: 1609676 - DNA, 25 bp, Homo sapien
cccctggaatgagagaccaattgat

SEQ ID NO: 1609677 - DNA, 25 bp, Homo sapien
tgaggtggacggcaacgtggtgcgc

SEQ ID NO: 1609678 - DNA, 25 bp, Homo sapien
gcctcaactgcaagaacatcgggca

SEQ ID NO: 1609679 - DNA, 25 bp, Homo sapien
ctgcaagaacatcgggcatgaggtg

SEQ ID NO: 1609680 - DNA, 25 bp, Homo sapien
ggcatgaggtggacggcaacgtggt

SEQ ID NO: 1609681 - DNA, 25 bp, Homo sapien
gttgatacgttgttgaccacagtgg

SEQ ID NO: 1609682 - DNA, 25 bp, Homo sapien
cagttgatacgttgttgaccacagt

SEQ ID NO: 1609683 - DNA, 25 bp, Homo sapien
tcagttgatacgttgttgaccacag

SEQ ID NO: 1609684 - DNA, 25 bp, Homo sapien
agttgatacgttgttgaccacagtg

SEQ ID NO: 1609685 - DNA, 25 bp, Homo sapien
aacatgtttgtgactgttcattgca

SEQ ID NO: 1609686 - DNA, 25 bp, Homo sapien
tgtgactgttcattgcaagagtaac

SEQ ID NO: 1609687 - DNA, 25 bp, Homo sapien
tgtttgtgactgttcattgcaagag

SEQ ID NO: 1609688 - DNA, 25 bp, Homo sapien
gactgttcattgcaagagtaaccac

SEQ ID NO: 1609689 - DNA, 25 bp, Homo sapien
gacaaacggcacagttgggtccgtg

SEQ ID NO: 1609690 - DNA, 25 bp, Homo sapien
ggccagaggtggtttattcagtctc

SEQ ID NO: 1609691 - DNA, 25 bp, Homo sapien
ggagggtccaagagctcacaagaga

SEQ ID NO: 1609692 - DNA, 25 bp, Homo sapien
gagtacttgggcctacatgggccag

SEQ ID NO: 1609693 - DNA, 25 bp, Homo sapien
caatgatgagactccaaaccagctg

SEQ ID NO: 1609694 - DNA, 25 bp, Homo sapien
cccagggcaagcaatgatgagactc

SEQ ID NO: 1609695 - DNA, 25 bp, Homo sapien
tcatgggataggcccagggcaagca

SEQ ID NO: 1609696 - DNA, 25 bp, Homo sapien
gccaagcgtcctgacccacaaggcc

SEQ ID NO: 1609697 - DNA, 25 bp, Homo sapien
caatggagccatcgcggaagtccgt

SEQ ID NO: 1609698 - DNA, 25 bp, Homo sapien
gaagtccgtcctcccaatgaggatg

SEQ ID NO: 1609699 - DNA, 25 bp, Homo sapien
aggatgttgaccacaaccgggtggc

SEQ ID NO: 1609700 - DNA, 25 bp, Homo sapien
tatacagcaatggagccatcgcgga

SEQ ID NO: 1609701 - DNA, 25 bp, Homo sapien
gatcctcgttctcccgtgagagcag

SEQ ID NO: 1609702 - DNA, 25 bp, Homo sapien
tcgttctcccgtgagagcagcaagc

SEQ ID NO: 1609703 - DNA, 25 bp, Homo sapien
accttgaccacctgatcctcgttct

SEQ ID NO: 1609704 - DNA, 25 bp, Homo sapien
acctgatcctcgttctcccgtgaga

SEQ ID NO: 1609705 - DNA, 25 bp, Homo sapien
tcggatagtggcaaggactcagccc

SEQ ID NO: 1609706 - DNA, 25 bp, Homo sapien
gattaagtcggatagtggcaaggac

SEQ ID NO: 1609707 - DNA, 25 bp, Homo sapien
aaagaagagattaagtcggatagtg

SEQ ID NO: 1609708 - DNA, 25 bp, Homo sapien
atagtggcaaggactcagcccaccg

SEQ ID NO: 1609709 - DNA, 25 bp, Homo sapien
agaaatctgtgtccagccagcatca

SEQ ID NO: 1609710 - DNA, 25 bp, Homo sapien
tcccgagaaatctgtgtccagccag

SEQ ID NO: 1609711 - DNA, 25 bp, Homo sapien
agagggcacctgctcccgagaaatc

SEQ ID NO: 1609712 - DNA, 25 bp, Homo sapien
gcacctgctcccgagaaatctgtgt

SEQ ID NO: 1609713 - DNA, 25 bp, Homo sapien
ctcagcccacccctggtgacatctc

SEQ ID NO: 1609714 - DNA, 25 bp, Homo sapien
ccccaggccctaagcttccctcagg

SEQ ID NO: 1609715 - DNA, 25 bp, Homo sapien
tcagccccatggcttggccagccag

SEQ ID NO: 1609716 - DNA, 25 bp, Homo sapien
gatgatgaaggcaggccgcagcctt

SEQ ID NO: 1609717 - DNA, 25 bp, Homo sapien
gaggctgtagccaaaagctccgtcc

SEQ ID NO: 1609718 - DNA, 25 bp, Homo sapien
cttgtgtctgacgaatgtatcaaat

SEQ ID NO: 1609719 - DNA, 25 bp, Homo sapien
gtatcaaattcgatgaggctgtagc

SEQ ID NO: 1609720 - DNA, 25 bp, Homo sapien
agctccgtccccaaacaggcaccag

SEQ ID NO: 1609721 - DNA, 25 bp, Homo sapien
gatcaggacctagagagcagcaagt

SEQ ID NO: 1609722 - DNA, 25 bp, Homo sapien
gtggatcaggacctagagagcagca

SEQ ID NO: 1609723 - DNA, 25 bp, Homo sapien
gttagggtggatcaggacctagaga

SEQ ID NO: 1609724 - DNA, 25 bp, Homo sapien
aggacctagagagcagcaagtctcc

SEQ ID NO: 1609725 - DNA, 25 bp, Homo sapien
cttggccccaagtgcaaatcctgca

SEQ ID NO: 1609726 - DNA, 25 bp, Homo sapien
cggcacagcttggccccaagtgcaa

SEQ ID NO: 1609727 - DNA, 25 bp, Homo sapien
acagcttggccccaagtgcaaatcc

SEQ ID NO: 1609728 - DNA, 25 bp, Homo sapien
tgcaaatcctgcaccaactcccaga

SEQ ID NO: 1609729 - DNA, 25 bp, Homo sapien
gtgtgaaggcgtcctgatggatggt

SEQ ID NO: 1609730 - DNA, 25 bp, Homo sapien
aggtgggtgtgaaggcgtcctgatg

SEQ ID NO: 1609731 - DNA, 25 bp, Homo sapien
gggtgtgaaggcgtcctgatggatg

SEQ ID NO: 1609732 - DNA, 25 bp, Homo sapien
ggaccaagagcaggtgggtgtgaag

SEQ ID NO: 1609733 - DNA, 25 bp, Homo sapien
ccgcggggctgtaccagatgggcag

SEQ ID NO: 1609734 - DNA, 25 bp, Homo sapien
gagttgtcaggtagcgtttcctcca

SEQ ID NO: 1609735 - DNA, 25 bp, Homo sapien
gtgcccacgaagtccccgccatcca

SEQ ID NO: 1609736 - DNA, 25 bp, Homo sapien
tgggccacaggcatcgctgccttct

SEQ ID NO: 1609737 - DNA, 25 bp, Homo sapien
caggtctggccctgaaggccctcca

SEQ ID NO: 1609738 - DNA, 25 bp, Homo sapien
taacttcagcacgaaggaacccaca

SEQ ID NO: 1609739 - DNA, 25 bp, Homo sapien
actaacttcagcacgaaggaaccca

SEQ ID NO: 1609740 - DNA, 25 bp, Homo sapien
tgaaggccctccactaacttcagca

SEQ ID NO: 1609741 - DNA, 25 bp, Homo sapien
aagtgaactaacaaacagccccgtg

SEQ ID NO: 1609742 - DNA, 25 bp, Homo sapien
taatacaagagtgtcctgtcgccta

SEQ ID NO: 1609743 - DNA, 25 bp, Homo sapien
aggtgacaaacccaagctggcctcg

SEQ ID NO: 1609744 - DNA, 25 bp, Homo sapien
tggaagcgcacagcgaacgttactg

SEQ ID NO: 1609745 - DNA, 25 bp, Homo sapien
gattgacgatgatgatcttgctgct

SEQ ID NO: 1609746 - DNA, 25 bp, Homo sapien
ggataggcggaagtcacacacagtt

SEQ ID NO: 1609747 - DNA, 25 bp, Homo sapien
gcaacatctcttcccgattacgatt

SEQ ID NO: 1609748 - DNA, 25 bp, Homo sapien
cacggccataggataggcggaagtc

SEQ ID NO: 1609749 - DNA, 25 bp, Homo sapien
gcactgcggttctcccggatgtgga

SEQ ID NO: 1609750 - DNA, 25 bp, Homo sapien
gctaggacaatgacatccgccttct

SEQ ID NO: 1609751 - DNA, 25 bp, Homo sapien
tcttcagggccgcactgcggttctc

SEQ ID NO: 1609752 - DNA, 25 bp, Homo sapien
aggaagcagggaacacccaaggtct

SEQ ID NO: 1609753 - DNA, 25 bp, Homo sapien
gaagcttgtcggcagacgttggggt

SEQ ID NO: 1609754 - DNA, 25 bp, Homo sapien
cccggctcaggatctccacacagcg

SEQ ID NO: 1609755 - DNA, 25 bp, Homo sapien
ggctcaggatctccacacagcgctg

SEQ ID NO: 1609756 - DNA, 25 bp, Homo sapien
ttggcccggctcaggatctccacac

SEQ ID NO: 1609757 - DNA, 25 bp, Homo sapien
cggtccctcgggctgaggctcccag

SEQ ID NO: 1609758 - DNA, 25 bp, Homo sapien
aggttggccaggtaattctctaaat

SEQ ID NO: 1609759 - DNA, 25 bp, Homo sapien
gggcagcggtccctcgggctgaggc

SEQ ID NO: 1609760 - DNA, 25 bp, Homo sapien
gttggccaggtaattctctaaatac

SEQ ID NO: 1609761 - DNA, 25 bp, Homo sapien
ggccaggtcttcaactgcctgtttg

SEQ ID NO: 1609762 - DNA, 25 bp, Homo sapien
tcagggacagacgaaccctagtggc

SEQ ID NO: 1609763 - DNA, 25 bp, Homo sapien
tgcctgtttgccctcggtagcctct

SEQ ID NO: 1609764 - DNA, 25 bp, Homo sapien
cctgtttgccctcggtagcctctgg

SEQ ID NO: 1609765 - DNA, 25 bp, Homo sapien
gaatgaacctcccttccgaggttca

SEQ ID NO: 1609766 - DNA, 25 bp, Homo sapien
ccactcggcccacgaggcccttggg

SEQ ID NO: 1609767 - DNA, 25 bp, Homo sapien
tacagcacgtcaacgggcagctcca

SEQ ID NO: 1609768 - DNA, 25 bp, Homo sapien
cttctggaccatgaagtaggggtac

SEQ ID NO: 1609769 - DNA, 25 bp, Homo sapien
caggagaccactcggcccacgaggc

SEQ ID NO: 1609770 - DNA, 25 bp, Homo sapien
ctggggtgcccgactgggcggcagc

SEQ ID NO: 1609771 - DNA, 25 bp, Homo sapien
tgggcggcagccatcgcggccctca

SEQ ID NO: 1609772 - DNA, 25 bp, Homo sapien
ggcggcagccatcgcggccctcagg

SEQ ID NO: 1609773 - DNA, 25 bp, Homo sapien
ctcagggtgggcacaatgtcccgca

SEQ ID NO: 1609774 - DNA, 25 bp, Homo sapien
ggaaaagggacagctgatcaacagc

SEQ ID NO: 1609775 - DNA, 25 bp, Homo sapien
cggaaaagggacagctgatcaacag

SEQ ID NO: 1609776 - DNA, 25 bp, Homo sapien
cattcttcaccgcagtcaccgtgtt

SEQ ID NO: 1609777 - DNA, 25 bp, Homo sapien
atctgagcattcttcaccgcagtca

SEQ ID NO: 1609778 - DNA, 25 bp, Homo sapien
cgcagtcaccgtgttggtgaggcca

SEQ ID NO: 1609779 - DNA, 25 bp, Homo sapien
tcaccgcagtcaccgtgttggtgag

SEQ ID NO: 1609780 - DNA, 25 bp, Homo sapien
aagacggccgtgacctcatggcgtg

SEQ ID NO: 1609781 - DNA, 25 bp, Homo sapien
tcatggcgtgtgtccaccacacgga

SEQ ID NO: 1609782 - DNA, 25 bp, Homo sapien
ggacaggcgggccatagcatcagca

SEQ ID NO: 1609783 - DNA, 25 bp, Homo sapien
caccgaccagcgtgaagatgaaccg

SEQ ID NO: 1609784 - DNA, 25 bp, Homo sapien
atagaagagccccaggcggtgagcg

SEQ ID NO: 1609785 - DNA, 25 bp, Homo sapien
agaagagccccaggcggtgagcggc

SEQ ID NO: 1609786 - DNA, 25 bp, Homo sapien
gaaggaggggaataagctcccagcg

SEQ ID NO: 1609787 - DNA, 25 bp, Homo sapien
cagctgatagaagagccccaggcgg

SEQ ID NO: 1609788 - DNA, 25 bp, Homo sapien
cttcccagacttgggcgcgacaggg

SEQ ID NO: 1609789 - DNA, 25 bp, Homo sapien
agaccacgccctttgtgcgcctagg

SEQ ID NO: 1609790 - DNA, 25 bp, Homo sapien
gacccttgccgccagtttctgtgcg

SEQ ID NO: 1609791 - DNA, 25 bp, Homo sapien
ggaacctctccggaagaaatcgcgc

SEQ ID NO: 1609792 - DNA, 25 bp, Homo sapien
cccacccaaactagccaccacaagt

SEQ ID NO: 1609793 - DNA, 25 bp, Homo sapien
gacagcaccacacagttatcttcca

SEQ ID NO: 1609794 - DNA, 25 bp, Homo sapien
agtcaaggtggcgacgacagcacca

SEQ ID NO: 1609795 - DNA, 25 bp, Homo sapien
caccacaagtcaaggtggcgacgac

SEQ ID NO: 1609796 - DNA, 25 bp, Homo sapien
cttgtcaatggacaggcggaagccc

SEQ ID NO: 1609797 - DNA, 25 bp, Homo sapien
ttacgtcaccaagaggcacgaggtc

SEQ ID NO: 1609798 - DNA, 25 bp, Homo sapien
gctgggtcgaggtcacatcgcatca

SEQ ID NO: 1609799 - DNA, 25 bp, Homo sapien
catcgcatcaggatgtggttctccc

SEQ ID NO: 1609800 - DNA, 25 bp, Homo sapien
tgacccgggagcgtggccgtgcccg

SEQ ID NO: 1609801 - DNA, 25 bp, Homo sapien
cgtgtcacgtgacccgggagcgtgg

SEQ ID NO: 1609802 - DNA, 25 bp, Homo sapien
gagcgtggccgtgcccgggtggccc

SEQ ID NO: 1609803 - DNA, 25 bp, Homo sapien
tccagcagaattcggccccctccgt

SEQ ID NO: 1609804 - DNA, 25 bp, Homo sapien
cggcgccccgtagtccggcccgatg

SEQ ID NO: 1609805 - DNA, 25 bp, Homo sapien
gctcagcggcgccccgtagtccggc

SEQ ID NO: 1609806 - DNA, 25 bp, Homo sapien
ttggctcagcggcgccccgtagtcc

SEQ ID NO: 1609807 - DNA, 25 bp, Homo sapien
gcgccccgtagtccggcccgatgcg

SEQ ID NO: 1609808 - DNA, 25 bp, Homo sapien
gttactcgcaggaaacgctgctgtt

SEQ ID NO: 1609809 - DNA, 25 bp, Homo sapien
tgtcacagagggaagcgatcatcaa

SEQ ID NO: 1609810 - DNA, 25 bp, Homo sapien
aaaggtgtctttgatgttactcgca

SEQ ID NO: 1609811 - DNA, 25 bp, Homo sapien
agtgatcccttgaagtaaccagaag

SEQ ID NO: 1609812 - DNA, 25 bp, Homo sapien
acggctccacgccagggtcctcctc

SEQ ID NO: 1609813 - DNA, 25 bp, Homo sapien
ggctccacgccagggtcctcctcag

SEQ ID NO: 1609814 - DNA, 25 bp, Homo sapien
ccccacggctccacgccagggtcct

SEQ ID NO: 1609815 - DNA, 25 bp, Homo sapien
cccacggctccacgccagggtcctc

SEQ ID NO: 1609816 - DNA, 25 bp, Homo sapien
tctcatgaccatagagtagcgcagg

SEQ ID NO: 1609817 - DNA, 25 bp, Homo sapien
aaaatgtactacgaccacggtgacg

SEQ ID NO: 1609818 - DNA, 25 bp, Homo sapien
gactccggacgcaagtagatgatgg

SEQ ID NO: 1609819 - DNA, 25 bp, Homo sapien
catagcggtcataacccatcagggt

SEQ ID NO: 1609820 - DNA, 25 bp, Homo sapien
ctgcatcccagacccaggaagaaaa

SEQ ID NO: 1609821 - DNA, 25 bp, Homo sapien
atcccagacccaggaagaaaaacat

SEQ ID NO: 1609822 - DNA, 25 bp, Homo sapien
gcatcccagacccaggaagaaaaac

SEQ ID NO: 1609823 - DNA, 25 bp, Homo sapien
catcccagacccaggaagaaaaaca

SEQ ID NO: 1609824 - DNA, 25 bp, Homo sapien
ctccatcagcagatgagccagcatg

SEQ ID NO: 1609825 - DNA, 25 bp, Homo sapien
ccagggatggagatggcctggtctc

SEQ ID NO: 1609826 - DNA, 25 bp, Homo sapien
atggagatggcctggtctccatcag

SEQ ID NO: 1609827 - DNA, 25 bp, Homo sapien
tctccatcagcagatgagccagcat

SEQ ID NO: 1609828 - DNA, 25 bp, Homo sapien
gtgaccaggtaggtaaggaagaaca

SEQ ID NO: 1609829 - DNA, 25 bp, Homo sapien
tgaccaggtaggtaaggaagaacag

SEQ ID NO: 1609830 - DNA, 25 bp, Homo sapien
ggagtgtggcgggacctatccgcat

SEQ ID NO: 1609831 - DNA, 25 bp, Homo sapien
acctatccgcatgggtgatggtgat

SEQ ID NO: 1609832 - DNA, 25 bp, Homo sapien
aattctgtcaccagacaggtcccat

SEQ ID NO: 1609833 - DNA, 25 bp, Homo sapien
caggaattctgtcaccagacaggtc

SEQ ID NO: 1609834 - DNA, 25 bp, Homo sapien
tgtcaccagacaggtcccattttcc

SEQ ID NO: 1609835 - DNA, 25 bp, Homo sapien
tctgtcaccagacaggtcccatttt

SEQ ID NO: 1609836 - DNA, 25 bp, Homo sapien
tatttgtagatctgaaccttaaggc

SEQ ID NO: 1609837 - DNA, 25 bp, Homo sapien
tctgaaccttaaggccagggatggg

SEQ ID NO: 1609838 - DNA, 25 bp, Homo sapien
tctgaattcacactcaccattgcca

SEQ ID NO: 1609839 - DNA, 25 bp, Homo sapien
ctcaccattgccaagggaggctcct

SEQ ID NO: 1609840 - DNA, 25 bp, Homo sapien
gagtaagctttaatgtccagagaaa

SEQ ID NO: 1609841 - DNA, 25 bp, Homo sapien
tatgtatacacccactccagttggt

SEQ ID NO: 1609842 - DNA, 25 bp, Homo sapien
cctgctgtacatgtggatggagtaa

SEQ ID NO: 1609843 - DNA, 25 bp, Homo sapien
taacttatccctgtaagcaactggg

SEQ ID NO: 1609844 - DNA, 25 bp, Homo sapien
ggtgacaagaacaagactctatctt

SEQ ID NO: 1609845 - DNA, 25 bp, Homo sapien
tgcttgaacccggaggcgggggatg

SEQ ID NO: 1609846 - DNA, 25 bp, Homo sapien
cttgaacccggaggcgggggatgca

SEQ ID NO: 1609847 - DNA, 25 bp, Homo sapien
gaacccggaggcgggggatgcagtg

SEQ ID NO: 1609848 - DNA, 25 bp, Homo sapien
ttaagagctccaccaactgacaact

SEQ ID NO: 1609849 - DNA, 25 bp, Homo sapien
taaatctgattgtgaccttaagagc

SEQ ID NO: 1609850 - DNA, 25 bp, Homo sapien
aactgcactgggagccgagataacc

SEQ ID NO: 1609851 - DNA, 25 bp, Homo sapien
gattggctcagcttaagtcaggtga

SEQ ID NO: 1609852 - DNA, 25 bp, Homo sapien
aaagaggaagcataagtagactggc

SEQ ID NO: 1609853 - DNA, 25 bp, Homo sapien
atgggagctcaagttagccctgggt

SEQ ID NO: 1609854 - DNA, 25 bp, Homo sapien
gggagatagaagtcccactgccacc

SEQ ID NO: 1609855 - DNA, 25 bp, Homo sapien
tcaaatgtatttaccccaagatggg

SEQ ID NO: 1609856 - DNA, 25 bp, Homo sapien
tacacagggattttgaccagaagcc

SEQ ID NO: 1609857 - DNA, 25 bp, Homo sapien
aagagaaagtaccactcaggcagct

SEQ ID NO: 1609858 - DNA, 25 bp, Homo sapien
tgggtgcgcccaagggtgcctactt

SEQ ID NO: 1609859 - DNA, 25 bp, Homo sapien
ggctatggaacatgtcccatctgga

SEQ ID NO: 1609860 - DNA, 25 bp, Homo sapien
ctgggtcgtgtactcggtacacggg

SEQ ID NO: 1609861 - DNA, 25 bp, Homo sapien
gtactcggtacacgggatcccagtc

SEQ ID NO: 1609862 - DNA, 25 bp, Homo sapien
gtcgtgtactcggtacacgggatcc

SEQ ID NO: 1609863 - DNA, 25 bp, Homo sapien
cgtgtactcggtacacgggatccca

SEQ ID NO: 1609864 - DNA, 25 bp, Homo sapien
tccagcttggccgaatgggcccaca

SEQ ID NO: 1609865 - DNA, 25 bp, Homo sapien
ctcggtcacgctgcaaggcaaggat

SEQ ID NO: 1609866 - DNA, 25 bp, Homo sapien
tcagagtgtaaggaaatgagaggcc

SEQ ID NO: 1609867 - DNA, 25 bp, Homo sapien
gccctgggctgatgacctatctcgg

SEQ ID NO: 1609868 - DNA, 25 bp, Homo sapien
ggtctgggcctgagcaagggagctg

SEQ ID NO: 1609869 - DNA, 25 bp, Homo sapien
tgggctaggcgtggattcggaccag

SEQ ID NO: 1609870 - DNA, 25 bp, Homo sapien
gggctaggcgtggattcggaccagt

SEQ ID NO: 1609871 - DNA, 25 bp, Homo sapien
gggtctgggcctgagcaagggagct

SEQ ID NO: 1609872 - DNA, 25 bp, Homo sapien
tgctcaggggattcgggggatgggg

SEQ ID NO: 1609873 - DNA, 25 bp, Homo sapien
cagtgctcaggggattcgggggatg

SEQ ID NO: 1609874 - DNA, 25 bp, Homo sapien
ccagtgctcaggggattcgggggat

SEQ ID NO: 1609875 - DNA, 25 bp, Homo sapien
agtgctcaggggattcgggggatgg

SEQ ID NO: 1609876 - DNA, 25 bp, Homo sapien
gacgggggtccctgggttgagcagc

SEQ ID NO: 1609877 - DNA, 25 bp, Homo sapien
agccgccgggtactcctcgccatgt

SEQ ID NO: 1609878 - DNA, 25 bp, Homo sapien
ctgtgtgccccagccgccgggtact

SEQ ID NO: 1609879 - DNA, 25 bp, Homo sapien
gtactcctcgccatgtcctgggact

SEQ ID NO: 1609880 - DNA, 25 bp, Homo sapien
tggcagctgcatagggcccctcaag

SEQ ID NO: 1609881 - DNA, 25 bp, Homo sapien
tgagtacacatcctccagggggctg

SEQ ID NO: 1609882 - DNA, 25 bp, Homo sapien
agtccacgggcgacagcgtgaccga

SEQ ID NO: 1609883 - DNA, 25 bp, Homo sapien
cgggcccaatcgaggggcacagcca

SEQ ID NO: 1609884 - DNA, 25 bp, Homo sapien
ggcccgggcaggccagcgtcagctt

SEQ ID NO: 1609885 - DNA, 25 bp, Homo sapien
gggggcccgggcaggccagcgtcag

SEQ ID NO: 1609886 - DNA, 25 bp, Homo sapien
ctgtcagccagggggcccgggcagg

SEQ ID NO: 1609887 - DNA, 25 bp, Homo sapien
gtcagccagggggcccgggcaggcc

SEQ ID NO: 1609888 - DNA, 25 bp, Homo sapien
cccggggggcctcctgctcttcttg

SEQ ID NO: 1609889 - DNA, 25 bp, Homo sapien
ggggggcctcctgctcttcttggac

SEQ ID NO: 1609890 - DNA, 25 bp, Homo sapien
cggggggcctcctgctcttcttgga

SEQ ID NO: 1609891 - DNA, 25 bp, Homo sapien
ctgcggccccagccccgccttcccg

SEQ ID NO: 1609892 - DNA, 25 bp, Homo sapien
cgactgtgccgctttgaggccaggg

SEQ ID NO: 1609893 - DNA, 25 bp, Homo sapien
ccgactgtgccgctttgaggccagg

SEQ ID NO: 1609894 - DNA, 25 bp, Homo sapien
cccgactgtgccgctttgaggccag

SEQ ID NO: 1609895 - DNA, 25 bp, Homo sapien
gcctgtccaggtggtcggtgatctc

SEQ ID NO: 1609896 - DNA, 25 bp, Homo sapien
ccaggtggtcggtgatctcacggtt

SEQ ID NO: 1609897 - DNA, 25 bp, Homo sapien
tgtccaggtggtcggtgatctcacg

SEQ ID NO: 1609898 - DNA, 25 bp, Homo sapien
tctcctgggctacgtcccgcggcag

SEQ ID NO: 1609899 - DNA, 25 bp, Homo sapien
ctgacacccagtggaccaagggctg

SEQ ID NO: 1609900 - DNA, 25 bp, Homo sapien
ctgtgccactgctgacacccagtgg

SEQ ID NO: 1609901 - DNA, 25 bp, Homo sapien
tggattgcaatggcactgtgccact

SEQ ID NO: 1609902 - DNA, 25 bp, Homo sapien
actgctgacacccagtggaccaagg

SEQ ID NO: 1609903 - DNA, 25 bp, Homo sapien
ttggctccatttttgagcagggcca

SEQ ID NO: 1609904 - DNA, 25 bp, Homo sapien
tgtccttattggctccatttttgag

SEQ ID NO: 1609905 - DNA, 25 bp, Homo sapien
gcttccacgttgttcacagccgcag

SEQ ID NO: 1609906 - DNA, 25 bp, Homo sapien
gccaaagtggcttccacgttgttca

SEQ ID NO: 1609907 - DNA, 25 bp, Homo sapien
gccgccaggatcagtgccgttgagc

SEQ ID NO: 1609908 - DNA, 25 bp, Homo sapien
gatcagtgccgttgagccatctgcc

SEQ ID NO: 1609909 - DNA, 25 bp, Homo sapien
accatgccctctactgccaggcggg

SEQ ID NO: 1609910 - DNA, 25 bp, Homo sapien
gcatggctggcgatgagctcttcca

SEQ ID NO: 1609911 - DNA, 25 bp, Homo sapien
ggcatccaagtctgtagagcggttt

SEQ ID NO: 1609912 - DNA, 25 bp, Homo sapien
catccaagtctgtagagcggtttcg

SEQ ID NO: 1609913 - DNA, 25 bp, Homo sapien
cgggcatccaagtctgtagagcggt

SEQ ID NO: 1609914 - DNA, 25 bp, Homo sapien
caagtctgtagagcggtttcggatg

SEQ ID NO: 1609915 - DNA, 25 bp, Homo sapien
tggctgcatcagcacgggcataacg

SEQ ID NO: 1609916 - DNA, 25 bp, Homo sapien
gatcaggtcggagatgatgctagct

SEQ ID NO: 1609917 - DNA, 25 bp, Homo sapien
aagcagtctcgccagtacggtcagt

SEQ ID NO: 1609918 - DNA, 25 bp, Homo sapien
tggtcctgggcattggtgtctgccc

SEQ ID NO: 1609919 - DNA, 25 bp, Homo sapien
atcagcatctgcgtcgccctgtggt

SEQ ID NO: 1609920 - DNA, 25 bp, Homo sapien
cactgacggcaatccacagcctcct

SEQ ID NO: 1609921 - DNA, 25 bp, Homo sapien
tctgcgtcgccctgtggtggtgtca

SEQ ID NO: 1609922 - DNA, 25 bp, Homo sapien
tggtgccacgcggatgtcagcagca

SEQ ID NO: 1609923 - DNA, 25 bp, Homo sapien
ctttagccgcttggcctctgggcac

SEQ ID NO: 1609924 - DNA, 25 bp, Homo sapien
gtgagggggacactagaggtgtcca

SEQ ID NO: 1609925 - DNA, 25 bp, Homo sapien
tgagggggacactagaggtgtccag

SEQ ID NO: 1609926 - DNA, 25 bp, Homo sapien
tgtgagggggacactagaggtgtcc

SEQ ID NO: 1609927 - DNA, 25 bp, Homo sapien
catgacacccaggacgagaatgacc

SEQ ID NO: 1609928 - DNA, 25 bp, Homo sapien
cagcgggacgctgggttctggaggc

SEQ ID NO: 1609929 - DNA, 25 bp, Homo sapien
accagagggtgctgtgctcgcgctt

SEQ ID NO: 1609930 - DNA, 25 bp, Homo sapien
cagaggccacgtccttgtgcagtga

SEQ ID NO: 1609931 - DNA, 25 bp, Homo sapien
ggtacgggaagtccaggcgctccac

SEQ ID NO: 1609932 - DNA, 25 bp, Homo sapien
gaagcagtgatcattctcaggcgac

SEQ ID NO: 1609933 - DNA, 25 bp, Homo sapien
tcccaggtagtcagcggcgctctgg

SEQ ID NO: 1609934 - DNA, 25 bp, Homo sapien
gtcaatctccagcattactaccgag

SEQ ID NO: 1609935 - DNA, 25 bp, Homo sapien
ggagccaggactaggccggtggtaa

SEQ ID NO: 1609936 - DNA, 25 bp, Homo sapien
taagggaagaccatggcctggccgt

SEQ ID NO: 1609937 - DNA, 25 bp, Homo sapien
tcggcaaagtggtcggcgcagtact

SEQ ID NO: 1609938 - DNA, 25 bp, Homo sapien
agaaagtcggcgctggaacgcagta

SEQ ID NO: 1609939 - DNA, 25 bp, Homo sapien
ttgcaagtgcgctcgcggccaccgg

SEQ ID NO: 1609940 - DNA, 25 bp, Homo sapien
gcagtcgaagttgtcgtagaggcag

SEQ ID NO: 1609941 - DNA, 25 bp, Homo sapien
tgttgcactcgcggtcgcagcgctg

SEQ ID NO: 1609942 - DNA, 25 bp, Homo sapien
gggtcgcagcggctgttgttgaaga

SEQ ID NO: 1609943 - DNA, 25 bp, Homo sapien
cgcgggcaccgcggctcctccgaga

SEQ ID NO: 1609944 - DNA, 25 bp, Homo sapien
gcgggcaccgcggctcctccgagac

SEQ ID NO: 1609945 - DNA, 25 bp, Homo sapien
cggcgcgcgggcaccgcggctcctc

SEQ ID NO: 1609946 - DNA, 25 bp, Homo sapien
cgcgcgggcaccgcggctcctccga

SEQ ID NO: 1609947 - DNA, 25 bp, Homo sapien
cggtccagccctgcgcgcaagcgca

SEQ ID NO: 1609948 - DNA, 25 bp, Homo sapien
gcaagcgcagcggaagaagggcgcg

SEQ ID NO: 1609949 - DNA, 25 bp, Homo sapien
cagcgcggcccggtccagccctgcg

SEQ ID NO: 1609950 - DNA, 25 bp, Homo sapien
cccgtggagacagggggcggccgcg

SEQ ID NO: 1609951 - DNA, 25 bp, Homo sapien
cggcaggagggtcccgacaaccctg

SEQ ID NO: 1609952 - DNA, 25 bp, Homo sapien
tgcggcaggagggtcccgacaaccc

SEQ ID NO: 1609953 - DNA, 25 bp, Homo sapien
gctcgcaacgcggaccccagaacgg

SEQ ID NO: 1609954 - DNA, 25 bp, Homo sapien
gcgccacccgctcgcaacgcggacc

SEQ ID NO: 1609955 - DNA, 25 bp, Homo sapien
acccgctcgcaacgcggaccccaga

SEQ ID NO: 1609956 - DNA, 25 bp, Homo sapien
gagcgcgccacccgctcgcaacgcg

SEQ ID NO: 1609957 - DNA, 25 bp, Homo sapien
aggacccgggctaggacggcactgg

SEQ ID NO: 1609958 - DNA, 25 bp, Homo sapien
ccaggacccgggctaggacggcact

SEQ ID NO: 1609959 - DNA, 25 bp, Homo sapien
caggacccgggctaggacggcactg

SEQ ID NO: 1609960 - DNA, 25 bp, Homo sapien
tgcctcgcagcgcaaaccagtgtat

SEQ ID NO: 1609961 - DNA, 25 bp, Homo sapien
gcatgacaaaggcaacggaaacctc

SEQ ID NO: 1609962 - DNA, 25 bp, Homo sapien
gcaggcacctgagcgacactcattg

SEQ ID NO: 1609963 - DNA, 25 bp, Homo sapien
tgggccgcagtcatcctcattaatc

SEQ ID NO: 1609964 - DNA, 25 bp, Homo sapien
gggacaggagcagagatagcgggcc

SEQ ID NO: 1609965 - DNA, 25 bp, Homo sapien
agatagcgggccacgaggtcaatgc

SEQ ID NO: 1609966 - DNA, 25 bp, Homo sapien
gccacgaggtcaatgcatgaacccc

SEQ ID NO: 1609967 - DNA, 25 bp, Homo sapien
cacgtcgtcctcacagttatcacca

SEQ ID NO: 1609968 - DNA, 25 bp, Homo sapien
atgaagacgcaaagaaccccagcac

SEQ ID NO: 1609969 - DNA, 25 bp, Homo sapien
ccactcagcttagtgggacacagac

SEQ ID NO: 1609970 - DNA, 25 bp, Homo sapien
gacccacctggacatacccatgaag

SEQ ID NO: 1609971 - DNA, 25 bp, Homo sapien
agatgttcagcgcactaccagtagg

SEQ ID NO: 1609972 - DNA, 25 bp, Homo sapien
tgctcacagtggctaccagtacggc

SEQ ID NO: 1609973 - DNA, 25 bp, Homo sapien
gtggctaccagtacggccctctggg

SEQ ID NO: 1609974 - DNA, 25 bp, Homo sapien
gcacacgcagtagtgggagctgtct

SEQ ID NO: 1609975 - DNA, 25 bp, Homo sapien
ccccatatagccacggcaggtcccc

SEQ ID NO: 1609976 - DNA, 25 bp, Homo sapien
agcgacccccgttttgacaaggctg

SEQ ID NO: 1609977 - DNA, 25 bp, Homo sapien
tcggatgtcacagaggcgtccgctc

SEQ ID NO: 1609978 - DNA, 25 bp, Homo sapien
gacaaaggcaataggccccagtctg

SEQ ID NO: 1609979 - DNA, 25 bp, Homo sapien
aaggctggcggctgcaccaatccac

SEQ ID NO: 1609980 - DNA, 25 bp, Homo sapien
actgcgggcccgtgaagctctcgag

SEQ ID NO: 1609981 - DNA, 25 bp, Homo sapien
acaggtcccgccattgaagcaggag

SEQ ID NO: 1609982 - DNA, 25 bp, Homo sapien
cacaggcagctgaacgagttcacgc

SEQ ID NO: 1609983 - DNA, 25 bp, Homo sapien
agctctcgaggcaggtgcagcggaa

SEQ ID NO: 1609984 - DNA, 25 bp, Homo sapien
cacgagccaccgttcaggcatgggt

SEQ ID NO: 1609985 - DNA, 25 bp, Homo sapien
cctgttcgcagtggaagcctccgta

SEQ ID NO: 1609986 - DNA, 25 bp, Homo sapien
cagtcgggcaggtcctgttcgcagt

SEQ ID NO: 1609987 - DNA, 25 bp, Homo sapien
aaggaggccacgtggtcggtacagg

SEQ ID NO: 1609988 - DNA, 25 bp, Homo sapien
aggcggtctggtcacctaccttgcc

SEQ ID NO: 1609989 - DNA, 25 bp, Homo sapien
aaggcggtctggtcacctaccttgc

SEQ ID NO: 1609990 - DNA, 25 bp, Homo sapien
gtctggtcacctaccttgcccccat

SEQ ID NO: 1609991 - DNA, 25 bp, Homo sapien
tggtcacctaccttgcccccattag

SEQ ID NO: 1609992 - DNA, 25 bp, Homo sapien
acagtcattgatgtcctgatcgcag

SEQ ID NO: 1609993 - DNA, 25 bp, Homo sapien
caggaagggccagtgtaccctccat

SEQ ID NO: 1609994 - DNA, 25 bp, Homo sapien
tgatgtcctgatcgcaggaagggcc

SEQ ID NO: 1609995 - DNA, 25 bp, Homo sapien
tggtgcagataccatgagggccaca

SEQ ID NO: 1609996 - DNA, 25 bp, Homo sapien
gcagggggagaggagttcacactga

SEQ ID NO: 1609997 - DNA, 25 bp, Homo sapien
agactcgcagcggcccccatgctca

SEQ ID NO: 1609998 - DNA, 25 bp, Homo sapien
tggccaggggcagactcgcagcggc

SEQ ID NO: 1609999 - DNA, 25 bp, Homo sapien
gctcacaggggttcggggtgcaggg

SEQ ID NO: 1610000 - DNA, 25 bp, Homo sapien
attccatcgctgctgcatgtcccac

SEQ ID NO: 1610001 - DNA, 25 bp, Homo sapien
ggaaacccattccatcgctgctgca

SEQ ID NO: 1610002 - DNA, 25 bp, Homo sapien
agtggaaacccattccatcgctgct

SEQ ID NO: 1610003 - DNA, 25 bp, Homo sapien
cattccatcgctgctgcatgtccca

SEQ ID NO: 1610004 - DNA, 25 bp, Homo sapien
gccaggctcacacacacagcggaac

SEQ ID NO: 1610005 - DNA, 25 bp, Homo sapien
cgtctcgggccaggctctggctgca

SEQ ID NO: 1610006 - DNA, 25 bp, Homo sapien
agccaggctcacacacacagcggaa

SEQ ID NO: 1610007 - DNA, 25 bp, Homo sapien
aggcgtctcgggccaggctctggct

SEQ ID NO: 1610008 - DNA, 25 bp, Homo sapien
catcatagcagatgccgtgactgca

SEQ ID NO: 1610009 - DNA, 25 bp, Homo sapien
tagcagatgccgtgactgcagggct

SEQ ID NO: 1610010 - DNA, 25 bp, Homo sapien
gcacactcattgatctccacgttac

SEQ ID NO: 1610011 - DNA, 25 bp, Homo sapien
ctccctcgccgcatgggctggaagc

SEQ ID NO: 1610012 - DNA, 25 bp, Homo sapien
ctggggagtacacaagcaatctcat

SEQ ID NO: 1610013 - DNA, 25 bp, Homo sapien
ctaaggaccccctctcatggcagcc

SEQ ID NO: 1610014 - DNA, 25 bp, Homo sapien
cctctcatggcagccacttgcccac

SEQ ID NO: 1610015 - DNA, 25 bp, Homo sapien
ccccctctcatggcagccacttgcc

SEQ ID NO: 1610016 - DNA, 25 bp, Homo sapien
taaggaccccctctcatggcagcca

SEQ ID NO: 1610017 - DNA, 25 bp, Homo sapien
caggttggcagacacagtcgtagcg

SEQ ID NO: 1610018 - DNA, 25 bp, Homo sapien
ttgatgccatcacggcagactccaa

SEQ ID NO: 1610019 - DNA, 25 bp, Homo sapien
cggttgatgccatcacggcagactc

SEQ ID NO: 1610020 - DNA, 25 bp, Homo sapien
agccaggttggcagacacagtcgta

SEQ ID NO: 1610021 - DNA, 25 bp, Homo sapien
ctgtggtcccagaagggcagcggca

SEQ ID NO: 1610022 - DNA, 25 bp, Homo sapien
ctggctgcggcattcgtccacctgg

SEQ ID NO: 1610023 - DNA, 25 bp, Homo sapien
gtctaggcatttgccgccatggcgg

SEQ ID NO: 1610024 - DNA, 25 bp, Homo sapien
cttgtccaccaggtctaggcatttg

SEQ ID NO: 1610025 - DNA, 25 bp, Homo sapien
tccacgcagcgaccatggtggcatg

SEQ ID NO: 1610026 - DNA, 25 bp, Homo sapien
ctcgcagcgtgtgcccgtgtagcca

SEQ ID NO: 1610027 - DNA, 25 bp, Homo sapien
agtcgtccacgttgcgatcacacag

SEQ ID NO: 1610028 - DNA, 25 bp, Homo sapien
cacaggcacatgagaagctggcgat

SEQ ID NO: 1610029 - DNA, 25 bp, Homo sapien
ggcgtgctggcgcattcgtccacgt

SEQ ID NO: 1610030 - DNA, 25 bp, Homo sapien
cagctgacacgtggagccgctgaag

SEQ ID NO: 1610031 - DNA, 25 bp, Homo sapien
cactcgtagccatcgggctggtcca

SEQ ID NO: 1610032 - DNA, 25 bp, Homo sapien
gctggtccacgcatttggcgccatt

SEQ ID NO: 1610033 - DNA, 25 bp, Homo sapien
actcgtcaatgtccacctcgcaata

SEQ ID NO: 1610034 - DNA, 25 bp, Homo sapien
ttgcagaccccaccgttgacacagg

SEQ ID NO: 1610035 - DNA, 25 bp, Homo sapien
tcaatgtccacctcgcaataggttc

SEQ ID NO: 1610036 - DNA, 25 bp, Homo sapien
cagctgaagccattgactcggtcct

SEQ ID NO: 1610037 - DNA, 25 bp, Homo sapien
tacaggtgaactggcctatgcggtc

SEQ ID NO: 1610038 - DNA, 25 bp, Homo sapien
cgttgacatcggtctcacagcgagg

SEQ ID NO: 1610039 - DNA, 25 bp, Homo sapien
aggaaggagccctgcgtgttcacgc

SEQ ID NO: 1610040 - DNA, 25 bp, Homo sapien
tccagtgtagccacgaccgcactgg

SEQ ID NO: 1610041 - DNA, 25 bp, Homo sapien
cacagatagcatcctcgtggcaggg

SEQ ID NO: 1610042 - DNA, 25 bp, Homo sapien
ggttgctgacacaggcgtcatccag

SEQ ID NO: 1610043 - DNA, 25 bp, Homo sapien
tcaccggatttgtgtcacagatagc

SEQ ID NO: 1610044 - DNA, 25 bp, Homo sapien
atggcccggccgttcaccggatttg

SEQ ID NO: 1610045 - DNA, 25 bp, Homo sapien
cagtagaaagaagccacgcggtcat

SEQ ID NO: 1610046 - DNA, 25 bp, Homo sapien
tgtggcacagtcatcgatattctga

SEQ ID NO: 1610047 - DNA, 25 bp, Homo sapien
cacccagcgtgttgaagcaggtacc

SEQ ID NO: 1610048 - DNA, 25 bp, Homo sapien
gccattgacacacacgcagctgtgg

SEQ ID NO: 1610049 - DNA, 25 bp, Homo sapien
ccacctggcgcatgtccacccgagg

SEQ ID NO: 1610050 - DNA, 25 bp, Homo sapien
cgctccctctggccgcagtgcccac

SEQ ID NO: 1610051 - DNA, 25 bp, Homo sapien
gtccagccacctggcgcatgtccac

SEQ ID NO: 1610052 - DNA, 25 bp, Homo sapien
gcacacagatgcagcagtccagcca

SEQ ID NO: 1610053 - DNA, 25 bp, Homo sapien
gacagtcgtccacgttcacttcaca

SEQ ID NO: 1610054 - DNA, 25 bp, Homo sapien
cactggcagttataggtgttgacgc

SEQ ID NO: 1610055 - DNA, 25 bp, Homo sapien
cccattgagacatcggtgtcctgga

SEQ ID NO: 1610056 - DNA, 25 bp, Homo sapien
ggtgttgacgccatccacgcatgtc

SEQ ID NO: 1610057 - DNA, 25 bp, Homo sapien
cacatagtggccctgtgtagccagc

SEQ ID NO: 1610058 - DNA, 25 bp, Homo sapien
cagtcgtaagtgaggtcgccactct

SEQ ID NO: 1610059 - DNA, 25 bp, Homo sapien
cgttacggcatggtgagggtgcaca

SEQ ID NO: 1610060 - DNA, 25 bp, Homo sapien
gcaggtgcccccgttacggcatggt

SEQ ID NO: 1610061 - DNA, 25 bp, Homo sapien
caccatggcggcagggctcacccac

SEQ ID NO: 1610062 - DNA, 25 bp, Homo sapien
caggtgtgttgaggcaggtgccacc

SEQ ID NO: 1610063 - DNA, 25 bp, Homo sapien
aggtgccaccatggcggcagggctc

SEQ ID NO: 1610064 - DNA, 25 bp, Homo sapien
cagcggaaggagccaggtgtgttga

SEQ ID NO: 1610065 - DNA, 25 bp, Homo sapien
ggaagcgtccatcgggccccactga

SEQ ID NO: 1610066 - DNA, 25 bp, Homo sapien
actcatccacgtcgcttcggcagct

SEQ ID NO: 1610067 - DNA, 25 bp, Homo sapien
gagcagaggaagcgtccatcgggcc

SEQ ID NO: 1610068 - DNA, 25 bp, Homo sapien
gcagctgcggccctggtagccaggt

SEQ ID NO: 1610069 - DNA, 25 bp, Homo sapien
gggcaccggcatgagaatcgggcgg

SEQ ID NO: 1610070 - DNA, 25 bp, Homo sapien
tgaactctggcagacaccacggcca

SEQ ID NO: 1610071 - DNA, 25 bp, Homo sapien
gagaatcgggcggtgccagccacca

SEQ ID NO: 1610072 - DNA, 25 bp, Homo sapien
gggcctgagtgacaggggtcctcca

SEQ ID NO: 1610073 - DNA, 25 bp, Homo sapien
ggagaacatatacgaataacaaatt

SEQ ID NO: 1610074 - DNA, 25 bp, Homo sapien
gccaggtccaggcaaggagaacata

SEQ ID NO: 1610075 - DNA, 25 bp, Homo sapien
gggtccctatccctctggatccttg

SEQ ID NO: 1610076 - DNA, 25 bp, Homo sapien
ctactacgttctgagcaatacaaat

SEQ ID NO: 1610077 - DNA, 25 bp, Homo sapien
ctgtcggcagtattccaggcgcgga

SEQ ID NO: 1610078 - DNA, 25 bp, Homo sapien
caggtaaggtcacacttttccccat

SEQ ID NO: 1610079 - DNA, 25 bp, Homo sapien
tcgccctcccaggtgtgtggctcca

SEQ ID NO: 1610080 - DNA, 25 bp, Homo sapien
attccaggcgcggagctccactgcg

SEQ ID NO: 1610081 - DNA, 25 bp, Homo sapien
ttgcacacgggcttccgtccaggca

SEQ ID NO: 1610082 - DNA, 25 bp, Homo sapien
gggcagctgggtgcaacgacctcca

SEQ ID NO: 1610083 - DNA, 25 bp, Homo sapien
acacgggcttccgtccaggcaaggg

SEQ ID NO: 1610084 - DNA, 25 bp, Homo sapien
aacgacctccatttgcacacgggct

SEQ ID NO: 1610085 - DNA, 25 bp, Homo sapien
gcagcgcccgcacgggtggcggtgg

SEQ ID NO: 1610086 - DNA, 25 bp, Homo sapien
ggcagcgcccgcacgggtggcggtg

SEQ ID NO: 1610087 - DNA, 25 bp, Homo sapien
gggcagcgcccgcacgggtggcggt

SEQ ID NO: 1610088 - DNA, 25 bp, Homo sapien
ctccttccctgggctccgggcgcgt

SEQ ID NO: 1610089 - DNA, 25 bp, Homo sapien
ggctccgggcgcgtcccgggccagc

SEQ ID NO: 1610090 - DNA, 25 bp, Homo sapien
gcgtcccgggccagcctccgcgccg

SEQ ID NO: 1610091 - DNA, 25 bp, Homo sapien
tccttccctgggctccgggcgcgtc

SEQ ID NO: 1610092 - DNA, 25 bp, Homo sapien
gagtctgtgactgctgatacagcac

SEQ ID NO: 1610093 - DNA, 25 bp, Homo sapien
tgtgactgctgatacagcacaccct

SEQ ID NO: 1610094 - DNA, 25 bp, Homo sapien
tctgtgactgctgatacagcacacc

SEQ ID NO: 1610095 - DNA, 25 bp, Homo sapien
gactgctgatacagcacaccctgat

SEQ ID NO: 1610096 - DNA, 25 bp, Homo sapien
tctgtgcagctatggcagagaagcg

SEQ ID NO: 1610097 - DNA, 25 bp, Homo sapien
gctccactggaagagaggtataccc

SEQ ID NO: 1610098 - DNA, 25 bp, Homo sapien
cataggtgcgcttgtgtgggatcca

SEQ ID NO: 1610099 - DNA, 25 bp, Homo sapien
tatgagcgattcaagagttcaccca

SEQ ID NO: 1610100 - DNA, 25 bp, Homo sapien
cagcaggtcttgcaagaaggcccac

SEQ ID NO: 1610101 - DNA, 25 bp, Homo sapien
tccagcaggtcttgcaagaaggccc

SEQ ID NO: 1610102 - DNA, 25 bp, Homo sapien
tagtccagcaggtcttgcaagaagg

SEQ ID NO: 1610103 - DNA, 25 bp, Homo sapien
ctagtccagcaggtcttgcaagaag

SEQ ID NO: 1610104 - DNA, 25 bp, Homo sapien
tgtgggatccaatgccctatgcctg

SEQ ID NO: 1610105 - DNA, 25 bp, Homo sapien
ccctatgcctggcaggatgtgggcc

SEQ ID NO: 1610106 - DNA, 25 bp, Homo sapien
aaagcggctgccgatggcttccacc

SEQ ID NO: 1610107 - DNA, 25 bp, Homo sapien
cagctccaagtaagtgtccttctcc

SEQ ID NO: 1610108 - DNA, 25 bp, Homo sapien
ctgaagaggtttcggtagtagttga

SEQ ID NO: 1610109 - DNA, 25 bp, Homo sapien
gttataaaggaaggcctcgagctcg

SEQ ID NO: 1610110 - DNA, 25 bp, Homo sapien
cttgcggtgggtgagggtggtcttc

SEQ ID NO: 1610111 - DNA, 25 bp, Homo sapien
ctcgagctcgctgggggtcaagcat

SEQ ID NO: 1610112 - DNA, 25 bp, Homo sapien
acaggaacatgtagtgggaacggaa

SEQ ID NO: 1610113 - DNA, 25 bp, Homo sapien
aacatgtagtgggaacggaagaact

SEQ ID NO: 1610114 - DNA, 25 bp, Homo sapien
acatgtagtgggaacggaagaactg

SEQ ID NO: 1610115 - DNA, 25 bp, Homo sapien
ctggaacaggaacatgtagtgggaa

SEQ ID NO: 1610116 - DNA, 25 bp, Homo sapien
gacatgggggcaccactgaccacaa

SEQ ID NO: 1610117 - DNA, 25 bp, Homo sapien
catccgctcgaccagggatgggtag

SEQ ID NO: 1610118 - DNA, 25 bp, Homo sapien
aggagggcaccccagtcatgggcca

SEQ ID NO: 1610119 - DNA, 25 bp, Homo sapien
gatgggtagtagatggagaaatgcc

SEQ ID NO: 1610120 - DNA, 25 bp, Homo sapien
ggcctaggatgacatctttgatgtc

SEQ ID NO: 1610121 - DNA, 25 bp, Homo sapien
caggcctaggatgacatctttgatg

SEQ ID NO: 1610122 - DNA, 25 bp, Homo sapien
ctaggatgacatctttgatgtccac

SEQ ID NO: 1610123 - DNA, 25 bp, Homo sapien
ccaggcctaggatgacatctttgat

SEQ ID NO: 1610124 - DNA, 25 bp, Homo sapien
cagccacaacatggaagcggctctg

SEQ ID NO: 1610125 - DNA, 25 bp, Homo sapien
gggccatagcctcgcaagtccacag

SEQ ID NO: 1610126 - DNA, 25 bp, Homo sapien
cagcaggtcgattgtgtagcagtcc

SEQ ID NO: 1610127 - DNA, 25 bp, Homo sapien
ccacatcccgaggtgcatccgaggg

SEQ ID NO: 1610128 - DNA, 25 bp, Homo sapien
tcagggccctcaggttgcacctgca

SEQ ID NO: 1610129 - DNA, 25 bp, Homo sapien
gctgagtcagggccctcaggttgca

SEQ ID NO: 1610130 - DNA, 25 bp, Homo sapien
gagtcagggccctcaggttgcacct

SEQ ID NO: 1610131 - DNA, 25 bp, Homo sapien
gaggctgagtcagggccctcaggtt

SEQ ID NO: 1610132 - DNA, 25 bp, Homo sapien
gaagccgtgcagaaacagcatgagg

SEQ ID NO: 1610133 - DNA, 25 bp, Homo sapien
gttctcagggaagccgtgcagaaac

SEQ ID NO: 1610134 - DNA, 25 bp, Homo sapien
ggtccgttacctcgtccagccgaga

SEQ ID NO: 1610135 - DNA, 25 bp, Homo sapien
cagccgagacatagtgcagacgcag

SEQ ID NO: 1610136 - DNA, 25 bp, Homo sapien
gtgagcgctatgcagccgtagaccg

SEQ ID NO: 1610137 - DNA, 25 bp, Homo sapien
agcttcagcgacaggcgcgacggcg

SEQ ID NO: 1610138 - DNA, 25 bp, Homo sapien
aggttcaggaaaccgtgctcaccca

SEQ ID NO: 1610139 - DNA, 25 bp, Homo sapien
cggcacagcacgtgcgtgagcgcta

SEQ ID NO: 1610140 - DNA, 25 bp, Homo sapien
cccctccgtgccgtcgggatttgtg

SEQ ID NO: 1610141 - DNA, 25 bp, Homo sapien
ggcgaagcggtgtcagggctcaggg

SEQ ID NO: 1610142 - DNA, 25 bp, Homo sapien
tgcagcagcggcgaagcggtgtcag

SEQ ID NO: 1610143 - DNA, 25 bp, Homo sapien
ccctccgtgccgtcgggatttgtgg

SEQ ID NO: 1610144 - DNA, 25 bp, Homo sapien
gaaaacagccagagcgcaccactca

SEQ ID NO: 1610145 - DNA, 25 bp, Homo sapien
aaaacagccagagcgcaccactcac

SEQ ID NO: 1610146 - DNA, 25 bp, Homo sapien
tagagagacacccatcagggaggtg

SEQ ID NO: 1610147 - DNA, 25 bp, Homo sapien
caagcgatccgtgcatacagtacag

SEQ ID NO: 1610148 - DNA, 25 bp, Homo sapien
cctgagtgggcatggacatcgaaga

SEQ ID NO: 1610149 - DNA, 25 bp, Homo sapien
gacataattattggccaagcgatcc

SEQ ID NO: 1610150 - DNA, 25 bp, Homo sapien
atcttaggggctcttcttgggcgtc

SEQ ID NO: 1610151 - DNA, 25 bp, Homo sapien
tgggcgtcacccgtgccttgtggct

SEQ ID NO: 1610152 - DNA, 25 bp, Homo sapien
cttaggggctcttcttgggcgtcac

SEQ ID NO: 1610153 - DNA, 25 bp, Homo sapien
ttcttgggcgtcacccgtgccttgt

SEQ ID NO: 1610154 - DNA, 25 bp, Homo sapien
gtccacaaggatgggtaccgggctc

SEQ ID NO: 1610155 - DNA, 25 bp, Homo sapien
taatccctggcagtagttcctgtac

SEQ ID NO: 1610156 - DNA, 25 bp, Homo sapien
gagtatctggttaaccctgagctta

SEQ ID NO: 1610157 - DNA, 25 bp, Homo sapien
gctctgcgtcacagcttcagcttgg

SEQ ID NO: 1610158 - DNA, 25 bp, Homo sapien
gagagatgtgtttattccatgatca

SEQ ID NO: 1610159 - DNA, 25 bp, Homo sapien
agatgtgtttattccatgatcagta

SEQ ID NO: 1610160 - DNA, 25 bp, Homo sapien
aaagagagatgtgtttattccatga

SEQ ID NO: 1610161 - DNA, 25 bp, Homo sapien
gagatgtgtttattccatgatcagt

SEQ ID NO: 1610162 - DNA, 25 bp, Homo sapien
gtcaaaccagtcagtgactccagag

SEQ ID NO: 1610163 - DNA, 25 bp, Homo sapien
caccagtttggtggagtcaccaaca

SEQ ID NO: 1610164 - DNA, 25 bp, Homo sapien
gagtgggttctcatggcacgcgtaa

SEQ ID NO: 1610165 - DNA, 25 bp, Homo sapien
aacactgaggcaccagcgtcgtggt

SEQ ID NO: 1610166 - DNA, 25 bp, Homo sapien
gatcacaccatttcggagataagca

SEQ ID NO: 1610167 - DNA, 25 bp, Homo sapien
gcagccgctgctcaatgaggagacg

SEQ ID NO: 1610168 - DNA, 25 bp, Homo sapien
ttcggagataagcagtgccattgtg

SEQ ID NO: 1610169 - DNA, 25 bp, Homo sapien
gctcaatgaggagacgatcacacca

SEQ ID NO: 1610170 - DNA, 25 bp, Homo sapien
acagaaacacaggtgggaaggaact

SEQ ID NO: 1610171 - DNA, 25 bp, Homo sapien
gaaacagaaacacaggtgggaagga

SEQ ID NO: 1610172 - DNA, 25 bp, Homo sapien
gaaacacaggtgggaaggaactgac

SEQ ID NO: 1610173 - DNA, 25 bp, Homo sapien
acgaaacagaaacacaggtgggaag

SEQ ID NO: 1610174 - DNA, 25 bp, Homo sapien
gctccggatgccatggacacacaca

SEQ ID NO: 1610175 - DNA, 25 bp, Homo sapien
ggcactattcccttttgcacaagca

SEQ ID NO: 1610176 - DNA, 25 bp, Homo sapien
caaggcaaagtcagtgccagcgagg

SEQ ID NO: 1610177 - DNA, 25 bp, Homo sapien
gcaaacacttacagagagcggctct

SEQ ID NO: 1610178 - DNA, 25 bp, Homo sapien
tcacgttcttggggacagaaaacca

SEQ ID NO: 1610179 - DNA, 25 bp, Homo sapien
cacgttcttggggacagaaaaccag

SEQ ID NO: 1610180 - DNA, 25 bp, Homo sapien
acatttggcggagagaagggcctct

SEQ ID NO: 1610181 - DNA, 25 bp, Homo sapien
gcggcagcaacgatgtcctgtgtat

SEQ ID NO: 1610182 - DNA, 25 bp, Homo sapien
ggtccagccggcacttgctcgtaac

SEQ ID NO: 1610183 - DNA, 25 bp, Homo sapien
ttgctcgtaacaaggcgtgtgctga

SEQ ID NO: 1610184 - DNA, 25 bp, Homo sapien
gacaggctctgcaatcctcagctgc

SEQ ID NO: 1610185 - DNA, 25 bp, Homo sapien
acgtctgtccgactggccgtaaggc

SEQ ID NO: 1610186 - DNA, 25 bp, Homo sapien
tggccgtaaggcagacaggctctgc

SEQ ID NO: 1610187 - DNA, 25 bp, Homo sapien
ggtgggtggcgggacgtctgtccga

SEQ ID NO: 1610188 - DNA, 25 bp, Homo sapien
tatggaaagtcaatgttttgccaga

SEQ ID NO: 1610189 - DNA, 25 bp, Homo sapien
ctgccccgggcatagcatgcaggag

SEQ ID NO: 1610190 - DNA, 25 bp, Homo sapien
caccgcccctaacactatggaaagt

SEQ ID NO: 1610191 - DNA, 25 bp, Homo sapien
aaagtcagaagccacctaggtgcgc

SEQ ID NO: 1610192 - DNA, 25 bp, Homo sapien
ttttcttcaaatattgacaatagat

SEQ ID NO: 1610193 - DNA, 25 bp, Homo sapien
tcttcaaatattgacaatagatcac

SEQ ID NO: 1610194 - DNA, 25 bp, Homo sapien
gattttcttcaaatattgacaatag

SEQ ID NO: 1610195 - DNA, 25 bp, Homo sapien
agattttcttcaaatattgacaata

SEQ ID NO: 1610196 - DNA, 25 bp, Homo sapien
aaattcatgtcaatggtagctgcca

SEQ ID NO: 1610197 - DNA, 25 bp, Homo sapien
aattcatgtcaatggtagctgccat

SEQ ID NO: 1610198 - DNA, 25 bp, Homo sapien
gaaattcatgtcaatggtagctgcc

SEQ ID NO: 1610199 - DNA, 25 bp, Homo sapien
tggaaattcatgtcaatggtagctg

SEQ ID NO: 1610200 - DNA, 25 bp, Homo sapien
ccgcttccgggccaactccctctgc

SEQ ID NO: 1610201 - DNA, 25 bp, Homo sapien
cccgcttccgggccaactccctctg

SEQ ID NO: 1610202 - DNA, 25 bp, Homo sapien
tggcgccgacgtgcctcctcatggg

SEQ ID NO: 1610203 - DNA, 25 bp, Homo sapien
cagcgcatcctcgtcctctcggctc

SEQ ID NO: 1610204 - DNA, 25 bp, Homo sapien
gctccagcgcatcctcgtcctctcg

SEQ ID NO: 1610205 - DNA, 25 bp, Homo sapien
tcctcatgggcccgccgggcctgct

SEQ ID NO: 1610206 - DNA, 25 bp, Homo sapien
gtggtcggatgcttctgcactaggc

SEQ ID NO: 1610207 - DNA, 25 bp, Homo sapien
agcggcgcggcggaactgctcgaag

SEQ ID NO: 1610208 - DNA, 25 bp, Homo sapien
aagctgtcgctggatgacttggctg

SEQ ID NO: 1610209 - DNA, 25 bp, Homo sapien
gcttctgcactaggctggcccagga

SEQ ID NO: 1610210 - DNA, 25 bp, Homo sapien
aggcctcccgacatccacaggcttc

SEQ ID NO: 1610211 - DNA, 25 bp, Homo sapien
ctttttgggcgcaactggagtcttc

SEQ ID NO: 1610212 - DNA, 25 bp, Homo sapien
aactggagtcttcggctcctgtttc

SEQ ID NO: 1610213 - DNA, 25 bp, Homo sapien
cctggtggcggtgcgttctgctctg

SEQ ID NO: 1610214 - DNA, 25 bp, Homo sapien
tgaagggctcgctgcggatgatggg

SEQ ID NO: 1610215 - DNA, 25 bp, Homo sapien
gggctgaagggctcgctgcggatga

SEQ ID NO: 1610216 - DNA, 25 bp, Homo sapien
ggatgatgggtgagtggatcttctc

SEQ ID NO: 1610217 - DNA, 25 bp, Homo sapien
tcgctgcggatgatgggtgagtgga

SEQ ID NO: 1610218 - DNA, 25 bp, Homo sapien
atggcacaggcacagcggccggtga

SEQ ID NO: 1610219 - DNA, 25 bp, Homo sapien
ccctagcccacaggactatggccca

SEQ ID NO: 1610220 - DNA, 25 bp, Homo sapien
ccggccctagcccacaggactatgg

SEQ ID NO: 1610221 - DNA, 25 bp, Homo sapien
ggatggcacaggcacagcggccggt

SEQ ID NO: 1610222 - DNA, 25 bp, Homo sapien
gaatgtatcataagcggggaggggg

SEQ ID NO: 1610223 - DNA, 25 bp, Homo sapien
actgtgacatctggggggaatgtat

SEQ ID NO: 1610224 - DNA, 25 bp, Homo sapien
ttcttaggctggacgttttgctggg

SEQ ID NO: 1610225 - DNA, 25 bp, Homo sapien
gtggagactggtgggtcaggctctg

SEQ ID NO: 1610226 - DNA, 25 bp, Homo sapien
gggcataactcagtgtgcagcagag

SEQ ID NO: 1610227 - DNA, 25 bp, Homo sapien
cattagcccagctcaaaaagggtga

SEQ ID NO: 1610228 - DNA, 25 bp, Homo sapien
gatcctgacacatgtgggcttggca

SEQ ID NO: 1610229 - DNA, 25 bp, Homo sapien
gacccacacaagtgactgggcctgg

SEQ ID NO: 1610230 - DNA, 25 bp, Homo sapien
ttgagtaggggtccgacttgtggtg

SEQ ID NO: 1610231 - DNA, 25 bp, Homo sapien
tccgacttgtggtgccggggtgaat

SEQ ID NO: 1610232 - DNA, 25 bp, Homo sapien
ctgaggcttggcaggctgcggcggg

SEQ ID NO: 1610233 - DNA, 25 bp, Homo sapien
agtaggggtccgacttgtggtgccg

SEQ ID NO: 1610234 - DNA, 25 bp, Homo sapien
ttggatgtgggtggaaaactgcatg

SEQ ID NO: 1610235 - DNA, 25 bp, Homo sapien
gggctgttggatgtgggtggaaaac

SEQ ID NO: 1610236 - DNA, 25 bp, Homo sapien
tgttggatgtgggtggaaaactgca

SEQ ID NO: 1610237 - DNA, 25 bp, Homo sapien
ggatgtgggtggaaaactgcatggg

SEQ ID NO: 1610238 - DNA, 25 bp, Homo sapien
agtgcacgggccgtggagggggctg

SEQ ID NO: 1610239 - DNA, 25 bp, Homo sapien
tgcacgggccgtggagggggctgat

SEQ ID NO: 1610240 - DNA, 25 bp, Homo sapien
caagtgcacgggccgtggagggggc

SEQ ID NO: 1610241 - DNA, 25 bp, Homo sapien
ctgcaagtgcacgggccgtggaggg

SEQ ID NO: 1610242 - DNA, 25 bp, Homo sapien
gggagtagcggcgtagggggctgca

SEQ ID NO: 1610243 - DNA, 25 bp, Homo sapien
cttcacggaagggagtagcggcgta

SEQ ID NO: 1610244 - DNA, 25 bp, Homo sapien
aagggagtagcggcgtagggggctg

SEQ ID NO: 1610245 - DNA, 25 bp, Homo sapien
tcacggaagggagtagcggcgtagg

SEQ ID NO: 1610246 - DNA, 25 bp, Homo sapien
cagcggctcggttgctgggccgtga

SEQ ID NO: 1610247 - DNA, 25 bp, Homo sapien
gctgctggggtagtgcgttgtgcaa

SEQ ID NO: 1610248 - DNA, 25 bp, Homo sapien
tcaaggctggtgacacggctggggg

SEQ ID NO: 1610249 - DNA, 25 bp, Homo sapien
tacagctgcatctgcatggaggtga

SEQ ID NO: 1610250 - DNA, 25 bp, Homo sapien
gctggttgagatggggtggagtgct

SEQ ID NO: 1610251 - DNA, 25 bp, Homo sapien
gaggagagaccactgcgtgctggtt

SEQ ID NO: 1610252 - DNA, 25 bp, Homo sapien
agagaccactgcgtgctggttgaga

SEQ ID NO: 1610253 - DNA, 25 bp, Homo sapien
tgagatggggtggagtgctgtgctc

SEQ ID NO: 1610254 - DNA, 25 bp, Homo sapien
gggtggcaatgaagggtgggggcga

SEQ ID NO: 1610255 - DNA, 25 bp, Homo sapien
gcaatgaagggtgggggcgaggact

SEQ ID NO: 1610256 - DNA, 25 bp, Homo sapien
gtggcaatgaagggtgggggcgagg

SEQ ID NO: 1610257 - DNA, 25 bp, Homo sapien
ggcaatgaagggtgggggcgaggac

SEQ ID NO: 1610258 - DNA, 25 bp, Homo sapien
ctgcggcatggagggtgggggaggc

SEQ ID NO: 1610259 - DNA, 25 bp, Homo sapien
gaggcgggggtggcggctgctgttg

SEQ ID NO: 1610260 - DNA, 25 bp, Homo sapien
tgggggaggcgggggtggcggctgc

SEQ ID NO: 1610261 - DNA, 25 bp, Homo sapien
gggaggcgggggtggcggctgctgt

SEQ ID NO: 1610262 - DNA, 25 bp, Homo sapien
gcacaggagccggggcctgctgcat

SEQ ID NO: 1610263 - DNA, 25 bp, Homo sapien
ctgcatctgctgatggtggtgatga

SEQ ID NO: 1610264 - DNA, 25 bp, Homo sapien
ctggggcacaggagccggggcctgc

SEQ ID NO: 1610265 - DNA, 25 bp, Homo sapien
ctgctgcatctgctgatggtggtga

SEQ ID NO: 1610266 - DNA, 25 bp, Homo sapien
agacccaacgtcccacctaatgaag

SEQ ID NO: 1610267 - DNA, 25 bp, Homo sapien
caacgtcccacctaatgaaggatgc

SEQ ID NO: 1610268 - DNA, 25 bp, Homo sapien
acgtcccacctaatgaaggatgccc

SEQ ID NO: 1610269 - DNA, 25 bp, Homo sapien
cccaacgtcccacctaatgaaggat

SEQ ID NO: 1610270 - DNA, 25 bp, Homo sapien
tcttctgctccctcccggggtgccc

SEQ ID NO: 1610271 - DNA, 25 bp, Homo sapien
ttcttttttgacttcggagccatct

SEQ ID NO: 1610272 - DNA, 25 bp, Homo sapien
cttcttctgctccctcccggggtgc

SEQ ID NO: 1610273 - DNA, 25 bp, Homo sapien
ccttcttttttgacttcggagccat

SEQ ID NO: 1610274 - DNA, 25 bp, Homo sapien
gaagaaagacgagaaaacagggcac

SEQ ID NO: 1610275 - DNA, 25 bp, Homo sapien
ggagagacatgcgaggcatcaccta

SEQ ID NO: 1610276 - DNA, 25 bp, Homo sapien
gcttttcctagcagggactgtgcct

SEQ ID NO: 1610277 - DNA, 25 bp, Homo sapien
cagggcactttcaggagaaggacca

SEQ ID NO: 1610278 - DNA, 25 bp, Homo sapien
ccagatatagagttgagggaaaaag

SEQ ID NO: 1610279 - DNA, 25 bp, Homo sapien
gtgtgcaagggaaggatatgctggg

SEQ ID NO: 1610280 - DNA, 25 bp, Homo sapien
ctcagggatgtgtccagatatagag

SEQ ID NO: 1610281 - DNA, 25 bp, Homo sapien
gctcgcctgttgtctcgtggccttg

SEQ ID NO: 1610282 - DNA, 25 bp, Homo sapien
actctctagaaagggttacatgaag

SEQ ID NO: 1610283 - DNA, 25 bp, Homo sapien
cacacaaaactctctagaaagggtt

SEQ ID NO: 1610284 - DNA, 25 bp, Homo sapien
ccacacaaaactctctagaaagggt

SEQ ID NO: 1610285 - DNA, 25 bp, Homo sapien
caaaactctctagaaagggttacat

SEQ ID NO: 1610286 - DNA, 25 bp, Homo sapien
gacagccaggcagtctttacacaga

SEQ ID NO: 1610287 - DNA, 25 bp, Homo sapien
tcgagccttacagggcaccagtgag

SEQ ID NO: 1610288 - DNA, 25 bp, Homo sapien
agttgcagctgctcaagcccaagga

SEQ ID NO: 1610289 - DNA, 25 bp, Homo sapien
tgcaggcccgacactggtaatcagg

SEQ ID NO: 1610290 - DNA, 25 bp, Homo sapien
gtgcttggcagacctaaccccagtg

SEQ ID NO: 1610291 - DNA, 25 bp, Homo sapien
ggacacttctgctcacaaagacctg

SEQ ID NO: 1610292 - DNA, 25 bp, Homo sapien
ggaatacatggtggcctgggacaca

SEQ ID NO: 1610293 - DNA, 25 bp, Homo sapien
tacagaatcctcaagcagctccagg

SEQ ID NO: 1610294 - DNA, 25 bp, Homo sapien
gagccagcggctctgagactgtaaa

SEQ ID NO: 1610295 - DNA, 25 bp, Homo sapien
tcttgtgagggctaaagcagcacac

SEQ ID NO: 1610296 - DNA, 25 bp, Homo sapien
cattttagttaatcaggtcccctga

SEQ ID NO: 1610297 - DNA, 25 bp, Homo sapien
aataataaaatctcggcagcggcag

SEQ ID NO: 1610298 - DNA, 25 bp, Homo sapien
tctgcgcccctgagaataatgagga

SEQ ID NO: 1610299 - DNA, 25 bp, Homo sapien
tagttagaactgcaggagggacacg

SEQ ID NO: 1610300 - DNA, 25 bp, Homo sapien
ggagtctactgccaaaacacaggtt

SEQ ID NO: 1610301 - DNA, 25 bp, Homo sapien
tgcacacttggaggagagcagtccc

SEQ ID NO: 1610302 - DNA, 25 bp, Homo sapien
gaaaccagcgaagcatctccctgaa

SEQ ID NO: 1610303 - DNA, 25 bp, Homo sapien
aacacagcaacgagcacactctggg

SEQ ID NO: 1610304 - DNA, 25 bp, Homo sapien
gcactgcacgtgactgtgatacggg

SEQ ID NO: 1610305 - DNA, 25 bp, Homo sapien
ggccagcagcagactggcgatgcgg

SEQ ID NO: 1610306 - DNA, 25 bp, Homo sapien
tggggacacgaagtctccactggtg

SEQ ID NO: 1610307 - DNA, 25 bp, Homo sapien
ctggggacacgaagtctccactggt

SEQ ID NO: 1610308 - DNA, 25 bp, Homo sapien
ggggacacgaagtctccactggtgc

SEQ ID NO: 1610309 - DNA, 25 bp, Homo sapien
gggacacgaagtctccactggtgca

SEQ ID NO: 1610310 - DNA, 25 bp, Homo sapien
agtgcagggctattcatggccccag

SEQ ID NO: 1610311 - DNA, 25 bp, Homo sapien
tgggctctagcatcctggacacagg

SEQ ID NO: 1610312 - DNA, 25 bp, Homo sapien
gagaatggacactactgcacagagt

SEQ ID NO: 1610313 - DNA, 25 bp, Homo sapien
catcaaggtcaacagcacagcctgg

SEQ ID NO: 1610314 - DNA, 25 bp, Homo sapien
ctctccgactctgaggacgagaagc

SEQ ID NO: 1610315 - DNA, 25 bp, Homo sapien
ggaggagccggcaatcacatcaact

SEQ ID NO: 1610316 - DNA, 25 bp, Homo sapien
ctgtttcggagtcttcgctgtcaga

SEQ ID NO: 1610317 - DNA, 25 bp, Homo sapien
tcactggagctctccgactctgagg

SEQ ID NO: 1610318 - DNA, 25 bp, Homo sapien
tcctcataggacataggcttgcact

SEQ ID NO: 1610319 - DNA, 25 bp, Homo sapien
cagggtctcaaagtcgatttcaatc

SEQ ID NO: 1610320 - DNA, 25 bp, Homo sapien
gctcacgcagtgtggacggcttcag

SEQ ID NO: 1610321 - DNA, 25 bp, Homo sapien
ttttcttccgcaaacaggaggtgac

SEQ ID NO: 1610322 - DNA, 25 bp, Homo sapien
ttaggaggaggttccttggctttgc

SEQ ID NO: 1610323 - DNA, 25 bp, Homo sapien
tctttggtttgttctgctggggctg

SEQ ID NO: 1610324 - DNA, 25 bp, Homo sapien
gctgctattatttttcttcgtcttt

SEQ ID NO: 1610325 - DNA, 25 bp, Homo sapien
attgctgttgctgctattatttttc

SEQ ID NO: 1610326 - DNA, 25 bp, Homo sapien
tgcaagctgctcgtgcacggctttg

SEQ ID NO: 1610327 - DNA, 25 bp, Homo sapien
ctgcaagctgctcgtgcacggcttt

SEQ ID NO: 1610328 - DNA, 25 bp, Homo sapien
gcaagctgctcgtgcacggctttga

SEQ ID NO: 1610329 - DNA, 25 bp, Homo sapien
caagctgctcgtgcacggctttgag

SEQ ID NO: 1610330 - DNA, 25 bp, Homo sapien
aagacccaggcgtctgctccaaaaa

SEQ ID NO: 1610331 - DNA, 25 bp, Homo sapien
tgtagaccagacaggcaagacacac

SEQ ID NO: 1610332 - DNA, 25 bp, Homo sapien
gctttgcgcctgtcatgttaaccag

SEQ ID NO: 1610333 - DNA, 25 bp, Homo sapien
gctccaaaaaacatgcgacagcatg

SEQ ID NO: 1610334 - DNA, 25 bp, Homo sapien
tgatcaagccgacagacaccaagtc

SEQ ID NO: 1610335 - DNA, 25 bp, Homo sapien
ccatcctgatcgcagaaggagggcc

SEQ ID NO: 1610336 - DNA, 25 bp, Homo sapien
ctgatcaagccgacagacaccaagt

SEQ ID NO: 1610337 - DNA, 25 bp, Homo sapien
aagtctcacggccatcctgatcgca

SEQ ID NO: 1610338 - DNA, 25 bp, Homo sapien
tgtccgaggagctatcgctgctgct

SEQ ID NO: 1610339 - DNA, 25 bp, Homo sapien
tcctcagagtcatcagtcgaactgt

SEQ ID NO: 1610340 - DNA, 25 bp, Homo sapien
tcctcaggctcgtccggcatcttgg

SEQ ID NO: 1610341 - DNA, 25 bp, Homo sapien
tggcaaagcgcatttcgaacacatc

SEQ ID NO: 1610342 - DNA, 25 bp, Homo sapien
ctcaacagaaagcaaccgagggcga

SEQ ID NO: 1610343 - DNA, 25 bp, Homo sapien
aagggcctctgacaactcttgcaac

SEQ ID NO: 1610344 - DNA, 25 bp, Homo sapien
ccaaaacagttagccgaggctccca

SEQ ID NO: 1610345 - DNA, 25 bp, Homo sapien
tctgagatggtactggaccaagggc

SEQ ID NO: 1610346 - DNA, 25 bp, Homo sapien
gaggcaagcctctcacaagggagga

SEQ ID NO: 1610347 - DNA, 25 bp, Homo sapien
gaactggaagtgtgctgagacctaa

SEQ ID NO: 1610348 - DNA, 25 bp, Homo sapien
tccctgttcaaggagctcagtctag

SEQ ID NO: 1610349 - DNA, 25 bp, Homo sapien
tcaatgacccgagaatttagaggct

SEQ ID NO: 1610350 - DNA, 25 bp, Homo sapien
gactgtgacagcgacttctcggcaa

SEQ ID NO: 1610351 - DNA, 25 bp, Homo sapien
tagaaggctcttacggctctggtgg

SEQ ID NO: 1610352 - DNA, 25 bp, Homo sapien
ttgtagaagagactgggccatgcac

SEQ ID NO: 1610353 - DNA, 25 bp, Homo sapien
tggaaacaaccactctgcagctaga

SEQ ID NO: 1610354 - DNA, 25 bp, Homo sapien
ctgagggtggctgcgccctcccaag

SEQ ID NO: 1610355 - DNA, 25 bp, Homo sapien
tctgctgagggtggctgcgccctcc

SEQ ID NO: 1610356 - DNA, 25 bp, Homo sapien
tgctgagggtggctgcgccctccca

SEQ ID NO: 1610357 - DNA, 25 bp, Homo sapien
gctctgctgagggtggctgcgccct

SEQ ID NO: 1610358 - DNA, 25 bp, Homo sapien
tgagcatcacggtactcacgggcct

SEQ ID NO: 1610359 - DNA, 25 bp, Homo sapien
gccaccacctcatggtcaggagggt

SEQ ID NO: 1610360 - DNA, 25 bp, Homo sapien
ggacgtcagcaccaaactcctgagc

SEQ ID NO: 1610361 - DNA, 25 bp, Homo sapien
gcagttggagaacatcaatcggacg

SEQ ID NO: 1610362 - DNA, 25 bp, Homo sapien
tctgcccatgtgaccatggagaagt

SEQ ID NO: 1610363 - DNA, 25 bp, Homo sapien
tgtctgcccatgtgaccatggagaa

SEQ ID NO: 1610364 - DNA, 25 bp, Homo sapien
ctgcccatgtgaccatggagaagtg

SEQ ID NO: 1610365 - DNA, 25 bp, Homo sapien
acaagacaagtccctgttagctgtg

SEQ ID NO: 1610366 - DNA, 25 bp, Homo sapien
ctggctcgcaggcaggtggactcag

SEQ ID NO: 1610367 - DNA, 25 bp, Homo sapien
tggctcgcaggcaggtggactcaga

SEQ ID NO: 1610368 - DNA, 25 bp, Homo sapien
tggcaaggccgccaagccccaactc

SEQ ID NO: 1610369 - DNA, 25 bp, Homo sapien
tctccaccacaaagaggctggcaag

SEQ ID NO: 1610370 - DNA, 25 bp, Homo sapien
gcgtgcctccaacacagaggagaca

SEQ ID NO: 1610371 - DNA, 25 bp, Homo sapien
agcatctactgtgtgggcaaggtac

SEQ ID NO: 1610372 - DNA, 25 bp, Homo sapien
ctggggcactgggcccccaaggcca

SEQ ID NO: 1610373 - DNA, 25 bp, Homo sapien
aaggccagagggcttgtcttgcttt

SEQ ID NO: 1610374 - DNA, 25 bp, Homo sapien
cccaaggccagagggcttgtcttgc

SEQ ID NO: 1610375 - DNA, 25 bp, Homo sapien
ggcccccaaggccagagggcttgtc

SEQ ID NO: 1610376 - DNA, 25 bp, Homo sapien
gcagcacaggcatctgtagccacaa

SEQ ID NO: 1610377 - DNA, 25 bp, Homo sapien
aggtctcagagcacgtcccacagca

SEQ ID NO: 1610378 - DNA, 25 bp, Homo sapien
ctgagtttcttcgagttggcgggaa

SEQ ID NO: 1610379 - DNA, 25 bp, Homo sapien
ttggcgggaaaaatccacgcagcca

SEQ ID NO: 1610380 - DNA, 25 bp, Homo sapien
ctgatgtggagggacagcctgccca

SEQ ID NO: 1610381 - DNA, 25 bp, Homo sapien
tgatgtggagggacagcctgcccac

SEQ ID NO: 1610382 - DNA, 25 bp, Homo sapien
tcccttccctcaggcacatcccgct

SEQ ID NO: 1610383 - DNA, 25 bp, Homo sapien
cttccctcaggcacatcccgctaac

SEQ ID NO: 1610384 - DNA, 25 bp, Homo sapien
tgtcccttccctcaggcacatcccg

SEQ ID NO: 1610385 - DNA, 25 bp, Homo sapien
ttgtcccttccctcaggcacatccc

SEQ ID NO: 1610386 - DNA, 25 bp, Homo sapien
cgtaggcggcgtgcttcttggcaaa

SEQ ID NO: 1610387 - DNA, 25 bp, Homo sapien
cagtagtcgtgtaggcccagtgcct

SEQ ID NO: 1610388 - DNA, 25 bp, Homo sapien
ttgaggatgccgctgcagcacttga

SEQ ID NO: 1610389 - DNA, 25 bp, Homo sapien
gattgtgctcatgtccatggggtgc

SEQ ID NO: 1610390 - DNA, 25 bp, Homo sapien
gaggcaccactgtcatgacaggggt

SEQ ID NO: 1610391 - DNA, 25 bp, Homo sapien
atgggtgggtggctctgtacgggct

SEQ ID NO: 1610392 - DNA, 25 bp, Homo sapien
tctggacgatgaggtccggggtgac

SEQ ID NO: 1610393 - DNA, 25 bp, Homo sapien
gggtggccgcgatgatgggtgggtg

SEQ ID NO: 1610394 - DNA, 25 bp, Homo sapien
gtggaaacgccaggttttgctgtcc

SEQ ID NO: 1610395 - DNA, 25 bp, Homo sapien
tgagttgtgtttggtaccgtggaaa

SEQ ID NO: 1610396 - DNA, 25 bp, Homo sapien
ccgtggaaacgccaggttttgctgt

SEQ ID NO: 1610397 - DNA, 25 bp, Homo sapien
tgggtctgcggaggagtcgatgctt

SEQ ID NO: 1610398 - DNA, 25 bp, Homo sapien
tcatgatctcggtttcttctgtggg

SEQ ID NO: 1610399 - DNA, 25 bp, Homo sapien
ttccttttgcctggactatcatgat

SEQ ID NO: 1610400 - DNA, 25 bp, Homo sapien
gactatcatgatctcggtttcttct

SEQ ID NO: 1610401 - DNA, 25 bp, Homo sapien
tcggtttcttctgtgggtagctcat

SEQ ID NO: 1610402 - DNA, 25 bp, Homo sapien
caccagcagaggtcaaaagctgagt

SEQ ID NO: 1610403 - DNA, 25 bp, Homo sapien
ggcatttttacccactacaccagca

SEQ ID NO: 1610404 - DNA, 25 bp, Homo sapien
ctgagttctgtatagtgtctccctc

SEQ ID NO: 1610405 - DNA, 25 bp, Homo sapien
tgagttctgtatagtgtctccctcc

SEQ ID NO: 1610406 - DNA, 25 bp, Homo sapien
tatttgaaagggttgattttaatca

SEQ ID NO: 1610407 - DNA, 25 bp, Homo sapien
tgattttaatcacatctgtggtctg

SEQ ID NO: 1610408 - DNA, 25 bp, Homo sapien
gattttaatcacatctgtggtctga

SEQ ID NO: 1610409 - DNA, 25 bp, Homo sapien
aaagggttgattttaatcacatctg

SEQ ID NO: 1610410 - DNA, 25 bp, Homo sapien
ggatacattcctgagcattccagta

SEQ ID NO: 1610411 - DNA, 25 bp, Homo sapien
cagtaatagttgttttccaagcgct

SEQ ID NO: 1610412 - DNA, 25 bp, Homo sapien
tgttcccatatccataggcgtttta

SEQ ID NO: 1610413 - DNA, 25 bp, Homo sapien
ccaagcgcttctttattgttcccat

SEQ ID NO: 1610414 - DNA, 25 bp, Homo sapien
ggagagcagagagcaaaagtccagt

SEQ ID NO: 1610415 - DNA, 25 bp, Homo sapien
gcagagagcaaaagtccagtgtcac

SEQ ID NO: 1610416 - DNA, 25 bp, Homo sapien
gagagcagagagcaaaagtccagtg

SEQ ID NO: 1610417 - DNA, 25 bp, Homo sapien
gagcagagagcaaaagtccagtgtc

SEQ ID NO: 1610418 - DNA, 25 bp, Homo sapien
gagccacagctcctactggcatcag

SEQ ID NO: 1610419 - DNA, 25 bp, Homo sapien
acaggtaaatccacgggagccacag

SEQ ID NO: 1610420 - DNA, 25 bp, Homo sapien
ggctgctccacaggtaaatccacgg

SEQ ID NO: 1610421 - DNA, 25 bp, Homo sapien
ccacaggtaaatccacgggagccac

SEQ ID NO: 1610422 - DNA, 25 bp, Homo sapien
ggcaggtcctacttgtcccatttga

SEQ ID NO: 1610423 - DNA, 25 bp, Homo sapien
gctgactgaccaggttaactgccaa

SEQ ID NO: 1610424 - DNA, 25 bp, Homo sapien
gctggagtccacttgtaacccttga

SEQ ID NO: 1610425 - DNA, 25 bp, Homo sapien
cctagtaagacaacccatggcaggt

SEQ ID NO: 1610426 - DNA, 25 bp, Homo sapien
gacatccacgagaaagagtcaaggg

SEQ ID NO: 1610427 - DNA, 25 bp, Homo sapien
cactgaggccctgctcgggatggta

SEQ ID NO: 1610428 - DNA, 25 bp, Homo sapien
agatgttctgacatccacgagaaag

SEQ ID NO: 1610429 - DNA, 25 bp, Homo sapien
cgggatggtagtggacagcgttgga

SEQ ID NO: 1610430 - DNA, 25 bp, Homo sapien
atgtaaggttttggcacagctcatg

SEQ ID NO: 1610431 - DNA, 25 bp, Homo sapien
ccgtcgcaatctggtttctacttct

SEQ ID NO: 1610432 - DNA, 25 bp, Homo sapien
ttctcattcacaccgtcgcaatctg

SEQ ID NO: 1610433 - DNA, 25 bp, Homo sapien
cacgtcttcctaaggtcaccaatgc

SEQ ID NO: 1610434 - DNA, 25 bp, Homo sapien
tttctacttctgtgtcacgtcttcc

SEQ ID NO: 1610435 - DNA, 25 bp, Homo sapien
cctgggccctgcccacactactcac

SEQ ID NO: 1610436 - DNA, 25 bp, Homo sapien
agggaggttcagcttgacggcatcc

SEQ ID NO: 1610437 - DNA, 25 bp, Homo sapien
ctggtgtttccatagtgtcttgagc

SEQ ID NO: 1610438 - DNA, 25 bp, Homo sapien
tggaaaggccatgcaaactggtgtt

SEQ ID NO: 1610439 - DNA, 25 bp, Homo sapien
tattgcagttggttggtctgcctct

SEQ ID NO: 1610440 - DNA, 25 bp, Homo sapien
ggcagatttctcaatctcgtcccag

SEQ ID NO: 1610441 - DNA, 25 bp, Homo sapien
tactggcagatttctcaatctcgtc

SEQ ID NO: 1610442 - DNA, 25 bp, Homo sapien
ttctcaatctcgtcccagggccgct

SEQ ID NO: 1610443 - DNA, 25 bp, Homo sapien
agatttctcaatctcgtcccagggc

SEQ ID NO: 1610444 - DNA, 25 bp, Homo sapien
gctagtgatcccatcacattcttca

SEQ ID NO: 1610445 - DNA, 25 bp, Homo sapien
ctagtgatcccatcacattcttcac

SEQ ID NO: 1610446 - DNA, 25 bp, Homo sapien
cccatcacattcttcaccaggcact

SEQ ID NO: 1610447 - DNA, 25 bp, Homo sapien
gatcccatcacattcttcaccaggc

SEQ ID NO: 1610448 - DNA, 25 bp, Homo sapien
gtaacttaaataatgcaggtctgct

SEQ ID NO: 1610449 - DNA, 25 bp, Homo sapien
tcttggtaacttaaataatgcaggt

SEQ ID NO: 1610450 - DNA, 25 bp, Homo sapien
cttggtaacttaaataatgcaggtc

SEQ ID NO: 1610451 - DNA, 25 bp, Homo sapien
tggtaacttaaataatgcaggtctg

SEQ ID NO: 1610452 - DNA, 25 bp, Homo sapien
aacttttagtgggttcagaagcagc

SEQ ID NO: 1610453 - DNA, 25 bp, Homo sapien
gaaccttgggtccagtgtaccagtc

SEQ ID NO: 1610454 - DNA, 25 bp, Homo sapien
cacaagtattggtagaaggacagca

SEQ ID NO: 1610455 - DNA, 25 bp, Homo sapien
taaagcaactccatggactaggctg

SEQ ID NO: 1610456 - DNA, 25 bp, Homo sapien
ggagtaggctggagagggcttccat

SEQ ID NO: 1610457 - DNA, 25 bp, Homo sapien
tgtggagtaggctggagagggcttc

SEQ ID NO: 1610458 - DNA, 25 bp, Homo sapien
tggagtaggctggagagggcttcca

SEQ ID NO: 1610459 - DNA, 25 bp, Homo sapien
atgtggagtaggctggagagggctt

SEQ ID NO: 1610460 - DNA, 25 bp, Homo sapien
gggtgcagagccaagctgtcccaaa

SEQ ID NO: 1610461 - DNA, 25 bp, Homo sapien
tcccaagatggagggtacaaagagt

SEQ ID NO: 1610462 - DNA, 25 bp, Homo sapien
ctgtggaagcctggatcccaagatg

SEQ ID NO: 1610463 - DNA, 25 bp, Homo sapien
caagcacacgccaggtaagtgatgg

SEQ ID NO: 1610464 - DNA, 25 bp, Homo sapien
tgctgtacccatcagtggcctgcct

SEQ ID NO: 1610465 - DNA, 25 bp, Homo sapien
agaggcccagtcatcctacacgggt

SEQ ID NO: 1610466 - DNA, 25 bp, Homo sapien
tgccatgtggcccataagctgggtc

SEQ ID NO: 1610467 - DNA, 25 bp, Homo sapien
tacacgggtctttggcttggccagc

SEQ ID NO: 1610468 - DNA, 25 bp, Homo sapien
tcccgtgtcataggtgaaatctaaa

SEQ ID NO: 1610469 - DNA, 25 bp, Homo sapien
gtcataggtgaaatctaaaacatac

SEQ ID NO: 1610470 - DNA, 25 bp, Homo sapien
gatatatcccgtgtcataggtgaaa

SEQ ID NO: 1610471 - DNA, 25 bp, Homo sapien
aatgagatatatcccgtgtcatagg

SEQ ID NO: 1610472 - DNA, 25 bp, Homo sapien
tccacattgtagcacctctgaattt

SEQ ID NO: 1610473 - DNA, 25 bp, Homo sapien
tgtggttgtcgtatttcacttggca

SEQ ID NO: 1610474 - DNA, 25 bp, Homo sapien
tgaaacacaggatccagttataaac

SEQ ID NO: 1610475 - DNA, 25 bp, Homo sapien
tgctgaagtacacagaggtaatatc

SEQ ID NO: 1610476 - DNA, 25 bp, Homo sapien
ccaagtcaatgggttatggtaactg

SEQ ID NO: 1610477 - DNA, 25 bp, Homo sapien
tatgatggcacttcagaccctgcaa

SEQ ID NO: 1610478 - DNA, 25 bp, Homo sapien
ggtatgatggcacttcagaccctgc

SEQ ID NO: 1610479 - DNA, 25 bp, Homo sapien
tgacctgaccattgcttatcaccca

SEQ ID NO: 1610480 - DNA, 25 bp, Homo sapien
gcaaatcagctcctagttgaggcta

SEQ ID NO: 1610481 - DNA, 25 bp, Homo sapien
ttgaggctagccaaacagcaggtgc

SEQ ID NO: 1610482 - DNA, 25 bp, Homo sapien
cctgctcctggagtaggcctataag

SEQ ID NO: 1610483 - DNA, 25 bp, Homo sapien
ctgctcctgacttgttatgccctgc

SEQ ID NO: 1610484 - DNA, 25 bp, Homo sapien
agcactgaactcaagcgaagcttgg

SEQ ID NO: 1610485 - DNA, 25 bp, Homo sapien
gaagaggaatgttggtatgtgattt

SEQ ID NO: 1610486 - DNA, 25 bp, Homo sapien
aagcgaagcttggttatcttgccac

SEQ ID NO: 1610487 - DNA, 25 bp, Homo sapien
tgatttttgcagcaagcactgaact

SEQ ID NO: 1610488 - DNA, 25 bp, Homo sapien
tagctgggatttctcccacctcagc

SEQ ID NO: 1610489 - DNA, 25 bp, Homo sapien
cagcacccagcctgaaatgttattt

SEQ ID NO: 1610490 - DNA, 25 bp, Homo sapien
tcccaagtagccaggcaggagccac

SEQ ID NO: 1610491 - DNA, 25 bp, Homo sapien
cacctgccttggctacccaagtgct

SEQ ID NO: 1610492 - DNA, 25 bp, Homo sapien
gcttaagggaatattgcagctgacc

SEQ ID NO: 1610493 - DNA, 25 bp, Homo sapien
caatctggctaactctctggcttaa

SEQ ID NO: 1610494 - DNA, 25 bp, Homo sapien
gttactacggccttgctagattagg

SEQ ID NO: 1610495 - DNA, 25 bp, Homo sapien
ttttttatgaagacgaggcctcact

SEQ ID NO: 1610496 - DNA, 25 bp, Homo sapien
aaatagtcagtagctggagcagtca

SEQ ID NO: 1610497 - DNA, 25 bp, Homo sapien
gtgagagacgcgagacccttccttt

SEQ ID NO: 1610498 - DNA, 25 bp, Homo sapien
gaattcaccttcttagatggacatg

SEQ ID NO: 1610499 - DNA, 25 bp, Homo sapien
ccggcctaattttaagacagttgtg

SEQ ID NO: 1610500 - DNA, 25 bp, Homo sapien
gtgagcagagcagagattgtgccac

SEQ ID NO: 1610501 - DNA, 25 bp, Homo sapien
tgtgccactgtactccagcctgggc

SEQ ID NO: 1610502 - DNA, 25 bp, Homo sapien
gccactgtactccagcctgggcgac

SEQ ID NO: 1610503 - DNA, 25 bp, Homo sapien
agtgagcagagcagagattgtgcca

SEQ ID NO: 1610504 - DNA, 25 bp, Homo sapien
tggaaccctcatatgtccagcaatg

SEQ ID NO: 1610505 - DNA, 25 bp, Homo sapien
ctacataaaaagtgtgtgtgggcac

SEQ ID NO: 1610506 - DNA, 25 bp, Homo sapien
caaaccgggtagtgtggcaatcaat

SEQ ID NO: 1610507 - DNA, 25 bp, Homo sapien
ccctacgcatatgccaagagaaagg

SEQ ID NO: 1610508 - DNA, 25 bp, Homo sapien
gaactataggagcatggcaccatgt

SEQ ID NO: 1610509 - DNA, 25 bp, Homo sapien
aactataggagcatggcaccatgtc

SEQ ID NO: 1610510 - DNA, 25 bp, Homo sapien
tcttcaggacgaggacaagaatggg

SEQ ID NO: 1610511 - DNA, 25 bp, Homo sapien
caaacggtgaccaaaccatgaaggc

SEQ ID NO: 1610512 - DNA, 25 bp, Homo sapien
caagaatgggacagacggctgctct

SEQ ID NO: 1610513 - DNA, 25 bp, Homo sapien
gaattatgctaggacatgtgcacgt

SEQ ID NO: 1610514 - DNA, 25 bp, Homo sapien
actccagcctgtcgactgacttcag

SEQ ID NO: 1610515 - DNA, 25 bp, Homo sapien
cactatacagtaggttgtcagaagc

SEQ ID NO: 1610516 - DNA, 25 bp, Homo sapien
ttctcacctcgcaaatgtacactct

SEQ ID NO: 1610517 - DNA, 25 bp, Homo sapien
gcaccagcaaggaattccccacaat

SEQ ID NO: 1610518 - DNA, 25 bp, Homo sapien
gaagccatgctatttccgtttggga

SEQ ID NO: 1610519 - DNA, 25 bp, Homo sapien
gagaaatgaacccaagaccagacac

SEQ ID NO: 1610520 - DNA, 25 bp, Homo sapien
catgcaccggcctgaactaaagtat

SEQ ID NO: 1610521 - DNA, 25 bp, Homo sapien
tctcgtgaggcatacattccaaggg

SEQ ID NO: 1610522 - DNA, 25 bp, Homo sapien
ggcgcgccgcggaccccgcggcggc

SEQ ID NO: 1610523 - DNA, 25 bp, Homo sapien
cgggcgcgccgcggaccccgcggcg

SEQ ID NO: 1610524 - DNA, 25 bp, Homo sapien
gcgcgccgcggaccccgcggcggcc

SEQ ID NO: 1610525 - DNA, 25 bp, Homo sapien
cgccgcggaccccgcggcggccgct

SEQ ID NO: 1610526 - DNA, 25 bp, Homo sapien
tcggctgcgggagaccagaacaaac

SEQ ID NO: 1610527 - DNA, 25 bp, Homo sapien
gcccgccgctctgccgagctcacag

SEQ ID NO: 1610528 - DNA, 25 bp, Homo sapien
ctcctcggctgcgggagaccagaac

SEQ ID NO: 1610529 - DNA, 25 bp, Homo sapien
gctgcgggagaccagaacaaacagc

SEQ ID NO: 1610530 - DNA, 25 bp, Homo sapien
attttatagatacgaaatcctgaag

SEQ ID NO: 1610531 - DNA, 25 bp, Homo sapien
tttctgtacactggcaacgaacaac

SEQ ID NO: 1610532 - DNA, 25 bp, Homo sapien
tagcatccatgatcaacacacaaaa

SEQ ID NO: 1610533 - DNA, 25 bp, Homo sapien
taatacattccacaaaattagcatc

SEQ ID NO: 1610534 - DNA, 25 bp, Homo sapien
taaggcgaagaattgcttaactggg

SEQ ID NO: 1610535 - DNA, 25 bp, Homo sapien
taggaacaaaagaggtccaagcctg

SEQ ID NO: 1610536 - DNA, 25 bp, Homo sapien
aatgttttaaataggctgggttcag

SEQ ID NO: 1610537 - DNA, 25 bp, Homo sapien
caagattatgctggcactgcactcc

SEQ ID NO: 1610538 - DNA, 25 bp, Homo sapien
tcaccctgcgattaagacgcatcta

SEQ ID NO: 1610539 - DNA, 25 bp, Homo sapien
gacgcatctacacaacacaaacgga

SEQ ID NO: 1610540 - DNA, 25 bp, Homo sapien
taagagaacaagcttaaaaggcatg

SEQ ID NO: 1610541 - DNA, 25 bp, Homo sapien
cggatgctgagcagaaatgacccag

SEQ ID NO: 1610542 - DNA, 25 bp, Homo sapien
cctggtatacagtagaggctcggca

SEQ ID NO: 1610543 - DNA, 25 bp, Homo sapien
ccagtggcgtaggtcggtcagatac

SEQ ID NO: 1610544 - DNA, 25 bp, Homo sapien
tgtgaaccaggtgctgcgaagtcct

SEQ ID NO: 1610545 - DNA, 25 bp, Homo sapien
taaagattgggacgcaatgccctct

SEQ ID NO: 1610546 - DNA, 25 bp, Homo sapien
tgggcaagaagccacacgactgcat

SEQ ID NO: 1610547 - DNA, 25 bp, Homo sapien
tacagcatattctgggagcacacgc

SEQ ID NO: 1610548 - DNA, 25 bp, Homo sapien
gagacatgttacagccgctaaggac

SEQ ID NO: 1610549 - DNA, 25 bp, Homo sapien
cgactgcatgagacaagccgtgaga

SEQ ID NO: 1610550 - DNA, 25 bp, Homo sapien
ttctcatgtgccgttccacagggca

SEQ ID NO: 1610551 - DNA, 25 bp, Homo sapien
cattctgtgggaacagcgtctttag

SEQ ID NO: 1610552 - DNA, 25 bp, Homo sapien
ccagcagctgttcggcttgaggatc

SEQ ID NO: 1610553 - DNA, 25 bp, Homo sapien
gcaggagcaactctggtttgggcac

SEQ ID NO: 1610554 - DNA, 25 bp, Homo sapien
atcacctctgctaagacgtccgcgg

SEQ ID NO: 1610555 - DNA, 25 bp, Homo sapien
tccatttctggatcaacagtttcac

SEQ ID NO: 1610556 - DNA, 25 bp, Homo sapien
tatcctcacctcctaaattgtcatc

SEQ ID NO: 1610557 - DNA, 25 bp, Homo sapien
acctcctcaggtgtctctttcttat

SEQ ID NO: 1610558 - DNA, 25 bp, Homo sapien
cacctcggggagatattctgcaatt

SEQ ID NO: 1610559 - DNA, 25 bp, Homo sapien
gtccacaagggaaacacttctgtaa

SEQ ID NO: 1610560 - DNA, 25 bp, Homo sapien
caccggtcagcgtggtgtaagcaga

SEQ ID NO: 1610561 - DNA, 25 bp, Homo sapien
cggggatgtcagcttttcagaacca

SEQ ID NO: 1610562 - DNA, 25 bp, Homo sapien
gcttcccgagtagggctagccttgg

SEQ ID NO: 1610563 - DNA, 25 bp, Homo sapien
ggcgcaatcgttaactcctctaact

SEQ ID NO: 1610564 - DNA, 25 bp, Homo sapien
aggcatgagccataattcccggttc

SEQ ID NO: 1610565 - DNA, 25 bp, Homo sapien
tgtagtggcgcaatcgttaactcct

SEQ ID NO: 1610566 - DNA, 25 bp, Homo sapien
catggagactggttttcttgaactg

SEQ ID NO: 1610567 - DNA, 25 bp, Homo sapien
gtctgttgttcaaaacactcttagc

SEQ ID NO: 1610568 - DNA, 25 bp, Homo sapien
gcatcttcactatatgtctgttgtt

SEQ ID NO: 1610569 - DNA, 25 bp, Homo sapien
tccagcatcttcactatatgtctgt

SEQ ID NO: 1610570 - DNA, 25 bp, Homo sapien
aggaattagcatgtcgcaggccagg

SEQ ID NO: 1610571 - DNA, 25 bp, Homo sapien
ttgtgattgtggtccacggagtgca

SEQ ID NO: 1610572 - DNA, 25 bp, Homo sapien
gaattagcatgtcgcaggccaggca

SEQ ID NO: 1610573 - DNA, 25 bp, Homo sapien
cctgcggttgtgattgtggtccacg

SEQ ID NO: 1610574 - DNA, 25 bp, Homo sapien
ttcctgacgccgcttctcaattttc

SEQ ID NO: 1610575 - DNA, 25 bp, Homo sapien
tccatcaattcctgacgccgcttct

SEQ ID NO: 1610576 - DNA, 25 bp, Homo sapien
catcaattcctgacgccgcttctca

SEQ ID NO: 1610577 - DNA, 25 bp, Homo sapien
tcaattcctgacgccgcttctcaat

SEQ ID NO: 1610578 - DNA, 25 bp, Homo sapien
cagcttggtgcttatgaaccgcagg

SEQ ID NO: 1610579 - DNA, 25 bp, Homo sapien
ggatctcttcgtcatcaaagctacg

SEQ ID NO: 1610580 - DNA, 25 bp, Homo sapien
ggaactccacggtcttgtcgggcag

SEQ ID NO: 1610581 - DNA, 25 bp, Homo sapien
gaaccgcagggtctctttgtgaaat

SEQ ID NO: 1610582 - DNA, 25 bp, Homo sapien
gagatggagtttttatttgagatag

SEQ ID NO: 1610583 - DNA, 25 bp, Homo sapien
ctcggctcactgagatggagttttt

SEQ ID NO: 1610584 - DNA, 25 bp, Homo sapien
cactgagatggagtttttatttgag

SEQ ID NO: 1610585 - DNA, 25 bp, Homo sapien
ctcactgagatggagtttttatttg

SEQ ID NO: 1610586 - DNA, 25 bp, Homo sapien
tagctgtgtcaaactccaggggtgg

SEQ ID NO: 1610587 - DNA, 25 bp, Homo sapien
ggacagtgtctgagatgccagacac

SEQ ID NO: 1610588 - DNA, 25 bp, Homo sapien
aaggtgaacacaggacagtgtctga

SEQ ID NO: 1610589 - DNA, 25 bp, Homo sapien
tctggatttggataaggtgaacaca

SEQ ID NO: 1610590 - DNA, 25 bp, Homo sapien
acggtcccgcgtcctgtctcttctc

SEQ ID NO: 1610591 - DNA, 25 bp, Homo sapien
tcggctgcacggtcccgcgtcctgt

SEQ ID NO: 1610592 - DNA, 25 bp, Homo sapien
gcacggtcccgcgtcctgtctcttc

SEQ ID NO: 1610593 - DNA, 25 bp, Homo sapien
ctgtcggctgcacggtcccgcgtcc

SEQ ID NO: 1610594 - DNA, 25 bp, Homo sapien
ctgtaacagacaagtcccttcgaga

SEQ ID NO: 1610595 - DNA, 25 bp, Homo sapien
cgagacgctctgagtggcctgcaaa

SEQ ID NO: 1610596 - DNA, 25 bp, Homo sapien
ccttcgagacgctctgagtggcctg

SEQ ID NO: 1610597 - DNA, 25 bp, Homo sapien
gacaagtcccttcgagacgctctga

SEQ ID NO: 1610598 - DNA, 25 bp, Homo sapien
tcagagactcctggtggacacgggc

SEQ ID NO: 1610599 - DNA, 25 bp, Homo sapien
gatgccccaaggcactgtcagagac

SEQ ID NO: 1610600 - DNA, 25 bp, Homo sapien
ccaggatgccccaaggcactgtcag

SEQ ID NO: 1610601 - DNA, 25 bp, Homo sapien
ccccaaggcactgtcagagactcct

SEQ ID NO: 1610602 - DNA, 25 bp, Homo sapien
gtgagagcccggagtagtcaccaaa

SEQ ID NO: 1610603 - DNA, 25 bp, Homo sapien
gagagcccggagtagtcaccaaact

SEQ ID NO: 1610604 - DNA, 25 bp, Homo sapien
agtgagagcccggagtagtcaccaa

SEQ ID NO: 1610605 - DNA, 25 bp, Homo sapien
gagtgagagcccggagtagtcacca

SEQ ID NO: 1610606 - DNA, 25 bp, Homo sapien
gatgggctagggacacagcctgccc

SEQ ID NO: 1610607 - DNA, 25 bp, Homo sapien
gcggccaggatgggctagggacaca

SEQ ID NO: 1610608 - DNA, 25 bp, Homo sapien
ggccaggatgggctagggacacagc

SEQ ID NO: 1610609 - DNA, 25 bp, Homo sapien
ccaggatgggctagggacacagcct

SEQ ID NO: 1610610 - DNA, 25 bp, Homo sapien
aattctccccggatgaagaggcggc

SEQ ID NO: 1610611 - DNA, 25 bp, Homo sapien
gatggggtcttctcccaatatcaca

SEQ ID NO: 1610612 - DNA, 25 bp, Homo sapien
ttctgcttgtccaatctcatgccct

SEQ ID NO: 1610613 - DNA, 25 bp, Homo sapien
tatcccacctctaggtggactgtga

SEQ ID NO: 1610614 - DNA, 25 bp, Homo sapien
cagcagaggagctcctcggagagcc

SEQ ID NO: 1610615 - DNA, 25 bp, Homo sapien
tcacaaaaaccgtcaatctagggct

SEQ ID NO: 1610616 - DNA, 25 bp, Homo sapien
gctgcgtgggaagcaatcctagaaa

SEQ ID NO: 1610617 - DNA, 25 bp, Homo sapien
ccgtctgaactagggcctcagcagg

SEQ ID NO: 1610618 - DNA, 25 bp, Homo sapien
cctgatgccagtcccgagactgtcc

SEQ ID NO: 1610619 - DNA, 25 bp, Homo sapien
cgaccggcgtgcgctgctcagaagc

SEQ ID NO: 1610620 - DNA, 25 bp, Homo sapien
cagtcccgagactgtcccacgaaga

SEQ ID NO: 1610621 - DNA, 25 bp, Homo sapien
tcccacgaagatggcgaccggcgtg

SEQ ID NO: 1610622 - DNA, 25 bp, Homo sapien
cactgcctgaaactatgactgctgt

SEQ ID NO: 1610623 - DNA, 25 bp, Homo sapien
agtcatcccgggtaggtagcaggac

SEQ ID NO: 1610624 - DNA, 25 bp, Homo sapien
tggcaagaggtcactgcctgaaact

SEQ ID NO: 1610625 - DNA, 25 bp, Homo sapien
atagcaaagtcatcccgggtaggta

SEQ ID NO: 1610626 - DNA, 25 bp, Homo sapien
gaagcaaagtgttggctgatcgcca

SEQ ID NO: 1610627 - DNA, 25 bp, Homo sapien
caggacaggtaaagaaacgagtggc

SEQ ID NO: 1610628 - DNA, 25 bp, Homo sapien
gacagacccgtttccagtaaatgct

SEQ ID NO: 1610629 - DNA, 25 bp, Homo sapien
aaacttcgactgtggtggacaccca

SEQ ID NO: 1610630 - DNA, 25 bp, Homo sapien
ctcccagagtcgcagagttcatcct

SEQ ID NO: 1610631 - DNA, 25 bp, Homo sapien
tcccagagtcgcagagttcatcctc

SEQ ID NO: 1610632 - DNA, 25 bp, Homo sapien
ttgcctcccagagtcgcagagttca

SEQ ID NO: 1610633 - DNA, 25 bp, Homo sapien
gcctcccagagtcgcagagttcatc

SEQ ID NO: 1610634 - DNA, 25 bp, Homo sapien
gcaaaatagggatcaagtgagactc

SEQ ID NO: 1610635 - DNA, 25 bp, Homo sapien
tgagaatctgaacagagctgactcc

SEQ ID NO: 1610636 - DNA, 25 bp, Homo sapien
gcgccaggcctatatttacccgatg

SEQ ID NO: 1610637 - DNA, 25 bp, Homo sapien
gactccttaggcagtgaacatacgg

SEQ ID NO: 1610638 - DNA, 25 bp, Homo sapien
cggcaaatgagcctccagcctgtgc

SEQ ID NO: 1610639 - DNA, 25 bp, Homo sapien
tggcggcaaatgagcctccagcctg

SEQ ID NO: 1610640 - DNA, 25 bp, Homo sapien
gtgcttggaggcttcagcccacagt

SEQ ID NO: 1610641 - DNA, 25 bp, Homo sapien
gcttggaggcttcagcccacagtcc

SEQ ID NO: 1610642 - DNA, 25 bp, Homo sapien
ccagggagaggaactgggagctttt

SEQ ID NO: 1610643 - DNA, 25 bp, Homo sapien
gaggaactgggagcttttttcagaa

SEQ ID NO: 1610644 - DNA, 25 bp, Homo sapien
cagaaaaggaatgtttgttgtaagt

SEQ ID NO: 1610645 - DNA, 25 bp, Homo sapien
ctagagaccagggagaggaactggg

SEQ ID NO: 1610646 - DNA, 25 bp, Homo sapien
tagtcaaatctaccatggcagctgc

SEQ ID NO: 1610647 - DNA, 25 bp, Homo sapien
cctgaatccactcagaggtagtcaa

SEQ ID NO: 1610648 - DNA, 25 bp, Homo sapien
ctaaaagtcagggtcctgaatccac

SEQ ID NO: 1610649 - DNA, 25 bp, Homo sapien
cacactagaggcaaaagggctgcct

SEQ ID NO: 1610650 - DNA, 25 bp, Homo sapien
cctgagcggaagtcaccagctgcgt

SEQ ID NO: 1610651 - DNA, 25 bp, Homo sapien
tgagcggaagtcaccagctgcgtca

SEQ ID NO: 1610652 - DNA, 25 bp, Homo sapien
ctgagcggaagtcaccagctgcgtc

SEQ ID NO: 1610653 - DNA, 25 bp, Homo sapien
gagcggaagtcaccagctgcgtcat

SEQ ID NO: 1610654 - DNA, 25 bp, Homo sapien
catctggtccgaagcggtcaaaccc

SEQ ID NO: 1610655 - DNA, 25 bp, Homo sapien
gaactgcttccgtttcctgcccgtg

SEQ ID NO: 1610656 - DNA, 25 bp, Homo sapien
tcaacccgggccagtttggtgtctg

SEQ ID NO: 1610657 - DNA, 25 bp, Homo sapien
ggctcctcgtaaagttggaactgct

SEQ ID NO: 1610658 - DNA, 25 bp, Homo sapien
tcttctggttgacataaatgctaag

SEQ ID NO: 1610659 - DNA, 25 bp, Homo sapien
gtcgaactgcgcacttaaaaacatt

SEQ ID NO: 1610660 - DNA, 25 bp, Homo sapien
aatccagagaccagtggtggttgtc

SEQ ID NO: 1610661 - DNA, 25 bp, Homo sapien
acatttaagtgaatgttgagatggg

SEQ ID NO: 1610662 - DNA, 25 bp, Homo sapien
cgatcccgatcccgcatccgaggct

SEQ ID NO: 1610663 - DNA, 25 bp, Homo sapien
gatcccgcatccgaggctgcgagcg

SEQ ID NO: 1610664 - DNA, 25 bp, Homo sapien
tcccgatcccgcatccgaggctgcg

SEQ ID NO: 1610665 - DNA, 25 bp, Homo sapien
ccgatcccgcatccgaggctgcgag

SEQ ID NO: 1610666 - DNA, 25 bp, Homo sapien
ggtgctgtcatagccgcccgccccc

SEQ ID NO: 1610667 - DNA, 25 bp, Homo sapien
cctgcatgcccatcacgccgtagtc

SEQ ID NO: 1610668 - DNA, 25 bp, Homo sapien
tgctgtcatagccgcccgccccctg

SEQ ID NO: 1610669 - DNA, 25 bp, Homo sapien
gcatgcccatcacgccgtagtcggg

SEQ ID NO: 1610670 - DNA, 25 bp, Homo sapien
gaagagggacggaggtggccggctg

SEQ ID NO: 1610671 - DNA, 25 bp, Homo sapien
aagagggacggaggtggccggctgg

SEQ ID NO: 1610672 - DNA, 25 bp, Homo sapien
agaagagggacggaggtggccggct

SEQ ID NO: 1610673 - DNA, 25 bp, Homo sapien
tcggaccccaggtcgaactcatagt

SEQ ID NO: 1610674 - DNA, 25 bp, Homo sapien
tgggtctcggcattcactgtactgc

SEQ ID NO: 1610675 - DNA, 25 bp, Homo sapien
tagttcagctcgttccagggcgtgg

SEQ ID NO: 1610676 - DNA, 25 bp, Homo sapien
tcataggactcgaacggctggaagc

SEQ ID NO: 1610677 - DNA, 25 bp, Homo sapien
aagcacagcccatcaggggcggtca

SEQ ID NO: 1610678 - DNA, 25 bp, Homo sapien
ctgcaacagaagcacagcccatcag

SEQ ID NO: 1610679 - DNA, 25 bp, Homo sapien
tgcaacagaagcacagcccatcagg

SEQ ID NO: 1610680 - DNA, 25 bp, Homo sapien
cagaagcacagcccatcaggggcgg

SEQ ID NO: 1610681 - DNA, 25 bp, Homo sapien
gacactggtgttctgggcgccatag

SEQ ID NO: 1610682 - DNA, 25 bp, Homo sapien
aattgtcggtgcatggctctgggcc

SEQ ID NO: 1610683 - DNA, 25 bp, Homo sapien
tgtaggttgcgcctgtggtgacact

SEQ ID NO: 1610684 - DNA, 25 bp, Homo sapien
caggccgccatcattggccttggcg

SEQ ID NO: 1610685 - DNA, 25 bp, Homo sapien
gagccaagtcagacttcagcagcca

SEQ ID NO: 1610686 - DNA, 25 bp, Homo sapien
gggggaggagccaagtcagacttca

SEQ ID NO: 1610687 - DNA, 25 bp, Homo sapien
agtcagacttcagcagccacgaggc

SEQ ID NO: 1610688 - DNA, 25 bp, Homo sapien
gaggagccaagtcagacttcagcag

SEQ ID NO: 1610689 - DNA, 25 bp, Homo sapien
tggtggacacaaccggggaggggca

SEQ ID NO: 1610690 - DNA, 25 bp, Homo sapien
attcaaagccgggtgactgagagcc

SEQ ID NO: 1610691 - DNA, 25 bp, Homo sapien
aaagcacggtcgcagtcctccccat

SEQ ID NO: 1610692 - DNA, 25 bp, Homo sapien
cagcagttccggctgctgacaggcc

SEQ ID NO: 1610693 - DNA, 25 bp, Homo sapien
acaaaggaccgctgctcccaaagca

SEQ ID NO: 1610694 - DNA, 25 bp, Homo sapien
cttgccagctggccacaccagttcc

SEQ ID NO: 1610695 - DNA, 25 bp, Homo sapien
ttgccagctggccacaccagttcca

SEQ ID NO: 1610696 - DNA, 25 bp, Homo sapien
tgccagctggccacaccagttccat

SEQ ID NO: 1610697 - DNA, 25 bp, Homo sapien
ggcaggtccagcactccacgccccg

SEQ ID NO: 1610698 - DNA, 25 bp, Homo sapien
aggtccagcactccacgccccgtag

SEQ ID NO: 1610699 - DNA, 25 bp, Homo sapien
ggtccagcactccacgccccgtagc

SEQ ID NO: 1610700 - DNA, 25 bp, Homo sapien
gcaggtccagcactccacgccccgt

SEQ ID NO: 1610701 - DNA, 25 bp, Homo sapien
cattcagagacaagggagctaggct

SEQ ID NO: 1610702 - DNA, 25 bp, Homo sapien
taagtgcctagtgcgtgccgataca

SEQ ID NO: 1610703 - DNA, 25 bp, Homo sapien
gacttgacccagtcatactgctgag

SEQ ID NO: 1610704 - DNA, 25 bp, Homo sapien
gagctaggctcatgggttacgagac

SEQ ID NO: 1610705 - DNA, 25 bp, Homo sapien
gctgtagctccgcccccctagcgcc

SEQ ID NO: 1610706 - DNA, 25 bp, Homo sapien
gtttactaggcgaccacagcacgca

SEQ ID NO: 1610707 - DNA, 25 bp, Homo sapien
agcagccccgtttactaggcgacca

SEQ ID NO: 1610708 - DNA, 25 bp, Homo sapien
ggcgaccacagcacgcatgcgttca

SEQ ID NO: 1610709 - DNA, 25 bp, Homo sapien
agccccgtttactaggcgaccacag

SEQ ID NO: 1610710 - DNA, 25 bp, Homo sapien
taggtttggtttccagcttcggcca

SEQ ID NO: 1610711 - DNA, 25 bp, Homo sapien
ggtttccagcttcggccacgcgggc

SEQ ID NO: 1610712 - DNA, 25 bp, Homo sapien
gtttggtttccagcttcggccacgc

SEQ ID NO: 1610713 - DNA, 25 bp, Homo sapien
ttggtttccagcttcggccacgcgg

SEQ ID NO: 1610714 - DNA, 25 bp, Homo sapien
cgtcctccacgtcgaggcccgggat

SEQ ID NO: 1610715 - DNA, 25 bp, Homo sapien
cgggatgccgcggatctggcgttgc

SEQ ID NO: 1610716 - DNA, 25 bp, Homo sapien
gaggcccgggatgccgcggatctgg

SEQ ID NO: 1610717 - DNA, 25 bp, Homo sapien
gcggatctggcgttgcagcgcccct

SEQ ID NO: 1610718 - DNA, 25 bp, Homo sapien
gcgacacggccccgggggctggctc

SEQ ID NO: 1610719 - DNA, 25 bp, Homo sapien
acacggccccgggggctggctctgg

SEQ ID NO: 1610720 - DNA, 25 bp, Homo sapien
cggcggtggcggcgacacggccccg

SEQ ID NO: 1610721 - DNA, 25 bp, Homo sapien
gcggcggtggcggcgacacggcccc

SEQ ID NO: 1610722 - DNA, 25 bp, Homo sapien
tcctcctcggggctgtcggtgaaag

SEQ ID NO: 1610723 - DNA, 25 bp, Homo sapien
ggctgtcggtgaaagggttctcgcc

SEQ ID NO: 1610724 - DNA, 25 bp, Homo sapien
gccctccgagatccctgccgcttcg

SEQ ID NO: 1610725 - DNA, 25 bp, Homo sapien
aggctgcgccggcacgccctctgcg

SEQ ID NO: 1610726 - DNA, 25 bp, Homo sapien
ggacagggcaggcccggaccagtgc

SEQ ID NO: 1610727 - DNA, 25 bp, Homo sapien
acagggcaggcccggaccagtgcct

SEQ ID NO: 1610728 - DNA, 25 bp, Homo sapien
gcacaggcggggactaagctgggga

SEQ ID NO: 1610729 - DNA, 25 bp, Homo sapien
gggaggggcgcggacactgaaggga

SEQ ID NO: 1610730 - DNA, 25 bp, Homo sapien
gttgagaatactgcgggccaccatg

SEQ ID NO: 1610731 - DNA, 25 bp, Homo sapien
tgttgttgagaatactgcgggccac

SEQ ID NO: 1610732 - DNA, 25 bp, Homo sapien
ttgttgagaatactgcgggccacca

SEQ ID NO: 1610733 - DNA, 25 bp, Homo sapien
aatactgcgggccaccatgagggag

SEQ ID NO: 1610734 - DNA, 25 bp, Homo sapien
tctgagtgccctacaagttgctgcc

SEQ ID NO: 1610735 - DNA, 25 bp, Homo sapien
tcatgcaagggtgaagagagtcttc

SEQ ID NO: 1610736 - DNA, 25 bp, Homo sapien
ccaaaggtgggtgcaacctgtaaca

SEQ ID NO: 1610737 - DNA, 25 bp, Homo sapien
cctgtaacaaggtgccaactaggct

SEQ ID NO: 1610738 - DNA, 25 bp, Homo sapien
taggatactactatagaccgttccc

SEQ ID NO: 1610739 - DNA, 25 bp, Homo sapien
taaattctcccaagtgaggcacatt

SEQ ID NO: 1610740 - DNA, 25 bp, Homo sapien
cacctgtgttaaaacaatgacctgg

SEQ ID NO: 1610741 - DNA, 25 bp, Homo sapien
tgatagtgcccaattaactgcagaa

SEQ ID NO: 1610742 - DNA, 25 bp, Homo sapien
tggaacacccgcccacagtttataa

SEQ ID NO: 1610743 - DNA, 25 bp, Homo sapien
caccggcgagtgagtgctctggtaa

SEQ ID NO: 1610744 - DNA, 25 bp, Homo sapien
tgagtgctctggtaagcacactgga

SEQ ID NO: 1610745 - DNA, 25 bp, Homo sapien
ctgcccaccggcgagtgagtgctct

SEQ ID NO: 1610746 - DNA, 25 bp, Homo sapien
tctagaatttgatacagattgagta

SEQ ID NO: 1610747 - DNA, 25 bp, Homo sapien
tatttgtgactcaactacaaggcgc

SEQ ID NO: 1610748 - DNA, 25 bp, Homo sapien
tgcactgccattgtgtgatcacggc

SEQ ID NO: 1610749 - DNA, 25 bp, Homo sapien
acaaggcgctttccccagatcctgt

SEQ ID NO: 1610750 - DNA, 25 bp, Homo sapien
gatcttcccatgctagcctcttgag

SEQ ID NO: 1610751 - DNA, 25 bp, Homo sapien
gcattataccaataatattgctaga

SEQ ID NO: 1610752 - DNA, 25 bp, Homo sapien
ttgcattataccaataatattgcta

SEQ ID NO: 1610753 - DNA, 25 bp, Homo sapien
tgcattataccaataatattgctag

SEQ ID NO: 1610754 - DNA, 25 bp, Homo sapien
accgcgcccggcaactgttgctaga

SEQ ID NO: 1610755 - DNA, 25 bp, Homo sapien
actactagattgatagttactaata

SEQ ID NO: 1610756 - DNA, 25 bp, Homo sapien
cgcgcccggcctttcatgccattct

SEQ ID NO: 1610757 - DNA, 25 bp, Homo sapien
taatgtatcatacatagggatcact

SEQ ID NO: 1610758 - DNA, 25 bp, Homo sapien
ggaacactccctagtgaaactgatg

SEQ ID NO: 1610759 - DNA, 25 bp, Homo sapien
gaggacagactctagcatagcagtc

SEQ ID NO: 1610760 - DNA, 25 bp, Homo sapien
catagcagtctgaggcgttccctgg

SEQ ID NO: 1610761 - DNA, 25 bp, Homo sapien
tgttcctaaggacatacagccctat

SEQ ID NO: 1610762 - DNA, 25 bp, Homo sapien
gagttaaacactgatagctttgtcc

SEQ ID NO: 1610763 - DNA, 25 bp, Homo sapien
ggacaaggaccagtgaaatagctaa

SEQ ID NO: 1610764 - DNA, 25 bp, Homo sapien
gaaggaccggtagatttgacagtga

SEQ ID NO: 1610765 - DNA, 25 bp, Homo sapien
tagctaacccataggctaactaggt

SEQ ID NO: 1610766 - DNA, 25 bp, Homo sapien
caatcagccagcaattggtagagtt

SEQ ID NO: 1610767 - DNA, 25 bp, Homo sapien
gaaaaagagcgagcccatggcttcc

SEQ ID NO: 1610768 - DNA, 25 bp, Homo sapien
ctgagtatggtctgggaaaaagagc

SEQ ID NO: 1610769 - DNA, 25 bp, Homo sapien
ggtagagtttaacagctgagtatgg

SEQ ID NO: 1610770 - DNA, 25 bp, Homo sapien
tgaatataccctataacaagtggag

SEQ ID NO: 1610771 - DNA, 25 bp, Homo sapien
ggaactctgtagacagacacaaatt

SEQ ID NO: 1610772 - DNA, 25 bp, Homo sapien
gactatctgaatataccctataaca

SEQ ID NO: 1610773 - DNA, 25 bp, Homo sapien
taccctataacaagtggagactgaa

SEQ ID NO: 1610774 - DNA, 25 bp, Homo sapien
ttgctatcacctctcccgtattttc

SEQ ID NO: 1610775 - DNA, 25 bp, Homo sapien
ctatcacctctcccgtattttccaa

SEQ ID NO: 1610776 - DNA, 25 bp, Homo sapien
tttgctatcacctctcccgtatttt

SEQ ID NO: 1610777 - DNA, 25 bp, Homo sapien
gctatcacctctcccgtattttcca

SEQ ID NO: 1610778 - DNA, 25 bp, Homo sapien
tctctgcaaccagagagacccctga

SEQ ID NO: 1610779 - DNA, 25 bp, Homo sapien
gaattgtgatgagcatggaagaaga

SEQ ID NO: 1610780 - DNA, 25 bp, Homo sapien
tgtccaccgttcagaatcatcacac

SEQ ID NO: 1610781 - DNA, 25 bp, Homo sapien
tgaccctgtccaccgttcagaatca

SEQ ID NO: 1610782 - DNA, 25 bp, Homo sapien
ctccagggtgaagacagccaagccc

SEQ ID NO: 1610783 - DNA, 25 bp, Homo sapien
cttggatgcgaacatctgttcataa

SEQ ID NO: 1610784 - DNA, 25 bp, Homo sapien
cctccagggtgaagacagccaagcc

SEQ ID NO: 1610785 - DNA, 25 bp, Homo sapien
tgaagaggtcgcaggctgcacaatg

SEQ ID NO: 1610786 - DNA, 25 bp, Homo sapien
gcggttccggttgtgatccatggtc

SEQ ID NO: 1610787 - DNA, 25 bp, Homo sapien
ttcacaaaatgctccatggcaattt

SEQ ID NO: 1610788 - DNA, 25 bp, Homo sapien
gatgcttctggatgatcccaaactg

SEQ ID NO: 1610789 - DNA, 25 bp, Homo sapien
tctgtagatttggtggatgaggcca

SEQ ID NO: 1610790 - DNA, 25 bp, Homo sapien
gatgaggccatcaaggtcctccacg

SEQ ID NO: 1610791 - DNA, 25 bp, Homo sapien
ctccacggtttttcggagctcctct

SEQ ID NO: 1610792 - DNA, 25 bp, Homo sapien
tcttggtcttgttagtgacgtactc

SEQ ID NO: 1610793 - DNA, 25 bp, Homo sapien
ggagcttggtgcctacgtacttaaa

SEQ ID NO: 1610794 - DNA, 25 bp, Homo sapien
gaaggtccggtatttgcacagagaa

SEQ ID NO: 1610795 - DNA, 25 bp, Homo sapien
catctcgtcctcatagaaggtccgg

SEQ ID NO: 1610796 - DNA, 25 bp, Homo sapien
aacttgctgtcaagatggctggcca

SEQ ID NO: 1610797 - DNA, 25 bp, Homo sapien
tgcaagtgtcccaggggatagtgct

SEQ ID NO: 1610798 - DNA, 25 bp, Homo sapien
ctgcaagtgtcccaggggatagtgc

SEQ ID NO: 1610799 - DNA, 25 bp, Homo sapien
tgtcccaggggatagtgctgccgcc

SEQ ID NO: 1610800 - DNA, 25 bp, Homo sapien
ccaggggatagtgctgccgcctcac

SEQ ID NO: 1610801 - DNA, 25 bp, Homo sapien
acgggcctctgaagtacggtcccag

SEQ ID NO: 1610802 - DNA, 25 bp, Homo sapien
gggcctctgaagtacggtcccagca

SEQ ID NO: 1610803 - DNA, 25 bp, Homo sapien
tcacgggcctctgaagtacggtccc

SEQ ID NO: 1610804 - DNA, 25 bp, Homo sapien
gcctctgaagtacggtcccagcaga

SEQ ID NO: 1610805 - DNA, 25 bp, Homo sapien
gtagaaagggccagaaagtctgcag

SEQ ID NO: 1610806 - DNA, 25 bp, Homo sapien
ggagtagaaagggccagaaagtctg

SEQ ID NO: 1610807 - DNA, 25 bp, Homo sapien
ctgggaccagtggggtcgggagtag

SEQ ID NO: 1610808 - DNA, 25 bp, Homo sapien
tgggaccagtggggtcgggagtaga

SEQ ID NO: 1610809 - DNA, 25 bp, Homo sapien
tgctgcaacaggcaacgagtcgctg

SEQ ID NO: 1610810 - DNA, 25 bp, Homo sapien
accggaaggaaggatgccctggcgt

SEQ ID NO: 1610811 - DNA, 25 bp, Homo sapien
aggagcgtgtgcacttggcccaggt

SEQ ID NO: 1610812 - DNA, 25 bp, Homo sapien
gaaagttgctggagggcctcgctac

SEQ ID NO: 1610813 - DNA, 25 bp, Homo sapien
gaggcagggcccgaaaaggtgctgc

SEQ ID NO: 1610814 - DNA, 25 bp, Homo sapien
tgcagagtggagtacgcagtcccga

SEQ ID NO: 1610815 - DNA, 25 bp, Homo sapien
ctgaggtgcagagtggagtacgcag

SEQ ID NO: 1610816 - DNA, 25 bp, Homo sapien
agggcccgaaaaggtgctgcatctt

SEQ ID NO: 1610817 - DNA, 25 bp, Homo sapien
aagagaccagtctgagctggaagga

SEQ ID NO: 1610818 - DNA, 25 bp, Homo sapien
tccaagaagagaccagtctgagctg

SEQ ID NO: 1610819 - DNA, 25 bp, Homo sapien
caagaagagaccagtctgagctgga

SEQ ID NO: 1610820 - DNA, 25 bp, Homo sapien
cgcccgctcggcctgccagagggca

SEQ ID NO: 1610821 - DNA, 25 bp, Homo sapien
cctggtgtccacagtagaagcccgg

SEQ ID NO: 1610822 - DNA, 25 bp, Homo sapien
gtgtccacagtagaagcccggggtc

SEQ ID NO: 1610823 - DNA, 25 bp, Homo sapien
ctggtgtccacagtagaagcccggg

SEQ ID NO: 1610824 - DNA, 25 bp, Homo sapien
tccacagtagaagcccggggtctgg

SEQ ID NO: 1610825 - DNA, 25 bp, Homo sapien
gccgtggcaaggggcggaggaggcc

SEQ ID NO: 1610826 - DNA, 25 bp, Homo sapien
ctgggccggagcaggccgccgtggc

SEQ ID NO: 1610827 - DNA, 25 bp, Homo sapien
ggccagccgccaccgagacctcggg

SEQ ID NO: 1610828 - DNA, 25 bp, Homo sapien
aggccagccgccaccgagacctcgg

SEQ ID NO: 1610829 - DNA, 25 bp, Homo sapien
tctgccggacgtccttatctgggcc

SEQ ID NO: 1610830 - DNA, 25 bp, Homo sapien
ctgggccacggggtcagctttgtct

SEQ ID NO: 1610831 - DNA, 25 bp, Homo sapien
ccttatctgggccacggggtcagct

SEQ ID NO: 1610832 - DNA, 25 bp, Homo sapien
ctctgccggacgtccttatctgggc

SEQ ID NO: 1610833 - DNA, 25 bp, Homo sapien
gaggaaggtccagcaagagcaagag

SEQ ID NO: 1610834 - DNA, 25 bp, Homo sapien
tgaggaaggtccagcaagagcaaga

SEQ ID NO: 1610835 - DNA, 25 bp, Homo sapien
ctgaggaaggtccagcaagagcaag

SEQ ID NO: 1610836 - DNA, 25 bp, Homo sapien
aggaaggtccagcaagagcaagagt

SEQ ID NO: 1610837 - DNA, 25 bp, Homo sapien
ggaggcaagcgccagtgcgggagcc

SEQ ID NO: 1610838 - DNA, 25 bp, Homo sapien
aggaggcaagcgccagtgcgggagc

SEQ ID NO: 1610839 - DNA, 25 bp, Homo sapien
ggcgccttggaccttgagtctctga

SEQ ID NO: 1610840 - DNA, 25 bp, Homo sapien
gacagacccgaccaaggggcgtgaa

SEQ ID NO: 1610841 - DNA, 25 bp, Homo sapien
gtgaagggctcagccgcagacaggc

SEQ ID NO: 1610842 - DNA, 25 bp, Homo sapien
cacggcggtggcctcttggcagcta

SEQ ID NO: 1610843 - DNA, 25 bp, Homo sapien
gttcgtgcgccgagtgacctagcgc

SEQ ID NO: 1610844 - DNA, 25 bp, Homo sapien
agcttctgagcaacggtgccgagcg

SEQ ID NO: 1610845 - DNA, 25 bp, Homo sapien
gtgacctagcgccagagcttctgag

SEQ ID NO: 1610846 - DNA, 25 bp, Homo sapien
ggtgtcaggtctcggcccacagacg

SEQ ID NO: 1610847 - DNA, 25 bp, Homo sapien
agcagggtccatgcacggccgagca

SEQ ID NO: 1610848 - DNA, 25 bp, Homo sapien
ggaagcagggtccatgcacggccga

SEQ ID NO: 1610849 - DNA, 25 bp, Homo sapien
ggaggccagagggcggcgagctggc

SEQ ID NO: 1610850 - DNA, 25 bp, Homo sapien
tgcacggccgagcaggtggcggctc

SEQ ID NO: 1610851 - DNA, 25 bp, Homo sapien
ttgcctgcctgcaacttgcgcttgg

SEQ ID NO: 1610852 - DNA, 25 bp, Homo sapien
gtctcgctgccgctttttctgcttg

SEQ ID NO: 1610853 - DNA, 25 bp, Homo sapien
accatgcggtctcgctgccgctttt

SEQ ID NO: 1610854 - DNA, 25 bp, Homo sapien
tgcaacttgcgcttggtctggccat

SEQ ID NO: 1610855 - DNA, 25 bp, Homo sapien
catcgagaatagctgtccaagcaag

SEQ ID NO: 1610856 - DNA, 25 bp, Homo sapien
ccaatttggctctgccaggacaggg

SEQ ID NO: 1610857 - DNA, 25 bp, Homo sapien
ggcctctggctgaatcacccactgt

SEQ ID NO: 1610858 - DNA, 25 bp, Homo sapien
tgtccactccagagggtccatcgag

SEQ ID NO: 1610859 - DNA, 25 bp, Homo sapien
accgcggcaacagtgggctgacgct

SEQ ID NO: 1610860 - DNA, 25 bp, Homo sapien
gctgttaggtacctgctggcgctca

SEQ ID NO: 1610861 - DNA, 25 bp, Homo sapien
tgctggcgctcatcactcaggtggg

SEQ ID NO: 1610862 - DNA, 25 bp, Homo sapien
aacagtgggctgacgctggatttgc

SEQ ID NO: 1610863 - DNA, 25 bp, Homo sapien
tgaggacttggaactgcgcgttact

SEQ ID NO: 1610864 - DNA, 25 bp, Homo sapien
aaaactgcaccgagggtcccagatc

SEQ ID NO: 1610865 - DNA, 25 bp, Homo sapien
agggtcccagatcggacaccagcca

SEQ ID NO: 1610866 - DNA, 25 bp, Homo sapien
aactgcgcgttactgagggaccgag

SEQ ID NO: 1610867 - DNA, 25 bp, Homo sapien
aaaaccagtgtgctaggcaggggtc

SEQ ID NO: 1610868 - DNA, 25 bp, Homo sapien
aggcaaaaccagtgtgctaggcagg

SEQ ID NO: 1610869 - DNA, 25 bp, Homo sapien
caaaaccagtgtgctaggcaggggt

SEQ ID NO: 1610870 - DNA, 25 bp, Homo sapien
tgaaggcaaaaccagtgtgctaggc

SEQ ID NO: 1610871 - DNA, 25 bp, Homo sapien
aggtccccaactggccgcatgtctg

SEQ ID NO: 1610872 - DNA, 25 bp, Homo sapien
gcggcgaaaagaaagccccctgcca

SEQ ID NO: 1610873 - DNA, 25 bp, Homo sapien
ggaagagccgccctagcaccaggca

SEQ ID NO: 1610874 - DNA, 25 bp, Homo sapien
ccctgccagcacacactcgggccca

SEQ ID NO: 1610875 - DNA, 25 bp, Homo sapien
cttctctggatcctctttgccttct

SEQ ID NO: 1610876 - DNA, 25 bp, Homo sapien
ttctctcccatcctcttttccctcc

SEQ ID NO: 1610877 - DNA, 25 bp, Homo sapien
ccttctctggatcctctttgccttc

SEQ ID NO: 1610878 - DNA, 25 bp, Homo sapien
cttttccctcctcatcctctccgtc

SEQ ID NO: 1610879 - DNA, 25 bp, Homo sapien
ctggtcaccatgcacgcagagctga

SEQ ID NO: 1610880 - DNA, 25 bp, Homo sapien
caatggctttaaatgacaaggcccg

SEQ ID NO: 1610881 - DNA, 25 bp, Homo sapien
gagagcaccactctttaggccagct

SEQ ID NO: 1610882 - DNA, 25 bp, Homo sapien
tgcctccagctaggcagcctgtgct

SEQ ID NO: 1610883 - DNA, 25 bp, Homo sapien
gtggcttccccctcggtgccctcat

SEQ ID NO: 1610884 - DNA, 25 bp, Homo sapien
ttctccacagcctcggtgccttcaa

SEQ ID NO: 1610885 - DNA, 25 bp, Homo sapien
cacagcctcggtgccttcaaggccc

SEQ ID NO: 1610886 - DNA, 25 bp, Homo sapien
tcggtgccttcaaggccctctgtgg

SEQ ID NO: 1610887 - DNA, 25 bp, Homo sapien
cgagcagtccgtgcgggtggctttg

SEQ ID NO: 1610888 - DNA, 25 bp, Homo sapien
aggactgccgccctgctttctcttc

SEQ ID NO: 1610889 - DNA, 25 bp, Homo sapien
tgagtcgctgttgtccgagcagtcc

SEQ ID NO: 1610890 - DNA, 25 bp, Homo sapien
ctggctcatcaggactgccgccctg

SEQ ID NO: 1610891 - DNA, 25 bp, Homo sapien
ccccagtgggaactaagcttcccag

SEQ ID NO: 1610892 - DNA, 25 bp, Homo sapien
ggaagccgtgtcagggtgcatggca

SEQ ID NO: 1610893 - DNA, 25 bp, Homo sapien
ggtgcatggcacccggcccttagct

SEQ ID NO: 1610894 - DNA, 25 bp, Homo sapien
gccccagtgggaactaagcttccca

SEQ ID NO: 1610895 - DNA, 25 bp, Homo sapien
tagtcatagcctgaccggtacaggt

SEQ ID NO: 1610896 - DNA, 25 bp, Homo sapien
tcataggccatttccatctcagggt

SEQ ID NO: 1610897 - DNA, 25 bp, Homo sapien
taggcatcgtattggccctcatagg

SEQ ID NO: 1610898 - DNA, 25 bp, Homo sapien
gaccgaaggtgtcgttgccacgcat

SEQ ID NO: 1610899 - DNA, 25 bp, Homo sapien
gaggcatggggtgagcatcaggtgg

SEQ ID NO: 1610900 - DNA, 25 bp, Homo sapien
tgcagaggcatggggtgagcatcag

SEQ ID NO: 1610901 - DNA, 25 bp, Homo sapien
cagaggcatggggtgagcatcaggt

SEQ ID NO: 1610902 - DNA, 25 bp, Homo sapien
ctgcagaggcatggggtgagcatca

SEQ ID NO: 1610903 - DNA, 25 bp, Homo sapien
cccttgcacactcttccctaaacct

SEQ ID NO: 1610904 - DNA, 25 bp, Homo sapien
ttgcacactcttccctaaacctggg

SEQ ID NO: 1610905 - DNA, 25 bp, Homo sapien
ctgcttaccccgatcccaggctcca

SEQ ID NO: 1610906 - DNA, 25 bp, Homo sapien
tgccgctgctctgcttaccccgatc

SEQ ID NO: 1610907 - DNA, 25 bp, Homo sapien
ggcaccatatctaagcgctggttaa

SEQ ID NO: 1610908 - DNA, 25 bp, Homo sapien
tttctccacctgagccgtacacgcc

SEQ ID NO: 1610909 - DNA, 25 bp, Homo sapien
catcatgtctgtctccaaatgcggc

SEQ ID NO: 1610910 - DNA, 25 bp, Homo sapien
tacacgcctccttgcatcatgtctg

SEQ ID NO: 1610911 - DNA, 25 bp, Homo sapien
tgtgtcagagctaggcatttcccaa

SEQ ID NO: 1610912 - DNA, 25 bp, Homo sapien
gataaaacggaatcggcactggcgc

SEQ ID NO: 1610913 - DNA, 25 bp, Homo sapien
catttcccaagagtgtgaagtggcc

SEQ ID NO: 1610914 - DNA, 25 bp, Homo sapien
tggcgctacccgaggcactagtgtt

SEQ ID NO: 1610915 - DNA, 25 bp, Homo sapien
ctggccatagccatagccatagcca

SEQ ID NO: 1610916 - DNA, 25 bp, Homo sapien
agccatagccatagccatagccctc

SEQ ID NO: 1610917 - DNA, 25 bp, Homo sapien
ggccatagccatagccatagccata

SEQ ID NO: 1610918 - DNA, 25 bp, Homo sapien
tagccatagccatagccctcgtagc

SEQ ID NO: 1610919 - DNA, 25 bp, Homo sapien
agatgggccctggtcattctgatga

SEQ ID NO: 1610920 - DNA, 25 bp, Homo sapien
gagacaaacacagatacaagggtat

SEQ ID NO: 1610921 - DNA, 25 bp, Homo sapien
aggagtaggtaaccccagaaacatg

SEQ ID NO: 1610922 - DNA, 25 bp, Homo sapien
aggacaaccccaagggacaggacag

SEQ ID NO: 1610923 - DNA, 25 bp, Homo sapien
ctctatttgtcccagagttccaagt

SEQ ID NO: 1610924 - DNA, 25 bp, Homo sapien
tacttggggagcttacttaagtctc

SEQ ID NO: 1610925 - DNA, 25 bp, Homo sapien
tcctgggactagctgctgttacttg

SEQ ID NO: 1610926 - DNA, 25 bp, Homo sapien
tttcctgggactagctgctgttact

SEQ ID NO: 1610927 - DNA, 25 bp, Homo sapien
ctgggactagctgctgttacttggg

SEQ ID NO: 1610928 - DNA, 25 bp, Homo sapien
tatccgagtatgtcgactgcaaagt

SEQ ID NO: 1610929 - DNA, 25 bp, Homo sapien
gctggtatccgagtatgtcgactgc

SEQ ID NO: 1610930 - DNA, 25 bp, Homo sapien
gctgagcgctggtatccgagtatgt

SEQ ID NO: 1610931 - DNA, 25 bp, Homo sapien
gagtatgtcgactgcaaagtggttt

SEQ ID NO: 1610932 - DNA, 25 bp, Homo sapien
cacaagatacagtcagcaagctgct

SEQ ID NO: 1610933 - DNA, 25 bp, Homo sapien
aatatctgtgtctgttcaggcgaga

SEQ ID NO: 1610934 - DNA, 25 bp, Homo sapien
tatctgtgtctgttcaggcgagagg

SEQ ID NO: 1610935 - DNA, 25 bp, Homo sapien
aaaatatctgtgtctgttcaggcga

SEQ ID NO: 1610936 - DNA, 25 bp, Homo sapien
tgctctgaacatccgacgctgcgat

SEQ ID NO: 1610937 - DNA, 25 bp, Homo sapien
gcgggcaacacaacatccgacgacg

SEQ ID NO: 1610938 - DNA, 25 bp, Homo sapien
ggtggcgggcaacacaacatccgac

SEQ ID NO: 1610939 - DNA, 25 bp, Homo sapien
ctgcgatagctgctgctaaccacag

SEQ ID NO: 1610940 - DNA, 25 bp, Homo sapien
gatctgacggataagcactctggct

SEQ ID NO: 1610941 - DNA, 25 bp, Homo sapien
gaacttgctgccatacggaacaaag

SEQ ID NO: 1610942 - DNA, 25 bp, Homo sapien
ctgtcttccaaaccaaggcagggcc

SEQ ID NO: 1610943 - DNA, 25 bp, Homo sapien
caagaactggaggtgactcttccaa

SEQ ID NO: 1610944 - DNA, 25 bp, Homo sapien
cttggcggccaactggaaaacccag

SEQ ID NO: 1610945 - DNA, 25 bp, Homo sapien
aacgatgagctgaaaaaccacatgc

SEQ ID NO: 1610946 - DNA, 25 bp, Homo sapien
gaaccctggttcatctgctcactgg

SEQ ID NO: 1610947 - DNA, 25 bp, Homo sapien
taacatcgcaaaggagccagtggct

SEQ ID NO: 1610948 - DNA, 25 bp, Homo sapien
gatccacgttccttattctctacac

SEQ ID NO: 1610949 - DNA, 25 bp, Homo sapien
gaaaggtctagggagctatacatag

SEQ ID NO: 1610950 - DNA, 25 bp, Homo sapien
tctaatttacatacttctaggtaca

SEQ ID NO: 1610951 - DNA, 25 bp, Homo sapien
gtacatcgataaccaaaatgtggcc

SEQ ID NO: 1610952 - DNA, 25 bp, Homo sapien
gcttgctcctttggaaacggaaaga

SEQ ID NO: 1610953 - DNA, 25 bp, Homo sapien
tttggcttgctcctttggaaacgga

SEQ ID NO: 1610954 - DNA, 25 bp, Homo sapien
tgaccagaccggctgccatcagaga

SEQ ID NO: 1610955 - DNA, 25 bp, Homo sapien
tgtgaccagaccggctgccatcaga

SEQ ID NO: 1610956 - DNA, 25 bp, Homo sapien
tgtaagtgccgcacccactcttcct

SEQ ID NO: 1610957 - DNA, 25 bp, Homo sapien
atctccaggatgtgccgctgtaagt

SEQ ID NO: 1610958 - DNA, 25 bp, Homo sapien
gggtccgctttggagaagttcatct

SEQ ID NO: 1610959 - DNA, 25 bp, Homo sapien
gcacccactcttcctggatggagag

SEQ ID NO: 1610960 - DNA, 25 bp, Homo sapien
tgcatgggggaacagagagagggag

SEQ ID NO: 1610961 - DNA, 25 bp, Homo sapien
catgggggaacagagagagggagtg

SEQ ID NO: 1610962 - DNA, 25 bp, Homo sapien
ctgcatgggggaacagagagaggga

SEQ ID NO: 1610963 - DNA, 25 bp, Homo sapien
gggggaacagagagagggagtggcc

SEQ ID NO: 1610964 - DNA, 25 bp, Homo sapien
cactggtgccaggtaagggctactg

SEQ ID NO: 1610965 - DNA, 25 bp, Homo sapien
tggcagatacatagaatctgagaca

SEQ ID NO: 1610966 - DNA, 25 bp, Homo sapien
tgccatctggcagatacatagaatc

SEQ ID NO: 1610967 - DNA, 25 bp, Homo sapien
gaagtcaggcgtttcccatggacag

SEQ ID NO: 1610968 - DNA, 25 bp, Homo sapien
gatgttgcccacgaacttgacaagt

SEQ ID NO: 1610969 - DNA, 25 bp, Homo sapien
tgcccacgaacttgacaagtgatgt

SEQ ID NO: 1610970 - DNA, 25 bp, Homo sapien
tgttgcccacgaacttgacaagtga

SEQ ID NO: 1610971 - DNA, 25 bp, Homo sapien
gttgcccacgaacttgacaagtgat

SEQ ID NO: 1610972 - DNA, 25 bp, Homo sapien
cagggaggggactggccggactcgg

SEQ ID NO: 1610973 - DNA, 25 bp, Homo sapien
ttctgctgtaggtcattggtgtcct

SEQ ID NO: 1610974 - DNA, 25 bp, Homo sapien
taggtcattggtgtcctcgcctccc

SEQ ID NO: 1610975 - DNA, 25 bp, Homo sapien
gagggcgggcttgtcggcgttcaaa

SEQ ID NO: 1610976 - DNA, 25 bp, Homo sapien
ggagggcgggcttgtcggcgttcaa

SEQ ID NO: 1610977 - DNA, 25 bp, Homo sapien
catggccggcactgcggaacttctt

SEQ ID NO: 1610978 - DNA, 25 bp, Homo sapien
gtcacgccgaactgccgcaggtgtg

SEQ ID NO: 1610979 - DNA, 25 bp, Homo sapien
atgtagctgcggtaggcgcccacct

SEQ ID NO: 1610980 - DNA, 25 bp, Homo sapien
cggtgtttgatccactcgctcagtg

SEQ ID NO: 1610981 - DNA, 25 bp, Homo sapien
tctcgcagtgtgtcgatgggcgaac

SEQ ID NO: 1610982 - DNA, 25 bp, Homo sapien
gctgagctcacgaggaacctgggcc

SEQ ID NO: 1610983 - DNA, 25 bp, Homo sapien
gtcacacccatctgccgcaggtgtg

SEQ ID NO: 1610984 - DNA, 25 bp, Homo sapien
cgcagaactcacagcggatgtcgcg

SEQ ID NO: 1610985 - DNA, 25 bp, Homo sapien
gaactcgcagcggatgtctcgtgct

SEQ ID NO: 1610986 - DNA, 25 bp, Homo sapien
tcgaagaactcaccacagaactcgc

SEQ ID NO: 1610987 - DNA, 25 bp, Homo sapien
tgggaacatctttcgggccgtagga

SEQ ID NO: 1610988 - DNA, 25 bp, Homo sapien
ccatttgccgcagatgggagcgcgc

SEQ ID NO: 1610989 - DNA, 25 bp, Homo sapien
gaggagacggctccacatcagaggc

SEQ ID NO: 1610990 - DNA, 25 bp, Homo sapien
agaggcccagaaaatgccggcggct

SEQ ID NO: 1610991 - DNA, 25 bp, Homo sapien
gctgcggcggccgagaggtcctgct

SEQ ID NO: 1610992 - DNA, 25 bp, Homo sapien
aggttgagaggagacggctccacat

SEQ ID NO: 1610993 - DNA, 25 bp, Homo sapien
gatgagcccgtggagcacgtctatg

SEQ ID NO: 1610994 - DNA, 25 bp, Homo sapien
gatcccttggcgtccggatcgctga

SEQ ID NO: 1610995 - DNA, 25 bp, Homo sapien
cacgggcgtggctagacaggccctt

SEQ ID NO: 1610996 - DNA, 25 bp, Homo sapien
gaggcggatctggacgccgtccctc

SEQ ID NO: 1610997 - DNA, 25 bp, Homo sapien
tcaggattcttaggggtaggggagc

SEQ ID NO: 1610998 - DNA, 25 bp, Homo sapien
tcagactgaggccactgtgcctttg

SEQ ID NO: 1610999 - DNA, 25 bp, Homo sapien
tgaggttcaagggcccctcatcctc

SEQ ID NO: 1611000 - DNA, 25 bp, Homo sapien
ggctcttgtcctcaggattcttagg

SEQ ID NO: 1611001 - DNA, 25 bp, Homo sapien
ccgagaagccgggaggcgacttgat

SEQ ID NO: 1611002 - DNA, 25 bp, Homo sapien
ccttggccgagaagccgggaggcga

SEQ ID NO: 1611003 - DNA, 25 bp, Homo sapien
ccgggaggcgacttgatggctttgt

SEQ ID NO: 1611004 - DNA, 25 bp, Homo sapien
aagccgggaggcgacttgatggctt

SEQ ID NO: 1611005 - DNA, 25 bp, Homo sapien
tggccaggctgagcaagccgggccg

SEQ ID NO: 1611006 - DNA, 25 bp, Homo sapien
gccaggctgagcaagccgggccggg

SEQ ID NO: 1611007 - DNA, 25 bp, Homo sapien
ttggccaggctgagcaagccgggcc

SEQ ID NO: 1611008 - DNA, 25 bp, Homo sapien
aggctgagcaagccgggccgggggg

SEQ ID NO: 1611009 - DNA, 25 bp, Homo sapien
ttcagtgagctggacttcttagcca

SEQ ID NO: 1611010 - DNA, 25 bp, Homo sapien
gcagcccaaggtgggcgtcaggcag

SEQ ID NO: 1611011 - DNA, 25 bp, Homo sapien
ccttcagtgagctggacttcttagc

SEQ ID NO: 1611012 - DNA, 25 bp, Homo sapien
agtgagctggacttcttagccaggc

SEQ ID NO: 1611013 - DNA, 25 bp, Homo sapien
cgcagacctcgcaggtggtcaggct

SEQ ID NO: 1611014 - DNA, 25 bp, Homo sapien
tgcttcacaagctcgtagaggaggt

SEQ ID NO: 1611015 - DNA, 25 bp, Homo sapien
ggtgcgccgctgctttccgactctg

SEQ ID NO: 1611016 - DNA, 25 bp, Homo sapien
gaggtcgatgggtgcgccgctgctt

SEQ ID NO: 1611017 - DNA, 25 bp, Homo sapien
gagcgagggagagcccaagtccatg

SEQ ID NO: 1611018 - DNA, 25 bp, Homo sapien
ggccaccattgcgttttcctcagaa

SEQ ID NO: 1611019 - DNA, 25 bp, Homo sapien
tagggagcgagggagagcccaagtc

SEQ ID NO: 1611020 - DNA, 25 bp, Homo sapien
caggcaggctcttcttagggagcga

SEQ ID NO: 1611021 - DNA, 25 bp, Homo sapien
ccgcggcggcggtggcggtggcggt

SEQ ID NO: 1611022 - DNA, 25 bp, Homo sapien
cggctccggctcggccttgggcccg

SEQ ID NO: 1611023 - DNA, 25 bp, Homo sapien
cggtggcggtggcggtggtggtggc

SEQ ID NO: 1611024 - DNA, 25 bp, Homo sapien
gctccggctcggccttgggcccgtc

SEQ ID NO: 1611025 - DNA, 25 bp, Homo sapien
tccgcttttgtcactcggcactggg

SEQ ID NO: 1611026 - DNA, 25 bp, Homo sapien
ctccgcttttgtcactcggcactgg

SEQ ID NO: 1611027 - DNA, 25 bp, Homo sapien
ccgcttttgtcactcggcactgggc

SEQ ID NO: 1611028 - DNA, 25 bp, Homo sapien
ggacatctctatccctaggatggga

SEQ ID NO: 1611029 - DNA, 25 bp, Homo sapien
taggatgggaatcttccggcctcac

SEQ ID NO: 1611030 - DNA, 25 bp, Homo sapien
agtgccacgagcgaaaccgttcgtc

SEQ ID NO: 1611031 - DNA, 25 bp, Homo sapien
ggaaagtctccatctccgagtcggg

SEQ ID NO: 1611032 - DNA, 25 bp, Homo sapien
acaagaatccctccagtatcatcct

SEQ ID NO: 1611033 - DNA, 25 bp, Homo sapien
cgacggtgccgttccgcagacctag

SEQ ID NO: 1611034 - DNA, 25 bp, Homo sapien
ggtgccgttccgcagacctagggaa

SEQ ID NO: 1611035 - DNA, 25 bp, Homo sapien
atcatcctgttatccaaccgtcccc

SEQ ID NO: 1611036 - DNA, 25 bp, Homo sapien
gcatttgtcaaagtcactggcagga

SEQ ID NO: 1611037 - DNA, 25 bp, Homo sapien
tcccagtaaaagctcagtaagcatt

SEQ ID NO: 1611038 - DNA, 25 bp, Homo sapien
gcttagaacgatgcctggctcccag

SEQ ID NO: 1611039 - DNA, 25 bp, Homo sapien
cagaaaggacacctaaatagcaggg

SEQ ID NO: 1611040 - DNA, 25 bp, Homo sapien
gagctcccagttggtgataccgaag

SEQ ID NO: 1611041 - DNA, 25 bp, Homo sapien
gataccgaagtcacgtaggtgggcc

SEQ ID NO: 1611042 - DNA, 25 bp, Homo sapien
aaggtgcctgggtcaaagttggcca

SEQ ID NO: 1611043 - DNA, 25 bp, Homo sapien
aagtcacagcgcatcaggctgaagg

SEQ ID NO: 1611044 - DNA, 25 bp, Homo sapien
cctcagcggagatgaaatggcgcac

SEQ ID NO: 1611045 - DNA, 25 bp, Homo sapien
tgggtaccatccctcggagctgctg

SEQ ID NO: 1611046 - DNA, 25 bp, Homo sapien
caagccgatgccgttgtggaagcga

SEQ ID NO: 1611047 - DNA, 25 bp, Homo sapien
gaaggagaacctgcgctcaatggcc

SEQ ID NO: 1611048 - DNA, 25 bp, Homo sapien
gggaaaaatccatctcggaggtcag

SEQ ID NO: 1611049 - DNA, 25 bp, Homo sapien
tcggaggtcagcactacatcctcct

SEQ ID NO: 1611050 - DNA, 25 bp, Homo sapien
tcttcgctccaagggcgcctccgtt

SEQ ID NO: 1611051 - DNA, 25 bp, Homo sapien
tcctcctcttcgctccaagggcgcc

SEQ ID NO: 1611052 - DNA, 25 bp, Homo sapien
ggagggaaaggccagccttccgaga

SEQ ID NO: 1611053 - DNA, 25 bp, Homo sapien
cctctggcccgtgccatgcaggagt

SEQ ID NO: 1611054 - DNA, 25 bp, Homo sapien
ggtggatgctagtgtggagggaaag

SEQ ID NO: 1611055 - DNA, 25 bp, Homo sapien
ttctcccgagctgtaaggagtaggg

SEQ ID NO: 1611056 - DNA, 25 bp, Homo sapien
ggccaaggacggctcagctttgcca

SEQ ID NO: 1611057 - DNA, 25 bp, Homo sapien
ggtcgtatccagcagggttctcccg

SEQ ID NO: 1611058 - DNA, 25 bp, Homo sapien
gggtcttcctcataagcctcgccat

SEQ ID NO: 1611059 - DNA, 25 bp, Homo sapien
tgagcatcctggctagtgcctggct

SEQ ID NO: 1611060 - DNA, 25 bp, Homo sapien
acagaagacacaggcgctgaggcca

SEQ ID NO: 1611061 - DNA, 25 bp, Homo sapien
aggccaacggcagctccgtagggct

SEQ ID NO: 1611062 - DNA, 25 bp, Homo sapien
tagggctgatagaggagggcgctgg

SEQ ID NO: 1611063 - DNA, 25 bp, Homo sapien
tgagcaggctctcgctgggcgcggg

SEQ ID NO: 1611064 - DNA, 25 bp, Homo sapien
gcatgctgcacataggccctggatg

SEQ ID NO: 1611065 - DNA, 25 bp, Homo sapien
aaagacacacttagggcactgcagc

SEQ ID NO: 1611066 - DNA, 25 bp, Homo sapien
gaatctccgctcagataggatgccc

SEQ ID NO: 1611067 - DNA, 25 bp, Homo sapien
tgcactcgatgcatgggaacacggc

SEQ ID NO: 1611068 - DNA, 25 bp, Homo sapien
gcccggccggaagtccaggctgcct

SEQ ID NO: 1611069 - DNA, 25 bp, Homo sapien
ccggccggaagtccaggctgcctcc

SEQ ID NO: 1611070 - DNA, 25 bp, Homo sapien
ggccggaagtccaggctgcctccat

SEQ ID NO: 1611071 - DNA, 25 bp, Homo sapien
ggagcccggccggaagtccaggctg

SEQ ID NO: 1611072 - DNA, 25 bp, Homo sapien
ggccccagtgatcctgaccttcttg

SEQ ID NO: 1611073 - DNA, 25 bp, Homo sapien
ggaggcaaggtaaccactctgggcc

SEQ ID NO: 1611074 - DNA, 25 bp, Homo sapien
gagaggttgaaggtccctgctaagc

SEQ ID NO: 1611075 - DNA, 25 bp, Homo sapien
cagatttggcgattaactttgtggc

SEQ ID NO: 1611076 - DNA, 25 bp, Homo sapien
aggtcagggccagcatggcactcac

SEQ ID NO: 1611077 - DNA, 25 bp, Homo sapien
gaggtcagggccagcatggcactca

SEQ ID NO: 1611078 - DNA, 25 bp, Homo sapien
tgaggtcagggccagcatggcactc

SEQ ID NO: 1611079 - DNA, 25 bp, Homo sapien
ctgaggtcagggccagcatggcact

SEQ ID NO: 1611080 - DNA, 25 bp, Homo sapien
cgggggagggcttcgctgaggccgg

SEQ ID NO: 1611081 - DNA, 25 bp, Homo sapien
gaggtgacacgggggagggcttcgc

SEQ ID NO: 1611082 - DNA, 25 bp, Homo sapien
tgctgatccgatgggtggcggaggt

SEQ ID NO: 1611083 - DNA, 25 bp, Homo sapien
ctgctgatccgatgggtggcggagg

SEQ ID NO: 1611084 - DNA, 25 bp, Homo sapien
ctaacctgagctgcagagagcccat

SEQ ID NO: 1611085 - DNA, 25 bp, Homo sapien
ttctaacctgagctgcagagagccc

SEQ ID NO: 1611086 - DNA, 25 bp, Homo sapien
tgttctaacctgagctgcagagagc

SEQ ID NO: 1611087 - DNA, 25 bp, Homo sapien
ctgttctaacctgagctgcagagag

SEQ ID NO: 1611088 - DNA, 25 bp, Homo sapien
catccagaatgtctcgggggccctc

SEQ ID NO: 1611089 - DNA, 25 bp, Homo sapien
tgacaggcaggtaacgggtggaccg

SEQ ID NO: 1611090 - DNA, 25 bp, Homo sapien
ttcggccccaccctcgatgttctcc

SEQ ID NO: 1611091 - DNA, 25 bp, Homo sapien
cttggcgccgggccaggcagtctct

SEQ ID NO: 1611092 - DNA, 25 bp, Homo sapien
ggcgccgggccaggcagtctctctg

SEQ ID NO: 1611093 - DNA, 25 bp, Homo sapien
ttggcgccgggccaggcagtctctc

SEQ ID NO: 1611094 - DNA, 25 bp, Homo sapien
gccgggccaggcagtctctctgggc

SEQ ID NO: 1611095 - DNA, 25 bp, Homo sapien
ttggggacgatctggtgcagccagg

SEQ ID NO: 1611096 - DNA, 25 bp, Homo sapien
cttggggacgatctggtgcagccag

SEQ ID NO: 1611097 - DNA, 25 bp, Homo sapien
actcagctgctgcaccggctcagcg

SEQ ID NO: 1611098 - DNA, 25 bp, Homo sapien
tctctgcttggatccactcagctgc

SEQ ID NO: 1611099 - DNA, 25 bp, Homo sapien
gattttctctgcttggatccactca

SEQ ID NO: 1611100 - DNA, 25 bp, Homo sapien
tcagctgctgcaccggctcagcggg

SEQ ID NO: 1611101 - DNA, 25 bp, Homo sapien
cggtgccggtgccgcggcctccgca

SEQ ID NO: 1611102 - DNA, 25 bp, Homo sapien
gccggccaggtgccggggctcggag

SEQ ID NO: 1611103 - DNA, 25 bp, Homo sapien
ccggccaggtgccggggctcggagc

SEQ ID NO: 1611104 - DNA, 25 bp, Homo sapien
ttcccaatcatccacactggacttc

SEQ ID NO: 1611105 - DNA, 25 bp, Homo sapien
ttccaaccacaagctcactccctcc

SEQ ID NO: 1611106 - DNA, 25 bp, Homo sapien
cttcccaatcatccacactggactt

SEQ ID NO: 1611107 - DNA, 25 bp, Homo sapien
tccaaccacaagctcactccctcct

SEQ ID NO: 1611108 - DNA, 25 bp, Homo sapien
cactgtgtagggaactttacgtcca

SEQ ID NO: 1611109 - DNA, 25 bp, Homo sapien
tcgaatgcctttaactatgggtcct

SEQ ID NO: 1611110 - DNA, 25 bp, Homo sapien
gagaatgaaggtctaaggtcacaca

SEQ ID NO: 1611111 - DNA, 25 bp, Homo sapien
tggtgagaacttgtgtacatggccc

SEQ ID NO: 1611112 - DNA, 25 bp, Homo sapien
ttgggaccagcagctccactcccca

SEQ ID NO: 1611113 - DNA, 25 bp, Homo sapien
catactgccagagtggttgggacca

SEQ ID NO: 1611114 - DNA, 25 bp, Homo sapien
actgccagagtggttgggaccagca

SEQ ID NO: 1611115 - DNA, 25 bp, Homo sapien
tcatactgccagagtggttgggacc

SEQ ID NO: 1611116 - DNA, 25 bp, Homo sapien
tgctcccagaccacgtgtgatgagg

SEQ ID NO: 1611117 - DNA, 25 bp, Homo sapien
cagaccacgtgtgatgaggcaggat

SEQ ID NO: 1611118 - DNA, 25 bp, Homo sapien
gacaccccccctaagatggctatct

SEQ ID NO: 1611119 - DNA, 25 bp, Homo sapien
tctctgctcccagaccacgtgtgat

SEQ ID NO: 1611120 - DNA, 25 bp, Homo sapien
tccaagacccccgcgtccttggaga

SEQ ID NO: 1611121 - DNA, 25 bp, Homo sapien
caggtggtgtctccattgaggcagg

SEQ ID NO: 1611122 - DNA, 25 bp, Homo sapien
tctccatctcatttaggcggtgctc

SEQ ID NO: 1611123 - DNA, 25 bp, Homo sapien
tgactccaagacccccgcgtccttg

SEQ ID NO: 1611124 - DNA, 25 bp, Homo sapien
agggctgcaccgcaacccttgctcc

SEQ ID NO: 1611125 - DNA, 25 bp, Homo sapien
gggctgcaccgcaacccttgctcct

SEQ ID NO: 1611126 - DNA, 25 bp, Homo sapien
ttcattgcttgttaggttgtgctct

SEQ ID NO: 1611127 - DNA, 25 bp, Homo sapien
ttaggttgtgctctgaatcaaactc

SEQ ID NO: 1611128 - DNA, 25 bp, Homo sapien
tcagactgtgcccttcattgcttgt

SEQ ID NO: 1611129 - DNA, 25 bp, Homo sapien
agactgtgcccttcattgcttgtta

SEQ ID NO: 1611130 - DNA, 25 bp, Homo sapien
ctgagatatctcagtgcccggccca

SEQ ID NO: 1611131 - DNA, 25 bp, Homo sapien
gagaatctgccagggtcctaggccg

SEQ ID NO: 1611132 - DNA, 25 bp, Homo sapien
gatctaattggatcgggcccacctg

SEQ ID NO: 1611133 - DNA, 25 bp, Homo sapien
ggcagaggctaaggaagtcccttcc

SEQ ID NO: 1611134 - DNA, 25 bp, Homo sapien
actttctgctcctcacgcagagcgg

SEQ ID NO: 1611135 - DNA, 25 bp, Homo sapien
agcgactccacgaggcgggacagca

SEQ ID NO: 1611136 - DNA, 25 bp, Homo sapien
cagagcggccacctcgcactgcagc

SEQ ID NO: 1611137 - DNA, 25 bp, Homo sapien
atttgggtgctcagcgactccacga

SEQ ID NO: 1611138 - DNA, 25 bp, Homo sapien
agcagctgtaatctgacccgttgtc

SEQ ID NO: 1611139 - DNA, 25 bp, Homo sapien
agctgtaatctgacccgttgtcccg

SEQ ID NO: 1611140 - DNA, 25 bp, Homo sapien
gctgtaatctgacccgttgtcccgc

SEQ ID NO: 1611141 - DNA, 25 bp, Homo sapien
ctgacccgttgtcccgcccctgtgt

SEQ ID NO: 1611142 - DNA, 25 bp, Homo sapien
ttgaacccagacttgcctggccctt

SEQ ID NO: 1611143 - DNA, 25 bp, Homo sapien
gtcatcaccggcctgcctagttggg

SEQ ID NO: 1611144 - DNA, 25 bp, Homo sapien
acagcgagctgggtacttgaaccca

SEQ ID NO: 1611145 - DNA, 25 bp, Homo sapien
aacatccctcctgcggtacagctgg

SEQ ID NO: 1611146 - DNA, 25 bp, Homo sapien
ttcacaggtcggtgcgtgcccagtg

SEQ ID NO: 1611147 - DNA, 25 bp, Homo sapien
ccagtgcctggtttcggtcttgcgg

SEQ ID NO: 1611148 - DNA, 25 bp, Homo sapien
ggtttcggtcttgcggctggtccat

SEQ ID NO: 1611149 - DNA, 25 bp, Homo sapien
cttgttcacaggtcggtgcgtgccc

SEQ ID NO: 1611150 - DNA, 25 bp, Homo sapien
catgctcagggagcctttgggtcgc

SEQ ID NO: 1611151 - DNA, 25 bp, Homo sapien
gcgaacgctgcgcagagactggctc

SEQ ID NO: 1611152 - DNA, 25 bp, Homo sapien
tgccagggtaccgacggcttccgag

SEQ ID NO: 1611153 - DNA, 25 bp, Homo sapien
ccaactctctgagcggcgaacgctg

SEQ ID NO: 1611154 - DNA, 25 bp, Homo sapien
gacctgggccgggggcagtgggaga

SEQ ID NO: 1611155 - DNA, 25 bp, Homo sapien
gggccgggggcagtgggagacgcat

SEQ ID NO: 1611156 - DNA, 25 bp, Homo sapien
ctgggccgggggcagtgggagacgc

SEQ ID NO: 1611157 - DNA, 25 bp, Homo sapien
ctggagtggacctgggccgggggca

SEQ ID NO: 1611158 - DNA, 25 bp, Homo sapien
tcctcaatggctcgcaggatggtgg

SEQ ID NO: 1611159 - DNA, 25 bp, Homo sapien
gccctcctcaatggctcgcaggatg

SEQ ID NO: 1611160 - DNA, 25 bp, Homo sapien
tggccctcctcaatggctcgcagga

SEQ ID NO: 1611161 - DNA, 25 bp, Homo sapien
cctcctcaatggctcgcaggatggt

SEQ ID NO: 1611162 - DNA, 25 bp, Homo sapien
tgggcatgcaggacagctaactgga

SEQ ID NO: 1611163 - DNA, 25 bp, Homo sapien
gtcaagctcagcaaaaattgtacag

SEQ ID NO: 1611164 - DNA, 25 bp, Homo sapien
caggaagcattgcatggctggtcca

SEQ ID NO: 1611165 - DNA, 25 bp, Homo sapien
gctaactggagggccagatcaccac

SEQ ID NO: 1611166 - DNA, 25 bp, Homo sapien
gctggatggtctggtgccaaaccaa

SEQ ID NO: 1611167 - DNA, 25 bp, Homo sapien
gcacctcagagccacgttctttaca

SEQ ID NO: 1611168 - DNA, 25 bp, Homo sapien
ccagcttgagaacacgatgcccagc

SEQ ID NO: 1611169 - DNA, 25 bp, Homo sapien
tttacatgcttctcgccagcttgag

SEQ ID NO: 1611170 - DNA, 25 bp, Homo sapien
tctggccaccctaaactggaggtcg

SEQ ID NO: 1611171 - DNA, 25 bp, Homo sapien
caaatttaactgagtgtctcctgta

SEQ ID NO: 1611172 - DNA, 25 bp, Homo sapien
tttagtataagcatggtcccaatta

SEQ ID NO: 1611173 - DNA, 25 bp, Homo sapien
agcatggtaagcaggggtgggctaa

SEQ ID NO: 1611174 - DNA, 25 bp, Homo sapien
cgtaggaatggataatggtttcgaa

SEQ ID NO: 1611175 - DNA, 25 bp, Homo sapien
gataatggtttcgaagacctcctcg

SEQ ID NO: 1611176 - DNA, 25 bp, Homo sapien
agacctcctcgcagctgttccgaag

SEQ ID NO: 1611177 - DNA, 25 bp, Homo sapien
gttccgaagtctggcctggtgctct

SEQ ID NO: 1611178 - DNA, 25 bp, Homo sapien
cgctgacatggactctcccccagct

SEQ ID NO: 1611179 - DNA, 25 bp, Homo sapien
cagcaggccgctgacatggactctc

SEQ ID NO: 1611180 - DNA, 25 bp, Homo sapien
tgacatggactctcccccagctcac

SEQ ID NO: 1611181 - DNA, 25 bp, Homo sapien
agcaggccgctgacatggactctcc

SEQ ID NO: 1611182 - DNA, 25 bp, Homo sapien
ccagctccgcagtgcccaggtcagt

SEQ ID NO: 1611183 - DNA, 25 bp, Homo sapien
ccaatgtgttttcccggaacagcag

SEQ ID NO: 1611184 - DNA, 25 bp, Homo sapien
catgtactcatcgatagccttggtg

SEQ ID NO: 1611185 - DNA, 25 bp, Homo sapien
tcctggaggtaatcctgtgccacga

SEQ ID NO: 1611186 - DNA, 25 bp, Homo sapien
gaggaactccgccagctccttgtag

SEQ ID NO: 1611187 - DNA, 25 bp, Homo sapien
cgcatagtggaaggtgaggaactcc

SEQ ID NO: 1611188 - DNA, 25 bp, Homo sapien
cgcctcgaagtggaagcgctcggcc

SEQ ID NO: 1611189 - DNA, 25 bp, Homo sapien
tccttgtagcgctcggacggcagca

SEQ ID NO: 1611190 - DNA, 25 bp, Homo sapien
ttgttggcaccccaaagaaggcacc

SEQ ID NO: 1611191 - DNA, 25 bp, Homo sapien
tcttggagccgttgcaacgatgcag

SEQ ID NO: 1611192 - DNA, 25 bp, Homo sapien
taaagacttcgcgattgcctggcag

SEQ ID NO: 1611193 - DNA, 25 bp, Homo sapien
ggagcctcaaacctgttgcgtcggg

SEQ ID NO: 1611194 - DNA, 25 bp, Homo sapien
gctggaattggcgacgaaggtcctc

SEQ ID NO: 1611195 - DNA, 25 bp, Homo sapien
tctcagcggccgagcgacaagagaa

SEQ ID NO: 1611196 - DNA, 25 bp, Homo sapien
tcgatccagcggtctctctcagcgg

SEQ ID NO: 1611197 - DNA, 25 bp, Homo sapien
ccgagcgacaagagaagcagcggct

SEQ ID NO: 1611198 - DNA, 25 bp, Homo sapien
agttcagagagtgtggccagcgact

SEQ ID NO: 1611199 - DNA, 25 bp, Homo sapien
gcagtggccagatccgcacatcccg

SEQ ID NO: 1611200 - DNA, 25 bp, Homo sapien
gtgtggccagcgactccctagagcc

SEQ ID NO: 1611201 - DNA, 25 bp, Homo sapien
gctcggcacccaggtccagttcaga

SEQ ID NO: 1611202 - DNA, 25 bp, Homo sapien
tgacctcaaatgttccacctgcctc

SEQ ID NO: 1611203 - DNA, 25 bp, Homo sapien
gacctcaaatgttccacctgcctct

SEQ ID NO: 1611204 - DNA, 25 bp, Homo sapien
acctcaaatgttccacctgcctctg

SEQ ID NO: 1611205 - DNA, 25 bp, Homo sapien
ctgacctcaaatgttccacctgcct

SEQ ID NO: 1611206 - DNA, 25 bp, Homo sapien
gattgacttagctcccattttagag

SEQ ID NO: 1611207 - DNA, 25 bp, Homo sapien
taaccctcccagaccagttgattga

SEQ ID NO: 1611208 - DNA, 25 bp, Homo sapien
cctggctctgtgctagatcattcaa

SEQ ID NO: 1611209 - DNA, 25 bp, Homo sapien
ccctgttggcctagttaacttccat

SEQ ID NO: 1611210 - DNA, 25 bp, Homo sapien
ccatcccggggctccaacctggcct

SEQ ID NO: 1611211 - DNA, 25 bp, Homo sapien
ttttcttctctttcagcctcttgag

SEQ ID NO: 1611212 - DNA, 25 bp, Homo sapien
tctctttcagcctcttgagcaaccc

SEQ ID NO: 1611213 - DNA, 25 bp, Homo sapien
catcccggggctccaacctggcctt

SEQ ID NO: 1611214 - DNA, 25 bp, Homo sapien
tcttggctctcccctctacctccca

SEQ ID NO: 1611215 - DNA, 25 bp, Homo sapien
gtcttggctctcccctctacctccc

SEQ ID NO: 1611216 - DNA, 25 bp, Homo sapien
cttggctctcccctctacctcccac

SEQ ID NO: 1611217 - DNA, 25 bp, Homo sapien
agtcttggctctcccctctacctcc

SEQ ID NO: 1611218 - DNA, 25 bp, Homo sapien
acgttgtggacctggttgggaccag

SEQ ID NO: 1611219 - DNA, 25 bp, Homo sapien
gttgggaccagcagtctccggttct

SEQ ID NO: 1611220 - DNA, 25 bp, Homo sapien
gaccagcagtctccggttctgtttt

SEQ ID NO: 1611221 - DNA, 25 bp, Homo sapien
agcagtctccggttctgtttttcca

SEQ ID NO: 1611222 - DNA, 25 bp, Homo sapien
gtgggtcgttatgggtggcaggttg

SEQ ID NO: 1611223 - DNA, 25 bp, Homo sapien
ggcaggttggggggttggattctgc

SEQ ID NO: 1611224 - DNA, 25 bp, Homo sapien
tgccccacttttagagcctcccaaa

SEQ ID NO: 1611225 - DNA, 25 bp, Homo sapien
ctgtgggtcgttatgggtggcaggt

SEQ ID NO: 1611226 - DNA, 25 bp, Homo sapien
tggccacgtggatgctgccctcgga

SEQ ID NO: 1611227 - DNA, 25 bp, Homo sapien
ctgccctcggagctagcacttccca

SEQ ID NO: 1611228 - DNA, 25 bp, Homo sapien
ggccacgtggatgctgccctcggag

SEQ ID NO: 1611229 - DNA, 25 bp, Homo sapien
tgctgccctcggagctagcacttcc

SEQ ID NO: 1611230 - DNA, 25 bp, Homo sapien
ctgttctcccgcaggagtgggtagt

SEQ ID NO: 1611231 - DNA, 25 bp, Homo sapien
tctcccgcaggagtgggtagtcaga

SEQ ID NO: 1611232 - DNA, 25 bp, Homo sapien
tgttctcccgcaggagtgggtagtc

SEQ ID NO: 1611233 - DNA, 25 bp, Homo sapien
ggtagtcagagaggggaggcaggca

SEQ ID NO: 1611234 - DNA, 25 bp, Homo sapien
cagacaccttcccattatcctccct

SEQ ID NO: 1611235 - DNA, 25 bp, Homo sapien
gcagacaccttcccattatcctccc

SEQ ID NO: 1611236 - DNA, 25 bp, Homo sapien
cagcttcccatcaagcagggtgaag

SEQ ID NO: 1611237 - DNA, 25 bp, Homo sapien
cccaatgtcccagacaggcacgttg

SEQ ID NO: 1611238 - DNA, 25 bp, Homo sapien
ttcccatcaagcagggtgaagcccc

SEQ ID NO: 1611239 - DNA, 25 bp, Homo sapien
ccaatgtcccagacaggcacgttgg

SEQ ID NO: 1611240 - DNA, 25 bp, Homo sapien
ctcagggatctgtggggtagggggc

SEQ ID NO: 1611241 - DNA, 25 bp, Homo sapien
gcgcagataggacccgacggaatat

SEQ ID NO: 1611242 - DNA, 25 bp, Homo sapien
ccgtgactccttgggaggcgcagat

SEQ ID NO: 1611243 - DNA, 25 bp, Homo sapien
gtcgaaggcgactggtccgtgactc

SEQ ID NO: 1611244 - DNA, 25 bp, Homo sapien
ccctgtgtgccagcggtaggaagtc

SEQ ID NO: 1611245 - DNA, 25 bp, Homo sapien
agagagtgacagtagtgcccagtgt

SEQ ID NO: 1611246 - DNA, 25 bp, Homo sapien
cgagagagtgacagtagtgcccagt

SEQ ID NO: 1611247 - DNA, 25 bp, Homo sapien
acgagagagtgacagtagtgcccag

SEQ ID NO: 1611248 - DNA, 25 bp, Homo sapien
gacgagagagtgacagtagtgccca

SEQ ID NO: 1611249 - DNA, 25 bp, Homo sapien
ctgtccacatactgccctcatctcg

SEQ ID NO: 1611250 - DNA, 25 bp, Homo sapien
cacatactgccctcatctcggcccc

SEQ ID NO: 1611251 - DNA, 25 bp, Homo sapien
tccacatactgccctcatctcggcc

SEQ ID NO: 1611252 - DNA, 25 bp, Homo sapien
tgcctccaggaatccccctgccccc

SEQ ID NO: 1611253 - DNA, 25 bp, Homo sapien
agcagccgtctgcaccccgcctggc

SEQ ID NO: 1611254 - DNA, 25 bp, Homo sapien
cccagaatcagcagccgtctgcacc

SEQ ID NO: 1611255 - DNA, 25 bp, Homo sapien
gaatcagcagccgtctgcaccccgc

SEQ ID NO: 1611256 - DNA, 25 bp, Homo sapien
atcagcagccgtctgcaccccgcct

SEQ ID NO: 1611257 - DNA, 25 bp, Homo sapien
aggctgggagggcacagtgcgggca

SEQ ID NO: 1611258 - DNA, 25 bp, Homo sapien
gggagggcacagtgcgggcaggttg

SEQ ID NO: 1611259 - DNA, 25 bp, Homo sapien
ccaggctgggagggcacagtgcggg

SEQ ID NO: 1611260 - DNA, 25 bp, Homo sapien
gctgggagggcacagtgcgggcagg

SEQ ID NO: 1611261 - DNA, 25 bp, Homo sapien
tcctggatctcttagagacactcct

SEQ ID NO: 1611262 - DNA, 25 bp, Homo sapien
ctggatctcttagagacactcctgg

SEQ ID NO: 1611263 - DNA, 25 bp, Homo sapien
ccctcctggatctcttagagacact

SEQ ID NO: 1611264 - DNA, 25 bp, Homo sapien
tggatctcttagagacactcctggc

SEQ ID NO: 1611265 - DNA, 25 bp, Homo sapien
caaagccaactataggccgagatgg

SEQ ID NO: 1611266 - DNA, 25 bp, Homo sapien
ctataggccgagatggatgtgctag

SEQ ID NO: 1611267 - DNA, 25 bp, Homo sapien
gtggttgtggtatgtggctgggtct

SEQ ID NO: 1611268 - DNA, 25 bp, Homo sapien
gaggacaaagccaactataggccga

SEQ ID NO: 1611269 - DNA, 25 bp, Homo sapien
tgttttagtgatggcgatcaagggc

SEQ ID NO: 1611270 - DNA, 25 bp, Homo sapien
gatgaggtcatcaggtcaaagttgt

SEQ ID NO: 1611271 - DNA, 25 bp, Homo sapien
tggcagtatgtaggtagcacgagat

SEQ ID NO: 1611272 - DNA, 25 bp, Homo sapien
cgagattgtccaggtgtgattctaa

SEQ ID NO: 1611273 - DNA, 25 bp, Homo sapien
cagcctaggttcatgttgtgtggac

SEQ ID NO: 1611274 - DNA, 25 bp, Homo sapien
cagcctgacaggttgtgacttgggt

SEQ ID NO: 1611275 - DNA, 25 bp, Homo sapien
cacaggattaaggactggacagagg

SEQ ID NO: 1611276 - DNA, 25 bp, Homo sapien
taaggagtcagggacgaaacaagca

SEQ ID NO: 1611277 - DNA, 25 bp, Homo sapien
gtttcctgaatagacgtgccgccgg

SEQ ID NO: 1611278 - DNA, 25 bp, Homo sapien
tgtgcgggcacagctgttacaggca

SEQ ID NO: 1611279 - DNA, 25 bp, Homo sapien
cataggcagaagtcacaggatcagg

SEQ ID NO: 1611280 - DNA, 25 bp, Homo sapien
caaaggctgggcctaggtttcctga

SEQ ID NO: 1611281 - DNA, 25 bp, Homo sapien
agttgtggccgagcgtgtgggcgcc

SEQ ID NO: 1611282 - DNA, 25 bp, Homo sapien
gcagcgcgtagtctggccgcaggag

SEQ ID NO: 1611283 - DNA, 25 bp, Homo sapien
cgcaccgcacaactcgggagcgtgt

SEQ ID NO: 1611284 - DNA, 25 bp, Homo sapien
cgcggtgtagttgcccactatggcc

SEQ ID NO: 1611285 - DNA, 25 bp, Homo sapien
ctgcgcagcgcgtgaagtccgtgca

SEQ ID NO: 1611286 - DNA, 25 bp, Homo sapien
acgtacaagaatcccagcggcagct

SEQ ID NO: 1611287 - DNA, 25 bp, Homo sapien
ccagccttgcgtgtcctggtggtag

SEQ ID NO: 1611288 - DNA, 25 bp, Homo sapien
caggcacgtaggtgtgatgcacgta

SEQ ID NO: 1611289 - DNA, 25 bp, Homo sapien
cacagggtgtggggaacttcctcac

SEQ ID NO: 1611290 - DNA, 25 bp, Homo sapien
tcacagggtgtggggaacttcctca

SEQ ID NO: 1611291 - DNA, 25 bp, Homo sapien
tgaattccttggtagcattggcagc

SEQ ID NO: 1611292 - DNA, 25 bp, Homo sapien
gctgttcttggctcatgcactgaag

SEQ ID NO: 1611293 - DNA, 25 bp, Homo sapien
gtgaattccttggtagcattggcag

SEQ ID NO: 1611294 - DNA, 25 bp, Homo sapien
tgtagaaggacaagggttccccaca

SEQ ID NO: 1611295 - DNA, 25 bp, Homo sapien
gagtccggctcaggtagtctccaag

SEQ ID NO: 1611296 - DNA, 25 bp, Homo sapien
tgggcagggatccaactctgtagca

SEQ ID NO: 1611297 - DNA, 25 bp, Homo sapien
gaaggccatggttaacagagatgcc

SEQ ID NO: 1611298 - DNA, 25 bp, Homo sapien
tggtcaggcctaacagctctgggct

SEQ ID NO: 1611299 - DNA, 25 bp, Homo sapien
ccctgggtctgaccacagtagcaat

SEQ ID NO: 1611300 - DNA, 25 bp, Homo sapien
tgaccacagtagcaatccgagtagg

SEQ ID NO: 1611301 - DNA, 25 bp, Homo sapien
caatccgagtaggatccagaggaca

SEQ ID NO: 1611302 - DNA, 25 bp, Homo sapien
cagtagcaatccgagtaggatccag

SEQ ID NO: 1611303 - DNA, 25 bp, Homo sapien
caaggggtatttctggttggcctcg

SEQ ID NO: 1611304 - DNA, 25 bp, Homo sapien
agcttccaaggggtatttctggttg

SEQ ID NO: 1611305 - DNA, 25 bp, Homo sapien
tctggttggcctcggcagagaacct

SEQ ID NO: 1611306 - DNA, 25 bp, Homo sapien
gcctcggcagagaacctcggcagtg

SEQ ID NO: 1611307 - DNA, 25 bp, Homo sapien
gaactgagcagagcctttgaccact

SEQ ID NO: 1611308 - DNA, 25 bp, Homo sapien
agaactgagcagagcctttgaccac

SEQ ID NO: 1611309 - DNA, 25 bp, Homo sapien
aactgagcagagcctttgaccactg

SEQ ID NO: 1611310 - DNA, 25 bp, Homo sapien
ccgggtgcccatgactgagacctgc

SEQ ID NO: 1611311 - DNA, 25 bp, Homo sapien
tgcccatgactgagacctgcagaat

SEQ ID NO: 1611312 - DNA, 25 bp, Homo sapien
ccatgactgagacctgcagaatgga

SEQ ID NO: 1611313 - DNA, 25 bp, Homo sapien
ggtgcccatgactgagacctgcaga

SEQ ID NO: 1611314 - DNA, 25 bp, Homo sapien
tcacagctcattcatgcactcattg

SEQ ID NO: 1611315 - DNA, 25 bp, Homo sapien
cacagctcattcatgcactcattgt

SEQ ID NO: 1611316 - DNA, 25 bp, Homo sapien
tggcgtcggcctgggtccgtgccct

SEQ ID NO: 1611317 - DNA, 25 bp, Homo sapien
accttgtataacaagtcctcagtgg

SEQ ID NO: 1611318 - DNA, 25 bp, Homo sapien
actccttcttgggagcccacacacc

SEQ ID NO: 1611319 - DNA, 25 bp, Homo sapien
gcccacacaccttgtataacaagtc

SEQ ID NO: 1611320 - DNA, 25 bp, Homo sapien
gcagggccacctctaccaaggcggg

SEQ ID NO: 1611321 - DNA, 25 bp, Homo sapien
acacggagccagtcgctggctttca

SEQ ID NO: 1611322 - DNA, 25 bp, Homo sapien
caccaccagataatgcgggccctgg

SEQ ID NO: 1611323 - DNA, 25 bp, Homo sapien
acaaaccagcgcgacctgggcgtgg

SEQ ID NO: 1611324 - DNA, 25 bp, Homo sapien
cttgctcagaggatctcatgagagg

SEQ ID NO: 1611325 - DNA, 25 bp, Homo sapien
acttgctcagaggatctcatgagag

SEQ ID NO: 1611326 - DNA, 25 bp, Homo sapien
cacttgctcagaggatctcatgaga

SEQ ID NO: 1611327 - DNA, 25 bp, Homo sapien
gccaagtcatatggaattctgtact

SEQ ID NO: 1611328 - DNA, 25 bp, Homo sapien
tatgtgttcaagttttggggtggac

SEQ ID NO: 1611329 - DNA, 25 bp, Homo sapien
ccaggttggtcattagggctgaatt

SEQ ID NO: 1611330 - DNA, 25 bp, Homo sapien
ttttggatgttgtgaatcatgctac

SEQ ID NO: 1611331 - DNA, 25 bp, Homo sapien
cagtagcagcggcgtgtgtcctggg

SEQ ID NO: 1611332 - DNA, 25 bp, Homo sapien
tagatccctagccacgtagcgtaga

SEQ ID NO: 1611333 - DNA, 25 bp, Homo sapien
tgtgctggggtcgtcggccgggatc

SEQ ID NO: 1611334 - DNA, 25 bp, Homo sapien
gctggctgtgcgagaggcagtagca

SEQ ID NO: 1611335 - DNA, 25 bp, Homo sapien
tttcatggctgggtgcagttgtgtc

SEQ ID NO: 1611336 - DNA, 25 bp, Homo sapien
tggctgggtgcagttgtgtctggaa

SEQ ID NO: 1611337 - DNA, 25 bp, Homo sapien
ctgggtgcagttgtgtctggaattg

SEQ ID NO: 1611338 - DNA, 25 bp, Homo sapien
ttcatggctgggtgcagttgtgtct

SEQ ID NO: 1611339 - DNA, 25 bp, Homo sapien
tatatgttcgactgactcctgatta

SEQ ID NO: 1611340 - DNA, 25 bp, Homo sapien
ccacaaaaagaagatccacacgtca

SEQ ID NO: 1611341 - DNA, 25 bp, Homo sapien
gaagaaggtatatgttcgactgact

SEQ ID NO: 1611342 - DNA, 25 bp, Homo sapien
caaaaagaagatccacacgtcaccc

SEQ ID NO: 1611343 - DNA, 25 bp, Homo sapien
tgtgtgatcactccagagatctttg

SEQ ID NO: 1611344 - DNA, 25 bp, Homo sapien
ggttgagggtaacaagaagctgtac

SEQ ID NO: 1611345 - DNA, 25 bp, Homo sapien
tttgaaatattcaccctgccactcc

SEQ ID NO: 1611346 - DNA, 25 bp, Homo sapien
ttgggcaagactcctgttctactta

SEQ ID NO: 1611347 - DNA, 25 bp, Homo sapien
ccagggggtgtctgaggtgggcatg

SEQ ID NO: 1611348 - DNA, 25 bp, Homo sapien
tcctttctcggcggggcccaggtga

SEQ ID NO: 1611349 - DNA, 25 bp, Homo sapien
ccaggtgaggccagggggtgtctga

SEQ ID NO: 1611350 - DNA, 25 bp, Homo sapien
ggtgtctgaggtgggcatgggctga

SEQ ID NO: 1611351 - DNA, 25 bp, Homo sapien
gtaggaccacgtgtttctgtgatag

SEQ ID NO: 1611352 - DNA, 25 bp, Homo sapien
accacgtgtttctgtgataggggtt

SEQ ID NO: 1611353 - DNA, 25 bp, Homo sapien
aggaccacgtgtttctgtgataggg

SEQ ID NO: 1611354 - DNA, 25 bp, Homo sapien
cacgtgtttctgtgataggggtttt

SEQ ID NO: 1611355 - DNA, 25 bp, Homo sapien
tctgggaatatgcaagcccacatgg

SEQ ID NO: 1611356 - DNA, 25 bp, Homo sapien
gctctgggaatatgcaagcccacat

SEQ ID NO: 1611357 - DNA, 25 bp, Homo sapien
ctctgggaatatgcaagcccacatg

SEQ ID NO: 1611358 - DNA, 25 bp, Homo sapien
cagaagttcgcgatggcagagatga

SEQ ID NO: 1611359 - DNA, 25 bp, Homo sapien
tgcggaggacggactttggctgcga

SEQ ID NO: 1611360 - DNA, 25 bp, Homo sapien
cccaggaactgcatcgggcagaagt

SEQ ID NO: 1611361 - DNA, 25 bp, Homo sapien
caggacgccggagattgttttgcgt

SEQ ID NO: 1611362 - DNA, 25 bp, Homo sapien
gggagtcccaggcacgcttagtctt

SEQ ID NO: 1611363 - DNA, 25 bp, Homo sapien
tccgcggagtgctcaaaatcccctt

SEQ ID NO: 1611364 - DNA, 25 bp, Homo sapien
gcccaggtaagagcgccctgtgtct

SEQ ID NO: 1611365 - DNA, 25 bp, Homo sapien
catacaagcccacatgggagtccca

SEQ ID NO: 1611366 - DNA, 25 bp, Homo sapien
catgggctatgatcactacgtgacc

SEQ ID NO: 1611367 - DNA, 25 bp, Homo sapien
gatctgctcttcacccatcgttcca

SEQ ID NO: 1611368 - DNA, 25 bp, Homo sapien
ccttcttatcatggccacagtttgg

SEQ ID NO: 1611369 - DNA, 25 bp, Homo sapien
gtttggattgaacgcagactccaca

SEQ ID NO: 1611370 - DNA, 25 bp, Homo sapien
tgtgctgaacccctgacatgtgtga

SEQ ID NO: 1611371 - DNA, 25 bp, Homo sapien
caggaaaaccctgacaaaggtagca

SEQ ID NO: 1611372 - DNA, 25 bp, Homo sapien
tctcaagggtcaaacaggatggccc

SEQ ID NO: 1611373 - DNA, 25 bp, Homo sapien
tcaggtagtatctgttggccaggct

SEQ ID NO: 1611374 - DNA, 25 bp, Homo sapien
aaaggcaggtggatgggtcagaggg

SEQ ID NO: 1611375 - DNA, 25 bp, Homo sapien
gaaaggcaggtggatgggtcagagg

SEQ ID NO: 1611376 - DNA, 25 bp, Homo sapien
tttattccggagaatctggaaaggc

SEQ ID NO: 1611377 - DNA, 25 bp, Homo sapien
attccggagaatctggaaaggcagg

SEQ ID NO: 1611378 - DNA, 25 bp, Homo sapien
tcactgcaagcccgcgttcaggggc

SEQ ID NO: 1611379 - DNA, 25 bp, Homo sapien
cttcagcgcgcatgatcagctccgg

SEQ ID NO: 1611380 - DNA, 25 bp, Homo sapien
gtcctccttcagcgcgcatgatcag

SEQ ID NO: 1611381 - DNA, 25 bp, Homo sapien
caagcccgcgttcaggggctccact

SEQ ID NO: 1611382 - DNA, 25 bp, Homo sapien
catttgggccccatcacgccggaaa

SEQ ID NO: 1611383 - DNA, 25 bp, Homo sapien
gatcctcaaccgcacccagatcagc

SEQ ID NO: 1611384 - DNA, 25 bp, Homo sapien
actgcgcccaggatccgcatttggg

SEQ ID NO: 1611385 - DNA, 25 bp, Homo sapien
gggactgtgactgcgcccaggatcc

SEQ ID NO: 1611386 - DNA, 25 bp, Homo sapien
ccattctatggacattttcccataa

SEQ ID NO: 1611387 - DNA, 25 bp, Homo sapien
ccccattctatggacattttcccat

SEQ ID NO: 1611388 - DNA, 25 bp, Homo sapien
cccattctatggacattttcccata

SEQ ID NO: 1611389 - DNA, 25 bp, Homo sapien
cattctatggacattttcccataaa

SEQ ID NO: 1611390 - DNA, 25 bp, Homo sapien
agaggtgacctctccttgctgttct

SEQ ID NO: 1611391 - DNA, 25 bp, Homo sapien
tctctgagttgaagcggaaggggtt

SEQ ID NO: 1611392 - DNA, 25 bp, Homo sapien
ttgctgttctctgagttgaagcgga

SEQ ID NO: 1611393 - DNA, 25 bp, Homo sapien
tgggtcccgcagagaagggaataaa

SEQ ID NO: 1611394 - DNA, 25 bp, Homo sapien
ggtaagaccaagagggctgctgggt

SEQ ID NO: 1611395 - DNA, 25 bp, Homo sapien
ctggaggtaagaccaagagggctgc

SEQ ID NO: 1611396 - DNA, 25 bp, Homo sapien
gaggtaagaccaagagggctgctgg

SEQ ID NO: 1611397 - DNA, 25 bp, Homo sapien
tggaggtaagaccaagagggctgct

SEQ ID NO: 1611398 - DNA, 25 bp, Homo sapien
agttgggttgtgatggattcctata

SEQ ID NO: 1611399 - DNA, 25 bp, Homo sapien
gttgggttgtgatggattcctataa

SEQ ID NO: 1611400 - DNA, 25 bp, Homo sapien
tcctataatgttgatgatgcagata

SEQ ID NO: 1611401 - DNA, 25 bp, Homo sapien
tggattcctataatgttgatgatgc

SEQ ID NO: 1611402 - DNA, 25 bp, Homo sapien
ccggggggctcctccccatgaggct

SEQ ID NO: 1611403 - DNA, 25 bp, Homo sapien
ggggctcctccccatgaggctgtga

SEQ ID NO: 1611404 - DNA, 25 bp, Homo sapien
gggctcctccccatgaggctgtgag

SEQ ID NO: 1611405 - DNA, 25 bp, Homo sapien
ctcctccccatgaggctgtgagcat

SEQ ID NO: 1611406 - DNA, 25 bp, Homo sapien
atgcggtggcgggaggtgtacggaa

SEQ ID NO: 1611407 - DNA, 25 bp, Homo sapien
gcacaatgtcccagatgcggtggcg

SEQ ID NO: 1611408 - DNA, 25 bp, Homo sapien
ggtgtacggaacagggggatgcaac

SEQ ID NO: 1611409 - DNA, 25 bp, Homo sapien
cacaatgtcccagatgcggtggcgg

SEQ ID NO: 1611410 - DNA, 25 bp, Homo sapien
tttaggatcgcggtccttcagaagc

SEQ ID NO: 1611411 - DNA, 25 bp, Homo sapien
cagagggtggacagcgtccatgcat

SEQ ID NO: 1611412 - DNA, 25 bp, Homo sapien
agggtggacagcgtccatgcattga

SEQ ID NO: 1611413 - DNA, 25 bp, Homo sapien
agagggtggacagcgtccatgcatt

SEQ ID NO: 1611414 - DNA, 25 bp, Homo sapien
gtggacagcgtccatgcattgaggc

SEQ ID NO: 1611415 - DNA, 25 bp, Homo sapien
tctgctcttacatcctcatctgaca

SEQ ID NO: 1611416 - DNA, 25 bp, Homo sapien
gctcttacatcctcatctgacaaca

SEQ ID NO: 1611417 - DNA, 25 bp, Homo sapien
ttacatcctcatctgacaacacctt

SEQ ID NO: 1611418 - DNA, 25 bp, Homo sapien
aaggtgtcagcctctgctcttacat

SEQ ID NO: 1611419 - DNA, 25 bp, Homo sapien
tgaagggaaagcaagacaaaccctc

SEQ ID NO: 1611420 - DNA, 25 bp, Homo sapien
ctgaagggaaagcaagacaaaccct

SEQ ID NO: 1611421 - DNA, 25 bp, Homo sapien
ctgagacaatctctgaaggtccgat

SEQ ID NO: 1611422 - DNA, 25 bp, Homo sapien
gagacaatctctgaaggtccgatct

SEQ ID NO: 1611423 - DNA, 25 bp, Homo sapien
tgagacaatctctgaaggtccgatc

SEQ ID NO: 1611424 - DNA, 25 bp, Homo sapien
gacaatctctgaaggtccgatcttc

SEQ ID NO: 1611425 - DNA, 25 bp, Homo sapien
tgggaggaatcaatgactcgaatat

SEQ ID NO: 1611426 - DNA, 25 bp, Homo sapien
ccattccaaggtcttccccccagct

SEQ ID NO: 1611427 - DNA, 25 bp, Homo sapien
ggtgggaggaatcaatgactcgaat

SEQ ID NO: 1611428 - DNA, 25 bp, Homo sapien
ggaggaatcaatgactcgaatattt

SEQ ID NO: 1611429 - DNA, 25 bp, Homo sapien
tgggaagggtatggcgccgctcctg

SEQ ID NO: 1611430 - DNA, 25 bp, Homo sapien
gtgggaagggtatggcgccgctcct

SEQ ID NO: 1611431 - DNA, 25 bp, Homo sapien
ggtaatacagaaagtccatgtgctg

SEQ ID NO: 1611432 - DNA, 25 bp, Homo sapien
taatacagaaagtccatgtgctgga

SEQ ID NO: 1611433 - DNA, 25 bp, Homo sapien
gaaagtccatgtgctggaggatatg

SEQ ID NO: 1611434 - DNA, 25 bp, Homo sapien
tacagaaagtccatgtgctggagga

SEQ ID NO: 1611435 - DNA, 25 bp, Homo sapien
tgtccagacgactgctgccctctga

SEQ ID NO: 1611436 - DNA, 25 bp, Homo sapien
atgtccagacgactgctgccctctg

SEQ ID NO: 1611437 - DNA, 25 bp, Homo sapien
aacatgtccagacgactgctgccct

SEQ ID NO: 1611438 - DNA, 25 bp, Homo sapien
tcaaacatgtccagacgactgctgc

SEQ ID NO: 1611439 - DNA, 25 bp, Homo sapien
tcagccttgtctcctatgttctgtg

SEQ ID NO: 1611440 - DNA, 25 bp, Homo sapien
tgaactgtttccagctcgctaacct

SEQ ID NO: 1611441 - DNA, 25 bp, Homo sapien
gtgtgcccttggtcaatctattgcc

SEQ ID NO: 1611442 - DNA, 25 bp, Homo sapien
tcaagatgatctgctttgggccaga

SEQ ID NO: 1611443 - DNA, 25 bp, Homo sapien
atgatgttcacactcctgttgaaga

SEQ ID NO: 1611444 - DNA, 25 bp, Homo sapien
cacactcctgttgaagatctttata

SEQ ID NO: 1611445 - DNA, 25 bp, Homo sapien
gatctttatatagggtttcaggatg

SEQ ID NO: 1611446 - DNA, 25 bp, Homo sapien
acttgtcaccgccactcagcagtat

SEQ ID NO: 1611447 - DNA, 25 bp, Homo sapien
cagggcttcaggaacctgatggaga

SEQ ID NO: 1611448 - DNA, 25 bp, Homo sapien
ggcttcaggaacctgatggagagat

SEQ ID NO: 1611449 - DNA, 25 bp, Homo sapien
ttcaggaacctgatggagagatcat

SEQ ID NO: 1611450 - DNA, 25 bp, Homo sapien
ccagggcttcaggaacctgatggag

SEQ ID NO: 1611451 - DNA, 25 bp, Homo sapien
gggaagatgggacccagccatatcc

SEQ ID NO: 1611452 - DNA, 25 bp, Homo sapien
cgatgtcagggtggcataaaacgat

SEQ ID NO: 1611453 - DNA, 25 bp, Homo sapien
gataggtggctgacatctgggtcaa

SEQ ID NO: 1611454 - DNA, 25 bp, Homo sapien
cattggtgatagaccggacgatgtc

SEQ ID NO: 1611455 - DNA, 25 bp, Homo sapien
gtggaaagtactgaaggcggcggca

SEQ ID NO: 1611456 - DNA, 25 bp, Homo sapien
tgtcatagaaggcataggtccaggc

SEQ ID NO: 1611457 - DNA, 25 bp, Homo sapien
ccacgggaatgctgccacctgcccg

SEQ ID NO: 1611458 - DNA, 25 bp, Homo sapien
ctggttgaccccaaaaccatttctg

SEQ ID NO: 1611459 - DNA, 25 bp, Homo sapien
tgaggaccgtgtaggtgatgcccat

SEQ ID NO: 1611460 - DNA, 25 bp, Homo sapien
tcttcatggcgaccttcagctcctt

SEQ ID NO: 1611461 - DNA, 25 bp, Homo sapien
agcagggccgtgatacacaccaagc

SEQ ID NO: 1611462 - DNA, 25 bp, Homo sapien
tcaggtaaatgacggaggcaaagcc

SEQ ID NO: 1611463 - DNA, 25 bp, Homo sapien
cacatggcaagcaaaatggtggatc

SEQ ID NO: 1611464 - DNA, 25 bp, Homo sapien
ggcacatggcaagcaaaatggtgga

SEQ ID NO: 1611465 - DNA, 25 bp, Homo sapien
gcacatggcaagcaaaatggtggat

SEQ ID NO: 1611466 - DNA, 25 bp, Homo sapien
agccccgcgggctcatgagcacgtt

SEQ ID NO: 1611467 - DNA, 25 bp, Homo sapien
ctcatgagcacgttgtagcgcaggg

SEQ ID NO: 1611468 - DNA, 25 bp, Homo sapien
cccgcgggctcatgagcacgttgta

SEQ ID NO: 1611469 - DNA, 25 bp, Homo sapien
cgggctcatgagcacgttgtagcgc

SEQ ID NO: 1611470 - DNA, 25 bp, Homo sapien
tgcccagcagcgtgaacaggtacat

SEQ ID NO: 1611471 - DNA, 25 bp, Homo sapien
tgggtgaagccgaagctgaaggaga

SEQ ID NO: 1611472 - DNA, 25 bp, Homo sapien
tgatggccacggtgtagaggatctc

SEQ ID NO: 1611473 - DNA, 25 bp, Homo sapien
gaacatctgactggcacaggccagg

SEQ ID NO: 1611474 - DNA, 25 bp, Homo sapien
tcactgtggagtgattggctctctg

SEQ ID NO: 1611475 - DNA, 25 bp, Homo sapien
aggatgaattgggtcactgtggagt

SEQ ID NO: 1611476 - DNA, 25 bp, Homo sapien
ggtcactgtggagtgattggctctc

SEQ ID NO: 1611477 - DNA, 25 bp, Homo sapien
cgacgaggatgaattgggtcactgt

SEQ ID NO: 1611478 - DNA, 25 bp, Homo sapien
tgagatgtgacagggagatgtcagt

SEQ ID NO: 1611479 - DNA, 25 bp, Homo sapien
gggtgagatgtgacagggagatgtc

SEQ ID NO: 1611480 - DNA, 25 bp, Homo sapien
gagatgtcagttactgcatgaagaa

SEQ ID NO: 1611481 - DNA, 25 bp, Homo sapien
agggagatgtcagttactgcatgaa

SEQ ID NO: 1611482 - DNA, 25 bp, Homo sapien
tcctggaatcactctcgttttgccc

SEQ ID NO: 1611483 - DNA, 25 bp, Homo sapien
ttgcccgtagctccacagaatagtg

SEQ ID NO: 1611484 - DNA, 25 bp, Homo sapien
aagccctggcagatttatagtgaga

SEQ ID NO: 1611485 - DNA, 25 bp, Homo sapien
tccaaacatcgttggtctccagagt

SEQ ID NO: 1611486 - DNA, 25 bp, Homo sapien
tgtttcaaaggccactaggagatgc

SEQ ID NO: 1611487 - DNA, 25 bp, Homo sapien
tttcaaaggccactaggagatgctg

SEQ ID NO: 1611488 - DNA, 25 bp, Homo sapien
tggtggctgtttcaaaggccactag

SEQ ID NO: 1611489 - DNA, 25 bp, Homo sapien
ggctgtttcaaaggccactaggaga

SEQ ID NO: 1611490 - DNA, 25 bp, Homo sapien
caatcctttttccgtagacttcttg

SEQ ID NO: 1611491 - DNA, 25 bp, Homo sapien
gtggtggctggagcttctgaaccct

SEQ ID NO: 1611492 - DNA, 25 bp, Homo sapien
ttcatcccagtaggaggctctagtt

SEQ ID NO: 1611493 - DNA, 25 bp, Homo sapien
tcatcccagtaggaggctctagttt

SEQ ID NO: 1611494 - DNA, 25 bp, Homo sapien
catcccagtaggaggctctagtttg

SEQ ID NO: 1611495 - DNA, 25 bp, Homo sapien
tcccagtaggaggctctagtttgga

SEQ ID NO: 1611496 - DNA, 25 bp, Homo sapien
aattcctaacattcatagaggtttt

SEQ ID NO: 1611497 - DNA, 25 bp, Homo sapien
tcctaacattcatagaggttttctc

SEQ ID NO: 1611498 - DNA, 25 bp, Homo sapien
ttcctaacattcatagaggttttct

SEQ ID NO: 1611499 - DNA, 25 bp, Homo sapien
gaaattcctaacattcatagaggtt

SEQ ID NO: 1611500 - DNA, 25 bp, Homo sapien
gagtggtgaaaacgaaaggcattcc

SEQ ID NO: 1611501 - DNA, 25 bp, Homo sapien
tgtatgtgaaaggagtggtgaaaac

SEQ ID NO: 1611502 - DNA, 25 bp, Homo sapien
ctttcgtgtatgtgaaaggagtggt

SEQ ID NO: 1611503 - DNA, 25 bp, Homo sapien
tgtgaaaggagtggtgaaaacgaaa

SEQ ID NO: 1611504 - DNA, 25 bp, Homo sapien
gatattcacagggtttgcgtccaag

SEQ ID NO: 1611505 - DNA, 25 bp, Homo sapien
tcaggtggctttactccaggaggcg

SEQ ID NO: 1611506 - DNA, 25 bp, Homo sapien
tcagtggatggatagcccacgccga

SEQ ID NO: 1611507 - DNA, 25 bp, Homo sapien
tgcgtccaaggcgatctctgatgtg

SEQ ID NO: 1611508 - DNA, 25 bp, Homo sapien
ttattttcacagggtctctctacca

SEQ ID NO: 1611509 - DNA, 25 bp, Homo sapien
tcacagggtctctctaccatatgat

SEQ ID NO: 1611510 - DNA, 25 bp, Homo sapien
ttttcacagggtctctctaccatat

SEQ ID NO: 1611511 - DNA, 25 bp, Homo sapien
ttcacagggtctctctaccatatga

SEQ ID NO: 1611512 - DNA, 25 bp, Homo sapien
atgttcttatctccccatttctttc

SEQ ID NO: 1611513 - DNA, 25 bp, Homo sapien
aatgttgtcacccttaactacagag

SEQ ID NO: 1611514 - DNA, 25 bp, Homo sapien
gaaatgttgtcacccttaactacag

SEQ ID NO: 1611515 - DNA, 25 bp, Homo sapien
agaaatgttgtcacccttaactaca

SEQ ID NO: 1611516 - DNA, 25 bp, Homo sapien
atgttgtcacccttaactacagagg

SEQ ID NO: 1611517 - DNA, 25 bp, Homo sapien
tcctgtagggtgaagttgaaagcca

SEQ ID NO: 1611518 - DNA, 25 bp, Homo sapien
acataataagttcacatgattccat

SEQ ID NO: 1611519 - DNA, 25 bp, Homo sapien
cacataataagttcacatgattcca

SEQ ID NO: 1611520 - DNA, 25 bp, Homo sapien
cacagggttttgtattaatctctga

SEQ ID NO: 1611521 - DNA, 25 bp, Homo sapien
tcttggtgttgccaagtcctgaccc

SEQ ID NO: 1611522 - DNA, 25 bp, Homo sapien
aagagaagagttattcaccgtcaca

SEQ ID NO: 1611523 - DNA, 25 bp, Homo sapien
tatttccatgacaatacacagttga

SEQ ID NO: 1611524 - DNA, 25 bp, Homo sapien
tcacagatgccgagcttcgggtaac

SEQ ID NO: 1611525 - DNA, 25 bp, Homo sapien
cagatgccgagcttcgggtaactct

SEQ ID NO: 1611526 - DNA, 25 bp, Homo sapien
tgccgagcttcgggtaactcttacg

SEQ ID NO: 1611527 - DNA, 25 bp, Homo sapien
cgagcttcgggtaactcttacggtg

SEQ ID NO: 1611528 - DNA, 25 bp, Homo sapien
gccacaagattaggccgagagccga

SEQ ID NO: 1611529 - DNA, 25 bp, Homo sapien
gacaccctagctggacgatcagtcc

SEQ ID NO: 1611530 - DNA, 25 bp, Homo sapien
aaactctacagcctcaatggaccag

SEQ ID NO: 1611531 - DNA, 25 bp, Homo sapien
gagagccgatcagacaaacaaccta

SEQ ID NO: 1611532 - DNA, 25 bp, Homo sapien
gacctgcacatatccgtccaggtgg

SEQ ID NO: 1611533 - DNA, 25 bp, Homo sapien
ggtcacacttgaagcagtccggaga

SEQ ID NO: 1611534 - DNA, 25 bp, Homo sapien
gacaaaaatgtcaggcctgtgagct

SEQ ID NO: 1611535 - DNA, 25 bp, Homo sapien
tttaaggtgtccacgcagtccctgg

SEQ ID NO: 1611536 - DNA, 25 bp, Homo sapien
agatcgtgccggcaggtgttccact

SEQ ID NO: 1611537 - DNA, 25 bp, Homo sapien
ggctctagccaagcgcatctctgat

SEQ ID NO: 1611538 - DNA, 25 bp, Homo sapien
gggctgtttgatgccactcaaggct

SEQ ID NO: 1611539 - DNA, 25 bp, Homo sapien
gacaatagagtttggtagatcgtgc

SEQ ID NO: 1611540 - DNA, 25 bp, Homo sapien
gatgagcacggggagttttggagga

SEQ ID NO: 1611541 - DNA, 25 bp, Homo sapien
aagaggtttacaccaatcttatggg

SEQ ID NO: 1611542 - DNA, 25 bp, Homo sapien
ttggagaaacgtcctttattgttgc

SEQ ID NO: 1611543 - DNA, 25 bp, Homo sapien
aaacgtcctttattgttgcctctgg

SEQ ID NO: 1611544 - DNA, 25 bp, Homo sapien
gaggttgaggatgcacaacaagagg

SEQ ID NO: 1611545 - DNA, 25 bp, Homo sapien
caagaggagttgctccagtgtccct

SEQ ID NO: 1611546 - DNA, 25 bp, Homo sapien
tttgcaagaggagttgctccagtgt

SEQ ID NO: 1611547 - DNA, 25 bp, Homo sapien
gactctgatttgcaagaggagttgc

SEQ ID NO: 1611548 - DNA, 25 bp, Homo sapien
gctggggtggttccattatcatcca

SEQ ID NO: 1611549 - DNA, 25 bp, Homo sapien
ggtgggggctgagccatccatccac

SEQ ID NO: 1611550 - DNA, 25 bp, Homo sapien
tgtaggtgggggctgagccatccat

SEQ ID NO: 1611551 - DNA, 25 bp, Homo sapien
taggtgggggctgagccatccatcc

SEQ ID NO: 1611552 - DNA, 25 bp, Homo sapien
atgtaggtgggggctgagccatcca

SEQ ID NO: 1611553 - DNA, 25 bp, Homo sapien
gatgtcgcctggttagttgatgtca

SEQ ID NO: 1611554 - DNA, 25 bp, Homo sapien
agaggcctatccaggatgtcgcctg

SEQ ID NO: 1611555 - DNA, 25 bp, Homo sapien
ccaggatgtcgcctggttagttgat

SEQ ID NO: 1611556 - DNA, 25 bp, Homo sapien
cctggttagttgatgtcaggaagtc

SEQ ID NO: 1611557 - DNA, 25 bp, Homo sapien
gaagaagttacatttgggaggtgga

SEQ ID NO: 1611558 - DNA, 25 bp, Homo sapien
catttgggaggtggaattccttgga

SEQ ID NO: 1611559 - DNA, 25 bp, Homo sapien
tacatttgggaggtggaattccttg

SEQ ID NO: 1611560 - DNA, 25 bp, Homo sapien
ctggaaggaagaagttacatttggg

SEQ ID NO: 1611561 - DNA, 25 bp, Homo sapien
catttcaccccgaatgaagtcccgg

SEQ ID NO: 1611562 - DNA, 25 bp, Homo sapien
ggacaacctttatttgcctgaacat

SEQ ID NO: 1611563 - DNA, 25 bp, Homo sapien
ggtcatgtccggtgtctgccagccc

SEQ ID NO: 1611564 - DNA, 25 bp, Homo sapien
cattgcgtgcctggacaacctttat

SEQ ID NO: 1611565 - DNA, 25 bp, Homo sapien
ctttttcatcccgcacatccttcgt

SEQ ID NO: 1611566 - DNA, 25 bp, Homo sapien
ttttcatcccgcacatccttcgtca

SEQ ID NO: 1611567 - DNA, 25 bp, Homo sapien
tttcatcccgcacatccttcgtcat

SEQ ID NO: 1611568 - DNA, 25 bp, Homo sapien
tttttcatcccgcacatccttcgtc

SEQ ID NO: 1611569 - DNA, 25 bp, Homo sapien
tggggtccttgctgctagcatccct

SEQ ID NO: 1611570 - DNA, 25 bp, Homo sapien
gggccccaatgctgataattctttg

SEQ ID NO: 1611571 - DNA, 25 bp, Homo sapien
ggccccaatgctgataattctttgg

SEQ ID NO: 1611572 - DNA, 25 bp, Homo sapien
tgctagcatccctgccttcaatcat

SEQ ID NO: 1611573 - DNA, 25 bp, Homo sapien
cctccgcatgcatgatcagctctgg

SEQ ID NO: 1611574 - DNA, 25 bp, Homo sapien
taaagtccgccctccgcatgcatga

SEQ ID NO: 1611575 - DNA, 25 bp, Homo sapien
tggtgccgcaggaagcggaagccca

SEQ ID NO: 1611576 - DNA, 25 bp, Homo sapien
gcatgcatgatcagctctggcttcc

SEQ ID NO: 1611577 - DNA, 25 bp, Homo sapien
ctgcgggcagatgagaggactctga

SEQ ID NO: 1611578 - DNA, 25 bp, Homo sapien
ctctgactgtgcccaagacccgcat

SEQ ID NO: 1611579 - DNA, 25 bp, Homo sapien
gggcagatgagaggactctgactgt

SEQ ID NO: 1611580 - DNA, 25 bp, Homo sapien
gcagatgagaggactctgactgtgc

SEQ ID NO: 1611581 - DNA, 25 bp, Homo sapien
cacacacattttgaggaccacaaaa

SEQ ID NO: 1611582 - DNA, 25 bp, Homo sapien
ttaagactgatttgaacacttaaca

SEQ ID NO: 1611583 - DNA, 25 bp, Homo sapien
gactgatttgaacacttaacacaca

SEQ ID NO: 1611584 - DNA, 25 bp, Homo sapien
taacacacacattttgaggaccaca

SEQ ID NO: 1611585 - DNA, 25 bp, Homo sapien
ttatatgaacaacctggacagaaaa

SEQ ID NO: 1611586 - DNA, 25 bp, Homo sapien
tatatgaacaacctggacagaaaaa

SEQ ID NO: 1611587 - DNA, 25 bp, Homo sapien
taccacgaaattcaccatttcaaag

SEQ ID NO: 1611588 - DNA, 25 bp, Homo sapien
cacataccacgaaattcaccatttc

SEQ ID NO: 1611589 - DNA, 25 bp, Homo sapien
ccctctgcgcgcaggaccagctccg

SEQ ID NO: 1611590 - DNA, 25 bp, Homo sapien
tgatgttctctgggtcaaagcgaaa

SEQ ID NO: 1611591 - DNA, 25 bp, Homo sapien
tgttctctgggtcaaagcgaaaggg

SEQ ID NO: 1611592 - DNA, 25 bp, Homo sapien
tgggccctgccgagaagggaataaa

SEQ ID NO: 1611593 - DNA, 25 bp, Homo sapien
ccttgatgttctctgggtcaaagcg

SEQ ID NO: 1611594 - DNA, 25 bp, Homo sapien
gctgggttgtgatgggttccgaaaa

SEQ ID NO: 1611595 - DNA, 25 bp, Homo sapien
ccacacagctgggttgtgatgggtt

SEQ ID NO: 1611596 - DNA, 25 bp, Homo sapien
gttgtgatgggttccgaaaacactg

SEQ ID NO: 1611597 - DNA, 25 bp, Homo sapien
tgggttccgaaaacactgatgaggc

SEQ ID NO: 1611598 - DNA, 25 bp, Homo sapien
ccaggagactcctccccgtgaggct

SEQ ID NO: 1611599 - DNA, 25 bp, Homo sapien
actcctccccgtgaggctgtgagca

SEQ ID NO: 1611600 - DNA, 25 bp, Homo sapien
gagactcctccccgtgaggctgtga

SEQ ID NO: 1611601 - DNA, 25 bp, Homo sapien
caggagactcctccccgtgaggctg

SEQ ID NO: 1611602 - DNA, 25 bp, Homo sapien
ctgggtgacatggcgggagatgacc

SEQ ID NO: 1611603 - DNA, 25 bp, Homo sapien
gggtgacatggcgggagatgaccgg

SEQ ID NO: 1611604 - DNA, 25 bp, Homo sapien
tgggtgacatggcgggagatgaccg

SEQ ID NO: 1611605 - DNA, 25 bp, Homo sapien
ggtgacatggcgggagatgaccggg

SEQ ID NO: 1611606 - DNA, 25 bp, Homo sapien
ggtgctttgcaaggtggtacaggac

SEQ ID NO: 1611607 - DNA, 25 bp, Homo sapien
tgctttgcaaggtggtacaggaccc

SEQ ID NO: 1611608 - DNA, 25 bp, Homo sapien
gtgctttgcaaggtggtacaggacc

SEQ ID NO: 1611609 - DNA, 25 bp, Homo sapien
ttcagcacccgaaggtagacagcac

SEQ ID NO: 1611610 - DNA, 25 bp, Homo sapien
ctgttcctggaagggagagatcccg

SEQ ID NO: 1611611 - DNA, 25 bp, Homo sapien
tcctggaagggagagatcccggtcc

SEQ ID NO: 1611612 - DNA, 25 bp, Homo sapien
ggagagatcccggtcccctctctag

SEQ ID NO: 1611613 - DNA, 25 bp, Homo sapien
agggagagatcccggtcccctctct

SEQ ID NO: 1611614 - DNA, 25 bp, Homo sapien
cagataacttcttcccgtcttcatc

SEQ ID NO: 1611615 - DNA, 25 bp, Homo sapien
gtcctcatcagataacttcttcccg

SEQ ID NO: 1611616 - DNA, 25 bp, Homo sapien
tcagataacttcttcccgtcttcat

SEQ ID NO: 1611617 - DNA, 25 bp, Homo sapien
tcatcagataacttcttcccgtctt

SEQ ID NO: 1611618 - DNA, 25 bp, Homo sapien
agtcacactagctctaagggctctt

SEQ ID NO: 1611619 - DNA, 25 bp, Homo sapien
acccccataaaaagtcacactagct

SEQ ID NO: 1611620 - DNA, 25 bp, Homo sapien
tcttgagtctaatctgagacagtct

SEQ ID NO: 1611621 - DNA, 25 bp, Homo sapien
cttgcactcctagacccctcttggt

SEQ ID NO: 1611622 - DNA, 25 bp, Homo sapien
cacagatatagacacagacatacac

SEQ ID NO: 1611623 - DNA, 25 bp, Homo sapien
agacacacgcacacatagactaagt

SEQ ID NO: 1611624 - DNA, 25 bp, Homo sapien
tagactgtcacagacttagaaacat

SEQ ID NO: 1611625 - DNA, 25 bp, Homo sapien
cacatagacaaagtcacagacttag

SEQ ID NO: 1611626 - DNA, 25 bp, Homo sapien
gaagtcaatatgcaggaggatctca

SEQ ID NO: 1611627 - DNA, 25 bp, Homo sapien
ggaagtcaatatgcaggaggatctc

SEQ ID NO: 1611628 - DNA, 25 bp, Homo sapien
aaacatatccaaacaggcactaccc

SEQ ID NO: 1611629 - DNA, 25 bp, Homo sapien
gctcaaacatatccaaacaggcact

SEQ ID NO: 1611630 - DNA, 25 bp, Homo sapien
tgtgctcaaacatatccaaacaggc

SEQ ID NO: 1611631 - DNA, 25 bp, Homo sapien
aacatatccaaacaggcactaccct

SEQ ID NO: 1611632 - DNA, 25 bp, Homo sapien
ctgaggccaggagctgccacttggc

SEQ ID NO: 1611633 - DNA, 25 bp, Homo sapien
ttgaaaatcttcatatagggcttca

SEQ ID NO: 1611634 - DNA, 25 bp, Homo sapien
gtcagcatccgacggtggcggctcc

SEQ ID NO: 1611635 - DNA, 25 bp, Homo sapien
aaatggaaggcaggcgtcagcatcc

SEQ ID NO: 1611636 - DNA, 25 bp, Homo sapien
ttgtcaccagcactcagcaggagcc

SEQ ID NO: 1611637 - DNA, 25 bp, Homo sapien
gccatgggcaaggacctctccctcc

SEQ ID NO: 1611638 - DNA, 25 bp, Homo sapien
aaccctgttcacctgcagatactca

SEQ ID NO: 1611639 - DNA, 25 bp, Homo sapien
ttttcccaaccctgttcacctgcag

SEQ ID NO: 1611640 - DNA, 25 bp, Homo sapien
agccaagggccatgggcaaggacct

SEQ ID NO: 1611641 - DNA, 25 bp, Homo sapien
aacttgtcctttggtgcaatggcag

SEQ ID NO: 1611642 - DNA, 25 bp, Homo sapien
tagaagaacttgtcctttggtgcaa

SEQ ID NO: 1611643 - DNA, 25 bp, Homo sapien
gaagaacttgtcctttggtgcaatg

SEQ ID NO: 1611644 - DNA, 25 bp, Homo sapien
gaacttgtcctttggtgcaatggca

SEQ ID NO: 1611645 - DNA, 25 bp, Homo sapien
cagctctacatgaccccagttggaa

SEQ ID NO: 1611646 - DNA, 25 bp, Homo sapien
tcggtcacgtgttcagctggaggca

SEQ ID NO: 1611647 - DNA, 25 bp, Homo sapien
cagaggttagacaggtggaagtcca

SEQ ID NO: 1611648 - DNA, 25 bp, Homo sapien
attgtagagacacgccccagacatg

SEQ ID NO: 1611649 - DNA, 25 bp, Homo sapien
tgagtcagaactctcatgccctcct

SEQ ID NO: 1611650 - DNA, 25 bp, Homo sapien
tgggaaacaccgaaggcggcggcag

SEQ ID NO: 1611651 - DNA, 25 bp, Homo sapien
gtgggaaacaccgaaggcggcggca

SEQ ID NO: 1611652 - DNA, 25 bp, Homo sapien
ggagcagtctgtcccagacaacctc

SEQ ID NO: 1611653 - DNA, 25 bp, Homo sapien
cttctgtcaggagcagtctgtccca

SEQ ID NO: 1611654 - DNA, 25 bp, Homo sapien
tgtcaggagcagtctgtcccagaca

SEQ ID NO: 1611655 - DNA, 25 bp, Homo sapien
tcaggagcagtctgtcccagacaac

SEQ ID NO: 1611656 - DNA, 25 bp, Homo sapien
tgaagaagtaggtggaacgcttcac

SEQ ID NO: 1611657 - DNA, 25 bp, Homo sapien
agctgaagaagtaggtggaacgctt

SEQ ID NO: 1611658 - DNA, 25 bp, Homo sapien
gctgaagaagtaggtggaacgcttc

SEQ ID NO: 1611659 - DNA, 25 bp, Homo sapien
gaagaagtaggtggaacgcttcacc

SEQ ID NO: 1611660 - DNA, 25 bp, Homo sapien
ggggctcagagcagaaccgcctgac

SEQ ID NO: 1611661 - DNA, 25 bp, Homo sapien
ggcttgggcaccacctgcagtgtct

SEQ ID NO: 1611662 - DNA, 25 bp, Homo sapien
tctggctggcctccaagatcttctg

SEQ ID NO: 1611663 - DNA, 25 bp, Homo sapien
acctgcagtgtctccttcatctggc

SEQ ID NO: 1611664 - DNA, 25 bp, Homo sapien
aggatggactcgctgtgcaagcaaa

SEQ ID NO: 1611665 - DNA, 25 bp, Homo sapien
gatggactcgctgtgcaagcaaact

SEQ ID NO: 1611666 - DNA, 25 bp, Homo sapien
ggatggactcgctgtgcaagcaaac

SEQ ID NO: 1611667 - DNA, 25 bp, Homo sapien
gctgcatgggtccggtaacagtcgt

SEQ ID NO: 1611668 - DNA, 25 bp, Homo sapien
gcatgggtccggtaacagtcgtgca

SEQ ID NO: 1611669 - DNA, 25 bp, Homo sapien
catgggtccggtaacagtcgtgcac

SEQ ID NO: 1611670 - DNA, 25 bp, Homo sapien
tgcatgggtccggtaacagtcgtgc

SEQ ID NO: 1611671 - DNA, 25 bp, Homo sapien
tcaggcccttcctgtagcagtgcag

SEQ ID NO: 1611672 - DNA, 25 bp, Homo sapien
agtggatgaagttgggccggaagcc

SEQ ID NO: 1611673 - DNA, 25 bp, Homo sapien
cgttcttctgcttaggtgtgttggg

SEQ ID NO: 1611674 - DNA, 25 bp, Homo sapien
gtgagcatcatgtgtgaggagtcca

SEQ ID NO: 1611675 - DNA, 25 bp, Homo sapien
tccacctcctgattgcttgaccttg

SEQ ID NO: 1611676 - DNA, 25 bp, Homo sapien
tgaattccacctcctgattgcttga

SEQ ID NO: 1611677 - DNA, 25 bp, Homo sapien
cttccggctgatgtctctgttgtgg

SEQ ID NO: 1611678 - DNA, 25 bp, Homo sapien
acctcctgattgcttgaccttggac

SEQ ID NO: 1611679 - DNA, 25 bp, Homo sapien
aggggggtgacccactccaccacag

SEQ ID NO: 1611680 - DNA, 25 bp, Homo sapien
accacagagcccgtgtgggagacga

SEQ ID NO: 1611681 - DNA, 25 bp, Homo sapien
ccgtgtgggagacgaggtgggcgct

SEQ ID NO: 1611682 - DNA, 25 bp, Homo sapien
tccaggcgatacggctggatgatgg

SEQ ID NO: 1611683 - DNA, 25 bp, Homo sapien
cccggaggcgcttctcaatctgcag

SEQ ID NO: 1611684 - DNA, 25 bp, Homo sapien
ccttgcgggtgatgaaggcttccag

SEQ ID NO: 1611685 - DNA, 25 bp, Homo sapien
cgtacaccacggtcatcactgtctg

SEQ ID NO: 1611686 - DNA, 25 bp, Homo sapien
accaccttgcgggtgatgaaggctt

SEQ ID NO: 1611687 - DNA, 25 bp, Homo sapien
caccttgcgggtgatgaaggcttcc

SEQ ID NO: 1611688 - DNA, 25 bp, Homo sapien
ctgtacacgtcctgcggcacatccg

SEQ ID NO: 1611689 - DNA, 25 bp, Homo sapien
cgctgtacacgtcctgcggcacatc

SEQ ID NO: 1611690 - DNA, 25 bp, Homo sapien
tgtacacgtcctgcggcacatccga

SEQ ID NO: 1611691 - DNA, 25 bp, Homo sapien
gccgctgtacacgtcctgcggcaca

SEQ ID NO: 1611692 - DNA, 25 bp, Homo sapien
tgtcgcggcccagggcagcataatg

SEQ ID NO: 1611693 - DNA, 25 bp, Homo sapien
ctgtcgcggcccagggcagcataat

SEQ ID NO: 1611694 - DNA, 25 bp, Homo sapien
cataaacgagaggttgtaaagcaaa

SEQ ID NO: 1611695 - DNA, 25 bp, Homo sapien
catgtatttggtacttctgtttaga

SEQ ID NO: 1611696 - DNA, 25 bp, Homo sapien
tgaatttagatacacaccagcccta

SEQ ID NO: 1611697 - DNA, 25 bp, Homo sapien
ccctatatgatggacttattcacac

SEQ ID NO: 1611698 - DNA, 25 bp, Homo sapien
ggtaagaacaatgagtgtgccctta

SEQ ID NO: 1611699 - DNA, 25 bp, Homo sapien
gcccttaatttcaagactcttgttg

SEQ ID NO: 1611700 - DNA, 25 bp, Homo sapien
tgtgcccttaatttcaagactcttg

SEQ ID NO: 1611701 - DNA, 25 bp, Homo sapien
cctggtaagaacaatgagtgtgccc

SEQ ID NO: 1611702 - DNA, 25 bp, Homo sapien
attaaaggtgcggagatattgcctg

SEQ ID NO: 1611703 - DNA, 25 bp, Homo sapien
ttaaaggtgcggagatattgcctgc

SEQ ID NO: 1611704 - DNA, 25 bp, Homo sapien
tgtgttgctaaggaacatatcagcc

SEQ ID NO: 1611705 - DNA, 25 bp, Homo sapien
tgctaaggaacatatcagccatatc

SEQ ID NO: 1611706 - DNA, 25 bp, Homo sapien
tatcagccatatctatcatgcacac

SEQ ID NO: 1611707 - DNA, 25 bp, Homo sapien
tatcccttatctactgtgttgctaa

SEQ ID NO: 1611708 - DNA, 25 bp, Homo sapien
cagttgggaaagtacatttccattt

SEQ ID NO: 1611709 - DNA, 25 bp, Homo sapien
ccagttgggaaagtacatttccatt

SEQ ID NO: 1611710 - DNA, 25 bp, Homo sapien
tccagttgggaaagtacatttccat

SEQ ID NO: 1611711 - DNA, 25 bp, Homo sapien
gtcattcagttttgtagtgattggc

SEQ ID NO: 1611712 - DNA, 25 bp, Homo sapien
ctgtcattcagttttgtagtgattg

SEQ ID NO: 1611713 - DNA, 25 bp, Homo sapien
cattcagttttgtagtgattggctg

SEQ ID NO: 1611714 - DNA, 25 bp, Homo sapien
tagtgattggctgagatgaaccttc

SEQ ID NO: 1611715 - DNA, 25 bp, Homo sapien
aaaggatcatagcttttttgccctg

SEQ ID NO: 1611716 - DNA, 25 bp, Homo sapien
agatgaggcaaaaaggatcatagct

SEQ ID NO: 1611717 - DNA, 25 bp, Homo sapien
caaaaaggatcatagcttttttgcc

SEQ ID NO: 1611718 - DNA, 25 bp, Homo sapien
tcagatgaggcaaaaaggatcatag

SEQ ID NO: 1611719 - DNA, 25 bp, Homo sapien
atagaattccagctctcttgggccc

SEQ ID NO: 1611720 - DNA, 25 bp, Homo sapien
tatagaattccagctctcttgggcc

SEQ ID NO: 1611721 - DNA, 25 bp, Homo sapien
tagaattccagctctcttgggcccc

SEQ ID NO: 1611722 - DNA, 25 bp, Homo sapien
cataacggagaacagaagcggtagg

SEQ ID NO: 1611723 - DNA, 25 bp, Homo sapien
ccacctgatgcaagatgggcacaca

SEQ ID NO: 1611724 - DNA, 25 bp, Homo sapien
cagggtgcccttaggggtggcctcg

SEQ ID NO: 1611725 - DNA, 25 bp, Homo sapien
aacagaagcggtagggtcagcaaga

SEQ ID NO: 1611726 - DNA, 25 bp, Homo sapien
gaatcaaggccagagtaaccgagtg

SEQ ID NO: 1611727 - DNA, 25 bp, Homo sapien
caacagggtttagcgatgcaacatc

SEQ ID NO: 1611728 - DNA, 25 bp, Homo sapien
tctgggagaacccactaagggccta

SEQ ID NO: 1611729 - DNA, 25 bp, Homo sapien
ggtgcaaaggcaatacgatggtccc

SEQ ID NO: 1611730 - DNA, 25 bp, Homo sapien
aaagtccaccctctgcgcgcaatat

SEQ ID NO: 1611731 - DNA, 25 bp, Homo sapien
cggcaggatgcggaagtgcagcagg

SEQ ID NO: 1611732 - DNA, 25 bp, Homo sapien
cctctgcgcgcaatatcagctcggg

SEQ ID NO: 1611733 - DNA, 25 bp, Homo sapien
gcaatatcagctcgggtttcctgcg

SEQ ID NO: 1611734 - DNA, 25 bp, Homo sapien
gatgttctcttggtcgaaacggaag

SEQ ID NO: 1611735 - DNA, 25 bp, Homo sapien
tgatgttctcttggtcgaaacggaa

SEQ ID NO: 1611736 - DNA, 25 bp, Homo sapien
atgttctcttggtcgaaacggaagg

SEQ ID NO: 1611737 - DNA, 25 bp, Homo sapien
agaccaagaaggcttgctgggtggg

SEQ ID NO: 1611738 - DNA, 25 bp, Homo sapien
ctgcaggtgagaccaagaaggcttg

SEQ ID NO: 1611739 - DNA, 25 bp, Homo sapien
ctgggtggggtcacccagttgggtg

SEQ ID NO: 1611740 - DNA, 25 bp, Homo sapien
gggtctcccagttgtctccaagacc

SEQ ID NO: 1611741 - DNA, 25 bp, Homo sapien
agttgggttgtaatggatcccgata

SEQ ID NO: 1611742 - DNA, 25 bp, Homo sapien
gttgtaatggatcccgataatattg

SEQ ID NO: 1611743 - DNA, 25 bp, Homo sapien
taatggatcccgataatattgatga

SEQ ID NO: 1611744 - DNA, 25 bp, Homo sapien
ggatcccgataatattgatgaggca

SEQ ID NO: 1611745 - DNA, 25 bp, Homo sapien
ccaggaggctcctccccctgaggct

SEQ ID NO: 1611746 - DNA, 25 bp, Homo sapien
aggctcctccccctgaggctgtgag

SEQ ID NO: 1611747 - DNA, 25 bp, Homo sapien
aggaggctcctccccctgaggctgt

SEQ ID NO: 1611748 - DNA, 25 bp, Homo sapien
gctcctccccctgaggctgtgagca

SEQ ID NO: 1611749 - DNA, 25 bp, Homo sapien
tgcgtgcaacatcgggagatgaccg

SEQ ID NO: 1611750 - DNA, 25 bp, Homo sapien
ctgcgtgcaacatcgggagatgacc

SEQ ID NO: 1611751 - DNA, 25 bp, Homo sapien
agtcctgcgtgcaacatcgggagat

SEQ ID NO: 1611752 - DNA, 25 bp, Homo sapien
acaaagtcctgcgtgcaacatcggg

SEQ ID NO: 1611753 - DNA, 25 bp, Homo sapien
cacttcttgccggcactgttcctgg

SEQ ID NO: 1611754 - DNA, 25 bp, Homo sapien
tgcacttcttgccggcactgttcct

SEQ ID NO: 1611755 - DNA, 25 bp, Homo sapien
acttcttgccggcactgttcctggt

SEQ ID NO: 1611756 - DNA, 25 bp, Homo sapien
gcacttcttgccggcactgttcctg

SEQ ID NO: 1611757 - DNA, 25 bp, Homo sapien
cttcagcaccagagggaggagagca

SEQ ID NO: 1611758 - DNA, 25 bp, Homo sapien
ttcagcaccagagggaggagagcac

SEQ ID NO: 1611759 - DNA, 25 bp, Homo sapien
ctgaggggcagccaagcaaaactgg

SEQ ID NO: 1611760 - DNA, 25 bp, Homo sapien
aaaactgggtttctgggctgcttca

SEQ ID NO: 1611761 - DNA, 25 bp, Homo sapien
ggtgtcagcttctgctcttatgtcc

SEQ ID NO: 1611762 - DNA, 25 bp, Homo sapien
ctcttatgtcctcatcagacaattc

SEQ ID NO: 1611763 - DNA, 25 bp, Homo sapien
ttatgtcctcatcagacaattcctt

SEQ ID NO: 1611764 - DNA, 25 bp, Homo sapien
cttctgctcttatgtcctcatcaga

SEQ ID NO: 1611765 - DNA, 25 bp, Homo sapien
tggagagaaggcaagacaatatccc

SEQ ID NO: 1611766 - DNA, 25 bp, Homo sapien
ctggagagaaggcaagacaatatcc

SEQ ID NO: 1611767 - DNA, 25 bp, Homo sapien
gagagaaggcaagacaatatccctg

SEQ ID NO: 1611768 - DNA, 25 bp, Homo sapien
gagaaggcaagacaatatccctgcc

SEQ ID NO: 1611769 - DNA, 25 bp, Homo sapien
ggaagtccgtgtgcaagagaatctg

SEQ ID NO: 1611770 - DNA, 25 bp, Homo sapien
tttgccttgttcttgaggaaatcat

SEQ ID NO: 1611771 - DNA, 25 bp, Homo sapien
gccttgttcttgaggaaatcatcaa

SEQ ID NO: 1611772 - DNA, 25 bp, Homo sapien
aggaagtccgtgtgcaagagaatct

SEQ ID NO: 1611773 - DNA, 25 bp, Homo sapien
tgttcaaacatgtccagtctggcgc

SEQ ID NO: 1611774 - DNA, 25 bp, Homo sapien
tgtgttcaaacatgtccagtctggc

SEQ ID NO: 1611775 - DNA, 25 bp, Homo sapien
gtgttcaaacatgtccagtctggcg

SEQ ID NO: 1611776 - DNA, 25 bp, Homo sapien
atgtgttcaaacatgtccagtctgg

SEQ ID NO: 1611777 - DNA, 25 bp, Homo sapien
cgtcaacatccgacggtggcggctc

SEQ ID NO: 1611778 - DNA, 25 bp, Homo sapien
cttcatataaggcttcaagatgttg

SEQ ID NO: 1611779 - DNA, 25 bp, Homo sapien
gaaatggaaggcaggcgtcaacatc

SEQ ID NO: 1611780 - DNA, 25 bp, Homo sapien
tataaggcttcaagatgttgaaatg

SEQ ID NO: 1611781 - DNA, 25 bp, Homo sapien
aatcatatccttgggtgcgacagca

SEQ ID NO: 1611782 - DNA, 25 bp, Homo sapien
atagaaaatcatatccttgggtgcg

SEQ ID NO: 1611783 - DNA, 25 bp, Homo sapien
gaaaatcatatccttgggtgcgaca

SEQ ID NO: 1611784 - DNA, 25 bp, Homo sapien
aaatcatatccttgggtgcgacagc

SEQ ID NO: 1611785 - DNA, 25 bp, Homo sapien
cagaatgcctttacagggacctagg

SEQ ID NO: 1611786 - DNA, 25 bp, Homo sapien
tgtcctaaacatggcccgggtataa

SEQ ID NO: 1611787 - DNA, 25 bp, Homo sapien
tggatctgggacctggaatattgcc

SEQ ID NO: 1611788 - DNA, 25 bp, Homo sapien
gaatattgccccgacagttgttaac

SEQ ID NO: 1611789 - DNA, 25 bp, Homo sapien
taatgatgtccactgcatcaccctt

SEQ ID NO: 1611790 - DNA, 25 bp, Homo sapien
ggaagccttccaatctgcccccagg

SEQ ID NO: 1611791 - DNA, 25 bp, Homo sapien
tactaatgatgtccactgcatcacc

SEQ ID NO: 1611792 - DNA, 25 bp, Homo sapien
ctgtatactaatgatgtccactgca

SEQ ID NO: 1611793 - DNA, 25 bp, Homo sapien
ctccacgaagtttgagatgtctctg

SEQ ID NO: 1611794 - DNA, 25 bp, Homo sapien
gaggacagggccctaaattgaggct

SEQ ID NO: 1611795 - DNA, 25 bp, Homo sapien
cttgccaattcctgactccacgaag

SEQ ID NO: 1611796 - DNA, 25 bp, Homo sapien
tcaagcacggggctttctcgaggac

SEQ ID NO: 1611797 - DNA, 25 bp, Homo sapien
gggagaggctagaaggcctttgatg

SEQ ID NO: 1611798 - DNA, 25 bp, Homo sapien
ggctagaaggcctttgatgtttccc

SEQ ID NO: 1611799 - DNA, 25 bp, Homo sapien
gagaggctagaaggcctttgatgtt

SEQ ID NO: 1611800 - DNA, 25 bp, Homo sapien
gccacacagaagcttggggagggga

SEQ ID NO: 1611801 - DNA, 25 bp, Homo sapien
cctggggatatgtggtcaccagctg

SEQ ID NO: 1611802 - DNA, 25 bp, Homo sapien
agccacaacttaaagccctggggat

SEQ ID NO: 1611803 - DNA, 25 bp, Homo sapien
tgaggcactggtgataggccggata

SEQ ID NO: 1611804 - DNA, 25 bp, Homo sapien
taggccggataatgtcagggtggca

SEQ ID NO: 1611805 - DNA, 25 bp, Homo sapien
ggttgaggaaaacactggaggcggc

SEQ ID NO: 1611806 - DNA, 25 bp, Homo sapien
ctggtgtccccaaaaccagttctgt

SEQ ID NO: 1611807 - DNA, 25 bp, Homo sapien
ttgaggaaaacactggaggcggcgg

SEQ ID NO: 1611808 - DNA, 25 bp, Homo sapien
aaggtgtaggtccaggccaggacgc

SEQ ID NO: 1611809 - DNA, 25 bp, Homo sapien
agagagagaggctgattagaatcca

SEQ ID NO: 1611810 - DNA, 25 bp, Homo sapien
ttagaatccaaaaaggcccagcctg

SEQ ID NO: 1611811 - DNA, 25 bp, Homo sapien
tctgagatgggtaaacaagagctga

SEQ ID NO: 1611812 - DNA, 25 bp, Homo sapien
taccaggaaatcaccagtctcccag

SEQ ID NO: 1611813 - DNA, 25 bp, Homo sapien
cctcctctccccctctgctaggagg

SEQ ID NO: 1611814 - DNA, 25 bp, Homo sapien
ctactgtgtgtcagatgttctatgt

SEQ ID NO: 1611815 - DNA, 25 bp, Homo sapien
actgtgtgtcagatgttctatgtag

SEQ ID NO: 1611816 - DNA, 25 bp, Homo sapien
tgtgtcagatgttctatgtagagca

SEQ ID NO: 1611817 - DNA, 25 bp, Homo sapien
gtgtgtcagatgttctatgtagagc

SEQ ID NO: 1611818 - DNA, 25 bp, Homo sapien
catggccacaatctggattgaacac

SEQ ID NO: 1611819 - DNA, 25 bp, Homo sapien
gcgttacaatgtgctcatgagcccc

SEQ ID NO: 1611820 - DNA, 25 bp, Homo sapien
tctgccacccactgcgttacaatgt

SEQ ID NO: 1611821 - DNA, 25 bp, Homo sapien
ttctcatcatggccacaatctggat

SEQ ID NO: 1611822 - DNA, 25 bp, Homo sapien
tcataagcactggataatgtcagct

SEQ ID NO: 1611823 - DNA, 25 bp, Homo sapien
tagatattgttaaagggtgtggtcc

SEQ ID NO: 1611824 - DNA, 25 bp, Homo sapien
tccttagaccgagcaaaattggcac

SEQ ID NO: 1611825 - DNA, 25 bp, Homo sapien
aaattggcacttaactgggctctgc

SEQ ID NO: 1611826 - DNA, 25 bp, Homo sapien
gccaaggagtctcaaggcggtcgct

SEQ ID NO: 1611827 - DNA, 25 bp, Homo sapien
cctggcacaggatgaagtccgggtt

SEQ ID NO: 1611828 - DNA, 25 bp, Homo sapien
tgcacatgagcaagcaggcgctcct

SEQ ID NO: 1611829 - DNA, 25 bp, Homo sapien
ttaactgcaggaatctacaggatgc

SEQ ID NO: 1611830 - DNA, 25 bp, Homo sapien
acatggtggtggctgactccggggg

SEQ ID NO: 1611831 - DNA, 25 bp, Homo sapien
ctacatggtggtggctgactccggg

SEQ ID NO: 1611832 - DNA, 25 bp, Homo sapien
catggtggtggctgactccgggggt

SEQ ID NO: 1611833 - DNA, 25 bp, Homo sapien
tacatggtggtggctgactccgggg

SEQ ID NO: 1611834 - DNA, 25 bp, Homo sapien
tgaaacacatgaggtgtctccaagg

SEQ ID NO: 1611835 - DNA, 25 bp, Homo sapien
tgttcaccactggctgtttgtaagg

SEQ ID NO: 1611836 - DNA, 25 bp, Homo sapien
cagaccctgatgttctcgtcatgtt

SEQ ID NO: 1611837 - DNA, 25 bp, Homo sapien
gggtcacttgccattgagtcttgct

SEQ ID NO: 1611838 - DNA, 25 bp, Homo sapien
ctatgaggttgtgtggagacttcca

SEQ ID NO: 1611839 - DNA, 25 bp, Homo sapien
gttgtgtggagacttccagccccat

SEQ ID NO: 1611840 - DNA, 25 bp, Homo sapien
tggagggttggaccccaggactatg

SEQ ID NO: 1611841 - DNA, 25 bp, Homo sapien
accccaggactatgaggttgtgtgg

SEQ ID NO: 1611842 - DNA, 25 bp, Homo sapien
gtctggacagacacggaagcacagc

SEQ ID NO: 1611843 - DNA, 25 bp, Homo sapien
tggtctggacagacacggaagcaca

SEQ ID NO: 1611844 - DNA, 25 bp, Homo sapien
atgtggtctggacagacacggaagc

SEQ ID NO: 1611845 - DNA, 25 bp, Homo sapien
tctggacagacacggaagcacagca

SEQ ID NO: 1611846 - DNA, 25 bp, Homo sapien
gttgggttgtggtgagtctcaaaat

SEQ ID NO: 1611847 - DNA, 25 bp, Homo sapien
aaattactgaagagacagacaatgc

SEQ ID NO: 1611848 - DNA, 25 bp, Homo sapien
ggatgcagccacaggctgtccttaa

SEQ ID NO: 1611849 - DNA, 25 bp, Homo sapien
tgggtgcagcatcgggagatgacag

SEQ ID NO: 1611850 - DNA, 25 bp, Homo sapien
ctgggtgcagcatcgggagatgaca

SEQ ID NO: 1611851 - DNA, 25 bp, Homo sapien
gccacaggctgtccttaatgtacat

SEQ ID NO: 1611852 - DNA, 25 bp, Homo sapien
ctttaggctcgtgatccttcagaag

SEQ ID NO: 1611853 - DNA, 25 bp, Homo sapien
tctttaggctcgtgatccttcagaa

SEQ ID NO: 1611854 - DNA, 25 bp, Homo sapien
aggtgtcagcttctgctcttatttc

SEQ ID NO: 1611855 - DNA, 25 bp, Homo sapien
tcagacaactccttccaatcttcat

SEQ ID NO: 1611856 - DNA, 25 bp, Homo sapien
tcatcagacaactccttccaatctt

SEQ ID NO: 1611857 - DNA, 25 bp, Homo sapien
cttatttcctcatcagacaactcct

SEQ ID NO: 1611858 - DNA, 25 bp, Homo sapien
tggcctttacttcgtggaaataatc

SEQ ID NO: 1611859 - DNA, 25 bp, Homo sapien
ccctggctagtaagggtgtggcgct

SEQ ID NO: 1611860 - DNA, 25 bp, Homo sapien
gatagcttctgtgaagtcatgaacc

SEQ ID NO: 1611861 - DNA, 25 bp, Homo sapien
tacttcgtggaaataatcaacaccc

SEQ ID NO: 1611862 - DNA, 25 bp, Homo sapien
tgtccagatgggcactgccccctga

SEQ ID NO: 1611863 - DNA, 25 bp, Homo sapien
gtgtgctcaaacatgtccagatggg

SEQ ID NO: 1611864 - DNA, 25 bp, Homo sapien
ctggtgtgctcaaacatgtccagat

SEQ ID NO: 1611865 - DNA, 25 bp, Homo sapien
aaacatgtccagatgggcactgccc

SEQ ID NO: 1611866 - DNA, 25 bp, Homo sapien
cgggcatcagcatctgacggtggca

SEQ ID NO: 1611867 - DNA, 25 bp, Homo sapien
ggcagctccacttgtcactggcatt

SEQ ID NO: 1611868 - DNA, 25 bp, Homo sapien
tggcagctccacttgtcactggcat

SEQ ID NO: 1611869 - DNA, 25 bp, Homo sapien
gtgcatgatattcacactgtcagtg

SEQ ID NO: 1611870 - DNA, 25 bp, Homo sapien
cttgtagaaggcctcgtcttttggt

SEQ ID NO: 1611871 - DNA, 25 bp, Homo sapien
aggaacttgtagaaggcctcgtctt

SEQ ID NO: 1611872 - DNA, 25 bp, Homo sapien
gaaggcctcgtcttttggtgcaatg

SEQ ID NO: 1611873 - DNA, 25 bp, Homo sapien
tagaaggcctcgtcttttggtgcaa

SEQ ID NO: 1611874 - DNA, 25 bp, Homo sapien
catgaaaatagcagtccagatcctc

SEQ ID NO: 1611875 - DNA, 25 bp, Homo sapien
tcatgaaaatagcagtccagatcct

SEQ ID NO: 1611876 - DNA, 25 bp, Homo sapien
tggggttcatccagatcttaaagcc

SEQ ID NO: 1611877 - DNA, 25 bp, Homo sapien
atgttggggtggcacaacctgatga

SEQ ID NO: 1611878 - DNA, 25 bp, Homo sapien
tgttggggtggcacaacctgatgat

SEQ ID NO: 1611879 - DNA, 25 bp, Homo sapien
cctgatgatgggagtaatggggttc

SEQ ID NO: 1611880 - DNA, 25 bp, Homo sapien
gtaagtggccaccagctgagtcaga

SEQ ID NO: 1611881 - DNA, 25 bp, Homo sapien
ctgggggtaagtggccaccagctga

SEQ ID NO: 1611882 - DNA, 25 bp, Homo sapien
tggccaccagctgagtcagaactct

SEQ ID NO: 1611883 - DNA, 25 bp, Homo sapien
ccaccagctgagtcagaactctcat

SEQ ID NO: 1611884 - DNA, 25 bp, Homo sapien
ctggcagttgcagcctcgtccatgg

SEQ ID NO: 1611885 - DNA, 25 bp, Homo sapien
tctggccagcgggggtcccacagtt

SEQ ID NO: 1611886 - DNA, 25 bp, Homo sapien
tcttatagttggggcctgtttggag

SEQ ID NO: 1611887 - DNA, 25 bp, Homo sapien
gcctggtcagcggggtcttatagtt

SEQ ID NO: 1611888 - DNA, 25 bp, Homo sapien
ggcctggttggtgggccgtctagca

SEQ ID NO: 1611889 - DNA, 25 bp, Homo sapien
ggccgtctagcagttgaggcctggt

SEQ ID NO: 1611890 - DNA, 25 bp, Homo sapien
gaggcctggtcatctgggcccggca

SEQ ID NO: 1611891 - DNA, 25 bp, Homo sapien
aggcctggtcatctgggcccggcat

SEQ ID NO: 1611892 - DNA, 25 bp, Homo sapien
cagaaaggacccttttctgggtgag

SEQ ID NO: 1611893 - DNA, 25 bp, Homo sapien
gaggtgctgtaagtggttgtgcaga

SEQ ID NO: 1611894 - DNA, 25 bp, Homo sapien
aatggagccagcctagggtggagct

SEQ ID NO: 1611895 - DNA, 25 bp, Homo sapien
ctgaatggagccagcctagggtgga

SEQ ID NO: 1611896 - DNA, 25 bp, Homo sapien
tgaatggagccagcctagggtggag

SEQ ID NO: 1611897 - DNA, 25 bp, Homo sapien
ggagccagcctagggtggagctgat

SEQ ID NO: 1611898 - DNA, 25 bp, Homo sapien
cacatgggggaccatggcgctgcac

SEQ ID NO: 1611899 - DNA, 25 bp, Homo sapien
ggatgaccacatgggggaccatggc

SEQ ID NO: 1611900 - DNA, 25 bp, Homo sapien
catgggggaccatggcgctgcacac

SEQ ID NO: 1611901 - DNA, 25 bp, Homo sapien
tgaccacatgggggaccatggcgct

SEQ ID NO: 1611902 - DNA, 25 bp, Homo sapien
ttgaagcaggtgcatgaggtcctga

SEQ ID NO: 1611903 - DNA, 25 bp, Homo sapien
agatcttgaagcaggtgcatgaggt

SEQ ID NO: 1611904 - DNA, 25 bp, Homo sapien
atcttgaagcaggtgcatgaggtcc

SEQ ID NO: 1611905 - DNA, 25 bp, Homo sapien
tcttgaagcaggtgcatgaggtcct

SEQ ID NO: 1611906 - DNA, 25 bp, Homo sapien
gccaacaagggcagcaacgatgact

SEQ ID NO: 1611907 - DNA, 25 bp, Homo sapien
cgatgactaggatgatgagtgagca

SEQ ID NO: 1611908 - DNA, 25 bp, Homo sapien
cgcaacaggtgtcgcggccagtgca

SEQ ID NO: 1611909 - DNA, 25 bp, Homo sapien
aggctttccagacggtggcagcgcc

SEQ ID NO: 1611910 - DNA, 25 bp, Homo sapien
cagggaggctccaagctacaaagtt

SEQ ID NO: 1611911 - DNA, 25 bp, Homo sapien
ggaggctccaagctacaaagttggg

SEQ ID NO: 1611912 - DNA, 25 bp, Homo sapien
gggaggctccaagctacaaagttgg

SEQ ID NO: 1611913 - DNA, 25 bp, Homo sapien
tgcagggaggctccaagctacaaag

SEQ ID NO: 1611914 - DNA, 25 bp, Homo sapien
tgcagctcagcaaaaggtccaggtg

SEQ ID NO: 1611915 - DNA, 25 bp, Homo sapien
gatccagactccacgggaagggctt

SEQ ID NO: 1611916 - DNA, 25 bp, Homo sapien
tcagtgggtacctcgaccttatggc

SEQ ID NO: 1611917 - DNA, 25 bp, Homo sapien
cacaggaacggactttgagcaccat

SEQ ID NO: 1611918 - DNA, 25 bp, Homo sapien
tgggcaagcatctgcagctatccat

SEQ ID NO: 1611919 - DNA, 25 bp, Homo sapien
gcagctatccatcttgctctccacc

SEQ ID NO: 1611920 - DNA, 25 bp, Homo sapien
tgagcagcagcgctgttgtccacct

SEQ ID NO: 1611921 - DNA, 25 bp, Homo sapien
caagcatctgcagctatccatcttg

SEQ ID NO: 1611922 - DNA, 25 bp, Homo sapien
gatcgttcaccgtcatggagctgcc

SEQ ID NO: 1611923 - DNA, 25 bp, Homo sapien
catggagacgactgggaacttcact

SEQ ID NO: 1611924 - DNA, 25 bp, Homo sapien
tggaggacgtggcattgcaccaaca

SEQ ID NO: 1611925 - DNA, 25 bp, Homo sapien
tgttctactgagtggtgtcgccagc

SEQ ID NO: 1611926 - DNA, 25 bp, Homo sapien
ggaaatcctgcgctggctgctggaa

SEQ ID NO: 1611927 - DNA, 25 bp, Homo sapien
gaaggcactctgtggtggcaccagc

SEQ ID NO: 1611928 - DNA, 25 bp, Homo sapien
actgagagatggcttcaaggaggca

SEQ ID NO: 1611929 - DNA, 25 bp, Homo sapien
agtgcaccgggcagggccttgaaac

SEQ ID NO: 1611930 - DNA, 25 bp, Homo sapien
acaggggcagccatggcgcgctggg

SEQ ID NO: 1611931 - DNA, 25 bp, Homo sapien
tggtacaatggccatggcacagtgg

SEQ ID NO: 1611932 - DNA, 25 bp, Homo sapien
ctgggtggtacaatggccatggcac

SEQ ID NO: 1611933 - DNA, 25 bp, Homo sapien
gccatggcgcgctgggccagtccag

SEQ ID NO: 1611934 - DNA, 25 bp, Homo sapien
tcctcccggcgtctgttgatgctca

SEQ ID NO: 1611935 - DNA, 25 bp, Homo sapien
catccctgaaggcgcgctgtggagt

SEQ ID NO: 1611936 - DNA, 25 bp, Homo sapien
agggagctcgcacagaccagagaga

SEQ ID NO: 1611937 - DNA, 25 bp, Homo sapien
cggcgtctgttgatgctcacagcgg

SEQ ID NO: 1611938 - DNA, 25 bp, Homo sapien
catagcagggccatattcaatgcac

SEQ ID NO: 1611939 - DNA, 25 bp, Homo sapien
ctgcatagcagggccatattcaatg

SEQ ID NO: 1611940 - DNA, 25 bp, Homo sapien
tgcatagcagggccatattcaatgc

SEQ ID NO: 1611941 - DNA, 25 bp, Homo sapien
gcatagcagggccatattcaatgca

SEQ ID NO: 1611942 - DNA, 25 bp, Homo sapien
gggccgcgcctgtaggttttccaga

SEQ ID NO: 1611943 - DNA, 25 bp, Homo sapien
gggcgctagtacctcgcgagctccg

SEQ ID NO: 1611944 - DNA, 25 bp, Homo sapien
agctccgcgaggatcattcccggga

SEQ ID NO: 1611945 - DNA, 25 bp, Homo sapien
tcgcagggtgcgtttctcaatccag

SEQ ID NO: 1611946 - DNA, 25 bp, Homo sapien
taatctccagagacccagtgagcac

SEQ ID NO: 1611947 - DNA, 25 bp, Homo sapien
agataatctccagagacccagtgag

SEQ ID NO: 1611948 - DNA, 25 bp, Homo sapien
aggagataatctccagagacccagt

SEQ ID NO: 1611949 - DNA, 25 bp, Homo sapien
tcaggagataatctccagagaccca

SEQ ID NO: 1611950 - DNA, 25 bp, Homo sapien
ttcgtggtcacttgcttcacctcca

SEQ ID NO: 1611951 - DNA, 25 bp, Homo sapien
gatgctggacgtgcaaagagatccc

SEQ ID NO: 1611952 - DNA, 25 bp, Homo sapien
ctggccttcgtggtcacttgcttca

SEQ ID NO: 1611953 - DNA, 25 bp, Homo sapien
cgtgcaaagagatcccttgtgtcat

SEQ ID NO: 1611954 - DNA, 25 bp, Homo sapien
caccaattaccatcacatggagatg

SEQ ID NO: 1611955 - DNA, 25 bp, Homo sapien
gagcgctctctagctagcttgcaga

SEQ ID NO: 1611956 - DNA, 25 bp, Homo sapien
tcccatcatggtgggtcaaccctca

SEQ ID NO: 1611957 - DNA, 25 bp, Homo sapien
tggaagaggataaccaagttctggc

SEQ ID NO: 1611958 - DNA, 25 bp, Homo sapien
tctcgctggaggacaattaactcgg

SEQ ID NO: 1611959 - DNA, 25 bp, Homo sapien
tgtaagcctcaatcggtagccggtc

SEQ ID NO: 1611960 - DNA, 25 bp, Homo sapien
gcaagaccgtctagttgggagagaa

SEQ ID NO: 1611961 - DNA, 25 bp, Homo sapien
ggttgaagcctctaatcctgtaagg

SEQ ID NO: 1611962 - DNA, 25 bp, Homo sapien
acggcctccagagttccagagtaaa

SEQ ID NO: 1611963 - DNA, 25 bp, Homo sapien
cgccacggcctccagagttccagag

SEQ ID NO: 1611964 - DNA, 25 bp, Homo sapien
ccagagttccagagtaaagctggga

SEQ ID NO: 1611965 - DNA, 25 bp, Homo sapien
cctccagagttccagagtaaagctg

SEQ ID NO: 1611966 - DNA, 25 bp, Homo sapien
ccgggccagggggatagatgtaaca

SEQ ID NO: 1611967 - DNA, 25 bp, Homo sapien
gatagatgtaacaccactaatacct

SEQ ID NO: 1611968 - DNA, 25 bp, Homo sapien
gatgtaacaccactaatacctcagc

SEQ ID NO: 1611969 - DNA, 25 bp, Homo sapien
tgtaacaccactaatacctcagctg

SEQ ID NO: 1611970 - DNA, 25 bp, Homo sapien
ggcttcagtcatgacttgatcactt

SEQ ID NO: 1611971 - DNA, 25 bp, Homo sapien
cttcagtcatgacttgatcacttaa

SEQ ID NO: 1611972 - DNA, 25 bp, Homo sapien
ccagagtcaggcttcagtcatgact

SEQ ID NO: 1611973 - DNA, 25 bp, Homo sapien
aggcttcagtcatgacttgatcact

SEQ ID NO: 1611974 - DNA, 25 bp, Homo sapien
ggttcctgggagaataggcagcccc

SEQ ID NO: 1611975 - DNA, 25 bp, Homo sapien
tagacagggctgcacgtatcggctt

SEQ ID NO: 1611976 - DNA, 25 bp, Homo sapien
ccatcacatgggtagggattttcca

SEQ ID NO: 1611977 - DNA, 25 bp, Homo sapien
tacaaaaattatggtgacgcctgcc

SEQ ID NO: 1611978 - DNA, 25 bp, Homo sapien
cagcctgaacttaatttagtcagga

SEQ ID NO: 1611979 - DNA, 25 bp, Homo sapien
ggagtggagagccactaaagactag

SEQ ID NO: 1611980 - DNA, 25 bp, Homo sapien
taggctgagcccacactgatgacag

SEQ ID NO: 1611981 - DNA, 25 bp, Homo sapien
gccactaaagactagaggaggccag

SEQ ID NO: 1611982 - DNA, 25 bp, Homo sapien
gaaatttgctaccaaaagcttgaag

SEQ ID NO: 1611983 - DNA, 25 bp, Homo sapien
tcggccgttatatccgtcacccagg

SEQ ID NO: 1611984 - DNA, 25 bp, Homo sapien
ccaaaagcttgaagatcttccagga

SEQ ID NO: 1611985 - DNA, 25 bp, Homo sapien
gggctgtcggccgttatatccgtca

SEQ ID NO: 1611986 - DNA, 25 bp, Homo sapien
gaaaatagtcacttggagccctgag

SEQ ID NO: 1611987 - DNA, 25 bp, Homo sapien
ttcgcaacattgaggaggtgaggcc

SEQ ID NO: 1611988 - DNA, 25 bp, Homo sapien
cagttgctcacgtctaggttaggga

SEQ ID NO: 1611989 - DNA, 25 bp, Homo sapien
tgtgacctggtacaaacgacctgtg

SEQ ID NO: 1611990 - DNA, 25 bp, Homo sapien
caaggtcggggggtaaatatctcag

SEQ ID NO: 1611991 - DNA, 25 bp, Homo sapien
aagtgtcaaagcagaaggtcccagg

SEQ ID NO: 1611992 - DNA, 25 bp, Homo sapien
gtaaatatctcagcctcactcacct

SEQ ID NO: 1611993 - DNA, 25 bp, Homo sapien
tcactcacctcccataggctagacc

SEQ ID NO: 1611994 - DNA, 25 bp, Homo sapien
gaaaacaaccacagccgtcacatgg

SEQ ID NO: 1611995 - DNA, 25 bp, Homo sapien
tggtcctcctgaagttggggcaccc

SEQ ID NO: 1611996 - DNA, 25 bp, Homo sapien
tgtgtgctgcaagtgaccccgaaaa

SEQ ID NO: 1611997 - DNA, 25 bp, Homo sapien
ccatcgagcatcaaggggacgctgt

SEQ ID NO: 1611998 - DNA, 25 bp, Homo sapien
aagcacgttgtacccttggctggac

SEQ ID NO: 1611999 - DNA, 25 bp, Homo sapien
tctgtagtgccatgaagcgattctg

SEQ ID NO: 1612000 - DNA, 25 bp, Homo sapien
aacctgggtgatcgggaacaagcac

SEQ ID NO: 1612001 - DNA, 25 bp, Homo sapien
cccatagggactgcgactgggacca

SEQ ID NO: 1612002 - DNA, 25 bp, Homo sapien
catcagggcaccttcgttttcccct

SEQ ID NO: 1612003 - DNA, 25 bp, Homo sapien
ctctgctgagaagcccagatctgtc

SEQ ID NO: 1612004 - DNA, 25 bp, Homo sapien
cttggaattctagccccgttatctc

SEQ ID NO: 1612005 - DNA, 25 bp, Homo sapien
tagccccgttatctccccatcaggg

SEQ ID NO: 1612006 - DNA, 25 bp, Homo sapien
tgactcagtgacttgtgtttattct

SEQ ID NO: 1612007 - DNA, 25 bp, Homo sapien
aaaccagagtccacagcgggtgagg

SEQ ID NO: 1612008 - DNA, 25 bp, Homo sapien
cctatagctcggctcctctgtggtg

SEQ ID NO: 1612009 - DNA, 25 bp, Homo sapien
tattctcagaaaccagagtccacag

SEQ ID NO: 1612010 - DNA, 25 bp, Homo sapien
ggaagtctggtgcccggaggatcat

SEQ ID NO: 1612011 - DNA, 25 bp, Homo sapien
ctccaggtcccacgcacaaatgtag

SEQ ID NO: 1612012 - DNA, 25 bp, Homo sapien
caaatgtagtcgtcgttgttaaaat

SEQ ID NO: 1612013 - DNA, 25 bp, Homo sapien
cccgcgtcagtttggtcaccgtctg

SEQ ID NO: 1612014 - DNA, 25 bp, Homo sapien
gcgtcagtttggtcaccgtctgctc

SEQ ID NO: 1612015 - DNA, 25 bp, Homo sapien
agcatagtaagccttgaggtcgcgg

SEQ ID NO: 1612016 - DNA, 25 bp, Homo sapien
tacctgggcaatcctctggcggaag

SEQ ID NO: 1612017 - DNA, 25 bp, Homo sapien
tgtccaaaaagttgtccagggtcat

SEQ ID NO: 1612018 - DNA, 25 bp, Homo sapien
gggagccatttcactcatcacggaa

SEQ ID NO: 1612019 - DNA, 25 bp, Homo sapien
caggtcctggtagcgatagaagagc

SEQ ID NO: 1612020 - DNA, 25 bp, Homo sapien
agctcgtagggcaccttcacatcgg

SEQ ID NO: 1612021 - DNA, 25 bp, Homo sapien
catgctgccaatgagctcgtagggc

SEQ ID NO: 1612022 - DNA, 25 bp, Homo sapien
ttcagctcgggcatgctgccaatga

SEQ ID NO: 1612023 - DNA, 25 bp, Homo sapien
ggccgagtgatgatgtgggatactc

SEQ ID NO: 1612024 - DNA, 25 bp, Homo sapien
aggccgagtgatgatgtgggatact

SEQ ID NO: 1612025 - DNA, 25 bp, Homo sapien
gatgtgggatactcatctgtgccca

SEQ ID NO: 1612026 - DNA, 25 bp, Homo sapien
atgatctccttccttgtgaaaaatg

SEQ ID NO: 1612027 - DNA, 25 bp, Homo sapien
atctccttccttgtgaaaaatgtgc

SEQ ID NO: 1612028 - DNA, 25 bp, Homo sapien
tctccttccttgtgaaaaatgtgca

SEQ ID NO: 1612029 - DNA, 25 bp, Homo sapien
gatctccttccttgtgaaaaatgtg

SEQ ID NO: 1612030 - DNA, 25 bp, Homo sapien
cgcttccagctgctcgtgtgtgaag

SEQ ID NO: 1612031 - DNA, 25 bp, Homo sapien
tttttggcggggtcagagcactgca

SEQ ID NO: 1612032 - DNA, 25 bp, Homo sapien
tatttttggcggggtcagagcactg

SEQ ID NO: 1612033 - DNA, 25 bp, Homo sapien
gctgttgatattgaatggccatgcc

SEQ ID NO: 1612034 - DNA, 25 bp, Homo sapien
tggcggggtcagagcactgcagcct

SEQ ID NO: 1612035 - DNA, 25 bp, Homo sapien
caaaatcagctgattttcttgtaga

SEQ ID NO: 1612036 - DNA, 25 bp, Homo sapien
cagctgattttcttgtagagttggg

SEQ ID NO: 1612037 - DNA, 25 bp, Homo sapien
ggtgtgcaccaccaaaatcagctga

SEQ ID NO: 1612038 - DNA, 25 bp, Homo sapien
aaatcagctgattttcttgtagagt

SEQ ID NO: 1612039 - DNA, 25 bp, Homo sapien
caggtgcttctaatgggtgttgcca

SEQ ID NO: 1612040 - DNA, 25 bp, Homo sapien
agttgcatgtaacgctctgaggcca

SEQ ID NO: 1612041 - DNA, 25 bp, Homo sapien
cacctaaggcaagaatggaacggac

SEQ ID NO: 1612042 - DNA, 25 bp, Homo sapien
catagcctgggtaacggaacagcca

SEQ ID NO: 1612043 - DNA, 25 bp, Homo sapien
cattatgtggtgatactctaggtct

SEQ ID NO: 1612044 - DNA, 25 bp, Homo sapien
cctgtaggccatgagcatcacgtca

SEQ ID NO: 1612045 - DNA, 25 bp, Homo sapien
atttcctggtcagatctcctgggcg

SEQ ID NO: 1612046 - DNA, 25 bp, Homo sapien
tccaggcaagttgacattttcgtgg

SEQ ID NO: 1612047 - DNA, 25 bp, Homo sapien
tgcaggtcactcaggtcccgtttct

SEQ ID NO: 1612048 - DNA, 25 bp, Homo sapien
gccactggcagtgcagcattgagca

SEQ ID NO: 1612049 - DNA, 25 bp, Homo sapien
tcagccaatccagtcatgcaggtca

SEQ ID NO: 1612050 - DNA, 25 bp, Homo sapien
acttgggtgtctccgtgacctgggc

SEQ ID NO: 1612051 - DNA, 25 bp, Homo sapien
cgccccggtgtggattttcagttgc

SEQ ID NO: 1612052 - DNA, 25 bp, Homo sapien
acaggctagggggtgcaggaccgtc

SEQ ID NO: 1612053 - DNA, 25 bp, Homo sapien
ccgtcgccccggtgtggattttcag

SEQ ID NO: 1612054 - DNA, 25 bp, Homo sapien
gtgcaggaccgtcgccccggtgtgg

SEQ ID NO: 1612055 - DNA, 25 bp, Homo sapien
tgatgtatcccggtcttgcagccca

SEQ ID NO: 1612056 - DNA, 25 bp, Homo sapien
caaggcgcccgacaacttgtttacg

SEQ ID NO: 1612057 - DNA, 25 bp, Homo sapien
tgataagggccttcaaggcgcccga

SEQ ID NO: 1612058 - DNA, 25 bp, Homo sapien
cctcatcgcgatccctgctgataag

SEQ ID NO: 1612059 - DNA, 25 bp, Homo sapien
ccgtcctcgggctggtgggagttca

SEQ ID NO: 1612060 - DNA, 25 bp, Homo sapien
tttgtcagagctatcggagccgtcc

SEQ ID NO: 1612061 - DNA, 25 bp, Homo sapien
tgttgttctcagcaatcgcagggcc

SEQ ID NO: 1612062 - DNA, 25 bp, Homo sapien
cacagtcccggctcatttgtcagag

SEQ ID NO: 1612063 - DNA, 25 bp, Homo sapien
gccattttggactcaagaccttcac

SEQ ID NO: 1612064 - DNA, 25 bp, Homo sapien
ccgcgcctagccaagctggccattt

SEQ ID NO: 1612065 - DNA, 25 bp, Homo sapien
cgcgcctagccaagctggccatttt

SEQ ID NO: 1612066 - DNA, 25 bp, Homo sapien
ttttggactcaagaccttcacattt

SEQ ID NO: 1612067 - DNA, 25 bp, Homo sapien
cccgtggccgggtgtttgggtgatg

SEQ ID NO: 1612068 - DNA, 25 bp, Homo sapien
gtggccgggtgtttgggtgatgctg

SEQ ID NO: 1612069 - DNA, 25 bp, Homo sapien
ccgtggccgggtgtttgggtgatgc

SEQ ID NO: 1612070 - DNA, 25 bp, Homo sapien
cgtggccgggtgtttgggtgatgct

SEQ ID NO: 1612071 - DNA, 25 bp, Homo sapien
ggccaactgcgtatttgaaatatgt

SEQ ID NO: 1612072 - DNA, 25 bp, Homo sapien
ggccaggttctcgtaaagcatcaca

SEQ ID NO: 1612073 - DNA, 25 bp, Homo sapien
cccatgaaagtgataagggcggtgt

SEQ ID NO: 1612074 - DNA, 25 bp, Homo sapien
ggtgtggaccgcagctgggaggcca

SEQ ID NO: 1612075 - DNA, 25 bp, Homo sapien
tgagtcacaagacaaagccgtcaga

SEQ ID NO: 1612076 - DNA, 25 bp, Homo sapien
tgtacatggcctcttggtgcctggg

SEQ ID NO: 1612077 - DNA, 25 bp, Homo sapien
gggcagccagcgctttgtaaaacct

SEQ ID NO: 1612078 - DNA, 25 bp, Homo sapien
agcctggtaaatggcccgggcagct

SEQ ID NO: 1612079 - DNA, 25 bp, Homo sapien
gtgtttcagcccaaaactctagtct

SEQ ID NO: 1612080 - DNA, 25 bp, Homo sapien
ctcggcgacagagactgtatcaaaa

SEQ ID NO: 1612081 - DNA, 25 bp, Homo sapien
tggggggtcctgtgtttcagcccaa

SEQ ID NO: 1612082 - DNA, 25 bp, Homo sapien
caacctcggcgacagagactgtatc

SEQ ID NO: 1612083 - DNA, 25 bp, Homo sapien
agtctctgagaggccccgacaccgc

SEQ ID NO: 1612084 - DNA, 25 bp, Homo sapien
tgaggctggagccaatctccccttc

SEQ ID NO: 1612085 - DNA, 25 bp, Homo sapien
tcaagggatccggggagaccgccaa

SEQ ID NO: 1612086 - DNA, 25 bp, Homo sapien
gaatcctggagactccagacttccc

SEQ ID NO: 1612087 - DNA, 25 bp, Homo sapien
gcaggtggtgcacgcttaggactcc

SEQ ID NO: 1612088 - DNA, 25 bp, Homo sapien
tacaccaagagttcgcatctgaagg

SEQ ID NO: 1612089 - DNA, 25 bp, Homo sapien
catctgaaggcgcatctgcgcacgc

SEQ ID NO: 1612090 - DNA, 25 bp, Homo sapien
cagcgcgcgccagaaaatgaattta

SEQ ID NO: 1612091 - DNA, 25 bp, Homo sapien
gggcagccccactaaagcatcgtgt

SEQ ID NO: 1612092 - DNA, 25 bp, Homo sapien
aagtttgcgcgctcagacgagctca

SEQ ID NO: 1612093 - DNA, 25 bp, Homo sapien
tctacactagaggatcgaggcttgt

SEQ ID NO: 1612094 - DNA, 25 bp, Homo sapien
gaaagtgctggtcccactgacgtgg

SEQ ID NO: 1612095 - DNA, 25 bp, Homo sapien
gcaaatcgttcacggggctgaagct

SEQ ID NO: 1612096 - DNA, 25 bp, Homo sapien
cagtgaaaggcaaatcgttcacggg

SEQ ID NO: 1612097 - DNA, 25 bp, Homo sapien
gcttctgagtccagtgaaaggcaaa

SEQ ID NO: 1612098 - DNA, 25 bp, Homo sapien
cctggaagcttctgagtccagtgaa

SEQ ID NO: 1612099 - DNA, 25 bp, Homo sapien
cctctgctcgtagcctgagctcttt

SEQ ID NO: 1612100 - DNA, 25 bp, Homo sapien
ctttctccagcgtgatttgatctgc

SEQ ID NO: 1612101 - DNA, 25 bp, Homo sapien
ctccagcgtgatttgatctgcccca

SEQ ID NO: 1612102 - DNA, 25 bp, Homo sapien
caaccctctgctcgtagcctgagct

SEQ ID NO: 1612103 - DNA, 25 bp, Homo sapien
taaactagtgtttcttgcaatggtg

SEQ ID NO: 1612104 - DNA, 25 bp, Homo sapien
tgagacattatattaggggagtttt

SEQ ID NO: 1612105 - DNA, 25 bp, Homo sapien
tatttttgagacattatattagggg

SEQ ID NO: 1612106 - DNA, 25 bp, Homo sapien
tttttgagacattatattaggggag

SEQ ID NO: 1612107 - DNA, 25 bp, Homo sapien
ggaagcaaatcaaggagtgatattt

SEQ ID NO: 1612108 - DNA, 25 bp, Homo sapien
aggaagcaaatcaaggagtgatatt

SEQ ID NO: 1612109 - DNA, 25 bp, Homo sapien
ttaaagacccactcggctgggcgca

SEQ ID NO: 1612110 - DNA, 25 bp, Homo sapien
caggaagcaaatcaaggagtgatat

SEQ ID NO: 1612111 - DNA, 25 bp, Homo sapien
gatgcggagaagataaagggtaccc

SEQ ID NO: 1612112 - DNA, 25 bp, Homo sapien
caaaacatggcttggaccgggcaat

SEQ ID NO: 1612113 - DNA, 25 bp, Homo sapien
gcaatgtgggcccttgaattccagt

SEQ ID NO: 1612114 - DNA, 25 bp, Homo sapien
cagttgaacaccagtccaaactggg

SEQ ID NO: 1612115 - DNA, 25 bp, Homo sapien
cttggcatcgagtatacgttagcat

SEQ ID NO: 1612116 - DNA, 25 bp, Homo sapien
tgtcagtcgccacacgtctcagtga

SEQ ID NO: 1612117 - DNA, 25 bp, Homo sapien
cttcagggcacgtgggcgaaatggc

SEQ ID NO: 1612118 - DNA, 25 bp, Homo sapien
tctcagtgacgtgcgcttcagggca

SEQ ID NO: 1612119 - DNA, 25 bp, Homo sapien
tccggccatgaccactttcaggaag

SEQ ID NO: 1612120 - DNA, 25 bp, Homo sapien
gaagctgctcgtttttgcagagaag

SEQ ID NO: 1612121 - DNA, 25 bp, Homo sapien
gaagtattgggaattgcctccggcc

SEQ ID NO: 1612122 - DNA, 25 bp, Homo sapien
tccaaagggatctatcacggcagaa

SEQ ID NO: 1612123 - DNA, 25 bp, Homo sapien
ttccatgggcaccaagaagacgtcc

SEQ ID NO: 1612124 - DNA, 25 bp, Homo sapien
ggcccattccatgggcaccaagaag

SEQ ID NO: 1612125 - DNA, 25 bp, Homo sapien
caatccacaaagcaggcccattcca

SEQ ID NO: 1612126 - DNA, 25 bp, Homo sapien
atgggcaccaagaagacgtcccctc

SEQ ID NO: 1612127 - DNA, 25 bp, Homo sapien
gaattactgccctgagacgagtcta

SEQ ID NO: 1612128 - DNA, 25 bp, Homo sapien
gacgagtctatgtaacaaaatatct

SEQ ID NO: 1612129 - DNA, 25 bp, Homo sapien
gccctgtattttcaatctcatgaat

SEQ ID NO: 1612130 - DNA, 25 bp, Homo sapien
tttcaatctcatgaattactgccct

SEQ ID NO: 1612131 - DNA, 25 bp, Homo sapien
tgtgttcgtccccagaggaagagcg

SEQ ID NO: 1612132 - DNA, 25 bp, Homo sapien
tttccaggtcttgcagccgagtctg

SEQ ID NO: 1612133 - DNA, 25 bp, Homo sapien
tatatatagacatctgcactgcccc

SEQ ID NO: 1612134 - DNA, 25 bp, Homo sapien
tacaacgagtgcatacaccactggg

SEQ ID NO: 1612135 - DNA, 25 bp, Homo sapien
ctcctgttccgccttctcgctctcc

SEQ ID NO: 1612136 - DNA, 25 bp, Homo sapien
cagccttgctgagcgcgatggccag

SEQ ID NO: 1612137 - DNA, 25 bp, Homo sapien
tgctgagcgcgatggccagttccag

SEQ ID NO: 1612138 - DNA, 25 bp, Homo sapien
taggcggcaggcatgtcagccttgc

SEQ ID NO: 1612139 - DNA, 25 bp, Homo sapien
aaaacggagagtgggtgatgtggcc

SEQ ID NO: 1612140 - DNA, 25 bp, Homo sapien
aaggaaaaacggagagtgggtgatg

SEQ ID NO: 1612141 - DNA, 25 bp, Homo sapien
ggaaaaacggagagtgggtgatgtg

SEQ ID NO: 1612142 - DNA, 25 bp, Homo sapien
ctgcaaaggaaaaacggagagtggg

SEQ ID NO: 1612143 - DNA, 25 bp, Homo sapien
gagtaacaccaaagataacatgcgc

SEQ ID NO: 1612144 - DNA, 25 bp, Homo sapien
taatgtctctctgcgatgcactgcc

SEQ ID NO: 1612145 - DNA, 25 bp, Homo sapien
cactaggtctgcgtgacaacctggg

SEQ ID NO: 1612146 - DNA, 25 bp, Homo sapien
ggcacccttgggagcagaaatatac

SEQ ID NO: 1612147 - DNA, 25 bp, Homo sapien
acttcttaaagaggcactgcccagc

SEQ ID NO: 1612148 - DNA, 25 bp, Homo sapien
caggcggagtgtcagtatcaagaaa

SEQ ID NO: 1612149 - DNA, 25 bp, Homo sapien
gaaactgacagggaggatgcgtccc

SEQ ID NO: 1612150 - DNA, 25 bp, Homo sapien
tggcagcgtctggatatttcacggc

SEQ ID NO: 1612151 - DNA, 25 bp, Homo sapien
cttcagagtcgaccggttcaaggcc

SEQ ID NO: 1612152 - DNA, 25 bp, Homo sapien
gaagcgccttcccttgacgggtctg

SEQ ID NO: 1612153 - DNA, 25 bp, Homo sapien
tgggagctgacagtaatgttcgcct

SEQ ID NO: 1612154 - DNA, 25 bp, Homo sapien
tgttcgcctggatccaaatcaaagc

SEQ ID NO: 1612155 - DNA, 25 bp, Homo sapien
cttgcattggtgaggtctgtatgca

SEQ ID NO: 1612156 - DNA, 25 bp, Homo sapien
tgtgtctgctgtcttagccctggac

SEQ ID NO: 1612157 - DNA, 25 bp, Homo sapien
gggactccgcagctccctctgtgtc

SEQ ID NO: 1612158 - DNA, 25 bp, Homo sapien
taggaggcacgctgggctgtgaggc

SEQ ID NO: 1612159 - DNA, 25 bp, Homo sapien
gaggcctgggagagctctcctgaaa

SEQ ID NO: 1612160 - DNA, 25 bp, Homo sapien
aaccgagacaccgtaggggcatgac

SEQ ID NO: 1612161 - DNA, 25 bp, Homo sapien
gggcatgacaccaccctagccgagg

SEQ ID NO: 1612162 - DNA, 25 bp, Homo sapien
catggaaccgagacaccgtaggggc

SEQ ID NO: 1612163 - DNA, 25 bp, Homo sapien
accgtaggggcatgacaccacccta

SEQ ID NO: 1612164 - DNA, 25 bp, Homo sapien
gggccagtcacgtgtaaccccagta

SEQ ID NO: 1612165 - DNA, 25 bp, Homo sapien
tttaaataagccacatgggccagtc

SEQ ID NO: 1612166 - DNA, 25 bp, Homo sapien
cagtgcgcatctagggtcaacaaaa

SEQ ID NO: 1612167 - DNA, 25 bp, Homo sapien
caggtcagggtcttgggcgatttaa

SEQ ID NO: 1612168 - DNA, 25 bp, Homo sapien
gcctcggtgcgtcagaaataataca

SEQ ID NO: 1612169 - DNA, 25 bp, Homo sapien
tctaccgtgaaggacagataggtcc

SEQ ID NO: 1612170 - DNA, 25 bp, Homo sapien
tatgatagagcatccaaactgcggc

SEQ ID NO: 1612171 - DNA, 25 bp, Homo sapien
taaataacgcgagggacagagagtg

SEQ ID NO: 1612172 - DNA, 25 bp, Homo sapien
agaggccttagaaggtttagctgca

SEQ ID NO: 1612173 - DNA, 25 bp, Homo sapien
cagaggccttagaaggtttagctgc

SEQ ID NO: 1612174 - DNA, 25 bp, Homo sapien
gcagaggccttagaaggtttagctg

SEQ ID NO: 1612175 - DNA, 25 bp, Homo sapien
tttggaacgggtcgccgctgtcagc

SEQ ID NO: 1612176 - DNA, 25 bp, Homo sapien
aaagtctgcggaaccaagctggctt

SEQ ID NO: 1612177 - DNA, 25 bp, Homo sapien
aaccaagctggcttacaggtgtact

SEQ ID NO: 1612178 - DNA, 25 bp, Homo sapien
ggcctcgggaaagtctgcggaacca

SEQ ID NO: 1612179 - DNA, 25 bp, Homo sapien
gaaatatgagttactcacccggaca

SEQ ID NO: 1612180 - DNA, 25 bp, Homo sapien
aaagaaatatgagttactcacccgg

SEQ ID NO: 1612181 - DNA, 25 bp, Homo sapien
tatgagttactcacccggacagagc

SEQ ID NO: 1612182 - DNA, 25 bp, Homo sapien
aatatgagttactcacccggacaga

SEQ ID NO: 1612183 - DNA, 25 bp, Homo sapien
atgcccggtcccagcaaggtatatc

SEQ ID NO: 1612184 - DNA, 25 bp, Homo sapien
ggctccaaggggcagcgtttatctg

SEQ ID NO: 1612185 - DNA, 25 bp, Homo sapien
ccaaggggcagcgtttatctgggcc

SEQ ID NO: 1612186 - DNA, 25 bp, Homo sapien
ggtcccagcaaggtatatcttgaca

SEQ ID NO: 1612187 - DNA, 25 bp, Homo sapien
tctgcagtttgcaggccagccgggc

SEQ ID NO: 1612188 - DNA, 25 bp, Homo sapien
cagcatctgcagtttgcaggccagc

SEQ ID NO: 1612189 - DNA, 25 bp, Homo sapien
gcatctgcagtttgcaggccagccg

SEQ ID NO: 1612190 - DNA, 25 bp, Homo sapien
catctgcagtttgcaggccagccgg

SEQ ID NO: 1612191 - DNA, 25 bp, Homo sapien
tgggcattcaacgtggtccacgcag

SEQ ID NO: 1612192 - DNA, 25 bp, Homo sapien
ttcctcatccggtagaacgagccca

SEQ ID NO: 1612193 - DNA, 25 bp, Homo sapien
aataatatgcaacacgattccggcg

SEQ ID NO: 1612194 - DNA, 25 bp, Homo sapien
ccagactggaagctcaataatatgc

SEQ ID NO: 1612195 - DNA, 25 bp, Homo sapien
atctcgcgcaaagccccagcatctg

SEQ ID NO: 1612196 - DNA, 25 bp, Homo sapien
agccacgctgggacccacgcatctc

SEQ ID NO: 1612197 - DNA, 25 bp, Homo sapien
gaaggcggccgtcactgtgtgctgg

SEQ ID NO: 1612198 - DNA, 25 bp, Homo sapien
tgctggccgtgtggtctccctgagc

SEQ ID NO: 1612199 - DNA, 25 bp, Homo sapien
ccagcagcgagtacaatgcagaatt

SEQ ID NO: 1612200 - DNA, 25 bp, Homo sapien
cccagcagcgagtacaatgcagaat

SEQ ID NO: 1612201 - DNA, 25 bp, Homo sapien
cacccagcagcgagtacaatgcaga

SEQ ID NO: 1612202 - DNA, 25 bp, Homo sapien
cagcagcgagtacaatgcagaattt

SEQ ID NO: 1612203 - DNA, 25 bp, Homo sapien
tgcggagcctgctaggtccattcca

SEQ ID NO: 1612204 - DNA, 25 bp, Homo sapien
ggagcctgctaggtccattccagga

SEQ ID NO: 1612205 - DNA, 25 bp, Homo sapien
ggcatgcggagcctgctaggtccat

SEQ ID NO: 1612206 - DNA, 25 bp, Homo sapien
actcgtaactagtgagctgggggca

SEQ ID NO: 1612207 - DNA, 25 bp, Homo sapien
acgcacatacggcacttgcgtggac

SEQ ID NO: 1612208 - DNA, 25 bp, Homo sapien
tacggcacttgcgtggacctgggca

SEQ ID NO: 1612209 - DNA, 25 bp, Homo sapien
cgccatccggcaccggtaggcggtg

SEQ ID NO: 1612210 - DNA, 25 bp, Homo sapien
agggtcccacggcatctgctgctac

SEQ ID NO: 1612211 - DNA, 25 bp, Homo sapien
tacttttaaaggggtcatctgagaa

SEQ ID NO: 1612212 - DNA, 25 bp, Homo sapien
cgctgggcggtttaggccgtggagg

SEQ ID NO: 1612213 - DNA, 25 bp, Homo sapien
ttaaaggggtcatctgagaatcctg

SEQ ID NO: 1612214 - DNA, 25 bp, Homo sapien
ctgggcggtttaggccgtggaggag

SEQ ID NO: 1612215 - DNA, 25 bp, Homo sapien
aacccaaatcggaccatatcctcca

SEQ ID NO: 1612216 - DNA, 25 bp, Homo sapien
acccaaatcggaccatatcctccag

SEQ ID NO: 1612217 - DNA, 25 bp, Homo sapien
caaacccaaatcggaccatatcctc

SEQ ID NO: 1612218 - DNA, 25 bp, Homo sapien
tctcaaacccaaatcggaccatatc

SEQ ID NO: 1612219 - DNA, 25 bp, Homo sapien
ctggagggcaagcacagtcctctcc

SEQ ID NO: 1612220 - DNA, 25 bp, Homo sapien
tggagggcaagcacagtcctctccc

SEQ ID NO: 1612221 - DNA, 25 bp, Homo sapien
gcaagcacagtcctctccccggcac

SEQ ID NO: 1612222 - DNA, 25 bp, Homo sapien
agggcaagcacagtcctctccccgg

SEQ ID NO: 1612223 - DNA, 25 bp, Homo sapien
atgagcagatactaagcgccgccac

SEQ ID NO: 1612224 - DNA, 25 bp, Homo sapien
ctgtgatgagcagatactaagcgcc

SEQ ID NO: 1612225 - DNA, 25 bp, Homo sapien
tgatgagcagatactaagcgccgcc

SEQ ID NO: 1612226 - DNA, 25 bp, Homo sapien
tgtgatgagcagatactaagcgccg

SEQ ID NO: 1612227 - DNA, 25 bp, Homo sapien
gagcgccggtgaggcacaggggagc

SEQ ID NO: 1612228 - DNA, 25 bp, Homo sapien
ggagccagggtctccatcagccaca

SEQ ID NO: 1612229 - DNA, 25 bp, Homo sapien
ggggagccagggtctccatcagcca

SEQ ID NO: 1612230 - DNA, 25 bp, Homo sapien
ttggagcgccggtgaggcacagggg

SEQ ID NO: 1612231 - DNA, 25 bp, Homo sapien
tcaactaagagtgcaggcccgaaga

SEQ ID NO: 1612232 - DNA, 25 bp, Homo sapien
gccaataggaagtgagaccggctct

SEQ ID NO: 1612233 - DNA, 25 bp, Homo sapien
tcagcaaagccacgcagaggtaagg

SEQ ID NO: 1612234 - DNA, 25 bp, Homo sapien
gaggagtccacttgcgacaaccaga

SEQ ID NO: 1612235 - DNA, 25 bp, Homo sapien
caccctgcctcggtcagaagtggga

SEQ ID NO: 1612236 - DNA, 25 bp, Homo sapien
tgtgatcacaagttgcgaccgctgc

SEQ ID NO: 1612237 - DNA, 25 bp, Homo sapien
ttcccgcagcgtggataatgcctgg

SEQ ID NO: 1612238 - DNA, 25 bp, Homo sapien
tctgcaggtggaactcgtgaggaaa

SEQ ID NO: 1612239 - DNA, 25 bp, Homo sapien
gccatggcaatgacttcaccgtctg

SEQ ID NO: 1612240 - DNA, 25 bp, Homo sapien
tggcaatgacttcaccgtctgagac

SEQ ID NO: 1612241 - DNA, 25 bp, Homo sapien
ctactcggccatggcaatgacttca

SEQ ID NO: 1612242 - DNA, 25 bp, Homo sapien
catggcaatgacttcaccgtctgag

SEQ ID NO: 1612243 - DNA, 25 bp, Homo sapien
catctggctgaagtcggcaaagcct

SEQ ID NO: 1612244 - DNA, 25 bp, Homo sapien
cttcagcactattgaaggacccact

SEQ ID NO: 1612245 - DNA, 25 bp, Homo sapien
acatctggctgaagtcggcaaagcc

SEQ ID NO: 1612246 - DNA, 25 bp, Homo sapien
tgaaggacccacttccgaagggatc

SEQ ID NO: 1612247 - DNA, 25 bp, Homo sapien
ctgatccttttgaggagacactgga

SEQ ID NO: 1612248 - DNA, 25 bp, Homo sapien
aaaagggatcactggattcaaaggg

SEQ ID NO: 1612249 - DNA, 25 bp, Homo sapien
tgatccttttgaggagacactggag

SEQ ID NO: 1612250 - DNA, 25 bp, Homo sapien
gatgaaaagggatcactggattcaa

SEQ ID NO: 1612251 - DNA, 25 bp, Homo sapien
cttcctgacgtcgatgtacaacatc

SEQ ID NO: 1612252 - DNA, 25 bp, Homo sapien
tgacgtcgatgtacaacatccagtg

SEQ ID NO: 1612253 - DNA, 25 bp, Homo sapien
tcctgacgtcgatgtacaacatcca

SEQ ID NO: 1612254 - DNA, 25 bp, Homo sapien
cctgacgtcgatgtacaacatccag

SEQ ID NO: 1612255 - DNA, 25 bp, Homo sapien
tgacgggagcacctaccaaacgtga

SEQ ID NO: 1612256 - DNA, 25 bp, Homo sapien
gcacttactcctgccgtgacgggag

SEQ ID NO: 1612257 - DNA, 25 bp, Homo sapien
gctgtgtgttacaaggaccgtgcag

SEQ ID NO: 1612258 - DNA, 25 bp, Homo sapien
aatatgcaaaatacccggtgtctgc

SEQ ID NO: 1612259 - DNA, 25 bp, Homo sapien
ggcagagccacggaatgggtcactt

SEQ ID NO: 1612260 - DNA, 25 bp, Homo sapien
ggatccgaggtaaatgggtcattct

SEQ ID NO: 1612261 - DNA, 25 bp, Homo sapien
agggtttttcgtgaatggatccgag

SEQ ID NO: 1612262 - DNA, 25 bp, Homo sapien
gagccacggaatgggtcactttctt

SEQ ID NO: 1612263 - DNA, 25 bp, Homo sapien
ctgttgaagttgtctgctgttctgc

SEQ ID NO: 1612264 - DNA, 25 bp, Homo sapien
tgctgttctgcaaaggggtcattct

SEQ ID NO: 1612265 - DNA, 25 bp, Homo sapien
tgttgaagttgtctgctgttctgca

SEQ ID NO: 1612266 - DNA, 25 bp, Homo sapien
tctgcaaaggggtcattctggaacg

SEQ ID NO: 1612267 - DNA, 25 bp, Homo sapien
tgaaggggtcagctcctttaaatgg

SEQ ID NO: 1612268 - DNA, 25 bp, Homo sapien
tctgtctggaaaggatccggatgca

SEQ ID NO: 1612269 - DNA, 25 bp, Homo sapien
tcttgcgtgttgttgctaaataaca

SEQ ID NO: 1612270 - DNA, 25 bp, Homo sapien
aaggatccggatgcaactcttgcgt

SEQ ID NO: 1612271 - DNA, 25 bp, Homo sapien
ggagttttcataccaagaaacatgc

SEQ ID NO: 1612272 - DNA, 25 bp, Homo sapien
catttcagaggtgtgaccttcctca

SEQ ID NO: 1612273 - DNA, 25 bp, Homo sapien
tctcggtgagtatgtacctaggtgg

SEQ ID NO: 1612274 - DNA, 25 bp, Homo sapien
cctatgaggaaatgagtacttatgc

SEQ ID NO: 1612275 - DNA, 25 bp, Homo sapien
ctccgcttctgaccagggcaggttt

SEQ ID NO: 1612276 - DNA, 25 bp, Homo sapien
agaaggtaccatactgatgactaac

SEQ ID NO: 1612277 - DNA, 25 bp, Homo sapien
cgcttctgaccagggcaggtttacc

SEQ ID NO: 1612278 - DNA, 25 bp, Homo sapien
gaaggtaccatactgatgactaact

SEQ ID NO: 1612279 - DNA, 25 bp, Homo sapien
caggatgaatgacacggcccttggc

SEQ ID NO: 1612280 - DNA, 25 bp, Homo sapien
tcaggagtcattggcctgaagccac

SEQ ID NO: 1612281 - DNA, 25 bp, Homo sapien
tgagaccccagcaggattcaggagg

SEQ ID NO: 1612282 - DNA, 25 bp, Homo sapien
tactaaggagaacagacccatctgc

SEQ ID NO: 1612283 - DNA, 25 bp, Homo sapien
tgagcaggacaagccaaaagcggtg

SEQ ID NO: 1612284 - DNA, 25 bp, Homo sapien
aagagacagatgagctcgccagcag

SEQ ID NO: 1612285 - DNA, 25 bp, Homo sapien
tgttccctgaacgaagactgagcag

SEQ ID NO: 1612286 - DNA, 25 bp, Homo sapien
gataaagctgatgatgacgggcccg

SEQ ID NO: 1612287 - DNA, 25 bp, Homo sapien
ggaatccatgacgtacagaggccca

SEQ ID NO: 1612288 - DNA, 25 bp, Homo sapien
gaggaatccatgacgtacagaggcc

SEQ ID NO: 1612289 - DNA, 25 bp, Homo sapien
gaagaggaatccatgacgtacagag

SEQ ID NO: 1612290 - DNA, 25 bp, Homo sapien
tccatgacgtacagaggcccaggag

SEQ ID NO: 1612291 - DNA, 25 bp, Homo sapien
aaatacttccgcagagatggagggc

SEQ ID NO: 1612292 - DNA, 25 bp, Homo sapien
gatggagggcattcaaaacaggttc

SEQ ID NO: 1612293 - DNA, 25 bp, Homo sapien
ggttctgaaaggatccaggcctatc

SEQ ID NO: 1612294 - DNA, 25 bp, Homo sapien
gaaactacatgtccccaggttcgag

SEQ ID NO: 1612295 - DNA, 25 bp, Homo sapien
tggcaccatgggctccatcgagcac

SEQ ID NO: 1612296 - DNA, 25 bp, Homo sapien
gagacgccttcgctcaggttggcca

SEQ ID NO: 1612297 - DNA, 25 bp, Homo sapien
tcctggcggctttcatgcagctggg

SEQ ID NO: 1612298 - DNA, 25 bp, Homo sapien
tccatcgagcacctggtcatactgc

SEQ ID NO: 1612299 - DNA, 25 bp, Homo sapien
tcggttcagatcgtcttcctgggac

SEQ ID NO: 1612300 - DNA, 25 bp, Homo sapien
ttcgtcttgcgttgacttcagggac

SEQ ID NO: 1612301 - DNA, 25 bp, Homo sapien
tgcaatcggttcagctccgacttgg

SEQ ID NO: 1612302 - DNA, 25 bp, Homo sapien
gatggtttccagctggactcgccca

SEQ ID NO: 1612303 - DNA, 25 bp, Homo sapien
tggatttgcgttttcagtgatgaga

SEQ ID NO: 1612304 - DNA, 25 bp, Homo sapien
gagattggatttgcgttttcagtga

SEQ ID NO: 1612305 - DNA, 25 bp, Homo sapien
gattggatttgcgttttcagtgatg

SEQ ID NO: 1612306 - DNA, 25 bp, Homo sapien
ctgagattggatttgcgttttcagt

SEQ ID NO: 1612307 - DNA, 25 bp, Homo sapien
catgtctcggagcttggccttctgc

SEQ ID NO: 1612308 - DNA, 25 bp, Homo sapien
actgcttgtttcccggtctaggtca

SEQ ID NO: 1612309 - DNA, 25 bp, Homo sapien
tcgtccaggcggtcttgagcatcct

SEQ ID NO: 1612310 - DNA, 25 bp, Homo sapien
ttctgccggacgtcgctcagcatgt

SEQ ID NO: 1612311 - DNA, 25 bp, Homo sapien
tgctcagggccagcattccgtgcac

SEQ ID NO: 1612312 - DNA, 25 bp, Homo sapien
gccagcattccgtgcacacccacgg

SEQ ID NO: 1612313 - DNA, 25 bp, Homo sapien
ccaatgtgtgcctcttgggctggag

SEQ ID NO: 1612314 - DNA, 25 bp, Homo sapien
gcacacccacggccaatgtgtgcct

SEQ ID NO: 1612315 - DNA, 25 bp, Homo sapien
gctccctcagcaggtatttcccgat

SEQ ID NO: 1612316 - DNA, 25 bp, Homo sapien
tccctcagcaggtatttcccgatgg

SEQ ID NO: 1612317 - DNA, 25 bp, Homo sapien
ccctcagcaggtatttcccgatggc

SEQ ID NO: 1612318 - DNA, 25 bp, Homo sapien
cagctccctcagcaggtatttcccg

SEQ ID NO: 1612319 - DNA, 25 bp, Homo sapien
agaggccaggtgcgagagaaggggc

SEQ ID NO: 1612320 - DNA, 25 bp, Homo sapien
gaggccaggtgcgagagaaggggct

SEQ ID NO: 1612321 - DNA, 25 bp, Homo sapien
cagaggccaggtgcgagagaagggg

SEQ ID NO: 1612322 - DNA, 25 bp, Homo sapien
gatgcccacaaaagcagcatttagg

SEQ ID NO: 1612323 - DNA, 25 bp, Homo sapien
gcagcatttaggatggggccaacag

SEQ ID NO: 1612324 - DNA, 25 bp, Homo sapien
aagatgcccacaaaagcagcattta

SEQ ID NO: 1612325 - DNA, 25 bp, Homo sapien
agatgcccacaaaagcagcatttag

SEQ ID NO: 1612326 - DNA, 25 bp, Homo sapien
agggtcggggggtgtcgcactccag

SEQ ID NO: 1612327 - DNA, 25 bp, Homo sapien
cagggtcggggggtgtcgcactcca

SEQ ID NO: 1612328 - DNA, 25 bp, Homo sapien
gggttctagttagcgccacactggc

SEQ ID NO: 1612329 - DNA, 25 bp, Homo sapien
cctcagggttctagttagcgccaca

SEQ ID NO: 1612330 - DNA, 25 bp, Homo sapien
tctagttagcgccacactggctcct

SEQ ID NO: 1612331 - DNA, 25 bp, Homo sapien
tcctgggcctcagggttctagttag

SEQ ID NO: 1612332 - DNA, 25 bp, Homo sapien
tcaaaccaaagatgccaaaatgtgt

SEQ ID NO: 1612333 - DNA, 25 bp, Homo sapien
tcctcctcaaaccaaagatgccaaa

SEQ ID NO: 1612334 - DNA, 25 bp, Homo sapien
tcctcaaaccaaagatgccaaaatg

SEQ ID NO: 1612335 - DNA, 25 bp, Homo sapien
ctcaaaccaaagatgccaaaatgtg

SEQ ID NO: 1612336 - DNA, 25 bp, Homo sapien
cgcagggccatcatactggccaagc

SEQ ID NO: 1612337 - DNA, 25 bp, Homo sapien
tggccacatcggtctgggtattaag

SEQ ID NO: 1612338 - DNA, 25 bp, Homo sapien
tacaatggccacatcggtctgggta

SEQ ID NO: 1612339 - DNA, 25 bp, Homo sapien
atccgcagggccatcatactggcca

SEQ ID NO: 1612340 - DNA, 25 bp, Homo sapien
agagtctccatgcagagcacccagg

SEQ ID NO: 1612341 - DNA, 25 bp, Homo sapien
acctacaccagagtctccatgcaga

SEQ ID NO: 1612342 - DNA, 25 bp, Homo sapien
gacctacagctacctgactcccaac

SEQ ID NO: 1612343 - DNA, 25 bp, Homo sapien
tacaccagagtctccatgcagagca

SEQ ID NO: 1612344 - DNA, 25 bp, Homo sapien
ctgcacctcgctggttttctgtctg

SEQ ID NO: 1612345 - DNA, 25 bp, Homo sapien
tttctgtctgattgcctcttccttt

SEQ ID NO: 1612346 - DNA, 25 bp, Homo sapien
ttttctgtctgattgcctcttcctt

SEQ ID NO: 1612347 - DNA, 25 bp, Homo sapien
ttgtgcaacaataaggccctctcag

SEQ ID NO: 1612348 - DNA, 25 bp, Homo sapien
taagaccctcctcttgtgcccaaag

SEQ ID NO: 1612349 - DNA, 25 bp, Homo sapien
gacatgtcgccagacacacagtaag

SEQ ID NO: 1612350 - DNA, 25 bp, Homo sapien
tttaaactgaaggacctgacatgcc

SEQ ID NO: 1612351 - DNA, 25 bp, Homo sapien
tcattcttcaagccccttgagccag

SEQ ID NO: 1612352 - DNA, 25 bp, Homo sapien
tgagccagtttaggacctcagaagc

SEQ ID NO: 1612353 - DNA, 25 bp, Homo sapien
cccttgagccagtttaggacctcag

SEQ ID NO: 1612354 - DNA, 25 bp, Homo sapien
cttgagccagtttaggacctcagaa

SEQ ID NO: 1612355 - DNA, 25 bp, Homo sapien
gactgatgtcatcaagctccttcac

SEQ ID NO: 1612356 - DNA, 25 bp, Homo sapien
gtaaactccccggagccgagagagc

SEQ ID NO: 1612357 - DNA, 25 bp, Homo sapien
tttgtaactgggcaatctcttgact

SEQ ID NO: 1612358 - DNA, 25 bp, Homo sapien
tcaagctccttcacgccagtaaact

SEQ ID NO: 1612359 - DNA, 25 bp, Homo sapien
gccaccgtgggctcatgtgtgccac

SEQ ID NO: 1612360 - DNA, 25 bp, Homo sapien
ccgccaccgtgggctcatgtgtgcc

SEQ ID NO: 1612361 - DNA, 25 bp, Homo sapien
cgccaccgtgggctcatgtgtgcca

SEQ ID NO: 1612362 - DNA, 25 bp, Homo sapien
ccaccgtgggctcatgtgtgccacc

SEQ ID NO: 1612363 - DNA, 25 bp, Homo sapien
aatacatagctaacgcgaattggtc

SEQ ID NO: 1612364 - DNA, 25 bp, Homo sapien
accatgtccggcgagaggacttgag

SEQ ID NO: 1612365 - DNA, 25 bp, Homo sapien
acttgaggagggtcgatgcctttac

SEQ ID NO: 1612366 - DNA, 25 bp, Homo sapien
cgtttgcctcgtatcggccagggcc

SEQ ID NO: 1612367 - DNA, 25 bp, Homo sapien
ggcctcctgttagagccagcatcac

SEQ ID NO: 1612368 - DNA, 25 bp, Homo sapien
aggcctcctgttagagccagcatca

SEQ ID NO: 1612369 - DNA, 25 bp, Homo sapien
caggcctcctgttagagccagcatc

SEQ ID NO: 1612370 - DNA, 25 bp, Homo sapien
cacagccagcaagaatagggcccag

SEQ ID NO: 1612371 - DNA, 25 bp, Homo sapien
ccaggtcggtcttcaggaatatctc

SEQ ID NO: 1612372 - DNA, 25 bp, Homo sapien
gtgaggcccgagtgcatgaagatct

SEQ ID NO: 1612373 - DNA, 25 bp, Homo sapien
tggccactcacgtagccatccaggt

SEQ ID NO: 1612374 - DNA, 25 bp, Homo sapien
gaatatctcatcaaatcgcatcttg

SEQ ID NO: 1612375 - DNA, 25 bp, Homo sapien
ctgccacgggcaccacccagttcac

SEQ ID NO: 1612376 - DNA, 25 bp, Homo sapien
acgggcaccacccagttcactgttg

SEQ ID NO: 1612377 - DNA, 25 bp, Homo sapien
ccacgggcaccacccagttcactgt

SEQ ID NO: 1612378 - DNA, 25 bp, Homo sapien
cgggcaccacccagttcactgttgg

SEQ ID NO: 1612379 - DNA, 25 bp, Homo sapien
tggctggagggatcgattgttcctt

SEQ ID NO: 1612380 - DNA, 25 bp, Homo sapien
agggatcgattgttccttctccacg

SEQ ID NO: 1612381 - DNA, 25 bp, Homo sapien
tctccacgcagcaactgtacagaaa

SEQ ID NO: 1612382 - DNA, 25 bp, Homo sapien
tgagaataaacacctgattgaatta

SEQ ID NO: 1612383 - DNA, 25 bp, Homo sapien
tgaaaggatttcttaggctgggtgc

SEQ ID NO: 1612384 - DNA, 25 bp, Homo sapien
tgccactcaaagtcattcctctcag

SEQ ID NO: 1612385 - DNA, 25 bp, Homo sapien
gccactcaaagtcattcctctcagt

SEQ ID NO: 1612386 - DNA, 25 bp, Homo sapien
ggtggacgtaaagatgccaataaag

SEQ ID NO: 1612387 - DNA, 25 bp, Homo sapien
gaattctaatgagaaatgggcttgc

SEQ ID NO: 1612388 - DNA, 25 bp, Homo sapien
gccttctcaagtctggtggacgtaa

SEQ ID NO: 1612389 - DNA, 25 bp, Homo sapien
tttaagtcacggagctacagcaagc

SEQ ID NO: 1612390 - DNA, 25 bp, Homo sapien
ggtaacaggagtcagacaagctgag

SEQ ID NO: 1612391 - DNA, 25 bp, Homo sapien
cacaaagaggtaacaggagtcagac

SEQ ID NO: 1612392 - DNA, 25 bp, Homo sapien
gatcacaaagaggtaacaggagtca

SEQ ID NO: 1612393 - DNA, 25 bp, Homo sapien
gccagggatcacaaagaggtaacag

SEQ ID NO: 1612394 - DNA, 25 bp, Homo sapien
gcagccttgccgtggagctggctct

SEQ ID NO: 1612395 - DNA, 25 bp, Homo sapien
cttgctgggcaaacaaaaggaactc

SEQ ID NO: 1612396 - DNA, 25 bp, Homo sapien
gaactcactgcctgatttctggagc

SEQ ID NO: 1612397 - DNA, 25 bp, Homo sapien
caaattgactataaacccaacacgg

SEQ ID NO: 1612398 - DNA, 25 bp, Homo sapien
ttgcttgaggctgtgcttgggggac

SEQ ID NO: 1612399 - DNA, 25 bp, Homo sapien
gtgtttgcttgaggctgtgcttggg

SEQ ID NO: 1612400 - DNA, 25 bp, Homo sapien
gtttgcttgaggctgtgcttggggg

SEQ ID NO: 1612401 - DNA, 25 bp, Homo sapien
ctgtgtttgcttgaggctgtgcttg

SEQ ID NO: 1612402 - DNA, 25 bp, Homo sapien
gggctcggtacaccaagtgcatggc

SEQ ID NO: 1612403 - DNA, 25 bp, Homo sapien
tgacgctgccgtgggacggcgtgga

SEQ ID NO: 1612404 - DNA, 25 bp, Homo sapien
gcgtggagcggaggctgtcttttgg

SEQ ID NO: 1612405 - DNA, 25 bp, Homo sapien
tccagggctcggtacaccaagtgca

SEQ ID NO: 1612406 - DNA, 25 bp, Homo sapien
aactcatctcgatccaagtgcccat

SEQ ID NO: 1612407 - DNA, 25 bp, Homo sapien
cagcgaactcatctcgatccaagtg

SEQ ID NO: 1612408 - DNA, 25 bp, Homo sapien
gcgaactcatctcgatccaagtgcc

SEQ ID NO: 1612409 - DNA, 25 bp, Homo sapien
cacagcgaactcatctcgatccaag

SEQ ID NO: 1612410 - DNA, 25 bp, Homo sapien
gcaagggagagaccagcatgggtaa

SEQ ID NO: 1612411 - DNA, 25 bp, Homo sapien
ctgcaagggagagaccagcatgggt

SEQ ID NO: 1612412 - DNA, 25 bp, Homo sapien
tgcaagggagagaccagcatgggta

SEQ ID NO: 1612413 - DNA, 25 bp, Homo sapien
gaggcagctttgagttcatgaggac

SEQ ID NO: 1612414 - DNA, 25 bp, Homo sapien
caagaggcagctttgagttcatgag

SEQ ID NO: 1612415 - DNA, 25 bp, Homo sapien
gcagctttgagttcatgaggactgg

SEQ ID NO: 1612416 - DNA, 25 bp, Homo sapien
tttgagttcatgaggactggcttga

SEQ ID NO: 1612417 - DNA, 25 bp, Homo sapien
tcttagaacagtcttggccccttgg

SEQ ID NO: 1612418 - DNA, 25 bp, Homo sapien
tagcccgagtaagtaggagagcaca

SEQ ID NO: 1612419 - DNA, 25 bp, Homo sapien
cgttatggcaacctcggatctggga

SEQ ID NO: 1612420 - DNA, 25 bp, Homo sapien
cacctgtgtgaatgtccagaccgag

SEQ ID NO: 1612421 - DNA, 25 bp, Homo sapien
caattctatctgaaggagagccaag

SEQ ID NO: 1612422 - DNA, 25 bp, Homo sapien
gaacaattctagaacaactgctgga

SEQ ID NO: 1612423 - DNA, 25 bp, Homo sapien
ccaaggagggagctattcccgttca

SEQ ID NO: 1612424 - DNA, 25 bp, Homo sapien
tgtccaggtaggcaactcccaattc

SEQ ID NO: 1612425 - DNA, 25 bp, Homo sapien
ctctgcagagggcggtgtgaccatc

SEQ ID NO: 1612426 - DNA, 25 bp, Homo sapien
gcagagggcggtgtgaccatcagag

SEQ ID NO: 1612427 - DNA, 25 bp, Homo sapien
ggcggtgtgaccatcagagggctgc

SEQ ID NO: 1612428 - DNA, 25 bp, Homo sapien
gagggcggtgtgaccatcagagggc

SEQ ID NO: 1612429 - DNA, 25 bp, Homo sapien
gaagagagagaaacattcctttgtg

SEQ ID NO: 1612430 - DNA, 25 bp, Homo sapien
ctgagaagagagagaaacattcctt

SEQ ID NO: 1612431 - DNA, 25 bp, Homo sapien
gagaagagagagaaacattcctttg

SEQ ID NO: 1612432 - DNA, 25 bp, Homo sapien
aagagagagaaacattcctttgtgg

SEQ ID NO: 1612433 - DNA, 25 bp, Homo sapien
gcacagaattaaatcataggtgggt

SEQ ID NO: 1612434 - DNA, 25 bp, Homo sapien
attaaatcataggtgggtgggtttg

SEQ ID NO: 1612435 - DNA, 25 bp, Homo sapien
caaaagaccatgttagagaattcca

SEQ ID NO: 1612436 - DNA, 25 bp, Homo sapien
gataaagatgtggtccatccagtaa

SEQ ID NO: 1612437 - DNA, 25 bp, Homo sapien
gggtggaaataacccacatgtccag

SEQ ID NO: 1612438 - DNA, 25 bp, Homo sapien
cctgaaaacacgatgctgagagaga

SEQ ID NO: 1612439 - DNA, 25 bp, Homo sapien
aaatttaggcggtggcatgctcaaa

SEQ ID NO: 1612440 - DNA, 25 bp, Homo sapien
ttcagattgctcaaggtaacttcat

SEQ ID NO: 1612441 - DNA, 25 bp, Homo sapien
gctcaaggtaacttcatggccactc

SEQ ID NO: 1612442 - DNA, 25 bp, Homo sapien
caggccaccagtctcagtgcaacat

SEQ ID NO: 1612443 - DNA, 25 bp, Homo sapien
gttgaatggaacatcccctgcccac

SEQ ID NO: 1612444 - DNA, 25 bp, Homo sapien
catatctgtggttcaccacgatccc

SEQ ID NO: 1612445 - DNA, 25 bp, Homo sapien
cccctcggcctcgttgaatggaaca

SEQ ID NO: 1612446 - DNA, 25 bp, Homo sapien
cagaaactcatatctgtggttcacc

SEQ ID NO: 1612447 - DNA, 25 bp, Homo sapien
agtgtagaggatcataagagggttt

SEQ ID NO: 1612448 - DNA, 25 bp, Homo sapien
cttcaaagaggtaagtgctaggatc

SEQ ID NO: 1612449 - DNA, 25 bp, Homo sapien
ttaagtaagtttagaggaactgcat

SEQ ID NO: 1612450 - DNA, 25 bp, Homo sapien
aagtgctaggatcggcctttctcag

SEQ ID NO: 1612451 - DNA, 25 bp, Homo sapien
ggcaaaagatacacaggaaccctcc

SEQ ID NO: 1612452 - DNA, 25 bp, Homo sapien
ctgatcactgtgctgtggttatgta

SEQ ID NO: 1612453 - DNA, 25 bp, Homo sapien
cacgagagactggtccaaaataaaa

SEQ ID NO: 1612454 - DNA, 25 bp, Homo sapien
ggaaccctccaagctatttgtgcaa

SEQ ID NO: 1612455 - DNA, 25 bp, Homo sapien
gcccctccatttgctctgtgtacat

SEQ ID NO: 1612456 - DNA, 25 bp, Homo sapien
aatgtggaaggagccgtggaggtca

SEQ ID NO: 1612457 - DNA, 25 bp, Homo sapien
tgcctagtaatacttgacagtggag

SEQ ID NO: 1612458 - DNA, 25 bp, Homo sapien
cttcccgtgttaagtttgacagccg

SEQ ID NO: 1612459 - DNA, 25 bp, Homo sapien
cttctggatcggccaagtcccatat

SEQ ID NO: 1612460 - DNA, 25 bp, Homo sapien
cccaactaaagtccgcaagtggcca

SEQ ID NO: 1612461 - DNA, 25 bp, Homo sapien
aaagtccgcaagtggccaagcgcgg

SEQ ID NO: 1612462 - DNA, 25 bp, Homo sapien
ctcccaagccaatggtgtttatgac

SEQ ID NO: 1612463 - DNA, 25 bp, Homo sapien
cagaggacatccaggtgcactcagc

SEQ ID NO: 1612464 - DNA, 25 bp, Homo sapien
aaaagtccacaagctatcaagaccc

SEQ ID NO: 1612465 - DNA, 25 bp, Homo sapien
agcgaccaggccactacccaggagg

SEQ ID NO: 1612466 - DNA, 25 bp, Homo sapien
ctatcaagaccccaaaagtactcgg

SEQ ID NO: 1612467 - DNA, 25 bp, Homo sapien
actcgggtttcttatctgctaccaa

SEQ ID NO: 1612468 - DNA, 25 bp, Homo sapien
cttctttagaaaaagcgcagcttca

SEQ ID NO: 1612469 - DNA, 25 bp, Homo sapien
ccaccctccctgtgtatgccggatc

SEQ ID NO: 1612470 - DNA, 25 bp, Homo sapien
tagaaaaagcgcagcttcactcgcc

SEQ ID NO: 1612471 - DNA, 25 bp, Homo sapien
accctccctgtgtatgccggatcga

SEQ ID NO: 1612472 - DNA, 25 bp, Homo sapien
gattcatacaacgaatttccagtgg

SEQ ID NO: 1612473 - DNA, 25 bp, Homo sapien
tcatacaacgaatttccagtgggaa

SEQ ID NO: 1612474 - DNA, 25 bp, Homo sapien
aataagattcatacaacgaatttcc

SEQ ID NO: 1612475 - DNA, 25 bp, Homo sapien
taagattcatacaacgaatttccag

SEQ ID NO: 1612476 - DNA, 25 bp, Homo sapien
agctttcgaccagtttccctggcct

SEQ ID NO: 1612477 - DNA, 25 bp, Homo sapien
cctgggtctggttctcaaccatccc

SEQ ID NO: 1612478 - DNA, 25 bp, Homo sapien
gcctgcaagctttcgaccagtttcc

SEQ ID NO: 1612479 - DNA, 25 bp, Homo sapien
caggcctgcaagctttcgaccagtt

SEQ ID NO: 1612480 - DNA, 25 bp, Homo sapien
gaggcctgcaccgtaagaggctgca

SEQ ID NO: 1612481 - DNA, 25 bp, Homo sapien
caccaggatggccgtaggaatggaa

SEQ ID NO: 1612482 - DNA, 25 bp, Homo sapien
cctgcaccgtaagaggctgcaggtg

SEQ ID NO: 1612483 - DNA, 25 bp, Homo sapien
gcagcagagctgacccgatgtgttc

SEQ ID NO: 1612484 - DNA, 25 bp, Homo sapien
gctaagagacaacatgcaaagttcc

SEQ ID NO: 1612485 - DNA, 25 bp, Homo sapien
taagcagggttcacccaactctgat

SEQ ID NO: 1612486 - DNA, 25 bp, Homo sapien
caagcgcctgtaactgtaacccagg

SEQ ID NO: 1612487 - DNA, 25 bp, Homo sapien
tgttctaacgactcctaagcagggt

SEQ ID NO: 1612488 - DNA, 25 bp, Homo sapien
ttctacgggccagctagtttgcttc

SEQ ID NO: 1612489 - DNA, 25 bp, Homo sapien
ctacgggccagctagtttgcttcct

SEQ ID NO: 1612490 - DNA, 25 bp, Homo sapien
aggatttctacgggccagctagttt

SEQ ID NO: 1612491 - DNA, 25 bp, Homo sapien
atttctacgggccagctagtttgct

SEQ ID NO: 1612492 - DNA, 25 bp, Homo sapien
gaagctgtctcatgtggaggtcaac

SEQ ID NO: 1612493 - DNA, 25 bp, Homo sapien
ggaggtcaacagtgctgccagacaa

SEQ ID NO: 1612494 - DNA, 25 bp, Homo sapien
tgagccctaaacgtcttcaggagag

SEQ ID NO: 1612495 - DNA, 25 bp, Homo sapien
gaggatgcaggactatgctgagccc

SEQ ID NO: 1612496 - DNA, 25 bp, Homo sapien
ccaacacagaagagcaaatgcacag

SEQ ID NO: 1612497 - DNA, 25 bp, Homo sapien
cactgcccaggactcggttgggatg

SEQ ID NO: 1612498 - DNA, 25 bp, Homo sapien
tttctggcccctctaaacatcaggc

SEQ ID NO: 1612499 - DNA, 25 bp, Homo sapien
cagcgtcagcctcctagtgcactgt

SEQ ID NO: 1612500 - DNA, 25 bp, Homo sapien
cacggaaggtacaagggagagaact

SEQ ID NO: 1612501 - DNA, 25 bp, Homo sapien
gggagagaactctcattcgggtggg

SEQ ID NO: 1612502 - DNA, 25 bp, Homo sapien
ctaggtacagcggtcacaaaaggga

SEQ ID NO: 1612503 - DNA, 25 bp, Homo sapien
cagcggtcacaaaagggacccacgg

SEQ ID NO: 1612504 - DNA, 25 bp, Homo sapien
actgctgctgacgggtccgggctcc

SEQ ID NO: 1612505 - DNA, 25 bp, Homo sapien
ccttcataagcgcatcaggcgaatt

SEQ ID NO: 1612506 - DNA, 25 bp, Homo sapien
caggcgaatttgaggacacagagag

SEQ ID NO: 1612507 - DNA, 25 bp, Homo sapien
gacgtacgatctgcgcccggtgcag

SEQ ID NO: 1612508 - DNA, 25 bp, Homo sapien
agagggggatgagcggcgccgccat

SEQ ID NO: 1612509 - DNA, 25 bp, Homo sapien
cgcggactcgggctccgagcgccgg

SEQ ID NO: 1612510 - DNA, 25 bp, Homo sapien
cttcccgcggactcgggctccgagc

SEQ ID NO: 1612511 - DNA, 25 bp, Homo sapien
ttcccgcggactcgggctccgagcg

SEQ ID NO: 1612512 - DNA, 25 bp, Homo sapien
cccgcggactcgggctccgagcgcc

SEQ ID NO: 1612513 - DNA, 25 bp, Homo sapien
ctgggacgacgggagggcggtgcgc

SEQ ID NO: 1612514 - DNA, 25 bp, Homo sapien
gggacgacgggagggcggtgcgcag

SEQ ID NO: 1612515 - DNA, 25 bp, Homo sapien
tgggacgacgggagggcggtgcgca

SEQ ID NO: 1612516 - DNA, 25 bp, Homo sapien
gacgacgggagggcggtgcgcaggc

SEQ ID NO: 1612517 - DNA, 25 bp, Homo sapien
gcggggccgtagacagggccacgca

SEQ ID NO: 1612518 - DNA, 25 bp, Homo sapien
ggcggggccgtagacagggccacgc

SEQ ID NO: 1612519 - DNA, 25 bp, Homo sapien
cggggccgtagacagggccacgcat

SEQ ID NO: 1612520 - DNA, 25 bp, Homo sapien
tccttccaacgttgttcggactctc

SEQ ID NO: 1612521 - DNA, 25 bp, Homo sapien
gctggccgctgtccgagtcgaccat

SEQ ID NO: 1612522 - DNA, 25 bp, Homo sapien
caacgttgttcggactctcatgccg

SEQ ID NO: 1612523 - DNA, 25 bp, Homo sapien
gttcggactctcatgccgctggccg

SEQ ID NO: 1612524 - DNA, 25 bp, Homo sapien
tgagattttaccagtcatccttata

SEQ ID NO: 1612525 - DNA, 25 bp, Homo sapien
accagtcatccttatatccaatggg

SEQ ID NO: 1612526 - DNA, 25 bp, Homo sapien
gattttaccagtcatccttatatcc

SEQ ID NO: 1612527 - DNA, 25 bp, Homo sapien
tagcaatgagattttaccagtcatc

SEQ ID NO: 1612528 - DNA, 25 bp, Homo sapien
gattgaagtaatgttcgtgcctgtt

SEQ ID NO: 1612529 - DNA, 25 bp, Homo sapien
gaaattgattgaagtaatgttcgtg

SEQ ID NO: 1612530 - DNA, 25 bp, Homo sapien
gaagtaatgttcgtgcctgttaatt

SEQ ID NO: 1612531 - DNA, 25 bp, Homo sapien
aattgattgaagtaatgttcgtgcc

SEQ ID NO: 1612532 - DNA, 25 bp, Homo sapien
ttcctcgcgggccttcttcatttcc

SEQ ID NO: 1612533 - DNA, 25 bp, Homo sapien
tcctcttcctcgcgggccttcttca

SEQ ID NO: 1612534 - DNA, 25 bp, Homo sapien
cttggcctgtatggcatccatctcc

SEQ ID NO: 1612535 - DNA, 25 bp, Homo sapien
ttggcctgtatggcatccatctccc

SEQ ID NO: 1612536 - DNA, 25 bp, Homo sapien
ttggtttcgccccaggtggccttgc

SEQ ID NO: 1612537 - DNA, 25 bp, Homo sapien
catctgtgatcagaaagttatcaaa

SEQ ID NO: 1612538 - DNA, 25 bp, Homo sapien
ggtggccttgccaaaattatctgcg

SEQ ID NO: 1612539 - DNA, 25 bp, Homo sapien
gccaaaattatctgcgtactcttca

SEQ ID NO: 1612540 - DNA, 25 bp, Homo sapien
agacgtctttatgaataccttctgg

SEQ ID NO: 1612541 - DNA, 25 bp, Homo sapien
atcttacggtggagccagacgtctt

SEQ ID NO: 1612542 - DNA, 25 bp, Homo sapien
ctgagaggtcatactgcgtcaaata

SEQ ID NO: 1612543 - DNA, 25 bp, Homo sapien
ggtcatactgcgtcaaatagtcggt

SEQ ID NO: 1612544 - DNA, 25 bp, Homo sapien
cgttccagtcgctctgcttgctggt

SEQ ID NO: 1612545 - DNA, 25 bp, Homo sapien
ccagtcgctctgcttgctggtgctg

SEQ ID NO: 1612546 - DNA, 25 bp, Homo sapien
gcttctggagcatcggcgctggcca

SEQ ID NO: 1612547 - DNA, 25 bp, Homo sapien
aggtcaccgttccagtcgctctgct

SEQ ID NO: 1612548 - DNA, 25 bp, Homo sapien
ctgggctttgttgtctttagtctgt

SEQ ID NO: 1612549 - DNA, 25 bp, Homo sapien
gggacgtttccttcttgagtgatgt

SEQ ID NO: 1612550 - DNA, 25 bp, Homo sapien
tctatgctgccggattcaattgact

SEQ ID NO: 1612551 - DNA, 25 bp, Homo sapien
caatccttcgattctgccggggacg

SEQ ID NO: 1612552 - DNA, 25 bp, Homo sapien
tgatgttaagttccagtcgtactct

SEQ ID NO: 1612553 - DNA, 25 bp, Homo sapien
ttagagtgtacaggtgtgtgaagcc

SEQ ID NO: 1612554 - DNA, 25 bp, Homo sapien
attagagtgtacaggtgtgtgaagc

SEQ ID NO: 1612555 - DNA, 25 bp, Homo sapien
aaattagagtgtacaggtgtgtgaa

SEQ ID NO: 1612556 - DNA, 25 bp, Homo sapien
aattagagtgtacaggtgtgtgaag

SEQ ID NO: 1612557 - DNA, 25 bp, Homo sapien
tcttgttttcgtgatacttattctt

SEQ ID NO: 1612558 - DNA, 25 bp, Homo sapien
ttgttttcgtgatacttattcttga

SEQ ID NO: 1612559 - DNA, 25 bp, Homo sapien
cttgttttcgtgatacttattcttg

SEQ ID NO: 1612560 - DNA, 25 bp, Homo sapien
tgtctgcaggaaagaccttaatgta

SEQ ID NO: 1612561 - DNA, 25 bp, Homo sapien
gaatcggccattctgagtggtttgc

SEQ ID NO: 1612562 - DNA, 25 bp, Homo sapien
tgcagagatggcatagaatcggcca

SEQ ID NO: 1612563 - DNA, 25 bp, Homo sapien
tattgctgaacggtttgaagcgtgc

SEQ ID NO: 1612564 - DNA, 25 bp, Homo sapien
aatatactcatgaaggatcaggaat

SEQ ID NO: 1612565 - DNA, 25 bp, Homo sapien
catgaaggatcaggaatgacgctgc

SEQ ID NO: 1612566 - DNA, 25 bp, Homo sapien
ctcatgaaggatcaggaatgacgct

SEQ ID NO: 1612567 - DNA, 25 bp, Homo sapien
tactcatgaaggatcaggaatgacg

SEQ ID NO: 1612568 - DNA, 25 bp, Homo sapien
tctaaaatgcccaaatcgggagtca

SEQ ID NO: 1612569 - DNA, 25 bp, Homo sapien
tgaccataaaacttgcccgacgaaa

SEQ ID NO: 1612570 - DNA, 25 bp, Homo sapien
tcattggtggactgcaaccatcggt

SEQ ID NO: 1612571 - DNA, 25 bp, Homo sapien
tgcaaccatcggtttctccaatgct

SEQ ID NO: 1612572 - DNA, 25 bp, Homo sapien
gaaataacaccggttagaggtgata

SEQ ID NO: 1612573 - DNA, 25 bp, Homo sapien
taacaccggttagaggtgataatgg

SEQ ID NO: 1612574 - DNA, 25 bp, Homo sapien
caccggttagaggtgataatggtta

SEQ ID NO: 1612575 - DNA, 25 bp, Homo sapien
ccggttagaggtgataatggttaat

SEQ ID NO: 1612576 - DNA, 25 bp, Homo sapien
ctccgccaccacgggcgtggcccct

SEQ ID NO: 1612577 - DNA, 25 bp, Homo sapien
cgccaccacgggcgtggccccttca

SEQ ID NO: 1612578 - DNA, 25 bp, Homo sapien
gccaccacgggcgtggccccttcac

SEQ ID NO: 1612579 - DNA, 25 bp, Homo sapien
tgcatatggcccagagctggaccaa

SEQ ID NO: 1612580 - DNA, 25 bp, Homo sapien
tggaaatagacggtagccagcgcca

SEQ ID NO: 1612581 - DNA, 25 bp, Homo sapien
cactcgcagcatgcatatggcccag

SEQ ID NO: 1612582 - DNA, 25 bp, Homo sapien
ttcctcttggaaatagacggtagcc

SEQ ID NO: 1612583 - DNA, 25 bp, Homo sapien
ggtcgccgccaccccttagctccca

SEQ ID NO: 1612584 - DNA, 25 bp, Homo sapien
tcgccgccaccccttagctcccagc

SEQ ID NO: 1612585 - DNA, 25 bp, Homo sapien
tccggtcgccgccaccccttagctc

SEQ ID NO: 1612586 - DNA, 25 bp, Homo sapien
cgccgccaccccttagctcccagct

SEQ ID NO: 1612587 - DNA, 25 bp, Homo sapien
taatctagagcagcgaccggttctc

SEQ ID NO: 1612588 - DNA, 25 bp, Homo sapien
ccctgtgaaagcgatgctgggcccg

SEQ ID NO: 1612589 - DNA, 25 bp, Homo sapien
gacgctgctttggaactgtgccgag

SEQ ID NO: 1612590 - DNA, 25 bp, Homo sapien
aactcatgcctctgttgggcgtcca

SEQ ID NO: 1612591 - DNA, 25 bp, Homo sapien
tgaatggaattgcaccaggctgccc

SEQ ID NO: 1612592 - DNA, 25 bp, Homo sapien
cctaggaggaggcttcaatctgact

SEQ ID NO: 1612593 - DNA, 25 bp, Homo sapien
tctgtttttcaatccgcgggcagtc

SEQ ID NO: 1612594 - DNA, 25 bp, Homo sapien
taactgaactaagggccagtacgcc

SEQ ID NO: 1612595 - DNA, 25 bp, Homo sapien
tgccctccacgccatggagcacggc

SEQ ID NO: 1612596 - DNA, 25 bp, Homo sapien
tcccactgggcatgcgctggtcttc

SEQ ID NO: 1612597 - DNA, 25 bp, Homo sapien
atggagcacggcgttcccactgggc

SEQ ID NO: 1612598 - DNA, 25 bp, Homo sapien
gagcacggcgttcccactgggcatg

SEQ ID NO: 1612599 - DNA, 25 bp, Homo sapien
caagtggagacggtgtaagaactga

SEQ ID NO: 1612600 - DNA, 25 bp, Homo sapien
ccacaagtggagacggtgtaagaac

SEQ ID NO: 1612601 - DNA, 25 bp, Homo sapien
gagacggtgtaagaactgagctgtc

SEQ ID NO: 1612602 - DNA, 25 bp, Homo sapien
ctccacaagtggagacggtgtaaga

SEQ ID NO: 1612603 - DNA, 25 bp, Homo sapien
tggatcccttgctccttcgcaccga

SEQ ID NO: 1612604 - DNA, 25 bp, Homo sapien
tcataggggtcatccagagccacgc

SEQ ID NO: 1612605 - DNA, 25 bp, Homo sapien
tatactggtcccacttatcccggac

SEQ ID NO: 1612606 - DNA, 25 bp, Homo sapien
catgcgggcgatgaaggagtagctc

SEQ ID NO: 1612607 - DNA, 25 bp, Homo sapien
gaatgtccagacaggcagtgtagac

SEQ ID NO: 1612608 - DNA, 25 bp, Homo sapien
aatgggtagagagaacccgcaggcc

SEQ ID NO: 1612609 - DNA, 25 bp, Homo sapien
gaagagaaagcgctggtgactcccg

SEQ ID NO: 1612610 - DNA, 25 bp, Homo sapien
caggccggccctgtctagagggtct

SEQ ID NO: 1612611 - DNA, 25 bp, Homo sapien
tcttcaccagcatctgatggccttt

SEQ ID NO: 1612612 - DNA, 25 bp, Homo sapien
catcttcaccagcatctgatggcct

SEQ ID NO: 1612613 - DNA, 25 bp, Homo sapien
atggcctttgttctcttctccgagc

SEQ ID NO: 1612614 - DNA, 25 bp, Homo sapien
ttcaccagcatctgatggcctttgt

SEQ ID NO: 1612615 - DNA, 25 bp, Homo sapien
atgggaggcgccgaattagaaccca

SEQ ID NO: 1612616 - DNA, 25 bp, Homo sapien
ggaggcgccgaattagaacccagac

SEQ ID NO: 1612617 - DNA, 25 bp, Homo sapien
agtcagggatgggaggcgccgaatt

SEQ ID NO: 1612618 - DNA, 25 bp, Homo sapien
tcagggatgggaggcgccgaattag

SEQ ID NO: 1612619 - DNA, 25 bp, Homo sapien
tgcagattttgcgtctctacccgtt

SEQ ID NO: 1612620 - DNA, 25 bp, Homo sapien
ccaggtgacaccgtatgcagatttt

SEQ ID NO: 1612621 - DNA, 25 bp, Homo sapien
agtgatgaggacctcacagccgcag

SEQ ID NO: 1612622 - DNA, 25 bp, Homo sapien
caacccagatggtggttagaaagca

SEQ ID NO: 1612623 - DNA, 25 bp, Homo sapien
cgcagcacttaagacaggatcttac

SEQ ID NO: 1612624 - DNA, 25 bp, Homo sapien
gcgcagcacttaagacaggatctta

SEQ ID NO: 1612625 - DNA, 25 bp, Homo sapien
cagcgcagcacttaagacaggatct

SEQ ID NO: 1612626 - DNA, 25 bp, Homo sapien
agcgcagcacttaagacaggatctt

SEQ ID NO: 1612627 - DNA, 25 bp, Homo sapien
gactgggaccgggagcggcttctgg

SEQ ID NO: 1612628 - DNA, 25 bp, Homo sapien
gcttctggaggagcgcgacctgctc

SEQ ID NO: 1612629 - DNA, 25 bp, Homo sapien
tcttcctggggagtacgacttggac

SEQ ID NO: 1612630 - DNA, 25 bp, Homo sapien
cctggaccgtgaccggcgtcttctt

SEQ ID NO: 1612631 - DNA, 25 bp, Homo sapien
tggagcgggagtaggaacgggagca

SEQ ID NO: 1612632 - DNA, 25 bp, Homo sapien
ggagcgggagtaggaacgggagcag

SEQ ID NO: 1612633 - DNA, 25 bp, Homo sapien
gcgggagtaggaacgggagcaggag

SEQ ID NO: 1612634 - DNA, 25 bp, Homo sapien
agcgggagtaggaacgggagcagga

SEQ ID NO: 1612635 - DNA, 25 bp, Homo sapien
tcgactcttggatctgctccgagac

SEQ ID NO: 1612636 - DNA, 25 bp, Homo sapien
tctgctccgagacctcgagggtccg

SEQ ID NO: 1612637 - DNA, 25 bp, Homo sapien
agcgggaggaagaacgccctcgact

SEQ ID NO: 1612638 - DNA, 25 bp, Homo sapien
gaacgccctcgactcttggatctgc

SEQ ID NO: 1612639 - DNA, 25 bp, Homo sapien
tgctcggaagaactcatagaggccg

SEQ ID NO: 1612640 - DNA, 25 bp, Homo sapien
catttttgctcggaagaactcatag

SEQ ID NO: 1612641 - DNA, 25 bp, Homo sapien
cgccgggcccgcatttttgctcgga

SEQ ID NO: 1612642 - DNA, 25 bp, Homo sapien
ctcatagaggccgttctgctcccag

SEQ ID NO: 1612643 - DNA, 25 bp, Homo sapien
caccctgctgttccgctgaggtggt

SEQ ID NO: 1612644 - DNA, 25 bp, Homo sapien
caaggaagtcgtgaaaaagtcatca

SEQ ID NO: 1612645 - DNA, 25 bp, Homo sapien
aaagtcatcaggagttaatccacag

SEQ ID NO: 1612646 - DNA, 25 bp, Homo sapien
cttggagagtacatggccctgtggc

SEQ ID NO: 1612647 - DNA, 25 bp, Homo sapien
cctaacttcttctgatgtgtctcca

SEQ ID NO: 1612648 - DNA, 25 bp, Homo sapien
tcattgagggccacgtgtgtgctgt

SEQ ID NO: 1612649 - DNA, 25 bp, Homo sapien
taaaacgcccttcattgagggccac

SEQ ID NO: 1612650 - DNA, 25 bp, Homo sapien
tgtgtctccattaaaacgcccttca

SEQ ID NO: 1612651 - DNA, 25 bp, Homo sapien
aaggcttgtactcgtgatcttccag

SEQ ID NO: 1612652 - DNA, 25 bp, Homo sapien
agggtccaaaggcttgtactcgtga

SEQ ID NO: 1612653 - DNA, 25 bp, Homo sapien
gatgtctttagggtccaaaggcttg

SEQ ID NO: 1612654 - DNA, 25 bp, Homo sapien
tgtctttagggtccaaaggcttgta

SEQ ID NO: 1612655 - DNA, 25 bp, Homo sapien
tgggcagagccctctcaggcccacc

SEQ ID NO: 1612656 - DNA, 25 bp, Homo sapien
catgcctgggcagagccctctcagg

SEQ ID NO: 1612657 - DNA, 25 bp, Homo sapien
ctgcagcagagaaccccagctgtca

SEQ ID NO: 1612658 - DNA, 25 bp, Homo sapien
agcagagaaccccagctgtcaccat

SEQ ID NO: 1612659 - DNA, 25 bp, Homo sapien
gcagacatggtgtcgctcacagcca

SEQ ID NO: 1612660 - DNA, 25 bp, Homo sapien
cccgtgcattcacttttcacaagga

SEQ ID NO: 1612661 - DNA, 25 bp, Homo sapien
gaccagtatggtaagcgtgctcagc

SEQ ID NO: 1612662 - DNA, 25 bp, Homo sapien
cactgacggatcagggtccctaggg

SEQ ID NO: 1612663 - DNA, 25 bp, Homo sapien
ctcgttgatgccaggatgaggcatg

SEQ ID NO: 1612664 - DNA, 25 bp, Homo sapien
ggtgggccctgtcgccgcatgtgtg

SEQ ID NO: 1612665 - DNA, 25 bp, Homo sapien
gtccagcccaaggcgggtgctcgtt

SEQ ID NO: 1612666 - DNA, 25 bp, Homo sapien
cagggagatcgaagtagggcacatt

SEQ ID NO: 1612667 - DNA, 25 bp, Homo sapien
gaagacggtcacctatgagccaagg

SEQ ID NO: 1612668 - DNA, 25 bp, Homo sapien
ggagacaggcctccaagacactaac

SEQ ID NO: 1612669 - DNA, 25 bp, Homo sapien
tagtggcccgaatccaacgtgactg

SEQ ID NO: 1612670 - DNA, 25 bp, Homo sapien
cccagtagctcaggacggaactgta

SEQ ID NO: 1612671 - DNA, 25 bp, Homo sapien
gggaagtcgtcctgcatgaagcggg

SEQ ID NO: 1612672 - DNA, 25 bp, Homo sapien
gctggttgaactgcgggtgctgctg

SEQ ID NO: 1612673 - DNA, 25 bp, Homo sapien
tccaggggccctcgaactggctgtt

SEQ ID NO: 1612674 - DNA, 25 bp, Homo sapien
cggctgctcgtgctggctgttccag

SEQ ID NO: 1612675 - DNA, 25 bp, Homo sapien
tccttgtcctggggtctgcttctgg

SEQ ID NO: 1612676 - DNA, 25 bp, Homo sapien
atccttgtcctggggtctgcttctg

SEQ ID NO: 1612677 - DNA, 25 bp, Homo sapien
ctgcaaaacagccaccaccatctgg

SEQ ID NO: 1612678 - DNA, 25 bp, Homo sapien
caaaacagccaccaccatctggctc

SEQ ID NO: 1612679 - DNA, 25 bp, Homo sapien
tgcaaaacagccaccaccatctggc

SEQ ID NO: 1612680 - DNA, 25 bp, Homo sapien
gcaaaacagccaccaccatctggct

SEQ ID NO: 1612681 - DNA, 25 bp, Homo sapien
gacagggagtcacctggaaaggcca

SEQ ID NO: 1612682 - DNA, 25 bp, Homo sapien
cagacagggagtcacctggaaaggc

SEQ ID NO: 1612683 - DNA, 25 bp, Homo sapien
tgcagacagggagtcacctggaaag

SEQ ID NO: 1612684 - DNA, 25 bp, Homo sapien
cagggagtcacctggaaaggccacg

SEQ ID NO: 1612685 - DNA, 25 bp, Homo sapien
gggcttgtttggtgggatctggtcg

SEQ ID NO: 1612686 - DNA, 25 bp, Homo sapien
tggtgggatctggtcgtgtggcccg

SEQ ID NO: 1612687 - DNA, 25 bp, Homo sapien
tctgaagagccaggcatctggatgg

SEQ ID NO: 1612688 - DNA, 25 bp, Homo sapien
gcaggatcctggacccctcctggag

SEQ ID NO: 1612689 - DNA, 25 bp, Homo sapien
gcggtggaggcgtggccttgacttc

SEQ ID NO: 1612690 - DNA, 25 bp, Homo sapien
gcgtggccttgacttcagcctccat

SEQ ID NO: 1612691 - DNA, 25 bp, Homo sapien
tggaggcgtggccttgacttcagcc

SEQ ID NO: 1612692 - DNA, 25 bp, Homo sapien
aggctgggtggtgggcgggatggca

SEQ ID NO: 1612693 - DNA, 25 bp, Homo sapien
ctgctgggccaggctggtgacaaac

SEQ ID NO: 1612694 - DNA, 25 bp, Homo sapien
ctgcggcatctggagctgctgctgc

SEQ ID NO: 1612695 - DNA, 25 bp, Homo sapien
tgctgctgggccaggctggtgacaa

SEQ ID NO: 1612696 - DNA, 25 bp, Homo sapien
gctgctgctgggccaggctggtgac

SEQ ID NO: 1612697 - DNA, 25 bp, Homo sapien
tcgtgctgcgtcttgagggtctgga

SEQ ID NO: 1612698 - DNA, 25 bp, Homo sapien
tgctgcgtcttgagggtctggatct

SEQ ID NO: 1612699 - DNA, 25 bp, Homo sapien
tcctcgtgctgcgtcttgagggtct

SEQ ID NO: 1612700 - DNA, 25 bp, Homo sapien
cctcgtgctgcgtcttgagggtctg

SEQ ID NO: 1612701 - DNA, 25 bp, Homo sapien
gctggaccactgaggagtactcgtt

SEQ ID NO: 1612702 - DNA, 25 bp, Homo sapien
cggctggaccactgaggagtactcg

SEQ ID NO: 1612703 - DNA, 25 bp, Homo sapien
cactgaggagtactcgttgatgagg

SEQ ID NO: 1612704 - DNA, 25 bp, Homo sapien
gaccactgaggagtactcgttgatg

SEQ ID NO: 1612705 - DNA, 25 bp, Homo sapien
ccgctgctcagtatgcggccttggg

SEQ ID NO: 1612706 - DNA, 25 bp, Homo sapien
agagcacccgctgctcagtatgcgg

SEQ ID NO: 1612707 - DNA, 25 bp, Homo sapien
gctgcctggcgccagaggacaaacg

SEQ ID NO: 1612708 - DNA, 25 bp, Homo sapien
gagagaagagcacccgctgctcagt

SEQ ID NO: 1612709 - DNA, 25 bp, Homo sapien
gggcaggtggacagggaaccgtcac

SEQ ID NO: 1612710 - DNA, 25 bp, Homo sapien
cctggggcaggtggacagggaaccg

SEQ ID NO: 1612711 - DNA, 25 bp, Homo sapien
agcagcagagcctgggggacctggg

SEQ ID NO: 1612712 - DNA, 25 bp, Homo sapien
tggggcaggtggacagggaaccgtc

SEQ ID NO: 1612713 - DNA, 25 bp, Homo sapien
gttcgctgcagcgtgttttacgact

SEQ ID NO: 1612714 - DNA, 25 bp, Homo sapien
tcgctgcagcgtgttttacgactcc

SEQ ID NO: 1612715 - DNA, 25 bp, Homo sapien
gatgttcgctgcagcgtgttttacg

SEQ ID NO: 1612716 - DNA, 25 bp, Homo sapien
tgaggatgttcgctgcagcgtgttt

SEQ ID NO: 1612717 - DNA, 25 bp, Homo sapien
gatggagtcatcgaagtagccgttt

SEQ ID NO: 1612718 - DNA, 25 bp, Homo sapien
tgaatgatggagtcatcgaagtagc

SEQ ID NO: 1612719 - DNA, 25 bp, Homo sapien
gtcatcgaagtagccgtttttctcc

SEQ ID NO: 1612720 - DNA, 25 bp, Homo sapien
ggagtcatcgaagtagccgtttttc

SEQ ID NO: 1612721 - DNA, 25 bp, Homo sapien
cggccaagaagctggtgcagtagat

SEQ ID NO: 1612722 - DNA, 25 bp, Homo sapien
tccacggccaagaagctggtgcagt

SEQ ID NO: 1612723 - DNA, 25 bp, Homo sapien
cacggccaagaagctggtgcagtag

SEQ ID NO: 1612724 - DNA, 25 bp, Homo sapien
cctccacggccaagaagctggtgca

SEQ ID NO: 1612725 - DNA, 25 bp, Homo sapien
tgagggagagactttccgcgcgtca

SEQ ID NO: 1612726 - DNA, 25 bp, Homo sapien
gagagactttccgcgcgtcagggcc

SEQ ID NO: 1612727 - DNA, 25 bp, Homo sapien
ctgtgagggagagactttccgcgcg

SEQ ID NO: 1612728 - DNA, 25 bp, Homo sapien
gggagagactttccgcgcgtcaggg

SEQ ID NO: 1612729 - DNA, 25 bp, Homo sapien
gccccagtgaccctgtagaaggaaa

SEQ ID NO: 1612730 - DNA, 25 bp, Homo sapien
gcaacaaggagacgccaagaagctg

SEQ ID NO: 1612731 - DNA, 25 bp, Homo sapien
tgcgtgcaaatcagtgacgagggca

SEQ ID NO: 1612732 - DNA, 25 bp, Homo sapien
acagggcatgcagcgaaggtgcaca

SEQ ID NO: 1612733 - DNA, 25 bp, Homo sapien
ttccggaggtggccggccatcagct

SEQ ID NO: 1612734 - DNA, 25 bp, Homo sapien
gtgcagccgcagctcgaagtgtgcc

SEQ ID NO: 1612735 - DNA, 25 bp, Homo sapien
tgtgccccatcagccgtgatgcggt

SEQ ID NO: 1612736 - DNA, 25 bp, Homo sapien
gtggtgcagcacgtcattgatcagg

SEQ ID NO: 1612737 - DNA, 25 bp, Homo sapien
agatggcgtccttggtgcacgtgtc

SEQ ID NO: 1612738 - DNA, 25 bp, Homo sapien
tccttggtgcacgtgtcgatgatgg

SEQ ID NO: 1612739 - DNA, 25 bp, Homo sapien
cgttcatgtctagctgggtctcctc

SEQ ID NO: 1612740 - DNA, 25 bp, Homo sapien
ggttgtcaaactcgttcatgtctag

SEQ ID NO: 1612741 - DNA, 25 bp, Homo sapien
tgagctcgtccatggatggcgcgcc

SEQ ID NO: 1612742 - DNA, 25 bp, Homo sapien
agctcgtccatggatggcgcgccct

SEQ ID NO: 1612743 - DNA, 25 bp, Homo sapien
ctcgtccatggatggcgcgccctgg

SEQ ID NO: 1612744 - DNA, 25 bp, Homo sapien
ggatgagctcgtccatggatggcgc

SEQ ID NO: 1612745 - DNA, 25 bp, Homo sapien
gctccggggtctgctgcttgcagat

SEQ ID NO: 1612746 - DNA, 25 bp, Homo sapien
cagctccggggtctgctgcttgcag

SEQ ID NO: 1612747 - DNA, 25 bp, Homo sapien
gctccagctccggggtctgctgctt

SEQ ID NO: 1612748 - DNA, 25 bp, Homo sapien
gcggctggctccagctccggggtct

SEQ ID NO: 1612749 - DNA, 25 bp, Homo sapien
tactgcacacactcaatcgacacag

SEQ ID NO: 1612750 - DNA, 25 bp, Homo sapien
tgacactgaacttactgcacacact

SEQ ID NO: 1612751 - DNA, 25 bp, Homo sapien
agttcaccaccccttagacagtcga

SEQ ID NO: 1612752 - DNA, 25 bp, Homo sapien
ttagacagtcgagtggtccccagct

SEQ ID NO: 1612753 - DNA, 25 bp, Homo sapien
gtgggaacagcggaacagggatcgt

SEQ ID NO: 1612754 - DNA, 25 bp, Homo sapien
tggaatccgagaaaggaagcgctcg

SEQ ID NO: 1612755 - DNA, 25 bp, Homo sapien
ggatcgtgtggaccgagctgctcca

SEQ ID NO: 1612756 - DNA, 25 bp, Homo sapien
gaggatcgaaaacctcgttgttctc

SEQ ID NO: 1612757 - DNA, 25 bp, Homo sapien
tgtagaattcgcctccgaaaagaaa

SEQ ID NO: 1612758 - DNA, 25 bp, Homo sapien
tagtaactgtagaattcgcctccga

SEQ ID NO: 1612759 - DNA, 25 bp, Homo sapien
gccagcttgcacttgtagtaactgt

SEQ ID NO: 1612760 - DNA, 25 bp, Homo sapien
cagcgccagcttgcacttgtagtaa

SEQ ID NO: 1612761 - DNA, 25 bp, Homo sapien
gcttgtcgatgacatttcgaagctc

SEQ ID NO: 1612762 - DNA, 25 bp, Homo sapien
cgagccacgaactgggcgagcttgt

SEQ ID NO: 1612763 - DNA, 25 bp, Homo sapien
gaactgggcgagcttgtcgatgaca

SEQ ID NO: 1612764 - DNA, 25 bp, Homo sapien
aaactcgggcccattgcgagccacg

SEQ ID NO: 1612765 - DNA, 25 bp, Homo sapien
ggcgtcagcgaggaccgcccaaagc

SEQ ID NO: 1612766 - DNA, 25 bp, Homo sapien
gggccacacgctcgccgggaatgcg

SEQ ID NO: 1612767 - DNA, 25 bp, Homo sapien
tgtacgggtcccgataggggccaca

SEQ ID NO: 1612768 - DNA, 25 bp, Homo sapien
gtctctcggccggtttgggtctcac

SEQ ID NO: 1612769 - DNA, 25 bp, Homo sapien
catcggggggcagcggcatctccat

SEQ ID NO: 1612770 - DNA, 25 bp, Homo sapien
ccacacgatcgaccaccagcgccgt

SEQ ID NO: 1612771 - DNA, 25 bp, Homo sapien
gtcctccggcgccacacgatcgacc

SEQ ID NO: 1612772 - DNA, 25 bp, Homo sapien
ggcgccacacgatcgaccaccagcg

SEQ ID NO: 1612773 - DNA, 25 bp, Homo sapien
gggaacgtcctccggcgccacacga

SEQ ID NO: 1612774 - DNA, 25 bp, Homo sapien
tacggcgggcttctagggccgcttc

SEQ ID NO: 1612775 - DNA, 25 bp, Homo sapien
agtggcgcgagggagccgtttacgg

SEQ ID NO: 1612776 - DNA, 25 bp, Homo sapien
tggcgcgagggagccgtttacggcg

SEQ ID NO: 1612777 - DNA, 25 bp, Homo sapien
gaagtggcgcgagggagccgtttac

SEQ ID NO: 1612778 - DNA, 25 bp, Homo sapien
aagaagccgcgcgatgcctggcgcg

SEQ ID NO: 1612779 - DNA, 25 bp, Homo sapien
tcgctgggaaactccggaagtgaga

SEQ ID NO: 1612780 - DNA, 25 bp, Homo sapien
cgcgcgatgcctggcgcgcgggagg

SEQ ID NO: 1612781 - DNA, 25 bp, Homo sapien
ggaggggctagcgacgcgcacgcgc

SEQ ID NO: 1612782 - DNA, 25 bp, Homo sapien
cccgtcgcgcggcgccgcggaaagg

SEQ ID NO: 1612783 - DNA, 25 bp, Homo sapien
cagagtgggtccccgtcgcgcggcg

SEQ ID NO: 1612784 - DNA, 25 bp, Homo sapien
agagtgggtccccgtcgcgcggcgc

SEQ ID NO: 1612785 - DNA, 25 bp, Homo sapien
agtgggtccccgtcgcgcggcgccg

SEQ ID NO: 1612786 - DNA, 25 bp, Homo sapien
aaagctgcagttgggttgcctctaa

SEQ ID NO: 1612787 - DNA, 25 bp, Homo sapien
cctttcgcgggcacagtgaggagac

SEQ ID NO: 1612788 - DNA, 25 bp, Homo sapien
gcaaatttctgctgtggacgtccga

SEQ ID NO: 1612789 - DNA, 25 bp, Homo sapien
gaagctaacccttgctaattgtggg

SEQ ID NO: 1612790 - DNA, 25 bp, Homo sapien
agccaccctacccagccttatttag

SEQ ID NO: 1612791 - DNA, 25 bp, Homo sapien
ttaggtatttctataaccagaaaga

SEQ ID NO: 1612792 - DNA, 25 bp, Homo sapien
gagccaccctacccagccttattta

SEQ ID NO: 1612793 - DNA, 25 bp, Homo sapien
cttatttaggtatttctataaccag

SEQ ID NO: 1612794 - DNA, 25 bp, Homo sapien
ggcaaaggttgaggtggaggttaca

SEQ ID NO: 1612795 - DNA, 25 bp, Homo sapien
acctgagcttgcacacagcctgcta

SEQ ID NO: 1612796 - DNA, 25 bp, Homo sapien
tgatgccctgtgctacctcaagact

SEQ ID NO: 1612797 - DNA, 25 bp, Homo sapien
ggcccttgattttggatatctcagc

SEQ ID NO: 1612798 - DNA, 25 bp, Homo sapien
ggtctgcactatgatctgaacaagg

SEQ ID NO: 1612799 - DNA, 25 bp, Homo sapien
aaaggctctcgaggtgaggtctgca

SEQ ID NO: 1612800 - DNA, 25 bp, Homo sapien
gatgctgagactatgatacaaggga

SEQ ID NO: 1612801 - DNA, 25 bp, Homo sapien
tatagatacggtcatgcacaactca

SEQ ID NO: 1612802 - DNA, 25 bp, Homo sapien
tgcctgttggtcagactggcctcaa

SEQ ID NO: 1612803 - DNA, 25 bp, Homo sapien
gtcctgtctgttgcccagcctagag

SEQ ID NO: 1612804 - DNA, 25 bp, Homo sapien
tctgcctgttggtcagactggcctc

SEQ ID NO: 1612805 - DNA, 25 bp, Homo sapien
gtttctgcctgttggtcagactggc

SEQ ID NO: 1612806 - DNA, 25 bp, Homo sapien
agaccggagtccagtggtgcagtct

SEQ ID NO: 1612807 - DNA, 25 bp, Homo sapien
accggagtccagtggtgcagtctct

SEQ ID NO: 1612808 - DNA, 25 bp, Homo sapien
cggagtccagtggtgcagtctctgc

SEQ ID NO: 1612809 - DNA, 25 bp, Homo sapien
gcccagaccggagtccagtggtgca

SEQ ID NO: 1612810 - DNA, 25 bp, Homo sapien
tagaaagagctggtagactggctgc

SEQ ID NO: 1612811 - DNA, 25 bp, Homo sapien
tccagcaagtaaagtggacacctcg

SEQ ID NO: 1612812 - DNA, 25 bp, Homo sapien
caaatcagaatctactggtcagaag

SEQ ID NO: 1612813 - DNA, 25 bp, Homo sapien
gacacctcgagtgagatgagccttg

SEQ ID NO: 1612814 - DNA, 25 bp, Homo sapien
gcatttctaagtagctcccatgtgc

SEQ ID NO: 1612815 - DNA, 25 bp, Homo sapien
tcagggtcagatggtaactaaagtt

SEQ ID NO: 1612816 - DNA, 25 bp, Homo sapien
gagtctggaccccttaatcggaatg

SEQ ID NO: 1612817 - DNA, 25 bp, Homo sapien
gttctgtggcccatatgtctgctag

SEQ ID NO: 1612818 - DNA, 25 bp, Homo sapien
cagaaaagtctatagcatttaagtc

SEQ ID NO: 1612819 - DNA, 25 bp, Homo sapien
gaggaatatacacgtcattcctgca

SEQ ID NO: 1612820 - DNA, 25 bp, Homo sapien
ccagtgaggaatatacacgtcattc

SEQ ID NO: 1612821 - DNA, 25 bp, Homo sapien
gaaaacaggtgacaattgaaaaaca

SEQ ID NO: 1612822 - DNA, 25 bp, Homo sapien
tgcagtgagtctcgccatggtgaac

SEQ ID NO: 1612823 - DNA, 25 bp, Homo sapien
gcttcctcacttgaacggatctggc

SEQ ID NO: 1612824 - DNA, 25 bp, Homo sapien
tgtccttcaggctgtgagaccctaa

SEQ ID NO: 1612825 - DNA, 25 bp, Homo sapien
tgtcccagctatagcaaagggcctg

SEQ ID NO: 1612826 - DNA, 25 bp, Homo sapien
cgtgattgcctcattcattccagtg

SEQ ID NO: 1612827 - DNA, 25 bp, Homo sapien
gtgtttgtcttttgatctgctgatt

SEQ ID NO: 1612828 - DNA, 25 bp, Homo sapien
gatctgctgatttggtgtaacgtga

SEQ ID NO: 1612829 - DNA, 25 bp, Homo sapien
cattcattccagtgtacgtacttgc

SEQ ID NO: 1612830 - DNA, 25 bp, Homo sapien
caggagtgtcccatgtgtcagctga

SEQ ID NO: 1612831 - DNA, 25 bp, Homo sapien
taaaagagaccacagctcggacctg

SEQ ID NO: 1612832 - DNA, 25 bp, Homo sapien
caagagggacacttctgaggccggt

SEQ ID NO: 1612833 - DNA, 25 bp, Homo sapien
tctgaacagggaaacatctcgctcg

SEQ ID NO: 1612834 - DNA, 25 bp, Homo sapien
caggcatgagccaccacgcctggcc

SEQ ID NO: 1612835 - DNA, 25 bp, Homo sapien
ggtctcaaactccagtgatccaccc

SEQ ID NO: 1612836 - DNA, 25 bp, Homo sapien
tctcaaactccagtgatccacccac

SEQ ID NO: 1612837 - DNA, 25 bp, Homo sapien
gtctcaaactccagtgatccaccca

SEQ ID NO: 1612838 - DNA, 25 bp, Homo sapien
catcaccagtgggaacttggttttg

SEQ ID NO: 1612839 - DNA, 25 bp, Homo sapien
aataccaaaacgtgtcagacaggca

SEQ ID NO: 1612840 - DNA, 25 bp, Homo sapien
caaaacgtgtcagacaggcatcacc

SEQ ID NO: 1612841 - DNA, 25 bp, Homo sapien
aagcttcgaaacacttcatttccta

SEQ ID NO: 1612842 - DNA, 25 bp, Homo sapien
aaaagattttcgatgcataggccag

SEQ ID NO: 1612843 - DNA, 25 bp, Homo sapien
gatggagagttatgcaccgtcccct

SEQ ID NO: 1612844 - DNA, 25 bp, Homo sapien
tgcgccagggaattaaactagccag

SEQ ID NO: 1612845 - DNA, 25 bp, Homo sapien
tttgaatgattctcgcgggctccct

SEQ ID NO: 1612846 - DNA, 25 bp, Homo sapien
catagcggttcaaactgtacgagtt

SEQ ID NO: 1612847 - DNA, 25 bp, Homo sapien
tccggtgacgctccttgctgctcag

SEQ ID NO: 1612848 - DNA, 25 bp, Homo sapien
gtctgttaagatgttgttgcggccg

SEQ ID NO: 1612849 - DNA, 25 bp, Homo sapien
tgcggccgtactgatagtccccgtg

SEQ ID NO: 1612850 - DNA, 25 bp, Homo sapien
cttgttatagaggaagacccccagg

SEQ ID NO: 1612851 - DNA, 25 bp, Homo sapien
tgatcagggacaccgtgatgaccat

SEQ ID NO: 1612852 - DNA, 25 bp, Homo sapien
ggtcatcatgcccaggacgttggtg

SEQ ID NO: 1612853 - DNA, 25 bp, Homo sapien
ggttgcgcagcatgatcagggacac

SEQ ID NO: 1612854 - DNA, 25 bp, Homo sapien
gtggcattggcgaccgagtagctca

SEQ ID NO: 1612855 - DNA, 25 bp, Homo sapien
gatgctgaaggcgataacattctgg

SEQ ID NO: 1612856 - DNA, 25 bp, Homo sapien
accgagtagctcagggggctaacga

SEQ ID NO: 1612857 - DNA, 25 bp, Homo sapien
tgaaggcgataacattctgggcaaa

SEQ ID NO: 1612858 - DNA, 25 bp, Homo sapien
tggagtgcaacagcatggtcttggc

SEQ ID NO: 1612859 - DNA, 25 bp, Homo sapien
ctggagtgcaacagcatggtcttgg

SEQ ID NO: 1612860 - DNA, 25 bp, Homo sapien
cccacgttcaagcagttctcctgcc

SEQ ID NO: 1612861 - DNA, 25 bp, Homo sapien
ccacgttcaagcagttctcctgcct

SEQ ID NO: 1612862 - DNA, 25 bp, Homo sapien
tggaggttagagtaagctaagatcg

SEQ ID NO: 1612863 - DNA, 25 bp, Homo sapien
gaggttagagtaagctaagatcgtg

SEQ ID NO: 1612864 - DNA, 25 bp, Homo sapien
ggttagagtaagctaagatcgtgcc

SEQ ID NO: 1612865 - DNA, 25 bp, Homo sapien
aggttagagtaagctaagatcgtgc

SEQ ID NO: 1612866 - DNA, 25 bp, Homo sapien
aaacgaggagcggaaccaagcatac

SEQ ID NO: 1612867 - DNA, 25 bp, Homo sapien
gaataagcaactaagaaacgaggag

SEQ ID NO: 1612868 - DNA, 25 bp, Homo sapien
taacatcagtgaataacgggtagaa

SEQ ID NO: 1612869 - DNA, 25 bp, Homo sapien
ccaagcataccagcgacgagatcta

SEQ ID NO: 1612870 - DNA, 25 bp, Homo sapien
agtacacaaggtgaaggcgggcatc

SEQ ID NO: 1612871 - DNA, 25 bp, Homo sapien
aacgctgacccacagtgctagaagg

SEQ ID NO: 1612872 - DNA, 25 bp, Homo sapien
cccgctgggagaaacgctgacccac

SEQ ID NO: 1612873 - DNA, 25 bp, Homo sapien
ctctgggatgggaagtacacaaggt

SEQ ID NO: 1612874 - DNA, 25 bp, Homo sapien
ggtaacaaactagtcctggaagatg

SEQ ID NO: 1612875 - DNA, 25 bp, Homo sapien
gtaatatccactacttcagcaggtg

SEQ ID NO: 1612876 - DNA, 25 bp, Homo sapien
ctggtcaacatttggagtaagctcc

SEQ ID NO: 1612877 - DNA, 25 bp, Homo sapien
gaaatgtcacaaatccagctagacc

SEQ ID NO: 1612878 - DNA, 25 bp, Homo sapien
tcaccgcaggcacttgcattcattt

SEQ ID NO: 1612879 - DNA, 25 bp, Homo sapien
ttttcctttctaactcgagtctgga

SEQ ID NO: 1612880 - DNA, 25 bp, Homo sapien
agtctggaagaatcgcactggcctc

SEQ ID NO: 1612881 - DNA, 25 bp, Homo sapien
catttataacacattctctgaaggc

SEQ ID NO: 1612882 - DNA, 25 bp, Homo sapien
tggcgtgcatcgtcaccgtgaggca

SEQ ID NO: 1612883 - DNA, 25 bp, Homo sapien
tggctgtcaggtgcccaaaagatac

SEQ ID NO: 1612884 - DNA, 25 bp, Homo sapien
aaatggcgtgttcttggtgctgtac

SEQ ID NO: 1612885 - DNA, 25 bp, Homo sapien
ttctcttccttgacgctactggcgc

SEQ ID NO: 1612886 - DNA, 25 bp, Homo sapien
gacggcgtggcagcccaggatgttg

SEQ ID NO: 1612887 - DNA, 25 bp, Homo sapien
gggatcataaagaagacggcgtggc

SEQ ID NO: 1612888 - DNA, 25 bp, Homo sapien
tcataaagaagacggcgtggcagcc

SEQ ID NO: 1612889 - DNA, 25 bp, Homo sapien
gatcataaagaagacggcgtggcag

SEQ ID NO: 1612890 - DNA, 25 bp, Homo sapien
agggcgctgacgagtccccacatgt

SEQ ID NO: 1612891 - DNA, 25 bp, Homo sapien
gagggcgctgacgagtccccacatg

SEQ ID NO: 1612892 - DNA, 25 bp, Homo sapien
ggctggtcctaactccacagatctg

SEQ ID NO: 1612893 - DNA, 25 bp, Homo sapien
cactgacgcaccagggtttgaagcc

SEQ ID NO: 1612894 - DNA, 25 bp, Homo sapien
gaagaggtcatcaagaagggctcac

SEQ ID NO: 1612895 - DNA, 25 bp, Homo sapien
tgtttgctgtgccagtgacgctctg

SEQ ID NO: 1612896 - DNA, 25 bp, Homo sapien
tctccttcataatgatccgggacag

SEQ ID NO: 1612897 - DNA, 25 bp, Homo sapien
ccttcataatgatccgggacaggag

SEQ ID NO: 1612898 - DNA, 25 bp, Homo sapien
cttctccttcataatgatccgggac

SEQ ID NO: 1612899 - DNA, 25 bp, Homo sapien
tccttcataatgatccgggacagga

SEQ ID NO: 1612900 - DNA, 25 bp, Homo sapien
ggatgtggcacagcgacacggtcac

SEQ ID NO: 1612901 - DNA, 25 bp, Homo sapien
ccggacgacggatgcggactgggtc

SEQ ID NO: 1612902 - DNA, 25 bp, Homo sapien
acttgccgaaggcgagcggtagcac

SEQ ID NO: 1612903 - DNA, 25 bp, Homo sapien
gcggtagcacgtagcgcgggtagaa

SEQ ID NO: 1612904 - DNA, 25 bp, Homo sapien
ccgccatcctgcccgagcggccgcc

SEQ ID NO: 1612905 - DNA, 25 bp, Homo sapien
cgcgccgtggcccgcgcccaccgcg

SEQ ID NO: 1612906 - DNA, 25 bp, Homo sapien
cgccgccatcctgcccgagcggccg

SEQ ID NO: 1612907 - DNA, 25 bp, Homo sapien
gtggcccgcgcccaccgcggccgcc

SEQ ID NO: 1612908 - DNA, 25 bp, Homo sapien
gggcgaacagaagcgcggagggctt

SEQ ID NO: 1612909 - DNA, 25 bp, Homo sapien
ggagggcttcgcagcgtcggcgtct

SEQ ID NO: 1612910 - DNA, 25 bp, Homo sapien
cacctgagacgtgggcggtcccagt

SEQ ID NO: 1612911 - DNA, 25 bp, Homo sapien
cggcgtctgtgcgtgggccaaacat

SEQ ID NO: 1612912 - DNA, 25 bp, Homo sapien
ctggcggcggctgacaccaaaggta

SEQ ID NO: 1612913 - DNA, 25 bp, Homo sapien
cagggcctcgaccagggatacaagg

SEQ ID NO: 1612914 - DNA, 25 bp, Homo sapien
gcggctgacaccaaaggtaaaaggc

SEQ ID NO: 1612915 - DNA, 25 bp, Homo sapien
gggcaaccgctaactagattcctga

SEQ ID NO: 1612916 - DNA, 25 bp, Homo sapien
ctctgtggatcagagtaaagtcaca

SEQ ID NO: 1612917 - DNA, 25 bp, Homo sapien
tctgtggatcagagtaaagtcacat

SEQ ID NO: 1612918 - DNA, 25 bp, Homo sapien
cctctgtggatcagagtaaagtcac

SEQ ID NO: 1612919 - DNA, 25 bp, Homo sapien
tttccacatttatatcacaaggtgt

SEQ ID NO: 1612920 - DNA, 25 bp, Homo sapien
catttatatcacaaggtgtccactt

SEQ ID NO: 1612921 - DNA, 25 bp, Homo sapien
cacatttatatcacaaggtgtccac

SEQ ID NO: 1612922 - DNA, 25 bp, Homo sapien
tttatatcacaaggtgtccacttac

SEQ ID NO: 1612923 - DNA, 25 bp, Homo sapien
tggaccaaatagcaaagttgctccc

SEQ ID NO: 1612924 - DNA, 25 bp, Homo sapien
gaccaaatagcaaagttgctccctt

SEQ ID NO: 1612925 - DNA, 25 bp, Homo sapien
caaatagcaaagttgctcccttctg

SEQ ID NO: 1612926 - DNA, 25 bp, Homo sapien
tagcaaagttgctcccttctgcgtc

SEQ ID NO: 1612927 - DNA, 25 bp, Homo sapien
gaacacagaagtctaggtactgtac

SEQ ID NO: 1612928 - DNA, 25 bp, Homo sapien
gagaacacagaagtctaggtactgt

SEQ ID NO: 1612929 - DNA, 25 bp, Homo sapien
ctgagaacacagaagtctaggtact

SEQ ID NO: 1612930 - DNA, 25 bp, Homo sapien
tgagaacacagaagtctaggtactg

SEQ ID NO: 1612931 - DNA, 25 bp, Homo sapien
cagatataaacaggtggctgcccat

SEQ ID NO: 1612932 - DNA, 25 bp, Homo sapien
tgtctcaagacactcagggccaaat

SEQ ID NO: 1612933 - DNA, 25 bp, Homo sapien
tgagtgtttccagcgtacagacagg

SEQ ID NO: 1612934 - DNA, 25 bp, Homo sapien
tttcaggtgctggaaagtgtccgca

SEQ ID NO: 1612935 - DNA, 25 bp, Homo sapien
cggatcgagcgatatgcactgcgtc

SEQ ID NO: 1612936 - DNA, 25 bp, Homo sapien
aagcgcccgtcgtcgccgtgcggat

SEQ ID NO: 1612937 - DNA, 25 bp, Homo sapien
aggcagaatgttcaagcgcccgtcg

SEQ ID NO: 1612938 - DNA, 25 bp, Homo sapien
gcgatatgcactgcgtccagtcata

SEQ ID NO: 1612939 - DNA, 25 bp, Homo sapien
cagcatcactgtccgccttggagga

SEQ ID NO: 1612940 - DNA, 25 bp, Homo sapien
gatgatctcgttgcgtgacagctcc

SEQ ID NO: 1612941 - DNA, 25 bp, Homo sapien
gcaaaggagccctcatgccgtgagt

SEQ ID NO: 1612942 - DNA, 25 bp, Homo sapien
tcttttaaccggacaggcttgacgc

SEQ ID NO: 1612943 - DNA, 25 bp, Homo sapien
tggccctgacagtgaaatgacccgg

SEQ ID NO: 1612944 - DNA, 25 bp, Homo sapien
ttggtcctccgaagcaaagacactg

SEQ ID NO: 1612945 - DNA, 25 bp, Homo sapien
gccactgtaaggacactgccagaga

SEQ ID NO: 1612946 - DNA, 25 bp, Homo sapien
gatgacatactttcgggacaggaac

SEQ ID NO: 1612947 - DNA, 25 bp, Homo sapien
tggagatgacttccagcaccgccac

SEQ ID NO: 1612948 - DNA, 25 bp, Homo sapien
ctcaagtgcctctttggtaataggg

SEQ ID NO: 1612949 - DNA, 25 bp, Homo sapien
tgcctctttggtaatagggtatttc

SEQ ID NO: 1612950 - DNA, 25 bp, Homo sapien
aggctggagatgacttccagcaccg

SEQ ID NO: 1612951 - DNA, 25 bp, Homo sapien
tgctcctgatacttaagatgacctc

SEQ ID NO: 1612952 - DNA, 25 bp, Homo sapien
caagccctccagtgtacatggtaca

SEQ ID NO: 1612953 - DNA, 25 bp, Homo sapien
aagccatttgtcaggtccctgtcct

SEQ ID NO: 1612954 - DNA, 25 bp, Homo sapien
tgcctgtggaacaagagctgctcct

SEQ ID NO: 1612955 - DNA, 25 bp, Homo sapien
agcctggtggcacaaagtgtccttg

SEQ ID NO: 1612956 - DNA, 25 bp, Homo sapien
gaagcagcagtccttgcagagcaga

SEQ ID NO: 1612957 - DNA, 25 bp, Homo sapien
gcctggtggcacaaagtgtccttgt

SEQ ID NO: 1612958 - DNA, 25 bp, Homo sapien
cgcccctgcccacttaatttgcttc

SEQ ID NO: 1612959 - DNA, 25 bp, Homo sapien
agtttggcctcttcattgctgcggg

SEQ ID NO: 1612960 - DNA, 25 bp, Homo sapien
gcctcttcattgctgcgggaagtgc

SEQ ID NO: 1612961 - DNA, 25 bp, Homo sapien
acttaatttgcttcagtttggcctc

SEQ ID NO: 1612962 - DNA, 25 bp, Homo sapien
caagctcccctactctggtactggg

SEQ ID NO: 1612963 - DNA, 25 bp, Homo sapien
tctggtactgggctgctgcttaaca

SEQ ID NO: 1612964 - DNA, 25 bp, Homo sapien
cccctactctggtactgggctgctg

SEQ ID NO: 1612965 - DNA, 25 bp, Homo sapien
tactctggtactgggctgctgctta

SEQ ID NO: 1612966 - DNA, 25 bp, Homo sapien
ggggagctctgagtacccatgccag

SEQ ID NO: 1612967 - DNA, 25 bp, Homo sapien
atgccagctgtccatcccggtccga

SEQ ID NO: 1612968 - DNA, 25 bp, Homo sapien
aggggagctctgagtacccatgcca

SEQ ID NO: 1612969 - DNA, 25 bp, Homo sapien
tcccggtccgactctcaggtgtcct

SEQ ID NO: 1612970 - DNA, 25 bp, Homo sapien
cacagagagcccgaaccaggggcac

SEQ ID NO: 1612971 - DNA, 25 bp, Homo sapien
gggcacacgctaggtcgacagttcc

SEQ ID NO: 1612972 - DNA, 25 bp, Homo sapien
gctaggtcgacagttccttcctgca

SEQ ID NO: 1612973 - DNA, 25 bp, Homo sapien
gaaccaggggcacacgctaggtcga

SEQ ID NO: 1612974 - DNA, 25 bp, Homo sapien
tggaagtgttcatcagcaagcaagc

SEQ ID NO: 1612975 - DNA, 25 bp, Homo sapien
gcaagtcagtacaagaggcggcacc

SEQ ID NO: 1612976 - DNA, 25 bp, Homo sapien
cacacgggtgaatcaaacagggctt

SEQ ID NO: 1612977 - DNA, 25 bp, Homo sapien
taagcattctaatgccgtccgcggc

SEQ ID NO: 1612978 - DNA, 25 bp, Homo sapien
taggagctccatcagtaggcatgcc

SEQ ID NO: 1612979 - DNA, 25 bp, Homo sapien
aattgcatgctacaactcagcccgg

SEQ ID NO: 1612980 - DNA, 25 bp, Homo sapien
cctgacttctgcagcgagggaaact

SEQ ID NO: 1612981 - DNA, 25 bp, Homo sapien
cacctgagtggtctgtcatgtccat

SEQ ID NO: 1612982 - DNA, 25 bp, Homo sapien
cacctggtccccaggagggccacca

SEQ ID NO: 1612983 - DNA, 25 bp, Homo sapien
caatccagacaccagcacctggtcc

SEQ ID NO: 1612984 - DNA, 25 bp, Homo sapien
ccagcacctggtccccaggagggcc

SEQ ID NO: 1612985 - DNA, 25 bp, Homo sapien
gcacctggtccccaggagggccacc

SEQ ID NO: 1612986 - DNA, 25 bp, Homo sapien
tgctgtggacctgaaccacgcgcat

SEQ ID NO: 1612987 - DNA, 25 bp, Homo sapien
tcatctgtaataacctttaggacaa

SEQ ID NO: 1612988 - DNA, 25 bp, Homo sapien
tcacttctgacactggcgcatcagg

SEQ ID NO: 1612989 - DNA, 25 bp, Homo sapien
atcaggcctactgtgccggacccat

SEQ ID NO: 1612990 - DNA, 25 bp, Homo sapien
gtgccggacccatcatctgtaataa

SEQ ID NO: 1612991 - DNA, 25 bp, Homo sapien
aggcagtcaacaggcagccagccca

SEQ ID NO: 1612992 - DNA, 25 bp, Homo sapien
ctggctgtggtgcaccctccctagg

SEQ ID NO: 1612993 - DNA, 25 bp, Homo sapien
ggacaggcagtcaacaggcagccag

SEQ ID NO: 1612994 - DNA, 25 bp, Homo sapien
tgtggtgcaccctccctaggtcccc

SEQ ID NO: 1612995 - DNA, 25 bp, Homo sapien
cttctaagtgtgtagcaggcagggc

SEQ ID NO: 1612996 - DNA, 25 bp, Homo sapien
cctggcaggcgagcagacatgtgat

SEQ ID NO: 1612997 - DNA, 25 bp, Homo sapien
ccgggagcagcacaagtaaagggct

SEQ ID NO: 1612998 - DNA, 25 bp, Homo sapien
gataaagcacgcctgtggccttgaa

SEQ ID NO: 1612999 - DNA, 25 bp, Homo sapien
tacattgggaacaggacaattgaga

SEQ ID NO: 1613000 - DNA, 25 bp, Homo sapien
catgcctgaagtcattacattggga

SEQ ID NO: 1613001 - DNA, 25 bp, Homo sapien
aacttaaaaagcgtgtcatgcctga

SEQ ID NO: 1613002 - DNA, 25 bp, Homo sapien
aacagaagctctacggccatatggc

SEQ ID NO: 1613003 - DNA, 25 bp, Homo sapien
tgattgcagtacatagaggcccgca

SEQ ID NO: 1613004 - DNA, 25 bp, Homo sapien
cagaatcacgctttcggctataggc

SEQ ID NO: 1613005 - DNA, 25 bp, Homo sapien
gataggccgggagagataaaacagc

SEQ ID NO: 1613006 - DNA, 25 bp, Homo sapien
cactccagggtgtttagcagagcca

SEQ ID NO: 1613007 - DNA, 25 bp, Homo sapien
gtcgacggcttctggaatccccaaa

SEQ ID NO: 1613008 - DNA, 25 bp, Homo sapien
gagagagccaagtaaccatcacagg

SEQ ID NO: 1613009 - DNA, 25 bp, Homo sapien
tcctcccaggttaggcaatgctact

SEQ ID NO: 1613010 - DNA, 25 bp, Homo sapien
taacggaactgagcgatacacacag

SEQ ID NO: 1613011 - DNA, 25 bp, Homo sapien
ggttcagtcagtttaagcagcaggt

SEQ ID NO: 1613012 - DNA, 25 bp, Homo sapien
ctagggttcagtcagtttaagcagc

SEQ ID NO: 1613013 - DNA, 25 bp, Homo sapien
cagtcagtttaagcagcaggtagaa

SEQ ID NO: 1613014 - DNA, 25 bp, Homo sapien
tagggttcagtcagtttaagcagca

SEQ ID NO: 1613015 - DNA, 25 bp, Homo sapien
tcggagagattttcaacaccctggg

SEQ ID NO: 1613016 - DNA, 25 bp, Homo sapien
gatgggaaccgaatcacctgctgag

SEQ ID NO: 1613017 - DNA, 25 bp, Homo sapien
catgcacacactgcgcttcggagag

SEQ ID NO: 1613018 - DNA, 25 bp, Homo sapien
gagtaagctggaacaatcatgcaca

SEQ ID NO: 1613019 - DNA, 25 bp, Homo sapien
ggttctctccgaagccaggaaggtg

SEQ ID NO: 1613020 - DNA, 25 bp, Homo sapien
acagactctccacgtaccctaggta

SEQ ID NO: 1613021 - DNA, 25 bp, Homo sapien
gcaaaacagactgggggttctctcc

SEQ ID NO: 1613022 - DNA, 25 bp, Homo sapien
gagacagactctccacgtaccctag

SEQ ID NO: 1613023 - DNA, 25 bp, Homo sapien
gcggagacgccggagccgctgtcat

SEQ ID NO: 1613024 - DNA, 25 bp, Homo sapien
gccggtccctgatctgctgcggaga

SEQ ID NO: 1613025 - DNA, 25 bp, Homo sapien
tccctgatctgctgcggagacgccg

SEQ ID NO: 1613026 - DNA, 25 bp, Homo sapien
ttgctctgggggtcgatggcctgca

SEQ ID NO: 1613027 - DNA, 25 bp, Homo sapien
tgcggccgggccagcgggcgggcgg

SEQ ID NO: 1613028 - DNA, 25 bp, Homo sapien
tgcctgggcgaggcggggggttgcg

SEQ ID NO: 1613029 - DNA, 25 bp, Homo sapien
ttgcggccgggccagcgggcgggcg

SEQ ID NO: 1613030 - DNA, 25 bp, Homo sapien
gttgcggccgggccagcgggcgggc

SEQ ID NO: 1613031 - DNA, 25 bp, Homo sapien
gggtcactcactcgccggcctccgg

SEQ ID NO: 1613032 - DNA, 25 bp, Homo sapien
ggacgggggtcactcactcgccggc

SEQ ID NO: 1613033 - DNA, 25 bp, Homo sapien
cggagccgcatgttccccgcggcgc

SEQ ID NO: 1613034 - DNA, 25 bp, Homo sapien
gggagccggagccgcatgttccccg

SEQ ID NO: 1613035 - DNA, 25 bp, Homo sapien
cgatcgcgaaaacgtgaggcggcaa

SEQ ID NO: 1613036 - DNA, 25 bp, Homo sapien
ggttgcaaatctgcgtctacgcggc

SEQ ID NO: 1613037 - DNA, 25 bp, Homo sapien
tccacgttgtgattctgcgcgcaga

SEQ ID NO: 1613038 - DNA, 25 bp, Homo sapien
tctgtcggaagttgagcggcatctc

SEQ ID NO: 1613039 - DNA, 25 bp, Homo sapien
tgcagagcatcttcagccaacctgg

SEQ ID NO: 1613040 - DNA, 25 bp, Homo sapien
ctgtggcctaagcaggaaccgggat

SEQ ID NO: 1613041 - DNA, 25 bp, Homo sapien
gaagatgcggcacgagataattcct

SEQ ID NO: 1613042 - DNA, 25 bp, Homo sapien
tcctgtcagttatgcgaagatgcgg

SEQ ID NO: 1613043 - DNA, 25 bp, Homo sapien
cgtgacgaggcaggttcacacagct

SEQ ID NO: 1613044 - DNA, 25 bp, Homo sapien
cacagctgtacaggaatagtcttcc

SEQ ID NO: 1613045 - DNA, 25 bp, Homo sapien
acaggaatagtcttccacagcgaca

SEQ ID NO: 1613046 - DNA, 25 bp, Homo sapien
gcactgcagaggaagccgtgacgag

SEQ ID NO: 1613047 - DNA, 25 bp, Homo sapien
gcaggaatgcgctcatcagacatgt

SEQ ID NO: 1613048 - DNA, 25 bp, Homo sapien
agcaggaatgcgctcatcagacatg

SEQ ID NO: 1613049 - DNA, 25 bp, Homo sapien
tatcagttatctcagaagtacctag

SEQ ID NO: 1613050 - DNA, 25 bp, Homo sapien
tgtacaaacacaacacggctgggac

SEQ ID NO: 1613051 - DNA, 25 bp, Homo sapien
gctgggacaccaacgaatgaaaaaa

SEQ ID NO: 1613052 - DNA, 25 bp, Homo sapien
ttccagttctgaacgcaagccccgg

SEQ ID NO: 1613053 - DNA, 25 bp, Homo sapien
taagcctcaatgtgagcggtgacct

SEQ ID NO: 1613054 - DNA, 25 bp, Homo sapien
tgtgggtgctacaataatctaagcc

SEQ ID NO: 1613055 - DNA, 25 bp, Homo sapien
tatgaattagaaggcgccacaggga

SEQ ID NO: 1613056 - DNA, 25 bp, Homo sapien
gaccctgtggatatgagcgtactga

SEQ ID NO: 1613057 - DNA, 25 bp, Homo sapien
tccaggctaaagctttaaggaggcc

SEQ ID NO: 1613058 - DNA, 25 bp, Homo sapien
tgttgaggacctacgatgtgtcagg

SEQ ID NO: 1613059 - DNA, 25 bp, Homo sapien
tagattcagatataggtcccaacag

SEQ ID NO: 1613060 - DNA, 25 bp, Homo sapien
aaaactgaaaacatggctgcgtgca

SEQ ID NO: 1613061 - DNA, 25 bp, Homo sapien
ggagtacagtggtatgacctcgact

SEQ ID NO: 1613062 - DNA, 25 bp, Homo sapien
agtacagtggtatgacctcgactca

SEQ ID NO: 1613063 - DNA, 25 bp, Homo sapien
tggagtacagtggtatgacctcgac

SEQ ID NO: 1613064 - DNA, 25 bp, Homo sapien
tacagtggtatgacctcgactcact

SEQ ID NO: 1613065 - DNA, 25 bp, Homo sapien
cgtggctcctggctactgtgctgct

SEQ ID NO: 1613066 - DNA, 25 bp, Homo sapien
taactaagacggagactgaaacagc

SEQ ID NO: 1613067 - DNA, 25 bp, Homo sapien
tgtggcactgcccaattagaacttt

SEQ ID NO: 1613068 - DNA, 25 bp, Homo sapien
atgcaatgcaattacagtcactgag

SEQ ID NO: 1613069 - DNA, 25 bp, Homo sapien
cagctgttgaacactatgggtcaga

SEQ ID NO: 1613070 - DNA, 25 bp, Homo sapien
gctctgacctccaacagggactgta

SEQ ID NO: 1613071 - DNA, 25 bp, Homo sapien
tcacagaacttctcagggtgcctcc

SEQ ID NO: 1613072 - DNA, 25 bp, Homo sapien
catggttgaggccaccagtcactta

SEQ ID NO: 1613073 - DNA, 25 bp, Homo sapien
cgtgcctggccattaacctcttttc

SEQ ID NO: 1613074 - DNA, 25 bp, Homo sapien
gcctggccattaacctcttttctta

SEQ ID NO: 1613075 - DNA, 25 bp, Homo sapien
accgtgcctggccattaacctcttt

SEQ ID NO: 1613076 - DNA, 25 bp, Homo sapien
tataaattacccatttctttatagc

SEQ ID NO: 1613077 - DNA, 25 bp, Homo sapien
gtgcagaagggccaagacacagaac

SEQ ID NO: 1613078 - DNA, 25 bp, Homo sapien
gagctacacctccaacttgctttct

SEQ ID NO: 1613079 - DNA, 25 bp, Homo sapien
cagaacccaggtctgagctacacct

SEQ ID NO: 1613080 - DNA, 25 bp, Homo sapien
cagaagggccaagacacagaaccca

SEQ ID NO: 1613081 - DNA, 25 bp, Homo sapien
tcctacctgccaccatgggtagaag

SEQ ID NO: 1613082 - DNA, 25 bp, Homo sapien
ctgccaccatgggtagaaggatatg

SEQ ID NO: 1613083 - DNA, 25 bp, Homo sapien
ctacctgccaccatgggtagaagga

SEQ ID NO: 1613084 - DNA, 25 bp, Homo sapien
caccatgggtagaaggatatgtttg

SEQ ID NO: 1613085 - DNA, 25 bp, Homo sapien
aagaaaatgccttgctaatgacagc

SEQ ID NO: 1613086 - DNA, 25 bp, Homo sapien
attatccaacatcgcactgctgctg

SEQ ID NO: 1613087 - DNA, 25 bp, Homo sapien
tctaactatcaagagaaagaggcca

SEQ ID NO: 1613088 - DNA, 25 bp, Homo sapien
gacagcttcgctggcttttcaaatc

SEQ ID NO: 1613089 - DNA, 25 bp, Homo sapien
ggtacagatgattccctgagtggct

SEQ ID NO: 1613090 - DNA, 25 bp, Homo sapien
ggaagggacaccttgggattctcca

SEQ ID NO: 1613091 - DNA, 25 bp, Homo sapien
tctgtgccactactccactttgaag

SEQ ID NO: 1613092 - DNA, 25 bp, Homo sapien
cacaccctagttgagcggttggcaa

SEQ ID NO: 1613093 - DNA, 25 bp, Homo sapien
cactcccagggtaggtgctgtacat

SEQ ID NO: 1613094 - DNA, 25 bp, Homo sapien
gctaataagggatcgcctggctcag

SEQ ID NO: 1613095 - DNA, 25 bp, Homo sapien
caaaaacaagccgtgggccagacat

SEQ ID NO: 1613096 - DNA, 25 bp, Homo sapien
tgccctagagcagatgtacatgaag

SEQ ID NO: 1613097 - DNA, 25 bp, Homo sapien
tacttgcaggccgattttagagatg

SEQ ID NO: 1613098 - DNA, 25 bp, Homo sapien
tagccaaggtccctctcagaatgag

SEQ ID NO: 1613099 - DNA, 25 bp, Homo sapien
ttgaccctggtctagcaagagccca

SEQ ID NO: 1613100 - DNA, 25 bp, Homo sapien
tcatctggcctgtgagggacccagc

SEQ ID NO: 1613101 - DNA, 25 bp, Homo sapien
catggcctccaaaatgaatcctagg

SEQ ID NO: 1613102 - DNA, 25 bp, Homo sapien
cagcagggtaaattcaaaaggactc

SEQ ID NO: 1613103 - DNA, 25 bp, Homo sapien
gactcaggttggaaattgacttctt

SEQ ID NO: 1613104 - DNA, 25 bp, Homo sapien
tccaaaaaggaaactctaccactga

SEQ ID NO: 1613105 - DNA, 25 bp, Homo sapien
tcaaggctactcagtcctaaaagcc

SEQ ID NO: 1613106 - DNA, 25 bp, Homo sapien
tccaggtttacctccaagtcaggat

SEQ ID NO: 1613107 - DNA, 25 bp, Homo sapien
agttgtgggattcagcgccaacccc

SEQ ID NO: 1613108 - DNA, 25 bp, Homo sapien
caaggttttagaacatggtcccaat

SEQ ID NO: 1613109 - DNA, 25 bp, Homo sapien
ccaggaactagctcaacactcttgc

SEQ ID NO: 1613110 - DNA, 25 bp, Homo sapien
ttaacaaaggggtcaaggcagagga

SEQ ID NO: 1613111 - DNA, 25 bp, Homo sapien
ctagctcaacactcttgctaacaat

SEQ ID NO: 1613112 - DNA, 25 bp, Homo sapien
gaaacacttcaccaggaactagctc

SEQ ID NO: 1613113 - DNA, 25 bp, Homo sapien
tctgttacaggtggcccgttcctta

SEQ ID NO: 1613114 - DNA, 25 bp, Homo sapien
tgtctatacaggaaggctggtgtct

SEQ ID NO: 1613115 - DNA, 25 bp, Homo sapien
aaagcctttagggttaatcgcagct

SEQ ID NO: 1613116 - DNA, 25 bp, Homo sapien
gctgcactgagtggccaagcagacc

SEQ ID NO: 1613117 - DNA, 25 bp, Homo sapien
cagcatttcaattcagagaccaaag

SEQ ID NO: 1613118 - DNA, 25 bp, Homo sapien
tgaaaccctttcagtagacagcatt

SEQ ID NO: 1613119 - DNA, 25 bp, Homo sapien
gaggctgtcagactcagcaagtaac

SEQ ID NO: 1613120 - DNA, 25 bp, Homo sapien
tgaaagcagtttgttaacagggccc

SEQ ID NO: 1613121 - DNA, 25 bp, Homo sapien
ctatctttgaaaacagggacgtggc

SEQ ID NO: 1613122 - DNA, 25 bp, Homo sapien
aaacattcttgaagtcatcaggaat

SEQ ID NO: 1613123 - DNA, 25 bp, Homo sapien
cattcttgaagtcatcaggaatgga

SEQ ID NO: 1613124 - DNA, 25 bp, Homo sapien
ttcttgaagtcatcaggaatggagg

SEQ ID NO: 1613125 - DNA, 25 bp, Homo sapien
cttgaagtcatcaggaatggaggaa

SEQ ID NO: 1613126 - DNA, 25 bp, Homo sapien
cgggaaagtgagttcctggtttcat

SEQ ID NO: 1613127 - DNA, 25 bp, Homo sapien
cgctgggattcaagagccgaacagc

SEQ ID NO: 1613128 - DNA, 25 bp, Homo sapien
caatactgaactacacagttaaaag

SEQ ID NO: 1613129 - DNA, 25 bp, Homo sapien
tttaaagtaacctgtgatccacctg

SEQ ID NO: 1613130 - DNA, 25 bp, Homo sapien
cagttaaaagaagaatatactcttt

SEQ ID NO: 1613131 - DNA, 25 bp, Homo sapien
tacatgactattacctattacttag

SEQ ID NO: 1613132 - DNA, 25 bp, Homo sapien
cctttgcaaagacgagaatgagaga

SEQ ID NO: 1613133 - DNA, 25 bp, Homo sapien
ctgcaaatggcaaacgtcttcttgt

SEQ ID NO: 1613134 - DNA, 25 bp, Homo sapien
caaatggcaaacgtcttcttgtcct

SEQ ID NO: 1613135 - DNA, 25 bp, Homo sapien
tgtcctttaggtcttgatttattat

SEQ ID NO: 1613136 - DNA, 25 bp, Homo sapien
ccctggccgttcctacaatttcatg

SEQ ID NO: 1613137 - DNA, 25 bp, Homo sapien
ggcaagtctcatacatgctctcaga

SEQ ID NO: 1613138 - DNA, 25 bp, Homo sapien
tttcatgtaagttccttgatctcct

SEQ ID NO: 1613139 - DNA, 25 bp, Homo sapien
cagatcctctctgccaggtaggata

SEQ ID NO: 1613140 - DNA, 25 bp, Homo sapien
cagtagtatcagagttatggcccca

SEQ ID NO: 1613141 - DNA, 25 bp, Homo sapien
tatggccccagtgctagatggaaag

SEQ ID NO: 1613142 - DNA, 25 bp, Homo sapien
tcttcctgggaatacatcacggtcc

SEQ ID NO: 1613143 - DNA, 25 bp, Homo sapien
gaagcatcttcgcaaacagccactg

SEQ ID NO: 1613144 - DNA, 25 bp, Homo sapien
cacagggcgatgaagattcgaaagt

SEQ ID NO: 1613145 - DNA, 25 bp, Homo sapien
tgaggctcagcaagaattcccggat

SEQ ID NO: 1613146 - DNA, 25 bp, Homo sapien
atgaagattcgaaagtatctgaggc

SEQ ID NO: 1613147 - DNA, 25 bp, Homo sapien
ttccacagggcgatgaagattcgaa

SEQ ID NO: 1613148 - DNA, 25 bp, Homo sapien
ctccatacccggctggtttttacat

SEQ ID NO: 1613149 - DNA, 25 bp, Homo sapien
gagggaaggcaatttagtacgtgaa

SEQ ID NO: 1613150 - DNA, 25 bp, Homo sapien
tggtccccttgaatgccaaggaaca

SEQ ID NO: 1613151 - DNA, 25 bp, Homo sapien
tctggtccccttgaatgccaaggaa

SEQ ID NO: 1613152 - DNA, 25 bp, Homo sapien
aatttagtacgtgaagactccagag

SEQ ID NO: 1613153 - DNA, 25 bp, Homo sapien
cactttagctcaggaggtcgagtct

SEQ ID NO: 1613154 - DNA, 25 bp, Homo sapien
ctttagctcaggaggtcgagtctgc

SEQ ID NO: 1613155 - DNA, 25 bp, Homo sapien
aaggatcactttagctcaggaggtc

SEQ ID NO: 1613156 - DNA, 25 bp, Homo sapien
atcactttagctcaggaggtcgagt

SEQ ID NO: 1613157 - DNA, 25 bp, Homo sapien
ccccaaagccctgcgtgtccttctt

SEQ ID NO: 1613158 - DNA, 25 bp, Homo sapien
ctgggctccctggactcctccccaa

SEQ ID NO: 1613159 - DNA, 25 bp, Homo sapien
caaagccctgcgtgtccttcttttt

SEQ ID NO: 1613160 - DNA, 25 bp, Homo sapien
ggctccctggactcctccccaaagc

SEQ ID NO: 1613161 - DNA, 25 bp, Homo sapien
gaaggtgaacagagggacaaccaag

SEQ ID NO: 1613162 - DNA, 25 bp, Homo sapien
agagtatgggtttaaggtctctcgg

SEQ ID NO: 1613163 - DNA, 25 bp, Homo sapien
gacaaccaaggaacggagagtatgg

SEQ ID NO: 1613164 - DNA, 25 bp, Homo sapien
cggagagtatgggtttaaggtctct

SEQ ID NO: 1613165 - DNA, 25 bp, Homo sapien
aagttcagcaccgccccggcattca

SEQ ID NO: 1613166 - DNA, 25 bp, Homo sapien
ttcagcaccgccccggcattcatca

SEQ ID NO: 1613167 - DNA, 25 bp, Homo sapien
cgccccggcattcatcagcaacgtc

SEQ ID NO: 1613168 - DNA, 25 bp, Homo sapien
gcaccgccccggcattcatcagcaa

SEQ ID NO: 1613169 - DNA, 25 bp, Homo sapien
gagaattacagttactaggggcgcc

SEQ ID NO: 1613170 - DNA, 25 bp, Homo sapien
agagggagaattacagttactaggg

SEQ ID NO: 1613171 - DNA, 25 bp, Homo sapien
ggagaattacagttactaggggcgc

SEQ ID NO: 1613172 - DNA, 25 bp, Homo sapien
ctgcagagggagaattacagttact

SEQ ID NO: 1613173 - DNA, 25 bp, Homo sapien
ccgaacagcaggatgtctccgatca

SEQ ID NO: 1613174 - DNA, 25 bp, Homo sapien
cgaacagcaggatgtctccgatcat

SEQ ID NO: 1613175 - DNA, 25 bp, Homo sapien
tcctaaagcaacagtggcgagggct

SEQ ID NO: 1613176 - DNA, 25 bp, Homo sapien
catgcgtgaggtctcgatgccgtag

SEQ ID NO: 1613177 - DNA, 25 bp, Homo sapien
gctgggccaatcgaaggtcaaggct

SEQ ID NO: 1613178 - DNA, 25 bp, Homo sapien
gaagcgtccgtcagaaccggaagcg

SEQ ID NO: 1613179 - DNA, 25 bp, Homo sapien
gtgcccgccaccatgcccagctaat

SEQ ID NO: 1613180 - DNA, 25 bp, Homo sapien
ggtgcccgccaccatgcccagctaa

SEQ ID NO: 1613181 - DNA, 25 bp, Homo sapien
aacctccggctcactggttcaagca

SEQ ID NO: 1613182 - DNA, 25 bp, Homo sapien
acctccggctcactggttcaagcaa

SEQ ID NO: 1613183 - DNA, 25 bp, Homo sapien
taggacctaaggactcagcaatggg

SEQ ID NO: 1613184 - DNA, 25 bp, Homo sapien
gctataggacctaaggactcagcaa

SEQ ID NO: 1613185 - DNA, 25 bp, Homo sapien
ccagctataggacctaaggactcag

SEQ ID NO: 1613186 - DNA, 25 bp, Homo sapien
aaatacttcttatcttggaagagtt

SEQ ID NO: 1613187 - DNA, 25 bp, Homo sapien
gaaagtcccgactcttgctgggcgt

SEQ ID NO: 1613188 - DNA, 25 bp, Homo sapien
taaaaaaggctcacatgctcctagc

SEQ ID NO: 1613189 - DNA, 25 bp, Homo sapien
gctagacattttcacgtggccagaa

SEQ ID NO: 1613190 - DNA, 25 bp, Homo sapien
cctctgtacggaagggccgatgcga

SEQ ID NO: 1613191 - DNA, 25 bp, Homo sapien
ccactggagcattggatcttcaata

SEQ ID NO: 1613192 - DNA, 25 bp, Homo sapien
ttccactggagcattggatcttcaa

SEQ ID NO: 1613193 - DNA, 25 bp, Homo sapien
ttcttccactggagcattggatctt

SEQ ID NO: 1613194 - DNA, 25 bp, Homo sapien
tcttccactggagcattggatcttc

SEQ ID NO: 1613195 - DNA, 25 bp, Homo sapien
gctttaagctgtaatgttttgccat

SEQ ID NO: 1613196 - DNA, 25 bp, Homo sapien
aatttgatttgactgcaaaactttt

SEQ ID NO: 1613197 - DNA, 25 bp, Homo sapien
tctgctttaagctgtaatgttttgc

SEQ ID NO: 1613198 - DNA, 25 bp, Homo sapien
tgatgtctgctttaagctgtaatgt

SEQ ID NO: 1613199 - DNA, 25 bp, Homo sapien
tttaaatcaagagtggatgtcaggg

SEQ ID NO: 1613200 - DNA, 25 bp, Homo sapien
cagggaggtatcctcctaacgcaga

SEQ ID NO: 1613201 - DNA, 25 bp, Homo sapien
tatggaaacacctacacaagcagcc

SEQ ID NO: 1613202 - DNA, 25 bp, Homo sapien
tgtgtgaagtctaaataaccacctc

SEQ ID NO: 1613203 - DNA, 25 bp, Homo sapien
catgatccataaggtggtgacgggc

SEQ ID NO: 1613204 - DNA, 25 bp, Homo sapien
ttttcagggtcagcgtttgggtcac

SEQ ID NO: 1613205 - DNA, 25 bp, Homo sapien
cagtacaagacggtagtggtgtgcc

SEQ ID NO: 1613206 - DNA, 25 bp, Homo sapien
agagcgttctctaggactcaccaag

SEQ ID NO: 1613207 - DNA, 25 bp, Homo sapien
tcatgggtcaagctgagcccatcag

SEQ ID NO: 1613208 - DNA, 25 bp, Homo sapien
tcctgagtctgcgaccctcatgggt

SEQ ID NO: 1613209 - DNA, 25 bp, Homo sapien
ccttaccagggtctctaacaatgga

SEQ ID NO: 1613210 - DNA, 25 bp, Homo sapien
tgtctctagtcctccctgtaagtgg

SEQ ID NO: 1613211 - DNA, 25 bp, Homo sapien
tccctttgtggaactccgagagccg

SEQ ID NO: 1613212 - DNA, 25 bp, Homo sapien
caggctgggcgattccgatgctgac

SEQ ID NO: 1613213 - DNA, 25 bp, Homo sapien
tgcacaccagtaggcccagaataac

SEQ ID NO: 1613214 - DNA, 25 bp, Homo sapien
acgcggccactccagggatcattgt

SEQ ID NO: 1613215 - DNA, 25 bp, Homo sapien
gcatcatcttcaaaccaccctgccc

SEQ ID NO: 1613216 - DNA, 25 bp, Homo sapien
cattgcgcccggtcgtgcatcacta

SEQ ID NO: 1613217 - DNA, 25 bp, Homo sapien
gcccggtcgtgcatcactattttga

SEQ ID NO: 1613218 - DNA, 25 bp, Homo sapien
gcatcactggactgccggtgtgccc

SEQ ID NO: 1613219 - DNA, 25 bp, Homo sapien
acagctgcgtggatcccttcatcta

SEQ ID NO: 1613220 - DNA, 25 bp, Homo sapien
catctactactacgtgtcggccgag

SEQ ID NO: 1613221 - DNA, 25 bp, Homo sapien
tgctgctgcattactcggacccgag

SEQ ID NO: 1613222 - DNA, 25 bp, Homo sapien
aacctctatggtgcctacgtgccca

SEQ ID NO: 1613223 - DNA, 25 bp, Homo sapien
tgttggcagccggttgtaagccttg

SEQ ID NO: 1613224 - DNA, 25 bp, Homo sapien
ccttgcacgggacagaccacaaggg

SEQ ID NO: 1613225 - DNA, 25 bp, Homo sapien
gtcaatgtcaccagggataaggtgg

SEQ ID NO: 1613226 - DNA, 25 bp, Homo sapien
ctttctgtcaatgtcaccagggata

SEQ ID NO: 1613227 - DNA, 25 bp, Homo sapien
aaactgcggtcccacaactgcatgt

SEQ ID NO: 1613228 - DNA, 25 bp, Homo sapien
cgtgtattcttgtcaatatcctgga

SEQ ID NO: 1613229 - DNA, 25 bp, Homo sapien
gagtgatcatttaccagagttttct

SEQ ID NO: 1613230 - DNA, 25 bp, Homo sapien
gtaagatcagtaacgtgtattcttg

SEQ ID NO: 1613231 - DNA, 25 bp, Homo sapien
ctcaaggtgcaggtgtttgacatcc

SEQ ID NO: 1613232 - DNA, 25 bp, Homo sapien
tttccaggttcccgctgctcacagg

SEQ ID NO: 1613233 - DNA, 25 bp, Homo sapien
cacccggccactatgtctctgaggg

SEQ ID NO: 1613234 - DNA, 25 bp, Homo sapien
cccatctgtggaacgggctggcgct

SEQ ID NO: 1613235 - DNA, 25 bp, Homo sapien
taccaccccggagaagatgggcaaa

SEQ ID NO: 1613236 - DNA, 25 bp, Homo sapien
tgttggctgaaataaataccacccc

SEQ ID NO: 1613237 - DNA, 25 bp, Homo sapien
tacaacatcctctacagcaagtggg

SEQ ID NO: 1613238 - DNA, 25 bp, Homo sapien
cagggcagcctcagaccttgatctc

SEQ ID NO: 1613239 - DNA, 25 bp, Homo sapien
ggcgaaggcagagggtgcgagagct

SEQ ID NO: 1613240 - DNA, 25 bp, Homo sapien
cagagggtgcgagagctgggacagt

SEQ ID NO: 1613241 - DNA, 25 bp, Homo sapien
tgaggaagcaccggggtcacccagc

SEQ ID NO: 1613242 - DNA, 25 bp, Homo sapien
ccttgtgatgtgagcccgaggtccc

SEQ ID NO: 1613243 - DNA, 25 bp, Homo sapien
tcagaaagaggcttttggccacacg

SEQ ID NO: 1613244 - DNA, 25 bp, Homo sapien
tccacatcgtgtttgctcagaaaga

SEQ ID NO: 1613245 - DNA, 25 bp, Homo sapien
ccaccggctggatgttttgctaatt

SEQ ID NO: 1613246 - DNA, 25 bp, Homo sapien
gaatgtttcttctcccgggaacaga

SEQ ID NO: 1613247 - DNA, 25 bp, Homo sapien
tgcaccacaccggtgactgctgagc

SEQ ID NO: 1613248 - DNA, 25 bp, Homo sapien
caagagtctcatcctagggacgggc

SEQ ID NO: 1613249 - DNA, 25 bp, Homo sapien
ggttcatttagaggcaggtgtcacc

SEQ ID NO: 1613250 - DNA, 25 bp, Homo sapien
tgcagccagatggtgtcgtcctgct

SEQ ID NO: 1613251 - DNA, 25 bp, Homo sapien
tatggatacacgaaacaacacaggt

SEQ ID NO: 1613252 - DNA, 25 bp, Homo sapien
tagatggcagaaccccaactggatg

SEQ ID NO: 1613253 - DNA, 25 bp, Homo sapien
caacacaggtgaatgcaagggaatc

SEQ ID NO: 1613254 - DNA, 25 bp, Homo sapien
taagggatccttgacccgtatgcgc

SEQ ID NO: 1613255 - DNA, 25 bp, Homo sapien
gagtcctccacctcaaggccggctc

SEQ ID NO: 1613256 - DNA, 25 bp, Homo sapien
tgagtcctccacctcaaggccggct

SEQ ID NO: 1613257 - DNA, 25 bp, Homo sapien
aagccaggtcatccccgtaggtgga

SEQ ID NO: 1613258 - DNA, 25 bp, Homo sapien
agaagccaggtcatccccgtaggtg

SEQ ID NO: 1613259 - DNA, 25 bp, Homo sapien
cagaagccaggtcatccccgtaggt

SEQ ID NO: 1613260 - DNA, 25 bp, Homo sapien
gaggacgacgaggccggcagccgct

SEQ ID NO: 1613261 - DNA, 25 bp, Homo sapien
gctggcgtagaccaccccgtcggag

SEQ ID NO: 1613262 - DNA, 25 bp, Homo sapien
aggggccacggcagggcccgactcg

SEQ ID NO: 1613263 - DNA, 25 bp, Homo sapien
cggagccgcacaccgggttcccctg

SEQ ID NO: 1613264 - DNA, 25 bp, Homo sapien
cagtcgtggtcgcagccgcatcgcg

SEQ ID NO: 1613265 - DNA, 25 bp, Homo sapien
ggacgaggcaggctcgacagacccc

SEQ ID NO: 1613266 - DNA, 25 bp, Homo sapien
gagccctggccttatggaatttcac

SEQ ID NO: 1613267 - DNA, 25 bp, Homo sapien
cgcgacagttaatgggaggtcctga

SEQ ID NO: 1613268 - DNA, 25 bp, Homo sapien
gaatttcacgcaggtatttgcctaa

SEQ ID NO: 1613269 - DNA, 25 bp, Homo sapien
gcggtgaccacacctaccctcaacc

SEQ ID NO: 1613270 - DNA, 25 bp, Homo sapien
tgtctgggccgccctgcaacaacag

SEQ ID NO: 1613271 - DNA, 25 bp, Homo sapien
gcactgaccgctcctatcctcaacc

SEQ ID NO: 1613272 - DNA, 25 bp, Homo sapien
gcgcctcctccgcactgaccacacc

SEQ ID NO: 1613273 - DNA, 25 bp, Homo sapien
tccggcgcacagttcccgggcgagt

SEQ ID NO: 1613274 - DNA, 25 bp, Homo sapien
cgttgtagaagcgagtggcctcgaa

SEQ ID NO: 1613275 - DNA, 25 bp, Homo sapien
ggctgtgggtgctgacgttgtagaa

SEQ ID NO: 1613276 - DNA, 25 bp, Homo sapien
gcgctccacttcgttgcacgcgggt

SEQ ID NO: 1613277 - DNA, 25 bp, Homo sapien
acggagactggcagcgccgacgtcc

SEQ ID NO: 1613278 - DNA, 25 bp, Homo sapien
ggttcgtagtagtcgtacacggaga

SEQ ID NO: 1613279 - DNA, 25 bp, Homo sapien
agcacggaaccgcacgcacgtcagg

SEQ ID NO: 1613280 - DNA, 25 bp, Homo sapien
acgcactcccggagagcacggaacc

SEQ ID NO: 1613281 - DNA, 25 bp, Homo sapien
gcgcaggctcgacccgggccaggag

SEQ ID NO: 1613282 - DNA, 25 bp, Homo sapien
cgcaggctcgacccgggccaggagg

SEQ ID NO: 1613283 - DNA, 25 bp, Homo sapien
gcgggcgcaggctcgacccgggcca

SEQ ID NO: 1613284 - DNA, 25 bp, Homo sapien
gggcgcaggctcgacccgggccagg

SEQ ID NO: 1613285 - DNA, 25 bp, Homo sapien
ccacaccaggcagtgaccggtgcac

SEQ ID NO: 1613286 - DNA, 25 bp, Homo sapien
acaccaggcagtgaccggtgcaccc

SEQ ID NO: 1613287 - DNA, 25 bp, Homo sapien
accaggcagtgaccggtgcaccctc

SEQ ID NO: 1613288 - DNA, 25 bp, Homo sapien
caggcagtgaccggtgcaccctcac

SEQ ID NO: 1613289 - DNA, 25 bp, Homo sapien
cctcctccaccaaccccggctggtg

SEQ ID NO: 1613290 - DNA, 25 bp, Homo sapien
aagcctcctccaccaaccccggctg

SEQ ID NO: 1613291 - DNA, 25 bp, Homo sapien
agcctcctccaccaaccccggctgg

SEQ ID NO: 1613292 - DNA, 25 bp, Homo sapien
ctcctccaccaaccccggctggtgg

SEQ ID NO: 1613293 - DNA, 25 bp, Homo sapien
catcaaagtagaagagcactcggcg

SEQ ID NO: 1613294 - DNA, 25 bp, Homo sapien
atcaaagtagaagagcactcggcgt

SEQ ID NO: 1613295 - DNA, 25 bp, Homo sapien
tcaaagtagaagagcactcggcgtc

SEQ ID NO: 1613296 - DNA, 25 bp, Homo sapien
cgtccagccacttcatacctcttca

SEQ ID NO: 1613297 - DNA, 25 bp, Homo sapien
catcccctggtgctccgtgcagcct

SEQ ID NO: 1613298 - DNA, 25 bp, Homo sapien
ctctgaattgaccacatcctcatcc

SEQ ID NO: 1613299 - DNA, 25 bp, Homo sapien
tattggaagaccctgcatgcagcca

SEQ ID NO: 1613300 - DNA, 25 bp, Homo sapien
gatgtctgcccggaagcctgacagc

SEQ ID NO: 1613301 - DNA, 25 bp, Homo sapien
acagccatattggaagaccctgcat

SEQ ID NO: 1613302 - DNA, 25 bp, Homo sapien
gtctgcccggaagcctgacagcagg

SEQ ID NO: 1613303 - DNA, 25 bp, Homo sapien
ttcctggtgatgctgatcggccgct

SEQ ID NO: 1613304 - DNA, 25 bp, Homo sapien
agctggcttggccaccgggtcaggc

SEQ ID NO: 1613305 - DNA, 25 bp, Homo sapien
ctggaggcttacgagcagctggaaa

SEQ ID NO: 1613306 - DNA, 25 bp, Homo sapien
gccgctgggtcatcatcgtcagctg

SEQ ID NO: 1613307 - DNA, 25 bp, Homo sapien
cagcagccgtcccccttggcactca

SEQ ID NO: 1613308 - DNA, 25 bp, Homo sapien
ccttggcactcacaaacagccccgt

SEQ ID NO: 1613309 - DNA, 25 bp, Homo sapien
cttggcactcacaaacagccccgtg

SEQ ID NO: 1613310 - DNA, 25 bp, Homo sapien
ccaaaccctcatcccaggaacacgc

SEQ ID NO: 1613311 - DNA, 25 bp, Homo sapien
tggagacagaagtcaccgtgaggcc

SEQ ID NO: 1613312 - DNA, 25 bp, Homo sapien
cctgctgacccctcctccaacaacc

SEQ ID NO: 1613313 - DNA, 25 bp, Homo sapien
aaaccctcatcccaggaacacgcac

SEQ ID NO: 1613314 - DNA, 25 bp, Homo sapien
agacagtgaggttgatgcctccagc

SEQ ID NO: 1613315 - DNA, 25 bp, Homo sapien
tgtgcagctcgaaggtttcctggta

SEQ ID NO: 1613316 - DNA, 25 bp, Homo sapien
tgcctccagcataggacaagatggc

SEQ ID NO: 1613317 - DNA, 25 bp, Homo sapien
gttggtcctgtgcagctcgaaggtt

SEQ ID NO: 1613318 - DNA, 25 bp, Homo sapien
ctccctctggccctgcccggctcgc

SEQ ID NO: 1613319 - DNA, 25 bp, Homo sapien
agccctgagcccctccctctggccc

SEQ ID NO: 1613320 - DNA, 25 bp, Homo sapien
ccagccctgagcccctccctctggc

SEQ ID NO: 1613321 - DNA, 25 bp, Homo sapien
ccctccctctggccctgcccggctc

SEQ ID NO: 1613322 - DNA, 25 bp, Homo sapien
ccaagtgcatttcgctgctgggaca

SEQ ID NO: 1613323 - DNA, 25 bp, Homo sapien
aagtgcatttcgctgctgggacagc

SEQ ID NO: 1613324 - DNA, 25 bp, Homo sapien
cccccaagtgcatttcgctgctggg

SEQ ID NO: 1613325 - DNA, 25 bp, Homo sapien
agtgcatttcgctgctgggacagcc

SEQ ID NO: 1613326 - DNA, 25 bp, Homo sapien
tcagaagggcgtaggctgtcatttc

SEQ ID NO: 1613327 - DNA, 25 bp, Homo sapien
agtgtaggtcagaagggcgtaggct

SEQ ID NO: 1613328 - DNA, 25 bp, Homo sapien
agggcggcagccacgtcacccagca

SEQ ID NO: 1613329 - DNA, 25 bp, Homo sapien
gctgtcatttccacctcggccgaga

SEQ ID NO: 1613330 - DNA, 25 bp, Homo sapien
tccacgtcccaggaatttgacaggc

SEQ ID NO: 1613331 - DNA, 25 bp, Homo sapien
cgtcccaggaatttgacaggctcca

SEQ ID NO: 1613332 - DNA, 25 bp, Homo sapien
gaagctcaagaatgtgcccttgtcc

SEQ ID NO: 1613333 - DNA, 25 bp, Homo sapien
ttgtccacgtcccaggaatttgaca

SEQ ID NO: 1613334 - DNA, 25 bp, Homo sapien
ctcgctttgtcagtggagcctctct

SEQ ID NO: 1613335 - DNA, 25 bp, Homo sapien
tccaggaagtgcctcgctttgtcag

SEQ ID NO: 1613336 - DNA, 25 bp, Homo sapien
agtcagggcacagctataagggtcc

SEQ ID NO: 1613337 - DNA, 25 bp, Homo sapien
atgatggccaggctacggagcttgc

SEQ ID NO: 1613338 - DNA, 25 bp, Homo sapien
gattaaggtggcctcaaatccaatg

SEQ ID NO: 1613339 - DNA, 25 bp, Homo sapien
acaagcggatgcaacggaactccaa

SEQ ID NO: 1613340 - DNA, 25 bp, Homo sapien
cggtggcccaccaaaaagatatatt

SEQ ID NO: 1613341 - DNA, 25 bp, Homo sapien
ccagcacaggtgtagcgggttgaac

SEQ ID NO: 1613342 - DNA, 25 bp, Homo sapien
aaaacaatctcatactgtcacccag

SEQ ID NO: 1613343 - DNA, 25 bp, Homo sapien
tgatcggcacgggagtttttgtttg

SEQ ID NO: 1613344 - DNA, 25 bp, Homo sapien
tttaaaacaatctcatactgtcacc

SEQ ID NO: 1613345 - DNA, 25 bp, Homo sapien
ctgctgatcggcacgggagtttttg

SEQ ID NO: 1613346 - DNA, 25 bp, Homo sapien
actacaggaatgccctgctgcacat

SEQ ID NO: 1613347 - DNA, 25 bp, Homo sapien
agttcatccctctttggacaacttg

SEQ ID NO: 1613348 - DNA, 25 bp, Homo sapien
gctattcatacgcacgatctcccta

SEQ ID NO: 1613349 - DNA, 25 bp, Homo sapien
acttggtcatcctgctctcaagagg

SEQ ID NO: 1613350 - DNA, 25 bp, Homo sapien
gccaaagaatgcctggggtccctgg

SEQ ID NO: 1613351 - DNA, 25 bp, Homo sapien
gcagcaaagaaagctcttcccttag

SEQ ID NO: 1613352 - DNA, 25 bp, Homo sapien
caagtgttgtttaagagacgagaag

SEQ ID NO: 1613353 - DNA, 25 bp, Homo sapien
gagaaggtcacacgcagacaaaggc

SEQ ID NO: 1613354 - DNA, 25 bp, Homo sapien
caccacgtaggctgtcagcgggaca

SEQ ID NO: 1613355 - DNA, 25 bp, Homo sapien
cctgtttccaggagagcaaccacca

SEQ ID NO: 1613356 - DNA, 25 bp, Homo sapien
tcagcgggacagtgccgtggatccc

SEQ ID NO: 1613357 - DNA, 25 bp, Homo sapien
aggagagcaaccaccacgtaggctg

SEQ ID NO: 1613358 - DNA, 25 bp, Homo sapien
ccagctcccgggggtccacgaagat

SEQ ID NO: 1613359 - DNA, 25 bp, Homo sapien
cagctcccgggggtccacgaagata

SEQ ID NO: 1613360 - DNA, 25 bp, Homo sapien
caatctccgagaaggagtccggcga

SEQ ID NO: 1613361 - DNA, 25 bp, Homo sapien
agctgctgtcggcactaccagggtg

SEQ ID NO: 1613362 - DNA, 25 bp, Homo sapien
gtacaggagttggaaagtgactcac

SEQ ID NO: 1613363 - DNA, 25 bp, Homo sapien
gagtccggcgatgggtacaggagtt

SEQ ID NO: 1613364 - DNA, 25 bp, Homo sapien
atgatgatgccaagaactgcaatag

SEQ ID NO: 1613365 - DNA, 25 bp, Homo sapien
tgatgatgccaagaactgcaatagc

SEQ ID NO: 1613366 - DNA, 25 bp, Homo sapien
tcaggtgaaccccatgatgatgcca

SEQ ID NO: 1613367 - DNA, 25 bp, Homo sapien
ctcaggtgaaccccatgatgatgcc

SEQ ID NO: 1613368 - DNA, 25 bp, Homo sapien
ttgtaggtcagctggcgctggtagc

SEQ ID NO: 1613369 - DNA, 25 bp, Homo sapien
aaacgcgctgtaggagccatcctgg

SEQ ID NO: 1613370 - DNA, 25 bp, Homo sapien
gccatcctggcgcttgtaggtcagc

SEQ ID NO: 1613371 - DNA, 25 bp, Homo sapien
cacatgctccccgatgcgtcccgct

SEQ ID NO: 1613372 - DNA, 25 bp, Homo sapien
ctccactgaaggctgaacctgcctc

SEQ ID NO: 1613373 - DNA, 25 bp, Homo sapien
ccacctcaacccaggcacttcttcc

SEQ ID NO: 1613374 - DNA, 25 bp, Homo sapien
caacccaggcacttcttccccaata

SEQ ID NO: 1613375 - DNA, 25 bp, Homo sapien
tccactgaaggctgaacctgcctcc

SEQ ID NO: 1613376 - DNA, 25 bp, Homo sapien
taggtagtcggtggtctctctctcc

SEQ ID NO: 1613377 - DNA, 25 bp, Homo sapien
gctgctgggttttctgaagatactt

SEQ ID NO: 1613378 - DNA, 25 bp, Homo sapien
ggtgcaaagtggatcatgttctgct

SEQ ID NO: 1613379 - DNA, 25 bp, Homo sapien
gatacttcaagacaaagacgttggg

SEQ ID NO: 1613380 - DNA, 25 bp, Homo sapien
ggaaggagaagagagttgagttggg

SEQ ID NO: 1613381 - DNA, 25 bp, Homo sapien
gaaggagaagagagttgagttgggg

SEQ ID NO: 1613382 - DNA, 25 bp, Homo sapien
aaggagaagagagttgagttggggg

SEQ ID NO: 1613383 - DNA, 25 bp, Homo sapien
gattcggaattcacccatggagccc

SEQ ID NO: 1613384 - DNA, 25 bp, Homo sapien
tggatggctctggaccatggccaac

SEQ ID NO: 1613385 - DNA, 25 bp, Homo sapien
cagccggtggaaaagccaatgaact

SEQ ID NO: 1613386 - DNA, 25 bp, Homo sapien
cacaatgacagactcattggatggc

SEQ ID NO: 1613387 - DNA, 25 bp, Homo sapien
cacagccacatcaaagcgggtgagg

SEQ ID NO: 1613388 - DNA, 25 bp, Homo sapien
cgccagctgatccagaatgttctga

SEQ ID NO: 1613389 - DNA, 25 bp, Homo sapien
cacgggcatcattgtgagctcgcac

SEQ ID NO: 1613390 - DNA, 25 bp, Homo sapien
gcagtggccgctgcacatactggaa

SEQ ID NO: 1613391 - DNA, 25 bp, Homo sapien
aatgcgctgtaggtgtacgcccggg

SEQ ID NO: 1613392 - DNA, 25 bp, Homo sapien
aagaatgcgctgtaggtgtacgccc

SEQ ID NO: 1613393 - DNA, 25 bp, Homo sapien
agaatgcgctgtaggtgtacgcccg

SEQ ID NO: 1613394 - DNA, 25 bp, Homo sapien
agaagaatgcgctgtaggtgtacgc

SEQ ID NO: 1613395 - DNA, 25 bp, Homo sapien
aaagggtctggagtcttctcagtgc

SEQ ID NO: 1613396 - DNA, 25 bp, Homo sapien
tggcttagggccactcactcaacct

SEQ ID NO: 1613397 - DNA, 25 bp, Homo sapien
taatacaaccattcctgctgactgg

SEQ ID NO: 1613398 - DNA, 25 bp, Homo sapien
tccataagcgcatgagccagtacct

SEQ ID NO: 1613399 - DNA, 25 bp, Homo sapien
gatcatgggtaagtggccaatcctg

SEQ ID NO: 1613400 - DNA, 25 bp, Homo sapien
gtctgcaagatcctggcgcctgcct

SEQ ID NO: 1613401 - DNA, 25 bp, Homo sapien
aatgccccaaatgctgagtcatggt

SEQ ID NO: 1613402 - DNA, 25 bp, Homo sapien
gaaagccaggatgcttcccgagatc

SEQ ID NO: 1613403 - DNA, 25 bp, Homo sapien
gtgtctccgtaagcaagggctttgg

SEQ ID NO: 1613404 - DNA, 25 bp, Homo sapien
gtcggcgtgattctcctcagggtgt

SEQ ID NO: 1613405 - DNA, 25 bp, Homo sapien
aaccatcacactgcgcctgacgtga

SEQ ID NO: 1613406 - DNA, 25 bp, Homo sapien
tcccatcccggcagcaatttgtgtc

SEQ ID NO: 1613407 - DNA, 25 bp, Homo sapien
cccaactcgggtcaatgccaggaca

SEQ ID NO: 1613408 - DNA, 25 bp, Homo sapien
ccctcatccccaactcgggtcaatg

SEQ ID NO: 1613409 - DNA, 25 bp, Homo sapien
tccccaactcgggtcaatgccagga

SEQ ID NO: 1613410 - DNA, 25 bp, Homo sapien
aactcgggtcaatgccaggacactt

SEQ ID NO: 1613411 - DNA, 25 bp, Homo sapien
ccgtgatgttgttgagtcccaggtc

SEQ ID NO: 1613412 - DNA, 25 bp, Homo sapien
tcccaggtcgctgaaggacagaacg

SEQ ID NO: 1613413 - DNA, 25 bp, Homo sapien
cacatggcgtttgccaggatgccca

SEQ ID NO: 1613414 - DNA, 25 bp, Homo sapien
ggatgcccttgggaaccgagagctt

SEQ ID NO: 1613415 - DNA, 25 bp, Homo sapien
gagtgtcccctcaccagatgggtca

SEQ ID NO: 1613416 - DNA, 25 bp, Homo sapien
tcggcgatgcctaagccctgagagg

SEQ ID NO: 1613417 - DNA, 25 bp, Homo sapien
gagtccgggaccttcacactgagtg

SEQ ID NO: 1613418 - DNA, 25 bp, Homo sapien
tgtagacactgagcgggatcttgac

SEQ ID NO: 1613419 - DNA, 25 bp, Homo sapien
gatgtgttctgatcagcagtcaaac

SEQ ID NO: 1613420 - DNA, 25 bp, Homo sapien
ctggatgtgttctgatcagcagtca

SEQ ID NO: 1613421 - DNA, 25 bp, Homo sapien
atggacagatagcctgtcttacagc

SEQ ID NO: 1613422 - DNA, 25 bp, Homo sapien
gatggacagatagcctgtcttacag

SEQ ID NO: 1613423 - DNA, 25 bp, Homo sapien
atcccccaaagcagtctgaggggcc

SEQ ID NO: 1613424 - DNA, 25 bp, Homo sapien
catcccccaaagcagtctgaggggc

SEQ ID NO: 1613425 - DNA, 25 bp, Homo sapien
tcccacgatgaggacatacacatcc

SEQ ID NO: 1613426 - DNA, 25 bp, Homo sapien
cttcccacgatgaggacatacacat

SEQ ID NO: 1613427 - DNA, 25 bp, Homo sapien
caagagctgtagtcccctgaggagc

SEQ ID NO: 1613428 - DNA, 25 bp, Homo sapien
gcaaacgtccaaatgtgcagcggga

SEQ ID NO: 1613429 - DNA, 25 bp, Homo sapien
gagcagatagagtaaccccaagagg

SEQ ID NO: 1613430 - DNA, 25 bp, Homo sapien
tgcatccagcagaaaagggttgcct

SEQ ID NO: 1613431 - DNA, 25 bp, Homo sapien
gccaaatccatgtttcggggaagaa

SEQ ID NO: 1613432 - DNA, 25 bp, Homo sapien
acaatgccaaatccatgtttcgggg

SEQ ID NO: 1613433 - DNA, 25 bp, Homo sapien
caaatccatgtttcggggaagaaag

SEQ ID NO: 1613434 - DNA, 25 bp, Homo sapien
aatgccaaatccatgtttcggggaa

SEQ ID NO: 1613435 - DNA, 25 bp, Homo sapien
acccagatactaagcctatgcccaa

SEQ ID NO: 1613436 - DNA, 25 bp, Homo sapien
agacctgtgtctgttcccccttttg

SEQ ID NO: 1613437 - DNA, 25 bp, Homo sapien
agcctatgcccaatagttattattt

SEQ ID NO: 1613438 - DNA, 25 bp, Homo sapien
agatactaagcctatgcccaatagt

SEQ ID NO: 1613439 - DNA, 25 bp, Homo sapien
actgccaccaggctccctgtgtggg

SEQ ID NO: 1613440 - DNA, 25 bp, Homo sapien
gtgcctggaaggagccactgccacc

SEQ ID NO: 1613441 - DNA, 25 bp, Homo sapien
ctgggggggtgcctggaaggagcca

SEQ ID NO: 1613442 - DNA, 25 bp, Homo sapien
tgtgtggggctggaaagcggggaca

SEQ ID NO: 1613443 - DNA, 25 bp, Homo sapien
ggttcaggctcactcggtcggtcat

SEQ ID NO: 1613444 - DNA, 25 bp, Homo sapien
cggtgtagaggccaccgtcctgccg

SEQ ID NO: 1613445 - DNA, 25 bp, Homo sapien
ccgtcctgccggtggttcaggctca

SEQ ID NO: 1613446 - DNA, 25 bp, Homo sapien
aggctcactcggtcggtcatcacca

SEQ ID NO: 1613447 - DNA, 25 bp, Homo sapien
taggcaacagacaacacccaaacca

SEQ ID NO: 1613448 - DNA, 25 bp, Homo sapien
aagtggatgctgacagcccccagaa

SEQ ID NO: 1613449 - DNA, 25 bp, Homo sapien
cacccaaaccattggtggggaagtg

SEQ ID NO: 1613450 - DNA, 25 bp, Homo sapien
tggatgctgacagcccccagaagca

SEQ ID NO: 1613451 - DNA, 25 bp, Homo sapien
gagcgccggcgtcgttgtgccgtca

SEQ ID NO: 1613452 - DNA, 25 bp, Homo sapien
cggcgtcgttgtgccgtcagcccag

SEQ ID NO: 1613453 - DNA, 25 bp, Homo sapien
aggagcgccggcgtcgttgtgccgt

SEQ ID NO: 1613454 - DNA, 25 bp, Homo sapien
cgccggcgtcgttgtgccgtcagcc

SEQ ID NO: 1613455 - DNA, 25 bp, Homo sapien
caaaaaggaccatcctccctggaca

SEQ ID NO: 1613456 - DNA, 25 bp, Homo sapien
tggacacgccaaaggaatcagaaac

SEQ ID NO: 1613457 - DNA, 25 bp, Homo sapien
catcataatcttccagttcctggaa

SEQ ID NO: 1613458 - DNA, 25 bp, Homo sapien
atcctccctggacacgccaaaggaa

SEQ ID NO: 1613459 - DNA, 25 bp, Homo sapien
gacactcttatcaactgcggcgacg

SEQ ID NO: 1613460 - DNA, 25 bp, Homo sapien
ttgcagccctgatccgcaggtcgac

SEQ ID NO: 1613461 - DNA, 25 bp, Homo sapien
tctcatttgctgaatacgtcactga

SEQ ID NO: 1613462 - DNA, 25 bp, Homo sapien
ctgggcaggagtcagccggaaccca

SEQ ID NO: 1613463 - DNA, 25 bp, Homo sapien
tagaagaccagcaggcgaccaaggg

SEQ ID NO: 1613464 - DNA, 25 bp, Homo sapien
aactgaaggctgtcggcgacccctt

SEQ ID NO: 1613465 - DNA, 25 bp, Homo sapien
aaggtctcgactgcaaactgaaggc

SEQ ID NO: 1613466 - DNA, 25 bp, Homo sapien
gaagagaggtcacacacacgtcgac

SEQ ID NO: 1613467 - DNA, 25 bp, Homo sapien
gatagcacaatattgccccgtgcag

SEQ ID NO: 1613468 - DNA, 25 bp, Homo sapien
tagtacagggtaaagttgcagggac

SEQ ID NO: 1613469 - DNA, 25 bp, Homo sapien
cgtgcagccacctcgtagtacaggg

SEQ ID NO: 1613470 - DNA, 25 bp, Homo sapien
taaacgaatcggtttctccagggca

SEQ ID NO: 1613471 - DNA, 25 bp, Homo sapien
agggcctctgcactaagggaaggct

SEQ ID NO: 1613472 - DNA, 25 bp, Homo sapien
ggctcaaggcagtggggaatctggc

SEQ ID NO: 1613473 - DNA, 25 bp, Homo sapien
ccagggcctctgcactaagggaagg

SEQ ID NO: 1613474 - DNA, 25 bp, Homo sapien
agtggggaatctggccccatagcag

SEQ ID NO: 1613475 - DNA, 25 bp, Homo sapien
ggagaggtagctgggcaggtactga

SEQ ID NO: 1613476 - DNA, 25 bp, Homo sapien
ggcttcccgttcagtgccatcacct

SEQ ID NO: 1613477 - DNA, 25 bp, Homo sapien
cttcccgttcagtgccatcaccttg

SEQ ID NO: 1613478 - DNA, 25 bp, Homo sapien
gcttcccgttcagtgccatcacctt

SEQ ID NO: 1613479 - DNA, 25 bp, Homo sapien
tgctggctgaataacaagggtccac

SEQ ID NO: 1613480 - DNA, 25 bp, Homo sapien
gaataacaagggtccacgggactca

SEQ ID NO: 1613481 - DNA, 25 bp, Homo sapien
ctggctgaataacaagggtccacgg

SEQ ID NO: 1613482 - DNA, 25 bp, Homo sapien
gctgaataacaagggtccacgggac

SEQ ID NO: 1613483 - DNA, 25 bp, Homo sapien
tgccatcggggtaggatagctccac

SEQ ID NO: 1613484 - DNA, 25 bp, Homo sapien
agctctgccttaatctggaccgtca

SEQ ID NO: 1613485 - DNA, 25 bp, Homo sapien
tgggacacaacttcactggtgtaga

SEQ ID NO: 1613486 - DNA, 25 bp, Homo sapien
cagccacacgtgctgggctgacgtg

SEQ ID NO: 1613487 - DNA, 25 bp, Homo sapien
tgtccctcacgcagatgtcgaagtc

SEQ ID NO: 1613488 - DNA, 25 bp, Homo sapien
gtggagtcatcgaacgcgacctgct

SEQ ID NO: 1613489 - DNA, 25 bp, Homo sapien
gaactgcttcctcgtgtccttggag

SEQ ID NO: 1613490 - DNA, 25 bp, Homo sapien
tggagtaccggatgtccaccagctg

SEQ ID NO: 1613491 - DNA, 25 bp, Homo sapien
ctcgtggctgtagtaccctacacca

SEQ ID NO: 1613492 - DNA, 25 bp, Homo sapien
tgtagtaccctacaccattaacagt

SEQ ID NO: 1613493 - DNA, 25 bp, Homo sapien
cacctcgtggctgtagtaccctaca

SEQ ID NO: 1613494 - DNA, 25 bp, Homo sapien
gtggctgtagtaccctacaccatta

SEQ ID NO: 1613495 - DNA, 25 bp, Homo sapien
acaggcgtccaggtcttggatatac

SEQ ID NO: 1613496 - DNA, 25 bp, Homo sapien
cgcacagtgcctgtctcacaggcgt

SEQ ID NO: 1613497 - DNA, 25 bp, Homo sapien
taccggggcgggtcaatcagaagct

SEQ ID NO: 1613498 - DNA, 25 bp, Homo sapien
gcgtccaggtcttggatataccggg

SEQ ID NO: 1613499 - DNA, 25 bp, Homo sapien
ccaacacaggctggtcggacaaggg

SEQ ID NO: 1613500 - DNA, 25 bp, Homo sapien
tacgcgtggccttgcatttcaacaa

SEQ ID NO: 1613501 - DNA, 25 bp, Homo sapien
aaagacttgttgtacgcgtggcctt

SEQ ID NO: 1613502 - DNA, 25 bp, Homo sapien
tgttgtacgcgtggccttgcatttc

SEQ ID NO: 1613503 - DNA, 25 bp, Homo sapien
gcagtgggggtacattagcggtggg

SEQ ID NO: 1613504 - DNA, 25 bp, Homo sapien
tgggccctggacagagcatattctg

SEQ ID NO: 1613505 - DNA, 25 bp, Homo sapien
gtacattagcggtgggccctggaca

SEQ ID NO: 1613506 - DNA, 25 bp, Homo sapien
cctggacagagcatattctgttttc

SEQ ID NO: 1613507 - DNA, 25 bp, Homo sapien
tccactctatcatccgagagcctcg

SEQ ID NO: 1613508 - DNA, 25 bp, Homo sapien
cactctatcatccgagagcctcggg

SEQ ID NO: 1613509 - DNA, 25 bp, Homo sapien
ctctatcatccgagagcctcggggg

SEQ ID NO: 1613510 - DNA, 25 bp, Homo sapien
ctatcatccgagagcctcgggggtc

SEQ ID NO: 1613511 - DNA, 25 bp, Homo sapien
cttctcgttgacaggcctcagattt

SEQ ID NO: 1613512 - DNA, 25 bp, Homo sapien
tcgttgacaggcctcagatttggag

SEQ ID NO: 1613513 - DNA, 25 bp, Homo sapien
tcagatttggagagacggtgaagat

SEQ ID NO: 1613514 - DNA, 25 bp, Homo sapien
gagacggtgaagatgcttatgagca

SEQ ID NO: 1613515 - DNA, 25 bp, Homo sapien
gggtctgtacacaggcttgtccgtc

SEQ ID NO: 1613516 - DNA, 25 bp, Homo sapien
gcttgtccgtctggatgaatacaga

SEQ ID NO: 1613517 - DNA, 25 bp, Homo sapien
tccacggtcaccgaggtctggttgt

SEQ ID NO: 1613518 - DNA, 25 bp, Homo sapien
agccgcggccccacactttcagaag

SEQ ID NO: 1613519 - DNA, 25 bp, Homo sapien
gaggaaggagctttgggacaagaat

SEQ ID NO: 1613520 - DNA, 25 bp, Homo sapien
ggaaggagctttgggacaagaattc

SEQ ID NO: 1613521 - DNA, 25 bp, Homo sapien
cagaggaaggagctttgggacaaga

SEQ ID NO: 1613522 - DNA, 25 bp, Homo sapien
aaggagctttgggacaagaattcac

SEQ ID NO: 1613523 - DNA, 25 bp, Homo sapien
taaaatcgcagcacaggctgagcgc

SEQ ID NO: 1613524 - DNA, 25 bp, Homo sapien
gaaacactggtctagttatggagcc

SEQ ID NO: 1613525 - DNA, 25 bp, Homo sapien
tgccaagtgaattcacagcctgtga

SEQ ID NO: 1613526 - DNA, 25 bp, Homo sapien
ggagacctggatcccttgatataca

SEQ ID NO: 1613527 - DNA, 25 bp, Homo sapien
ataccggaggtgctgaggaccgtat

SEQ ID NO: 1613528 - DNA, 25 bp, Homo sapien
gcaggagggagataccggaggtgct

SEQ ID NO: 1613529 - DNA, 25 bp, Homo sapien
gagataccggaggtgctgaggaccg

SEQ ID NO: 1613530 - DNA, 25 bp, Homo sapien
tctggaaatatctcaacactggcca

SEQ ID NO: 1613531 - DNA, 25 bp, Homo sapien
gggtgcccgtgctctgcccagatct

SEQ ID NO: 1613532 - DNA, 25 bp, Homo sapien
acacaggtgggtgcccgtgctctgc

SEQ ID NO: 1613533 - DNA, 25 bp, Homo sapien
ctggtcaaagctgacacaggtgggt

SEQ ID NO: 1613534 - DNA, 25 bp, Homo sapien
gcccatcctgggctttactctctct

SEQ ID NO: 1613535 - DNA, 25 bp, Homo sapien
aggatggctccctggctctgcacca

SEQ ID NO: 1613536 - DNA, 25 bp, Homo sapien
tggctccctggctctgcaccaccgg

SEQ ID NO: 1613537 - DNA, 25 bp, Homo sapien
ccctggctctgcaccaccggctcac

SEQ ID NO: 1613538 - DNA, 25 bp, Homo sapien
gctccctggctctgcaccaccggct

SEQ ID NO: 1613539 - DNA, 25 bp, Homo sapien
ttggagagttaaagatggtcacgct

SEQ ID NO: 1613540 - DNA, 25 bp, Homo sapien
cacgcccgcgcgaaaaacagaggga

SEQ ID NO: 1613541 - DNA, 25 bp, Homo sapien
cagagggagctgcaatcaagtaacc

SEQ ID NO: 1613542 - DNA, 25 bp, Homo sapien
gcctggaccgtgacttcccttggag

SEQ ID NO: 1613543 - DNA, 25 bp, Homo sapien
caggagcgggagcaacggccagagc

SEQ ID NO: 1613544 - DNA, 25 bp, Homo sapien
gtcccgcgccgacagcagcaggagc

SEQ ID NO: 1613545 - DNA, 25 bp, Homo sapien
cgtcccgcgccgacagcagcaggag

SEQ ID NO: 1613546 - DNA, 25 bp, Homo sapien
gccgtcccgcgccgacagcagcagg

SEQ ID NO: 1613547 - DNA, 25 bp, Homo sapien
ggccctttgttcgcagcccccgcgc

SEQ ID NO: 1613548 - DNA, 25 bp, Homo sapien
agtgcgcccggcgccatgcgccccg

SEQ ID NO: 1613549 - DNA, 25 bp, Homo sapien
ccggcgccatgcgccccgctccgcg

SEQ ID NO: 1613550 - DNA, 25 bp, Homo sapien
cctttgttcgcagcccccgcgcagt

SEQ ID NO: 1613551 - DNA, 25 bp, Homo sapien
gccctgtgaatcctgcactgtgtcc

SEQ ID NO: 1613552 - DNA, 25 bp, Homo sapien
gcggggagtgtacgcaggccatcgg

SEQ ID NO: 1613553 - DNA, 25 bp, Homo sapien
tgtgtaggctctagggtcagcctca

SEQ ID NO: 1613554 - DNA, 25 bp, Homo sapien
acgtcacttccgggaggaagcttca

SEQ ID NO: 1613555 - DNA, 25 bp, Homo sapien
cccttgcaagccatgggaggacaca

SEQ ID NO: 1613556 - DNA, 25 bp, Homo sapien
tgatggtggtcattttgagcagtag

SEQ ID NO: 1613557 - DNA, 25 bp, Homo sapien
taggttcccttgcaagccatgggag

SEQ ID NO: 1613558 - DNA, 25 bp, Homo sapien
tttgagcagtaggttcccttgcaag

SEQ ID NO: 1613559 - DNA, 25 bp, Homo sapien
tatataaagtgctcaagtatcctga

SEQ ID NO: 1613560 - DNA, 25 bp, Homo sapien
tggaggcttcaattgcaaaacaggt

SEQ ID NO: 1613561 - DNA, 25 bp, Homo sapien
cccttcatagaaaatggaggcttca

SEQ ID NO: 1613562 - DNA, 25 bp, Homo sapien
aaaaatagctacagtgctacggtag

SEQ ID NO: 1613563 - DNA, 25 bp, Homo sapien
gcctggctgcttgaagaaaaatctt

SEQ ID NO: 1613564 - DNA, 25 bp, Homo sapien
tgacaagtccctccctgaacgagag

SEQ ID NO: 1613565 - DNA, 25 bp, Homo sapien
gaaaaatcttcgcttgggctgatga

SEQ ID NO: 1613566 - DNA, 25 bp, Homo sapien
catgacaagtccctccctgaacgag

SEQ ID NO: 1613567 - DNA, 25 bp, Homo sapien
cccagattctctgcaggcactgtct

SEQ ID NO: 1613568 - DNA, 25 bp, Homo sapien
cttgattgaaataccaccggctggg

SEQ ID NO: 1613569 - DNA, 25 bp, Homo sapien
cttgcctctgcggagagttccagca

SEQ ID NO: 1613570 - DNA, 25 bp, Homo sapien
tcttcccagacttcctggtttgcca

SEQ ID NO: 1613571 - DNA, 25 bp, Homo sapien
gctcaaggtcctttttcgccgtcac

SEQ ID NO: 1613572 - DNA, 25 bp, Homo sapien
tgagttcgctcagtaagtccagcac

SEQ ID NO: 1613573 - DNA, 25 bp, Homo sapien
tcgccgtcacgtccttgagttcgct

SEQ ID NO: 1613574 - DNA, 25 bp, Homo sapien
tcttccgaatcaccaacatcaagtt

SEQ ID NO: 1613575 - DNA, 25 bp, Homo sapien
gcggccgacagacttctgtcatgat

SEQ ID NO: 1613576 - DNA, 25 bp, Homo sapien
aagagggatggtgggcgatggatgg

SEQ ID NO: 1613577 - DNA, 25 bp, Homo sapien
ggcacacacaagtggagcggccgac

SEQ ID NO: 1613578 - DNA, 25 bp, Homo sapien
atggatggcaaggtgccccacgcaa

SEQ ID NO: 1613579 - DNA, 25 bp, Homo sapien
agtcataaaatcagaaacccggccg

SEQ ID NO: 1613580 - DNA, 25 bp, Homo sapien
gacttctggctgaaatcaagactcc

SEQ ID NO: 1613581 - DNA, 25 bp, Homo sapien
tctgtggccgcttggtatggcagcc

SEQ ID NO: 1613582 - DNA, 25 bp, Homo sapien
aatttcaataacgagacagccaggg

SEQ ID NO: 1613583 - DNA, 25 bp, Homo sapien
tggatggacctcacgggcagctcgt

SEQ ID NO: 1613584 - DNA, 25 bp, Homo sapien
ggccgtggcgaatgtcctgtattgc

SEQ ID NO: 1613585 - DNA, 25 bp, Homo sapien
tattgctccttgaagcgtgtggcca

SEQ ID NO: 1613586 - DNA, 25 bp, Homo sapien
gcagctcgtgcctggtagtgtccag

SEQ ID NO: 1613587 - DNA, 25 bp, Homo sapien
cgagggtgtggtgagctcttcccaa

SEQ ID NO: 1613588 - DNA, 25 bp, Homo sapien
catgtgtctgccagcggttctaggc

SEQ ID NO: 1613589 - DNA, 25 bp, Homo sapien
aatgatatacgattgacccttgagc

SEQ ID NO: 1613590 - DNA, 25 bp, Homo sapien
tgagcccacctgctttagagtactg

SEQ ID NO: 1613591 - DNA, 25 bp, Homo sapien
atccaggacatctgccagctcccgc

SEQ ID NO: 1613592 - DNA, 25 bp, Homo sapien
caaactcagcaagattgttctccat

SEQ ID NO: 1613593 - DNA, 25 bp, Homo sapien
cttctttcaaactcagcaagattgt

SEQ ID NO: 1613594 - DNA, 25 bp, Homo sapien
ttcaaactcagcaagattgttctcc

SEQ ID NO: 1613595 - DNA, 25 bp, Homo sapien
ttacggatagtagcgtcagcagtag

SEQ ID NO: 1613596 - DNA, 25 bp, Homo sapien
acggatagtagcgtcagcagtagtg

SEQ ID NO: 1613597 - DNA, 25 bp, Homo sapien
ggatagtagcgtcagcagtagtgtc

SEQ ID NO: 1613598 - DNA, 25 bp, Homo sapien
ctttacggatagtagcgtcagcagt

SEQ ID NO: 1613599 - DNA, 25 bp, Homo sapien
aactgtggcgtctttttgacgatgc

SEQ ID NO: 1613600 - DNA, 25 bp, Homo sapien
ctctttttccgaggggcagaaaatg

SEQ ID NO: 1613601 - DNA, 25 bp, Homo sapien
tgtggcgtctttttgacgatgcttt

SEQ ID NO: 1613602 - DNA, 25 bp, Homo sapien
ggcgtctttttgacgatgcttttgt

SEQ ID NO: 1613603 - DNA, 25 bp, Homo sapien
tgccatgcccttccagcaacgtgga

SEQ ID NO: 1613604 - DNA, 25 bp, Homo sapien
agagagatccaggtcaggtggagct

SEQ ID NO: 1613605 - DNA, 25 bp, Homo sapien
cattaatagcagagagatccaggtc

SEQ ID NO: 1613606 - DNA, 25 bp, Homo sapien
gtggagctgtgccatgcccttccag

SEQ ID NO: 1613607 - DNA, 25 bp, Homo sapien
caggtcaccctttccgaccccactg

SEQ ID NO: 1613608 - DNA, 25 bp, Homo sapien
gtcaccctttccgaccccactgcta

SEQ ID NO: 1613609 - DNA, 25 bp, Homo sapien
ctgcaggtcaccctttccgacccca

SEQ ID NO: 1613610 - DNA, 25 bp, Homo sapien
tcaccctttccgaccccactgctat

SEQ ID NO: 1613611 - DNA, 25 bp, Homo sapien
gaaagtcagcacagtcaagagacac

SEQ ID NO: 1613612 - DNA, 25 bp, Homo sapien
gcacagtcaagagacactctccatt

SEQ ID NO: 1613613 - DNA, 25 bp, Homo sapien
tccccgaaagtcagcacagtcaaga

SEQ ID NO: 1613614 - DNA, 25 bp, Homo sapien
aaaagaatccccgaaagtcagcaca

SEQ ID NO: 1613615 - DNA, 25 bp, Homo sapien
actaagcatgagactatttcatgaa

SEQ ID NO: 1613616 - DNA, 25 bp, Homo sapien
gaactaagcatgagactatttcatg

SEQ ID NO: 1613617 - DNA, 25 bp, Homo sapien
aggaactaagcatgagactatttca

SEQ ID NO: 1613618 - DNA, 25 bp, Homo sapien
taagcatgagactatttcatgaaca

SEQ ID NO: 1613619 - DNA, 25 bp, Homo sapien
tatcatcagcatgtatagcatttgc

SEQ ID NO: 1613620 - DNA, 25 bp, Homo sapien
tcttagccatggcattgcgagcaca

SEQ ID NO: 1613621 - DNA, 25 bp, Homo sapien
tcaagggatctaccggcttcatcct

SEQ ID NO: 1613622 - DNA, 25 bp, Homo sapien
gaactcaaacaagcagtcctttgaa

SEQ ID NO: 1613623 - DNA, 25 bp, Homo sapien
tctgacccttcccagaaaggaaaga

SEQ ID NO: 1613624 - DNA, 25 bp, Homo sapien
gaactttaacttagcacccatggag

SEQ ID NO: 1613625 - DNA, 25 bp, Homo sapien
tgtcacaaagcagtaccatgatggc

SEQ ID NO: 1613626 - DNA, 25 bp, Homo sapien
agacaaaatttactgccgcgctcat

SEQ ID NO: 1613627 - DNA, 25 bp, Homo sapien
cagacatcttccctcgggtctgtga

SEQ ID NO: 1613628 - DNA, 25 bp, Homo sapien
ttgaagacacgggtcagggtctcgc

SEQ ID NO: 1613629 - DNA, 25 bp, Homo sapien
ttttgaagacacgggtcagggtctc

SEQ ID NO: 1613630 - DNA, 25 bp, Homo sapien
tttgaagacacgggtcagggtctcg

SEQ ID NO: 1613631 - DNA, 25 bp, Homo sapien
ttcatactgcagataccgggactca

SEQ ID NO: 1613632 - DNA, 25 bp, Homo sapien
tcatactgcagataccgggactcaa

SEQ ID NO: 1613633 - DNA, 25 bp, Homo sapien
tgcagataccgggactcaatcactc

SEQ ID NO: 1613634 - DNA, 25 bp, Homo sapien
gataccgggactcaatcactcttcc

SEQ ID NO: 1613635 - DNA, 25 bp, Homo sapien
tttgttccagttgattcttctgttg

SEQ ID NO: 1613636 - DNA, 25 bp, Homo sapien
catatctttgttccagttgattctt

SEQ ID NO: 1613637 - DNA, 25 bp, Homo sapien
tgttccagttgattcttctgttggg

SEQ ID NO: 1613638 - DNA, 25 bp, Homo sapien
ttctgttggggactggggttgcagc

SEQ ID NO: 1613639 - DNA, 25 bp, Homo sapien
ctcagagttaacaaggatccttcag

SEQ ID NO: 1613640 - DNA, 25 bp, Homo sapien
gggctgtcaatctgggcagccccag

SEQ ID NO: 1613641 - DNA, 25 bp, Homo sapien
ggacaatcggaaggccactctcatg

SEQ ID NO: 1613642 - DNA, 25 bp, Homo sapien
cttcagtcagccaaagggccgggct

SEQ ID NO: 1613643 - DNA, 25 bp, Homo sapien
tgaactcttttatccttcttcttgg

SEQ ID NO: 1613644 - DNA, 25 bp, Homo sapien
ttcttggcactgctagaatttgtgg

SEQ ID NO: 1613645 - DNA, 25 bp, Homo sapien
atttgtggggccggttgcaggcttc

SEQ ID NO: 1613646 - DNA, 25 bp, Homo sapien
ttcttcttggcactgctagaatttg

SEQ ID NO: 1613647 - DNA, 25 bp, Homo sapien
gctcagacagcccagtccaagggct

SEQ ID NO: 1613648 - DNA, 25 bp, Homo sapien
tgttcacctcactacccaagaagca

SEQ ID NO: 1613649 - DNA, 25 bp, Homo sapien
gcgaggtgcctctgctagttgaagc

SEQ ID NO: 1613650 - DNA, 25 bp, Homo sapien
aagcacagggaagccggcgaggtgc

SEQ ID NO: 1613651 - DNA, 25 bp, Homo sapien
aagaaggcataggtgaacacccaaa

SEQ ID NO: 1613652 - DNA, 25 bp, Homo sapien
gcaagaaggcataggtgaacaccca

SEQ ID NO: 1613653 - DNA, 25 bp, Homo sapien
ggcaagaaggcataggtgaacaccc

SEQ ID NO: 1613654 - DNA, 25 bp, Homo sapien
ctgggcaagaaggcataggtgaaca

SEQ ID NO: 1613655 - DNA, 25 bp, Homo sapien
tgagaagagaggagggtaatgagag

SEQ ID NO: 1613656 - DNA, 25 bp, Homo sapien
gagaagagaggagggtaatgagagc

SEQ ID NO: 1613657 - DNA, 25 bp, Homo sapien
ctgagaagagaggagggtaatgaga

SEQ ID NO: 1613658 - DNA, 25 bp, Homo sapien
agaagagaggagggtaatgagagct

SEQ ID NO: 1613659 - DNA, 25 bp, Homo sapien
ttagcaaatgttcgccaggtgccag

SEQ ID NO: 1613660 - DNA, 25 bp, Homo sapien
tactgtcaatctatcggttacggca

SEQ ID NO: 1613661 - DNA, 25 bp, Homo sapien
tcatcggccccatttcgtagcggag

SEQ ID NO: 1613662 - DNA, 25 bp, Homo sapien
gatctaagcgcgtttcagcctcacg

SEQ ID NO: 1613663 - DNA, 25 bp, Homo sapien
tcccgccttccacctcaaggcccga

SEQ ID NO: 1613664 - DNA, 25 bp, Homo sapien
ccagcgcctcgccccgaggaatccg

SEQ ID NO: 1613665 - DNA, 25 bp, Homo sapien
tcggaccatttgtggagacgcagga

SEQ ID NO: 1613666 - DNA, 25 bp, Homo sapien
gcttgcgggtcggaccatttgtgga

SEQ ID NO: 1613667 - DNA, 25 bp, Homo sapien
gcagcgccggctaagtgtggagagc

SEQ ID NO: 1613668 - DNA, 25 bp, Homo sapien
ctaagtgtggagagcgcggccccag

SEQ ID NO: 1613669 - DNA, 25 bp, Homo sapien
gcgtgaggcagcgccggctaagtgt

SEQ ID NO: 1613670 - DNA, 25 bp, Homo sapien
cccagacgcgcgcttcgcctgtcct

SEQ ID NO: 1613671 - DNA, 25 bp, Homo sapien
ctcgggttggcgactcgagctcgaa

SEQ ID NO: 1613672 - DNA, 25 bp, Homo sapien
ttggcgactcgagctcgaagcctgc

SEQ ID NO: 1613673 - DNA, 25 bp, Homo sapien
actcgagctcgaagcctgcctttgg

SEQ ID NO: 1613674 - DNA, 25 bp, Homo sapien
cagcctcgggttggcgactcgagct

SEQ ID NO: 1613675 - DNA, 25 bp, Homo sapien
ccattcctggctgcgatgatcctac

SEQ ID NO: 1613676 - DNA, 25 bp, Homo sapien
tccattcctggctgcgatgatccta

SEQ ID NO: 1613677 - DNA, 25 bp, Homo sapien
caggtagagacgtgggaatctcccc

SEQ ID NO: 1613678 - DNA, 25 bp, Homo sapien
tctggaaatcccgaggcagtaccgt

SEQ ID NO: 1613679 - DNA, 25 bp, Homo sapien
catggacttgttaacttgctgcttc

SEQ ID NO: 1613680 - DNA, 25 bp, Homo sapien
tcgtccaaatagaaaattgcggtgt

SEQ ID NO: 1613681 - DNA, 25 bp, Homo sapien
cttccaaatggtgtgtcttgggtgg

SEQ ID NO: 1613682 - DNA, 25 bp, Homo sapien
ctcttccaaatggtgtgtcttgggt

SEQ ID NO: 1613683 - DNA, 25 bp, Homo sapien
tcttccaaatggtgtgtcttgggtg

SEQ ID NO: 1613684 - DNA, 25 bp, Homo sapien
tttgcagtatcccctcgccacaagt

SEQ ID NO: 1613685 - DNA, 25 bp, Homo sapien
atttgcagtatcccctcgccacaag

SEQ ID NO: 1613686 - DNA, 25 bp, Homo sapien
ttgcagtatcccctcgccacaagtg

SEQ ID NO: 1613687 - DNA, 25 bp, Homo sapien
tcagcccttgtgattccatgagcta

SEQ ID NO: 1613688 - DNA, 25 bp, Homo sapien
aagagcccatccttgggttctcctg

SEQ ID NO: 1613689 - DNA, 25 bp, Homo sapien
ttgtgattccatgagctagcatcag

SEQ ID NO: 1613690 - DNA, 25 bp, Homo sapien
agcatcagccgtcccctcagtgggt

SEQ ID NO: 1613691 - DNA, 25 bp, Homo sapien
tgattaactctcgtggcgtcctggg

SEQ ID NO: 1613692 - DNA, 25 bp, Homo sapien
tcctgggacgaccaggtgagcgata

SEQ ID NO: 1613693 - DNA, 25 bp, Homo sapien
ttagaagtgcgtaaacctctgtcca

SEQ ID NO: 1613694 - DNA, 25 bp, Homo sapien
ggtgagcgataccatgtggcacctg

SEQ ID NO: 1613695 - DNA, 25 bp, Homo sapien
tcttttgggtctatacctgggagca

SEQ ID NO: 1613696 - DNA, 25 bp, Homo sapien
ggagcagaattgctacgtctgtatg

SEQ ID NO: 1613697 - DNA, 25 bp, Homo sapien
tgtagcacggagcagtggttccttc

SEQ ID NO: 1613698 - DNA, 25 bp, Homo sapien
ggaccacgttttgtgtatgcattca

SEQ ID NO: 1613699 - DNA, 25 bp, Homo sapien
ccactggactccagcatggtgatag

SEQ ID NO: 1613700 - DNA, 25 bp, Homo sapien
gagccgagatccgccactggactcc

SEQ ID NO: 1613701 - DNA, 25 bp, Homo sapien
ctggactccagcatggtgatagagt

SEQ ID NO: 1613702 - DNA, 25 bp, Homo sapien
agccgagatccgccactggactcca

SEQ ID NO: 1613703 - DNA, 25 bp, Homo sapien
tgcaggagcgcaacgcagatggaac

SEQ ID NO: 1613704 - DNA, 25 bp, Homo sapien
gatggaaccatcaagtacgtgcata

SEQ ID NO: 1613705 - DNA, 25 bp, Homo sapien
tacgtgcatatgcagctggtggcgc

SEQ ID NO: 1613706 - DNA, 25 bp, Homo sapien
gactttgatgacctgtgtaacctcc

SEQ ID NO: 1613707 - DNA, 25 bp, Homo sapien
cattcgtgtggtgtgttggttgcac

SEQ ID NO: 1613708 - DNA, 25 bp, Homo sapien
taaaaataccgagcagatagtgcag

SEQ ID NO: 1613709 - DNA, 25 bp, Homo sapien
aatgtgtctgccgttggagtgtcac

SEQ ID NO: 1613710 - DNA, 25 bp, Homo sapien
tgtcacagagtggtgtcactgccct

SEQ ID NO: 1613711 - DNA, 25 bp, Homo sapien
tgtctatcggcgatgtcagcctcaa

SEQ ID NO: 1613712 - DNA, 25 bp, Homo sapien
cagtgcagttgccacctaaggtttc

SEQ ID NO: 1613713 - DNA, 25 bp, Homo sapien
tagatccgatttctgcaggcctcgc

SEQ ID NO: 1613714 - DNA, 25 bp, Homo sapien
gatgacttagcagtggtcaggcacc

SEQ ID NO: 1613715 - DNA, 25 bp, Homo sapien
ccttgctgcgtttcagtgtttgctg

SEQ ID NO: 1613716 - DNA, 25 bp, Homo sapien
gggagtccttgctgcgtttcagtgt

SEQ ID NO: 1613717 - DNA, 25 bp, Homo sapien
tggctgacagttggtgtctcttgtg

SEQ ID NO: 1613718 - DNA, 25 bp, Homo sapien
tgtttgctgtaatgccatctgcgtc

SEQ ID NO: 1613719 - DNA, 25 bp, Homo sapien
ggacatacggcgttgggagcactca

SEQ ID NO: 1613720 - DNA, 25 bp, Homo sapien
aaccagctatcgagagcctgccggg

SEQ ID NO: 1613721 - DNA, 25 bp, Homo sapien
cgtccgtccatctgaccagcaacca

SEQ ID NO: 1613722 - DNA, 25 bp, Homo sapien
ctgtacatccctgccgtccgtccat

SEQ ID NO: 1613723 - DNA, 25 bp, Homo sapien
ttgtgcctggctggcatcatccccg

SEQ ID NO: 1613724 - DNA, 25 bp, Homo sapien
cttcgcagggtcttccttgtgcctg

SEQ ID NO: 1613725 - DNA, 25 bp, Homo sapien
ggtcttccttgtgcctggctggcat

SEQ ID NO: 1613726 - DNA, 25 bp, Homo sapien
ccccttcgcagggtcttccttgtgc

SEQ ID NO: 1613727 - DNA, 25 bp, Homo sapien
gccctccttgggcacgtgaccctgt

SEQ ID NO: 1613728 - DNA, 25 bp, Homo sapien
cttgggcacgtgaccctgtggaccc

SEQ ID NO: 1613729 - DNA, 25 bp, Homo sapien
tgggcacgtgaccctgtggacccat

SEQ ID NO: 1613730 - DNA, 25 bp, Homo sapien
tccttgggcacgtgaccctgtggac

SEQ ID NO: 1613731 - DNA, 25 bp, Homo sapien
ggtgtgaacgacagtgccaggcctt

SEQ ID NO: 1613732 - DNA, 25 bp, Homo sapien
ccttggcttccgaagtggtggaatt

SEQ ID NO: 1613733 - DNA, 25 bp, Homo sapien
acagcgccaggccttattttatttc

SEQ ID NO: 1613734 - DNA, 25 bp, Homo sapien
gaacgacagtgccaggccttatttt

SEQ ID NO: 1613735 - DNA, 25 bp, Homo sapien
gttatacaatagatcgcttgaattt

SEQ ID NO: 1613736 - DNA, 25 bp, Homo sapien
tacgcgttacctgacatactcaaca

SEQ ID NO: 1613737 - DNA, 25 bp, Homo sapien
tcaatggagctaattaacgtacgcg

SEQ ID NO: 1613738 - DNA, 25 bp, Homo sapien
acattgtggaaagggtcaatggagc

SEQ ID NO: 1613739 - DNA, 25 bp, Homo sapien
atggccaaatactattccatagtgt

SEQ ID NO: 1613740 - DNA, 25 bp, Homo sapien
tggccaaatactattccatagtgta

SEQ ID NO: 1613741 - DNA, 25 bp, Homo sapien
cagcaaatccctgtgatacaagttt

SEQ ID NO: 1613742 - DNA, 25 bp, Homo sapien
ttaaataaaccgagtctgggcatga

SEQ ID NO: 1613743 - DNA, 25 bp, Homo sapien
tacctacttaacaaacctgcgtgtg

SEQ ID NO: 1613744 - DNA, 25 bp, Homo sapien
taaaccgagtctgggcatgatggtt

SEQ ID NO: 1613745 - DNA, 25 bp, Homo sapien
gaaaagtctcgcctggtgtctcagg

SEQ ID NO: 1613746 - DNA, 25 bp, Homo sapien
gctgtcgtcgagaaatatctgcttg

SEQ ID NO: 1613747 - DNA, 25 bp, Homo sapien
tctcttaatgacagagctgtcgtcg

SEQ ID NO: 1613748 - DNA, 25 bp, Homo sapien
tgaatgccacgccatgtctacgttt

SEQ ID NO: 1613749 - DNA, 25 bp, Homo sapien
ggagttcgagatcagattggctaac

SEQ ID NO: 1613750 - DNA, 25 bp, Homo sapien
gttcgagatcagattggctaacatg

SEQ ID NO: 1613751 - DNA, 25 bp, Homo sapien
gagatcagattggctaacatggcaa

SEQ ID NO: 1613752 - DNA, 25 bp, Homo sapien
cgagatcagattggctaacatggca

SEQ ID NO: 1613753 - DNA, 25 bp, Homo sapien
gaggtccagactagcctgtacagca

SEQ ID NO: 1613754 - DNA, 25 bp, Homo sapien
agcctgtacagcatagcgtctgtcg

SEQ ID NO: 1613755 - DNA, 25 bp, Homo sapien
caggaggtccagactagcctgtaca

SEQ ID NO: 1613756 - DNA, 25 bp, Homo sapien
cagactagcctgtacagcatagcgt

SEQ ID NO: 1613757 - DNA, 25 bp, Homo sapien
catcggctacacagacaatgtcggc

SEQ ID NO: 1613758 - DNA, 25 bp, Homo sapien
tcacgtggcacaacatcggctacac

SEQ ID NO: 1613759 - DNA, 25 bp, Homo sapien
cacagacaatgtcggctgcatccat

SEQ ID NO: 1613760 - DNA, 25 bp, Homo sapien
gaatatcagggcgaggggatcacgt

SEQ ID NO: 1613761 - DNA, 25 bp, Homo sapien
ggatgcacgtcccaccctgtagatt

SEQ ID NO: 1613762 - DNA, 25 bp, Homo sapien
aacccgccaggcgtggcttgctgaa

SEQ ID NO: 1613763 - DNA, 25 bp, Homo sapien
tacttctcagacatccgaatggccc

SEQ ID NO: 1613764 - DNA, 25 bp, Homo sapien
caacccagggaaactggtgtccaca

SEQ ID NO: 1613765 - DNA, 25 bp, Homo sapien
cgtgagtcgcgtcggcaaagagggc

SEQ ID NO: 1613766 - DNA, 25 bp, Homo sapien
agagggctggagcacgtcaagttcc

SEQ ID NO: 1613767 - DNA, 25 bp, Homo sapien
agaaagtccccagcagccgggagaa

SEQ ID NO: 1613768 - DNA, 25 bp, Homo sapien
tggagcacgtcaagttccagaacaa

SEQ ID NO: 1613769 - DNA, 25 bp, Homo sapien
cctggacgtgagctgtcagagcaga

SEQ ID NO: 1613770 - DNA, 25 bp, Homo sapien
ctggacgtgagctgtcagagcagaa

SEQ ID NO: 1613771 - DNA, 25 bp, Homo sapien
tacccaccccgtgtgacagaatagg

SEQ ID NO: 1613772 - DNA, 25 bp, Homo sapien
ggagggcaacgcctgaagtcagacc

SEQ ID NO: 1613773 - DNA, 25 bp, Homo sapien
tataggtcaacagggacaacctggg

SEQ ID NO: 1613774 - DNA, 25 bp, Homo sapien
gaataggagccagcgactcaggact

SEQ ID NO: 1613775 - DNA, 25 bp, Homo sapien
agtagcgctatcttgcccgggctgg

SEQ ID NO: 1613776 - DNA, 25 bp, Homo sapien
gacgtgaaatagctccgactgggaa

SEQ ID NO: 1613777 - DNA, 25 bp, Homo sapien
gaagggttaacatgctctcgaggaa

SEQ ID NO: 1613778 - DNA, 25 bp, Homo sapien
ttttcaaggacatcaggcccactgg

SEQ ID NO: 1613779 - DNA, 25 bp, Homo sapien
ggatctgcctggcacacgctagcta

SEQ ID NO: 1613780 - DNA, 25 bp, Homo sapien
cataggttacgtgtccagaggatct

SEQ ID NO: 1613781 - DNA, 25 bp, Homo sapien
caggcctttgtccatcatgccaggg

SEQ ID NO: 1613782 - DNA, 25 bp, Homo sapien
ggctgtcctaggattggaccctcca

SEQ ID NO: 1613783 - DNA, 25 bp, Homo sapien
ggtactccccgacagcagcatgtct

SEQ ID NO: 1613784 - DNA, 25 bp, Homo sapien
atgagggaggcagggaccgcgcgca

SEQ ID NO: 1613785 - DNA, 25 bp, Homo sapien
caggctctcaacgtgggccgggtct

SEQ ID NO: 1613786 - DNA, 25 bp, Homo sapien
ctgcgcccgcacatactcggtgagg

SEQ ID NO: 1613787 - DNA, 25 bp, Homo sapien
accactcgccactgtgggtaagaac

SEQ ID NO: 1613788 - DNA, 25 bp, Homo sapien
gggacaccactcgccactgtgggta

SEQ ID NO: 1613789 - DNA, 25 bp, Homo sapien
tgggaggcagctagagaacacagag

SEQ ID NO: 1613790 - DNA, 25 bp, Homo sapien
gcatgatggctcacggccacagtcc

SEQ ID NO: 1613791 - DNA, 25 bp, Homo sapien
tcaagggtggctggcacccaactca

SEQ ID NO: 1613792 - DNA, 25 bp, Homo sapien
ccagaagggcctacggtgtgagaga

SEQ ID NO: 1613793 - DNA, 25 bp, Homo sapien
ctttggcagggagacaggttctaat

SEQ ID NO: 1613794 - DNA, 25 bp, Homo sapien
ttctaaggaagctcgcagggaaggt

SEQ ID NO: 1613795 - DNA, 25 bp, Homo sapien
tggtccatgaaagccacggcgcgct

SEQ ID NO: 1613796 - DNA, 25 bp, Homo sapien
gctcggcggccataggcgcggcgtg

SEQ ID NO: 1613797 - DNA, 25 bp, Homo sapien
cgccgcgttcagcacgaagagctcg

SEQ ID NO: 1613798 - DNA, 25 bp, Homo sapien
ttgaggcagccatactcggccgagt

SEQ ID NO: 1613799 - DNA, 25 bp, Homo sapien
gcgcgcccactccacggtgctgaag

SEQ ID NO: 1613800 - DNA, 25 bp, Homo sapien
cgccagctcgcacacgttgtcgatg

SEQ ID NO: 1613801 - DNA, 25 bp, Homo sapien
tgcgcgatcagttcggacaccggct

SEQ ID NO: 1613802 - DNA, 25 bp, Homo sapien
tcggacaccggctgccccgggaaga

SEQ ID NO: 1613803 - DNA, 25 bp, Homo sapien
ccgaggaggcggccacggcaccagg

SEQ ID NO: 1613804 - DNA, 25 bp, Homo sapien
ccaggcagcgagtgcgggatgcggc

SEQ ID NO: 1613805 - DNA, 25 bp, Homo sapien
caggcagcgagtgcgggatgcggcc

SEQ ID NO: 1613806 - DNA, 25 bp, Homo sapien
tgcccgaggaggcggccacggcacc

SEQ ID NO: 1613807 - DNA, 25 bp, Homo sapien
tgcgggaggcggggacaggagggac

SEQ ID NO: 1613808 - DNA, 25 bp, Homo sapien
ctgcgggaggcggggacaggaggga

SEQ ID NO: 1613809 - DNA, 25 bp, Homo sapien
cgggaggcggggacaggagggacat

SEQ ID NO: 1613810 - DNA, 25 bp, Homo sapien
gcgggaggcggggacaggagggaca

SEQ ID NO: 1613811 - DNA, 25 bp, Homo sapien
gctccagcggctgtgatcgtcccca

SEQ ID NO: 1613812 - DNA, 25 bp, Homo sapien
tccagcggctgtgatcgtccccagt

SEQ ID NO: 1613813 - DNA, 25 bp, Homo sapien
cagcggctgtgatcgtccccagtgt

SEQ ID NO: 1613814 - DNA, 25 bp, Homo sapien
cggctgtgatcgtccccagtgtgtc

SEQ ID NO: 1613815 - DNA, 25 bp, Homo sapien
cggaagcacttcttgagacggcagt

SEQ ID NO: 1613816 - DNA, 25 bp, Homo sapien
gtcgatctggcagtcacggttggac

SEQ ID NO: 1613817 - DNA, 25 bp, Homo sapien
ccggaagcacttcttgagacggcag

SEQ ID NO: 1613818 - DNA, 25 bp, Homo sapien
ggtcgatctggcagtcacggttgga

SEQ ID NO: 1613819 - DNA, 25 bp, Homo sapien
tgggcccctcatgcgaagaaggccg

SEQ ID NO: 1613820 - DNA, 25 bp, Homo sapien
ccagtggcgatttccggtgacccaa

SEQ ID NO: 1613821 - DNA, 25 bp, Homo sapien
agtcaattccggtggccctgccggc

SEQ ID NO: 1613822 - DNA, 25 bp, Homo sapien
gagagggacgtttcagtcaattccg

SEQ ID NO: 1613823 - DNA, 25 bp, Homo sapien
gttgcggcggatgcttcgcttgaaa

SEQ ID NO: 1613824 - DNA, 25 bp, Homo sapien
agacaccgtaatgcttgccgctcga

SEQ ID NO: 1613825 - DNA, 25 bp, Homo sapien
cctcgcaggtgaagacaccgtaatg

SEQ ID NO: 1613826 - DNA, 25 bp, Homo sapien
ttgtccacgccgttcgtgtcgccgc

SEQ ID NO: 1613827 - DNA, 25 bp, Homo sapien
ggccaactttcccacgcgtgcgcgg

SEQ ID NO: 1613828 - DNA, 25 bp, Homo sapien
gggctgcggccaactcagcgggccg

SEQ ID NO: 1613829 - DNA, 25 bp, Homo sapien
tttgcagcaacttcctgcggccggt

SEQ ID NO: 1613830 - DNA, 25 bp, Homo sapien
aaagtttggccgcaagttgcgcggc

SEQ ID NO: 1613831 - DNA, 25 bp, Homo sapien
ggtcggaaggtgactagccccagcc

SEQ ID NO: 1613832 - DNA, 25 bp, Homo sapien
gtcaggttgactggattcaagtcca

SEQ ID NO: 1613833 - DNA, 25 bp, Homo sapien
gcgctgacctcaggctgacgtggtc

SEQ ID NO: 1613834 - DNA, 25 bp, Homo sapien
caagtccagggacagcgtgtgggtc

SEQ ID NO: 1613835 - DNA, 25 bp, Homo sapien
tgccctgggagaggcggtgaacaca

SEQ ID NO: 1613836 - DNA, 25 bp, Homo sapien
gccctgggagaggcggtgaacacac

SEQ ID NO: 1613837 - DNA, 25 bp, Homo sapien
ctgccctgggagaggcggtgaacac

SEQ ID NO: 1613838 - DNA, 25 bp, Homo sapien
gacaggccagttggaacttcagctg

SEQ ID NO: 1613839 - DNA, 25 bp, Homo sapien
ggcacgatcttgttgttggcgcgat

SEQ ID NO: 1613840 - DNA, 25 bp, Homo sapien
agctgtggctatgcaacctcacgga

SEQ ID NO: 1613841 - DNA, 25 bp, Homo sapien
gaaatgcgtcagtcccagggacctg

SEQ ID NO: 1613842 - DNA, 25 bp, Homo sapien
caacatgccaaatcatgcaacatga

SEQ ID NO: 1613843 - DNA, 25 bp, Homo sapien
ggacagtttatgacatgccacagct

SEQ ID NO: 1613844 - DNA, 25 bp, Homo sapien
ctcacgccaaatgtgccccaacatg

SEQ ID NO: 1613845 - DNA, 25 bp, Homo sapien
caacatgacatgatgtcactccagg

SEQ ID NO: 1613846 - DNA, 25 bp, Homo sapien
gggcccttgcagtggcttcgagcac

SEQ ID NO: 1613847 - DNA, 25 bp, Homo sapien
tcctgcttccggtgggctcctcgga

SEQ ID NO: 1613848 - DNA, 25 bp, Homo sapien
tgagcctccatgagtgccatctgct

SEQ ID NO: 1613849 - DNA, 25 bp, Homo sapien
gctgctccaacttccggcgttgctc

SEQ ID NO: 1613850 - DNA, 25 bp, Homo sapien
ccaacttccggcgttgctcttcctg

SEQ ID NO: 1613851 - DNA, 25 bp, Homo sapien
gttccagctccctgcgcagagactg

SEQ ID NO: 1613852 - DNA, 25 bp, Homo sapien
tcagctcggcactctgagaccgtct

SEQ ID NO: 1613853 - DNA, 25 bp, Homo sapien
cataaatccctgttcagctcggcac

SEQ ID NO: 1613854 - DNA, 25 bp, Homo sapien
ggcactctgagaccgtctggctcgc

SEQ ID NO: 1613855 - DNA, 25 bp, Homo sapien
tggtgagcgatgctgccagttcctg

SEQ ID NO: 1613856 - DNA, 25 bp, Homo sapien
cagttcctgggctaacttctctggg

SEQ ID NO: 1613857 - DNA, 25 bp, Homo sapien
ctgggctaacttctctgggtcccag

SEQ ID NO: 1613858 - DNA, 25 bp, Homo sapien
tggccaccatcaatgccactggtgc

SEQ ID NO: 1613859 - DNA, 25 bp, Homo sapien
acctccgctgctatgtccgccactg

SEQ ID NO: 1613860 - DNA, 25 bp, Homo sapien
tccgctgctatgtccgccactgctg

SEQ ID NO: 1613861 - DNA, 25 bp, Homo sapien
tgccacctccgctgctatgtccgcc

SEQ ID NO: 1613862 - DNA, 25 bp, Homo sapien
tgctatgtccgccactgctgtttgc

SEQ ID NO: 1613863 - DNA, 25 bp, Homo sapien
cccgcagctctaggccccgcttctc

SEQ ID NO: 1613864 - DNA, 25 bp, Homo sapien
caccagctgcagccgaagcatcagg

SEQ ID NO: 1613865 - DNA, 25 bp, Homo sapien
gctgcagccgaagcatcaggtccgc

SEQ ID NO: 1613866 - DNA, 25 bp, Homo sapien
ggccccgcttctcacgccgcaccag

SEQ ID NO: 1613867 - DNA, 25 bp, Homo sapien
tctgagagaatcttcattagagaac

SEQ ID NO: 1613868 - DNA, 25 bp, Homo sapien
catagcttcggagctggaaagccac

SEQ ID NO: 1613869 - DNA, 25 bp, Homo sapien
ttcattagagaacggcgctcctgga

SEQ ID NO: 1613870 - DNA, 25 bp, Homo sapien
tcctggagacgctggacatagcttc

SEQ ID NO: 1613871 - DNA, 25 bp, Homo sapien
tggccacgatggaatctatgccatc

SEQ ID NO: 1613872 - DNA, 25 bp, Homo sapien
gcataggtgggttaagttcatgcca

SEQ ID NO: 1613873 - DNA, 25 bp, Homo sapien
cagaaaaggtgcctatgtcaacact

SEQ ID NO: 1613874 - DNA, 25 bp, Homo sapien
tcctggtagggtccatcaccttcca

SEQ ID NO: 1613875 - DNA, 25 bp, Homo sapien
tcatgggggcttcgtctcctgctcc

SEQ ID NO: 1613876 - DNA, 25 bp, Homo sapien
caagcagaaccctgtatgcctcttc

SEQ ID NO: 1613877 - DNA, 25 bp, Homo sapien
ttcagctgcttgcaggtcactcatg

SEQ ID NO: 1613878 - DNA, 25 bp, Homo sapien
ccttttcagctgcttgcaggtcact

SEQ ID NO: 1613879 - DNA, 25 bp, Homo sapien
ctgtgggacactggttctgagtgct

SEQ ID NO: 1613880 - DNA, 25 bp, Homo sapien
ggacactcagctcggctgggtgcaa

SEQ ID NO: 1613881 - DNA, 25 bp, Homo sapien
caggacactcagctcggctgggtgc

SEQ ID NO: 1613882 - DNA, 25 bp, Homo sapien
ggttctgagtgcttcaggacactca

SEQ ID NO: 1613883 - DNA, 25 bp, Homo sapien
tgtatccctgtagcacagctgatag

SEQ ID NO: 1613884 - DNA, 25 bp, Homo sapien
taaagcatttgagcttctcaatgct

SEQ ID NO: 1613885 - DNA, 25 bp, Homo sapien
cagctgatagcagacgattaaagca

SEQ ID NO: 1613886 - DNA, 25 bp, Homo sapien
ccagatgcaatgctgtggcctcagc

SEQ ID NO: 1613887 - DNA, 25 bp, Homo sapien
gcttccatgatgtgcatctcaggac

SEQ ID NO: 1613888 - DNA, 25 bp, Homo sapien
ttccatgatgtgcatctcaggactg

SEQ ID NO: 1613889 - DNA, 25 bp, Homo sapien
catgatgtgcatctcaggactgagg

SEQ ID NO: 1613890 - DNA, 25 bp, Homo sapien
ccatgatgtgcatctcaggactgag

SEQ ID NO: 1613891 - DNA, 25 bp, Homo sapien
cggaggcgccgaagcagggggtgag

SEQ ID NO: 1613892 - DNA, 25 bp, Homo sapien
ggaggcgccgaagcagggggtgagc

SEQ ID NO: 1613893 - DNA, 25 bp, Homo sapien
tctgggtgctggaatggctgcggag

SEQ ID NO: 1613894 - DNA, 25 bp, Homo sapien
aagagacccaaggatctgggtgctg

SEQ ID NO: 1613895 - DNA, 25 bp, Homo sapien
ggctccagcctcaagagggaatcct

SEQ ID NO: 1613896 - DNA, 25 bp, Homo sapien
ccagcctcaagagggaatcctgcag

SEQ ID NO: 1613897 - DNA, 25 bp, Homo sapien
cctgagccacctgcttggttgtggg

SEQ ID NO: 1613898 - DNA, 25 bp, Homo sapien
ctgagccacctgcttggttgtggga

SEQ ID NO: 1613899 - DNA, 25 bp, Homo sapien
ctgcgtgcggaccagctcatcctct

SEQ ID NO: 1613900 - DNA, 25 bp, Homo sapien
ggaccagctcatcctctcggctact

SEQ ID NO: 1613901 - DNA, 25 bp, Homo sapien
gggaggcctgcgtgcggaccagctc

SEQ ID NO: 1613902 - DNA, 25 bp, Homo sapien
agctcatcctctcggctactcaggg

SEQ ID NO: 1613903 - DNA, 25 bp, Homo sapien
ttcgaactccatcggcccagaatgg

SEQ ID NO: 1613904 - DNA, 25 bp, Homo sapien
actccatcggcccagaatggctggg

SEQ ID NO: 1613905 - DNA, 25 bp, Homo sapien
cttcgcttgtgccttcgaactccat

SEQ ID NO: 1613906 - DNA, 25 bp, Homo sapien
gagtgtgctggagggtctgaaacac

SEQ ID NO: 1613907 - DNA, 25 bp, Homo sapien
cacttgagtcactccatgctgggca

SEQ ID NO: 1613908 - DNA, 25 bp, Homo sapien
gtggacaccaactcaggcacttgag

SEQ ID NO: 1613909 - DNA, 25 bp, Homo sapien
gctaatgtggcctgtctcactaaaa

SEQ ID NO: 1613910 - DNA, 25 bp, Homo sapien
caaagatgcgtctggactggagtga

SEQ ID NO: 1613911 - DNA, 25 bp, Homo sapien
ctgcttcctaggccttggccactga

SEQ ID NO: 1613912 - DNA, 25 bp, Homo sapien
tgcttcctaggccttggccactgac

SEQ ID NO: 1613913 - DNA, 25 bp, Homo sapien
gcccggagctcaccggaggtggggc

SEQ ID NO: 1613914 - DNA, 25 bp, Homo sapien
cggagctcaccggaggtggggcaaa

SEQ ID NO: 1613915 - DNA, 25 bp, Homo sapien
cagcccggagctcaccggaggtggg

SEQ ID NO: 1613916 - DNA, 25 bp, Homo sapien
ccagcccggagctcaccggaggtgg

SEQ ID NO: 1613917 - DNA, 25 bp, Homo sapien
aactctcagccacgggatccagttc

SEQ ID NO: 1613918 - DNA, 25 bp, Homo sapien
tgaactctcagccacgggatccagt

SEQ ID NO: 1613919 - DNA, 25 bp, Homo sapien
tcctctgaactctcagccacgggat

SEQ ID NO: 1613920 - DNA, 25 bp, Homo sapien
tctgaactctcagccacgggatcca

SEQ ID NO: 1613921 - DNA, 25 bp, Homo sapien
gccaggcaggacaggaccttggggt

SEQ ID NO: 1613922 - DNA, 25 bp, Homo sapien
gcaggacaggaccttggggtcccca

SEQ ID NO: 1613923 - DNA, 25 bp, Homo sapien
cggggccctgctctgagccaggcag

SEQ ID NO: 1613924 - DNA, 25 bp, Homo sapien
tgcaaatgacccccggggccctgct

SEQ ID NO: 1613925 - DNA, 25 bp, Homo sapien
ctcgccggcttcggggccgcgtggc

SEQ ID NO: 1613926 - DNA, 25 bp, Homo sapien
tcgccggcttcggggccgcgtggcc

SEQ ID NO: 1613927 - DNA, 25 bp, Homo sapien
cctcgccggcttcggggccgcgtgg

SEQ ID NO: 1613928 - DNA, 25 bp, Homo sapien
tgctgtccagaagccagtgccctct

SEQ ID NO: 1613929 - DNA, 25 bp, Homo sapien
gaagccagtgccctctgaatgcttc

SEQ ID NO: 1613930 - DNA, 25 bp, Homo sapien
aagccagtgccctctgaatgcttct

SEQ ID NO: 1613931 - DNA, 25 bp, Homo sapien
gtccagaagccagtgccctctgaat

SEQ ID NO: 1613932 - DNA, 25 bp, Homo sapien
gatcctctgggggtaacttgatcag

SEQ ID NO: 1613933 - DNA, 25 bp, Homo sapien
ctgagtcccgggacactctgttggg

SEQ ID NO: 1613934 - DNA, 25 bp, Homo sapien
cctgagtcccgggacactctgttgg

SEQ ID NO: 1613935 - DNA, 25 bp, Homo sapien
ctgggggtaacttgatcagaggcct

SEQ ID NO: 1613936 - DNA, 25 bp, Homo sapien
cttcctagtgagtcggcggctgatt

SEQ ID NO: 1613937 - DNA, 25 bp, Homo sapien
agtttcagcctatcagtttccaagt

SEQ ID NO: 1613938 - DNA, 25 bp, Homo sapien
tactttgctccagtgtagccaatca

SEQ ID NO: 1613939 - DNA, 25 bp, Homo sapien
aacttccggctgtaaagatggcggc

SEQ ID NO: 1613940 - DNA, 25 bp, Homo sapien
tgctgatgatgggagcctcaacact

SEQ ID NO: 1613941 - DNA, 25 bp, Homo sapien
tgaggtccaaattcggacaccaagg

SEQ ID NO: 1613942 - DNA, 25 bp, Homo sapien
gaagaggagcactcggcagagcctc

SEQ ID NO: 1613943 - DNA, 25 bp, Homo sapien
gacaccaagggtcaactgtccagag

SEQ ID NO: 1613944 - DNA, 25 bp, Homo sapien
tgcctggacctgtcagaggaaatgt

SEQ ID NO: 1613945 - DNA, 25 bp, Homo sapien
tggacctgtcagaggaaatgtcact

SEQ ID NO: 1613946 - DNA, 25 bp, Homo sapien
tatctgcctggacctgtcagaggaa

SEQ ID NO: 1613947 - DNA, 25 bp, Homo sapien
attatctgcctggacctgtcagagg

SEQ ID NO: 1613948 - DNA, 25 bp, Homo sapien
tgcctctatgatctggagacggcct

SEQ ID NO: 1613949 - DNA, 25 bp, Homo sapien
tagctgcctctatgatctggagacg

SEQ ID NO: 1613950 - DNA, 25 bp, Homo sapien
cctctatgatctggagacggcctcc

SEQ ID NO: 1613951 - DNA, 25 bp, Homo sapien
tctgtagctgcctctatgatctgga

SEQ ID NO: 1613952 - DNA, 25 bp, Homo sapien
tatgaacagggaattgagaccagct

SEQ ID NO: 1613953 - DNA, 25 bp, Homo sapien
catcccagacctgaattagctgtgg

SEQ ID NO: 1613954 - DNA, 25 bp, Homo sapien
tcgctagagctcgaaaggtggagat

SEQ ID NO: 1613955 - DNA, 25 bp, Homo sapien
ttagctgtgggacctcgagtggact

SEQ ID NO: 1613956 - DNA, 25 bp, Homo sapien
ccctccagggatatgaagggcctgt

SEQ ID NO: 1613957 - DNA, 25 bp, Homo sapien
ccattgaggttgaggccactgtctg

SEQ ID NO: 1613958 - DNA, 25 bp, Homo sapien
gataccaagggtaccagctacaagt

SEQ ID NO: 1613959 - DNA, 25 bp, Homo sapien
aactgcatggcgaaactgttggccc

SEQ ID NO: 1613960 - DNA, 25 bp, Homo sapien
gtcatcttccgtgagggtcccggct

SEQ ID NO: 1613961 - DNA, 25 bp, Homo sapien
aaaatagctcccagcgccgaggaat

SEQ ID NO: 1613962 - DNA, 25 bp, Homo sapien
tacaagttgagatgtgcaggttcgg

SEQ ID NO: 1613963 - DNA, 25 bp, Homo sapien
gatcaagcacggctgacacggaaga

SEQ ID NO: 1613964 - DNA, 25 bp, Homo sapien
cttgtcttctggaggcgccggcagt

SEQ ID NO: 1613965 - DNA, 25 bp, Homo sapien
cggcagtggctccggtagagccttg

SEQ ID NO: 1613966 - DNA, 25 bp, Homo sapien
tcttgtcttctggaggcgccggcag

SEQ ID NO: 1613967 - DNA, 25 bp, Homo sapien
agagccttgggcgagggctcgggct

SEQ ID NO: 1613968 - DNA, 25 bp, Homo sapien
ccagagcaggaattcgtggagcagc

SEQ ID NO: 1613969 - DNA, 25 bp, Homo sapien
tcgtggagcagcgtgttgaccgtct

SEQ ID NO: 1613970 - DNA, 25 bp, Homo sapien
gctgccctcgtcgatgagcttcagg

SEQ ID NO: 1613971 - DNA, 25 bp, Homo sapien
ttccagcatcaccatgtggctgccc

SEQ ID NO: 1613972 - DNA, 25 bp, Homo sapien
caaacttatcgtgcatgccgtggac

SEQ ID NO: 1613973 - DNA, 25 bp, Homo sapien
tgagctcggcgtggtagacctcgtc

SEQ ID NO: 1613974 - DNA, 25 bp, Homo sapien
catcatggcccggagtacgaaggat

SEQ ID NO: 1613975 - DNA, 25 bp, Homo sapien
gaaagcgttgccctcctttaacagc

SEQ ID NO: 1613976 - DNA, 25 bp, Homo sapien
tcatgtgccaggaatgtgcagaaag

SEQ ID NO: 1613977 - DNA, 25 bp, Homo sapien
actaggtctgggtactcatgtgcca

SEQ ID NO: 1613978 - DNA, 25 bp, Homo sapien
gatcatgatcaccttgtgcactagg

SEQ ID NO: 1613979 - DNA, 25 bp, Homo sapien
gattgagcagaagctgggctccagc

SEQ ID NO: 1613980 - DNA, 25 bp, Homo sapien
tgcggtggcgtaatcatagctccct

SEQ ID NO: 1613981 - DNA, 25 bp, Homo sapien
tggagtggtgcggtggcgtaatcat

SEQ ID NO: 1613982 - DNA, 25 bp, Homo sapien
ggtgcggtggcgtaatcatagctcc

SEQ ID NO: 1613983 - DNA, 25 bp, Homo sapien
acaaggtttcgctgtcgcctaggct

SEQ ID NO: 1613984 - DNA, 25 bp, Homo sapien
gtaagaattactcatcagcaagtgg

SEQ ID NO: 1613985 - DNA, 25 bp, Homo sapien
gattaaacaaatgcttccggctgcc

SEQ ID NO: 1613986 - DNA, 25 bp, Homo sapien
gccaccatgacccaaaagcggtaag

SEQ ID NO: 1613987 - DNA, 25 bp, Homo sapien
tgcctctgggcatgacatatctgtc

SEQ ID NO: 1613988 - DNA, 25 bp, Homo sapien
tcttgaactcctcagctatagcagt

SEQ ID NO: 1613989 - DNA, 25 bp, Homo sapien
gtcttgaactcctcagctatagcag

SEQ ID NO: 1613990 - DNA, 25 bp, Homo sapien
gaactcctcagctatagcagtcctc

SEQ ID NO: 1613991 - DNA, 25 bp, Homo sapien
ttgaactcctcagctatagcagtcc

SEQ ID NO: 1613992 - DNA, 25 bp, Homo sapien
tgcctggctgttcaatcttgccttt

SEQ ID NO: 1613993 - DNA, 25 bp, Homo sapien
aacagtggtgctcaacttgcctggc

SEQ ID NO: 1613994 - DNA, 25 bp, Homo sapien
gccttccatggaggggttcttggta

SEQ ID NO: 1613995 - DNA, 25 bp, Homo sapien
tgaggccacttggtagtggtcaagc

SEQ ID NO: 1613996 - DNA, 25 bp, Homo sapien
catagaaggtgtaggctgcggccac

SEQ ID NO: 1613997 - DNA, 25 bp, Homo sapien
gaaccgccgacaccatggatgaaaa

SEQ ID NO: 1613998 - DNA, 25 bp, Homo sapien
tagcctaggcgcacaaagaagtcca

SEQ ID NO: 1613999 - DNA, 25 bp, Homo sapien
gaagattgctcgcatgtcctcagcc

SEQ ID NO: 1614000 - DNA, 25 bp, Homo sapien
ttctcacagtcaatatggatggtcc

SEQ ID NO: 1614001 - DNA, 25 bp, Homo sapien
tctcacagtcaatatggatggtcct

SEQ ID NO: 1614002 - DNA, 25 bp, Homo sapien
cttctcacagtcaatatggatggtc

SEQ ID NO: 1614003 - DNA, 25 bp, Homo sapien
gcggccatcgctgcccgccggatct

SEQ ID NO: 1614004 - DNA, 25 bp, Homo sapien
gggccaagcggccatcgctgcccgc

SEQ ID NO: 1614005 - DNA, 25 bp, Homo sapien
tgccgggggccaagcggccatcgct

SEQ ID NO: 1614006 - DNA, 25 bp, Homo sapien
gctgccgggggccaagcggccatcg

SEQ ID NO: 1614007 - DNA, 25 bp, Homo sapien
cattgcggtacacggtgatccggcg

SEQ ID NO: 1614008 - DNA, 25 bp, Homo sapien
ttctgcccgtgtaggaggtcggctc

SEQ ID NO: 1614009 - DNA, 25 bp, Homo sapien
agcaaccgcccattgcggtacacgg

SEQ ID NO: 1614010 - DNA, 25 bp, Homo sapien
cccagagccattctgcccgtgtagg

SEQ ID NO: 1614011 - DNA, 25 bp, Homo sapien
cccctgggctgcatccgaggatgcg

SEQ ID NO: 1614012 - DNA, 25 bp, Homo sapien
ctgacagcggaccaagccggagagg

SEQ ID NO: 1614013 - DNA, 25 bp, Homo sapien
acagcggaccaagccggagaggtcc

SEQ ID NO: 1614014 - DNA, 25 bp, Homo sapien
cctgggctgcatccgaggatgcgga

SEQ ID NO: 1614015 - DNA, 25 bp, Homo sapien
cgctggactcgacgctctccagtgg

SEQ ID NO: 1614016 - DNA, 25 bp, Homo sapien
aaaggtgtagccatcgctggactcg

SEQ ID NO: 1614017 - DNA, 25 bp, Homo sapien
acgcggccgggcttgacctctacaa

SEQ ID NO: 1614018 - DNA, 25 bp, Homo sapien
cagaagataccgtcggtcaccccgg

SEQ ID NO: 1614019 - DNA, 25 bp, Homo sapien
ggtggcgtcttgtgtggggatgttc

SEQ ID NO: 1614020 - DNA, 25 bp, Homo sapien
ggaaggtggtggcgtcttgtgtggg

SEQ ID NO: 1614021 - DNA, 25 bp, Homo sapien
gtggtggcgtcttgtgtggggatgt

SEQ ID NO: 1614022 - DNA, 25 bp, Homo sapien
aaggtggtggcgtcttgtgtgggga

SEQ ID NO: 1614023 - DNA, 25 bp, Homo sapien
taatcccggattgtggagggcaacg

SEQ ID NO: 1614024 - DNA, 25 bp, Homo sapien
tcccggattgtggagggcaacgcac

SEQ ID NO: 1614025 - DNA, 25 bp, Homo sapien
tggggccctaatcccggattgtgga

SEQ ID NO: 1614026 - DNA, 25 bp, Homo sapien
gccctaatcccggattgtggagggc

SEQ ID NO: 1614027 - DNA, 25 bp, Homo sapien
cccccgccttccaggtgttcgtcat

SEQ ID NO: 1614028 - DNA, 25 bp, Homo sapien
gcccccgccttccaggtgttcgtca

SEQ ID NO: 1614029 - DNA, 25 bp, Homo sapien
gtcaggccgggtgcgtctacgcggg

SEQ ID NO: 1614030 - DNA, 25 bp, Homo sapien
agaagccagcgtccgcctgctggcg

SEQ ID NO: 1614031 - DNA, 25 bp, Homo sapien
gcacctgcccctggcggtcagcgca

SEQ ID NO: 1614032 - DNA, 25 bp, Homo sapien
cctgctggcgccgtttacatggtgg

SEQ ID NO: 1614033 - DNA, 25 bp, Homo sapien
gacaattacaaagcttatcacatcc

SEQ ID NO: 1614034 - DNA, 25 bp, Homo sapien
agaatgtatctctccaagatgagag

SEQ ID NO: 1614035 - DNA, 25 bp, Homo sapien
tctctccaagatgagagctcattaa

SEQ ID NO: 1614036 - DNA, 25 bp, Homo sapien
ttacaaagcttatcacatccaaaag

SEQ ID NO: 1614037 - DNA, 25 bp, Homo sapien
cttcccgagagggaccagcagagga

SEQ ID NO: 1614038 - DNA, 25 bp, Homo sapien
tccagtgccctggtgcctgctaggg

SEQ ID NO: 1614039 - DNA, 25 bp, Homo sapien
gggcagtaggtcatccagatgtgac

SEQ ID NO: 1614040 - DNA, 25 bp, Homo sapien
caggtttgagggactttgaacaggt

SEQ ID NO: 1614041 - DNA, 25 bp, Homo sapien
accaggacagccgagtggccttctc

SEQ ID NO: 1614042 - DNA, 25 bp, Homo sapien
cagacccagtagtgtgatgttggta

SEQ ID NO: 1614043 - DNA, 25 bp, Homo sapien
aacaccggtccaggccattgagact

SEQ ID NO: 1614044 - DNA, 25 bp, Homo sapien
gaagtcggcccttgggatctttctc

SEQ ID NO: 1614045 - DNA, 25 bp, Homo sapien
ccggccgcccctgtgaatgactgat

SEQ ID NO: 1614046 - DNA, 25 bp, Homo sapien
gaggctgtaaaagctggcgtctccc

SEQ ID NO: 1614047 - DNA, 25 bp, Homo sapien
cgggtagagctaatgccagccgctg

SEQ ID NO: 1614048 - DNA, 25 bp, Homo sapien
gatattgcatatgagaagagaaggc

SEQ ID NO: 1614049 - DNA, 25 bp, Homo sapien
gctcagcccgggtgccaccaaaggg

SEQ ID NO: 1614050 - DNA, 25 bp, Homo sapien
ctcagagtcccgccgggtctcgggt

SEQ ID NO: 1614051 - DNA, 25 bp, Homo sapien
tcgggtgacttgaggaacttgaagc

SEQ ID NO: 1614052 - DNA, 25 bp, Homo sapien
ctttgggcggtgagtggctgcgctc

SEQ ID NO: 1614053 - DNA, 25 bp, Homo sapien
gatgatctgcttcaacttcatgacg

SEQ ID NO: 1614054 - DNA, 25 bp, Homo sapien
tggtgctctgcatggcgctgtcgct

SEQ ID NO: 1614055 - DNA, 25 bp, Homo sapien
ttcatgacgttgttgggtgccagca

SEQ ID NO: 1614056 - DNA, 25 bp, Homo sapien
cttgggccgttcaggcccgtggcca

SEQ ID NO: 1614057 - DNA, 25 bp, Homo sapien
gaagaaagggtgttagcgggtgcca

SEQ ID NO: 1614058 - DNA, 25 bp, Homo sapien
tgcaggtagagccaagccgttacag

SEQ ID NO: 1614059 - DNA, 25 bp, Homo sapien
gagccaagccgttacaggactaaga

SEQ ID NO: 1614060 - DNA, 25 bp, Homo sapien
gaaagggtgttagcgggtgccagct

SEQ ID NO: 1614061 - DNA, 25 bp, Homo sapien
ctttctgaggaatgcggaagaagct

SEQ ID NO: 1614062 - DNA, 25 bp, Homo sapien
caaaggacattgtcatcctcgagga

SEQ ID NO: 1614063 - DNA, 25 bp, Homo sapien
tatcacctgtagctaaaggctgcag

SEQ ID NO: 1614064 - DNA, 25 bp, Homo sapien
ttctaggaagcctccgctgtgtccc

SEQ ID NO: 1614065 - DNA, 25 bp, Homo sapien
tcgcggcgctggtactccagcttgg

SEQ ID NO: 1614066 - DNA, 25 bp, Homo sapien
tgaggtacttgaggagcagagcgaa

SEQ ID NO: 1614067 - DNA, 25 bp, Homo sapien
atggccacgtggatgaggtacttga

SEQ ID NO: 1614068 - DNA, 25 bp, Homo sapien
cacccagcccgggatatcggggatg

SEQ ID NO: 1614069 - DNA, 25 bp, Homo sapien
tgcaggggtggcagagaggaggctg

SEQ ID NO: 1614070 - DNA, 25 bp, Homo sapien
caggggtggcagagaggaggctgca

SEQ ID NO: 1614071 - DNA, 25 bp, Homo sapien
ctgcaggggtggcagagaggaggct

SEQ ID NO: 1614072 - DNA, 25 bp, Homo sapien
ggggtggcagagaggaggctgcagg

SEQ ID NO: 1614073 - DNA, 25 bp, Homo sapien
gcagttgaccacaatcgctaggaca

SEQ ID NO: 1614074 - DNA, 25 bp, Homo sapien
agcactaccaccgacacgatggctg

SEQ ID NO: 1614075 - DNA, 25 bp, Homo sapien
cccgcactggccgattaagtagcag

SEQ ID NO: 1614076 - DNA, 25 bp, Homo sapien
acaatcgctaggacacccatggcct

SEQ ID NO: 1614077 - DNA, 25 bp, Homo sapien
tctcctggtagtcctggaacgtgtc

SEQ ID NO: 1614078 - DNA, 25 bp, Homo sapien
gaactgcacgaacatctcctggtag

SEQ ID NO: 1614079 - DNA, 25 bp, Homo sapien
gcgtcgctgcggatctcaatgaggt

SEQ ID NO: 1614080 - DNA, 25 bp, Homo sapien
gaagagcacaacgtagccgaactgc

SEQ ID NO: 1614081 - DNA, 25 bp, Homo sapien
tacgggtcgaatcgctgttggagcc

SEQ ID NO: 1614082 - DNA, 25 bp, Homo sapien
ggttctgccgtctctgcctacgggt

SEQ ID NO: 1614083 - DNA, 25 bp, Homo sapien
tccggcgggtcaatccaagacgacc

SEQ ID NO: 1614084 - DNA, 25 bp, Homo sapien
tacttcttcatacagctctccagct

SEQ ID NO: 1614085 - DNA, 25 bp, Homo sapien
cggccagggtgaacactcccggctc

SEQ ID NO: 1614086 - DNA, 25 bp, Homo sapien
agggtgaacactcccggctccagcc

SEQ ID NO: 1614087 - DNA, 25 bp, Homo sapien
gccagggtgaacactcccggctcca

SEQ ID NO: 1614088 - DNA, 25 bp, Homo sapien
ttctccaccatagtggggctccctt

SEQ ID NO: 1614089 - DNA, 25 bp, Homo sapien
cgctcagcgaagctgaccttcttca

SEQ ID NO: 1614090 - DNA, 25 bp, Homo sapien
agcgaagctgaccttcttcagccgg

SEQ ID NO: 1614091 - DNA, 25 bp, Homo sapien
gcgccgcgctcagcgaagctgacct

SEQ ID NO: 1614092 - DNA, 25 bp, Homo sapien
ttcagccggagcccgcagtccagga

SEQ ID NO: 1614093 - DNA, 25 bp, Homo sapien
tggggttcgaggcggcggggcgcag

SEQ ID NO: 1614094 - DNA, 25 bp, Homo sapien
ctggggttcgaggcggcggggcgca

SEQ ID NO: 1614095 - DNA, 25 bp, Homo sapien
gcccgcaggcccagctcgccgcggc

SEQ ID NO: 1614096 - DNA, 25 bp, Homo sapien
gcaggcccagctcgccgcggcccag

SEQ ID NO: 1614097 - DNA, 25 bp, Homo sapien
aggcccagctcgccgcggcccaggc

SEQ ID NO: 1614098 - DNA, 25 bp, Homo sapien
cgcaggcccagctcgccgcggccca

SEQ ID NO: 1614099 - DNA, 25 bp, Homo sapien
gaactggcgggtgatcagcagcgtg

SEQ ID NO: 1614100 - DNA, 25 bp, Homo sapien
gacacacgccgaatccggttcctaa

SEQ ID NO: 1614101 - DNA, 25 bp, Homo sapien
tttggacgcgcctcgacgcgaggcc

SEQ ID NO: 1614102 - DNA, 25 bp, Homo sapien
caccgcgggctctgtcggtgcactg

SEQ ID NO: 1614103 - DNA, 25 bp, Homo sapien
taactccgctgctttggacgcgcct

SEQ ID NO: 1614104 - DNA, 25 bp, Homo sapien
tttggcccgggccgcgagcaggagg

SEQ ID NO: 1614105 - DNA, 25 bp, Homo sapien
cgagcgggaccagcaccgcctgcag

SEQ ID NO: 1614106 - DNA, 25 bp, Homo sapien
aggagcaggcggaaccgcagggccg

SEQ ID NO: 1614107 - DNA, 25 bp, Homo sapien
aggcggaaccgcagggccgcgagcg

SEQ ID NO: 1614108 - DNA, 25 bp, Homo sapien
gggacagggacaggacgagcaggag

SEQ ID NO: 1614109 - DNA, 25 bp, Homo sapien
tgggacagggacaggacgagcagga

SEQ ID NO: 1614110 - DNA, 25 bp, Homo sapien
ctgggacagggacaggacgagcagg

SEQ ID NO: 1614111 - DNA, 25 bp, Homo sapien
tagaagaggctcaggtacgagttga

SEQ ID NO: 1614112 - DNA, 25 bp, Homo sapien
tctttcaagcgctccatgtccttga

SEQ ID NO: 1614113 - DNA, 25 bp, Homo sapien
ccttgaggtagaaaccgatgtagaa

SEQ ID NO: 1614114 - DNA, 25 bp, Homo sapien
ctcaggtacgagttgacaaactgga

SEQ ID NO: 1614115 - DNA, 25 bp, Homo sapien
tctcataggcgctctccagccggta

SEQ ID NO: 1614116 - DNA, 25 bp, Homo sapien
ggacaactttgatgatgaggtgctt

SEQ ID NO: 1614117 - DNA, 25 bp, Homo sapien
caactttgatgatgaggtgcttctc

SEQ ID NO: 1614118 - DNA, 25 bp, Homo sapien
atgaggtgcttctcataggcgctct

SEQ ID NO: 1614119 - DNA, 25 bp, Homo sapien
tggctagcttcttgtagccctcggc

SEQ ID NO: 1614120 - DNA, 25 bp, Homo sapien
tcggcactcacactgacaagcaggg

SEQ ID NO: 1614121 - DNA, 25 bp, Homo sapien
tgtcattgagccagatggctagctt

SEQ ID NO: 1614122 - DNA, 25 bp, Homo sapien
accttaggcaggaatcgggcgagac

SEQ ID NO: 1614123 - DNA, 25 bp, Homo sapien
agacacagacgaggcacgccaggca

SEQ ID NO: 1614124 - DNA, 25 bp, Homo sapien
acagacgaggcacgccaggcacagg

SEQ ID NO: 1614125 - DNA, 25 bp, Homo sapien
gctggaagcagccaagcatgagcaa

SEQ ID NO: 1614126 - DNA, 25 bp, Homo sapien
ctggaagcagccaagcatgagcaag

SEQ ID NO: 1614127 - DNA, 25 bp, Homo sapien
cgcttccagggcgggtagtagaact

SEQ ID NO: 1614128 - DNA, 25 bp, Homo sapien
aagcagctggaagagcagccgcttc

SEQ ID NO: 1614129 - DNA, 25 bp, Homo sapien
gcttccagggcgggtagtagaactc

SEQ ID NO: 1614130 - DNA, 25 bp, Homo sapien
cagctggaagagcagccgcttccag

SEQ ID NO: 1614131 - DNA, 25 bp, Homo sapien
cgcgtgatggggctgatacgtcgca

SEQ ID NO: 1614132 - DNA, 25 bp, Homo sapien
tgatggggctgatacgtcgcacgcc

SEQ ID NO: 1614133 - DNA, 25 bp, Homo sapien
cgtgatggggctgatacgtcgcacg

SEQ ID NO: 1614134 - DNA, 25 bp, Homo sapien
tcggcccgcgtgatggggctgatac

SEQ ID NO: 1614135 - DNA, 25 bp, Homo sapien
ttccattcctctaggaacagcgtcg

SEQ ID NO: 1614136 - DNA, 25 bp, Homo sapien
tcgaccagatcacgttgaagagggc

SEQ ID NO: 1614137 - DNA, 25 bp, Homo sapien
ccacgcaggaaacatcccggcttgt

SEQ ID NO: 1614138 - DNA, 25 bp, Homo sapien
tcacgttgaagagggcaaagaccac

SEQ ID NO: 1614139 - DNA, 25 bp, Homo sapien
taccatagccgacgtgtagaagccc

SEQ ID NO: 1614140 - DNA, 25 bp, Homo sapien
gaatgtgtacaggacagacccgaag

SEQ ID NO: 1614141 - DNA, 25 bp, Homo sapien
ccaggcgaagtacatggcaattttc

SEQ ID NO: 1614142 - DNA, 25 bp, Homo sapien
ccgaagacagctgggtataccatag

SEQ ID NO: 1614143 - DNA, 25 bp, Homo sapien
tgctcgtggacagggaacacctgct

SEQ ID NO: 1614144 - DNA, 25 bp, Homo sapien
ttcatgaggcggttcagaatacgct

SEQ ID NO: 1614145 - DNA, 25 bp, Homo sapien
gctggatgatcccacgtgctgccag

SEQ ID NO: 1614146 - DNA, 25 bp, Homo sapien
ggctggttttcacacacggcctgca

SEQ ID NO: 1614147 - DNA, 25 bp, Homo sapien
accgcaaccttcaagcgattatcgt

SEQ ID NO: 1614148 - DNA, 25 bp, Homo sapien
ccgcaaccttcaagcgattatcgtg

SEQ ID NO: 1614149 - DNA, 25 bp, Homo sapien
caccgcaaccttcaagcgattatcg

SEQ ID NO: 1614150 - DNA, 25 bp, Homo sapien
cgcaaccttcaagcgattatcgtgc

SEQ ID NO: 1614151 - DNA, 25 bp, Homo sapien
ggctcaagtgatgctaccgcctgga

SEQ ID NO: 1614152 - DNA, 25 bp, Homo sapien
caagtgatgctaccgcctggacctc

SEQ ID NO: 1614153 - DNA, 25 bp, Homo sapien
gacagaatgcagtggcgctaccatg

SEQ ID NO: 1614154 - DNA, 25 bp, Homo sapien
gctcaagtgatgctaccgcctggac

SEQ ID NO: 1614155 - DNA, 25 bp, Homo sapien
ctgcagccagaagcggatgatgctc

SEQ ID NO: 1614156 - DNA, 25 bp, Homo sapien
ccctgcttggcacgcaaattctgca

SEQ ID NO: 1614157 - DNA, 25 bp, Homo sapien
cagaagcggatgatgctctggcgtt

SEQ ID NO: 1614158 - DNA, 25 bp, Homo sapien
gaagcgcacgttgtggagtgcttct

SEQ ID NO: 1614159 - DNA, 25 bp, Homo sapien
aagtcctcctcgcaggagaagccgc

SEQ ID NO: 1614160 - DNA, 25 bp, Homo sapien
tgctttgcgcagacccagctcgtcg

SEQ ID NO: 1614161 - DNA, 25 bp, Homo sapien
gaagaagcgtagctcgctctccaca

SEQ ID NO: 1614162 - DNA, 25 bp, Homo sapien
aaactcggccttcactgctttgcgc

SEQ ID NO: 1614163 - DNA, 25 bp, Homo sapien
cggacttgcacgatgagctcgggaa

SEQ ID NO: 1614164 - DNA, 25 bp, Homo sapien
tggcggtgacaaagaaggcgtaggc

SEQ ID NO: 1614165 - DNA, 25 bp, Homo sapien
catagcagcgtgtggtcatcggtcg

SEQ ID NO: 1614166 - DNA, 25 bp, Homo sapien
ccacgcggatgtggttcagcagcca

SEQ ID NO: 1614167 - DNA, 25 bp, Homo sapien
acaccaggtagcgaccagcctgcag

SEQ ID NO: 1614168 - DNA, 25 bp, Homo sapien
ggaaggtcatcagcacgtcgcagtt

SEQ ID NO: 1614169 - DNA, 25 bp, Homo sapien
tccacgccttgtgggacaccaggta

SEQ ID NO: 1614170 - DNA, 25 bp, Homo sapien
cagttctctgtaggcaccgtcttca

SEQ ID NO: 1614171 - DNA, 25 bp, Homo sapien
ggagccgcgggctcatggggccggt

SEQ ID NO: 1614172 - DNA, 25 bp, Homo sapien
tccggcgggggcctcttgccacgct

SEQ ID NO: 1614173 - DNA, 25 bp, Homo sapien
acgctcgccctccagggacgtgccc

SEQ ID NO: 1614174 - DNA, 25 bp, Homo sapien
tcaggtcaggggctacggacggccc

SEQ ID NO: 1614175 - DNA, 25 bp, Homo sapien
cccggccagtgatttagttctgatt

SEQ ID NO: 1614176 - DNA, 25 bp, Homo sapien
tttagttctgattaagtcctgcccc

SEQ ID NO: 1614177 - DNA, 25 bp, Homo sapien
tgcggtctatcccatcccctgtgct

SEQ ID NO: 1614178 - DNA, 25 bp, Homo sapien
ggacatgtttctcatccctaagccc

SEQ ID NO: 1614179 - DNA, 25 bp, Homo sapien
ggcaacttaaagtgggctgcctggc

SEQ ID NO: 1614180 - DNA, 25 bp, Homo sapien
gcctggcctgatggcttctttgaag

SEQ ID NO: 1614181 - DNA, 25 bp, Homo sapien
ggcactgaatatgcaaatcccttca

SEQ ID NO: 1614182 - DNA, 25 bp, Homo sapien
ctcataaagaggagaagtgacctag

SEQ ID NO: 1614183 - DNA, 25 bp, Homo sapien
tgcaagtgtacaggggctgagccag

SEQ ID NO: 1614184 - DNA, 25 bp, Homo sapien
caggtcactgggatcggttagaggg

SEQ ID NO: 1614185 - DNA, 25 bp, Homo sapien
gggatcggttagagggatgatggct

SEQ ID NO: 1614186 - DNA, 25 bp, Homo sapien
gctgaggtgcaagtgtacaggggct

SEQ ID NO: 1614187 - DNA, 25 bp, Homo sapien
agtggctcccctcccgacaacaggt

SEQ ID NO: 1614188 - DNA, 25 bp, Homo sapien
accaacatttcaacgggccacaggc

SEQ ID NO: 1614189 - DNA, 25 bp, Homo sapien
tcaaggagcggaggtgaatggcttc

SEQ ID NO: 1614190 - DNA, 25 bp, Homo sapien
cactcacgctcaaggagcggaggtg

SEQ ID NO: 1614191 - DNA, 25 bp, Homo sapien
ggtccaggcactgggggtgaggaag

SEQ ID NO: 1614192 - DNA, 25 bp, Homo sapien
ccaggcactgggggtgaggaagtgg

SEQ ID NO: 1614193 - DNA, 25 bp, Homo sapien
tccgggtccaggcactgggggtgag

SEQ ID NO: 1614194 - DNA, 25 bp, Homo sapien
ctccgggtccaggcactgggggtga

SEQ ID NO: 1614195 - DNA, 25 bp, Homo sapien
tgcgggaggggatgggatcctgtgg

SEQ ID NO: 1614196 - DNA, 25 bp, Homo sapien
gctgtgcgggaggggatgggatcct

SEQ ID NO: 1614197 - DNA, 25 bp, Homo sapien
gcccagggctgtgcgggaggggatg

SEQ ID NO: 1614198 - DNA, 25 bp, Homo sapien
tgtgcgggaggggatgggatcctgt

SEQ ID NO: 1614199 - DNA, 25 bp, Homo sapien
ccatgtctgtgtgcgacgtgctgca

SEQ ID NO: 1614200 - DNA, 25 bp, Homo sapien
cacggtgatatgtgacgtcagcgcc

SEQ ID NO: 1614201 - DNA, 25 bp, Homo sapien
tgtgtgatgccatcgccgcgtctgt

SEQ ID NO: 1614202 - DNA, 25 bp, Homo sapien
catctcggtgtgacgtcatgccaag

SEQ ID NO: 1614203 - DNA, 25 bp, Homo sapien
ctgggtgagggatcgtgaggcgcgg

SEQ ID NO: 1614204 - DNA, 25 bp, Homo sapien
tgcatgcagggagttgtctgatggt

SEQ ID NO: 1614205 - DNA, 25 bp, Homo sapien
tgtgtcgggcgctgtgagcatatcc

SEQ ID NO: 1614206 - DNA, 25 bp, Homo sapien
cgcgggtgcgggtgtgagagggtac

SEQ ID NO: 1614207 - DNA, 25 bp, Homo sapien
tgtgttgaacctccccaggatggtg

SEQ ID NO: 1614208 - DNA, 25 bp, Homo sapien
gatggtaacacaacagagtgtcaga

SEQ ID NO: 1614209 - DNA, 25 bp, Homo sapien
gactgagattcagagtggccacact

SEQ ID NO: 1614210 - DNA, 25 bp, Homo sapien
gtgagactgaggtgtgttcttcccc

SEQ ID NO: 1614211 - DNA, 25 bp, Homo sapien
aagctggcgcacacatcaccaacag

SEQ ID NO: 1614212 - DNA, 25 bp, Homo sapien
gacactcagtctcatcaagtaaagg

SEQ ID NO: 1614213 - DNA, 25 bp, Homo sapien
caagtaaaggaaagctggcgcacac

SEQ ID NO: 1614214 - DNA, 25 bp, Homo sapien
caggaagggacactcagtctcatca

SEQ ID NO: 1614215 - DNA, 25 bp, Homo sapien
ccctgcgtcggccatcgatttggga

SEQ ID NO: 1614216 - DNA, 25 bp, Homo sapien
tcggccatcgatttgggaacacggg

SEQ ID NO: 1614217 - DNA, 25 bp, Homo sapien
atcgatttgggaacacgggagatgc

SEQ ID NO: 1614218 - DNA, 25 bp, Homo sapien
tggggccctgcgtcggccatcgatt

SEQ ID NO: 1614219 - DNA, 25 bp, Homo sapien
ctgagattttatcaaggcttagaag

SEQ ID NO: 1614220 - DNA, 25 bp, Homo sapien
gaagccgttagagcaagttaatacc

SEQ ID NO: 1614221 - DNA, 25 bp, Homo sapien
ctctcttagagacgaggacttgcta

SEQ ID NO: 1614222 - DNA, 25 bp, Homo sapien
ctttgtcccactaaactgagatttt

SEQ ID NO: 1614223 - DNA, 25 bp, Homo sapien
agtcaccatccctgtgacgcacagg

SEQ ID NO: 1614224 - DNA, 25 bp, Homo sapien
gagagcacaggctattcttggggcg

SEQ ID NO: 1614225 - DNA, 25 bp, Homo sapien
cacaggctattcttggggcggtggc

SEQ ID NO: 1614226 - DNA, 25 bp, Homo sapien
gggcggtggcctgagtcaccatccc

SEQ ID NO: 1614227 - DNA, 25 bp, Homo sapien
ggctacagggatgcctgcagggggc

SEQ ID NO: 1614228 - DNA, 25 bp, Homo sapien
ggatggggctacagggatgcctgca

SEQ ID NO: 1614229 - DNA, 25 bp, Homo sapien
tcttgaactcctccaggctagctgg

SEQ ID NO: 1614230 - DNA, 25 bp, Homo sapien
gggcctctgggactccaggatcttc

SEQ ID NO: 1614231 - DNA, 25 bp, Homo sapien
ttgacactggcatcatcggctgcga

SEQ ID NO: 1614232 - DNA, 25 bp, Homo sapien
cccatgggccttgacactggcatca

SEQ ID NO: 1614233 - DNA, 25 bp, Homo sapien
tgggccttgacactggcatcatcgg

SEQ ID NO: 1614234 - DNA, 25 bp, Homo sapien
ggcccatgggccttgacactggcat

SEQ ID NO: 1614235 - DNA, 25 bp, Homo sapien
taccaatccctatgtcaatgccagt

SEQ ID NO: 1614236 - DNA, 25 bp, Homo sapien
taagctggtcagttaccccaaatcc

SEQ ID NO: 1614237 - DNA, 25 bp, Homo sapien
aatgtccccagccataacccagggt

SEQ ID NO: 1614238 - DNA, 25 bp, Homo sapien
tatggagcccctgatgttaacccga

SEQ ID NO: 1614239 - DNA, 25 bp, Homo sapien
tccgccacgcgtttgttcagcagca

SEQ ID NO: 1614240 - DNA, 25 bp, Homo sapien
cggatggaggccaattccgagccca

SEQ ID NO: 1614241 - DNA, 25 bp, Homo sapien
tggagtccctccacaggttacgaag

SEQ ID NO: 1614242 - DNA, 25 bp, Homo sapien
tgggtctgccgggagcattcagctt

SEQ ID NO: 1614243 - DNA, 25 bp, Homo sapien
cttctgattcagcatgaagagcaag

SEQ ID NO: 1614244 - DNA, 25 bp, Homo sapien
ttctgattcagcatgaagagcaagg

SEQ ID NO: 1614245 - DNA, 25 bp, Homo sapien
acccaggaagattgggggctgccga

SEQ ID NO: 1614246 - DNA, 25 bp, Homo sapien
actgggcagggagtccaccaccccg

SEQ ID NO: 1614247 - DNA, 25 bp, Homo sapien
caggagacccaggaagattgggggc

SEQ ID NO: 1614248 - DNA, 25 bp, Homo sapien
ggcagggagtccaccaccccggctc

SEQ ID NO: 1614249 - DNA, 25 bp, Homo sapien
tcatgtccttgaattgatctctgca

SEQ ID NO: 1614250 - DNA, 25 bp, Homo sapien
catgtacctctgattgttcgtgtag

SEQ ID NO: 1614251 - DNA, 25 bp, Homo sapien
tggcagccatgtacctctgattgtt

SEQ ID NO: 1614252 - DNA, 25 bp, Homo sapien
acctctgattgttcgtgtagatgac

SEQ ID NO: 1614253 - DNA, 25 bp, Homo sapien
ccatagaccatgaagagcacgagcc

SEQ ID NO: 1614254 - DNA, 25 bp, Homo sapien
taggagctgactgtataggccctcg

SEQ ID NO: 1614255 - DNA, 25 bp, Homo sapien
cacgagccccaggatgatgaggaat

SEQ ID NO: 1614256 - DNA, 25 bp, Homo sapien
aagaagtagcgcaggtaataccagc

SEQ ID NO: 1614257 - DNA, 25 bp, Homo sapien
tcgatcccgccgtccggtgcaccgt

SEQ ID NO: 1614258 - DNA, 25 bp, Homo sapien
cgccgtccggtgcaccgtccctgct

SEQ ID NO: 1614259 - DNA, 25 bp, Homo sapien
ccgtccggtgcaccgtccctgctca

SEQ ID NO: 1614260 - DNA, 25 bp, Homo sapien
ttgctcgatcccgccgtccggtgca

SEQ ID NO: 1614261 - DNA, 25 bp, Homo sapien
cctcgcaggggggagtgcttatatt

SEQ ID NO: 1614262 - DNA, 25 bp, Homo sapien
cgcaggggggagtgcttatattact

SEQ ID NO: 1614263 - DNA, 25 bp, Homo sapien
ccccgcctcgcaggggggagtgctt

SEQ ID NO: 1614264 - DNA, 25 bp, Homo sapien
gggggagtgcttatattactcctct

SEQ ID NO: 1614265 - DNA, 25 bp, Homo sapien
tgcgggttatcacaacactcccact

SEQ ID NO: 1614266 - DNA, 25 bp, Homo sapien
cgggggctgcgggttatcacaacac

SEQ ID NO: 1614267 - DNA, 25 bp, Homo sapien
gggctgcgggttatcacaacactcc

SEQ ID NO: 1614268 - DNA, 25 bp, Homo sapien
ggttatcacaacactcccactctgg

SEQ ID NO: 1614269 - DNA, 25 bp, Homo sapien
tagagaaatgtgcaagtatgtcccc

SEQ ID NO: 1614270 - DNA, 25 bp, Homo sapien
ccgattcccagacccctggttcgct

SEQ ID NO: 1614271 - DNA, 25 bp, Homo sapien
tttacaaaaggtacatagagaaatg

SEQ ID NO: 1614272 - DNA, 25 bp, Homo sapien
ttgtaataagtgacacatgtgcatg

SEQ ID NO: 1614273 - DNA, 25 bp, Homo sapien
tttgctccagtcaccctagcacgat

SEQ ID NO: 1614274 - DNA, 25 bp, Homo sapien
ggggttttgctccagtcaccctagc

SEQ ID NO: 1614275 - DNA, 25 bp, Homo sapien
tgctccagtcaccctagcacgatct

SEQ ID NO: 1614276 - DNA, 25 bp, Homo sapien
tccagtcaccctagcacgatcttgg

SEQ ID NO: 1614277 - DNA, 25 bp, Homo sapien
tgttgtcaaatcagctccctatcat

SEQ ID NO: 1614278 - DNA, 25 bp, Homo sapien
ccttctcacagggttagggatttgc

SEQ ID NO: 1614279 - DNA, 25 bp, Homo sapien
tctgggagttttgtacccttctcac

SEQ ID NO: 1614280 - DNA, 25 bp, Homo sapien
gatttgcggttttcctattgtgcca

SEQ ID NO: 1614281 - DNA, 25 bp, Homo sapien
tccagccgccgcgtagactccgtgg

SEQ ID NO: 1614282 - DNA, 25 bp, Homo sapien
tcccgggccgcacaggcttcgccct

SEQ ID NO: 1614283 - DNA, 25 bp, Homo sapien
gggccgcacaggcttcgccctcggc

SEQ ID NO: 1614284 - DNA, 25 bp, Homo sapien
gcgccgcagagcctcgtccagccgc

SEQ ID NO: 1614285 - DNA, 25 bp, Homo sapien
cgtgagtcgtttacaaggagtttgc

SEQ ID NO: 1614286 - DNA, 25 bp, Homo sapien
gataactaggattcacctaggctcc

SEQ ID NO: 1614287 - DNA, 25 bp, Homo sapien
aaattagtgtgtaccattgcatggc

SEQ ID NO: 1614288 - DNA, 25 bp, Homo sapien
caactgtgcttgtttggataactag

SEQ ID NO: 1614289 - DNA, 25 bp, Homo sapien
cagtgtcgttagttgggtctgaagc

SEQ ID NO: 1614290 - DNA, 25 bp, Homo sapien
tctcaatcttcagtgtcgttagttg

SEQ ID NO: 1614291 - DNA, 25 bp, Homo sapien
ggcttcgtccatctcaatcttcagt

SEQ ID NO: 1614292 - DNA, 25 bp, Homo sapien
tggcttcgtccatctcaatcttcag

SEQ ID NO: 1614293 - DNA, 25 bp, Homo sapien
caagaggccaactttagcctcctaa

SEQ ID NO: 1614294 - DNA, 25 bp, Homo sapien
tacaggtgacatgtatgtccctctc

SEQ ID NO: 1614295 - DNA, 25 bp, Homo sapien
ctcaaaatagggctgctggaaactg

SEQ ID NO: 1614296 - DNA, 25 bp, Homo sapien
tgcacagaggtatacagtagtcact

SEQ ID NO: 1614297 - DNA, 25 bp, Homo sapien
gcaggccgtctcttatctcaacatt

SEQ ID NO: 1614298 - DNA, 25 bp, Homo sapien
tgtgggcaggccgtctcttatctca

SEQ ID NO: 1614299 - DNA, 25 bp, Homo sapien
agttgtgtgggcaggccgtctctta

SEQ ID NO: 1614300 - DNA, 25 bp, Homo sapien
aacattctggattcccgagctcccc

SEQ ID NO: 1614301 - DNA, 25 bp, Homo sapien
tggcattggcccctggctccgggca

SEQ ID NO: 1614302 - DNA, 25 bp, Homo sapien
tgccttctccaactcgtgccggata

SEQ ID NO: 1614303 - DNA, 25 bp, Homo sapien
gatactttccgcctggtccagctgc

SEQ ID NO: 1614304 - DNA, 25 bp, Homo sapien
gccttcacaggcctttaatgccttc

SEQ ID NO: 1614305 - DNA, 25 bp, Homo sapien
tgggttcctgcatcccacgtgctgc

SEQ ID NO: 1614306 - DNA, 25 bp, Homo sapien
gccccagacggccacgaatatttaa

SEQ ID NO: 1614307 - DNA, 25 bp, Homo sapien
cgcatctgcaaacgaagtgcttggc

SEQ ID NO: 1614308 - DNA, 25 bp, Homo sapien
catctgtaggaagcgccaaagaccg

SEQ ID NO: 1614309 - DNA, 25 bp, Homo sapien
tgcaatgtcacgatctcagcccact

SEQ ID NO: 1614310 - DNA, 25 bp, Homo sapien
ccactgcaacctctgccttccaggt

SEQ ID NO: 1614311 - DNA, 25 bp, Homo sapien
gctggaatgcaatgttggctcactg

SEQ ID NO: 1614312 - DNA, 25 bp, Homo sapien
actgcaacctctgccttccaggttc

SEQ ID NO: 1614313 - DNA, 25 bp, Homo sapien
cgaaaagccgagcaggacggacctt

SEQ ID NO: 1614314 - DNA, 25 bp, Homo sapien
caagggaatgttcaagcgaaaagcc

SEQ ID NO: 1614315 - DNA, 25 bp, Homo sapien
ttttttggagctcaaagaccccaga

SEQ ID NO: 1614316 - DNA, 25 bp, Homo sapien
actcattgtccggagggaggctctg

SEQ ID NO: 1614317 - DNA, 25 bp, Homo sapien
cagaagagggactcagggcagactg

SEQ ID NO: 1614318 - DNA, 25 bp, Homo sapien
accagaagagggactcagggcagac

SEQ ID NO: 1614319 - DNA, 25 bp, Homo sapien
ctaaaggaccagaagagggactcag

SEQ ID NO: 1614320 - DNA, 25 bp, Homo sapien
aagagggactcagggcagactggag

SEQ ID NO: 1614321 - DNA, 25 bp, Homo sapien
tagtacttcttgtccgcgattctca

SEQ ID NO: 1614322 - DNA, 25 bp, Homo sapien
gattctcacgcttaagacctggttt

SEQ ID NO: 1614323 - DNA, 25 bp, Homo sapien
tgtccgcgattctcacgcttaagac

SEQ ID NO: 1614324 - DNA, 25 bp, Homo sapien
tcttgtccgcgattctcacgcttaa

SEQ ID NO: 1614325 - DNA, 25 bp, Homo sapien
ctgcagacgcgtcctgaagcttatg

SEQ ID NO: 1614326 - DNA, 25 bp, Homo sapien
gcagacgcgtcctgaagcttatggt

SEQ ID NO: 1614327 - DNA, 25 bp, Homo sapien
ttatggtttaatgtagtgatctctc

SEQ ID NO: 1614328 - DNA, 25 bp, Homo sapien
tcctgaagcttatggtttaatgtag

SEQ ID NO: 1614329 - DNA, 25 bp, Homo sapien
gccctctcccttctccctttctcac

SEQ ID NO: 1614330 - DNA, 25 bp, Homo sapien
ggccctctcccttctccctttctca

SEQ ID NO: 1614331 - DNA, 25 bp, Homo sapien
ctcaagctcctccactttcttttgt

SEQ ID NO: 1614332 - DNA, 25 bp, Homo sapien
tgcatccagggaagccattagggcc

SEQ ID NO: 1614333 - DNA, 25 bp, Homo sapien
ttttgtccttgggccttctctgcat

SEQ ID NO: 1614334 - DNA, 25 bp, Homo sapien
tgtccttgggccttctctgcatcca

SEQ ID NO: 1614335 - DNA, 25 bp, Homo sapien
gatctggagagttttaacaccctgc

SEQ ID NO: 1614336 - DNA, 25 bp, Homo sapien
ggagagattcttgtccctcccaccg

SEQ ID NO: 1614337 - DNA, 25 bp, Homo sapien
gactggtgcccacgaggagtttcaa

SEQ ID NO: 1614338 - DNA, 25 bp, Homo sapien
ctagtactaggccatccaaaggagt

SEQ ID NO: 1614339 - DNA, 25 bp, Homo sapien
ccatcactgcccgaaggccgtcccg

SEQ ID NO: 1614340 - DNA, 25 bp, Homo sapien
tgcccgaaggccgtcccggcaggcc

SEQ ID NO: 1614341 - DNA, 25 bp, Homo sapien
tgacattgcgacactccatcactgc

SEQ ID NO: 1614342 - DNA, 25 bp, Homo sapien
cacagtgtggttgcaggtggcggcc

SEQ ID NO: 1614343 - DNA, 25 bp, Homo sapien
agcttacagcgcttatccccgtctt

SEQ ID NO: 1614344 - DNA, 25 bp, Homo sapien
tggtgaagataatcaagggcacccc

SEQ ID NO: 1614345 - DNA, 25 bp, Homo sapien
aattcctatccccagcagaagctta

SEQ ID NO: 1614346 - DNA, 25 bp, Homo sapien
gaatcacgatgatcaggagcaccag

SEQ ID NO: 1614347 - DNA, 25 bp, Homo sapien
ctgcaatagtcatacgaagtagatg

SEQ ID NO: 1614348 - DNA, 25 bp, Homo sapien
aatagtcatacgaagtagatgccat

SEQ ID NO: 1614349 - DNA, 25 bp, Homo sapien
caatagtcatacgaagtagatgcca

SEQ ID NO: 1614350 - DNA, 25 bp, Homo sapien
gcaatagtcatacgaagtagatgcc

SEQ ID NO: 1614351 - DNA, 25 bp, Homo sapien
ccagatctcccctttagagtctggc

SEQ ID NO: 1614352 - DNA, 25 bp, Homo sapien
gggtgctggaatcttctacgggcca

SEQ ID NO: 1614353 - DNA, 25 bp, Homo sapien
tgctggaatcttctacgggccaccc

SEQ ID NO: 1614354 - DNA, 25 bp, Homo sapien
gagggtgctggaatcttctacgggc

SEQ ID NO: 1614355 - DNA, 25 bp, Homo sapien
ggtgctggaatcttctacgggccac

SEQ ID NO: 1614356 - DNA, 25 bp, Homo sapien
tgagatgtggccccggatgggcttc

SEQ ID NO: 1614357 - DNA, 25 bp, Homo sapien
ctgagatgtggccccggatgggctt

SEQ ID NO: 1614358 - DNA, 25 bp, Homo sapien
atgtggccccggatgggcttctgag

SEQ ID NO: 1614359 - DNA, 25 bp, Homo sapien
ttggacttctctttcactgacactg

SEQ ID NO: 1614360 - DNA, 25 bp, Homo sapien
tctctttcactgacactgtcttcca

SEQ ID NO: 1614361 - DNA, 25 bp, Homo sapien
tgacactgtcttccaactctcagaa

SEQ ID NO: 1614362 - DNA, 25 bp, Homo sapien
caaatttggacttctctttcactga

SEQ ID NO: 1614363 - DNA, 25 bp, Homo sapien
ctgtgcccggcttaaaagcatatta

SEQ ID NO: 1614364 - DNA, 25 bp, Homo sapien
acagccctgataaaataactgggaa

SEQ ID NO: 1614365 - DNA, 25 bp, Homo sapien
tgtgcccggcttaaaagcatattat

SEQ ID NO: 1614366 - DNA, 25 bp, Homo sapien
ccatgacagccctgataaaataact

SEQ ID NO: 1614367 - DNA, 25 bp, Homo sapien
taaaggctgcatggaatcccctcct

SEQ ID NO: 1614368 - DNA, 25 bp, Homo sapien
tagacataacaggactgggcgcggt

SEQ ID NO: 1614369 - DNA, 25 bp, Homo sapien
cagaggcctctgtgtccaagaagaa

SEQ ID NO: 1614370 - DNA, 25 bp, Homo sapien
gattctgcatgttaaaaccgggaca

SEQ ID NO: 1614371 - DNA, 25 bp, Homo sapien
gaacgattaacacacattgaggacc

SEQ ID NO: 1614372 - DNA, 25 bp, Homo sapien
cctgcagcaaggtatggccatttcg

SEQ ID NO: 1614373 - DNA, 25 bp, Homo sapien
tttgtgccacgaggcaaccttgagg

SEQ ID NO: 1614374 - DNA, 25 bp, Homo sapien
gagtctgagacttgcacatcagcag

SEQ ID NO: 1614375 - DNA, 25 bp, Homo sapien
acaccagtgtggagtccttccccat

SEQ ID NO: 1614376 - DNA, 25 bp, Homo sapien
tccggtgcattctggatgcaggcag

SEQ ID NO: 1614377 - DNA, 25 bp, Homo sapien
ccaggctctggacaggttgaatagg

SEQ ID NO: 1614378 - DNA, 25 bp, Homo sapien
tggcccagcattcgacgcatctcgt

SEQ ID NO: 1614379 - DNA, 25 bp, Homo sapien
gggacaactcatggagcccacggcg

SEQ ID NO: 1614380 - DNA, 25 bp, Homo sapien
agccaccagaaccagggtgcccgag

SEQ ID NO: 1614381 - DNA, 25 bp, Homo sapien
tctcgatctcgaaaagtagcaaggc

SEQ ID NO: 1614382 - DNA, 25 bp, Homo sapien
tcttcaaaggatggcggggacaact

SEQ ID NO: 1614383 - DNA, 25 bp, Homo sapien
tcccattgtactgatgaggaaatca

SEQ ID NO: 1614384 - DNA, 25 bp, Homo sapien
tactatgcctggtcctatgggcttt

SEQ ID NO: 1614385 - DNA, 25 bp, Homo sapien
acagagagactttgcccaaggcacc

SEQ ID NO: 1614386 - DNA, 25 bp, Homo sapien
ttgaactcaaggaggctgtctgcag

SEQ ID NO: 1614387 - DNA, 25 bp, Homo sapien
gaggcggcagtcgtagagaaaccag

SEQ ID NO: 1614388 - DNA, 25 bp, Homo sapien
gcggcagtcgtagagaaaccagtca

SEQ ID NO: 1614389 - DNA, 25 bp, Homo sapien
aggaggcggcagtcgtagagaaacc

SEQ ID NO: 1614390 - DNA, 25 bp, Homo sapien
ggcggcagtcgtagagaaaccagtc

SEQ ID NO: 1614391 - DNA, 25 bp, Homo sapien
gagcagcaagcaggtgaaccccagc

SEQ ID NO: 1614392 - DNA, 25 bp, Homo sapien
cgcggcgagcagcaagcaggtgaac

SEQ ID NO: 1614393 - DNA, 25 bp, Homo sapien
ccccgcgccagctcggcgcccaggt

SEQ ID NO: 1614394 - DNA, 25 bp, Homo sapien
cccgcgccagctcggcgcccaggtg

SEQ ID NO: 1614395 - DNA, 25 bp, Homo sapien
cagcacccggccgccgtaagaacgg

SEQ ID NO: 1614396 - DNA, 25 bp, Homo sapien
gtcccggccgcgtcctctggcagcc

SEQ ID NO: 1614397 - DNA, 25 bp, Homo sapien
ttgcagccagcacccggccgccgta

SEQ ID NO: 1614398 - DNA, 25 bp, Homo sapien
gccgcgatgcccagcagggtcattg

SEQ ID NO: 1614399 - DNA, 25 bp, Homo sapien
ggaagagttgaggaattgaagtggt

SEQ ID NO: 1614400 - DNA, 25 bp, Homo sapien
tgaagtggttttagagggcagggga

SEQ ID NO: 1614401 - DNA, 25 bp, Homo sapien
gctccggggtgctggtcgcagccgg

SEQ ID NO: 1614402 - DNA, 25 bp, Homo sapien
cggggtgctggtcgcagccgggacg

SEQ ID NO: 1614403 - DNA, 25 bp, Homo sapien
gggggctccggggtgctggtcgcag

SEQ ID NO: 1614404 - DNA, 25 bp, Homo sapien
tccggggtgctggtcgcagccggga

SEQ ID NO: 1614405 - DNA, 25 bp, Homo sapien
caatggagtcatacaagaggtggca

SEQ ID NO: 1614406 - DNA, 25 bp, Homo sapien
tactcaaggttcatcgaggttgtag

SEQ ID NO: 1614407 - DNA, 25 bp, Homo sapien
tctcactctgcatgatgtactcaag

SEQ ID NO: 1614408 - DNA, 25 bp, Homo sapien
tgcgtaatattccatagcgtgtctg

SEQ ID NO: 1614409 - DNA, 25 bp, Homo sapien
gtctcaaactctttatacccaagtg

SEQ ID NO: 1614410 - DNA, 25 bp, Homo sapien
tcctccttcctcataatagcctttt

SEQ ID NO: 1614411 - DNA, 25 bp, Homo sapien
tcaaactctttatacccaagtgatt

SEQ ID NO: 1614412 - DNA, 25 bp, Homo sapien
tctttatacccaagtgattctctca

SEQ ID NO: 1614413 - DNA, 25 bp, Homo sapien
tcgacgaacatcagtggagagccca

SEQ ID NO: 1614414 - DNA, 25 bp, Homo sapien
aaaagtctcacgttgagggctcagc

SEQ ID NO: 1614415 - DNA, 25 bp, Homo sapien
gagagttccaccatacagtccaagg

SEQ ID NO: 1614416 - DNA, 25 bp, Homo sapien
taaaatggccccaaggaagagtatg

SEQ ID NO: 1614417 - DNA, 25 bp, Homo sapien
gctggaacatgaagcatcaggcagc

SEQ ID NO: 1614418 - DNA, 25 bp, Homo sapien
catttcacagatgcgccacagcagt

SEQ ID NO: 1614419 - DNA, 25 bp, Homo sapien
gagctgggtcaattttccaacctgg

SEQ ID NO: 1614420 - DNA, 25 bp, Homo sapien
gtcatccagtattcaggaccctctg

SEQ ID NO: 1614421 - DNA, 25 bp, Homo sapien
cacgcgtggactcctaggaaacctt

SEQ ID NO: 1614422 - DNA, 25 bp, Homo sapien
ctagtttccatggacacgcgtggac

SEQ ID NO: 1614423 - DNA, 25 bp, Homo sapien
cagtcacgcttgctagtttccatgg

SEQ ID NO: 1614424 - DNA, 25 bp, Homo sapien
gtgcaccgcagtcacgcttgctagt

SEQ ID NO: 1614425 - DNA, 25 bp, Homo sapien
agaagggagttgatctcacggtcac

SEQ ID NO: 1614426 - DNA, 25 bp, Homo sapien
tctcatttgaatgctaggccctgcc

SEQ ID NO: 1614427 - DNA, 25 bp, Homo sapien
caaccaagcagttcgtgagccgagt

SEQ ID NO: 1614428 - DNA, 25 bp, Homo sapien
cctgcctgggagaacctggctttaa

SEQ ID NO: 1614429 - DNA, 25 bp, Homo sapien
ggtagctaagccacaggtgcgcgcc

SEQ ID NO: 1614430 - DNA, 25 bp, Homo sapien
cagggtagctaagccacaggtgcgc

SEQ ID NO: 1614431 - DNA, 25 bp, Homo sapien
agggtagctaagccacaggtgcgcg

SEQ ID NO: 1614432 - DNA, 25 bp, Homo sapien
gggtagctaagccacaggtgcgcgc

SEQ ID NO: 1614433 - DNA, 25 bp, Homo sapien
gtcgcgcccgcctcgcgccgccttt

SEQ ID NO: 1614434 - DNA, 25 bp, Homo sapien
gcccgcctcgcgccgccttttccac

SEQ ID NO: 1614435 - DNA, 25 bp, Homo sapien
gcgcccgcctcgcgccgccttttcc

SEQ ID NO: 1614436 - DNA, 25 bp, Homo sapien
ccggggtcgcgcccgcctcgcgccg

SEQ ID NO: 1614437 - DNA, 25 bp, Homo sapien
ttgtggcggcgcaggcactcggtga

SEQ ID NO: 1614438 - DNA, 25 bp, Homo sapien
ctcctgccagttggcgaagcaggcg

SEQ ID NO: 1614439 - DNA, 25 bp, Homo sapien
tcgtcggcgccgtcgcgagtgagca

SEQ ID NO: 1614440 - DNA, 25 bp, Homo sapien
tccactgagaactggcgcccgaggt

SEQ ID NO: 1614441 - DNA, 25 bp, Homo sapien
taaaaagtcaagctataatactgtt

SEQ ID NO: 1614442 - DNA, 25 bp, Homo sapien
ccagcctgaacgtttttttcataat

SEQ ID NO: 1614443 - DNA, 25 bp, Homo sapien
aggtacccaacactacgtctggcta

SEQ ID NO: 1614444 - DNA, 25 bp, Homo sapien
agctataatactgtttcattgggca

SEQ ID NO: 1614445 - DNA, 25 bp, Homo sapien
tgagccgcacgaagaagtccttgag

SEQ ID NO: 1614446 - DNA, 25 bp, Homo sapien
tcctgggacacgtacaccagggcca

SEQ ID NO: 1614447 - DNA, 25 bp, Homo sapien
tattgttgcggatcaggatgcggcc

SEQ ID NO: 1614448 - DNA, 25 bp, Homo sapien
gccgcccgcagtacatagaactcat

SEQ ID NO: 1614449 - DNA, 25 bp, Homo sapien
tggggacagcgcggcgtgtggtccc

SEQ ID NO: 1614450 - DNA, 25 bp, Homo sapien
ggacagcgcggcgtgtggtccccgg

SEQ ID NO: 1614451 - DNA, 25 bp, Homo sapien
gctggggacagcgcggcgtgtggtc

SEQ ID NO: 1614452 - DNA, 25 bp, Homo sapien
ggtgctggggacagcgcggcgtgtg

SEQ ID NO: 1614453 - DNA, 25 bp, Homo sapien
ggaaaagtttgatcaagttctgctc

SEQ ID NO: 1614454 - DNA, 25 bp, Homo sapien
cggtgaccatgacccatgtgttggg

SEQ ID NO: 1614455 - DNA, 25 bp, Homo sapien
cagggagttggtgcatcccaggcct

SEQ ID NO: 1614456 - DNA, 25 bp, Homo sapien
ggcacagatccccagcaagggcatg

SEQ ID NO: 1614457 - DNA, 25 bp, Homo sapien
tgtgcttggcttcgcttttgaggag

SEQ ID NO: 1614458 - DNA, 25 bp, Homo sapien
gggtataccacaaggtccacagctg

SEQ ID NO: 1614459 - DNA, 25 bp, Homo sapien
gtacaggaaacaggtatggagcccg

SEQ ID NO: 1614460 - DNA, 25 bp, Homo sapien
cccggagggaatagcaaggctgact

SEQ ID NO: 1614461 - DNA, 25 bp, Homo sapien
tagaggccccgaatgtctggctgca

SEQ ID NO: 1614462 - DNA, 25 bp, Homo sapien
aattttgctactgttatctagaagg

SEQ ID NO: 1614463 - DNA, 25 bp, Homo sapien
cactaattttgctactgttatctag

SEQ ID NO: 1614464 - DNA, 25 bp, Homo sapien
tctggctgcactgttatttactgga

SEQ ID NO: 1614465 - DNA, 25 bp, Homo sapien
caacgcgatataccaggagctgcag

SEQ ID NO: 1614466 - DNA, 25 bp, Homo sapien
tcgatggctatgtcagcgagagcgc

SEQ ID NO: 1614467 - DNA, 25 bp, Homo sapien
gcctccttgtgggtcagatcaacca

SEQ ID NO: 1614468 - DNA, 25 bp, Homo sapien
ttgctctaaaagaatacctggccgg

SEQ ID NO: 1614469 - DNA, 25 bp, Homo sapien
gaggagatcgagagcatcccggcta

SEQ ID NO: 1614470 - DNA, 25 bp, Homo sapien
gaggtgaggagatcgagagcatccc

SEQ ID NO: 1614471 - DNA, 25 bp, Homo sapien
gtgaggagatcgagagcatcccggc

SEQ ID NO: 1614472 - DNA, 25 bp, Homo sapien
acacagtgaaaccctgtctctacta

SEQ ID NO: 1614473 - DNA, 25 bp, Homo sapien
cggaactacacgcacgtgccatgac

SEQ ID NO: 1614474 - DNA, 25 bp, Homo sapien
agccggaactacacgcacgtgccat

SEQ ID NO: 1614475 - DNA, 25 bp, Homo sapien
ggaactacacgcacgtgccatgaca

SEQ ID NO: 1614476 - DNA, 25 bp, Homo sapien
gccggaactacacgcacgtgccatg

SEQ ID NO: 1614477 - DNA, 25 bp, Homo sapien
aagcttccggaattgactgtgacca

SEQ ID NO: 1614478 - DNA, 25 bp, Homo sapien
gccgagagtggaacacgcgtgtcct

SEQ ID NO: 1614479 - DNA, 25 bp, Homo sapien
tccctctcggctgtgccttacggag

SEQ ID NO: 1614480 - DNA, 25 bp, Homo sapien
gctgcatcttgtgtagggtccagct

SEQ ID NO: 1614481 - DNA, 25 bp, Homo sapien
gaccatatagcaagagcccgtccgt

SEQ ID NO: 1614482 - DNA, 25 bp, Homo sapien
caccgttgccaaagatgagttgacc

SEQ ID NO: 1614483 - DNA, 25 bp, Homo sapien
ccaggcaagaactcgattggaggcc

SEQ ID NO: 1614484 - DNA, 25 bp, Homo sapien
gaactgcgcttacacacatcactga

SEQ ID NO: 1614485 - DNA, 25 bp, Homo sapien
aaatccctgccacctcgataggacg

SEQ ID NO: 1614486 - DNA, 25 bp, Homo sapien
caaaatacgccctccttcagaaaat

SEQ ID NO: 1614487 - DNA, 25 bp, Homo sapien
cgataggacgtcctcttcttgagct

SEQ ID NO: 1614488 - DNA, 25 bp, Homo sapien
tgccacctcgataggacgtcctctt

SEQ ID NO: 1614489 - DNA, 25 bp, Homo sapien
gccctccctgatacagcaaggttga

SEQ ID NO: 1614490 - DNA, 25 bp, Homo sapien
agcaaggttgagcattcgggcactg

SEQ ID NO: 1614491 - DNA, 25 bp, Homo sapien
ccgaactcacttcgactcaggcaca

SEQ ID NO: 1614492 - DNA, 25 bp, Homo sapien
gggcactggcttcccgaactcactt

SEQ ID NO: 1614493 - DNA, 25 bp, Homo sapien
ttcgatcacgccgagagcacgtacg

SEQ ID NO: 1614494 - DNA, 25 bp, Homo sapien
acgtacggcctctaccgggtgagag

SEQ ID NO: 1614495 - DNA, 25 bp, Homo sapien
cactgggtatcatgccaagagggcc

SEQ ID NO: 1614496 - DNA, 25 bp, Homo sapien
gcgggagcctcgtctcgatgctagc

SEQ ID NO: 1614497 - DNA, 25 bp, Homo sapien
caaagccgtgtgatgggagcaaacc

SEQ ID NO: 1614498 - DNA, 25 bp, Homo sapien
taacgaatgaccacaaactgagcgg

SEQ ID NO: 1614499 - DNA, 25 bp, Homo sapien
gaatcatatcggttccctagggcta

SEQ ID NO: 1614500 - DNA, 25 bp, Homo sapien
caagagggctcagctaaggccaaag

SEQ ID NO: 1614501 - DNA, 25 bp, Homo sapien
tatggatacgattgtgtccctcccc

SEQ ID NO: 1614502 - DNA, 25 bp, Homo sapien
tgagttaaatctgctgccaacgact

SEQ ID NO: 1614503 - DNA, 25 bp, Homo sapien
gtcagcccctgcgtttacttcgtgg

SEQ ID NO: 1614504 - DNA, 25 bp, Homo sapien
ctctcagtgggatagggctgcagct

SEQ ID NO: 1614505 - DNA, 25 bp, Homo sapien
cttcattgaaaagaccaacaactac

SEQ ID NO: 1614506 - DNA, 25 bp, Homo sapien
aaaaaatcacgtggtattatgaata

SEQ ID NO: 1614507 - DNA, 25 bp, Homo sapien
aatcacgtggtattatgaataaaaa

SEQ ID NO: 1614508 - DNA, 25 bp, Homo sapien
tgaaaagaccaacaactacagaaga

SEQ ID NO: 1614509 - DNA, 25 bp, Homo sapien
agatcgcaccatcacgccatcacac

SEQ ID NO: 1614510 - DNA, 25 bp, Homo sapien
tgggaccaggcacgcggcccatggg

SEQ ID NO: 1614511 - DNA, 25 bp, Homo sapien
aagccacgtcgtgctgctgctggaa

SEQ ID NO: 1614512 - DNA, 25 bp, Homo sapien
attccactttgtagctggccagagg

SEQ ID NO: 1614513 - DNA, 25 bp, Homo sapien
ctggaagccaacagcctccggccag

SEQ ID NO: 1614514 - DNA, 25 bp, Homo sapien
tgtctggagttttcggcctacccca

SEQ ID NO: 1614515 - DNA, 25 bp, Homo sapien
tcctggctgggagacaagcttttac

SEQ ID NO: 1614516 - DNA, 25 bp, Homo sapien
gagggactttcacactccctggaga

SEQ ID NO: 1614517 - DNA, 25 bp, Homo sapien
tttaccgacttcctctgcttgccag

SEQ ID NO: 1614518 - DNA, 25 bp, Homo sapien
gatcatgggctacatgccgagtgct

SEQ ID NO: 1614519 - DNA, 25 bp, Homo sapien
tgtgccgggcactagtgatacaaaa

SEQ ID NO: 1614520 - DNA, 25 bp, Homo sapien
cactgctagacggtgtgggaacttc

SEQ ID NO: 1614521 - DNA, 25 bp, Homo sapien
tgtaccctcggtcgtctgagctgtg

SEQ ID NO: 1614522 - DNA, 25 bp, Homo sapien
cccactggttttcacacagtgtgct

SEQ ID NO: 1614523 - DNA, 25 bp, Homo sapien
taaggctccttcccactggttttca

SEQ ID NO: 1614524 - DNA, 25 bp, Homo sapien
tccttcccactggttttcacacagt

SEQ ID NO: 1614525 - DNA, 25 bp, Homo sapien
ctggttttcacacagtgtgcttctc

SEQ ID NO: 1614526 - DNA, 25 bp, Homo sapien
cattggtaacacgatgggtcccaca

SEQ ID NO: 1614527 - DNA, 25 bp, Homo sapien
tacaatggccgagttggttgcaaca

SEQ ID NO: 1614528 - DNA, 25 bp, Homo sapien
aactttacattaggcctggatgacc

SEQ ID NO: 1614529 - DNA, 25 bp, Homo sapien
tatgcacttgggtacagaaacagct

SEQ ID NO: 1614530 - DNA, 25 bp, Homo sapien
gaaatgaaggcgtctgtgcagacac

SEQ ID NO: 1614531 - DNA, 25 bp, Homo sapien
gtgtctccagagagccactatggct

SEQ ID NO: 1614532 - DNA, 25 bp, Homo sapien
tctgcaatcacatgctaagagttgt

SEQ ID NO: 1614533 - DNA, 25 bp, Homo sapien
tagtgcaaaacatctcaacaccatg

SEQ ID NO: 1614534 - DNA, 25 bp, Homo sapien
ttgacacagtcaacttgatttttct

SEQ ID NO: 1614535 - DNA, 25 bp, Homo sapien
taaagcgaggtccagggttcagaac

SEQ ID NO: 1614536 - DNA, 25 bp, Homo sapien
tctgagatcccagccgagagaggtc

SEQ ID NO: 1614537 - DNA, 25 bp, Homo sapien
tgcaaatcattcgaggacagactgg

SEQ ID NO: 1614538 - DNA, 25 bp, Homo sapien
cacacacacggaggtcttgaacaga

SEQ ID NO: 1614539 - DNA, 25 bp, Homo sapien
caatccagcagaaaaaggcgtgcca

SEQ ID NO: 1614540 - DNA, 25 bp, Homo sapien
ggcactgtgcaactgggacaactgt

SEQ ID NO: 1614541 - DNA, 25 bp, Homo sapien
tcccagagcaagtgtagtccacgct

SEQ ID NO: 1614542 - DNA, 25 bp, Homo sapien
taaggtcctatgtgcaccaggtaac

SEQ ID NO: 1614543 - DNA, 25 bp, Homo sapien
gcacaaatatctaaagggactccgg

SEQ ID NO: 1614544 - DNA, 25 bp, Homo sapien
gcccaagggcgcatgtgcttttgaa

SEQ ID NO: 1614545 - DNA, 25 bp, Homo sapien
gagctgtgtcaggtcatcccgatct

SEQ ID NO: 1614546 - DNA, 25 bp, Homo sapien
cacagagggtatggcacctggaacc

SEQ ID NO: 1614547 - DNA, 25 bp, Homo sapien
tgcgagaggattcgcagcaccgtga

SEQ ID NO: 1614548 - DNA, 25 bp, Homo sapien
tcgcgcgcgaagcagtagtccttga

SEQ ID NO: 1614549 - DNA, 25 bp, Homo sapien
ttggccacctcgtcgttgctgcgct

SEQ ID NO: 1614550 - DNA, 25 bp, Homo sapien
gacttgagcttcacgaactccttgg

SEQ ID NO: 1614551 - DNA, 25 bp, Homo sapien
cggaacgtgagacaggccacaccta

SEQ ID NO: 1614552 - DNA, 25 bp, Homo sapien
acctactgtgatgccccgcccacgg

SEQ ID NO: 1614553 - DNA, 25 bp, Homo sapien
ggcggaacgtgagacaggccacacc

SEQ ID NO: 1614554 - DNA, 25 bp, Homo sapien
gaacgtgagacaggccacacctact

SEQ ID NO: 1614555 - DNA, 25 bp, Homo sapien
gctattgttcttggatttggtcgca

SEQ ID NO: 1614556 - DNA, 25 bp, Homo sapien
cattgtacttgggagcccagctatt

SEQ ID NO: 1614557 - DNA, 25 bp, Homo sapien
ttgacctcgatgaacggccggaaga

SEQ ID NO: 1614558 - DNA, 25 bp, Homo sapien
caaacttgcgtttcttgtcgctgag

SEQ ID NO: 1614559 - DNA, 25 bp, Homo sapien
cagctcaacatggacagagacttca

SEQ ID NO: 1614560 - DNA, 25 bp, Homo sapien
gtgaacagctcaacatggacagaga

SEQ ID NO: 1614561 - DNA, 25 bp, Homo sapien
catggacagagacttcacccacagg

SEQ ID NO: 1614562 - DNA, 25 bp, Homo sapien
tcaacatggacagagacttcaccca

SEQ ID NO: 1614563 - DNA, 25 bp, Homo sapien
tgctggcggcaccaggtcatcagcc

SEQ ID NO: 1614564 - DNA, 25 bp, Homo sapien
tgtgctggcggcaccaggtcatcag

SEQ ID NO: 1614565 - DNA, 25 bp, Homo sapien
ctgtgctggcggcaccaggtcatca

SEQ ID NO: 1614566 - DNA, 25 bp, Homo sapien
cacctgtgctggcggcaccaggtca

SEQ ID NO: 1614567 - DNA, 25 bp, Homo sapien
tacattacatcttggcagcatctgg

SEQ ID NO: 1614568 - DNA, 25 bp, Homo sapien
tccctaggtgcccataaactggaaa

SEQ ID NO: 1614569 - DNA, 25 bp, Homo sapien
tggctgtttgtcctcttggctgcaa

SEQ ID NO: 1614570 - DNA, 25 bp, Homo sapien
gaagcagagccatgtcttttccctg

SEQ ID NO: 1614571 - DNA, 25 bp, Homo sapien
cgcgccaggcctcaacccctaattt

SEQ ID NO: 1614572 - DNA, 25 bp, Homo sapien
gggcttctgtttggggccaccagcc

SEQ ID NO: 1614573 - DNA, 25 bp, Homo sapien
tgtctgcttgaatcatggtgtggtg

SEQ ID NO: 1614574 - DNA, 25 bp, Homo sapien
tgtttggggccaccagccgtgtcct

SEQ ID NO: 1614575 - DNA, 25 bp, Homo sapien
ctcaggataaatgtcttcactaagg

SEQ ID NO: 1614576 - DNA, 25 bp, Homo sapien
ccttctcaggataaatgtcttcact

SEQ ID NO: 1614577 - DNA, 25 bp, Homo sapien
cttctcaggataaatgtcttcacta

SEQ ID NO: 1614578 - DNA, 25 bp, Homo sapien
tctcaggataaatgtcttcactaag

SEQ ID NO: 1614579 - DNA, 25 bp, Homo sapien
caaaggtcttgattagcaggtcggt

SEQ ID NO: 1614580 - DNA, 25 bp, Homo sapien
cctgggccgattgcgtctgtacaaa

SEQ ID NO: 1614581 - DNA, 25 bp, Homo sapien
cgacagggcatagcgcaaggattgc

SEQ ID NO: 1614582 - DNA, 25 bp, Homo sapien
caaggattgcaggtccgggctcttc

SEQ ID NO: 1614583 - DNA, 25 bp, Homo sapien
cgcgcactgctttggggtcaagctc

SEQ ID NO: 1614584 - DNA, 25 bp, Homo sapien
aactcaacaaccgcgcactgctttg

SEQ ID NO: 1614585 - DNA, 25 bp, Homo sapien
tcttggcttcttctcgtaccatgtg

SEQ ID NO: 1614586 - DNA, 25 bp, Homo sapien
cttggcttcttctcgtaccatgtga

SEQ ID NO: 1614587 - DNA, 25 bp, Homo sapien
tccttggctgcattgaagatcatct

SEQ ID NO: 1614588 - DNA, 25 bp, Homo sapien
cttggctgcattgaagatcatctgg

SEQ ID NO: 1614589 - DNA, 25 bp, Homo sapien
cttgagtttggacagctgacccagc

SEQ ID NO: 1614590 - DNA, 25 bp, Homo sapien
ctgcattgaagatcatctgggttcc

SEQ ID NO: 1614591 - DNA, 25 bp, Homo sapien
tctgagtggcttggcaatttcaccc

SEQ ID NO: 1614592 - DNA, 25 bp, Homo sapien
tgagtggcttggcaatttcaccctg

SEQ ID NO: 1614593 - DNA, 25 bp, Homo sapien
agtggcttggcaatttcaccctgcc

SEQ ID NO: 1614594 - DNA, 25 bp, Homo sapien
gtctgagtggcttggcaatttcacc

SEQ ID NO: 1614595 - DNA, 25 bp, Homo sapien
tttctaatcccttgccatgttttct

SEQ ID NO: 1614596 - DNA, 25 bp, Homo sapien
tgccatgttttctcaagaggttccc

SEQ ID NO: 1614597 - DNA, 25 bp, Homo sapien
cagagataatgtcacagggtgatca

SEQ ID NO: 1614598 - DNA, 25 bp, Homo sapien
gcagagataatgtcacagggtgatc

SEQ ID NO: 1614599 - DNA, 25 bp, Homo sapien
gagataatgtcacagggtgatcaac

SEQ ID NO: 1614600 - DNA, 25 bp, Homo sapien
ctgcagagataatgtcacagggtga

SEQ ID NO: 1614601 - DNA, 25 bp, Homo sapien
tcagcactcgcttcagcacagtctt

SEQ ID NO: 1614602 - DNA, 25 bp, Homo sapien
tctccatggtgttcataaccagctt

SEQ ID NO: 1614603 - DNA, 25 bp, Homo sapien
ctcacagattttggcaaagagggtc

SEQ ID NO: 1614604 - DNA, 25 bp, Homo sapien
gggcggcaggacgatggttttctcc

SEQ ID NO: 1614605 - DNA, 25 bp, Homo sapien
acactcttcaatgtgcggctggaag

SEQ ID NO: 1614606 - DNA, 25 bp, Homo sapien
tgtgcccttaacctggctaaggatg

SEQ ID NO: 1614607 - DNA, 25 bp, Homo sapien
gatgggctgcaacacattgtccgcg

SEQ ID NO: 1614608 - DNA, 25 bp, Homo sapien
gcaggcactggctggcacattgcct

SEQ ID NO: 1614609 - DNA, 25 bp, Homo sapien
ccttcaggatgtcactggcttcagc

SEQ ID NO: 1614610 - DNA, 25 bp, Homo sapien
ggatgtcactggcttcagcatccag

SEQ ID NO: 1614611 - DNA, 25 bp, Homo sapien
ctggtagcaaacacccggctgagct

SEQ ID NO: 1614612 - DNA, 25 bp, Homo sapien
tccaagacgttattgagtttcacct

SEQ ID NO: 1614613 - DNA, 25 bp, Homo sapien
gctgaactcgtagctgttgagtgtt

SEQ ID NO: 1614614 - DNA, 25 bp, Homo sapien
actcgtagctgttgagtgttattca

SEQ ID NO: 1614615 - DNA, 25 bp, Homo sapien
ttctccagctgaactcgtagctgtt

SEQ ID NO: 1614616 - DNA, 25 bp, Homo sapien
ttcctcccatggcttcgaacatctt

SEQ ID NO: 1614617 - DNA, 25 bp, Homo sapien
gaccttgggatggtttcagggtctg

SEQ ID NO: 1614618 - DNA, 25 bp, Homo sapien
ccagggaccttgggatggtttcagg

SEQ ID NO: 1614619 - DNA, 25 bp, Homo sapien
cagggaccttgggatggtttcaggg

SEQ ID NO: 1614620 - DNA, 25 bp, Homo sapien
catactggaggagcacattactgat

SEQ ID NO: 1614621 - DNA, 25 bp, Homo sapien
gtctgcatactggaggagcacatta

SEQ ID NO: 1614622 - DNA, 25 bp, Homo sapien
tactggaggagcacattactgatgg

SEQ ID NO: 1614623 - DNA, 25 bp, Homo sapien
tgcatactggaggagcacattactg

SEQ ID NO: 1614624 - DNA, 25 bp, Homo sapien
cacggagcaggagaatagggcatgc

SEQ ID NO: 1614625 - DNA, 25 bp, Homo sapien
cactcgagtttcttgatgatttcaa

SEQ ID NO: 1614626 - DNA, 25 bp, Homo sapien
caaagctctggttgagttgggagaa

SEQ ID NO: 1614627 - DNA, 25 bp, Homo sapien
cccacgatctgagggtcgggacact

SEQ ID NO: 1614628 - DNA, 25 bp, Homo sapien
gaaatcccgggacacctcctcattc

SEQ ID NO: 1614629 - DNA, 25 bp, Homo sapien
cactggatgacgaagggttcaaacc

SEQ ID NO: 1614630 - DNA, 25 bp, Homo sapien
cagggcaccgtgcaggaaatcccgg

SEQ ID NO: 1614631 - DNA, 25 bp, Homo sapien
ctcgctccagggcaccgtgcaggaa

SEQ ID NO: 1614632 - DNA, 25 bp, Homo sapien
caggtaaccctaagtaggtcagtct

SEQ ID NO: 1614633 - DNA, 25 bp, Homo sapien
tgtaggagtcaactgctcaatggct

SEQ ID NO: 1614634 - DNA, 25 bp, Homo sapien
gatcccaccttaactcatagaattg

SEQ ID NO: 1614635 - DNA, 25 bp, Homo sapien
gatgggatctgactatcttttccag

SEQ ID NO: 1614636 - DNA, 25 bp, Homo sapien
ggttcatgtagtcggcactcttgca

SEQ ID NO: 1614637 - DNA, 25 bp, Homo sapien
cttgaaggcgggaagttccgtcaca

SEQ ID NO: 1614638 - DNA, 25 bp, Homo sapien
cactcttgcatagacgatgcttgtc

SEQ ID NO: 1614639 - DNA, 25 bp, Homo sapien
ctcaggcacgcggtccttgaaggcg

SEQ ID NO: 1614640 - DNA, 25 bp, Homo sapien
cacatcacttcagcgctgattttac

SEQ ID NO: 1614641 - DNA, 25 bp, Homo sapien
tcacttcagcgctgattttacccac

SEQ ID NO: 1614642 - DNA, 25 bp, Homo sapien
ccacatcacttcagcgctgatttta

SEQ ID NO: 1614643 - DNA, 25 bp, Homo sapien
catcacttcagcgctgattttaccc

SEQ ID NO: 1614644 - DNA, 25 bp, Homo sapien
ctctgggagaacttcccccttcttg

SEQ ID NO: 1614645 - DNA, 25 bp, Homo sapien
tatgagggtaatcagcttggaccag

SEQ ID NO: 1614646 - DNA, 25 bp, Homo sapien
gaccagaagtcgaggttcttgatgc

SEQ ID NO: 1614647 - DNA, 25 bp, Homo sapien
cagggagtgtaggaattcttgtctt

SEQ ID NO: 1614648 - DNA, 25 bp, Homo sapien
ttcatggcagttattgaagatgtac

SEQ ID NO: 1614649 - DNA, 25 bp, Homo sapien
gaagatgtactcgtaggtagaatta

SEQ ID NO: 1614650 - DNA, 25 bp, Homo sapien
aattaaggcaggctttcacacagtc

SEQ ID NO: 1614651 - DNA, 25 bp, Homo sapien
ggtactcccggctgtacagttcatg

SEQ ID NO: 1614652 - DNA, 25 bp, Homo sapien
tccacagtggatttgaggtcctgga

SEQ ID NO: 1614653 - DNA, 25 bp, Homo sapien
gaaggtccacagtggatttgaggtc

SEQ ID NO: 1614654 - DNA, 25 bp, Homo sapien
gtgagaaggtccacagtggatttga

SEQ ID NO: 1614655 - DNA, 25 bp, Homo sapien
agaaggtgatgctggtgagaaggtc

SEQ ID NO: 1614656 - DNA, 25 bp, Homo sapien
ccggtacatggagaggtcaatccgc

SEQ ID NO: 1614657 - DNA, 25 bp, Homo sapien
ccaggagtttcacgaagcgctcttt

SEQ ID NO: 1614658 - DNA, 25 bp, Homo sapien
ggtccaggagtttcacgaagcgctc

SEQ ID NO: 1614659 - DNA, 25 bp, Homo sapien
cgcagggagttatgcagctggtcca

SEQ ID NO: 1614660 - DNA, 25 bp, Homo sapien
ggcacatatacttggaggagaggca

SEQ ID NO: 1614661 - DNA, 25 bp, Homo sapien
agcggtcggaggcagacacgttggt

SEQ ID NO: 1614662 - DNA, 25 bp, Homo sapien
ttgatgttggcgagcagggtgctca

SEQ ID NO: 1614663 - DNA, 25 bp, Homo sapien
gctcatgacggcaggcacccctggg

SEQ ID NO: 1614664 - DNA, 25 bp, Homo sapien
cttggtagatggactcgacgccgta

SEQ ID NO: 1614665 - DNA, 25 bp, Homo sapien
tgtctcatcgtagtaaaccttccag

SEQ ID NO: 1614666 - DNA, 25 bp, Homo sapien
cttggcatctgggatcttcacgacc

SEQ ID NO: 1614667 - DNA, 25 bp, Homo sapien
ccattgttctgcacgtcggtcacga

SEQ ID NO: 1614668 - DNA, 25 bp, Homo sapien
cacggcagatttgtcagttcgcttg

SEQ ID NO: 1614669 - DNA, 25 bp, Homo sapien
cactgatgtggagccggatggcacc

SEQ ID NO: 1614670 - DNA, 25 bp, Homo sapien
ctcatgcagacaggtgtactggaca

SEQ ID NO: 1614671 - DNA, 25 bp, Homo sapien
gatggcacccgacacggcagatttg

SEQ ID NO: 1614672 - DNA, 25 bp, Homo sapien
ctgcagggcagaaaaagaagacagt

SEQ ID NO: 1614673 - DNA, 25 bp, Homo sapien
aaaaagaagacagtgtcagaacttc

SEQ ID NO: 1614674 - DNA, 25 bp, Homo sapien
aagaagacagtgtcagaacttccca

SEQ ID NO: 1614675 - DNA, 25 bp, Homo sapien
cagggcagaaaaagaagacagtgtc

SEQ ID NO: 1614676 - DNA, 25 bp, Homo sapien
tgagcgtccgcacctcaatgatcgt

SEQ ID NO: 1614677 - DNA, 25 bp, Homo sapien
gaacctctgtttcacgcgggatttg

SEQ ID NO: 1614678 - DNA, 25 bp, Homo sapien
gatcgtctgccccaggaaatcgtca

SEQ ID NO: 1614679 - DNA, 25 bp, Homo sapien
agacgcgcaccttgatgcggtcgga

SEQ ID NO: 1614680 - DNA, 25 bp, Homo sapien
ttgaggttcccatagatggtttttg

SEQ ID NO: 1614681 - DNA, 25 bp, Homo sapien
ccatagatggtttttgtccgtttct

SEQ ID NO: 1614682 - DNA, 25 bp, Homo sapien
ggatcctgtcttgtcctttgcctgc

SEQ ID NO: 1614683 - DNA, 25 bp, Homo sapien
tcccgacctggacggtgacataggg

SEQ ID NO: 1614684 - DNA, 25 bp, Homo sapien
gaagatctcgggcttgttgcgctcc

SEQ ID NO: 1614685 - DNA, 25 bp, Homo sapien
tcatctgctgcgtgtgcgccgtctt

SEQ ID NO: 1614686 - DNA, 25 bp, Homo sapien
ggtcaccgcgaagatctcctggatg

SEQ ID NO: 1614687 - DNA, 25 bp, Homo sapien
tgatcttggcggaccacttggacgt

SEQ ID NO: 1614688 - DNA, 25 bp, Homo sapien
ttcgaagttgtgtggcgtcgtgcac

SEQ ID NO: 1614689 - DNA, 25 bp, Homo sapien
cctcgcactcgtagcagtaggtggg

SEQ ID NO: 1614690 - DNA, 25 bp, Homo sapien
gtggcacttgacaccgcactcggtg

SEQ ID NO: 1614691 - DNA, 25 bp, Homo sapien
ggtggccgtccacacttcgaagttg

SEQ ID NO: 1614692 - DNA, 25 bp, Homo sapien
agctcctcgttgttcaacgtgctgg

SEQ ID NO: 1614693 - DNA, 25 bp, Homo sapien
tcgttgttcaacgtgctggaggcca

SEQ ID NO: 1614694 - DNA, 25 bp, Homo sapien
gtgatgcccgctttcctggactgga

SEQ ID NO: 1614695 - DNA, 25 bp, Homo sapien
gccaaggccgaggtgatgcccgctt

SEQ ID NO: 1614696 - DNA, 25 bp, Homo sapien
ggcatgctgtcgatgatgatgagac

SEQ ID NO: 1614697 - DNA, 25 bp, Homo sapien
agtgggataggtttcctcttgcgga

SEQ ID NO: 1614698 - DNA, 25 bp, Homo sapien
ctgtcgatgatgatgagaccgcccc

SEQ ID NO: 1614699 - DNA, 25 bp, Homo sapien
caagtcgctcacgagtgggataggt

SEQ ID NO: 1614700 - DNA, 25 bp, Homo sapien
ccatagggatttagacatctctcct

SEQ ID NO: 1614701 - DNA, 25 bp, Homo sapien
ttgaaccatagggatttagacatct

SEQ ID NO: 1614702 - DNA, 25 bp, Homo sapien
gaaccatagggatttagacatctct

SEQ ID NO: 1614703 - DNA, 25 bp, Homo sapien
accatagggatttagacatctctcc

SEQ ID NO: 1614704 - DNA, 25 bp, Homo sapien
gcaccttgttgaaggcacgcagcca

SEQ ID NO: 1614705 - DNA, 25 bp, Homo sapien
gttgaaggcacgcagccagttggcc

SEQ ID NO: 1614706 - DNA, 25 bp, Homo sapien
tccgcaccttgttgaaggcacgcag

SEQ ID NO: 1614707 - DNA, 25 bp, Homo sapien
ccttgttgaaggcacgcagccagtt

SEQ ID NO: 1614708 - DNA, 25 bp, Homo sapien
ctggcgggaggctgatgcgtttgaa

SEQ ID NO: 1614709 - DNA, 25 bp, Homo sapien
tgcgtttgaagtctttgggctcagc

SEQ ID NO: 1614710 - DNA, 25 bp, Homo sapien
ccttgtcgggcgtggctggcttggg

SEQ ID NO: 1614711 - DNA, 25 bp, Homo sapien
cttgggggccaccttggccatgtcg

SEQ ID NO: 1614712 - DNA, 25 bp, Homo sapien
ggtaggagtcccggtcccgctcatc

SEQ ID NO: 1614713 - DNA, 25 bp, Homo sapien
agggtcgaagtcctcgctcagctga

SEQ ID NO: 1614714 - DNA, 25 bp, Homo sapien
catcctccatgtcggagccctgcag

SEQ ID NO: 1614715 - DNA, 25 bp, Homo sapien
aagaggcatagcggctgctacccgt

SEQ ID NO: 1614716 - DNA, 25 bp, Homo sapien
ggtagtcactgtcacgatcatccac

SEQ ID NO: 1614717 - DNA, 25 bp, Homo sapien
ttgtgacgtagtataatagggcggc

SEQ ID NO: 1614718 - DNA, 25 bp, Homo sapien
gagaactcctcgtaactgtgcatgg

SEQ ID NO: 1614719 - DNA, 25 bp, Homo sapien
cggcgggatgctgttgctcgtttca

SEQ ID NO: 1614720 - DNA, 25 bp, Homo sapien
caggctctgctttctactaagtagc

SEQ ID NO: 1614721 - DNA, 25 bp, Homo sapien
caattatctatcagctttagctgca

SEQ ID NO: 1614722 - DNA, 25 bp, Homo sapien
caacggtctgttttcggttcaattg

SEQ ID NO: 1614723 - DNA, 25 bp, Homo sapien
gctcttgactaaattgcctgcttct

SEQ ID NO: 1614724 - DNA, 25 bp, Homo sapien
gctgctcaccccagccaaaataatt

SEQ ID NO: 1614725 - DNA, 25 bp, Homo sapien
ccccagccaaaataattccagttgc

SEQ ID NO: 1614726 - DNA, 25 bp, Homo sapien
tcaccccagccaaaataattccagt

SEQ ID NO: 1614727 - DNA, 25 bp, Homo sapien
gctcaccccagccaaaataattcca

SEQ ID NO: 1614728 - DNA, 25 bp, Homo sapien
tggctcctctgaccattggctgctt

SEQ ID NO: 1614729 - DNA, 25 bp, Homo sapien
ggctcctctgaccattggctgcttt

SEQ ID NO: 1614730 - DNA, 25 bp, Homo sapien
gctcctctgaccattggctgctttc

SEQ ID NO: 1614731 - DNA, 25 bp, Homo sapien
ttgtcttgctcatcttggaacgaat

SEQ ID NO: 1614732 - DNA, 25 bp, Homo sapien
ggcttgtcttgctcatcttggaacg

SEQ ID NO: 1614733 - DNA, 25 bp, Homo sapien
gacaggcagaggcttgtcttgctca

SEQ ID NO: 1614734 - DNA, 25 bp, Homo sapien
caggcagaggcttgtcttgctcatc

SEQ ID NO: 1614735 - DNA, 25 bp, Homo sapien
gcttcttggcccagtagcgagcctc

SEQ ID NO: 1614736 - DNA, 25 bp, Homo sapien
ttcttggcccagtagcgagcctcct

SEQ ID NO: 1614737 - DNA, 25 bp, Homo sapien
cccgcatagcattgagctgctccag

SEQ ID NO: 1614738 - DNA, 25 bp, Homo sapien
atcctggtcccgcatagcattgagc

SEQ ID NO: 1614739 - DNA, 25 bp, Homo sapien
ctaagggtagctcaaagcgcgtgtc

SEQ ID NO: 1614740 - DNA, 25 bp, Homo sapien
tccttggtgccacagatctcactgt

SEQ ID NO: 1614741 - DNA, 25 bp, Homo sapien
ggtccttggtgccacagatctcact

SEQ ID NO: 1614742 - DNA, 25 bp, Homo sapien
tcaaagcgcgtgtccaggaggatgc

SEQ ID NO: 1614743 - DNA, 25 bp, Homo sapien
gaatctgctggtcactagtccccag

SEQ ID NO: 1614744 - DNA, 25 bp, Homo sapien
gggcccctactctcgcatgagacat

SEQ ID NO: 1614745 - DNA, 25 bp, Homo sapien
ggtcaggaatctgctggtcactagt

SEQ ID NO: 1614746 - DNA, 25 bp, Homo sapien
aaaccaaagtcatgtcccctctcta

SEQ ID NO: 1614747 - DNA, 25 bp, Homo sapien
tgtcccagatgagacccttattcca

SEQ ID NO: 1614748 - DNA, 25 bp, Homo sapien
attggactggcggatggtcctcagt

SEQ ID NO: 1614749 - DNA, 25 bp, Homo sapien
ccattgtgtcccagatgagaccctt

SEQ ID NO: 1614750 - DNA, 25 bp, Homo sapien
gatggtcctcagtgggatccacaca

SEQ ID NO: 1614751 - DNA, 25 bp, Homo sapien
tgcactttcagggtcacgtacgtgt

SEQ ID NO: 1614752 - DNA, 25 bp, Homo sapien
gcgatggtcgtgctcttgacattct

SEQ ID NO: 1614753 - DNA, 25 bp, Homo sapien
ccgcaccgcgatggtcgtgctcttg

SEQ ID NO: 1614754 - DNA, 25 bp, Homo sapien
cagggtcacgtacgtgttgaatttc

SEQ ID NO: 1614755 - DNA, 25 bp, Homo sapien
ggcaccatcaaacttggcttttttg

SEQ ID NO: 1614756 - DNA, 25 bp, Homo sapien
gcaccatcaaacttggcttttttga

SEQ ID NO: 1614757 - DNA, 25 bp, Homo sapien
tgggcaccatcaaacttggcttttt

SEQ ID NO: 1614758 - DNA, 25 bp, Homo sapien
cttgggcaccatcaaacttggcttt

SEQ ID NO: 1614759 - DNA, 25 bp, Homo sapien
tgttccactggagatggtccatgcg

SEQ ID NO: 1614760 - DNA, 25 bp, Homo sapien
atgcgtcggcaaccatacccacgtt

SEQ ID NO: 1614761 - DNA, 25 bp, Homo sapien
tgcaatcaacgttggcagttccttg

SEQ ID NO: 1614762 - DNA, 25 bp, Homo sapien
ggtagcattcgacacccactgttct

SEQ ID NO: 1614763 - DNA, 25 bp, Homo sapien
gaaaagtagggatgcatatgggggt

SEQ ID NO: 1614764 - DNA, 25 bp, Homo sapien
tatgggggtgggaaagtgacaggct

SEQ ID NO: 1614765 - DNA, 25 bp, Homo sapien
aagatttccactagggagggcaggc

SEQ ID NO: 1614766 - DNA, 25 bp, Homo sapien
cactggggtctagactgggctgggc

SEQ ID NO: 1614767 - DNA, 25 bp, Homo sapien
ctgcacttagctccctgccgaggtc

SEQ ID NO: 1614768 - DNA, 25 bp, Homo sapien
ctcctgcacttagctccctgccgag

SEQ ID NO: 1614769 - DNA, 25 bp, Homo sapien
ggctcctgcacttagctccctgccg

SEQ ID NO: 1614770 - DNA, 25 bp, Homo sapien
cctgcacttagctccctgccgaggt

SEQ ID NO: 1614771 - DNA, 25 bp, Homo sapien
cgtcttcgtcgtcacatcccgccac

SEQ ID NO: 1614772 - DNA, 25 bp, Homo sapien
cgcctgcgccgggttgctgtatcag

SEQ ID NO: 1614773 - DNA, 25 bp, Homo sapien
gggttgctgtatcagggtcagcggg

SEQ ID NO: 1614774 - DNA, 25 bp, Homo sapien
tcttcgtcgtcacatcccgccacct

SEQ ID NO: 1614775 - DNA, 25 bp, Homo sapien
tccagagaagcccaacttggaggat

SEQ ID NO: 1614776 - DNA, 25 bp, Homo sapien
ttccagagaagcccaacttggagga

SEQ ID NO: 1614777 - DNA, 25 bp, Homo sapien
cagagaagcccaacttggaggatgt

SEQ ID NO: 1614778 - DNA, 25 bp, Homo sapien
gagaagcccaacttggaggatgtga

SEQ ID NO: 1614779 - DNA, 25 bp, Homo sapien
gtccacacgggcctccgcgttcagc

SEQ ID NO: 1614780 - DNA, 25 bp, Homo sapien
agagccctgccgcgtctacacggat

SEQ ID NO: 1614781 - DNA, 25 bp, Homo sapien
agggctacccctctcaaaagtccag

SEQ ID NO: 1614782 - DNA, 25 bp, Homo sapien
ggcccagctgcgtcgacaagggcta

SEQ ID NO: 1614783 - DNA, 25 bp, Homo sapien
cggctctgtcgggtcgggctcagcg

SEQ ID NO: 1614784 - DNA, 25 bp, Homo sapien
tctccgagctcgcaggtgggccgga

SEQ ID NO: 1614785 - DNA, 25 bp, Homo sapien
gtctccgagctcgcaggtgggccgg

SEQ ID NO: 1614786 - DNA, 25 bp, Homo sapien
cgggccggctctgtcgggtcgggct

SEQ ID NO: 1614787 - DNA, 25 bp, Homo sapien
cgcggacagcgcctgacgtggcgct

SEQ ID NO: 1614788 - DNA, 25 bp, Homo sapien
gcccggccgccaccggccatcttgg

SEQ ID NO: 1614789 - DNA, 25 bp, Homo sapien
acagcgcctgacgtggcgctgatgc

SEQ ID NO: 1614790 - DNA, 25 bp, Homo sapien
catcttggttcagcaccgggggcgc

SEQ ID NO: 1614791 - DNA, 25 bp, Homo sapien
gctccatggagtagacggataccga

SEQ ID NO: 1614792 - DNA, 25 bp, Homo sapien
cggataccgatgagacgtcaatttg

SEQ ID NO: 1614793 - DNA, 25 bp, Homo sapien
tgggaactaagcttgtcaccaggtt

SEQ ID NO: 1614794 - DNA, 25 bp, Homo sapien
cgtcaatttgttcagccagcgtttg

SEQ ID NO: 1614795 - DNA, 25 bp, Homo sapien
tgcaatgcagacgtctgtgtaatcg

SEQ ID NO: 1614796 - DNA, 25 bp, Homo sapien
caaggctgggacgtgaagtgggtct

SEQ ID NO: 1614797 - DNA, 25 bp, Homo sapien
gtgggtctggagtaactctcagaat

SEQ ID NO: 1614798 - DNA, 25 bp, Homo sapien
cagaataggccgtttctgcaatgca

SEQ ID NO: 1614799 - DNA, 25 bp, Homo sapien
gcctccagtacctccgctgtcgcca

SEQ ID NO: 1614800 - DNA, 25 bp, Homo sapien
cgctgtcgccactggatccagccat

SEQ ID NO: 1614801 - DNA, 25 bp, Homo sapien
tgcagcctccagtacctccgctgtc

SEQ ID NO: 1614802 - DNA, 25 bp, Homo sapien
ccgctgtcgccactggatccagcca

SEQ ID NO: 1614803 - DNA, 25 bp, Homo sapien
gggctttggagtccctcgccacgac

SEQ ID NO: 1614804 - DNA, 25 bp, Homo sapien
tgcggcagactcagacgaagacaca

SEQ ID NO: 1614805 - DNA, 25 bp, Homo sapien
actcagtgcccggagtgagcccagt

SEQ ID NO: 1614806 - DNA, 25 bp, Homo sapien
aagacagcacggcaaacggagaacg

SEQ ID NO: 1614807 - DNA, 25 bp, Homo sapien
catttctccagtagcaagttgtaac

SEQ ID NO: 1614808 - DNA, 25 bp, Homo sapien
gcacatagggtgaagtccaaaggaa

SEQ ID NO: 1614809 - DNA, 25 bp, Homo sapien
ctgattggttaggaggacccggcct

SEQ ID NO: 1614810 - DNA, 25 bp, Homo sapien
gacccggcctatggttgcactcata

SEQ ID NO: 1614811 - DNA, 25 bp, Homo sapien
atgcctattggccatttgtctgtct

SEQ ID NO: 1614812 - DNA, 25 bp, Homo sapien
tatgcctattggccatttgtctgtc

SEQ ID NO: 1614813 - DNA, 25 bp, Homo sapien
aggagttcttccagcgcgtgcgcgc

SEQ ID NO: 1614814 - DNA, 25 bp, Homo sapien
tgcaggtcgaacttggagcctcggc

SEQ ID NO: 1614815 - DNA, 25 bp, Homo sapien
ggtctacctggacctggcctacctg

SEQ ID NO: 1614816 - DNA, 25 bp, Homo sapien
tggacgcgctactggccagcaagca

SEQ ID NO: 1614817 - DNA, 25 bp, Homo sapien
catcacggtgttgggcagcaacagc

SEQ ID NO: 1614818 - DNA, 25 bp, Homo sapien
gcatacgtggtacgcagagacgcac

SEQ ID NO: 1614819 - DNA, 25 bp, Homo sapien
catggtgtccatgcaggatgacgcc

SEQ ID NO: 1614820 - DNA, 25 bp, Homo sapien
gcctgcaaggtggagttctagcccc

SEQ ID NO: 1614821 - DNA, 25 bp, Homo sapien
gagcccaggatcctacaggagtttg

SEQ ID NO: 1614822 - DNA, 25 bp, Homo sapien
agcccaggatcctacaggagtttga

SEQ ID NO: 1614823 - DNA, 25 bp, Homo sapien
tggagcccaggatcctacaggagtt

SEQ ID NO: 1614824 - DNA, 25 bp, Homo sapien
gctggagcccaggatcctacaggag

SEQ ID NO: 1614825 - DNA, 25 bp, Homo sapien
cacccaggagacttcgctctaggaa

SEQ ID NO: 1614826 - DNA, 25 bp, Homo sapien
ttcgctctaggaaggtgtcctgccc

SEQ ID NO: 1614827 - DNA, 25 bp, Homo sapien
ctgccctctcacacgtagcaatggg

SEQ ID NO: 1614828 - DNA, 25 bp, Homo sapien
gagacttcgctctaggaaggtgtcc

SEQ ID NO: 1614829 - DNA, 25 bp, Homo sapien
catttcttcacggaacacacgtggg

SEQ ID NO: 1614830 - DNA, 25 bp, Homo sapien
tcatctccagccacggggagctcat

SEQ ID NO: 1614831 - DNA, 25 bp, Homo sapien
caggaacccgcaaggcgctgcttgt

SEQ ID NO: 1614832 - DNA, 25 bp, Homo sapien
tgggccaacgctgaccgggctctgt

SEQ ID NO: 1614833 - DNA, 25 bp, Homo sapien
cctgctaatttttgtatctaatatt

SEQ ID NO: 1614834 - DNA, 25 bp, Homo sapien
aggcatgagccatgagccaccacgc

SEQ ID NO: 1614835 - DNA, 25 bp, Homo sapien
ccaaagtgctgggatgacagctgtg

SEQ ID NO: 1614836 - DNA, 25 bp, Homo sapien
gctaatttttgtatctaatattttg

SEQ ID NO: 1614837 - DNA, 25 bp, Homo sapien
caggatgaagtatctccggcaccgg

SEQ ID NO: 1614838 - DNA, 25 bp, Homo sapien
gaacttcctcctgtacagacactgc

SEQ ID NO: 1614839 - DNA, 25 bp, Homo sapien
tcattctggccatcggcgctttcac

SEQ ID NO: 1614840 - DNA, 25 bp, Homo sapien
cgtgccatgccaacacctctatggt

SEQ ID NO: 1614841 - DNA, 25 bp, Homo sapien
agtgtccagcatctgtgaaagcggg

SEQ ID NO: 1614842 - DNA, 25 bp, Homo sapien
catcccaggaggtaatcaaaggcct

SEQ ID NO: 1614843 - DNA, 25 bp, Homo sapien
ggtagatagtgagcacccatcccag

SEQ ID NO: 1614844 - DNA, 25 bp, Homo sapien
tcccctggagtgaggacatttggct

SEQ ID NO: 1614845 - DNA, 25 bp, Homo sapien
ggccaggtcccagcgtgagattact

SEQ ID NO: 1614846 - DNA, 25 bp, Homo sapien
tgggtacagccactgaggcagcagt

SEQ ID NO: 1614847 - DNA, 25 bp, Homo sapien
cagcccatggagcagatgtcgtctc

SEQ ID NO: 1614848 - DNA, 25 bp, Homo sapien
gcagtagcgtgcagggttggtggca

SEQ ID NO: 1614849 - DNA, 25 bp, Homo sapien
tggaaggtcaaggtgggaggattac

SEQ ID NO: 1614850 - DNA, 25 bp, Homo sapien
ttgagctcaggagtttgagaccagc

SEQ ID NO: 1614851 - DNA, 25 bp, Homo sapien
gcctgggaaacagagtgagactccc

SEQ ID NO: 1614852 - DNA, 25 bp, Homo sapien
tgggaaacagagtgagactccctct

SEQ ID NO: 1614853 - DNA, 25 bp, Homo sapien
acacgcgcactagcgcgcgtacgaa

SEQ ID NO: 1614854 - DNA, 25 bp, Homo sapien
gcacaacttctcacgcatctctggg

SEQ ID NO: 1614855 - DNA, 25 bp, Homo sapien
cgcgtacgaagtggtggccgcacaa

SEQ ID NO: 1614856 - DNA, 25 bp, Homo sapien
aggcctcctggcttcggtggaccag

SEQ ID NO: 1614857 - DNA, 25 bp, Homo sapien
gtggtgggtggcgccggggccaagc

SEQ ID NO: 1614858 - DNA, 25 bp, Homo sapien
tggtgggtggcgccggggccaagcg

SEQ ID NO: 1614859 - DNA, 25 bp, Homo sapien
gagcagcagaagcttaacctgcatg

SEQ ID NO: 1614860 - DNA, 25 bp, Homo sapien
ccttctcacgcttggcatgctgttc

SEQ ID NO: 1614861 - DNA, 25 bp, Homo sapien
caccagtcagaaagttgaccctgca

SEQ ID NO: 1614862 - DNA, 25 bp, Homo sapien
gggcaaaactgtaggctccaatact

SEQ ID NO: 1614863 - DNA, 25 bp, Homo sapien
tcaggatcccaaagagatacacggg

SEQ ID NO: 1614864 - DNA, 25 bp, Homo sapien
gatacacgggctcccctaaaaggca

SEQ ID NO: 1614865 - DNA, 25 bp, Homo sapien
tttaaagctacatgagggccgggcg

SEQ ID NO: 1614866 - DNA, 25 bp, Homo sapien
gacactcagataccattagggtgga

SEQ ID NO: 1614867 - DNA, 25 bp, Homo sapien
tgaatgtccccattggaaataagac

SEQ ID NO: 1614868 - DNA, 25 bp, Homo sapien
gaatgtccccattggaaataagaca

SEQ ID NO: 1614869 - DNA, 25 bp, Homo sapien
aatgtccccattggaaataagacag

SEQ ID NO: 1614870 - DNA, 25 bp, Homo sapien
ctaatccagaggtctgcgggcagga

SEQ ID NO: 1614871 - DNA, 25 bp, Homo sapien
caggctattctacaggccacgggag

SEQ ID NO: 1614872 - DNA, 25 bp, Homo sapien
ggtgttcctgaagtagaggaccctc

SEQ ID NO: 1614873 - DNA, 25 bp, Homo sapien
gccagtcaacagagacctaatccag

SEQ ID NO: 1614874 - DNA, 25 bp, Homo sapien
agtggtgtttgccctctgggtgagc

SEQ ID NO: 1614875 - DNA, 25 bp, Homo sapien
ggagtggtgtttgccctctgggtga

SEQ ID NO: 1614876 - DNA, 25 bp, Homo sapien
agcagtgaaggcatgagtctcacac

SEQ ID NO: 1614877 - DNA, 25 bp, Homo sapien
agtgaaggcatgagtctcacacccc

SEQ ID NO: 1614878 - DNA, 25 bp, Homo sapien
ggcgctgaatgatggccggtcctgt

SEQ ID NO: 1614879 - DNA, 25 bp, Homo sapien
cagggcgctgaatgatggccggtcc

SEQ ID NO: 1614880 - DNA, 25 bp, Homo sapien
cccagggcgctgaatgatggccggt

SEQ ID NO: 1614881 - DNA, 25 bp, Homo sapien
ggcccagggcgctgaatgatggccg

SEQ ID NO: 1614882 - DNA, 25 bp, Homo sapien
aagtgctctgacttgccacacagtg

SEQ ID NO: 1614883 - DNA, 25 bp, Homo sapien
ccatttatggagcatcgactgtgtg

SEQ ID NO: 1614884 - DNA, 25 bp, Homo sapien
tgagccctcataggcacaggtgttc

SEQ ID NO: 1614885 - DNA, 25 bp, Homo sapien
ccacacagtgagagagtagccaagt

SEQ ID NO: 1614886 - DNA, 25 bp, Homo sapien
aaactgaggctagccctgcggcgct

SEQ ID NO: 1614887 - DNA, 25 bp, Homo sapien
cccggcccaatctacagactgggaa

SEQ ID NO: 1614888 - DNA, 25 bp, Homo sapien
tcaggcgccagctggcttgcccgag

SEQ ID NO: 1614889 - DNA, 25 bp, Homo sapien
ggcccaatctacagactgggaaact

SEQ ID NO: 1614890 - DNA, 25 bp, Homo sapien
cacatcccatcatccgcaggaactc

SEQ ID NO: 1614891 - DNA, 25 bp, Homo sapien
gacatcccgctcacatcccatcatc

SEQ ID NO: 1614892 - DNA, 25 bp, Homo sapien
cagagggcggggacatcccgctcac

SEQ ID NO: 1614893 - DNA, 25 bp, Homo sapien
cccatgctaaagagggacgcaggcg

SEQ ID NO: 1614894 - DNA, 25 bp, Homo sapien
tgggaccaggtgaccccatgctaaa

SEQ ID NO: 1614895 - DNA, 25 bp, Homo sapien
cagacaggttggagattggccacga

SEQ ID NO: 1614896 - DNA, 25 bp, Homo sapien
cactggggcctatgatgctgggacc

SEQ ID NO: 1614897 - DNA, 25 bp, Homo sapien
cagcttttgtcgcagtaggtgaaga

SEQ ID NO: 1614898 - DNA, 25 bp, Homo sapien
gaagctccagacgtctgactggcga

SEQ ID NO: 1614899 - DNA, 25 bp, Homo sapien
taggtgaagagctcgtacaggacga

SEQ ID NO: 1614900 - DNA, 25 bp, Homo sapien
agaagatgttgtccgagagggattc

SEQ ID NO: 1614901 - DNA, 25 bp, Homo sapien
tagtagtctttgtcaagcggcagca

SEQ ID NO: 1614902 - DNA, 25 bp, Homo sapien
tcagcgatcttgacgtgtgcctcgc

SEQ ID NO: 1614903 - DNA, 25 bp, Homo sapien
tccacgaggatgtttcgggcggcca

SEQ ID NO: 1614904 - DNA, 25 bp, Homo sapien
tggctcgcggaccacgtagtagtct

SEQ ID NO: 1614905 - DNA, 25 bp, Homo sapien
gctgcaggaagtcgcgcaagcagcc

SEQ ID NO: 1614906 - DNA, 25 bp, Homo sapien
aatagagaaggaggcggctggcatc

SEQ ID NO: 1614907 - DNA, 25 bp, Homo sapien
ttgcagatctgcgaggaatagagaa

SEQ ID NO: 1614908 - DNA, 25 bp, Homo sapien
gcaagcagccgctgggcaggtactc

SEQ ID NO: 1614909 - DNA, 25 bp, Homo sapien
tattgtcgcctagcgggtcatagcg

SEQ ID NO: 1614910 - DNA, 25 bp, Homo sapien
gaggatctgaatctcccgctgaaag

SEQ ID NO: 1614911 - DNA, 25 bp, Homo sapien
gctgacaccacgatacttgacaatg

SEQ ID NO: 1614912 - DNA, 25 bp, Homo sapien
tgcagctgtttcacggccaccaggg

SEQ ID NO: 1614913 - DNA, 25 bp, Homo sapien
tccacagcccatcacgaggtgccag

SEQ ID NO: 1614914 - DNA, 25 bp, Homo sapien
gaggtgtctctcctcgaagatcgtg

SEQ ID NO: 1614915 - DNA, 25 bp, Homo sapien
ggtgtctctcctcgaagatcgtggg

SEQ ID NO: 1614916 - DNA, 25 bp, Homo sapien
agcccatcacgaggtgccagggcac

SEQ ID NO: 1614917 - DNA, 25 bp, Homo sapien
tattgaggtcacgaatgacggctcg

SEQ ID NO: 1614918 - DNA, 25 bp, Homo sapien
tgctgccggtcctcataaaattgga

SEQ ID NO: 1614919 - DNA, 25 bp, Homo sapien
aaggagggcctctggaccggctcat

SEQ ID NO: 1614920 - DNA, 25 bp, Homo sapien
ggctcataggccatgcactgttgaa

SEQ ID NO: 1614921 - DNA, 25 bp, Homo sapien
taaacacttcccagaccgtggcgcc

SEQ ID NO: 1614922 - DNA, 25 bp, Homo sapien
gcgccgaagccccacttgtcagctt

SEQ ID NO: 1614923 - DNA, 25 bp, Homo sapien
aagctaagtgtctgcgcctcccgga

SEQ ID NO: 1614924 - DNA, 25 bp, Homo sapien
gcatggtgacgccactaaacacttc

SEQ ID NO: 1614925 - DNA, 25 bp, Homo sapien
agagacattgccatggggcaggcct

SEQ ID NO: 1614926 - DNA, 25 bp, Homo sapien
cagagacattgccatggggcaggcc

SEQ ID NO: 1614927 - DNA, 25 bp, Homo sapien
tctccaggcttaacacagcggggct

SEQ ID NO: 1614928 - DNA, 25 bp, Homo sapien
ccaggcttaacacagcggggctgac

SEQ ID NO: 1614929 - DNA, 25 bp, Homo sapien
gccacgttttcgcagatacatgtct

SEQ ID NO: 1614930 - DNA, 25 bp, Homo sapien
tagttgagggcgtaggccagctgtt

SEQ ID NO: 1614931 - DNA, 25 bp, Homo sapien
agctgtttgaccacctgcagcttcc

SEQ ID NO: 1614932 - DNA, 25 bp, Homo sapien
ttcgcagatacatgtctatggcccc

SEQ ID NO: 1614933 - DNA, 25 bp, Homo sapien
tgagaacctggagccgctttccaag

SEQ ID NO: 1614934 - DNA, 25 bp, Homo sapien
taaagggtaatgaacacggctccca

SEQ ID NO: 1614935 - DNA, 25 bp, Homo sapien
tgtcacattctaggctctgtcccag

SEQ ID NO: 1614936 - DNA, 25 bp, Homo sapien
gctgcagagattagaaagccaggtt

SEQ ID NO: 1614937 - DNA, 25 bp, Homo sapien
gtgggaagaacagcctagacttggg

SEQ ID NO: 1614938 - DNA, 25 bp, Homo sapien
ggaagaacagcctagacttgggtga

SEQ ID NO: 1614939 - DNA, 25 bp, Homo sapien
gaagaacagcctagacttgggtgag

SEQ ID NO: 1614940 - DNA, 25 bp, Homo sapien
tgggaagaacagcctagacttgggt

SEQ ID NO: 1614941 - DNA, 25 bp, Homo sapien
ggctcatcaagctcgctgcttccag

SEQ ID NO: 1614942 - DNA, 25 bp, Homo sapien
tacgacacttggctcatcaagctcg

SEQ ID NO: 1614943 - DNA, 25 bp, Homo sapien
cacgagatgccggtacgacacttgg

SEQ ID NO: 1614944 - DNA, 25 bp, Homo sapien
gccggtacgacacttggctcatcaa

SEQ ID NO: 1614945 - DNA, 25 bp, Homo sapien
gacagccccggtaaatcttggtgaa

SEQ ID NO: 1614946 - DNA, 25 bp, Homo sapien
acctcatggcgacagccccggtaaa

SEQ ID NO: 1614947 - DNA, 25 bp, Homo sapien
atcttggtgaaggacccatggccca

SEQ ID NO: 1614948 - DNA, 25 bp, Homo sapien
cggtaaatcttggtgaaggacccat

SEQ ID NO: 1614949 - DNA, 25 bp, Homo sapien
ctgtcagcagggatcttgtgaaatg

SEQ ID NO: 1614950 - DNA, 25 bp, Homo sapien
gtcagcagggatcttgtgaaatgtc

SEQ ID NO: 1614951 - DNA, 25 bp, Homo sapien
ctggtattgggattggggctgaacc

SEQ ID NO: 1614952 - DNA, 25 bp, Homo sapien
cagcagggatcttgtgaaatgtcat

SEQ ID NO: 1614953 - DNA, 25 bp, Homo sapien
gactaggtgcagatgacatggctca

SEQ ID NO: 1614954 - DNA, 25 bp, Homo sapien
tttgaaaggagatccagaaagcccc

SEQ ID NO: 1614955 - DNA, 25 bp, Homo sapien
tagctgtgcctagatcaagccagac

SEQ ID NO: 1614956 - DNA, 25 bp, Homo sapien
caagtggcactgtggacaaccaggg

SEQ ID NO: 1614957 - DNA, 25 bp, Homo sapien
tgccaccccatctacgtgcagcccc

SEQ ID NO: 1614958 - DNA, 25 bp, Homo sapien
gatgaggcagcccttataatcagga

SEQ ID NO: 1614959 - DNA, 25 bp, Homo sapien
ttgccaggagctctcgaagactgct

SEQ ID NO: 1614960 - DNA, 25 bp, Homo sapien
tgtggggtcggctgaggccaaccag

SEQ ID NO: 1614961 - DNA, 25 bp, Homo sapien
tggcccctgagtgggactgagcgac

SEQ ID NO: 1614962 - DNA, 25 bp, Homo sapien
ctgcaaagaagagtggcccctgagt

SEQ ID NO: 1614963 - DNA, 25 bp, Homo sapien
gcccctgagtgggactgagcgacag

SEQ ID NO: 1614964 - DNA, 25 bp, Homo sapien
gaagagtggcccctgagtgggactg

SEQ ID NO: 1614965 - DNA, 25 bp, Homo sapien
ctgcggcggagaacataggagccag

SEQ ID NO: 1614966 - DNA, 25 bp, Homo sapien
ccaggacgtgagcccccagtcttga

SEQ ID NO: 1614967 - DNA, 25 bp, Homo sapien
cttgagcttgttgatggcaaagtcc

SEQ ID NO: 1614968 - DNA, 25 bp, Homo sapien
gggctgcggcggagaacataggagc

SEQ ID NO: 1614969 - DNA, 25 bp, Homo sapien
tgatggggccgtggcactgctcggc

SEQ ID NO: 1614970 - DNA, 25 bp, Homo sapien
agcgccacgaacgacagagcctcgg

SEQ ID NO: 1614971 - DNA, 25 bp, Homo sapien
gaagtgctgggagtccgtggtcagc

SEQ ID NO: 1614972 - DNA, 25 bp, Homo sapien
gaagtagccgtccacgagcgccacg

SEQ ID NO: 1614973 - DNA, 25 bp, Homo sapien
gaaggggaggggaatcctgcaccca

SEQ ID NO: 1614974 - DNA, 25 bp, Homo sapien
acaagcgtcagagcccagtgaaacc

SEQ ID NO: 1614975 - DNA, 25 bp, Homo sapien
ctgcgagggacaagcgtcagagccc

SEQ ID NO: 1614976 - DNA, 25 bp, Homo sapien
gcgtcagagcccagtgaaacccgag

SEQ ID NO: 1614977 - DNA, 25 bp, Homo sapien
agtgaccaggcggtgctctccggcc

SEQ ID NO: 1614978 - DNA, 25 bp, Homo sapien
aacgcgcggggcctgcttgatgcta

SEQ ID NO: 1614979 - DNA, 25 bp, Homo sapien
tggtaacagtgaccaggcggtgctc

SEQ ID NO: 1614980 - DNA, 25 bp, Homo sapien
gctaatgtctacgatttctggaaag

SEQ ID NO: 1614981 - DNA, 25 bp, Homo sapien
ccatgagcgagtgccggtctgcctg

SEQ ID NO: 1614982 - DNA, 25 bp, Homo sapien
gaatacgcctccgcgtcacgaagct

SEQ ID NO: 1614983 - DNA, 25 bp, Homo sapien
tccaggtccatgatgtacttggcca

SEQ ID NO: 1614984 - DNA, 25 bp, Homo sapien
tctgcgcaccgtcctccgaatacgc

SEQ ID NO: 1614985 - DNA, 25 bp, Homo sapien
gggccattggcgcccacaggtcgga

SEQ ID NO: 1614986 - DNA, 25 bp, Homo sapien
gccattggcgcccacaggtcggaca

SEQ ID NO: 1614987 - DNA, 25 bp, Homo sapien
tggcgcccacaggtcggacagggac

SEQ ID NO: 1614988 - DNA, 25 bp, Homo sapien
cattggcgcccacaggtcggacagg

SEQ ID NO: 1614989 - DNA, 25 bp, Homo sapien
ttcagcagctctcccggccgctggg

SEQ ID NO: 1614990 - DNA, 25 bp, Homo sapien
gaggcgcccactcaccaggtcactg

SEQ ID NO: 1614991 - DNA, 25 bp, Homo sapien
gccatccgggccaggtccaacacgg

SEQ ID NO: 1614992 - DNA, 25 bp, Homo sapien
tgggcctgctctcgcgccatccggg

SEQ ID NO: 1614993 - DNA, 25 bp, Homo sapien
gatagcactggccaaatccttgcgt

SEQ ID NO: 1614994 - DNA, 25 bp, Homo sapien
gcaggtcaaggatagcactggccaa

SEQ ID NO: 1614995 - DNA, 25 bp, Homo sapien
agcggtggcacttctccagcccaaa

SEQ ID NO: 1614996 - DNA, 25 bp, Homo sapien
ttgcgtagcccgaagcggtggcact

SEQ ID NO: 1614997 - DNA, 25 bp, Homo sapien
agcaggacaggtcctccgtggccag

SEQ ID NO: 1614998 - DNA, 25 bp, Homo sapien
tggcatcctccacggagaagatgtg

SEQ ID NO: 1614999 - DNA, 25 bp, Homo sapien
ggtgctggcatcctccacggagaag

SEQ ID NO: 1615000 - DNA, 25 bp, Homo sapien
gcaggacaggtcctccgtggccaga

SEQ ID NO: 1615001 - DNA, 25 bp, Homo sapien
gcgtctcttcacttggaggtgccat

SEQ ID NO: 1615002 - DNA, 25 bp, Homo sapien
agggcaccagcctccgtggacaaga

SEQ ID NO: 1615003 - DNA, 25 bp, Homo sapien
aggctgcatgaacgctgagggatca

SEQ ID NO: 1615004 - DNA, 25 bp, Homo sapien
tccccaaaggagaaagataggcgct

SEQ ID NO: 1615005 - DNA, 25 bp, Homo sapien
gggcacagagagaaaaagcccctca

SEQ ID NO: 1615006 - DNA, 25 bp, Homo sapien
ctggggcacagagagaaaaagcccc

SEQ ID NO: 1615007 - DNA, 25 bp, Homo sapien
cacagagagaaaaagcccctcagtc

SEQ ID NO: 1615008 - DNA, 25 bp, Homo sapien
ggcacagagagaaaaagcccctcag

SEQ ID NO: 1615009 - DNA, 25 bp, Homo sapien
tggaaggcgagctagcctttgccct

SEQ ID NO: 1615010 - DNA, 25 bp, Homo sapien
cgaggcctggaaggcgagctagcct

SEQ ID NO: 1615011 - DNA, 25 bp, Homo sapien
cgcagctttcctccgaggcctggaa

SEQ ID NO: 1615012 - DNA, 25 bp, Homo sapien
gtctgcctcgcagctttcctccgag

SEQ ID NO: 1615013 - DNA, 25 bp, Homo sapien
ccctggactttcgaagggcgggcag

SEQ ID NO: 1615014 - DNA, 25 bp, Homo sapien
cgggaggcagcgagaggaaagtccc

SEQ ID NO: 1615015 - DNA, 25 bp, Homo sapien
tggactttcgaagggcgggcagagc

SEQ ID NO: 1615016 - DNA, 25 bp, Homo sapien
gaggaaagtcccactcggctccttc

SEQ ID NO: 1615017 - DNA, 25 bp, Homo sapien
aataccgggacctgaccaccgcagg

SEQ ID NO: 1615018 - DNA, 25 bp, Homo sapien
atgactcccggagcggcacccacaa

SEQ ID NO: 1615019 - DNA, 25 bp, Homo sapien
cccacaacatgtaccgggaataccg

SEQ ID NO: 1615020 - DNA, 25 bp, Homo sapien
catgtaccgggaataccgggacctg

SEQ ID NO: 1615021 - DNA, 25 bp, Homo sapien
agcccactccattcagatcatgaag

SEQ ID NO: 1615022 - DNA, 25 bp, Homo sapien
cgagcccactccattcagatcatga

SEQ ID NO: 1615023 - DNA, 25 bp, Homo sapien
cgagacatgggtgcccggcaccgcg

SEQ ID NO: 1615024 - DNA, 25 bp, Homo sapien
gtgcccggcaccgcgcccgagccca

SEQ ID NO: 1615025 - DNA, 25 bp, Homo sapien
gagcaaagtcttccccaagtatgta

SEQ ID NO: 1615026 - DNA, 25 bp, Homo sapien
tccccatagctcaaggtattcaagc

SEQ ID NO: 1615027 - DNA, 25 bp, Homo sapien
gtcctgcatgaaagtgagctcccca

SEQ ID NO: 1615028 - DNA, 25 bp, Homo sapien
tcaagcacaatacggctttgagtgc

SEQ ID NO: 1615029 - DNA, 25 bp, Homo sapien
aaagggcctccctatggaggttgca

SEQ ID NO: 1615030 - DNA, 25 bp, Homo sapien
ggtctcgcttcgtgcctaggcttgt

SEQ ID NO: 1615031 - DNA, 25 bp, Homo sapien
aagtcgctgagattaagaactaagt

SEQ ID NO: 1615032 - DNA, 25 bp, Homo sapien
gaactaagttctatttgatgccaga

SEQ ID NO: 1615033 - DNA, 25 bp, Homo sapien
aagaagccaggtggagcagaagaca

SEQ ID NO: 1615034 - DNA, 25 bp, Homo sapien
aagccaggtggagcagaagacaaga

SEQ ID NO: 1615035 - DNA, 25 bp, Homo sapien
cagcgggagagttgtcaagaagcca

SEQ ID NO: 1615036 - DNA, 25 bp, Homo sapien
tctttctggtacagcgggagagttg

SEQ ID NO: 1615037 - DNA, 25 bp, Homo sapien
cccggcgcgtgtgtgtagagcctca

SEQ ID NO: 1615038 - DNA, 25 bp, Homo sapien
ggagccagttcacccacgggtggtc

SEQ ID NO: 1615039 - DNA, 25 bp, Homo sapien
acgggtggtccaggtcacgactctg

SEQ ID NO: 1615040 - DNA, 25 bp, Homo sapien
cccttaggccaggtcagctgcgagg

SEQ ID NO: 1615041 - DNA, 25 bp, Homo sapien
gagccccgcaggtacagggtgggat

SEQ ID NO: 1615042 - DNA, 25 bp, Homo sapien
tgagtgaggatccacgcacccccat

SEQ ID NO: 1615043 - DNA, 25 bp, Homo sapien
tgtacattgcccgagtgagtgagga

SEQ ID NO: 1615044 - DNA, 25 bp, Homo sapien
tctccgtgcggtccggagcctagga

SEQ ID NO: 1615045 - DNA, 25 bp, Homo sapien
ctgagtggactgaggcctgccccgc

SEQ ID NO: 1615046 - DNA, 25 bp, Homo sapien
gccacctccgggaagccttgtacag

SEQ ID NO: 1615047 - DNA, 25 bp, Homo sapien
tcaagaagccaacgctgagtcaggc

SEQ ID NO: 1615048 - DNA, 25 bp, Homo sapien
tacagtggcgcctcttggagttcaa

SEQ ID NO: 1615049 - DNA, 25 bp, Homo sapien
ggaacagtcataggctctctggccc

SEQ ID NO: 1615050 - DNA, 25 bp, Homo sapien
taagcgggacttgaatcaggaaagg

SEQ ID NO: 1615051 - DNA, 25 bp, Homo sapien
caagaggttgtcatttgcccagagc

SEQ ID NO: 1615052 - DNA, 25 bp, Homo sapien
cagagccaccagctaagcgggactt

SEQ ID NO: 1615053 - DNA, 25 bp, Homo sapien
cccggctggcagaggattttaattg

SEQ ID NO: 1615054 - DNA, 25 bp, Homo sapien
ccctctgcgttagctggtttggaat

SEQ ID NO: 1615055 - DNA, 25 bp, Homo sapien
gaatttcgctacatacagtcggccc

SEQ ID NO: 1615056 - DNA, 25 bp, Homo sapien
ttgttgacagaatttcgctacatac

SEQ ID NO: 1615057 - DNA, 25 bp, Homo sapien
ggctgatctcaaaatgagatcctcc

SEQ ID NO: 1615058 - DNA, 25 bp, Homo sapien
ctggtctacaacaggttcattgtca

SEQ ID NO: 1615059 - DNA, 25 bp, Homo sapien
agggctgatctcaaaatgagatcct

SEQ ID NO: 1615060 - DNA, 25 bp, Homo sapien
gtctacaacaggttcattgtcacct

SEQ ID NO: 1615061 - DNA, 25 bp, Homo sapien
gccgcccggctcttgggaaccaaga

SEQ ID NO: 1615062 - DNA, 25 bp, Homo sapien
ttgtcttgttcttgcagcccagcat

SEQ ID NO: 1615063 - DNA, 25 bp, Homo sapien
gaaagacatattggctgacctcata

SEQ ID NO: 1615064 - DNA, 25 bp, Homo sapien
tcctccatgaatttgaaagacatat

SEQ ID NO: 1615065 - DNA, 25 bp, Homo sapien
cagaaactgctacccaaggctaagg

SEQ ID NO: 1615066 - DNA, 25 bp, Homo sapien
caaagctaccttgtgtcgcagcaaa

SEQ ID NO: 1615067 - DNA, 25 bp, Homo sapien
ggtatcagccgaacccaagtactgg

SEQ ID NO: 1615068 - DNA, 25 bp, Homo sapien
tgatgagggcatccgtttctgaggc

SEQ ID NO: 1615069 - DNA, 25 bp, Homo sapien
tcctttgcagcagccatgaacgggc

SEQ ID NO: 1615070 - DNA, 25 bp, Homo sapien
ggctatggccatgcagtactaagga

SEQ ID NO: 1615071 - DNA, 25 bp, Homo sapien
gatccacgatatacctgtcagcgag

SEQ ID NO: 1615072 - DNA, 25 bp, Homo sapien
gattgtgcccaatgtcctcttagag

SEQ ID NO: 1615073 - DNA, 25 bp, Homo sapien
cacgagcattgggtgtactggcaca

SEQ ID NO: 1615074 - DNA, 25 bp, Homo sapien
cacgctgatcaatgagctgtatggg

SEQ ID NO: 1615075 - DNA, 25 bp, Homo sapien
tcttttgcttggtgaagtgccccca

SEQ ID NO: 1615076 - DNA, 25 bp, Homo sapien
tctgtaacattctgagtgtcctgaa

SEQ ID NO: 1615077 - DNA, 25 bp, Homo sapien
tggcttcagcttcaagggcaatgtt

SEQ ID NO: 1615078 - DNA, 25 bp, Homo sapien
tgtgaaaccagctgtcgctgttttt

SEQ ID NO: 1615079 - DNA, 25 bp, Homo sapien
aaaccagctgtcgctgtttttcctc

SEQ ID NO: 1615080 - DNA, 25 bp, Homo sapien
tgaaaccagctgtcgctgtttttcc

SEQ ID NO: 1615081 - DNA, 25 bp, Homo sapien
ttgtgaaaccagctgtcgctgtttt

SEQ ID NO: 1615082 - DNA, 25 bp, Homo sapien
atgtctgaggccagcacaccgagac

SEQ ID NO: 1615083 - DNA, 25 bp, Homo sapien
catagagggatgcaccacttctggg

SEQ ID NO: 1615084 - DNA, 25 bp, Homo sapien
gagcaaccgaagaagattccggccc

SEQ ID NO: 1615085 - DNA, 25 bp, Homo sapien
acaccgagaccattggccgccatgg

SEQ ID NO: 1615086 - DNA, 25 bp, Homo sapien
catttatgggacaggcccctagaat

SEQ ID NO: 1615087 - DNA, 25 bp, Homo sapien
tgggacaggcccctagaatgggagg

SEQ ID NO: 1615088 - DNA, 25 bp, Homo sapien
ccctagaatgggaggcccaggacag

SEQ ID NO: 1615089 - DNA, 25 bp, Homo sapien
gacaggcccctagaatgggaggccc

SEQ ID NO: 1615090 - DNA, 25 bp, Homo sapien
tgtctcccccggattaggtgctcct

SEQ ID NO: 1615091 - DNA, 25 bp, Homo sapien
ctcccccggattaggtgctcctgga

SEQ ID NO: 1615092 - DNA, 25 bp, Homo sapien
ggctctgtctcccccggattaggtg

SEQ ID NO: 1615093 - DNA, 25 bp, Homo sapien
tccaagctctcatccggctctgtct

SEQ ID NO: 1615094 - DNA, 25 bp, Homo sapien
tgcagggagcccttgagtccagact

SEQ ID NO: 1615095 - DNA, 25 bp, Homo sapien
gactcctgtgtgtgctacgtagcct

SEQ ID NO: 1615096 - DNA, 25 bp, Homo sapien
acaagaccccgcaatgctgcaggga

SEQ ID NO: 1615097 - DNA, 25 bp, Homo sapien
gcaggacattcaagcttcaaacagg

SEQ ID NO: 1615098 - DNA, 25 bp, Homo sapien
caggccctgatatcccaggagcgat

SEQ ID NO: 1615099 - DNA, 25 bp, Homo sapien
tcccaggagcgatggatgtctagcc

SEQ ID NO: 1615100 - DNA, 25 bp, Homo sapien
aggccctgatatcccaggagcgatg

SEQ ID NO: 1615101 - DNA, 25 bp, Homo sapien
gagcgatggatgtctagccccccca

SEQ ID NO: 1615102 - DNA, 25 bp, Homo sapien
cgtctggcccactgggccccaggac

SEQ ID NO: 1615103 - DNA, 25 bp, Homo sapien
ctcaggggcaccctcaggtagctct

SEQ ID NO: 1615104 - DNA, 25 bp, Homo sapien
ggcaccctcaggtagctctgtcttc

SEQ ID NO: 1615105 - DNA, 25 bp, Homo sapien
tgtcttctcgagaggctcagtcctc

SEQ ID NO: 1615106 - DNA, 25 bp, Homo sapien
tcaggtagctctgtcttctcgagag

SEQ ID NO: 1615107 - DNA, 25 bp, Homo sapien
tccagggaactcaatggcggagctg

SEQ ID NO: 1615108 - DNA, 25 bp, Homo sapien
cagggaactcaatggcggagctggc

SEQ ID NO: 1615109 - DNA, 25 bp, Homo sapien
ctccagggaactcaatggcggagct

SEQ ID NO: 1615110 - DNA, 25 bp, Homo sapien
ggaactcaatggcggagctggcaca

SEQ ID NO: 1615111 - DNA, 25 bp, Homo sapien
ttcaggccaaggtagccaaggacgc

SEQ ID NO: 1615112 - DNA, 25 bp, Homo sapien
gccaaggacgcccacgagaaggatg

SEQ ID NO: 1615113 - DNA, 25 bp, Homo sapien
ctgttcaggccaaggtagccaagga

SEQ ID NO: 1615114 - DNA, 25 bp, Homo sapien
cgcccacgagaaggatgctcaggaa

SEQ ID NO: 1615115 - DNA, 25 bp, Homo sapien
gctcgcacctgcaccgtgtaggcta

SEQ ID NO: 1615116 - DNA, 25 bp, Homo sapien
gtgtaggctacaccagcccgcaggc

SEQ ID NO: 1615117 - DNA, 25 bp, Homo sapien
ggccactgagggtaacttgggtctc

SEQ ID NO: 1615118 - DNA, 25 bp, Homo sapien
agccacgctgtgtctgctcgcacct

SEQ ID NO: 1615119 - DNA, 25 bp, Homo sapien
cttcatctcggcagcggacaacata

SEQ ID NO: 1615120 - DNA, 25 bp, Homo sapien
catactcctttaggacgccgggaca

SEQ ID NO: 1615121 - DNA, 25 bp, Homo sapien
caccgagacgtggtgcggtgtccca

SEQ ID NO: 1615122 - DNA, 25 bp, Homo sapien
gtgcccagtccacagacacagagtc

SEQ ID NO: 1615123 - DNA, 25 bp, Homo sapien
taggtggacaggaccgtagaccaca

SEQ ID NO: 1615124 - DNA, 25 bp, Homo sapien
caggaccgtagaccacaaggtgagc

SEQ ID NO: 1615125 - DNA, 25 bp, Homo sapien
cattgcccccaaagtggtaggtgga

SEQ ID NO: 1615126 - DNA, 25 bp, Homo sapien
agatggtaatgtagtaacacttttc

SEQ ID NO: 1615127 - DNA, 25 bp, Homo sapien
ctgccccattgccccagactctcga

SEQ ID NO: 1615128 - DNA, 25 bp, Homo sapien
gactctcgactccagctgtaggttg

SEQ ID NO: 1615129 - DNA, 25 bp, Homo sapien
agactctcgactccagctgtaggtt

SEQ ID NO: 1615130 - DNA, 25 bp, Homo sapien
ccccattgccccagactctcgactc

SEQ ID NO: 1615131 - DNA, 25 bp, Homo sapien
ggtcccgttggttccgacgctgata

SEQ ID NO: 1615132 - DNA, 25 bp, Homo sapien
cattccagccggatccgggtcttgc

SEQ ID NO: 1615133 - DNA, 25 bp, Homo sapien
ccgggctggccaatacatggtggtc

SEQ ID NO: 1615134 - DNA, 25 bp, Homo sapien
tacgtcatgctctgagcccgggctg

SEQ ID NO: 1615135 - DNA, 25 bp, Homo sapien
aaaatagtaggtcggccacagtggc

SEQ ID NO: 1615136 - DNA, 25 bp, Homo sapien
tctgccaacagactgagaacctagc

SEQ ID NO: 1615137 - DNA, 25 bp, Homo sapien
gggcaacgtagagagacacctgtct

SEQ ID NO: 1615138 - DNA, 25 bp, Homo sapien
tagcaacagccgtttattgagtacc

SEQ ID NO: 1615139 - DNA, 25 bp, Homo sapien
gaatctcttgaatctggaaggcgga

SEQ ID NO: 1615140 - DNA, 25 bp, Homo sapien
ggttgcagtgagctgagatcatgcc

SEQ ID NO: 1615141 - DNA, 25 bp, Homo sapien
ttgcagtgagctgagatcatgccat

SEQ ID NO: 1615142 - DNA, 25 bp, Homo sapien
gagaatctcttgaatctggaaggcg

SEQ ID NO: 1615143 - DNA, 25 bp, Homo sapien
cctggtctagctgaggctcagagta

SEQ ID NO: 1615144 - DNA, 25 bp, Homo sapien
tgaggggccctcataccgccctccc

SEQ ID NO: 1615145 - DNA, 25 bp, Homo sapien
gaggctcagagtaggtgctcagctc

SEQ ID NO: 1615146 - DNA, 25 bp, Homo sapien
tagctgaggctcagagtaggtgctc

SEQ ID NO: 1615147 - DNA, 25 bp, Homo sapien
gagatagggcatcttccccaggtgc

SEQ ID NO: 1615148 - DNA, 25 bp, Homo sapien
agccacgttgtaggcagcacccgag

SEQ ID NO: 1615149 - DNA, 25 bp, Homo sapien
caggccaggaccaaattggttcgag

SEQ ID NO: 1615150 - DNA, 25 bp, Homo sapien
gaatgtgccacgtctggttcaggcc

SEQ ID NO: 1615151 - DNA, 25 bp, Homo sapien
aggcgccagcccttgacagccttct

SEQ ID NO: 1615152 - DNA, 25 bp, Homo sapien
tggagctgtagtcggtaagtgacct

SEQ ID NO: 1615153 - DNA, 25 bp, Homo sapien
cgtgccaggcgccagcccttgacag

SEQ ID NO: 1615154 - DNA, 25 bp, Homo sapien
tgtggagctgtagtcggtaagtgac

SEQ ID NO: 1615155 - DNA, 25 bp, Homo sapien
tgatcacactcatcatcccataggc

SEQ ID NO: 1615156 - DNA, 25 bp, Homo sapien
gcagggcacagcctatgaagacaga

SEQ ID NO: 1615157 - DNA, 25 bp, Homo sapien
ctgtcaggagtatgaaagacagctt

SEQ ID NO: 1615158 - DNA, 25 bp, Homo sapien
gcttgtgggtacctgatcacactca

SEQ ID NO: 1615159 - DNA, 25 bp, Homo sapien
ccagctgctccaccgagaatctcac

SEQ ID NO: 1615160 - DNA, 25 bp, Homo sapien
ctctttcagggtcagccgcctcctc

SEQ ID NO: 1615161 - DNA, 25 bp, Homo sapien
tctttcagggtcagccgcctcctcc

SEQ ID NO: 1615162 - DNA, 25 bp, Homo sapien
cagctgccgtcgtcggagctggaat

SEQ ID NO: 1615163 - DNA, 25 bp, Homo sapien
ccgtcgtcggagctggaattcctgg

SEQ ID NO: 1615164 - DNA, 25 bp, Homo sapien
cccagctgccgtcgtcggagctgga

SEQ ID NO: 1615165 - DNA, 25 bp, Homo sapien
ctgccgtcgtcggagctggaattcc

SEQ ID NO: 1615166 - DNA, 25 bp, Homo sapien
catcatcctgaggtccgcagtcgcc

SEQ ID NO: 1615167 - DNA, 25 bp, Homo sapien
agtatcatcatcctgaggtccgcag

SEQ ID NO: 1615168 - DNA, 25 bp, Homo sapien
atcatcatcctgaggtccgcagtcg

SEQ ID NO: 1615169 - DNA, 25 bp, Homo sapien
tatcatcatcctgaggtccgcagtc

SEQ ID NO: 1615170 - DNA, 25 bp, Homo sapien
gggtctcccactccatacgcagctg

SEQ ID NO: 1615171 - DNA, 25 bp, Homo sapien
tgtccggtgccggaactgcacctca

SEQ ID NO: 1615172 - DNA, 25 bp, Homo sapien
tgcccggccaacttggacaccttga

SEQ ID NO: 1615173 - DNA, 25 bp, Homo sapien
ctcagcaccaacctggttatccggg

SEQ ID NO: 1615174 - DNA, 25 bp, Homo sapien
tgtgctgcgtaactacaaattgtat

SEQ ID NO: 1615175 - DNA, 25 bp, Homo sapien
tggaactctagatttatttgtgctg

SEQ ID NO: 1615176 - DNA, 25 bp, Homo sapien
cacagttctactttcggtgcctaga

SEQ ID NO: 1615177 - DNA, 25 bp, Homo sapien
ttatacatgtaagtgggatgggcgc

SEQ ID NO: 1615178 - DNA, 25 bp, Homo sapien
accccagcctggtcggagaactgca

SEQ ID NO: 1615179 - DNA, 25 bp, Homo sapien
ggttcctggcccaggattccaccca

SEQ ID NO: 1615180 - DNA, 25 bp, Homo sapien
cctggtcggagaactgcagcctggt

SEQ ID NO: 1615181 - DNA, 25 bp, Homo sapien
cctggtggctgagccggcggcgaag

SEQ ID NO: 1615182 - DNA, 25 bp, Homo sapien
tggatatccgatagcatctcaggtc

SEQ ID NO: 1615183 - DNA, 25 bp, Homo sapien
agctgtgggaccctcatactgccag

SEQ ID NO: 1615184 - DNA, 25 bp, Homo sapien
aacaccgcaggaagtggctgacccc

SEQ ID NO: 1615185 - DNA, 25 bp, Homo sapien
tactgccaggagcactcgtaacgat

SEQ ID NO: 1615186 - DNA, 25 bp, Homo sapien
aagtgataatgttcagagaggcggc

SEQ ID NO: 1615187 - DNA, 25 bp, Homo sapien
tttctcccatgtaccgaccaatctg

SEQ ID NO: 1615188 - DNA, 25 bp, Homo sapien
cctgagaccatgctagggaagtgat

SEQ ID NO: 1615189 - DNA, 25 bp, Homo sapien
caatctgaacggacacagacaccag

SEQ ID NO: 1615190 - DNA, 25 bp, Homo sapien
ctgagtctgcatccggatatggcgg

SEQ ID NO: 1615191 - DNA, 25 bp, Homo sapien
gcatccggatatggcgggtcctgaa

SEQ ID NO: 1615192 - DNA, 25 bp, Homo sapien
tctgcatccggatatggcgggtcct

SEQ ID NO: 1615193 - DNA, 25 bp, Homo sapien
ggatatggcgggtcctgaaaacagc

SEQ ID NO: 1615194 - DNA, 25 bp, Homo sapien
gacataatgacattcctggccttgc

SEQ ID NO: 1615195 - DNA, 25 bp, Homo sapien
gaagacataatgacattcctggcct

SEQ ID NO: 1615196 - DNA, 25 bp, Homo sapien
agacataatgacattcctggccttg

SEQ ID NO: 1615197 - DNA, 25 bp, Homo sapien
acataatgacattcctggccttgca

SEQ ID NO: 1615198 - DNA, 25 bp, Homo sapien
gagggggaccacccaggtcaccagc

SEQ ID NO: 1615199 - DNA, 25 bp, Homo sapien
gggaccacccaggtcaccagcggct

SEQ ID NO: 1615200 - DNA, 25 bp, Homo sapien
ccacccaggtcaccagcggctccat

SEQ ID NO: 1615201 - DNA, 25 bp, Homo sapien
agggggaccacccaggtcaccagcg

SEQ ID NO: 1615202 - DNA, 25 bp, Homo sapien
tgccacctgcgaggttcagccaccc

SEQ ID NO: 1615203 - DNA, 25 bp, Homo sapien
ccggaacacattgaagctgagcaag

SEQ ID NO: 1615204 - DNA, 25 bp, Homo sapien
gtccccactccggaacacattgaag

SEQ ID NO: 1615205 - DNA, 25 bp, Homo sapien
cggatccacgtagagccccacagcc

SEQ ID NO: 1615206 - DNA, 25 bp, Homo sapien
acacccagatgccagccccatgggc

SEQ ID NO: 1615207 - DNA, 25 bp, Homo sapien
ccagatgccagccccatgggcccat

SEQ ID NO: 1615208 - DNA, 25 bp, Homo sapien
acccagatgccagccccatgggccc

SEQ ID NO: 1615209 - DNA, 25 bp, Homo sapien
ctgaactgaacacccagatgccagc

SEQ ID NO: 1615210 - DNA, 25 bp, Homo sapien
tgaggactggctgctaataggtaca

SEQ ID NO: 1615211 - DNA, 25 bp, Homo sapien
tggaatcagatcgtggtgatggtta

SEQ ID NO: 1615212 - DNA, 25 bp, Homo sapien
atgaggactggctgctaataggtac

SEQ ID NO: 1615213 - DNA, 25 bp, Homo sapien
ggaatcagatcgtggtgatggttac

SEQ ID NO: 1615214 - DNA, 25 bp, Homo sapien
agaggcagcggagtgttctgcaacc

SEQ ID NO: 1615215 - DNA, 25 bp, Homo sapien
ggaggtagacgccagagcagcggtg

SEQ ID NO: 1615216 - DNA, 25 bp, Homo sapien
gttctgcaacctctggagctgccct

SEQ ID NO: 1615217 - DNA, 25 bp, Homo sapien
agacgccagagcagcggtgacccca

SEQ ID NO: 1615218 - DNA, 25 bp, Homo sapien
gctgagcagatttgaccagttttaa

SEQ ID NO: 1615219 - DNA, 25 bp, Homo sapien
tcgggccagatctgactctgtctaa

SEQ ID NO: 1615220 - DNA, 25 bp, Homo sapien
ggccgctgagcagatttgaccagtt

SEQ ID NO: 1615221 - DNA, 25 bp, Homo sapien
ctaggaaggtttcgggccagatctg

SEQ ID NO: 1615222 - DNA, 25 bp, Homo sapien
agagccacattgccttgggcctggc

SEQ ID NO: 1615223 - DNA, 25 bp, Homo sapien
cacattgccttgggcctggcggggg

SEQ ID NO: 1615224 - DNA, 25 bp, Homo sapien
gccacattgccttgggcctggcggg

SEQ ID NO: 1615225 - DNA, 25 bp, Homo sapien
gagccacattgccttgggcctggcg

SEQ ID NO: 1615226 - DNA, 25 bp, Homo sapien
cagctcagaggttgaagctttgaca

SEQ ID NO: 1615227 - DNA, 25 bp, Homo sapien
cctgtcatgtgccagacgcttgcat

SEQ ID NO: 1615228 - DNA, 25 bp, Homo sapien
actgtgtgtatgctctgtgctgcgg

SEQ ID NO: 1615229 - DNA, 25 bp, Homo sapien
catggtcgcaaatgggcagctggcc

SEQ ID NO: 1615230 - DNA, 25 bp, Homo sapien
agagttcatcgacaagcaggtgggc

SEQ ID NO: 1615231 - DNA, 25 bp, Homo sapien
catctcaggcggagccaaggtctag

SEQ ID NO: 1615232 - DNA, 25 bp, Homo sapien
tctatgagggccacatcgagaagga

SEQ ID NO: 1615233 - DNA, 25 bp, Homo sapien
gagcatggccaccaacctctatgag

SEQ ID NO: 1615234 - DNA, 25 bp, Homo sapien
caagatgccgtgtgtttgaggccca

SEQ ID NO: 1615235 - DNA, 25 bp, Homo sapien
tgaggcccagcagagtaagcccttg

SEQ ID NO: 1615236 - DNA, 25 bp, Homo sapien
cagaaaacccagtcgaggctcaagt

SEQ ID NO: 1615237 - DNA, 25 bp, Homo sapien
aagcccttggccgtgatgtgtctga

SEQ ID NO: 1615238 - DNA, 25 bp, Homo sapien
caagcgcttttacgtggcttctccc

SEQ ID NO: 1615239 - DNA, 25 bp, Homo sapien
gcgcttttacgtggcttctccctca

SEQ ID NO: 1615240 - DNA, 25 bp, Homo sapien
gccaagcgcttttacgtggcttctc

SEQ ID NO: 1615241 - DNA, 25 bp, Homo sapien
aagcgcttttacgtggcttctccct

SEQ ID NO: 1615242 - DNA, 25 bp, Homo sapien
agtgtgcttaaatgcggggcgcccg

SEQ ID NO: 1615243 - DNA, 25 bp, Homo sapien
aagccagaacgcaagcgccaggctg

SEQ ID NO: 1615244 - DNA, 25 bp, Homo sapien
ggccccggtggaagccagaacgcaa

SEQ ID NO: 1615245 - DNA, 25 bp, Homo sapien
tcgggctcggctccgcagcggtgca

SEQ ID NO: 1615246 - DNA, 25 bp, Homo sapien
taatttgaagcgaggcatgagcggc

SEQ ID NO: 1615247 - DNA, 25 bp, Homo sapien
gacccagtgacgagtggcccttgta

SEQ ID NO: 1615248 - DNA, 25 bp, Homo sapien
tgctgatggaggactcaatggccca

SEQ ID NO: 1615249 - DNA, 25 bp, Homo sapien
ccagctgacgaatggtggacccagt

SEQ ID NO: 1615250 - DNA, 25 bp, Homo sapien
ctgccatgtttacagagggcccctg

SEQ ID NO: 1615251 - DNA, 25 bp, Homo sapien
tgctgcttccgagaacctcggccgt

SEQ ID NO: 1615252 - DNA, 25 bp, Homo sapien
aaataattaaactcgcaggccaggc

SEQ ID NO: 1615253 - DNA, 25 bp, Homo sapien
tatctacgtgtcctccgggcattgc

SEQ ID NO: 1615254 - DNA, 25 bp, Homo sapien
tcctcttttgggacaagagccctgg

SEQ ID NO: 1615255 - DNA, 25 bp, Homo sapien
gagccctggttttctacgctgccct

SEQ ID NO: 1615256 - DNA, 25 bp, Homo sapien
ggaatcacagctccccgtactggtg

SEQ ID NO: 1615257 - DNA, 25 bp, Homo sapien
cagggcttctcttcgatcatgttgg

SEQ ID NO: 1615258 - DNA, 25 bp, Homo sapien
aacatccgggtcacccaagaggcct

SEQ ID NO: 1615259 - DNA, 25 bp, Homo sapien
ggtcacccaagaggcctcacctagt

SEQ ID NO: 1615260 - DNA, 25 bp, Homo sapien
tgacaccctagtcctgcagggttag

SEQ ID NO: 1615261 - DNA, 25 bp, Homo sapien
gaggcctcacctagtgacaccctag

SEQ ID NO: 1615262 - DNA, 25 bp, Homo sapien
cactgtgaagccaactgtaccctct

SEQ ID NO: 1615263 - DNA, 25 bp, Homo sapien
atgaaaccaagggagctaggaggca

SEQ ID NO: 1615264 - DNA, 25 bp, Homo sapien
tcagtgacgaaacaggcttggctca

SEQ ID NO: 1615265 - DNA, 25 bp, Homo sapien
tgggctttgtcgcatcactgtgaag

SEQ ID NO: 1615266 - DNA, 25 bp, Homo sapien
ttcacaactgacaactgtggatggg

SEQ ID NO: 1615267 - DNA, 25 bp, Homo sapien
tcatgacatctcctaaggaactggg

SEQ ID NO: 1615268 - DNA, 25 bp, Homo sapien
gctttagggtgtcatctggcccctc

SEQ ID NO: 1615269 - DNA, 25 bp, Homo sapien
tcgctttattgggtgcgtgtagtgt

SEQ ID NO: 1615270 - DNA, 25 bp, Homo sapien
cttggcgcctgtgaccgcagggtcc

SEQ ID NO: 1615271 - DNA, 25 bp, Homo sapien
caggcgctcaaaggtctgcttgacg

SEQ ID NO: 1615272 - DNA, 25 bp, Homo sapien
ggtccgccgtgtccaacgactcgga

SEQ ID NO: 1615273 - DNA, 25 bp, Homo sapien
aatgttgtccttggcgcttgcctca

SEQ ID NO: 1615274 - DNA, 25 bp, Homo sapien
tccctcaggatccaactcaaatggc

SEQ ID NO: 1615275 - DNA, 25 bp, Homo sapien
caacaaagcgttggacggtgagtgt

SEQ ID NO: 1615276 - DNA, 25 bp, Homo sapien
taaatccttaaactttctgcatggc

SEQ ID NO: 1615277 - DNA, 25 bp, Homo sapien
cctggatgaaggctagtttgcagaa

SEQ ID NO: 1615278 - DNA, 25 bp, Homo sapien
cacctgggcattgtcccatgagtag

SEQ ID NO: 1615279 - DNA, 25 bp, Homo sapien
tgccggccacgttctgatgacacca

SEQ ID NO: 1615280 - DNA, 25 bp, Homo sapien
tctgatgacaccacccgctcatcct

SEQ ID NO: 1615281 - DNA, 25 bp, Homo sapien
caaggtggtcagctagctgccggcc

SEQ ID NO: 1615282 - DNA, 25 bp, Homo sapien
aagcccatagcgccccggtagtatg

SEQ ID NO: 1615283 - DNA, 25 bp, Homo sapien
cggtagtatgcggtggtgatggtcc

SEQ ID NO: 1615284 - DNA, 25 bp, Homo sapien
tgcattgaaggattcctcgttggtg

SEQ ID NO: 1615285 - DNA, 25 bp, Homo sapien
ttgaaggattcctcgttggtgatgt

SEQ ID NO: 1615286 - DNA, 25 bp, Homo sapien
aggtgctgtttctgccccggtacac

SEQ ID NO: 1615287 - DNA, 25 bp, Homo sapien
tccaagtacgggaatccaaccgagc

SEQ ID NO: 1615288 - DNA, 25 bp, Homo sapien
caggattaggtgcttatgggagaac

SEQ ID NO: 1615289 - DNA, 25 bp, Homo sapien
cccagtgtgtaagtgaatgactcca

SEQ ID NO: 1615290 - DNA, 25 bp, Homo sapien
cttctgcccatagcgcgagtctgtg

SEQ ID NO: 1615291 - DNA, 25 bp, Homo sapien
cgtgaacgagtcgtcagcatagcgg

SEQ ID NO: 1615292 - DNA, 25 bp, Homo sapien
tcgaagttctgatccgaggactcct

SEQ ID NO: 1615293 - DNA, 25 bp, Homo sapien
cacgctgctgttgccgatgatgaga

SEQ ID NO: 1615294 - DNA, 25 bp, Homo sapien
cagtattaattggtggtgcccccag

SEQ ID NO: 1615295 - DNA, 25 bp, Homo sapien
gaggacacccttatcccatcaggag

SEQ ID NO: 1615296 - DNA, 25 bp, Homo sapien
ggcagcctgtgaccttgaaatcctg

SEQ ID NO: 1615297 - DNA, 25 bp, Homo sapien
ggctccagaaaacggccggtgtatg

SEQ ID NO: 1615298 - DNA, 25 bp, Homo sapien
gcgtgtgcacaccacgcgcacgcgc

SEQ ID NO: 1615299 - DNA, 25 bp, Homo sapien
cgcgtgtgcacaccacgcgcacgcg

SEQ ID NO: 1615300 - DNA, 25 bp, Homo sapien
acgcgtgtgcacaccacgcgcacgc

SEQ ID NO: 1615301 - DNA, 25 bp, Homo sapien
cgtgtgcacaccacgcgcacgcgca

SEQ ID NO: 1615302 - DNA, 25 bp, Homo sapien
tgcaccgatgcaacggcgaccctag

SEQ ID NO: 1615303 - DNA, 25 bp, Homo sapien
acggcgaccctagcggcggtgactt

SEQ ID NO: 1615304 - DNA, 25 bp, Homo sapien
acttttttggcggtggcggtgacag

SEQ ID NO: 1615305 - DNA, 25 bp, Homo sapien
gacaggaccccggtgcgttgatgtg

SEQ ID NO: 1615306 - DNA, 25 bp, Homo sapien
gaaatgcaccaagttcgtgaacccg

SEQ ID NO: 1615307 - DNA, 25 bp, Homo sapien
gatcgaaccctaggcttgagcatgg

SEQ ID NO: 1615308 - DNA, 25 bp, Homo sapien
tatttatgaacgaagccagctgctc

SEQ ID NO: 1615309 - DNA, 25 bp, Homo sapien
taaatattcaggcacgcgaagaggg

SEQ ID NO: 1615310 - DNA, 25 bp, Homo sapien
cacacctcgtcggagtttatccaag

SEQ ID NO: 1615311 - DNA, 25 bp, Homo sapien
tccaagtactaggatcaggttacag

SEQ ID NO: 1615312 - DNA, 25 bp, Homo sapien
tctaagatatttcagggaggtcaca

SEQ ID NO: 1615313 - DNA, 25 bp, Homo sapien
gctatgatggcaagaaagcctcagg

SEQ ID NO: 1615314 - DNA, 25 bp, Homo sapien
ggtgcataggttcaatcagtcttca

SEQ ID NO: 1615315 - DNA, 25 bp, Homo sapien
gacagaaaataaagcgacttaaagc

SEQ ID NO: 1615316 - DNA, 25 bp, Homo sapien
gggctcctacatccagagacaccaa

SEQ ID NO: 1615317 - DNA, 25 bp, Homo sapien
gcgacttaaagcaacaactggtgca

SEQ ID NO: 1615318 - DNA, 25 bp, Homo sapien
gcttgattgtctccctaaatgggtg

SEQ ID NO: 1615319 - DNA, 25 bp, Homo sapien
cctgggagccacctataactaagag

SEQ ID NO: 1615320 - DNA, 25 bp, Homo sapien
tctcctcacagggatagaagcccag

SEQ ID NO: 1615321 - DNA, 25 bp, Homo sapien
tttgtgcagggctactacagaggca

SEQ ID NO: 1615322 - DNA, 25 bp, Homo sapien
aaggcctctttggctaaagctgtct

SEQ ID NO: 1615323 - DNA, 25 bp, Homo sapien
tcctctggttgtcgaggggtaagtc

SEQ ID NO: 1615324 - DNA, 25 bp, Homo sapien
cctctttggctaaagctgtctcttc

SEQ ID NO: 1615325 - DNA, 25 bp, Homo sapien
cagtgtcaggcaactccaaggcctc

SEQ ID NO: 1615326 - DNA, 25 bp, Homo sapien
tggaatctgtcaggcccgtcccgct

SEQ ID NO: 1615327 - DNA, 25 bp, Homo sapien
atctgtcaggcccgtcccgctcggg

SEQ ID NO: 1615328 - DNA, 25 bp, Homo sapien
ctgtcaggcccgtcccgctcggggt

SEQ ID NO: 1615329 - DNA, 25 bp, Homo sapien
gaatctgtcaggcccgtcccgctcg

SEQ ID NO: 1615330 - DNA, 25 bp, Homo sapien
tctcgattgtcctccagcgtgtcca

SEQ ID NO: 1615331 - DNA, 25 bp, Homo sapien
ggtggaccaggtcagcccaagtctc

SEQ ID NO: 1615332 - DNA, 25 bp, Homo sapien
atctgggtggaccaggtcagcccaa

SEQ ID NO: 1615333 - DNA, 25 bp, Homo sapien
gatcttgctctggtaccactctcga

SEQ ID NO: 1615334 - DNA, 25 bp, Homo sapien
tgggactgatgtccaggcccgactc

SEQ ID NO: 1615335 - DNA, 25 bp, Homo sapien
cttctccactgaggccgtatgcttg

SEQ ID NO: 1615336 - DNA, 25 bp, Homo sapien
tgaggccgtatgcttgtcacacatg

SEQ ID NO: 1615337 - DNA, 25 bp, Homo sapien
acgctcgcggtctccctgctggaag

SEQ ID NO: 1615338 - DNA, 25 bp, Homo sapien
tcttgaggtcggccaggaggttcat

SEQ ID NO: 1615339 - DNA, 25 bp, Homo sapien
ggaggacaccgaggcttgtcacctt

SEQ ID NO: 1615340 - DNA, 25 bp, Homo sapien
cggccaggaggttcatgtgtttgga

SEQ ID NO: 1615341 - DNA, 25 bp, Homo sapien
ttcggtcggaatagttgtccaggag

SEQ ID NO: 1615342 - DNA, 25 bp, Homo sapien
gaagatatcgcagttctctgcctgc

SEQ ID NO: 1615343 - DNA, 25 bp, Homo sapien
catgtcaatgaccatcctgcgcaga

SEQ ID NO: 1615344 - DNA, 25 bp, Homo sapien
cagtcgctgcttggcgctgaggttc

SEQ ID NO: 1615345 - DNA, 25 bp, Homo sapien
gtcgttgtacataagcgccagctct

SEQ ID NO: 1615346 - DNA, 25 bp, Homo sapien
gtggtgcaatcacggttccctgcag

SEQ ID NO: 1615347 - DNA, 25 bp, Homo sapien
gcaatcacggttccctgcagcctca

SEQ ID NO: 1615348 - DNA, 25 bp, Homo sapien
aacctcctggcctcaagtgatcctc

SEQ ID NO: 1615349 - DNA, 25 bp, Homo sapien
ggtgtgtgccaccacccttgactaa

SEQ ID NO: 1615350 - DNA, 25 bp, Homo sapien
aggtcttggtggaaccagatcagct

SEQ ID NO: 1615351 - DNA, 25 bp, Homo sapien
aaaggtcttggtggaaccagatcag

SEQ ID NO: 1615352 - DNA, 25 bp, Homo sapien
taaaggtcttggtggaaccagatca

SEQ ID NO: 1615353 - DNA, 25 bp, Homo sapien
aaggtcttggtggaaccagatcagc

SEQ ID NO: 1615354 - DNA, 25 bp, Homo sapien
gtggatggcgcttgcaaagagggca

SEQ ID NO: 1615355 - DNA, 25 bp, Homo sapien
tcgtggatggcgcttgcaaagaggg

SEQ ID NO: 1615356 - DNA, 25 bp, Homo sapien
tccacgtcgtggatggcgcttgcaa

SEQ ID NO: 1615357 - DNA, 25 bp, Homo sapien
cacgtcgtggatggcgcttgcaaag

SEQ ID NO: 1615358 - DNA, 25 bp, Homo sapien
catgtaggctgttgtggtaggccac

SEQ ID NO: 1615359 - DNA, 25 bp, Homo sapien
ccacgtcggcggcatgtaggctgtt

SEQ ID NO: 1615360 - DNA, 25 bp, Homo sapien
cgtggtagtgaccttccagcatcag

SEQ ID NO: 1615361 - DNA, 25 bp, Homo sapien
agcagcacatgcgtggactgggcca

SEQ ID NO: 1615362 - DNA, 25 bp, Homo sapien
ggtccatcacagaccctggctcagg

SEQ ID NO: 1615363 - DNA, 25 bp, Homo sapien
ctggtccatcacagaccctggctca

SEQ ID NO: 1615364 - DNA, 25 bp, Homo sapien
ccctggctcagggccttggccttgg

SEQ ID NO: 1615365 - DNA, 25 bp, Homo sapien
ctggctcagggccttggccttgggg

SEQ ID NO: 1615366 - DNA, 25 bp, Homo sapien
tgaaaaatgctgaatatgatagctg

SEQ ID NO: 1615367 - DNA, 25 bp, Homo sapien
cccacttgttggtgtcttctagctc

SEQ ID NO: 1615368 - DNA, 25 bp, Homo sapien
tgaggggccggttcccacttagctc

SEQ ID NO: 1615369 - DNA, 25 bp, Homo sapien
gaacacatcaagtccccacttgttg

SEQ ID NO: 1615370 - DNA, 25 bp, Homo sapien
cagtctggaccccaaagcgtgggac

SEQ ID NO: 1615371 - DNA, 25 bp, Homo sapien
gtctggaccccaaagcgtgggacag

SEQ ID NO: 1615372 - DNA, 25 bp, Homo sapien
catgtaggccactgatccgggacat

SEQ ID NO: 1615373 - DNA, 25 bp, Homo sapien
ctggtcagtctggaccccaaagcgt

SEQ ID NO: 1615374 - DNA, 25 bp, Homo sapien
ctgtggggcctcctcagcggtcacc

SEQ ID NO: 1615375 - DNA, 25 bp, Homo sapien
gtaaagaccctgtcggccggacgca

SEQ ID NO: 1615376 - DNA, 25 bp, Homo sapien
agaagccgatttcacctgctggggc

SEQ ID NO: 1615377 - DNA, 25 bp, Homo sapien
aagaccctgtcggccggacgcagtg

SEQ ID NO: 1615378 - DNA, 25 bp, Homo sapien
gagaagccgatttcacctgctgggg

SEQ ID NO: 1615379 - DNA, 25 bp, Homo sapien
tccgggagatgtactcggacacctg

SEQ ID NO: 1615380 - DNA, 25 bp, Homo sapien
ctggtttcggacaggtgggtcaact

SEQ ID NO: 1615381 - DNA, 25 bp, Homo sapien
actcccggttcaggatccgcttgaa

SEQ ID NO: 1615382 - DNA, 25 bp, Homo sapien
cggacacctggttcccggagcggct

SEQ ID NO: 1615383 - DNA, 25 bp, Homo sapien
aggcaccagtccagctcgtctagcg

SEQ ID NO: 1615384 - DNA, 25 bp, Homo sapien
tgcagcgtctccaactgatccaggc

SEQ ID NO: 1615385 - DNA, 25 bp, Homo sapien
gtctagcgtctccaatgccagcttc

SEQ ID NO: 1615386 - DNA, 25 bp, Homo sapien
gtctgcagcgtctccaactgatcca

SEQ ID NO: 1615387 - DNA, 25 bp, Homo sapien
ggacccaagttccagatctgttccc

SEQ ID NO: 1615388 - DNA, 25 bp, Homo sapien
atctgttccccgagtgcctgtgtga

SEQ ID NO: 1615389 - DNA, 25 bp, Homo sapien
atggaaaggaagctcccagctgtcc

SEQ ID NO: 1615390 - DNA, 25 bp, Homo sapien
cccgagggcgttattgtttttgcag

SEQ ID NO: 1615391 - DNA, 25 bp, Homo sapien
tgattgctggatgaagggtttccga

SEQ ID NO: 1615392 - DNA, 25 bp, Homo sapien
agctgattgctggatgaagggtttc

SEQ ID NO: 1615393 - DNA, 25 bp, Homo sapien
attgctggatgaagggtttccgacg

SEQ ID NO: 1615394 - DNA, 25 bp, Homo sapien
agggagctgattgctggatgaaggg

SEQ ID NO: 1615395 - DNA, 25 bp, Homo sapien
ctcaaacccacctggaggcgccgga

SEQ ID NO: 1615396 - DNA, 25 bp, Homo sapien
gcagcccgctttccgcccaccttgt

SEQ ID NO: 1615397 - DNA, 25 bp, Homo sapien
aggcgtggctgctccgcccatctcg

SEQ ID NO: 1615398 - DNA, 25 bp, Homo sapien
ccagcctcaatttgcagcccgcttt

SEQ ID NO: 1615399 - DNA, 25 bp, Homo sapien
ttggctgctcctaggcattgctggc

SEQ ID NO: 1615400 - DNA, 25 bp, Homo sapien
tggctgctcctaggcattgctggcg

SEQ ID NO: 1615401 - DNA, 25 bp, Homo sapien
ggctgctcctaggcattgctggcgg

SEQ ID NO: 1615402 - DNA, 25 bp, Homo sapien
gttgctccgaacggtccgcagactg

SEQ ID NO: 1615403 - DNA, 25 bp, Homo sapien
ccgaacggtccgcagactggccagg

SEQ ID NO: 1615404 - DNA, 25 bp, Homo sapien
gaacggtccgcagactggccaggac

SEQ ID NO: 1615405 - DNA, 25 bp, Homo sapien
tgctccgaacggtccgcagactggc

SEQ ID NO: 1615406 - DNA, 25 bp, Homo sapien
gtgggaaggagaggccggatccgga

SEQ ID NO: 1615407 - DNA, 25 bp, Homo sapien
ctgttgggaggaggtggtaggcggt

SEQ ID NO: 1615408 - DNA, 25 bp, Homo sapien
aggtggtaggcggtgggaaggagag

SEQ ID NO: 1615409 - DNA, 25 bp, Homo sapien
tgggaaggagaggccggatccggag

SEQ ID NO: 1615410 - DNA, 25 bp, Homo sapien
gggcgtcacaatcatgtcctctcca

SEQ ID NO: 1615411 - DNA, 25 bp, Homo sapien
gcgtcacaatcatgtcctctccatg

SEQ ID NO: 1615412 - DNA, 25 bp, Homo sapien
caaagggcgtcacaatcatgtcctc

SEQ ID NO: 1615413 - DNA, 25 bp, Homo sapien
tgggcaaagggcgtcacaatcatgt

SEQ ID NO: 1615414 - DNA, 25 bp, Homo sapien
gactcgcgccgctggctgtgcggga

SEQ ID NO: 1615415 - DNA, 25 bp, Homo sapien
tggccttgggcgagagttcatagtc

SEQ ID NO: 1615416 - DNA, 25 bp, Homo sapien
gttcatagtcgctatctgagcggta

SEQ ID NO: 1615417 - DNA, 25 bp, Homo sapien
ctggccacagaggagttccgagaca

SEQ ID NO: 1615418 - DNA, 25 bp, Homo sapien
ggccctcctcccacacgagagccca

SEQ ID NO: 1615419 - DNA, 25 bp, Homo sapien
tcctcccacacgagagcccattttc

SEQ ID NO: 1615420 - DNA, 25 bp, Homo sapien
tcccacacgagagcccattttccag

SEQ ID NO: 1615421 - DNA, 25 bp, Homo sapien
cctcctcccacacgagagcccattt

SEQ ID NO: 1615422 - DNA, 25 bp, Homo sapien
cacgtggactggaaacagcttcttg

SEQ ID NO: 1615423 - DNA, 25 bp, Homo sapien
acgtggactggaaacagcttcttgg

SEQ ID NO: 1615424 - DNA, 25 bp, Homo sapien
cagagaaagggcgtagggcaagaac

SEQ ID NO: 1615425 - DNA, 25 bp, Homo sapien
aggtcagagaaagggcgtagggcaa

SEQ ID NO: 1615426 - DNA, 25 bp, Homo sapien
agaaagggcgtagggcaagaactgg

SEQ ID NO: 1615427 - DNA, 25 bp, Homo sapien
ggctcctcctctttggggtcagagg

SEQ ID NO: 1615428 - DNA, 25 bp, Homo sapien
ggtccaagtatgaccgggtctgagt

SEQ ID NO: 1615429 - DNA, 25 bp, Homo sapien
gccaagacttttgggtcaaaggtca

SEQ ID NO: 1615430 - DNA, 25 bp, Homo sapien
gggatttggcagcattcggtccaag

SEQ ID NO: 1615431 - DNA, 25 bp, Homo sapien
ggaagcggcaccgacaggaagacaa

SEQ ID NO: 1615432 - DNA, 25 bp, Homo sapien
ggaccaagcgcaggatgccagccac

SEQ ID NO: 1615433 - DNA, 25 bp, Homo sapien
attcggcgcggaccaagcgcaggat

SEQ ID NO: 1615434 - DNA, 25 bp, Homo sapien
tgccagccacagtcggcgcccacaa

SEQ ID NO: 1615435 - DNA, 25 bp, Homo sapien
caagtgggtgccaattcggcgcgga

SEQ ID NO: 1615436 - DNA, 25 bp, Homo sapien
cctccccacgaggtcacagtcgttt

SEQ ID NO: 1615437 - DNA, 25 bp, Homo sapien
tgggccaccgtgaagcgccgctgca

SEQ ID NO: 1615438 - DNA, 25 bp, Homo sapien
cacagcggatgggccaccgtgaagc

SEQ ID NO: 1615439 - DNA, 25 bp, Homo sapien
agcggatgggccaccgtgaagcgcc

SEQ ID NO: 1615440 - DNA, 25 bp, Homo sapien
ggatgggccaccgtgaagcgccgct

SEQ ID NO: 1615441 - DNA, 25 bp, Homo sapien
tgaagagcccgggggagccgcgcgg

SEQ ID NO: 1615442 - DNA, 25 bp, Homo sapien
ctgaagagcccgggggagccgcgcg

SEQ ID NO: 1615443 - DNA, 25 bp, Homo sapien
cgccaggactgcgtggaggctggac

SEQ ID NO: 1615444 - DNA, 25 bp, Homo sapien
actgcgtggaggctggaccgagcgc

SEQ ID NO: 1615445 - DNA, 25 bp, Homo sapien
tgcgtggaggctggaccgagcgccg

SEQ ID NO: 1615446 - DNA, 25 bp, Homo sapien
aggactgcgtggaggctggaccgag

SEQ ID NO: 1615447 - DNA, 25 bp, Homo sapien
aaggacagtcacactcagccacata

SEQ ID NO: 1615448 - DNA, 25 bp, Homo sapien
cttcggacccccagctatgttagca

SEQ ID NO: 1615449 - DNA, 25 bp, Homo sapien
tatgttagcacaaggacagtcacac

SEQ ID NO: 1615450 - DNA, 25 bp, Homo sapien
tgcggacattccacaaccccgaaaa

SEQ ID NO: 1615451 - DNA, 25 bp, Homo sapien
gctcaggtccctctcgcggcagccc

SEQ ID NO: 1615452 - DNA, 25 bp, Homo sapien
tccggccgcgggctcaggtccctct

SEQ ID NO: 1615453 - DNA, 25 bp, Homo sapien
ggccaggagagccgcgacttcctga

SEQ ID NO: 1615454 - DNA, 25 bp, Homo sapien
gccgcgacttcctgagctccggccg

SEQ ID NO: 1615455 - DNA, 25 bp, Homo sapien
tggtcatgctgtggcggccgcgaga

SEQ ID NO: 1615456 - DNA, 25 bp, Homo sapien
cgagagcgactcaacctgctgcaag

SEQ ID NO: 1615457 - DNA, 25 bp, Homo sapien
ttgtccggatccgaatagaagcgct

SEQ ID NO: 1615458 - DNA, 25 bp, Homo sapien
aatagaagcgctgttggatgcggat

SEQ ID NO: 1615459 - DNA, 25 bp, Homo sapien
agcaggactcgtccccgtgagcggg

SEQ ID NO: 1615460 - DNA, 25 bp, Homo sapien
gagtggaggcgacagcgaggagctg

SEQ ID NO: 1615461 - DNA, 25 bp, Homo sapien
tgctgaagcggtagaaggtggaact

SEQ ID NO: 1615462 - DNA, 25 bp, Homo sapien
ccgaggagctgtcgatgcccagatg

SEQ ID NO: 1615463 - DNA, 25 bp, Homo sapien
aacaggggagaagaacgtggtgagg

SEQ ID NO: 1615464 - DNA, 25 bp, Homo sapien
gggggtgttgaagctaggggctgaa

SEQ ID NO: 1615465 - DNA, 25 bp, Homo sapien
caggggagaagaacgtggtgagggg

SEQ ID NO: 1615466 - DNA, 25 bp, Homo sapien
acaggggagaagaacgtggtgaggg

SEQ ID NO: 1615467 - DNA, 25 bp, Homo sapien
tctgccgtcccctatagcgctgcat

SEQ ID NO: 1615468 - DNA, 25 bp, Homo sapien
accgtctgccgtcccctatagcgct

SEQ ID NO: 1615469 - DNA, 25 bp, Homo sapien
aaaccgtctgccgtcccctatagcg

SEQ ID NO: 1615470 - DNA, 25 bp, Homo sapien
cgtctgccgtcccctatagcgctgc

SEQ ID NO: 1615471 - DNA, 25 bp, Homo sapien
ccaagacaaggacttggagtggaga

SEQ ID NO: 1615472 - DNA, 25 bp, Homo sapien
gaaccaagacaaggacttggagtgg

SEQ ID NO: 1615473 - DNA, 25 bp, Homo sapien
accaagacaaggacttggagtggag

SEQ ID NO: 1615474 - DNA, 25 bp, Homo sapien
aaccaagacaaggacttggagtgga

SEQ ID NO: 1615475 - DNA, 25 bp, Homo sapien
cggggccgagacggtgtccctcgca

SEQ ID NO: 1615476 - DNA, 25 bp, Homo sapien
ggggccgagacggtgtccctcgcac

SEQ ID NO: 1615477 - DNA, 25 bp, Homo sapien
agacagggtctcaggagacccccgg

SEQ ID NO: 1615478 - DNA, 25 bp, Homo sapien
gcgaagagctgtccgcgacctgatg

SEQ ID NO: 1615479 - DNA, 25 bp, Homo sapien
gggtggatgagacagcgaagagctg

SEQ ID NO: 1615480 - DNA, 25 bp, Homo sapien
tagctttgggttctccgggtggatg

SEQ ID NO: 1615481 - DNA, 25 bp, Homo sapien
gatgagacagcgaagagctgtccgc

SEQ ID NO: 1615482 - DNA, 25 bp, Homo sapien
cagtcaaggttctggtcttcggagg

SEQ ID NO: 1615483 - DNA, 25 bp, Homo sapien
aacatgagcagtgacgggccctcaa

SEQ ID NO: 1615484 - DNA, 25 bp, Homo sapien
tcttcggaggtacgtacagatagca

SEQ ID NO: 1615485 - DNA, 25 bp, Homo sapien
cagcaacaatggcaacaaggagtct

SEQ ID NO: 1615486 - DNA, 25 bp, Homo sapien
tcttagtctcaggggtaatttcctg

SEQ ID NO: 1615487 - DNA, 25 bp, Homo sapien
gcgtcttagtctcaggggtaatttc

SEQ ID NO: 1615488 - DNA, 25 bp, Homo sapien
aaggatgggtaagaacattttccat

SEQ ID NO: 1615489 - DNA, 25 bp, Homo sapien
ctatctgggaccacgctgtcttttc

SEQ ID NO: 1615490 - DNA, 25 bp, Homo sapien
tctgggaccacgctgtcttttctct

SEQ ID NO: 1615491 - DNA, 25 bp, Homo sapien
tatctgggaccacgctgtcttttct

SEQ ID NO: 1615492 - DNA, 25 bp, Homo sapien
ctgggaccacgctgtcttttctctg

SEQ ID NO: 1615493 - DNA, 25 bp, Homo sapien
ctccggatgataccaccaccaaggg

SEQ ID NO: 1615494 - DNA, 25 bp, Homo sapien
ggtacccgagaagcctctccggatg

SEQ ID NO: 1615495 - DNA, 25 bp, Homo sapien
aacacaaggcggctcggcagcgatg

SEQ ID NO: 1615496 - DNA, 25 bp, Homo sapien
gctcacaggggccaagccagaatcc

SEQ ID NO: 1615497 - DNA, 25 bp, Homo sapien
aaggagagtgttgtcctgctgtgcc

SEQ ID NO: 1615498 - DNA, 25 bp, Homo sapien
cagcaggaaggagagtgttgtcctg

SEQ ID NO: 1615499 - DNA, 25 bp, Homo sapien
ctcagcaggaaggagagtgttgtcc

SEQ ID NO: 1615500 - DNA, 25 bp, Homo sapien
caggaaggagagtgttgtcctgctg

SEQ ID NO: 1615501 - DNA, 25 bp, Homo sapien
ttgcagcggtccccatccagggaca

SEQ ID NO: 1615502 - DNA, 25 bp, Homo sapien
ccctccccacacctgtccaggttca

SEQ ID NO: 1615503 - DNA, 25 bp, Homo sapien
gccaggtgcccaaagcccctcccca

SEQ ID NO: 1615504 - DNA, 25 bp, Homo sapien
tccccacacctgtccaggttcagca

SEQ ID NO: 1615505 - DNA, 25 bp, Homo sapien
cggagtcctgcctgggtcccatgac

SEQ ID NO: 1615506 - DNA, 25 bp, Homo sapien
tcctgcctgggtcccatgacctgct

SEQ ID NO: 1615507 - DNA, 25 bp, Homo sapien
ctgcctgggtcccatgacctgctgg

SEQ ID NO: 1615508 - DNA, 25 bp, Homo sapien
agtcctgcctgggtcccatgacctg

SEQ ID NO: 1615509 - DNA, 25 bp, Homo sapien
atgcccccatctctgttggctcctc

SEQ ID NO: 1615510 - DNA, 25 bp, Homo sapien
tgcccccatctctgttggctcctca

SEQ ID NO: 1615511 - DNA, 25 bp, Homo sapien
gtggtgggcaaaggacaatctgtca

SEQ ID NO: 1615512 - DNA, 25 bp, Homo sapien
gtgggcaaaggacaatctgtcattc

SEQ ID NO: 1615513 - DNA, 25 bp, Homo sapien
aaaggacaatctgtcattcacggat

SEQ ID NO: 1615514 - DNA, 25 bp, Homo sapien
aggacaatctgtcattcacggatcc

SEQ ID NO: 1615515 - DNA, 25 bp, Homo sapien
ggaacacacagggaggcattcagac

SEQ ID NO: 1615516 - DNA, 25 bp, Homo sapien
tgggatagcagctcccccaaccatg

SEQ ID NO: 1615517 - DNA, 25 bp, Homo sapien
caggttggccctgcttgggatagca

SEQ ID NO: 1615518 - DNA, 25 bp, Homo sapien
agggaggcattcagacaccaaaagg

SEQ ID NO: 1615519 - DNA, 25 bp, Homo sapien
gacccgatgagcaaaagagacacca

SEQ ID NO: 1615520 - DNA, 25 bp, Homo sapien
gactcattccggtgacagaatctca

SEQ ID NO: 1615521 - DNA, 25 bp, Homo sapien
catggacacctcgtccaggttctca

SEQ ID NO: 1615522 - DNA, 25 bp, Homo sapien
caggttctcaaacttggactcattc

SEQ ID NO: 1615523 - DNA, 25 bp, Homo sapien
ctgtgtaactcacggggcccagtgt

SEQ ID NO: 1615524 - DNA, 25 bp, Homo sapien
gtgtaactcacggggcccagtgtca

SEQ ID NO: 1615525 - DNA, 25 bp, Homo sapien
tgtgtaactcacggggcccagtgtc

SEQ ID NO: 1615526 - DNA, 25 bp, Homo sapien
agtggaggtcaagggctccgttccg

SEQ ID NO: 1615527 - DNA, 25 bp, Homo sapien
tcagtggaggtcaagggctccgttc

SEQ ID NO: 1615528 - DNA, 25 bp, Homo sapien
tggtcagtggaggtcaagggctccg

SEQ ID NO: 1615529 - DNA, 25 bp, Homo sapien
gtcagtggaggtcaagggctccgtt

SEQ ID NO: 1615530 - DNA, 25 bp, Homo sapien
tccagtgcggggtcagggattcgga

SEQ ID NO: 1615531 - DNA, 25 bp, Homo sapien
aagtggggctccagtgcggggtcag

SEQ ID NO: 1615532 - DNA, 25 bp, Homo sapien
tgtgggaagtggggctccagtgcgg

SEQ ID NO: 1615533 - DNA, 25 bp, Homo sapien
ccagtgcggggtcagggattcggaa

SEQ ID NO: 1615534 - DNA, 25 bp, Homo sapien
agccagaactagggtgcgtgattgt

SEQ ID NO: 1615535 - DNA, 25 bp, Homo sapien
ccagaactagggtgcgtgattgtct

SEQ ID NO: 1615536 - DNA, 25 bp, Homo sapien
gccagaactagggtgcgtgattgtc

SEQ ID NO: 1615537 - DNA, 25 bp, Homo sapien
gaggtgggttatggagtctgtctcc

SEQ ID NO: 1615538 - DNA, 25 bp, Homo sapien
tatcatccttgaatctgtggagctg

SEQ ID NO: 1615539 - DNA, 25 bp, Homo sapien
ggttcccctgaactgtgggtgctgt

SEQ ID NO: 1615540 - DNA, 25 bp, Homo sapien
gctgtgggcgaagggagaagaaatc

SEQ ID NO: 1615541 - DNA, 25 bp, Homo sapien
gggagtattgtaattcacaccagct

SEQ ID NO: 1615542 - DNA, 25 bp, Homo sapien
ctgtaaagggagtattgtaattcac

SEQ ID NO: 1615543 - DNA, 25 bp, Homo sapien
taaagggagtattgtaattcacacc

SEQ ID NO: 1615544 - DNA, 25 bp, Homo sapien
gagtattgtaattcacaccagcttt

SEQ ID NO: 1615545 - DNA, 25 bp, Homo sapien
tcctgcgccgggagggcctgccacc

SEQ ID NO: 1615546 - DNA, 25 bp, Homo sapien
caccggctctgcacaggtgtgtggc

SEQ ID NO: 1615547 - DNA, 25 bp, Homo sapien
tgcacctgcgtgtgcgctccctgct

SEQ ID NO: 1615548 - DNA, 25 bp, Homo sapien
tgcccaggtgccagctccttgcacc

SEQ ID NO: 1615549 - DNA, 25 bp, Homo sapien
ctttattcattagacccagagagcc

SEQ ID NO: 1615550 - DNA, 25 bp, Homo sapien
agagagccatgagtgcctcccacga

SEQ ID NO: 1615551 - DNA, 25 bp, Homo sapien
agccatgagtgcctcccacgaagtc

SEQ ID NO: 1615552 - DNA, 25 bp, Homo sapien
attcattagacccagagagccatga

SEQ ID NO: 1615553 - DNA, 25 bp, Homo sapien
tcccaagagcgcctctgtgttcttc

SEQ ID NO: 1615554 - DNA, 25 bp, Homo sapien
gccaatgcatgtgccgtgagctggc

SEQ ID NO: 1615555 - DNA, 25 bp, Homo sapien
gctggtcccaagagcgcctctgtgt

SEQ ID NO: 1615556 - DNA, 25 bp, Homo sapien
aatgcatgtgccgtgagctggccga

SEQ ID NO: 1615557 - DNA, 25 bp, Homo sapien
gcctcatctgctggcggatcttaaa

SEQ ID NO: 1615558 - DNA, 25 bp, Homo sapien
ccctccaggcggactggatggctgt

SEQ ID NO: 1615559 - DNA, 25 bp, Homo sapien
tatcttcgctgccatttgctgctgc

SEQ ID NO: 1615560 - DNA, 25 bp, Homo sapien
tggcggatcttaaagcccctccagg

SEQ ID NO: 1615561 - DNA, 25 bp, Homo sapien
ggtaggcggaggcccaagacactgc

SEQ ID NO: 1615562 - DNA, 25 bp, Homo sapien
tggtaggcggaggcccaagacactg

SEQ ID NO: 1615563 - DNA, 25 bp, Homo sapien
ggcggaggcccaagacactgccccg

SEQ ID NO: 1615564 - DNA, 25 bp, Homo sapien
agcccactagcatcaccacgctggg

SEQ ID NO: 1615565 - DNA, 25 bp, Homo sapien
tatgacaggtgcgagggctggagcc

SEQ ID NO: 1615566 - DNA, 25 bp, Homo sapien
ctgtgtgcgtccacaggtatgacag

SEQ ID NO: 1615567 - DNA, 25 bp, Homo sapien
cacacgggtgggctgtgtgcgtcca

SEQ ID NO: 1615568 - DNA, 25 bp, Homo sapien
tcctggagctcagggagtggcagac

SEQ ID NO: 1615569 - DNA, 25 bp, Homo sapien
ctcccgatcctggagctcagggagt

SEQ ID NO: 1615570 - DNA, 25 bp, Homo sapien
ccgatcctggagctcagggagtggc

SEQ ID NO: 1615571 - DNA, 25 bp, Homo sapien
atcctggagctcagggagtggcaga

SEQ ID NO: 1615572 - DNA, 25 bp, Homo sapien
gcaggactggaagcagcgatggtca

SEQ ID NO: 1615573 - DNA, 25 bp, Homo sapien
cagcttcggtcagacatgaccccgg

SEQ ID NO: 1615574 - DNA, 25 bp, Homo sapien
ccatcctggaaccagcttcggtcag

SEQ ID NO: 1615575 - DNA, 25 bp, Homo sapien
tggtcagatactgtcctggctctgc

SEQ ID NO: 1615576 - DNA, 25 bp, Homo sapien
aagtagcttggatgaccatggcccc

SEQ ID NO: 1615577 - DNA, 25 bp, Homo sapien
gatcactgcgaggatgcggatctcc

SEQ ID NO: 1615578 - DNA, 25 bp, Homo sapien
tgtagccgcgccaggcagactggat

SEQ ID NO: 1615579 - DNA, 25 bp, Homo sapien
gacgcccgcctggatagtgatcact

SEQ ID NO: 1615580 - DNA, 25 bp, Homo sapien
ggctccccggaccgcctgggaggca

SEQ ID NO: 1615581 - DNA, 25 bp, Homo sapien
gcatggacaccattggctccccgga

SEQ ID NO: 1615582 - DNA, 25 bp, Homo sapien
ctgcatggacaccattggctccccg

SEQ ID NO: 1615583 - DNA, 25 bp, Homo sapien
tccccggaccgcctgggaggcacca

SEQ ID NO: 1615584 - DNA, 25 bp, Homo sapien
ttgcgccaggtgtcccaggacgcag

SEQ ID NO: 1615585 - DNA, 25 bp, Homo sapien
gcgcggttccacgattggccaccaa

SEQ ID NO: 1615586 - DNA, 25 bp, Homo sapien
cttgttgcgccaggtgtcccaggac

SEQ ID NO: 1615587 - DNA, 25 bp, Homo sapien
ggctggctcccatgcgcggttccac

SEQ ID NO: 1615588 - DNA, 25 bp, Homo sapien
tctccacggtgactcctggttaaaa

SEQ ID NO: 1615589 - DNA, 25 bp, Homo sapien
ggctataggagtcctgccgtctcca

SEQ ID NO: 1615590 - DNA, 25 bp, Homo sapien
tcatctccccagtgcggatgacggg

SEQ ID NO: 1615591 - DNA, 25 bp, Homo sapien
tcagggatgccttgtgactaacggc

SEQ ID NO: 1615592 - DNA, 25 bp, Homo sapien
tactgtaagggcctaaccctggcca

SEQ ID NO: 1615593 - DNA, 25 bp, Homo sapien
tttgcaccacttcgggctgaggcct

SEQ ID NO: 1615594 - DNA, 25 bp, Homo sapien
tctggaacaatcctaccatgcacgg

SEQ ID NO: 1615595 - DNA, 25 bp, Homo sapien
tgtaggaatttttagggcccatggc

SEQ ID NO: 1615596 - DNA, 25 bp, Homo sapien
ggagtggattggggacagcttctgt

SEQ ID NO: 1615597 - DNA, 25 bp, Homo sapien
ctggagtggattggggacagcttct

SEQ ID NO: 1615598 - DNA, 25 bp, Homo sapien
tggagtggattggggacagcttctg

SEQ ID NO: 1615599 - DNA, 25 bp, Homo sapien
tgaaagcctcagtactgccacgggc

SEQ ID NO: 1615600 - DNA, 25 bp, Homo sapien
cattagaagccactgtaccctgaga

SEQ ID NO: 1615601 - DNA, 25 bp, Homo sapien
gtatgacgtgagtgacagacccctg

SEQ ID NO: 1615602 - DNA, 25 bp, Homo sapien
tctgaagaagactaggattccccat

SEQ ID NO: 1615603 - DNA, 25 bp, Homo sapien
gaccccagatggcattatcctagca

SEQ ID NO: 1615604 - DNA, 25 bp, Homo sapien
tcagacagggacctatgatcatggc

SEQ ID NO: 1615605 - DNA, 25 bp, Homo sapien
ggagtacatccactgggttgcacca

SEQ ID NO: 1615606 - DNA, 25 bp, Homo sapien
gatccacttgatcctgacacttgga

SEQ ID NO: 1615607 - DNA, 25 bp, Homo sapien
tcagaagggtgccagcagtctatgt

SEQ ID NO: 1615608 - DNA, 25 bp, Homo sapien
tcagagagtcctgcggaatcacatc

SEQ ID NO: 1615609 - DNA, 25 bp, Homo sapien
ctctgctggtaactgggtgggacca

SEQ ID NO: 1615610 - DNA, 25 bp, Homo sapien
gaaagattagactgagtcacggcca

SEQ ID NO: 1615611 - DNA, 25 bp, Homo sapien
cagtggccataaatgggtaggctgg

SEQ ID NO: 1615612 - DNA, 25 bp, Homo sapien
ctcagtggccataaatgggtaggct

SEQ ID NO: 1615613 - DNA, 25 bp, Homo sapien
tcagtggccataaatgggtaggctg

SEQ ID NO: 1615614 - DNA, 25 bp, Homo sapien
ccttactggatgctatatgctggga

SEQ ID NO: 1615615 - DNA, 25 bp, Homo sapien
gggacctcctagtcaccacagatgg

SEQ ID NO: 1615616 - DNA, 25 bp, Homo sapien
cagtggccacacatggatagtctgg

SEQ ID NO: 1615617 - DNA, 25 bp, Homo sapien
tcagtgcgctgatatgactgggcca

SEQ ID NO: 1615618 - DNA, 25 bp, Homo sapien
tactggctcaccgaggatggatggc

SEQ ID NO: 1615619 - DNA, 25 bp, Homo sapien
tctatcttgttgacggcaggcaggc

SEQ ID NO: 1615620 - DNA, 25 bp, Homo sapien
catggactccggaggaaaaacagac

SEQ ID NO: 1615621 - DNA, 25 bp, Homo sapien
tatagccggtttcagtctcttgcgt

SEQ ID NO: 1615622 - DNA, 25 bp, Homo sapien
tgccgggggaagcttgaaacagacc

SEQ ID NO: 1615623 - DNA, 25 bp, Homo sapien
gaacttgagccaatgcactgccggg

SEQ ID NO: 1615624 - DNA, 25 bp, Homo sapien
agacagatgtcttgggacgaacttg

SEQ ID NO: 1615625 - DNA, 25 bp, Homo sapien
cacagaaccctgtgttcgattcctc

SEQ ID NO: 1615626 - DNA, 25 bp, Homo sapien
ttgggcccacacagttggcaatgag

SEQ ID NO: 1615627 - DNA, 25 bp, Homo sapien
caaatccaggtttgaggagaagtcc

SEQ ID NO: 1615628 - DNA, 25 bp, Homo sapien
gggtcgggcatgcttcttccttttg

SEQ ID NO: 1615629 - DNA, 25 bp, Homo sapien
ggctggttcatgcttgggcccacac

SEQ ID NO: 1615630 - DNA, 25 bp, Homo sapien
acagcatgggatacaggccagtgat

SEQ ID NO: 1615631 - DNA, 25 bp, Homo sapien
atgggatacaggccagtgatcaggg

SEQ ID NO: 1615632 - DNA, 25 bp, Homo sapien
gcatgggatacaggccagtgatcag

SEQ ID NO: 1615633 - DNA, 25 bp, Homo sapien
cagcatgggatacaggccagtgatc

SEQ ID NO: 1615634 - DNA, 25 bp, Homo sapien
agggcccccatgcggccgatggact

SEQ ID NO: 1615635 - DNA, 25 bp, Homo sapien
catgcggccgatggactcctcctgc

SEQ ID NO: 1615636 - DNA, 25 bp, Homo sapien
agggagggcccccatgcggccgatg

SEQ ID NO: 1615637 - DNA, 25 bp, Homo sapien
ccccatgcggccgatggactcctcc

SEQ ID NO: 1615638 - DNA, 25 bp, Homo sapien
cctgttgatttcgaggcggccttgg

SEQ ID NO: 1615639 - DNA, 25 bp, Homo sapien
gtcttagtcaccccgcttcctgttg

SEQ ID NO: 1615640 - DNA, 25 bp, Homo sapien
ttcaccagggccggcgtcttagtca

SEQ ID NO: 1615641 - DNA, 25 bp, Homo sapien
tcagggccacccgacaccaagactg

SEQ ID NO: 1615642 - DNA, 25 bp, Homo sapien
atgaccttggtgagttccgcccgca

SEQ ID NO: 1615643 - DNA, 25 bp, Homo sapien
cttgctaagcacctcggccaattta

SEQ ID NO: 1615644 - DNA, 25 bp, Homo sapien
aacagagtgcggagatcctcctggg

SEQ ID NO: 1615645 - DNA, 25 bp, Homo sapien
ggccaatttaccctgcatgaccttg

SEQ ID NO: 1615646 - DNA, 25 bp, Homo sapien
ccccaggactcaacgttgcatgtgg

SEQ ID NO: 1615647 - DNA, 25 bp, Homo sapien
gtggctccgttgtctccccaggact

SEQ ID NO: 1615648 - DNA, 25 bp, Homo sapien
caacgttgcatgtggaatggccggt

SEQ ID NO: 1615649 - DNA, 25 bp, Homo sapien
aatggccggtgggtgccatcggcgg

SEQ ID NO: 1615650 - DNA, 25 bp, Homo sapien
tggacaccttggaccctgttaggag

SEQ ID NO: 1615651 - DNA, 25 bp, Homo sapien
tgtgtctgggaatgcatcttgctca

SEQ ID NO: 1615652 - DNA, 25 bp, Homo sapien
ggttatgtctgtgatcggctgcccc

SEQ ID NO: 1615653 - DNA, 25 bp, Homo sapien
agaggcgcttgggactggaccttca

SEQ ID NO: 1615654 - DNA, 25 bp, Homo sapien
cagggtgacagccatgtctacaggc

SEQ ID NO: 1615655 - DNA, 25 bp, Homo sapien
tctctgggatgaggcattggtcagt

SEQ ID NO: 1615656 - DNA, 25 bp, Homo sapien
gggtgacagccatgtctacaggcac

SEQ ID NO: 1615657 - DNA, 25 bp, Homo sapien
atgtctctgggatgaggcattggtc

SEQ ID NO: 1615658 - DNA, 25 bp, Homo sapien
tgtggttgagccaggcacctgatct

SEQ ID NO: 1615659 - DNA, 25 bp, Homo sapien
ctcagcaacttttgtccaggatgga

SEQ ID NO: 1615660 - DNA, 25 bp, Homo sapien
taaatgccatgtctgttttcgcctg

SEQ ID NO: 1615661 - DNA, 25 bp, Homo sapien
gatgaggctttcaccacctttgcag

SEQ ID NO: 1615662 - DNA, 25 bp, Homo sapien
ggatggtggccaccgagcgtaactg

SEQ ID NO: 1615663 - DNA, 25 bp, Homo sapien
ggccaccgagcgtaactgggctggg

SEQ ID NO: 1615664 - DNA, 25 bp, Homo sapien
ggtggccaccgagcgtaactgggct

SEQ ID NO: 1615665 - DNA, 25 bp, Homo sapien
tcttggttatcatggctggcaggcg

SEQ ID NO: 1615666 - DNA, 25 bp, Homo sapien
cttggacattgtggctgacagacat

SEQ ID NO: 1615667 - DNA, 25 bp, Homo sapien
ggctcctctgggatgaagtcttgga

SEQ ID NO: 1615668 - DNA, 25 bp, Homo sapien
agggcttggtcaccccaactgggct

SEQ ID NO: 1615669 - DNA, 25 bp, Homo sapien
tgaagtcttggacattgtggctgac

SEQ ID NO: 1615670 - DNA, 25 bp, Homo sapien
tctggatggtctcgtaactgcctgg

SEQ ID NO: 1615671 - DNA, 25 bp, Homo sapien
tctatgtggacgaggcaggtgcttc

SEQ ID NO: 1615672 - DNA, 25 bp, Homo sapien
catgggccctggacatatctggaag

SEQ ID NO: 1615673 - DNA, 25 bp, Homo sapien
tagagtcttggtgatcatgggccct

SEQ ID NO: 1615674 - DNA, 25 bp, Homo sapien
ttcaccatgatgggcggggacagaa

SEQ ID NO: 1615675 - DNA, 25 bp, Homo sapien
agaaggcggttctcttccggatgct

SEQ ID NO: 1615676 - DNA, 25 bp, Homo sapien
ggacagaaggcggttctcttccgga

SEQ ID NO: 1615677 - DNA, 25 bp, Homo sapien
agattgtcacaggaagggaactggg

SEQ ID NO: 1615678 - DNA, 25 bp, Homo sapien
gcacgggcgtgcatcatgtccatct

SEQ ID NO: 1615679 - DNA, 25 bp, Homo sapien
gatgtgtctcttgttgaagcgccgc

SEQ ID NO: 1615680 - DNA, 25 bp, Homo sapien
tctttaccaacgacttgctggagtg

SEQ ID NO: 1615681 - DNA, 25 bp, Homo sapien
ggaaatcagcttctgccggagccaa

SEQ ID NO: 1615682 - DNA, 25 bp, Homo sapien
gcgggacgccgtcttgccttcggca

SEQ ID NO: 1615683 - DNA, 25 bp, Homo sapien
caggctgttgcggaagatgctcctt

SEQ ID NO: 1615684 - DNA, 25 bp, Homo sapien
ttgcggaagatgctccttggacttg

SEQ ID NO: 1615685 - DNA, 25 bp, Homo sapien
tcttgccttcggcaggctgttgcgg

SEQ ID NO: 1615686 - DNA, 25 bp, Homo sapien
ctggaggatgcaccgcccactgggt

SEQ ID NO: 1615687 - DNA, 25 bp, Homo sapien
actgggtgacaactggctcgtgaac

SEQ ID NO: 1615688 - DNA, 25 bp, Homo sapien
tgattaccggacaggtcagctctgc

SEQ ID NO: 1615689 - DNA, 25 bp, Homo sapien
ctaggcggccggctgcattgccttg

SEQ ID NO: 1615690 - DNA, 25 bp, Homo sapien
ggtggtcagggtgtagcaggtcctg

SEQ ID NO: 1615691 - DNA, 25 bp, Homo sapien
gcaaacaagaggtctcctggctggg

SEQ ID NO: 1615692 - DNA, 25 bp, Homo sapien
ggcccagatcttgttcctggcacgt

SEQ ID NO: 1615693 - DNA, 25 bp, Homo sapien
ggtgtagcaggtcctgcaaacaaga

SEQ ID NO: 1615694 - DNA, 25 bp, Homo sapien
gccttcagcctttcatccatgcaat

SEQ ID NO: 1615695 - DNA, 25 bp, Homo sapien
gcaatctcagaagccagcctgcaag

SEQ ID NO: 1615696 - DNA, 25 bp, Homo sapien
tccatgcaatatgcagcaacactgc

SEQ ID NO: 1615697 - DNA, 25 bp, Homo sapien
ggaggcagccttcagcctttcatcc

SEQ ID NO: 1615698 - DNA, 25 bp, Homo sapien
gcccctgaagctaaacctagcagtc

SEQ ID NO: 1615699 - DNA, 25 bp, Homo sapien
tctggccaaggcaagagcgagacct

SEQ ID NO: 1615700 - DNA, 25 bp, Homo sapien
tggccaaggcaagagcgagacctca

SEQ ID NO: 1615701 - DNA, 25 bp, Homo sapien
actctggccaaggcaagagcgagac

SEQ ID NO: 1615702 - DNA, 25 bp, Homo sapien
ggccaaggcaagagcgagacctcat

SEQ ID NO: 1615703 - DNA, 25 bp, Homo sapien
ccattttatacggacaggcaaacca

SEQ ID NO: 1615704 - DNA, 25 bp, Homo sapien
caagcactgctctgtaaacataaac

SEQ ID NO: 1615705 - DNA, 25 bp, Homo sapien
cataaactctcttaatcgtcacaac

SEQ ID NO: 1615706 - DNA, 25 bp, Homo sapien
gcaagtttttcgactgttctcccca

SEQ ID NO: 1615707 - DNA, 25 bp, Homo sapien
agatgtgcgggccgctctcagacac

SEQ ID NO: 1615708 - DNA, 25 bp, Homo sapien
aaacgcagatcaaagaccccaagac

SEQ ID NO: 1615709 - DNA, 25 bp, Homo sapien
cccaaaaggcaagggggcattagct

SEQ ID NO: 1615710 - DNA, 25 bp, Homo sapien
tctctgctccctccaacaaggggag

SEQ ID NO: 1615711 - DNA, 25 bp, Homo sapien
cgtaacgagactttactgaaaacag

SEQ ID NO: 1615712 - DNA, 25 bp, Homo sapien
gcggagagccgagctggcgtaacga

SEQ ID NO: 1615713 - DNA, 25 bp, Homo sapien
cataaatagggcagaatcgaacact

SEQ ID NO: 1615714 - DNA, 25 bp, Homo sapien
cgggcgaaccaaggattacaaacag

SEQ ID NO: 1615715 - DNA, 25 bp, Homo sapien
cccttccgcggcgcggtgtacaaag

SEQ ID NO: 1615716 - DNA, 25 bp, Homo sapien
tccagcttgtcgagtcctgggcacc

SEQ ID NO: 1615717 - DNA, 25 bp, Homo sapien
cgagacgcgcgggtttgtgcaacac

SEQ ID NO: 1615718 - DNA, 25 bp, Homo sapien
tctctgagttcctgggcacactcgg

SEQ ID NO: 1615719 - DNA, 25 bp, Homo sapien
gccttgatgcgctcctgcgtgtcca

SEQ ID NO: 1615720 - DNA, 25 bp, Homo sapien
tgtccatgtcgatgggcgacaacgg

SEQ ID NO: 1615721 - DNA, 25 bp, Homo sapien
ccgctgttgacgtggctgaggactt

SEQ ID NO: 1615722 - DNA, 25 bp, Homo sapien
tggacgccagctccgtgttctgact

SEQ ID NO: 1615723 - DNA, 25 bp, Homo sapien
cacaggttcggcagcgaaggcgacc

SEQ ID NO: 1615724 - DNA, 25 bp, Homo sapien
gcgcggcggccccaacgcgcctggg

SEQ ID NO: 1615725 - DNA, 25 bp, Homo sapien
ggaagggcacaggttcggcagcgaa

SEQ ID NO: 1615726 - DNA, 25 bp, Homo sapien
gcagcgaaggcgaccgtcgcggcgc

SEQ ID NO: 1615727 - DNA, 25 bp, Homo sapien
caggttcgcgtagacaggcgcttcg

SEQ ID NO: 1615728 - DNA, 25 bp, Homo sapien
gtagacaggcgcttcgggcgcggcc

SEQ ID NO: 1615729 - DNA, 25 bp, Homo sapien
ctgctcaggttcgcgtagacaggcg

SEQ ID NO: 1615730 - DNA, 25 bp, Homo sapien
gcgcccgcgccgagctggttctgct

SEQ ID NO: 1615731 - DNA, 25 bp, Homo sapien
gaactcctgctcctcgctggccgcc

SEQ ID NO: 1615732 - DNA, 25 bp, Homo sapien
actcctgctcctcgctggccgccac

SEQ ID NO: 1615733 - DNA, 25 bp, Homo sapien
gcgaactcctgctcctcgctggccg

SEQ ID NO: 1615734 - DNA, 25 bp, Homo sapien
gaagccctcggcgaactcctgctcc

SEQ ID NO: 1615735 - DNA, 25 bp, Homo sapien
actggatgatgaggcgctcgagctc

SEQ ID NO: 1615736 - DNA, 25 bp, Homo sapien
gtcgggagaggcgagcaggccgtcg

SEQ ID NO: 1615737 - DNA, 25 bp, Homo sapien
tcactcaggctcagcgtcagcgcgt

SEQ ID NO: 1615738 - DNA, 25 bp, Homo sapien
tagaggaactgtgagctcgtcggcg

SEQ ID NO: 1615739 - DNA, 25 bp, Homo sapien
agcgcctcatcgccgtagaagggtg

SEQ ID NO: 1615740 - DNA, 25 bp, Homo sapien
cgcctcatcgccgtagaagggtgtt

SEQ ID NO: 1615741 - DNA, 25 bp, Homo sapien
cctcatcgccgtagaagggtgtttc

SEQ ID NO: 1615742 - DNA, 25 bp, Homo sapien
catcgccgtagaagggtgtttccat

SEQ ID NO: 1615743 - DNA, 25 bp, Homo sapien
gcccggccctccactggcggcggct

SEQ ID NO: 1615744 - DNA, 25 bp, Homo sapien
ctcctgcgccgcgccacttgtgcgc

SEQ ID NO: 1615745 - DNA, 25 bp, Homo sapien
gctcctgcgccgcgccacttgtgcg

SEQ ID NO: 1615746 - DNA, 25 bp, Homo sapien
agcgcccggccctccactggcggcg

SEQ ID NO: 1615747 - DNA, 25 bp, Homo sapien
tagcgcgccttctggagaggctttg

SEQ ID NO: 1615748 - DNA, 25 bp, Homo sapien
cacgtcccgggtggcgtgatgggcc

SEQ ID NO: 1615749 - DNA, 25 bp, Homo sapien
ggtcccgcatggctaaataactcct

SEQ ID NO: 1615750 - DNA, 25 bp, Homo sapien
ctgtgtacgaccgatctccccggcg

SEQ ID NO: 1615751 - DNA, 25 bp, Homo sapien
gtgcaattccttatagacccagctt

SEQ ID NO: 1615752 - DNA, 25 bp, Homo sapien
cttggttcttctccagtgtcctttt

SEQ ID NO: 1615753 - DNA, 25 bp, Homo sapien
ttctccagtgtccttttggagttgt

SEQ ID NO: 1615754 - DNA, 25 bp, Homo sapien
ttgtccaggaatcgcttaatcctga

SEQ ID NO: 1615755 - DNA, 25 bp, Homo sapien
tccccgctgacagactgagggcagg

SEQ ID NO: 1615756 - DNA, 25 bp, Homo sapien
ttttgcctgcatccgaccacatact

SEQ ID NO: 1615757 - DNA, 25 bp, Homo sapien
aggtactgagccatttccccgctga

SEQ ID NO: 1615758 - DNA, 25 bp, Homo sapien
tactcgtggcttttccaggtactga

SEQ ID NO: 1615759 - DNA, 25 bp, Homo sapien
tgtggaaggcagattcgaagccagt

SEQ ID NO: 1615760 - DNA, 25 bp, Homo sapien
cagttggccctgcacatcgtgggct

SEQ ID NO: 1615761 - DNA, 25 bp, Homo sapien
ccctgcacatcgtgggctgcatttc

SEQ ID NO: 1615762 - DNA, 25 bp, Homo sapien
ggcagattcgaagccagttggccct

SEQ ID NO: 1615763 - DNA, 25 bp, Homo sapien
gcttggtggttaggacaaagttgac

SEQ ID NO: 1615764 - DNA, 25 bp, Homo sapien
gtggttaggacaaagttgaccgcac

SEQ ID NO: 1615765 - DNA, 25 bp, Homo sapien
gaaaggtcaaggtgcttggtggtta

SEQ ID NO: 1615766 - DNA, 25 bp, Homo sapien
tcaaggtgcttggtggttaggacaa

SEQ ID NO: 1615767 - DNA, 25 bp, Homo sapien
gttgaatatgaccagggaggctgac

SEQ ID NO: 1615768 - DNA, 25 bp, Homo sapien
ttgaatatgaccagggaggctgaca

SEQ ID NO: 1615769 - DNA, 25 bp, Homo sapien
ggggccacagaggccgttgaatatg

SEQ ID NO: 1615770 - DNA, 25 bp, Homo sapien
ggccacagaggccgttgaatatgac

SEQ ID NO: 1615771 - DNA, 25 bp, Homo sapien
gagggcacagtgcacacccctctcc

SEQ ID NO: 1615772 - DNA, 25 bp, Homo sapien
agggcacagtgcacacccctctccc

SEQ ID NO: 1615773 - DNA, 25 bp, Homo sapien
gggcacagtgcacacccctctccca

SEQ ID NO: 1615774 - DNA, 25 bp, Homo sapien
caggatgtctgagttacttgatgct

SEQ ID NO: 1615775 - DNA, 25 bp, Homo sapien
gtctgagttacttgatgctggaggg

SEQ ID NO: 1615776 - DNA, 25 bp, Homo sapien
ggccaggatgtctgagttacttgat

SEQ ID NO: 1615777 - DNA, 25 bp, Homo sapien
ctggggccaggatgtctgagttact

SEQ ID NO: 1615778 - DNA, 25 bp, Homo sapien
tgacccctgctggtccagaatgttc

SEQ ID NO: 1615779 - DNA, 25 bp, Homo sapien
cctgacccctgctggtccagaatgt

SEQ ID NO: 1615780 - DNA, 25 bp, Homo sapien
ggcctttgcacgggactgtcctcct

SEQ ID NO: 1615781 - DNA, 25 bp, Homo sapien
gcctttgcacgggactgtcctcctg

SEQ ID NO: 1615782 - DNA, 25 bp, Homo sapien
tgactcagtgtctcaggtgcgcgcc

SEQ ID NO: 1615783 - DNA, 25 bp, Homo sapien
gatgctacccggagcctttctcgaa

SEQ ID NO: 1615784 - DNA, 25 bp, Homo sapien
tctcaaaataggtctccgaacgagg

SEQ ID NO: 1615785 - DNA, 25 bp, Homo sapien
gaacgaggaccctgaagagaaggct

SEQ ID NO: 1615786 - DNA, 25 bp, Homo sapien
gctgacacctggtgagaactctcaa

SEQ ID NO: 1615787 - DNA, 25 bp, Homo sapien
gatttcctgagagtccagcgatgga

SEQ ID NO: 1615788 - DNA, 25 bp, Homo sapien
ttggcattaacgtctccacagaggg

SEQ ID NO: 1615789 - DNA, 25 bp, Homo sapien
ggagcctcgtgagaatcttccatga

SEQ ID NO: 1615790 - DNA, 25 bp, Homo sapien
gaggaagcgaagggccagggcccga

SEQ ID NO: 1615791 - DNA, 25 bp, Homo sapien
gcaattttggggccgcgcccaagga

SEQ ID NO: 1615792 - DNA, 25 bp, Homo sapien
tgcacggttcgaaggctttcaaccg

SEQ ID NO: 1615793 - DNA, 25 bp, Homo sapien
aggcaattttggggccgcgcccaag

SEQ ID NO: 1615794 - DNA, 25 bp, Homo sapien
ggccgcgcccaaggaaaccctgcag

SEQ ID NO: 1615795 - DNA, 25 bp, Homo sapien
ttctgagcagatccgtccgagactg

SEQ ID NO: 1615796 - DNA, 25 bp, Homo sapien
aacaaacccgcctggaaaatgctgc

SEQ ID NO: 1615797 - DNA, 25 bp, Homo sapien
ccgagactgtggagcggaatcgcca

SEQ ID NO: 1615798 - DNA, 25 bp, Homo sapien
aatccagccagttttgggacggccg

SEQ ID NO: 1615799 - DNA, 25 bp, Homo sapien
actgtttgcccgcctgtctgccagg

SEQ ID NO: 1615800 - DNA, 25 bp, Homo sapien
tggcctctgcctgtgcccgggatcc

SEQ ID NO: 1615801 - DNA, 25 bp, Homo sapien
ggcttcttctctggctggcctctgc

SEQ ID NO: 1615802 - DNA, 25 bp, Homo sapien
gtctgccaggcttcttctctggctg

SEQ ID NO: 1615803 - DNA, 25 bp, Homo sapien
ggtcaggccgggacccaacattgat

SEQ ID NO: 1615804 - DNA, 25 bp, Homo sapien
gctggacgaacgcttgaggaaatca

SEQ ID NO: 1615805 - DNA, 25 bp, Homo sapien
tagggagccgtttcagagaactttc

SEQ ID NO: 1615806 - DNA, 25 bp, Homo sapien
cttcaaacagcaggagagccaaggc

SEQ ID NO: 1615807 - DNA, 25 bp, Homo sapien
agcccaggtccccccgagaacacag

SEQ ID NO: 1615808 - DNA, 25 bp, Homo sapien
gcccaggtccccccgagaacacaga

SEQ ID NO: 1615809 - DNA, 25 bp, Homo sapien
cagcacacaggcagtgcccatggat

SEQ ID NO: 1615810 - DNA, 25 bp, Homo sapien
ccatggatggcagaagcaaagccca

SEQ ID NO: 1615811 - DNA, 25 bp, Homo sapien
aaccccaagaaggagggatgccacg

SEQ ID NO: 1615812 - DNA, 25 bp, Homo sapien
tggatagagccacgccaggttccaa

SEQ ID NO: 1615813 - DNA, 25 bp, Homo sapien
gtgacttgatgtgccctgaggaccg

SEQ ID NO: 1615814 - DNA, 25 bp, Homo sapien
aagtggagttgccagcggcctggac

SEQ ID NO: 1615815 - DNA, 25 bp, Homo sapien
ccgcggccgcggcccttggccacca

SEQ ID NO: 1615816 - DNA, 25 bp, Homo sapien
tcggccagcgccgcccatgccgcgg

SEQ ID NO: 1615817 - DNA, 25 bp, Homo sapien
agcgccgcccatgccgcggcctttc

SEQ ID NO: 1615818 - DNA, 25 bp, Homo sapien
cgcccatgccgcggcctttctgctg

SEQ ID NO: 1615819 - DNA, 25 bp, Homo sapien
ctcctccttgaccatgtcgatgatc

SEQ ID NO: 1615820 - DNA, 25 bp, Homo sapien
agcactcgggcatccgccagaactt

SEQ ID NO: 1615821 - DNA, 25 bp, Homo sapien
tacttgatggtgctgccgcggatgt

SEQ ID NO: 1615822 - DNA, 25 bp, Homo sapien
tgaccatgtcgatgatctcgtcggg

SEQ ID NO: 1615823 - DNA, 25 bp, Homo sapien
tcagtcccgggacatacgtggcaaa

SEQ ID NO: 1615824 - DNA, 25 bp, Homo sapien
catacgtggcaaagggtccaccctg

SEQ ID NO: 1615825 - DNA, 25 bp, Homo sapien
gtgtggtaggcgcagcccccattgt

SEQ ID NO: 1615826 - DNA, 25 bp, Homo sapien
ccctgcaagctgcacagtatcagtc

SEQ ID NO: 1615827 - DNA, 25 bp, Homo sapien
aaggaagactggctcctatcctctg

SEQ ID NO: 1615828 - DNA, 25 bp, Homo sapien
aggaagactggctcctatcctctgc

SEQ ID NO: 1615829 - DNA, 25 bp, Homo sapien
ggaagactggctcctatcctctgcc

SEQ ID NO: 1615830 - DNA, 25 bp, Homo sapien
ggggcctccctgtgcaccagacaca

SEQ ID NO: 1615831 - DNA, 25 bp, Homo sapien
gcagcccaaagcccagagcgggtgg

SEQ ID NO: 1615832 - DNA, 25 bp, Homo sapien
ggcctccctgtgcaccagacacagc

SEQ ID NO: 1615833 - DNA, 25 bp, Homo sapien
agcccaaagcccagagcgggtgggg

SEQ ID NO: 1615834 - DNA, 25 bp, Homo sapien
aggcaccatccgacacagccagact

SEQ ID NO: 1615835 - DNA, 25 bp, Homo sapien
gctggccgcagatgggaggcacgcg

SEQ ID NO: 1615836 - DNA, 25 bp, Homo sapien
acgcggttctgcaccaaggcaccat

SEQ ID NO: 1615837 - DNA, 25 bp, Homo sapien
tggtgattccaataccggaagtgga

SEQ ID NO: 1615838 - DNA, 25 bp, Homo sapien
gccacactaccatggcccgcagagt

SEQ ID NO: 1615839 - DNA, 25 bp, Homo sapien
cgtgacctgggcatcccggacatcc

SEQ ID NO: 1615840 - DNA, 25 bp, Homo sapien
cactaccatggcccgcagagtgcag

SEQ ID NO: 1615841 - DNA, 25 bp, Homo sapien
ccggacatcccagggccacactacc

SEQ ID NO: 1615842 - DNA, 25 bp, Homo sapien
atcccacccccgttggtgggtgcag

SEQ ID NO: 1615843 - DNA, 25 bp, Homo sapien
agggaggaggctgagtgtgcacccc

SEQ ID NO: 1615844 - DNA, 25 bp, Homo sapien
ggctgagtgtgcaccccctgcatcc

SEQ ID NO: 1615845 - DNA, 25 bp, Homo sapien
ccctgcatcccacccccgttggtgg

SEQ ID NO: 1615846 - DNA, 25 bp, Homo sapien
aggtgtccattgtacgtctccccat

SEQ ID NO: 1615847 - DNA, 25 bp, Homo sapien
gctcaccaggtgtccattgtacgtc

SEQ ID NO: 1615848 - DNA, 25 bp, Homo sapien
tgttcatccagttgtcgcagctcac

SEQ ID NO: 1615849 - DNA, 25 bp, Homo sapien
tgcagatgacttctcgcaggttaat

SEQ ID NO: 1615850 - DNA, 25 bp, Homo sapien
gtgattctgagccgtcttcagcagt

SEQ ID NO: 1615851 - DNA, 25 bp, Homo sapien
gggtgattctgagccgtcttcagca

SEQ ID NO: 1615852 - DNA, 25 bp, Homo sapien
ggtgattctgagccgtcttcagcag

SEQ ID NO: 1615853 - DNA, 25 bp, Homo sapien
ggggtgattctgagccgtcttcagc

SEQ ID NO: 1615854 - DNA, 25 bp, Homo sapien
ttgtctgtttgaccagcgcctggga

SEQ ID NO: 1615855 - DNA, 25 bp, Homo sapien
tctgtttgaccagcgcctgggagct

SEQ ID NO: 1615856 - DNA, 25 bp, Homo sapien
tgggagctctggtcttgagtcccac

SEQ ID NO: 1615857 - DNA, 25 bp, Homo sapien
ccagcgcctgggagctctggtcttg

SEQ ID NO: 1615858 - DNA, 25 bp, Homo sapien
ccaagtgtgataggagaggccccac

SEQ ID NO: 1615859 - DNA, 25 bp, Homo sapien
tgccaagtgtgataggagaggcccc

SEQ ID NO: 1615860 - DNA, 25 bp, Homo sapien
gatccacgaggacctaaacccagtg

SEQ ID NO: 1615861 - DNA, 25 bp, Homo sapien
ctggttctcaggtctagatccacga

SEQ ID NO: 1615862 - DNA, 25 bp, Homo sapien
cactgtactgtggatacaagtccgt

SEQ ID NO: 1615863 - DNA, 25 bp, Homo sapien
tgcaaccctaaatcccagacacgaa

SEQ ID NO: 1615864 - DNA, 25 bp, Homo sapien
taactaaggcgaggccactgtactg

SEQ ID NO: 1615865 - DNA, 25 bp, Homo sapien
gaacgtgatagagccacctgcagtc

SEQ ID NO: 1615866 - DNA, 25 bp, Homo sapien
ggtgagaccccgcagttgccctgcc

SEQ ID NO: 1615867 - DNA, 25 bp, Homo sapien
tgctgttcccgcctcccggtgagac

SEQ ID NO: 1615868 - DNA, 25 bp, Homo sapien
gggatcccaacgactgctgttcccg

SEQ ID NO: 1615869 - DNA, 25 bp, Homo sapien
ccgcagggatcccaacgactgctgt

SEQ ID NO: 1615870 - DNA, 25 bp, Homo sapien
cgggctcgccggccacttccgccgc

SEQ ID NO: 1615871 - DNA, 25 bp, Homo sapien
acacgctcccggcggtcgtcgccgc

SEQ ID NO: 1615872 - DNA, 25 bp, Homo sapien
gaccgggctcgccggccacttccgc

SEQ ID NO: 1615873 - DNA, 25 bp, Homo sapien
cgctcccggcggtcgtcgccgcgcc

SEQ ID NO: 1615874 - DNA, 25 bp, Homo sapien
agaaagtggcagagacgcaagccag

SEQ ID NO: 1615875 - DNA, 25 bp, Homo sapien
tcagcaccgggctcgaagggcggtc

SEQ ID NO: 1615876 - DNA, 25 bp, Homo sapien
cagcaccgggctcgaagggcggtca

SEQ ID NO: 1615877 - DNA, 25 bp, Homo sapien
gcaccgggctcgaagggcggtcaac

SEQ ID NO: 1615878 - DNA, 25 bp, Homo sapien
agcaccgggctcgaagggcggtcaa

SEQ ID NO: 1615879 - DNA, 25 bp, Homo sapien
ggtagtgacgggtacgctggctgat

SEQ ID NO: 1615880 - DNA, 25 bp, Homo sapien
gagcagccgaggaaggcggtggtag

SEQ ID NO: 1615881 - DNA, 25 bp, Homo sapien
agctgtcgcgccagtcgcaacagaa

SEQ ID NO: 1615882 - DNA, 25 bp, Homo sapien
aagcaggtccgaggcacagcccgat

SEQ ID NO: 1615883 - DNA, 25 bp, Homo sapien
cacccgcgggagccccgcgcagccc

SEQ ID NO: 1615884 - DNA, 25 bp, Homo sapien
acccgcgggagccccgcgcagccca

SEQ ID NO: 1615885 - DNA, 25 bp, Homo sapien
cgggagccccgcgcagcccaggctt

SEQ ID NO: 1615886 - DNA, 25 bp, Homo sapien
ccgcgggagccccgcgcagcccagg

SEQ ID NO: 1615887 - DNA, 25 bp, Homo sapien
gaagggccactcttgggtaatatat

SEQ ID NO: 1615888 - DNA, 25 bp, Homo sapien
gactcattgacttcagagcggacag

SEQ ID NO: 1615889 - DNA, 25 bp, Homo sapien
tgttgtccttggcagctgcgccctg

SEQ ID NO: 1615890 - DNA, 25 bp, Homo sapien
tctccaggtgggagtagcggccagg

SEQ ID NO: 1615891 - DNA, 25 bp, Homo sapien
gttggattgcagttcaggtaactta

SEQ ID NO: 1615892 - DNA, 25 bp, Homo sapien
tcaggtaacttagatccggagggtg

SEQ ID NO: 1615893 - DNA, 25 bp, Homo sapien
tgggcacaccccagaaagttatggc

SEQ ID NO: 1615894 - DNA, 25 bp, Homo sapien
aagttatggcatccaagaaggtccc

SEQ ID NO: 1615895 - DNA, 25 bp, Homo sapien
gtgagcctcgctgtcatctcctcgc

SEQ ID NO: 1615896 - DNA, 25 bp, Homo sapien
tgagcctcgctgtcatctcctcgca

SEQ ID NO: 1615897 - DNA, 25 bp, Homo sapien
gagcctcgctgtcatctcctcgcag

SEQ ID NO: 1615898 - DNA, 25 bp, Homo sapien
gctccccggagagccagacaaaaag

SEQ ID NO: 1615899 - DNA, 25 bp, Homo sapien
agagccagacaaaaagaaacagcat

SEQ ID NO: 1615900 - DNA, 25 bp, Homo sapien
ccgctccccggagagccagacaaaa

SEQ ID NO: 1615901 - DNA, 25 bp, Homo sapien
tccccggagagccagacaaaaagaa

SEQ ID NO: 1615902 - DNA, 25 bp, Homo sapien
aagatctcgaacattctctggttct

SEQ ID NO: 1615903 - DNA, 25 bp, Homo sapien
tctcgaacattctctggttcttcct

SEQ ID NO: 1615904 - DNA, 25 bp, Homo sapien
cgaacattctctggttcttcctcgc

SEQ ID NO: 1615905 - DNA, 25 bp, Homo sapien
aagggccaggtcaagatctcgaaca

SEQ ID NO: 1615906 - DNA, 25 bp, Homo sapien
aatatcctcatgtgggctaggtgtg

SEQ ID NO: 1615907 - DNA, 25 bp, Homo sapien
ttcttttggtggaactcatctgtgc

SEQ ID NO: 1615908 - DNA, 25 bp, Homo sapien
ggaactcatctgtgcactctctggt

SEQ ID NO: 1615909 - DNA, 25 bp, Homo sapien
tccacctttgttgggtcttggctta

SEQ ID NO: 1615910 - DNA, 25 bp, Homo sapien
tgagttgggaggcttatctgagccc

SEQ ID NO: 1615911 - DNA, 25 bp, Homo sapien
tgtcccagatggcagtagtttctcg

SEQ ID NO: 1615912 - DNA, 25 bp, Homo sapien
aattagtcaagagtggatggtgcgt

SEQ ID NO: 1615913 - DNA, 25 bp, Homo sapien
gatggcagtagtttctcggcaagga

SEQ ID NO: 1615914 - DNA, 25 bp, Homo sapien
tgcagtggtgtgagatcacgccact

SEQ ID NO: 1615915 - DNA, 25 bp, Homo sapien
gcagaggttgcagtggtgtgagatc

SEQ ID NO: 1615916 - DNA, 25 bp, Homo sapien
agaggttgcagtggtgtgagatcac

SEQ ID NO: 1615917 - DNA, 25 bp, Homo sapien
aggttgcagtggtgtgagatcacgc

SEQ ID NO: 1615918 - DNA, 25 bp, Homo sapien
tcagacctgcccggacatgtccaag

SEQ ID NO: 1615919 - DNA, 25 bp, Homo sapien
cagacctgcccggacatgtccaagt

SEQ ID NO: 1615920 - DNA, 25 bp, Homo sapien
agacctgcccggacatgtccaagtc

SEQ ID NO: 1615921 - DNA, 25 bp, Homo sapien
acctgcccggacatgtccaagtccc

SEQ ID NO: 1615922 - DNA, 25 bp, Homo sapien
cagagttgcactccgaagactccag

SEQ ID NO: 1615923 - DNA, 25 bp, Homo sapien
tgggaagattcgaacaccgacctcg

SEQ ID NO: 1615924 - DNA, 25 bp, Homo sapien
aagactccagattccgagagttgcg

SEQ ID NO: 1615925 - DNA, 25 bp, Homo sapien
ttgcggaaacgctacgaggacctgc

SEQ ID NO: 1615926 - DNA, 25 bp, Homo sapien
gggtgtcgctccagacctatgatga

SEQ ID NO: 1615927 - DNA, 25 bp, Homo sapien
gacttgttagccaaagactgccact

SEQ ID NO: 1615928 - DNA, 25 bp, Homo sapien
caagtgaccatgtgcatcggcgcgt

SEQ ID NO: 1615929 - DNA, 25 bp, Homo sapien
caactgctggcagaatcttcgtccg

SEQ ID NO: 1615930 - DNA, 25 bp, Homo sapien
agtgaccgtcctgtccccttgttgg

SEQ ID NO: 1615931 - DNA, 25 bp, Homo sapien
tcagaaatccccaccttgaggaacc

SEQ ID NO: 1615932 - DNA, 25 bp, Homo sapien
catcagcctcgaagcatttattgag

SEQ ID NO: 1615933 - DNA, 25 bp, Homo sapien
tgatgacaggattggcacagtgacc

SEQ ID NO: 1615934 - DNA, 25 bp, Homo sapien
cggggatcacgtactcctcttcatc

SEQ ID NO: 1615935 - DNA, 25 bp, Homo sapien
tcagtgcccggggatcacgtactcc

SEQ ID NO: 1615936 - DNA, 25 bp, Homo sapien
tgcccggggatcacgtactcctctt

SEQ ID NO: 1615937 - DNA, 25 bp, Homo sapien
gtgcccggggatcacgtactcctct

SEQ ID NO: 1615938 - DNA, 25 bp, Homo sapien
ttgtagttgatgtaaaagtcattgt

SEQ ID NO: 1615939 - DNA, 25 bp, Homo sapien
gttgatgtaaaagtcattgtcctct

SEQ ID NO: 1615940 - DNA, 25 bp, Homo sapien
gctgggaagccaggtcgatgtcctt

SEQ ID NO: 1615941 - DNA, 25 bp, Homo sapien
gtcattgtcctctgaagggtgagcc

SEQ ID NO: 1615942 - DNA, 25 bp, Homo sapien
ggctgccgtaccgtggctgcaagcc

SEQ ID NO: 1615943 - DNA, 25 bp, Homo sapien
tgttcatcccactggtgctcggctg

SEQ ID NO: 1615944 - DNA, 25 bp, Homo sapien
catgttctcatagtcgggagtggag

SEQ ID NO: 1615945 - DNA, 25 bp, Homo sapien
gggcaggatggcacggccacttggg

SEQ ID NO: 1615946 - DNA, 25 bp, Homo sapien
caagaagcaggcacccgctgaccac

SEQ ID NO: 1615947 - DNA, 25 bp, Homo sapien
tggccactcggcatcgccagagtct

SEQ ID NO: 1615948 - DNA, 25 bp, Homo sapien
caccactgccccgatagttgcagag

SEQ ID NO: 1615949 - DNA, 25 bp, Homo sapien
gccccgatagttgcagaggccaggc

SEQ ID NO: 1615950 - DNA, 25 bp, Homo sapien
cagagcagttgtctcggcggatgtc

SEQ ID NO: 1615951 - DNA, 25 bp, Homo sapien
agctggttgtgtcccagcagagcag

SEQ ID NO: 1615952 - DNA, 25 bp, Homo sapien
tggccagagcagttgtctcggcgga

SEQ ID NO: 1615953 - DNA, 25 bp, Homo sapien
tgggagctggttgtgtcccagcaga

SEQ ID NO: 1615954 - DNA, 25 bp, Homo sapien
gggcacagttgcagtcggcctgcag

SEQ ID NO: 1615955 - DNA, 25 bp, Homo sapien
aggtcacagcgggcggccagcgccc

SEQ ID NO: 1615956 - DNA, 25 bp, Homo sapien
aaggtcacagcgggcggccagcgcc

SEQ ID NO: 1615957 - DNA, 25 bp, Homo sapien
agtcggcctgcaggtcaaggtcaca

SEQ ID NO: 1615958 - DNA, 25 bp, Homo sapien
gggcaaagaaggtcactggaagctc

SEQ ID NO: 1615959 - DNA, 25 bp, Homo sapien
gttgcgtagcacgttcaggacctca

SEQ ID NO: 1615960 - DNA, 25 bp, Homo sapien
ttgctggcccgcagagactggttgt

SEQ ID NO: 1615961 - DNA, 25 bp, Homo sapien
gtcaaggagaatcacgttgctggcc

SEQ ID NO: 1615962 - DNA, 25 bp, Homo sapien
ttccagtccacatccgcggaggaca

SEQ ID NO: 1615963 - DNA, 25 bp, Homo sapien
ggcacgtggcactgaactccgcgtt

SEQ ID NO: 1615964 - DNA, 25 bp, Homo sapien
cacgacggttctaggctgtctgact

SEQ ID NO: 1615965 - DNA, 25 bp, Homo sapien
gaggacacggtgcacgacggttcta

SEQ ID NO: 1615966 - DNA, 25 bp, Homo sapien
ctacgtagagacaccggaatcctag

SEQ ID NO: 1615967 - DNA, 25 bp, Homo sapien
agagacaccggaatcctagccctga

SEQ ID NO: 1615968 - DNA, 25 bp, Homo sapien
cctccaccgccagtgtttattatta

SEQ ID NO: 1615969 - DNA, 25 bp, Homo sapien
cgcctccaccgccagtgtttattat

SEQ ID NO: 1615970 - DNA, 25 bp, Homo sapien
gacgggaccctatgcaaataagcgg

SEQ ID NO: 1615971 - DNA, 25 bp, Homo sapien
tctggtcgcctcctttggctggtgg

SEQ ID NO: 1615972 - DNA, 25 bp, Homo sapien
tagataaccccagtgcttagcgggc

SEQ ID NO: 1615973 - DNA, 25 bp, Homo sapien
tgaaatggtaaaacgcagccccagt

SEQ ID NO: 1615974 - DNA, 25 bp, Homo sapien
tcacgctcccggtatctcccagaac

SEQ ID NO: 1615975 - DNA, 25 bp, Homo sapien
ggtatctcccagaacggcgggtcgc

SEQ ID NO: 1615976 - DNA, 25 bp, Homo sapien
cagaacggcgggtcgctgggaagtc

SEQ ID NO: 1615977 - DNA, 25 bp, Homo sapien
ctcccggtatctcccagaacggcgg

SEQ ID NO: 1615978 - DNA, 25 bp, Homo sapien
gtctggtttgcagtccctgcacagg

SEQ ID NO: 1615979 - DNA, 25 bp, Homo sapien
ctgccacgcttttgcctctgcgatg

SEQ ID NO: 1615980 - DNA, 25 bp, Homo sapien
acggcgcccagaggctgcgtcctgg

SEQ ID NO: 1615981 - DNA, 25 bp, Homo sapien
aaaagcgacggcgcccagaggctgc

SEQ ID NO: 1615982 - DNA, 25 bp, Homo sapien
ctggaaaagcgacggcgcccagagg

SEQ ID NO: 1615983 - DNA, 25 bp, Homo sapien
agcgacggcgcccagaggctgcgtc

SEQ ID NO: 1615984 - DNA, 25 bp, Homo sapien
gccagcaccgtccgcagcgctgctg

SEQ ID NO: 1615985 - DNA, 25 bp, Homo sapien
ggtcgctggcgttcctctggctctg

SEQ ID NO: 1615986 - DNA, 25 bp, Homo sapien
ctggggtcgctggcgttcctctggc

SEQ ID NO: 1615987 - DNA, 25 bp, Homo sapien
cagcaccgtccgcagcgctgctggg

SEQ ID NO: 1615988 - DNA, 25 bp, Homo sapien
gccaccttaactgcgtgtgacacca

SEQ ID NO: 1615989 - DNA, 25 bp, Homo sapien
tgccaccttaactgcgtgtgacacc

SEQ ID NO: 1615990 - DNA, 25 bp, Homo sapien
ccaccttaactgcgtgtgacaccat

SEQ ID NO: 1615991 - DNA, 25 bp, Homo sapien
tgtgccaccttaactgcgtgtgaca

SEQ ID NO: 1615992 - DNA, 25 bp, Homo sapien
gaaataaaacgtggcatgaaggcag

SEQ ID NO: 1615993 - DNA, 25 bp, Homo sapien
ttggctgacagtgacgctgaccacg

SEQ ID NO: 1615994 - DNA, 25 bp, Homo sapien
ctgacagtgacgctgaccacgggag

SEQ ID NO: 1615995 - DNA, 25 bp, Homo sapien
tggctgacagtgacgctgaccacgg

SEQ ID NO: 1615996 - DNA, 25 bp, Homo sapien
tcttggctgacagtgacgctgacca

SEQ ID NO: 1615997 - DNA, 25 bp, Homo sapien
cccttttgttctgggcgtggctcca

SEQ ID NO: 1615998 - DNA, 25 bp, Homo sapien
ggtaccaggcgctctgaagctggta

SEQ ID NO: 1615999 - DNA, 25 bp, Homo sapien
gagtgcatactgagggccccttttg

SEQ ID NO: 1616000 - DNA, 25 bp, Homo sapien
gctctccgggtggaaagcatttgaa

SEQ ID NO: 1616001 - DNA, 25 bp, Homo sapien
cagccatggttggtgttgcctggca

SEQ ID NO: 1616002 - DNA, 25 bp, Homo sapien
gcttgattttgagccggcacatgga

SEQ ID NO: 1616003 - DNA, 25 bp, Homo sapien
taagccagggatgggattcacgatt

SEQ ID NO: 1616004 - DNA, 25 bp, Homo sapien
ccaggcaggttgagaagaggtccat

SEQ ID NO: 1616005 - DNA, 25 bp, Homo sapien
tccccacgagcccagggtgagtagg

SEQ ID NO: 1616006 - DNA, 25 bp, Homo sapien
agtagggaagctccagcccctatcc

SEQ ID NO: 1616007 - DNA, 25 bp, Homo sapien
ccggggagggagcaccccacactca

SEQ ID NO: 1616008 - DNA, 25 bp, Homo sapien
gcccagggtgagtagggaagctcca

SEQ ID NO: 1616009 - DNA, 25 bp, Homo sapien
cgttcccgagcgaaagcgtaagcga

SEQ ID NO: 1616010 - DNA, 25 bp, Homo sapien
gcacccgttcccgagcgaaagcgta

SEQ ID NO: 1616011 - DNA, 25 bp, Homo sapien
agcgtaagcgactgcgtcgactccc

SEQ ID NO: 1616012 - DNA, 25 bp, Homo sapien
cgagcgaaagcgtaagcgactgcgt

SEQ ID NO: 1616013 - DNA, 25 bp, Homo sapien
cagtactcgccagggatgaccatga

SEQ ID NO: 1616014 - DNA, 25 bp, Homo sapien
cgcaaggacctcagagacgttcttt

SEQ ID NO: 1616015 - DNA, 25 bp, Homo sapien
acgcaaggacctcagagacgttctt

SEQ ID NO: 1616016 - DNA, 25 bp, Homo sapien
aacgcaaggacctcagagacgttct

SEQ ID NO: 1616017 - DNA, 25 bp, Homo sapien
aaacgcaaggacctcagagacgttc

SEQ ID NO: 1616018 - DNA, 25 bp, Homo sapien
aagagccgagaaactgtgtgaccgg

SEQ ID NO: 1616019 - DNA, 25 bp, Homo sapien
aggaagagccgagaaactgtgtgac

SEQ ID NO: 1616020 - DNA, 25 bp, Homo sapien
gaagagccgagaaactgtgtgaccg

SEQ ID NO: 1616021 - DNA, 25 bp, Homo sapien
ggaggaagagccgagaaactgtgtg

SEQ ID NO: 1616022 - DNA, 25 bp, Homo sapien
atgcccattggcatcaccggtgcag

SEQ ID NO: 1616023 - DNA, 25 bp, Homo sapien
catcaccggtgcagccattggtggc

SEQ ID NO: 1616024 - DNA, 25 bp, Homo sapien
ttggcatcaccggtgcagccattgg

SEQ ID NO: 1616025 - DNA, 25 bp, Homo sapien
tcctcttgcagatgcccattggcat

SEQ ID NO: 1616026 - DNA, 25 bp, Homo sapien
gtccaactcgcttgaggctgggccc

SEQ ID NO: 1616027 - DNA, 25 bp, Homo sapien
gggcgctccattttgtgttccagga

SEQ ID NO: 1616028 - DNA, 25 bp, Homo sapien
tcaacatagggtaggtggcagccac

SEQ ID NO: 1616029 - DNA, 25 bp, Homo sapien
ggcagccacgggtccaactcgcttg

SEQ ID NO: 1616030 - DNA, 25 bp, Homo sapien
acacagcttagcagagccagacacc

SEQ ID NO: 1616031 - DNA, 25 bp, Homo sapien
aagccctgtgcatagcttagccagg

SEQ ID NO: 1616032 - DNA, 25 bp, Homo sapien
ggggggtatccctgccacctacagc

SEQ ID NO: 1616033 - DNA, 25 bp, Homo sapien
ccaagccctgtgcatagcttagcca

SEQ ID NO: 1616034 - DNA, 25 bp, Homo sapien
cgggcggcactagtggcgccttgaa

SEQ ID NO: 1616035 - DNA, 25 bp, Homo sapien
gctcggggtccatgtcagtgcagaa

SEQ ID NO: 1616036 - DNA, 25 bp, Homo sapien
tgagcagggacagcacggggtggaa

SEQ ID NO: 1616037 - DNA, 25 bp, Homo sapien
gtccatgtcagtgcagaagctcacg

SEQ ID NO: 1616038 - DNA, 25 bp, Homo sapien
agcatgatgggtgcggccagcagcg

SEQ ID NO: 1616039 - DNA, 25 bp, Homo sapien
ccagcatgatgggtgcggccagcag

SEQ ID NO: 1616040 - DNA, 25 bp, Homo sapien
ctaggtccagcatgatgggtgcggc

SEQ ID NO: 1616041 - DNA, 25 bp, Homo sapien
ggtccagcatgatgggtgcggccag

SEQ ID NO: 1616042 - DNA, 25 bp, Homo sapien
tgggtcaggagatgggggcggtggc

SEQ ID NO: 1616043 - DNA, 25 bp, Homo sapien
tgctgtcacccacgtacggcacata

SEQ ID NO: 1616044 - DNA, 25 bp, Homo sapien
gtatactcatccagcgcgcgcttgc

SEQ ID NO: 1616045 - DNA, 25 bp, Homo sapien
ccacgtacggcacatacttgatgac

SEQ ID NO: 1616046 - DNA, 25 bp, Homo sapien
gcaccagtgtgttggttccgcccag

SEQ ID NO: 1616047 - DNA, 25 bp, Homo sapien
ctggagtgcagcaggagtttgcccg

SEQ ID NO: 1616048 - DNA, 25 bp, Homo sapien
tggagtgcagcaggagtttgcccgg

SEQ ID NO: 1616049 - DNA, 25 bp, Homo sapien
tcttcgccgggcgtatagagcactg

SEQ ID NO: 1616050 - DNA, 25 bp, Homo sapien
gcagtggtcaggctcttcgccgggc

SEQ ID NO: 1616051 - DNA, 25 bp, Homo sapien
ggcgtatagagcactgggttgctct

SEQ ID NO: 1616052 - DNA, 25 bp, Homo sapien
ggtcaggctcttcgccgggcgtata

SEQ ID NO: 1616053 - DNA, 25 bp, Homo sapien
tgcccaggtggttgtaactcacgat

SEQ ID NO: 1616054 - DNA, 25 bp, Homo sapien
tgcaatggcgccgataggttctccc

SEQ ID NO: 1616055 - DNA, 25 bp, Homo sapien
ggtggttgtaactcacgatggacat

SEQ ID NO: 1616056 - DNA, 25 bp, Homo sapien
ctccttagagcggaactgcaatggc

SEQ ID NO: 1616057 - DNA, 25 bp, Homo sapien
tgggtacaagggaagccccagcagc

SEQ ID NO: 1616058 - DNA, 25 bp, Homo sapien
ctgtgggtacaagggaagccccagc

SEQ ID NO: 1616059 - DNA, 25 bp, Homo sapien
ggtacaagggaagccccagcagctg

SEQ ID NO: 1616060 - DNA, 25 bp, Homo sapien
tgtgggtacaagggaagccccagca

SEQ ID NO: 1616061 - DNA, 25 bp, Homo sapien
tgctgccacgcgagctcaagagctc

SEQ ID NO: 1616062 - DNA, 25 bp, Homo sapien
tgttctgcggagacccattgaggaa

SEQ ID NO: 1616063 - DNA, 25 bp, Homo sapien
ttgaagtcatctccgcccacaaaaa

SEQ ID NO: 1616064 - DNA, 25 bp, Homo sapien
ccggagccaatgaggaagtccacaa

SEQ ID NO: 1616065 - DNA, 25 bp, Homo sapien
ggaagtctcggatgtccctgcggat

SEQ ID NO: 1616066 - DNA, 25 bp, Homo sapien
tggaatcacctcacagaagcgctcc

SEQ ID NO: 1616067 - DNA, 25 bp, Homo sapien
gtgttcgccgtccacagcactatga

SEQ ID NO: 1616068 - DNA, 25 bp, Homo sapien
gctgtgtcgttgaggcctggaatca

SEQ ID NO: 1616069 - DNA, 25 bp, Homo sapien
accaagtggcgaagaacaggtggca

SEQ ID NO: 1616070 - DNA, 25 bp, Homo sapien
gaagttggttgtacatactctcgga

SEQ ID NO: 1616071 - DNA, 25 bp, Homo sapien
ttccccgggtgtcaagtgaggcctg

SEQ ID NO: 1616072 - DNA, 25 bp, Homo sapien
agaggcctgggctactcagttcccc

SEQ ID NO: 1616073 - DNA, 25 bp, Homo sapien
gagcctgggatgaggttgtccgcgc

SEQ ID NO: 1616074 - DNA, 25 bp, Homo sapien
attcggggatgtaaacagaaggccg

SEQ ID NO: 1616075 - DNA, 25 bp, Homo sapien
cgcgctctggttggccgcgatgaat

SEQ ID NO: 1616076 - DNA, 25 bp, Homo sapien
tccatgtgcggccacagttgctcct

SEQ ID NO: 1616077 - DNA, 25 bp, Homo sapien
gaccctcacactcggccctgcccgg

SEQ ID NO: 1616078 - DNA, 25 bp, Homo sapien
ggaccctcacactcggccctgcccg

SEQ ID NO: 1616079 - DNA, 25 bp, Homo sapien
gggaccctcacactcggccctgccc

SEQ ID NO: 1616080 - DNA, 25 bp, Homo sapien
gggggaccctcacactcggccctgc

SEQ ID NO: 1616081 - DNA, 25 bp, Homo sapien
tgcccgcctgagtcagcgagccgta

SEQ ID NO: 1616082 - DNA, 25 bp, Homo sapien
tcagcgagccgtagtagttggcctc

SEQ ID NO: 1616083 - DNA, 25 bp, Homo sapien
gcagcaccgcgctgaagggtacgaa

SEQ ID NO: 1616084 - DNA, 25 bp, Homo sapien
cgctgaagggtacgaacacctcctg

SEQ ID NO: 1616085 - DNA, 25 bp, Homo sapien
gggtcagcagacacggcgaggtgac

SEQ ID NO: 1616086 - DNA, 25 bp, Homo sapien
tgagacctccggcaccttaagctcc

SEQ ID NO: 1616087 - DNA, 25 bp, Homo sapien
tgggagtggtgaaagggccgcgacc

SEQ ID NO: 1616088 - DNA, 25 bp, Homo sapien
tgggccccacctagactctcaagcc

SEQ ID NO: 1616089 - DNA, 25 bp, Homo sapien
ggccaggacaaacgcagtcgattgg

SEQ ID NO: 1616090 - DNA, 25 bp, Homo sapien
gacaaacgcagtcgattggccagca

SEQ ID NO: 1616091 - DNA, 25 bp, Homo sapien
cgtgggccaggacaaacgcagtcga

SEQ ID NO: 1616092 - DNA, 25 bp, Homo sapien
aaacgcagtcgattggccagcaccg

SEQ ID NO: 1616093 - DNA, 25 bp, Homo sapien
tgaagcgcgtggacgtggggtgcac

SEQ ID NO: 1616094 - DNA, 25 bp, Homo sapien
gagccggggcacctgccgggcggtc

SEQ ID NO: 1616095 - DNA, 25 bp, Homo sapien
ggaaggtgaagcgcgtggacgtggg

SEQ ID NO: 1616096 - DNA, 25 bp, Homo sapien
cgacaagcatgaccccgagccgggg

SEQ ID NO: 1616097 - DNA, 25 bp, Homo sapien
cagtgaatcccgggtcccgtgccct

SEQ ID NO: 1616098 - DNA, 25 bp, Homo sapien
cgcgcagtgaatcccgggtcccgtg

SEQ ID NO: 1616099 - DNA, 25 bp, Homo sapien
gcagtgaatcccgggtcccgtgccc

SEQ ID NO: 1616100 - DNA, 25 bp, Homo sapien
gcgcagtgaatcccgggtcccgtgc

SEQ ID NO: 1616101 - DNA, 25 bp, Homo sapien
tcgtattgcgcctcgatggcctcgg

SEQ ID NO: 1616102 - DNA, 25 bp, Homo sapien
cacgtccgggctctcgacgaagaac

SEQ ID NO: 1616103 - DNA, 25 bp, Homo sapien
cggctgacgcgcgtcgtccggtact

SEQ ID NO: 1616104 - DNA, 25 bp, Homo sapien
tccgggctctcgacgaagaactggg

SEQ ID NO: 1616105 - DNA, 25 bp, Homo sapien
cgtccctgccccgaaccgcactcac

SEQ ID NO: 1616106 - DNA, 25 bp, Homo sapien
tcagcggggactctaagcggccggg

SEQ ID NO: 1616107 - DNA, 25 bp, Homo sapien
ctctaagcggccggggccaagccag

SEQ ID NO: 1616108 - DNA, 25 bp, Homo sapien
gggtcagcggggactctaagcggcc

SEQ ID NO: 1616109 - DNA, 25 bp, Homo sapien
gaggaccagaactccaaagccagaa

SEQ ID NO: 1616110 - DNA, 25 bp, Homo sapien
caacgtctggagacccggttcgagg

SEQ ID NO: 1616111 - DNA, 25 bp, Homo sapien
gacctccggagaaaagcgctgcggc

SEQ ID NO: 1616112 - DNA, 25 bp, Homo sapien
agcgcggcgcgtataggttcacctc

SEQ ID NO: 1616113 - DNA, 25 bp, Homo sapien
gcctttcaattgtaacattttggca

SEQ ID NO: 1616114 - DNA, 25 bp, Homo sapien
aaactgaagacgcagatagatgcct

SEQ ID NO: 1616115 - DNA, 25 bp, Homo sapien
caaccccatggctcaaaatagtttt

SEQ ID NO: 1616116 - DNA, 25 bp, Homo sapien
aatagtttttctccacagtacaaca

SEQ ID NO: 1616117 - DNA, 25 bp, Homo sapien
tcagctagaactttgtccaccaacc

SEQ ID NO: 1616118 - DNA, 25 bp, Homo sapien
tatttaatcagctagaactttgtcc

SEQ ID NO: 1616119 - DNA, 25 bp, Homo sapien
tagcttcataattccttaaaaggag

SEQ ID NO: 1616120 - DNA, 25 bp, Homo sapien
agttagaccatatttaatcagctag

SEQ ID NO: 1616121 - DNA, 25 bp, Homo sapien
ccacctcaccggtgtctgcagggct

SEQ ID NO: 1616122 - DNA, 25 bp, Homo sapien
ggcgacacagcaaggtccagctgac

SEQ ID NO: 1616123 - DNA, 25 bp, Homo sapien
acaacagctattgaaacatgaagga

SEQ ID NO: 1616124 - DNA, 25 bp, Homo sapien
tcctggagcctgctcggcccttccc

SEQ ID NO: 1616125 - DNA, 25 bp, Homo sapien
tcagctctttggaagctgtcaggag

SEQ ID NO: 1616126 - DNA, 25 bp, Homo sapien
gctgtcaggaggcacccctccaccc

SEQ ID NO: 1616127 - DNA, 25 bp, Homo sapien
agcagtgacccccatgtgatccctg

SEQ ID NO: 1616128 - DNA, 25 bp, Homo sapien
tgggccctgagtcacagccgccatc

SEQ ID NO: 1616129 - DNA, 25 bp, Homo sapien
caaaccttggcggtggctctgctaa

SEQ ID NO: 1616130 - DNA, 25 bp, Homo sapien
agaacgcagctgcacctttcgacga

SEQ ID NO: 1616131 - DNA, 25 bp, Homo sapien
aaagaaaagtctgacgccgctgcgg

SEQ ID NO: 1616132 - DNA, 25 bp, Homo sapien
tagactaggcacagcaacagagcag

SEQ ID NO: 1616133 - DNA, 25 bp, Homo sapien
agatccccgccatcggggagggcgg

SEQ ID NO: 1616134 - DNA, 25 bp, Homo sapien
tcccagatccccgccatcggggagg

SEQ ID NO: 1616135 - DNA, 25 bp, Homo sapien
tttaaataaatcctctctcaccgcc

SEQ ID NO: 1616136 - DNA, 25 bp, Homo sapien
ttaaataaatcctctctcaccgcct

SEQ ID NO: 1616137 - DNA, 25 bp, Homo sapien
cgtactcggcgatgagcctcttgat

SEQ ID NO: 1616138 - DNA, 25 bp, Homo sapien
ctgtgcaggtactcgcagcggtgct

SEQ ID NO: 1616139 - DNA, 25 bp, Homo sapien
gtactcgcagcggtgcttctcctgg

SEQ ID NO: 1616140 - DNA, 25 bp, Homo sapien
tgcagctgccgctggtcgtactcgg

SEQ ID NO: 1616141 - DNA, 25 bp, Homo sapien
ctgtgggacagcacagtcatgctca

SEQ ID NO: 1616142 - DNA, 25 bp, Homo sapien
tccacagcttgtgtggctgggccag

SEQ ID NO: 1616143 - DNA, 25 bp, Homo sapien
cagagtgggagttggtcccccgcac

SEQ ID NO: 1616144 - DNA, 25 bp, Homo sapien
ctccccgctgtaagcaggccagtgt

SEQ ID NO: 1616145 - DNA, 25 bp, Homo sapien
tcctgcaaaatctgccctcgagtag

SEQ ID NO: 1616146 - DNA, 25 bp, Homo sapien
ttcctgcaaaatctgccctcgagta

SEQ ID NO: 1616147 - DNA, 25 bp, Homo sapien
cctgcaaaatctgccctcgagtagt

SEQ ID NO: 1616148 - DNA, 25 bp, Homo sapien
gggccaccaagctcgtggtggcgat

SEQ ID NO: 1616149 - DNA, 25 bp, Homo sapien
ggcacagtaggcagcgggggggctc

SEQ ID NO: 1616150 - DNA, 25 bp, Homo sapien
tcgtggtggcgatggtgcgcgccca

SEQ ID NO: 1616151 - DNA, 25 bp, Homo sapien
tggtgcgcgcccaagtgggccctgg

SEQ ID NO: 1616152 - DNA, 25 bp, Homo sapien
tgaaccgccgcgtgatgcgctcaat

SEQ ID NO: 1616153 - DNA, 25 bp, Homo sapien
gtgcaggtcgcggtactcgctgtac

SEQ ID NO: 1616154 - DNA, 25 bp, Homo sapien
gtactcggcattgaagtcgttcttg

SEQ ID NO: 1616155 - DNA, 25 bp, Homo sapien
tcatactcctcggagccctgggaga

SEQ ID NO: 1616156 - DNA, 25 bp, Homo sapien
agagaggggccactgagtggaggct

SEQ ID NO: 1616157 - DNA, 25 bp, Homo sapien
caggagagaggggccactgagtgga

SEQ ID NO: 1616158 - DNA, 25 bp, Homo sapien
ctgaaacaggagagaggggccactg

SEQ ID NO: 1616159 - DNA, 25 bp, Homo sapien
tgagtggaggctggaaggacccagc

SEQ ID NO: 1616160 - DNA, 25 bp, Homo sapien
gggaacactggaaacgctgcaggtt

SEQ ID NO: 1616161 - DNA, 25 bp, Homo sapien
agcaagtagtcaggcgtctccgacg

SEQ ID NO: 1616162 - DNA, 25 bp, Homo sapien
tctccgacgtggacgtgggaacact

SEQ ID NO: 1616163 - DNA, 25 bp, Homo sapien
tggaaacgctgcaggttccgtttaa

SEQ ID NO: 1616164 - DNA, 25 bp, Homo sapien
aagcacgccaggatggggacatgca

SEQ ID NO: 1616165 - DNA, 25 bp, Homo sapien
tgagtctgcgcccatggcaccggtc

SEQ ID NO: 1616166 - DNA, 25 bp, Homo sapien
caccggtcggcaggaagcacgccag

SEQ ID NO: 1616167 - DNA, 25 bp, Homo sapien
cgccaggatggggacatgcatgaaa

SEQ ID NO: 1616168 - DNA, 25 bp, Homo sapien
agctcagcgtgcacctgcgtgtcca

SEQ ID NO: 1616169 - DNA, 25 bp, Homo sapien
gagctcagcgtgcacctgcgtgtcc

SEQ ID NO: 1616170 - DNA, 25 bp, Homo sapien
cagcgtgcacctgcgtgtccagggc

SEQ ID NO: 1616171 - DNA, 25 bp, Homo sapien
ctcagcgtgcacctgcgtgtccagg

SEQ ID NO: 1616172 - DNA, 25 bp, Homo sapien
gacacagagcacccaggcatcacca

SEQ ID NO: 1616173 - DNA, 25 bp, Homo sapien
gagcacccaggcatcaccacagtca

SEQ ID NO: 1616174 - DNA, 25 bp, Homo sapien
cagagcacccaggcatcaccacagt

SEQ ID NO: 1616175 - DNA, 25 bp, Homo sapien
cacagagcacccaggcatcaccaca

SEQ ID NO: 1616176 - DNA, 25 bp, Homo sapien
cttggcaaacagcggacaggtcagg

SEQ ID NO: 1616177 - DNA, 25 bp, Homo sapien
ttggcaaacagcggacaggtcaggg

SEQ ID NO: 1616178 - DNA, 25 bp, Homo sapien
ggcaaacagcggacaggtcagggaa

SEQ ID NO: 1616179 - DNA, 25 bp, Homo sapien
tggcaaacagcggacaggtcaggga

SEQ ID NO: 1616180 - DNA, 25 bp, Homo sapien
aaaagtggacgaagctcactcccca

SEQ ID NO: 1616181 - DNA, 25 bp, Homo sapien
tagtagagatgaggaggcttgccta

SEQ ID NO: 1616182 - DNA, 25 bp, Homo sapien
tctctctcagtgtaacacacctggg

SEQ ID NO: 1616183 - DNA, 25 bp, Homo sapien
tgcgatctccagtttgctgagccct

SEQ ID NO: 1616184 - DNA, 25 bp, Homo sapien
ttgacatgccccaagatcttcacca

SEQ ID NO: 1616185 - DNA, 25 bp, Homo sapien
tttgacatgccccaagatcttcacc

SEQ ID NO: 1616186 - DNA, 25 bp, Homo sapien
agcccctgggccggggatgaactgc

SEQ ID NO: 1616187 - DNA, 25 bp, Homo sapien
ccatttgatcgtggcccaggtctgg

SEQ ID NO: 1616188 - DNA, 25 bp, Homo sapien
aaccaccttgagtccccaggcctgt

SEQ ID NO: 1616189 - DNA, 25 bp, Homo sapien
tggcacctaggcactgggcatccaa

SEQ ID NO: 1616190 - DNA, 25 bp, Homo sapien
acagcccagagtggtctgtggaccc

SEQ ID NO: 1616191 - DNA, 25 bp, Homo sapien
ggcaggtgcacagtctggaagctgg

SEQ ID NO: 1616192 - DNA, 25 bp, Homo sapien
cgtgctcacagtctcggccgctgtg

SEQ ID NO: 1616193 - DNA, 25 bp, Homo sapien
tgtggcccaggtcattgctgacatc

SEQ ID NO: 1616194 - DNA, 25 bp, Homo sapien
tcttgggcttgctgcgcgaggggct

SEQ ID NO: 1616195 - DNA, 25 bp, Homo sapien
attgggcacgcccagcttcccgttg

SEQ ID NO: 1616196 - DNA, 25 bp, Homo sapien
gcagcaaggcctcacggccattggg

SEQ ID NO: 1616197 - DNA, 25 bp, Homo sapien
tcccgttgacggcaggctgagctct

SEQ ID NO: 1616198 - DNA, 25 bp, Homo sapien
ctctgagtgaagtgcgatatccggg

SEQ ID NO: 1616199 - DNA, 25 bp, Homo sapien
agcgcccacgctcgcctggggggct

SEQ ID NO: 1616200 - DNA, 25 bp, Homo sapien
agcagggtctccaaggaggctgcca

SEQ ID NO: 1616201 - DNA, 25 bp, Homo sapien
gaggcagcagggtctccaaggaggc

SEQ ID NO: 1616202 - DNA, 25 bp, Homo sapien
aggccgagcgcccacgctcgcctgg

SEQ ID NO: 1616203 - DNA, 25 bp, Homo sapien
gtctagatgtgatcaaccgccggct

SEQ ID NO: 1616204 - DNA, 25 bp, Homo sapien
tcgtctgggcatgaagatgtggcca

SEQ ID NO: 1616205 - DNA, 25 bp, Homo sapien
tctgaccttcaacgtggagggaaag

SEQ ID NO: 1616206 - DNA, 25 bp, Homo sapien
gacccctgacccatggacagtgatg

SEQ ID NO: 1616207 - DNA, 25 bp, Homo sapien
tccgagtagccaggccagtccttct

SEQ ID NO: 1616208 - DNA, 25 bp, Homo sapien
catccttgtacatgcagtcctgcag

SEQ ID NO: 1616209 - DNA, 25 bp, Homo sapien
ccgtccttagcactcatgttggcca

SEQ ID NO: 1616210 - DNA, 25 bp, Homo sapien
tgcagtgtacacgtgccgtccttag

SEQ ID NO: 1616211 - DNA, 25 bp, Homo sapien
cagagccagccatcactttgtggga

SEQ ID NO: 1616212 - DNA, 25 bp, Homo sapien
ctgcaagacagagccagccatcact

SEQ ID NO: 1616213 - DNA, 25 bp, Homo sapien
agccagccatcactttgtgggaatc

SEQ ID NO: 1616214 - DNA, 25 bp, Homo sapien
gacagagccagccatcactttgtgg

SEQ ID NO: 1616215 - DNA, 25 bp, Homo sapien
tgccttgctgttgccggttgaccaa

SEQ ID NO: 1616216 - DNA, 25 bp, Homo sapien
tctgatcacaactcccagggaagag

SEQ ID NO: 1616217 - DNA, 25 bp, Homo sapien
gattcagaacgtctgccttagaggg

SEQ ID NO: 1616218 - DNA, 25 bp, Homo sapien
tctgaggaagctccaggtcactgcc

SEQ ID NO: 1616219 - DNA, 25 bp, Homo sapien
ggccgtccttctgcagtcgcagcag

SEQ ID NO: 1616220 - DNA, 25 bp, Homo sapien
cagctcagccttgcggtagggccgt

SEQ ID NO: 1616221 - DNA, 25 bp, Homo sapien
cctgatggcactcgccaagttgatg

SEQ ID NO: 1616222 - DNA, 25 bp, Homo sapien
agggcaccgcgtctgttgcacctgg

SEQ ID NO: 1616223 - DNA, 25 bp, Homo sapien
tatccccaacgcagagacgtgggca

SEQ ID NO: 1616224 - DNA, 25 bp, Homo sapien
ggtgcaagtggcaccccagccttag

SEQ ID NO: 1616225 - DNA, 25 bp, Homo sapien
ggtcggccgagcaagctcaacagtg

SEQ ID NO: 1616226 - DNA, 25 bp, Homo sapien
tctgtcctgaacaatgatgccccgg

SEQ ID NO: 1616227 - DNA, 25 bp, Homo sapien
gatcttgtcctgtatgctgcccagg

SEQ ID NO: 1616228 - DNA, 25 bp, Homo sapien
tgccgcgccttctggtaggagtcgt

SEQ ID NO: 1616229 - DNA, 25 bp, Homo sapien
taggagtcgtcggtggcacacaccg

SEQ ID NO: 1616230 - DNA, 25 bp, Homo sapien
tgatgacaatggcacttcggctccg

SEQ ID NO: 1616231 - DNA, 25 bp, Homo sapien
tactgctggatgcagtcgaagctgc

SEQ ID NO: 1616232 - DNA, 25 bp, Homo sapien
cgcggccgatgttggagaggtagaa

SEQ ID NO: 1616233 - DNA, 25 bp, Homo sapien
aggtagaaggagaacgtccgcgcct

SEQ ID NO: 1616234 - DNA, 25 bp, Homo sapien
ttgtcgcggccgatgttggagaggt

SEQ ID NO: 1616235 - DNA, 25 bp, Homo sapien
gggtgtcactgggaggtcctcggca

SEQ ID NO: 1616236 - DNA, 25 bp, Homo sapien
tcactgggaggtcctcggcaggaca

SEQ ID NO: 1616237 - DNA, 25 bp, Homo sapien
tgggaggtcctcggcaggacaggtc

SEQ ID NO: 1616238 - DNA, 25 bp, Homo sapien
gaggtcctcggcaggacaggtcccc

SEQ ID NO: 1616239 - DNA, 25 bp, Homo sapien
gaacaccatccagggggcgttccga

SEQ ID NO: 1616240 - DNA, 25 bp, Homo sapien
caagagccccaaagctaacagccca

SEQ ID NO: 1616241 - DNA, 25 bp, Homo sapien
ggcgttccgacaacgatgagcccag

SEQ ID NO: 1616242 - DNA, 25 bp, Homo sapien
cgatgagcccagtgcaggctctgtg

SEQ ID NO: 1616243 - DNA, 25 bp, Homo sapien
ggaagcccatggatcatcatgtcca

SEQ ID NO: 1616244 - DNA, 25 bp, Homo sapien
tggatcatcatgtccatatccccac

SEQ ID NO: 1616245 - DNA, 25 bp, Homo sapien
atcatcatgtccatatccccacatc

SEQ ID NO: 1616246 - DNA, 25 bp, Homo sapien
atatccccacatccagctgtgcaga

SEQ ID NO: 1616247 - DNA, 25 bp, Homo sapien
gggcccctgccctatcagagtggaa

SEQ ID NO: 1616248 - DNA, 25 bp, Homo sapien
gctgtacccagcgagcaaggacaga

SEQ ID NO: 1616249 - DNA, 25 bp, Homo sapien
tgtgggcagttcctaaccagtccag

SEQ ID NO: 1616250 - DNA, 25 bp, Homo sapien
catcgctgcatgaagggagccactg

SEQ ID NO: 1616251 - DNA, 25 bp, Homo sapien
ccttgaaatcggatagatggcctca

SEQ ID NO: 1616252 - DNA, 25 bp, Homo sapien
ggcttccttgaaatcggatagatgg

SEQ ID NO: 1616253 - DNA, 25 bp, Homo sapien
aatcggatagatggcctcagtgaaa

SEQ ID NO: 1616254 - DNA, 25 bp, Homo sapien
cccttggcttccttgaaatcggata

SEQ ID NO: 1616255 - DNA, 25 bp, Homo sapien
tacttgagtctggagaggcctgtcg

SEQ ID NO: 1616256 - DNA, 25 bp, Homo sapien
gggcaaagcactacttgagtctgga

SEQ ID NO: 1616257 - DNA, 25 bp, Homo sapien
cactacttgagtctggagaggcctg

SEQ ID NO: 1616258 - DNA, 25 bp, Homo sapien
ccggggtaagcggagcagctccaca

SEQ ID NO: 1616259 - DNA, 25 bp, Homo sapien
ccagtgcccatcagttgggaaagac

SEQ ID NO: 1616260 - DNA, 25 bp, Homo sapien
ccatcagttgggaaagacaggagct

SEQ ID NO: 1616261 - DNA, 25 bp, Homo sapien
cggaagccgcctgggacatgagaga

SEQ ID NO: 1616262 - DNA, 25 bp, Homo sapien
ccgcctgggacatgagagatggctg

SEQ ID NO: 1616263 - DNA, 25 bp, Homo sapien
agatgggacgttttacaggatgttc

SEQ ID NO: 1616264 - DNA, 25 bp, Homo sapien
caggggccgtctttgttgactcagg

SEQ ID NO: 1616265 - DNA, 25 bp, Homo sapien
ttcccaactgcccttgagctcacag

SEQ ID NO: 1616266 - DNA, 25 bp, Homo sapien
gatgttcgctacaccttcccaactg

SEQ ID NO: 1616267 - DNA, 25 bp, Homo sapien
tccagagccaacatgcgtggtgtca

SEQ ID NO: 1616268 - DNA, 25 bp, Homo sapien
gcagtgccctgacaagccaatcaag

SEQ ID NO: 1616269 - DNA, 25 bp, Homo sapien
tgtcatggccgaacccttgtcaggg

SEQ ID NO: 1616270 - DNA, 25 bp, Homo sapien
agagccagctaggtcccttcacggt

SEQ ID NO: 1616271 - DNA, 25 bp, Homo sapien
aatccaactttcattacccagcatg

SEQ ID NO: 1616272 - DNA, 25 bp, Homo sapien
cagcatgaggtatggaactgggagc

SEQ ID NO: 1616273 - DNA, 25 bp, Homo sapien
tcctctcaggccctcgagtggcaaa

SEQ ID NO: 1616274 - DNA, 25 bp, Homo sapien
cctcgagtggcaaaaatccaacttt

SEQ ID NO: 1616275 - DNA, 25 bp, Homo sapien
ccctcccaaactagcagctctgggt

SEQ ID NO: 1616276 - DNA, 25 bp, Homo sapien
gaacatctctgggacgaggacccgt

SEQ ID NO: 1616277 - DNA, 25 bp, Homo sapien
gcaccaagttgttcctctggagaga

SEQ ID NO: 1616278 - DNA, 25 bp, Homo sapien
ctttagagacagaacctgatgtggc

SEQ ID NO: 1616279 - DNA, 25 bp, Homo sapien
cagagcaagcgttacatatgtgtcc

SEQ ID NO: 1616280 - DNA, 25 bp, Homo sapien
ccaatcagtcgaaggcctggagggc

SEQ ID NO: 1616281 - DNA, 25 bp, Homo sapien
gagctgcaacatccactgtaaccta

SEQ ID NO: 1616282 - DNA, 25 bp, Homo sapien
cagaaggactctaggcttgagctgc

SEQ ID NO: 1616283 - DNA, 25 bp, Homo sapien
cctccaacgtatgggtgggcctcgt

SEQ ID NO: 1616284 - DNA, 25 bp, Homo sapien
agaggtctcctgcacgggacagctc

SEQ ID NO: 1616285 - DNA, 25 bp, Homo sapien
tcatggtgacgctgcttacagaggt

SEQ ID NO: 1616286 - DNA, 25 bp, Homo sapien
cactgccctatgtgcaaggacggcc

SEQ ID NO: 1616287 - DNA, 25 bp, Homo sapien
cattcggtgacctggaagcttcctc

SEQ ID NO: 1616288 - DNA, 25 bp, Homo sapien
agtgacaggcggcagtggctgcccc

SEQ ID NO: 1616289 - DNA, 25 bp, Homo sapien
aagcagcgccccgcatgagggtgcc

SEQ ID NO: 1616290 - DNA, 25 bp, Homo sapien
ggagggccgagagcctgcggagaca

SEQ ID NO: 1616291 - DNA, 25 bp, Homo sapien
ggaggagggccgagagcctgcggag

SEQ ID NO: 1616292 - DNA, 25 bp, Homo sapien
cacacagtgggcgtttggaggtgat

SEQ ID NO: 1616293 - DNA, 25 bp, Homo sapien
gtgatgtgggaggtttatatgggga

SEQ ID NO: 1616294 - DNA, 25 bp, Homo sapien
aggtgatgtgggaggtttatatggg

SEQ ID NO: 1616295 - DNA, 25 bp, Homo sapien
acagtgggcgtttggaggtgatgtg

SEQ ID NO: 1616296 - DNA, 25 bp, Homo sapien
tccagatgataaagacgtcaggctg

SEQ ID NO: 1616297 - DNA, 25 bp, Homo sapien
aaaaatgtcagtgcaggctcatcca

SEQ ID NO: 1616298 - DNA, 25 bp, Homo sapien
gcaccaagagtgtgtcccagtggaa

SEQ ID NO: 1616299 - DNA, 25 bp, Homo sapien
tatggttatgctactgactccagcc

SEQ ID NO: 1616300 - DNA, 25 bp, Homo sapien
tgcgggctgtcacggcggatgcagg

SEQ ID NO: 1616301 - DNA, 25 bp, Homo sapien
atgcaggggtcaactgtgctggcac

SEQ ID NO: 1616302 - DNA, 25 bp, Homo sapien
tgcagcgtgcagaggatctgcgggc

SEQ ID NO: 1616303 - DNA, 25 bp, Homo sapien
cacggcggatgcaggggtcaactgt

SEQ ID NO: 1616304 - DNA, 25 bp, Homo sapien
gcctgctgtttacacacaatcacag

SEQ ID NO: 1616305 - DNA, 25 bp, Homo sapien
cgctgcctgctgtttacacacaatc

SEQ ID NO: 1616306 - DNA, 25 bp, Homo sapien
caaaggtgatgaactacggccttgg

SEQ ID NO: 1616307 - DNA, 25 bp, Homo sapien
gccttggccgtgagtcaacagaggg

SEQ ID NO: 1616308 - DNA, 25 bp, Homo sapien
cagaaagggtcaggcaccaggatcc

SEQ ID NO: 1616309 - DNA, 25 bp, Homo sapien
tcagaaagggtcaggcaccaggatc

SEQ ID NO: 1616310 - DNA, 25 bp, Homo sapien
agggagcaggtcaagtactgctgac

SEQ ID NO: 1616311 - DNA, 25 bp, Homo sapien
aggtcaagtactgctgaccccagtt

SEQ ID NO: 1616312 - DNA, 25 bp, Homo sapien
gcaggtcaagtactgctgaccccag

SEQ ID NO: 1616313 - DNA, 25 bp, Homo sapien
gagcaggtcaagtactgctgacccc

SEQ ID NO: 1616314 - DNA, 25 bp, Homo sapien
tccagctggctaccaggtcaacacc

SEQ ID NO: 1616315 - DNA, 25 bp, Homo sapien
gctccagctggctaccaggtcaaca

SEQ ID NO: 1616316 - DNA, 25 bp, Homo sapien
ctgctccagctggctaccaggtcaa

SEQ ID NO: 1616317 - DNA, 25 bp, Homo sapien
ccagctggctaccaggtcaacacca

SEQ ID NO: 1616318 - DNA, 25 bp, Homo sapien
ggtggcagaaccgaaacgcctcaaa

SEQ ID NO: 1616319 - DNA, 25 bp, Homo sapien
catgtgccctgaggataacatcaca

SEQ ID NO: 1616320 - DNA, 25 bp, Homo sapien
aagttccagagtcagcggccagatg

SEQ ID NO: 1616321 - DNA, 25 bp, Homo sapien
gatgggcccaaatcggcctctgaga

SEQ ID NO: 1616322 - DNA, 25 bp, Homo sapien
ctagcgtctccgagcccggacgcct

SEQ ID NO: 1616323 - DNA, 25 bp, Homo sapien
cctcagtgaggggagcgcgaggccg

SEQ ID NO: 1616324 - DNA, 25 bp, Homo sapien
cgcgtccggacgttccccactggcg

SEQ ID NO: 1616325 - DNA, 25 bp, Homo sapien
ggcgcgccgggcgccatgccactca

SEQ ID NO: 1616326 - DNA, 25 bp, Homo sapien
acgtggaacaccgacaccttgctgc

SEQ ID NO: 1616327 - DNA, 25 bp, Homo sapien
cgtagctcctatcctccttcagcgc

SEQ ID NO: 1616328 - DNA, 25 bp, Homo sapien
ctgtctggcgcggtagctctcgaag

SEQ ID NO: 1616329 - DNA, 25 bp, Homo sapien
gccctcagggcactgtcggtgagct

SEQ ID NO: 1616330 - DNA, 25 bp, Homo sapien
ttgcgaccatctctcccccgcgccc

SEQ ID NO: 1616331 - DNA, 25 bp, Homo sapien
ccccttcccggctccagcgccgcca

SEQ ID NO: 1616332 - DNA, 25 bp, Homo sapien
cttcccggctccagcgccgccacgc

SEQ ID NO: 1616333 - DNA, 25 bp, Homo sapien
cttgcgaccatctctcccccgcgcc

SEQ ID NO: 1616334 - DNA, 25 bp, Homo sapien
ctggcactcaggcggggactaggca

SEQ ID NO: 1616335 - DNA, 25 bp, Homo sapien
ggatgctttatttcactgtggcggg

SEQ ID NO: 1616336 - DNA, 25 bp, Homo sapien
cagccctggcggagacctagcccag

SEQ ID NO: 1616337 - DNA, 25 bp, Homo sapien
gagacctagcccagcggggtaagga

SEQ ID NO: 1616338 - DNA, 25 bp, Homo sapien
cctcctagagggcctcagtccctcc

SEQ ID NO: 1616339 - DNA, 25 bp, Homo sapien
tcctcctagagggcctcagtccctc

SEQ ID NO: 1616340 - DNA, 25 bp, Homo sapien
ccccaaggcaacagcagtcgcccca

SEQ ID NO: 1616341 - DNA, 25 bp, Homo sapien
aaggcaacagcagtcgccccaaaca

SEQ ID NO: 1616342 - DNA, 25 bp, Homo sapien
ccaaggcaacagcagtcgccccaaa

SEQ ID NO: 1616343 - DNA, 25 bp, Homo sapien
aggcaacagcagtcgccccaaacag

SEQ ID NO: 1616344 - DNA, 25 bp, Homo sapien
ttgcccagcattttccggtacaagg

SEQ ID NO: 1616345 - DNA, 25 bp, Homo sapien
ggttgcccagcattttccggtacaa

SEQ ID NO: 1616346 - DNA, 25 bp, Homo sapien
tgcccagcattttccggtacaaggc

SEQ ID NO: 1616347 - DNA, 25 bp, Homo sapien
gttgcccagcattttccggtacaag

SEQ ID NO: 1616348 - DNA, 25 bp, Homo sapien
agcttcagggctgccctcaggatgg

SEQ ID NO: 1616349 - DNA, 25 bp, Homo sapien
cagggctgccctcaggatggggatg

SEQ ID NO: 1616350 - DNA, 25 bp, Homo sapien
cttgttggaaggttccagcttcagg

SEQ ID NO: 1616351 - DNA, 25 bp, Homo sapien
cttcagggctgccctcaggatgggg

SEQ ID NO: 1616352 - DNA, 25 bp, Homo sapien
ctcactgtactccccctgctgggcc

SEQ ID NO: 1616353 - DNA, 25 bp, Homo sapien
tgtactccccctgctgggccagcac

SEQ ID NO: 1616354 - DNA, 25 bp, Homo sapien
tcactgtactccccctgctgggcca

SEQ ID NO: 1616355 - DNA, 25 bp, Homo sapien
actgtactccccctgctgggccagc

SEQ ID NO: 1616356 - DNA, 25 bp, Homo sapien
gctggtgctccagcacaaggctgca

SEQ ID NO: 1616357 - DNA, 25 bp, Homo sapien
ctggtgctccagcacaaggctgcag

SEQ ID NO: 1616358 - DNA, 25 bp, Homo sapien
ggctggtgctccagcacaaggctgc

SEQ ID NO: 1616359 - DNA, 25 bp, Homo sapien
ccatattctgggctattctagaata

SEQ ID NO: 1616360 - DNA, 25 bp, Homo sapien
tttctggcacggagtggacaccttt

SEQ ID NO: 1616361 - DNA, 25 bp, Homo sapien
tggcacggagtggacacctttgcag

SEQ ID NO: 1616362 - DNA, 25 bp, Homo sapien
gaagtttctggcacggagtggacac

SEQ ID NO: 1616363 - DNA, 25 bp, Homo sapien
cgtccacagccgtcttcagggtcac

SEQ ID NO: 1616364 - DNA, 25 bp, Homo sapien
tccgcccgctggtagtgggcgttgc

SEQ ID NO: 1616365 - DNA, 25 bp, Homo sapien
tgatagccttgatggcgaggtcgta

SEQ ID NO: 1616366 - DNA, 25 bp, Homo sapien
gtagtgggcgttgccgcactcccgc

SEQ ID NO: 1616367 - DNA, 25 bp, Homo sapien
ccccacgtccatgagtgggacactg

SEQ ID NO: 1616368 - DNA, 25 bp, Homo sapien
ggccgtagcagtacttggagtcagc

SEQ ID NO: 1616369 - DNA, 25 bp, Homo sapien
tacttggagtcagcagtgaccatgg

SEQ ID NO: 1616370 - DNA, 25 bp, Homo sapien
cacgtccatgagtgggacactgaga

SEQ ID NO: 1616371 - DNA, 25 bp, Homo sapien
gtgtgccattctccagcgacgtctg

SEQ ID NO: 1616372 - DNA, 25 bp, Homo sapien
gatgtacggtgaccacctggccctt

SEQ ID NO: 1616373 - DNA, 25 bp, Homo sapien
cagtcacccagagtgaacaccagct

SEQ ID NO: 1616374 - DNA, 25 bp, Homo sapien
tggatgacgtcacagtcacccagag

SEQ ID NO: 1616375 - DNA, 25 bp, Homo sapien
cttattatttgcatgggcaccagca

SEQ ID NO: 1616376 - DNA, 25 bp, Homo sapien
gagccactgttagcagatctgggaa

SEQ ID NO: 1616377 - DNA, 25 bp, Homo sapien
ttttcagagcccaagcatgtgtcag

SEQ ID NO: 1616378 - DNA, 25 bp, Homo sapien
tttacccagccatgaaatgaggtgc

SEQ ID NO: 1616379 - DNA, 25 bp, Homo sapien
tcgggctccatggcagcaaggaact

SEQ ID NO: 1616380 - DNA, 25 bp, Homo sapien
ccagaatgtccagccactcttctgg

SEQ ID NO: 1616381 - DNA, 25 bp, Homo sapien
cagcaaggaactctcgggccagggc

SEQ ID NO: 1616382 - DNA, 25 bp, Homo sapien
tcagcctcctccgccgggggttgtc

SEQ ID NO: 1616383 - DNA, 25 bp, Homo sapien
agctcactcaggtcatcctcttcct

SEQ ID NO: 1616384 - DNA, 25 bp, Homo sapien
cctcctcaccctctgcatcctcaac

SEQ ID NO: 1616385 - DNA, 25 bp, Homo sapien
ctccagcggtggcagctcactcagg

SEQ ID NO: 1616386 - DNA, 25 bp, Homo sapien
tcaccctctgcatcctcaaccccat

SEQ ID NO: 1616387 - DNA, 25 bp, Homo sapien
cagagggttcagcacacgatgccat

SEQ ID NO: 1616388 - DNA, 25 bp, Homo sapien
tgtgtaactcaagggctccaggcct

SEQ ID NO: 1616389 - DNA, 25 bp, Homo sapien
cagagatgtgggtcagaatcctaca

SEQ ID NO: 1616390 - DNA, 25 bp, Homo sapien
cctccgaggccttagggaagccatt

SEQ ID NO: 1616391 - DNA, 25 bp, Homo sapien
ctttccaggagtggtcgaggtccca

SEQ ID NO: 1616392 - DNA, 25 bp, Homo sapien
gggctcggagccccactttgagaga

SEQ ID NO: 1616393 - DNA, 25 bp, Homo sapien
tcggagccccactttgagagaccct

SEQ ID NO: 1616394 - DNA, 25 bp, Homo sapien
ctcccgggctcggagccccactttg

SEQ ID NO: 1616395 - DNA, 25 bp, Homo sapien
tcccgggctcggagccccactttga

SEQ ID NO: 1616396 - DNA, 25 bp, Homo sapien
cgccgcgcctcgggaaccaggttcg

SEQ ID NO: 1616397 - DNA, 25 bp, Homo sapien
ctgaagccttagttacagaagtgaa

SEQ ID NO: 1616398 - DNA, 25 bp, Homo sapien
gggttgctgaatgacccatcctgaa

SEQ ID NO: 1616399 - DNA, 25 bp, Homo sapien
ggcacagtccactctaaatgttatt

SEQ ID NO: 1616400 - DNA, 25 bp, Homo sapien
gccttagttacagaagtgaacctga

SEQ ID NO: 1616401 - DNA, 25 bp, Homo sapien
ggaggcccatagctagtaccagtga

SEQ ID NO: 1616402 - DNA, 25 bp, Homo sapien
tcaccgttacgaggcagacacaatc

SEQ ID NO: 1616403 - DNA, 25 bp, Homo sapien
gaagtcccgggaatcaacattttga

SEQ ID NO: 1616404 - DNA, 25 bp, Homo sapien
gctccgttgccgaaactcacaggga

SEQ ID NO: 1616405 - DNA, 25 bp, Homo sapien
tattacgggcaaacacttgtagagc

SEQ ID NO: 1616406 - DNA, 25 bp, Homo sapien
caaaggtgataacgactggagctca

SEQ ID NO: 1616407 - DNA, 25 bp, Homo sapien
aatatattcttagaggcccctggga

SEQ ID NO: 1616408 - DNA, 25 bp, Homo sapien
ccctgtgagtttcggcaacggagcc

SEQ ID NO: 1616409 - DNA, 25 bp, Homo sapien
tatgtgggccagactagcagtaatc

SEQ ID NO: 1616410 - DNA, 25 bp, Homo sapien
tcactggtactagctatgggcctcc

SEQ ID NO: 1616411 - DNA, 25 bp, Homo sapien
gctcaatggatacgcaggcggcgct

SEQ ID NO: 1616412 - DNA, 25 bp, Homo sapien
gattgtgtctgcctcgtaacggtga

SEQ ID NO: 1616413 - DNA, 25 bp, Homo sapien
agcccacgggtctcacaaaggtgtg

SEQ ID NO: 1616414 - DNA, 25 bp, Homo sapien
ctcagggacactgagaaactgggcc

SEQ ID NO: 1616415 - DNA, 25 bp, Homo sapien
gaaactgggccactgtcacacagcc

SEQ ID NO: 1616416 - DNA, 25 bp, Homo sapien
ctaagtcacaacaaacggccacagc

SEQ ID NO: 1616417 - DNA, 25 bp, Homo sapien
aatgtactctcccatttattcagca

SEQ ID NO: 1616418 - DNA, 25 bp, Homo sapien
tctatgctaaacaaagcatcaagct

SEQ ID NO: 1616419 - DNA, 25 bp, Homo sapien
ggctgtgtgacagtggcccagtttc

SEQ ID NO: 1616420 - DNA, 25 bp, Homo sapien
tgctgaataaatgggagagtacatt

SEQ ID NO: 1616421 - DNA, 25 bp, Homo sapien
ggcccagtttctcagtgtccctgag

SEQ ID NO: 1616422 - DNA, 25 bp, Homo sapien
cacacctttgtgagacccgtgggct

SEQ ID NO: 1616423 - DNA, 25 bp, Homo sapien
gatgctttgtttagcatagagtagc

SEQ ID NO: 1616424 - DNA, 25 bp, Homo sapien
ggctgtggccgtttgttgtgactta

SEQ ID NO: 1616425 - DNA, 25 bp, Homo sapien
gatcttggcttagcgcaacctccgc

SEQ ID NO: 1616426 - DNA, 25 bp, Homo sapien
cagagtttcactcctgtcacccagg

SEQ ID NO: 1616427 - DNA, 25 bp, Homo sapien
ggcgcgatcttggcttagcgcaacc

SEQ ID NO: 1616428 - DNA, 25 bp, Homo sapien
gcgcgatcttggcttagcgcaacct

SEQ ID NO: 1616429 - DNA, 25 bp, Homo sapien
cttggcttagcgcaacctccgcctc

SEQ ID NO: 1616430 - DNA, 25 bp, Homo sapien
cgatcttggcttagcgcaacctccg

SEQ ID NO: 1616431 - DNA, 25 bp, Homo sapien
ggttgcgctaagccaagatcgcgcc

SEQ ID NO: 1616432 - DNA, 25 bp, Homo sapien
cggaggttgcgctaagccaagatcg

SEQ ID NO: 1616433 - DNA, 25 bp, Homo sapien
aggttgcgctaagccaagatcgcgc

SEQ ID NO: 1616434 - DNA, 25 bp, Homo sapien
gcggaggttgcgctaagccaagatc

SEQ ID NO: 1616435 - DNA, 25 bp, Homo sapien
cctgggtgacaggagtgaaactctg

SEQ ID NO: 1616436 - DNA, 25 bp, Homo sapien
gaggcggaggttgcgctaagccaag

SEQ ID NO: 1616437 - DNA, 25 bp, Homo sapien
ctcagggagggcgagacggtgtcgg

SEQ ID NO: 1616438 - DNA, 25 bp, Homo sapien
gaacaaggcagggttacccgctgcc

SEQ ID NO: 1616439 - DNA, 25 bp, Homo sapien
gctggtgtcacatgagcccgtgctc

SEQ ID NO: 1616440 - DNA, 25 bp, Homo sapien
ggcagcagggctattcgcccgtcat

SEQ ID NO: 1616441 - DNA, 25 bp, Homo sapien
gagccaggctggacatgggacaggt

SEQ ID NO: 1616442 - DNA, 25 bp, Homo sapien
ttacccgctgccaccttgtatgctg

SEQ ID NO: 1616443 - DNA, 25 bp, Homo sapien
agagcacgggctcatgtgacaccag

SEQ ID NO: 1616444 - DNA, 25 bp, Homo sapien
cagcatacaaggtggcagcgggtaa

SEQ ID NO: 1616445 - DNA, 25 bp, Homo sapien
gagatgacgggcgaatagccctgct

SEQ ID NO: 1616446 - DNA, 25 bp, Homo sapien
tggcagcgggtaaccctgccttgtt

SEQ ID NO: 1616447 - DNA, 25 bp, Homo sapien
ctgagccccggcttcgaggacctgt

SEQ ID NO: 1616448 - DNA, 25 bp, Homo sapien
acagatgacgaggagatgacgggcg

SEQ ID NO: 1616449 - DNA, 25 bp, Homo sapien
gaattccacacccctcgggagagag

SEQ ID NO: 1616450 - DNA, 25 bp, Homo sapien
agagccttgtccccctaggagccct

SEQ ID NO: 1616451 - DNA, 25 bp, Homo sapien
gagagccttgtccccctaggagccc

SEQ ID NO: 1616452 - DNA, 25 bp, Homo sapien
gagccttgtccccctaggagccctg

SEQ ID NO: 1616453 - DNA, 25 bp, Homo sapien
gggctcctagggggacaaggctctc

SEQ ID NO: 1616454 - DNA, 25 bp, Homo sapien
ctctctcccgaggggtgtggaattc

SEQ ID NO: 1616455 - DNA, 25 bp, Homo sapien
cagggctcctagggggacaaggctc

SEQ ID NO: 1616456 - DNA, 25 bp, Homo sapien
agggctcctagggggacaaggctct

SEQ ID NO: 1616457 - DNA, 25 bp, Homo sapien
gaattccacacccctcgggagagag

SEQ ID NO: 1616458 - DNA, 25 bp, Homo sapien
ttgtccccctaggagccctgggtga

SEQ ID NO: 1616459 - DNA, 25 bp, Homo sapien
aattccacacccctcgggagagagc

SEQ ID NO: 1616460 - DNA, 25 bp, Homo sapien
acacccctcgggagagagccttgtc

SEQ ID NO: 1616461 - DNA, 25 bp, Homo sapien
gggagagagccttgtccccctagga

SEQ ID NO: 1616462 - DNA, 25 bp, Homo sapien
tgtccccctaggagccctgggtgac

SEQ ID NO: 1616463 - DNA, 25 bp, Homo sapien
cacccagggctcctagggggacaag

SEQ ID NO: 1616464 - DNA, 25 bp, Homo sapien
gctctctcccgaggggtgtggaatt

SEQ ID NO: 1616465 - DNA, 25 bp, Homo sapien
cctagggggacaaggctctctcccg

SEQ ID NO: 1616466 - DNA, 25 bp, Homo sapien
ggctcctagggggacaaggctctct

SEQ ID NO: 1616467 - DNA, 25 bp, Homo sapien
gctcctagggggacaaggctctctc

SEQ ID NO: 1616468 - DNA, 25 bp, Homo sapien
gtcacccagggctcctagggggaca

SEQ ID NO: 1616469 - DNA, 25 bp, Homo sapien
tctggtgtctgggaaccttctaagc

SEQ ID NO: 1616470 - DNA, 25 bp, Homo sapien
cattcttcagagcagacgtcaggct

SEQ ID NO: 1616471 - DNA, 25 bp, Homo sapien
gggaaccttctaagcattcttcaga

SEQ ID NO: 1616472 - DNA, 25 bp, Homo sapien
tccagctggaatgggcgtgccctgg

SEQ ID NO: 1616473 - DNA, 25 bp, Homo sapien
tctggaaaaattcccctgtgcccag

SEQ ID NO: 1616474 - DNA, 25 bp, Homo sapien
tcagagcagacgtcaggctcagctc

SEQ ID NO: 1616475 - DNA, 25 bp, Homo sapien
gcctgacgtctgctctgaagaatgc

SEQ ID NO: 1616476 - DNA, 25 bp, Homo sapien
gcttagaaggttcccagacaccaga

SEQ ID NO: 1616477 - DNA, 25 bp, Homo sapien
tattctgcaagacccctctgccatg

SEQ ID NO: 1616478 - DNA, 25 bp, Homo sapien
tctgaagaatgcttagaaggttccc

SEQ ID NO: 1616479 - DNA, 25 bp, Homo sapien
gagctgagcctgacgtctgctctga

SEQ ID NO: 1616480 - DNA, 25 bp, Homo sapien
gacgtctgctctgaagaatgcttag

SEQ ID NO: 1616481 - DNA, 25 bp, Homo sapien
ggagaccgtgcttgtgcacctcaag

SEQ ID NO: 1616482 - DNA, 25 bp, Homo sapien
gagaccgtgcttgtgcacctcaagg

SEQ ID NO: 1616483 - DNA, 25 bp, Homo sapien
aggagaccgtgcttgtgcacctcaa

SEQ ID NO: 1616484 - DNA, 25 bp, Homo sapien
agaccgtgcttgtgcacctcaagga

SEQ ID NO: 1616485 - DNA, 25 bp, Homo sapien
gaggagaccgtgcttgtgcacctca

SEQ ID NO: 1616486 - DNA, 25 bp, Homo sapien
ttgaggtgcacaagcacggtctcct

SEQ ID NO: 1616487 - DNA, 25 bp, Homo sapien
tgaggtgcacaagcacggtctcctc

SEQ ID NO: 1616488 - DNA, 25 bp, Homo sapien
cttgaggtgcacaagcacggtctcc

SEQ ID NO: 1616489 - DNA, 25 bp, Homo sapien
ccttgaggtgcacaagcacggtctc

SEQ ID NO: 1616490 - DNA, 25 bp, Homo sapien
tccttgaggtgcacaagcacggtct

SEQ ID NO: 1616491 - DNA, 25 bp, Homo sapien
gtctcaagacttctacctatctcag

SEQ ID NO: 1616492 - DNA, 25 bp, Homo sapien
gaaaagcagaattagtgggtgcggg

SEQ ID NO: 1616493 - DNA, 25 bp, Homo sapien
atttgatacttttacggagcaaggg

SEQ ID NO: 1616494 - DNA, 25 bp, Homo sapien
gaaacctccttgagataccaaggag

SEQ ID NO: 1616495 - DNA, 25 bp, Homo sapien
ctcagcacgctcagggctgaatgga

SEQ ID NO: 1616496 - DNA, 25 bp, Homo sapien
tctacctatctcagaaacctccttg

SEQ ID NO: 1616497 - DNA, 25 bp, Homo sapien
tcaaggaggtttctgagataggtag

SEQ ID NO: 1616498 - DNA, 25 bp, Homo sapien
tcctgccccttgctccgtaaaagta

SEQ ID NO: 1616499 - DNA, 25 bp, Homo sapien
gccccttgctccgtaaaagtatcaa

SEQ ID NO: 1616500 - DNA, 25 bp, Homo sapien
tgagataggtagaagtcttgagacg

SEQ ID NO: 1616501 - DNA, 25 bp, Homo sapien
actttctccttggtatctcaaggag

SEQ ID NO: 1616502 - DNA, 25 bp, Homo sapien
tccattcagccctgagcgtgctgag

SEQ ID NO: 1616503 - DNA, 25 bp, Homo sapien
cattaaactctttcccgaggtggct

SEQ ID NO: 1616504 - DNA, 25 bp, Homo sapien
gaggtggctccgtttgctccatgga

SEQ ID NO: 1616505 - DNA, 25 bp, Homo sapien
gctccgtttgctccatggaggcctt

SEQ ID NO: 1616506 - DNA, 25 bp, Homo sapien
catctgtaaacatcgggtacaaaaa

SEQ ID NO: 1616507 - DNA, 25 bp, Homo sapien
aacagcatctgtaaacatcgggtac

SEQ ID NO: 1616508 - DNA, 25 bp, Homo sapien
cccgaggtggctccgtttgctccat

SEQ ID NO: 1616509 - DNA, 25 bp, Homo sapien
gtacccgatgtttacagatgctgtt

SEQ ID NO: 1616510 - DNA, 25 bp, Homo sapien
ttttgtacccgatgtttacagatgc

SEQ ID NO: 1616511 - DNA, 25 bp, Homo sapien
aaggcctccatggagcaaacggagc

SEQ ID NO: 1616512 - DNA, 25 bp, Homo sapien
ctccatggagcaaacggagccacct

SEQ ID NO: 1616513 - DNA, 25 bp, Homo sapien
atggagcaaacggagccacctcggg

SEQ ID NO: 1616514 - DNA, 25 bp, Homo sapien
agccacctcgggaaagagtttaatg

SEQ ID NO: 1616515 - DNA, 25 bp, Homo sapien
aaggcgcggcgcgaattgtgacgca

SEQ ID NO: 1616516 - DNA, 25 bp, Homo sapien
tttcttcagcgaggcggccgagctg

SEQ ID NO: 1616517 - DNA, 25 bp, Homo sapien
ggtgggcgaccttcacccacgtgcg

SEQ ID NO: 1616518 - DNA, 25 bp, Homo sapien
ggcttcgttcgccagcatccaagat

SEQ ID NO: 1616519 - DNA, 25 bp, Homo sapien
cattactacgtctgtaaggaggagc

SEQ ID NO: 1616520 - DNA, 25 bp, Homo sapien
agctaagagtgttgggtgctccagc

SEQ ID NO: 1616521 - DNA, 25 bp, Homo sapien
gagatactgacgagtccttccgccg

SEQ ID NO: 1616522 - DNA, 25 bp, Homo sapien
gatgatgccaaagggtacttattcc

SEQ ID NO: 1616523 - DNA, 25 bp, Homo sapien
gacatgtttagactacaggccaggg

SEQ ID NO: 1616524 - DNA, 25 bp, Homo sapien
gatagcaactgtggtgtaggcacct

SEQ ID NO: 1616525 - DNA, 25 bp, Homo sapien
tgagcttgtgctactcaggcatgca

SEQ ID NO: 1616526 - DNA, 25 bp, Homo sapien
gaccagttggacttggtgcaggcaa

SEQ ID NO: 1616527 - DNA, 25 bp, Homo sapien
ttcaccctcgtgctgtcaactgccg

SEQ ID NO: 1616528 - DNA, 25 bp, Homo sapien
accaacaacctgcgtcccaagaaga

SEQ ID NO: 1616529 - DNA, 25 bp, Homo sapien
ggccctggagcctcaataaagtgtc

SEQ ID NO: 1616530 - DNA, 25 bp, Homo sapien
tcaactgccgcaagaagaagtgtgg

SEQ ID NO: 1616531 - DNA, 25 bp, Homo sapien
gaaggaagaaccactcttaatggac

SEQ ID NO: 1616532 - DNA, 25 bp, Homo sapien
gctagcaatggcaacccttctgggt

SEQ ID NO: 1616533 - DNA, 25 bp, Homo sapien
taacagggatatgagctctagccgc

SEQ ID NO: 1616534 - DNA, 25 bp, Homo sapien
gcacgaggccagtgatgcatcctaa

SEQ ID NO: 1616535 - DNA, 25 bp, Homo sapien
aactacggagctcttccactcaggg

SEQ ID NO: 1616536 - DNA, 25 bp, Homo sapien
ctttcgggcgcactggtaagaggcc

SEQ ID NO: 1616537 - DNA, 25 bp, Homo sapien
taatagaccatcgactgggagatca

SEQ ID NO: 1616538 - DNA, 25 bp, Homo sapien
gagacactatttcagccttggccca

SEQ ID NO: 1616539 - DNA, 25 bp, Homo sapien
tgtgttgataccttcacgaattggg

SEQ ID NO: 1616540 - DNA, 25 bp, Homo sapien
tagcctgtgttgataccttcacgaa

SEQ ID NO: 1616541 - DNA, 25 bp, Homo sapien
taccttcacgaattgggttgaagcc

SEQ ID NO: 1616542 - DNA, 25 bp, Homo sapien
tcacgaattgggttgaagccttccc

SEQ ID NO: 1616543 - DNA, 25 bp, Homo sapien
cctgcgggagtcaggaagcgtcctt

SEQ ID NO: 1616544 - DNA, 25 bp, Homo sapien
tcaaggaaaaacacgatcggaggcg

SEQ ID NO: 1616545 - DNA, 25 bp, Homo sapien
tgctgctgaggaggccaccgaagct

SEQ ID NO: 1616546 - DNA, 25 bp, Homo sapien
tgcgcagtcatgatcaccgagaccg

SEQ ID NO: 1616547 - DNA, 25 bp, Homo sapien
ctaagacgtcactgttgttcccagg

SEQ ID NO: 1616548 - DNA, 25 bp, Homo sapien
caatgcctggctaagacgtcactgt

SEQ ID NO: 1616549 - DNA, 25 bp, Homo sapien
ctgggaccatgaggcgcaacctaac

SEQ ID NO: 1616550 - DNA, 25 bp, Homo sapien
ccctacggccaatgcctggctaaga

SEQ ID NO: 1616551 - DNA, 25 bp, Homo sapien
gggatgcgccgagggagatgggaaa

SEQ ID NO: 1616552 - DNA, 25 bp, Homo sapien
ctctgtgtacaagggtgctgcagcc

SEQ ID NO: 1616553 - DNA, 25 bp, Homo sapien
cagacacctcccacaataaagagct

SEQ ID NO: 1616554 - DNA, 25 bp, Homo sapien
aatctgccgagtgatggcggctccc

SEQ ID NO: 1616555 - DNA, 25 bp, Homo sapien
ccaaaggtggcctcacgtgggagtc

SEQ ID NO: 1616556 - DNA, 25 bp, Homo sapien
tcagagctgttatggccgttggagc

SEQ ID NO: 1616557 - DNA, 25 bp, Homo sapien
gaagtgagggtacagaggtggcccc

SEQ ID NO: 1616558 - DNA, 25 bp, Homo sapien
gggagtaatgactccccttctcacc

SEQ ID NO: 1616559 - DNA, 25 bp, Homo sapien
agagggccgcaccacagagccactg

SEQ ID NO: 1616560 - DNA, 25 bp, Homo sapien
aggggaagccaagctaagcagggag

SEQ ID NO: 1616561 - DNA, 25 bp, Homo sapien
aagccaagctaagcagggagtccag

SEQ ID NO: 1616562 - DNA, 25 bp, Homo sapien
aggagagggccgcaccacagagcca

SEQ ID NO: 1616563 - DNA, 25 bp, Homo sapien
acaatgccagttatacagtaagtgc

SEQ ID NO: 1616564 - DNA, 25 bp, Homo sapien
aggagacaatgccagttatacagta

SEQ ID NO: 1616565 - DNA, 25 bp, Homo sapien
aggagattccacttcggacattttc

SEQ ID NO: 1616566 - DNA, 25 bp, Homo sapien
gattccacttcggacattttcaggg

SEQ ID NO: 1616567 - DNA, 25 bp, Homo sapien
ccgtgccccgtctgcccgagggcag

SEQ ID NO: 1616568 - DNA, 25 bp, Homo sapien
ctctcgccgtgccccgtctgcccga

SEQ ID NO: 1616569 - DNA, 25 bp, Homo sapien
gccgtgccccgtctgcccgagggca

SEQ ID NO: 1616570 - DNA, 25 bp, Homo sapien
tcgccgtgccccgtctgcccgaggg

SEQ ID NO: 1616571 - DNA, 25 bp, Homo sapien
aagctgaggttggagcagtacgcgt

SEQ ID NO: 1616572 - DNA, 25 bp, Homo sapien
cgggtcttgtgcgacttctgcatcc

SEQ ID NO: 1616573 - DNA, 25 bp, Homo sapien
ctcgccactggtcgtagaggcggaa

SEQ ID NO: 1616574 - DNA, 25 bp, Homo sapien
tgcatccaggctcgccactggtcgt

SEQ ID NO: 1616575 - DNA, 25 bp, Homo sapien
ttgagccagcccaggaactgcttga

SEQ ID NO: 1616576 - DNA, 25 bp, Homo sapien
cttgagccagcccaggaactgcttg

SEQ ID NO: 1616577 - DNA, 25 bp, Homo sapien
tgagccagcccaggaactgcttgag

SEQ ID NO: 1616578 - DNA, 25 bp, Homo sapien
cgcgccgcaccggccccgagctcgg

SEQ ID NO: 1616579 - DNA, 25 bp, Homo sapien
ctcgcgccgcaccggccccgagctc

SEQ ID NO: 1616580 - DNA, 25 bp, Homo sapien
tcgcgccgcaccggccccgagctcg

SEQ ID NO: 1616581 - DNA, 25 bp, Homo sapien
cgcggttcgcacgccccgccgcccg

SEQ ID NO: 1616582 - DNA, 25 bp, Homo sapien
ggcctgatcagggtaggacagaaac

SEQ ID NO: 1616583 - DNA, 25 bp, Homo sapien
gaaagggcctgatcagggtaggaca

SEQ ID NO: 1616584 - DNA, 25 bp, Homo sapien
agatggagacgcagggtgggtgaaa

SEQ ID NO: 1616585 - DNA, 25 bp, Homo sapien
gagacgcagggtgggtgaaagccaa

SEQ ID NO: 1616586 - DNA, 25 bp, Homo sapien
tcacccagccctaggagggtgctca

SEQ ID NO: 1616587 - DNA, 25 bp, Homo sapien
cacccagccctaggagggtgctcac

SEQ ID NO: 1616588 - DNA, 25 bp, Homo sapien
cactgcggggagtggaggcggctgt

SEQ ID NO: 1616589 - DNA, 25 bp, Homo sapien
ggaggcggctgtggggtggctccac

SEQ ID NO: 1616590 - DNA, 25 bp, Homo sapien
gcggctgtggggtggctccactcac

SEQ ID NO: 1616591 - DNA, 25 bp, Homo sapien
actgcggggagtggaggcggctgtg

SEQ ID NO: 1616592 - DNA, 25 bp, Homo sapien
tttcttggagccatagatgccaaag

SEQ ID NO: 1616593 - DNA, 25 bp, Homo sapien
gggttgcagcgcacttgcacgaagt

SEQ ID NO: 1616594 - DNA, 25 bp, Homo sapien
gaggtctggttgctcacatcgtcca

SEQ ID NO: 1616595 - DNA, 25 bp, Homo sapien
cgaagtacacggtgccgggtttcag

SEQ ID NO: 1616596 - DNA, 25 bp, Homo sapien
ggaaatccttgagggcgggtggcga

SEQ ID NO: 1616597 - DNA, 25 bp, Homo sapien
acactgtcctccactcggtagcgga

SEQ ID NO: 1616598 - DNA, 25 bp, Homo sapien
gcggctcacgtgcacgtcgggcggg

SEQ ID NO: 1616599 - DNA, 25 bp, Homo sapien
gacacccagcgcacgctcagctggt

SEQ ID NO: 1616600 - DNA, 25 bp, Homo sapien
ttccctctgaccagcagggacaacc

SEQ ID NO: 1616601 - DNA, 25 bp, Homo sapien
tgaccagcagggacaacccgggagt

SEQ ID NO: 1616602 - DNA, 25 bp, Homo sapien
ctctgaccagcagggacaacccggg

SEQ ID NO: 1616603 - DNA, 25 bp, Homo sapien
cagcagggacaacccgggagttgcc

SEQ ID NO: 1616604 - DNA, 25 bp, Homo sapien
catagggcgtaaagagagccaggtc

SEQ ID NO: 1616605 - DNA, 25 bp, Homo sapien
agcccaggcggttggtggcctccac

SEQ ID NO: 1616606 - DNA, 25 bp, Homo sapien
tatccagcgtgagtacatcggagcg

SEQ ID NO: 1616607 - DNA, 25 bp, Homo sapien
ggtactcctcacatgtgttgtcctg

SEQ ID NO: 1616608 - DNA, 25 bp, Homo sapien
gcgtccagcggcaggtcaagtcctt

SEQ ID NO: 1616609 - DNA, 25 bp, Homo sapien
gcttgtacttgagggagtagttggt

SEQ ID NO: 1616610 - DNA, 25 bp, Homo sapien
agcagctgatgttgacgggtttctc

SEQ ID NO: 1616611 - DNA, 25 bp, Homo sapien
cagcggcaggtcaagtccttcatgt

SEQ ID NO: 1616612 - DNA, 25 bp, Homo sapien
atgctgccgtcacgggcgtggcaca

SEQ ID NO: 1616613 - DNA, 25 bp, Homo sapien
ggcgttgagtacacgggagagctca

SEQ ID NO: 1616614 - DNA, 25 bp, Homo sapien
ctgcctggacccattgaggttggcc

SEQ ID NO: 1616615 - DNA, 25 bp, Homo sapien
gtggctcctggtgggtctccgtgca

SEQ ID NO: 1616616 - DNA, 25 bp, Homo sapien
cccatccaaagggacttgacatcat

SEQ ID NO: 1616617 - DNA, 25 bp, Homo sapien
ccaactcccatccaaagggacttga

SEQ ID NO: 1616618 - DNA, 25 bp, Homo sapien
ctcccatccaaagggacttgacatc

SEQ ID NO: 1616619 - DNA, 25 bp, Homo sapien
aactcccatccaaagggacttgaca

SEQ ID NO: 1616620 - DNA, 25 bp, Homo sapien
gtctccgcgtccgtgcgaaggagcc

SEQ ID NO: 1616621 - DNA, 25 bp, Homo sapien
tggagcctggaatcgcagttgcgct

SEQ ID NO: 1616622 - DNA, 25 bp, Homo sapien
ggcaaacttggctcgagggctctgt

SEQ ID NO: 1616623 - DNA, 25 bp, Homo sapien
ttgggccggccctgatgattttccg

SEQ ID NO: 1616624 - DNA, 25 bp, Homo sapien
gcccgacgcagcctggctgaaaacg

SEQ ID NO: 1616625 - DNA, 25 bp, Homo sapien
tcgctcacaaagattcctctcgctg

SEQ ID NO: 1616626 - DNA, 25 bp, Homo sapien
caaagattcctctcgctggaggctc

SEQ ID NO: 1616627 - DNA, 25 bp, Homo sapien
ctgaaaacggttctaagcgccgccg

SEQ ID NO: 1616628 - DNA, 25 bp, Homo sapien
gcggcgccccgaggacgcagagcag

SEQ ID NO: 1616629 - DNA, 25 bp, Homo sapien
cggctcgcggcgccccgaggacgca

SEQ ID NO: 1616630 - DNA, 25 bp, Homo sapien
ctcgcggcgccccgaggacgcagag

SEQ ID NO: 1616631 - DNA, 25 bp, Homo sapien
tcgcggcgccccgaggacgcagagc

SEQ ID NO: 1616632 - DNA, 25 bp, Homo sapien
gccggagcaagtctgagcagccgaa

SEQ ID NO: 1616633 - DNA, 25 bp, Homo sapien
tcgctgggcgcggacgcggaggccg

SEQ ID NO: 1616634 - DNA, 25 bp, Homo sapien
caagtctgagcagccgaattgacaa

SEQ ID NO: 1616635 - DNA, 25 bp, Homo sapien
tctgagcagccgaattgacaaggcg

SEQ ID NO: 1616636 - DNA, 25 bp, Homo sapien
taatgcgccgctggccccgcccggc

SEQ ID NO: 1616637 - DNA, 25 bp, Homo sapien
tgcgccgctggccccgcccggcccc

SEQ ID NO: 1616638 - DNA, 25 bp, Homo sapien
ctaatgcgccgctggccccgcccgg

SEQ ID NO: 1616639 - DNA, 25 bp, Homo sapien
aatgcgccgctggccccgcccggcc

SEQ ID NO: 1616640 - DNA, 25 bp, Homo sapien
caaatattgacccaagtccttgaag

SEQ ID NO: 1616641 - DNA, 25 bp, Homo sapien
gacaaaagggagctagcgtcaatgg

SEQ ID NO: 1616642 - DNA, 25 bp, Homo sapien
ttctggcaaatattgacccaagtcc

SEQ ID NO: 1616643 - DNA, 25 bp, Homo sapien
tagcgtcaatggaacttctggcaaa

SEQ ID NO: 1616644 - DNA, 25 bp, Homo sapien
cccgggaacagcaggaggggcgcgg

SEQ ID NO: 1616645 - DNA, 25 bp, Homo sapien
cggctcccccgggaacagcaggagg

SEQ ID NO: 1616646 - DNA, 25 bp, Homo sapien
tggaccggctcccccgggaacagca

SEQ ID NO: 1616647 - DNA, 25 bp, Homo sapien
cagcaggaggggcgcgggggctcac

SEQ ID NO: 1616648 - DNA, 25 bp, Homo sapien
ctctttccgctcacccccccagcgg

SEQ ID NO: 1616649 - DNA, 25 bp, Homo sapien
gtcaagtcctctttccgctcacccc

SEQ ID NO: 1616650 - DNA, 25 bp, Homo sapien
gggtcaagtcctctttccgctcacc

SEQ ID NO: 1616651 - DNA, 25 bp, Homo sapien
cggggtcaagtcctctttccgctca

SEQ ID NO: 1616652 - DNA, 25 bp, Homo sapien
gccaggcacagccgcgcctgattaa

SEQ ID NO: 1616653 - DNA, 25 bp, Homo sapien
ggcacagccgcgcctgattaagcca

SEQ ID NO: 1616654 - DNA, 25 bp, Homo sapien
gggatccagatgttcggggtccgcc

SEQ ID NO: 1616655 - DNA, 25 bp, Homo sapien
gccgcgcctgattaagccacgtggg

SEQ ID NO: 1616656 - DNA, 25 bp, Homo sapien
ggccagagtagggggtgcgccgggc

SEQ ID NO: 1616657 - DNA, 25 bp, Homo sapien
gagatgaaagcgcggccgcaggcca

SEQ ID NO: 1616658 - DNA, 25 bp, Homo sapien
caggccagagtagggggtgcgccgg

SEQ ID NO: 1616659 - DNA, 25 bp, Homo sapien
ctgagatgaaagcgcggccgcaggc

SEQ ID NO: 1616660 - DNA, 25 bp, Homo sapien
actcccttatctggcggagaggaag

SEQ ID NO: 1616661 - DNA, 25 bp, Homo sapien
ctctaaccgagattcggctcctggg

SEQ ID NO: 1616662 - DNA, 25 bp, Homo sapien
catctttgcagaggatccgggttta

SEQ ID NO: 1616663 - DNA, 25 bp, Homo sapien
tcagaagtgtcgctatttgccccgt

SEQ ID NO: 1616664 - DNA, 25 bp, Homo sapien
gttccctggttggactccagcccca

SEQ ID NO: 1616665 - DNA, 25 bp, Homo sapien
tctccgttccctggttggactccag

SEQ ID NO: 1616666 - DNA, 25 bp, Homo sapien
tccgttccctggttggactccagcc

SEQ ID NO: 1616667 - DNA, 25 bp, Homo sapien
ctctccgttccctggttggactcca

SEQ ID NO: 1616668 - DNA, 25 bp, Homo sapien
ggcatctccatgcccctataaagcg

SEQ ID NO: 1616669 - DNA, 25 bp, Homo sapien
agctgcgtcttgctagggcttcccc

SEQ ID NO: 1616670 - DNA, 25 bp, Homo sapien
catgcccctataaagcgtgcctggg

SEQ ID NO: 1616671 - DNA, 25 bp, Homo sapien
ggagctgcgtcttgctagggcttcc

SEQ ID NO: 1616672 - DNA, 25 bp, Homo sapien
ctgagtgaggtttgatgcctgcatg

SEQ ID NO: 1616673 - DNA, 25 bp, Homo sapien
tggatgtttatgaagtgtgcgtgca

SEQ ID NO: 1616674 - DNA, 25 bp, Homo sapien
aatgttatttgtggcgggtgtgtca

SEQ ID NO: 1616675 - DNA, 25 bp, Homo sapien
tgtgtcagctgtaggtcgctgctga

SEQ ID NO: 1616676 - DNA, 25 bp, Homo sapien
gtattggagatgccagcagttccct

SEQ ID NO: 1616677 - DNA, 25 bp, Homo sapien
gtgtattggagatgccagcagttcc

SEQ ID NO: 1616678 - DNA, 25 bp, Homo sapien
tgtgtattggagatgccagcagttc

SEQ ID NO: 1616679 - DNA, 25 bp, Homo sapien
tgtattggagatgccagcagttccc

SEQ ID NO: 1616680 - DNA, 25 bp, Homo sapien
tcagcacttggtatctgtcagcttg

SEQ ID NO: 1616681 - DNA, 25 bp, Homo sapien
gcttgcacagggtcatctgagagca

SEQ ID NO: 1616682 - DNA, 25 bp, Homo sapien
tggtatctgtcagcttgcacagggt

SEQ ID NO: 1616683 - DNA, 25 bp, Homo sapien
cttgcacagggtcatctgagagcat

SEQ ID NO: 1616684 - DNA, 25 bp, Homo sapien
cgattgagcacgtattgttgtatca

SEQ ID NO: 1616685 - DNA, 25 bp, Homo sapien
gagcacgtattgttgtatcaggccc

SEQ ID NO: 1616686 - DNA, 25 bp, Homo sapien
taacgattgagcacgtattgttgta

SEQ ID NO: 1616687 - DNA, 25 bp, Homo sapien
tttgtgtaacgattgagcacgtatt

SEQ ID NO: 1616688 - DNA, 25 bp, Homo sapien
cggctcgagggtctttcgctgagaa

SEQ ID NO: 1616689 - DNA, 25 bp, Homo sapien
tcgctgagaatttggactttacggg

SEQ ID NO: 1616690 - DNA, 25 bp, Homo sapien
gagcccaggaaacctgtgggcagtc

SEQ ID NO: 1616691 - DNA, 25 bp, Homo sapien
aacctgtgggcagtcttgggcgtcc

SEQ ID NO: 1616692 - DNA, 25 bp, Homo sapien
ggacagaattcacccctttggtcag

SEQ ID NO: 1616693 - DNA, 25 bp, Homo sapien
gggacagaattcacccctttggtca

SEQ ID NO: 1616694 - DNA, 25 bp, Homo sapien
caaggggacagaattcacccctttg

SEQ ID NO: 1616695 - DNA, 25 bp, Homo sapien
ttttggacctgtgggctgattgttg

SEQ ID NO: 1616696 - DNA, 25 bp, Homo sapien
gagttttggacctgtgggctgattg

SEQ ID NO: 1616697 - DNA, 25 bp, Homo sapien
tggacctgtgggctgattgttggag

SEQ ID NO: 1616698 - DNA, 25 bp, Homo sapien
gacctgtgggctgattgttggaggg

SEQ ID NO: 1616699 - DNA, 25 bp, Homo sapien
ttatttgttgtgtttctctggtgcc

SEQ ID NO: 1616700 - DNA, 25 bp, Homo sapien
ggagtcgcacctccccagctaaaat

SEQ ID NO: 1616701 - DNA, 25 bp, Homo sapien
tgtcgcaaggggaggcaaaccctct

SEQ ID NO: 1616702 - DNA, 25 bp, Homo sapien
acaaaggacacttgttcaccagctg

SEQ ID NO: 1616703 - DNA, 25 bp, Homo sapien
gtctagactccttggagggaaagga

SEQ ID NO: 1616704 - DNA, 25 bp, Homo sapien
tggcatccacgctttttggcccacg

SEQ ID NO: 1616705 - DNA, 25 bp, Homo sapien
gggcccaggctcactgagtcatgct

SEQ ID NO: 1616706 - DNA, 25 bp, Homo sapien
ctggagacgcctgggtagggcccag

SEQ ID NO: 1616707 - DNA, 25 bp, Homo sapien
tgcagcctctccgacatgggccttt

SEQ ID NO: 1616708 - DNA, 25 bp, Homo sapien
tttgcataagaagtggtggctaggc

SEQ ID NO: 1616709 - DNA, 25 bp, Homo sapien
ttgcataagaagtggtggctaggct

SEQ ID NO: 1616710 - DNA, 25 bp, Homo sapien
atttgcataagaagtggtggctagg

SEQ ID NO: 1616711 - DNA, 25 bp, Homo sapien
gcataagaagtggtggctaggctgg

SEQ ID NO: 1616712 - DNA, 25 bp, Homo sapien
gcccctttcagaaggaggattttga

SEQ ID NO: 1616713 - DNA, 25 bp, Homo sapien
tcatgcccctttcagaaggaggatt

SEQ ID NO: 1616714 - DNA, 25 bp, Homo sapien
catgcccctttcagaaggaggattt

SEQ ID NO: 1616715 - DNA, 25 bp, Homo sapien
tgcccctttcagaaggaggattttg

SEQ ID NO: 1616716 - DNA, 25 bp, Homo sapien
tctcatcatacccatgggtgactgt

SEQ ID NO: 1616717 - DNA, 25 bp, Homo sapien
cagatatggcggcatgaggtgtctc

SEQ ID NO: 1616718 - DNA, 25 bp, Homo sapien
atatggcggcatgaggtgtctcatc

SEQ ID NO: 1616719 - DNA, 25 bp, Homo sapien
aaatgtggtcagatatggcggcatg

SEQ ID NO: 1616720 - DNA, 25 bp, Homo sapien
agcgagagagtagagcacgtccagc

SEQ ID NO: 1616721 - DNA, 25 bp, Homo sapien
gagccattgggaagacagtagtgcc

SEQ ID NO: 1616722 - DNA, 25 bp, Homo sapien
tgtggcagtgctgacgcccatgatg

SEQ ID NO: 1616723 - DNA, 25 bp, Homo sapien
gatcgtcaatgccagcaagccttga

SEQ ID NO: 1616724 - DNA, 25 bp, Homo sapien
tgcctgatcgctctgtgtgcaccac

SEQ ID NO: 1616725 - DNA, 25 bp, Homo sapien
taaccagcaccttgggggaatcaca

SEQ ID NO: 1616726 - DNA, 25 bp, Homo sapien
tgcgcagcggagtgcctgatcgctc

SEQ ID NO: 1616727 - DNA, 25 bp, Homo sapien
ggagtgcctgatcgctctgtgtgca

SEQ ID NO: 1616728 - DNA, 25 bp, Homo sapien
tcagaatggccctcagcggggcttc

SEQ ID NO: 1616729 - DNA, 25 bp, Homo sapien
ttttctgggagtcgtggcggacgga

SEQ ID NO: 1616730 - DNA, 25 bp, Homo sapien
ggagccgtctgtctcgtcacagaca

SEQ ID NO: 1616731 - DNA, 25 bp, Homo sapien
cactcgccctcagaatggccctcag

SEQ ID NO: 1616732 - DNA, 25 bp, Homo sapien
ccagctgggccatgagggtgaggaa

SEQ ID NO: 1616733 - DNA, 25 bp, Homo sapien
tcgtcagccctggatggggacccag

SEQ ID NO: 1616734 - DNA, 25 bp, Homo sapien
tcagccctggatggggacccagctg

SEQ ID NO: 1616735 - DNA, 25 bp, Homo sapien
agctgggccatgagggtgaggaaag

SEQ ID NO: 1616736 - DNA, 25 bp, Homo sapien
tgtacaacacggacaccgacgagtg

SEQ ID NO: 1616737 - DNA, 25 bp, Homo sapien
tggcgtctcaacaacgtcacgggca

SEQ ID NO: 1616738 - DNA, 25 bp, Homo sapien
gcttggcgaatgcacgtctgcctga

SEQ ID NO: 1616739 - DNA, 25 bp, Homo sapien
tactatgtgccggagacggaccagt

SEQ ID NO: 1616740 - DNA, 25 bp, Homo sapien
tccttctgggcgagcttagacctgg

SEQ ID NO: 1616741 - DNA, 25 bp, Homo sapien
cctgctgtctttggtgcatggtgca

SEQ ID NO: 1616742 - DNA, 25 bp, Homo sapien
cttgcacggagggattcagaagcac

SEQ ID NO: 1616743 - DNA, 25 bp, Homo sapien
tggtctctgcctcattggatcatgg

SEQ ID NO: 1616744 - DNA, 25 bp, Homo sapien
cagtttgtgttctgcaggcgctcag

SEQ ID NO: 1616745 - DNA, 25 bp, Homo sapien
ttgtgttctgcaggcgctcagctgg

SEQ ID NO: 1616746 - DNA, 25 bp, Homo sapien
gtgcacagtttgtgttctgcaggcg

SEQ ID NO: 1616747 - DNA, 25 bp, Homo sapien
aggtgctcggcaggcacacggtagg

SEQ ID NO: 1616748 - DNA, 25 bp, Homo sapien
caggttctcagcacatgcacagtgt

SEQ ID NO: 1616749 - DNA, 25 bp, Homo sapien
acagtgtatactcaccgggcgctca

SEQ ID NO: 1616750 - DNA, 25 bp, Homo sapien
cacaatgtgtatacaggtgctcagc

SEQ ID NO: 1616751 - DNA, 25 bp, Homo sapien
gcacagtgtgtatttagcaggcgct

SEQ ID NO: 1616752 - DNA, 25 bp, Homo sapien
gacacgcgagctgtccacctttctg

SEQ ID NO: 1616753 - DNA, 25 bp, Homo sapien
gaggccgagcgtgtccgcaaagaca

SEQ ID NO: 1616754 - DNA, 25 bp, Homo sapien
tgcagaacctcggaacctcggaggg

SEQ ID NO: 1616755 - DNA, 25 bp, Homo sapien
ggtctgcagaacctcggaacctcgg

SEQ ID NO: 1616756 - DNA, 25 bp, Homo sapien
gcgtctctttctcaagtgactgaaa

SEQ ID NO: 1616757 - DNA, 25 bp, Homo sapien
catcgctgcggggatcccttcggtc

SEQ ID NO: 1616758 - DNA, 25 bp, Homo sapien
tgagtcctttcgcatctgtgcgcat

SEQ ID NO: 1616759 - DNA, 25 bp, Homo sapien
tccctgctgcgttacaccattgagt

SEQ ID NO: 1616760 - DNA, 25 bp, Homo sapien
ctctgagcccgcatggtgctcggag

SEQ ID NO: 1616761 - DNA, 25 bp, Homo sapien
ggtgcagtgggtaaatgtccacccg

SEQ ID NO: 1616762 - DNA, 25 bp, Homo sapien
gcagtgggtaaatgtccacccggta

SEQ ID NO: 1616763 - DNA, 25 bp, Homo sapien
tcatgggtgcagtgggtaaatgtcc

SEQ ID NO: 1616764 - DNA, 25 bp, Homo sapien
tgatgtcccctcatggtgccttttt

SEQ ID NO: 1616765 - DNA, 25 bp, Homo sapien
tcctgatgtcccctcatggtgcctt

SEQ ID NO: 1616766 - DNA, 25 bp, Homo sapien
tgtcccctcatggtgcctttttatg

SEQ ID NO: 1616767 - DNA, 25 bp, Homo sapien
cctcatggtgcctttttatgcccac

SEQ ID NO: 1616768 - DNA, 25 bp, Homo sapien
ttgcccccacacgtaaccctcaggc

SEQ ID NO: 1616769 - DNA, 25 bp, Homo sapien
ccacacgtaaccctcaggcagtggg

SEQ ID NO: 1616770 - DNA, 25 bp, Homo sapien
tggcaggagccaggacagcttcaga

SEQ ID NO: 1616771 - DNA, 25 bp, Homo sapien
gagaagcctccaggcccaaaatggg

SEQ ID NO: 1616772 - DNA, 25 bp, Homo sapien
gtcctctgggaagccggcagtgcac

SEQ ID NO: 1616773 - DNA, 25 bp, Homo sapien
cctgggggagatgggtcccgtctgc

SEQ ID NO: 1616774 - DNA, 25 bp, Homo sapien
gcagtgcacctaggactccacctgg

SEQ ID NO: 1616775 - DNA, 25 bp, Homo sapien
cccgtctgccctgggcgggcttcct

SEQ ID NO: 1616776 - DNA, 25 bp, Homo sapien
gaatccgggccctgagttgtcggca

SEQ ID NO: 1616777 - DNA, 25 bp, Homo sapien
gagcatgagggcaccgatcctgcgc

SEQ ID NO: 1616778 - DNA, 25 bp, Homo sapien
atccatcgcctgccaggaatccggg

SEQ ID NO: 1616779 - DNA, 25 bp, Homo sapien
ggcacttccagcgtttcaggagaag

SEQ ID NO: 1616780 - DNA, 25 bp, Homo sapien
gcgcgtgaagcaaaggcccaagtat

SEQ ID NO: 1616781 - DNA, 25 bp, Homo sapien
ccttagctcaaggtccaggttcgtg

SEQ ID NO: 1616782 - DNA, 25 bp, Homo sapien
gcccaggtccatttggaatattcca

SEQ ID NO: 1616783 - DNA, 25 bp, Homo sapien
caagtatatgaagtggcgtgcccag

SEQ ID NO: 1616784 - DNA, 25 bp, Homo sapien
ctgttgactttgctgcagcccacgc

SEQ ID NO: 1616785 - DNA, 25 bp, Homo sapien
tcagggctgcatcctgtttccctgt

SEQ ID NO: 1616786 - DNA, 25 bp, Homo sapien
tgtacgcttatgtgctggcagcggt

SEQ ID NO: 1616787 - DNA, 25 bp, Homo sapien
gcctgggacaggtgtacgcttatgt

SEQ ID NO: 1616788 - DNA, 25 bp, Homo sapien
cagcctcgtcagtgtggggcacatt

SEQ ID NO: 1616789 - DNA, 25 bp, Homo sapien
agcctcgtcagtgtggggcacattg

SEQ ID NO: 1616790 - DNA, 25 bp, Homo sapien
ccacagcagcctcgtcagtgtgggg

SEQ ID NO: 1616791 - DNA, 25 bp, Homo sapien
tattaaagtactacacctgggctgc

SEQ ID NO: 1616792 - DNA, 25 bp, Homo sapien
tgttctctgcactcgctaggagtca

SEQ ID NO: 1616793 - DNA, 25 bp, Homo sapien
gagctggctctaggatcaagggacc

SEQ ID NO: 1616794 - DNA, 25 bp, Homo sapien
tcttctgtctcttaaaagggcagca

SEQ ID NO: 1616795 - DNA, 25 bp, Homo sapien
cctcccgtgttctggagaattcctc

SEQ ID NO: 1616796 - DNA, 25 bp, Homo sapien
tctccccgtgtgtcgcgcttccggg

SEQ ID NO: 1616797 - DNA, 25 bp, Homo sapien
cggccctcccgtgttctggagaatt

SEQ ID NO: 1616798 - DNA, 25 bp, Homo sapien
ctcggccctcccgtgttctggagaa

SEQ ID NO: 1616799 - DNA, 25 bp, Homo sapien
gagtccatctaacacaggacccgat

SEQ ID NO: 1616800 - DNA, 25 bp, Homo sapien
ggacccgattcatcctgggctgcct

SEQ ID NO: 1616801 - DNA, 25 bp, Homo sapien
caggcacgttgcttatcttcgggag

SEQ ID NO: 1616802 - DNA, 25 bp, Homo sapien
gtgaaccccaccgagcaggcacgtt

SEQ ID NO: 1616803 - DNA, 25 bp, Homo sapien
agagagaaaccaatggtgggccggg

SEQ ID NO: 1616804 - DNA, 25 bp, Homo sapien
agaaaccaatggtgggccgggcaca

SEQ ID NO: 1616805 - DNA, 25 bp, Homo sapien
acagagagaaaccaatggtgggccg

SEQ ID NO: 1616806 - DNA, 25 bp, Homo sapien
agagaaaccaatggtgggccgggca

SEQ ID NO: 1616807 - DNA, 25 bp, Homo sapien
tgggcccgtcctagctatagcgagt

SEQ ID NO: 1616808 - DNA, 25 bp, Homo sapien
gtttcaaatgtagcggcagcaagcc

SEQ ID NO: 1616809 - DNA, 25 bp, Homo sapien
caccgagtgggtggttaacacgcaa

SEQ ID NO: 1616810 - DNA, 25 bp, Homo sapien
tgtattgctgccgttcaccgagtgg

SEQ ID NO: 1616811 - DNA, 25 bp, Homo sapien
tcagggccctgcttgtgggttttcg

SEQ ID NO: 1616812 - DNA, 25 bp, Homo sapien
tgtcctccagagaagagggttcttt

SEQ ID NO: 1616813 - DNA, 25 bp, Homo sapien
gttctttgccctcatcagggccctg

SEQ ID NO: 1616814 - DNA, 25 bp, Homo sapien
cagagaagagggttctttgccctca

SEQ ID NO: 1616815 - DNA, 25 bp, Homo sapien
ttctgcccagcatcccaggcctgaa

SEQ ID NO: 1616816 - DNA, 25 bp, Homo sapien
caggcctgaacagccttggcaggac

SEQ ID NO: 1616817 - DNA, 25 bp, Homo sapien
agcatcccaggcctgaacagccttg

SEQ ID NO: 1616818 - DNA, 25 bp, Homo sapien
tgtgagccacttctgcccagcatcc

SEQ ID NO: 1616819 - DNA, 25 bp, Homo sapien
tgggccttgagctggtttttaacca

SEQ ID NO: 1616820 - DNA, 25 bp, Homo sapien
cctcccttaggtgggccttgagctg

SEQ ID NO: 1616821 - DNA, 25 bp, Homo sapien
tgagctggtttttaaccaaacatcc

SEQ ID NO: 1616822 - DNA, 25 bp, Homo sapien
tagagggggctctggtgcctccctt

SEQ ID NO: 1616823 - DNA, 25 bp, Homo sapien
ccaaggagccctccgaccagggaga

SEQ ID NO: 1616824 - DNA, 25 bp, Homo sapien
tgtcacctcgccctgaaaacagcag

SEQ ID NO: 1616825 - DNA, 25 bp, Homo sapien
tccagcggtattcgggggtcctctg

SEQ ID NO: 1616826 - DNA, 25 bp, Homo sapien
ctggtggagtaaggtccagcggtat

SEQ ID NO: 1616827 - DNA, 25 bp, Homo sapien
cacaaagccgatggcacagatgtgc

SEQ ID NO: 1616828 - DNA, 25 bp, Homo sapien
agccgatggcacagatgtgcccctg

SEQ ID NO: 1616829 - DNA, 25 bp, Homo sapien
ccgatggagccgtctcagaggccga

SEQ ID NO: 1616830 - DNA, 25 bp, Homo sapien
tcactgggtcccgatggagccgtct

SEQ ID NO: 1616831 - DNA, 25 bp, Homo sapien
gggtggctgtcatccggcgggtcct

SEQ ID NO: 1616832 - DNA, 25 bp, Homo sapien
ccttctcacttccccctcaggacgg

SEQ ID NO: 1616833 - DNA, 25 bp, Homo sapien
tcatccggcgggtcctcaccctggt

SEQ ID NO: 1616834 - DNA, 25 bp, Homo sapien
tggctgtcatccggcgggtcctcac

SEQ ID NO: 1616835 - DNA, 25 bp, Homo sapien
cagctgatgggtctcatagtcctct

SEQ ID NO: 1616836 - DNA, 25 bp, Homo sapien
agctgatgggtctcatagtcctctg

SEQ ID NO: 1616837 - DNA, 25 bp, Homo sapien
ggccaccccgcatggttgtgtccaa

SEQ ID NO: 1616838 - DNA, 25 bp, Homo sapien
tccaagaccacgttgctgtcggcca

SEQ ID NO: 1616839 - DNA, 25 bp, Homo sapien
cattgcagcggtaacgcaggttggc

SEQ ID NO: 1616840 - DNA, 25 bp, Homo sapien
aggttggcccagatgatgttctcct

SEQ ID NO: 1616841 - DNA, 25 bp, Homo sapien
caggaaccaacgataggacttcttg

SEQ ID NO: 1616842 - DNA, 25 bp, Homo sapien
ccaacgataggacttcttgtccttc

SEQ ID NO: 1616843 - DNA, 25 bp, Homo sapien
gctgcaggaaccaacgataggactt

SEQ ID NO: 1616844 - DNA, 25 bp, Homo sapien
acgtttcgcgggtccttccacagca

SEQ ID NO: 1616845 - DNA, 25 bp, Homo sapien
tgccacagagcgttccgcagctgtt

SEQ ID NO: 1616846 - DNA, 25 bp, Homo sapien
gggactctgtgtctcctgtatgcca

SEQ ID NO: 1616847 - DNA, 25 bp, Homo sapien
cagctgttccccggggcctgtggaa

SEQ ID NO: 1616848 - DNA, 25 bp, Homo sapien
tctcctgtatgccacagagcgttcc

SEQ ID NO: 1616849 - DNA, 25 bp, Homo sapien
caaatggcagcttggggataggtca

SEQ ID NO: 1616850 - DNA, 25 bp, Homo sapien
agaggatttgggagtccgtggacag

SEQ ID NO: 1616851 - DNA, 25 bp, Homo sapien
tgagaggatttgggagtccgtggac

SEQ ID NO: 1616852 - DNA, 25 bp, Homo sapien
ggcagcttggggataggtcacaggg

SEQ ID NO: 1616853 - DNA, 25 bp, Homo sapien
tagtcgtcatccgtgaccgtgttca

SEQ ID NO: 1616854 - DNA, 25 bp, Homo sapien
tcacatggaacgtgccctcgaagtc

SEQ ID NO: 1616855 - DNA, 25 bp, Homo sapien
tgaagcccgcatagtcgtcatccgt

SEQ ID NO: 1616856 - DNA, 25 bp, Homo sapien
tccacgccattgaaggcagtgtaac

SEQ ID NO: 1616857 - DNA, 25 bp, Homo sapien
agccaggcctgggtcgctgttcatt

SEQ ID NO: 1616858 - DNA, 25 bp, Homo sapien
ggcctgggtcgctgttcattgtctg

SEQ ID NO: 1616859 - DNA, 25 bp, Homo sapien
ctgggtcgctgttcattgtctgcac

SEQ ID NO: 1616860 - DNA, 25 bp, Homo sapien
gccaggcctgggtcgctgttcattg

SEQ ID NO: 1616861 - DNA, 25 bp, Homo sapien
tccgggtccagcacgactgtctgga

SEQ ID NO: 1616862 - DNA, 25 bp, Homo sapien
ttctccggacacacgtcgatcttgt

SEQ ID NO: 1616863 - DNA, 25 bp, Homo sapien
gtcggtgagcgtgacttcagcgttc

SEQ ID NO: 1616864 - DNA, 25 bp, Homo sapien
tgtctgcatcaaagtcgtcctggca

SEQ ID NO: 1616865 - DNA, 25 bp, Homo sapien
tgagaggtgggagacccctcggtgg

SEQ ID NO: 1616866 - DNA, 25 bp, Homo sapien
ctgagaggtgggagacccctcggtg

SEQ ID NO: 1616867 - DNA, 25 bp, Homo sapien
gtcagggactccgtcattgtcgtcg

SEQ ID NO: 1616868 - DNA, 25 bp, Homo sapien
tcaccctggccatcgtggtctgagt

SEQ ID NO: 1616869 - DNA, 25 bp, Homo sapien
tgttaggcaccgtgggacagttgtc

SEQ ID NO: 1616870 - DNA, 25 bp, Homo sapien
gacagttgtcccgagagtcctgatg

SEQ ID NO: 1616871 - DNA, 25 bp, Homo sapien
ggtcttgatcgctgtcacaagcatc

SEQ ID NO: 1616872 - DNA, 25 bp, Homo sapien
tggtcttgatcgctgtcacaagcat

SEQ ID NO: 1616873 - DNA, 25 bp, Homo sapien
cagttgtcggcctggttgcggatcc

SEQ ID NO: 1616874 - DNA, 25 bp, Homo sapien
acaggcatcccctataccatcgcca

SEQ ID NO: 1616875 - DNA, 25 bp, Homo sapien
tcccctataccatcgccatcactgt

SEQ ID NO: 1616876 - DNA, 25 bp, Homo sapien
tgggtaccctagggcagttgtcggc

SEQ ID NO: 1616877 - DNA, 25 bp, Homo sapien
ctgggttccgcaccagcgggcagtt

SEQ ID NO: 1616878 - DNA, 25 bp, Homo sapien
ggtcgccgtcgatgtcgtcgtcgca

SEQ ID NO: 1616879 - DNA, 25 bp, Homo sapien
tccgtgttgcgctggtctgggttcc

SEQ ID NO: 1616880 - DNA, 25 bp, Homo sapien
tcgtcgttcttctgggaccggcagt

SEQ ID NO: 1616881 - DNA, 25 bp, Homo sapien
caggcgtctccgatgccatcgcggt

SEQ ID NO: 1616882 - DNA, 25 bp, Homo sapien
ggatcgcaggcgtctccgatgccat

SEQ ID NO: 1616883 - DNA, 25 bp, Homo sapien
gtccccgtcggcatccggatcgcag

SEQ ID NO: 1616884 - DNA, 25 bp, Homo sapien
gtcggcatccggatcgcaggcgtct

SEQ ID NO: 1616885 - DNA, 25 bp, Homo sapien
gcagcgcagcttctcgtccgggaag

SEQ ID NO: 1616886 - DNA, 25 bp, Homo sapien
gtcagtgtcgcgaccacagaggatc

SEQ ID NO: 1616887 - DNA, 25 bp, Homo sapien
acagaggatcccgttgccggcccag

SEQ ID NO: 1616888 - DNA, 25 bp, Homo sapien
gaagccgtctaggtcagtgtcgcga

SEQ ID NO: 1616889 - DNA, 25 bp, Homo sapien
tggcacgggccgcactggaaggagc

SEQ ID NO: 1616890 - DNA, 25 bp, Homo sapien
tcgcgctctaggacgcagtctgcat

SEQ ID NO: 1616891 - DNA, 25 bp, Homo sapien
catgctcgtggcactcgctgggcga

SEQ ID NO: 1616892 - DNA, 25 bp, Homo sapien
gaccgcgagccatcgcgctctagga

SEQ ID NO: 1616893 - DNA, 25 bp, Homo sapien
ggagttggggacgcagttatgttgc

SEQ ID NO: 1616894 - DNA, 25 bp, Homo sapien
gttgcccggtctcacactcgttgat

SEQ ID NO: 1616895 - DNA, 25 bp, Homo sapien
ttgcccggtctcacactcgttgatg

SEQ ID NO: 1616896 - DNA, 25 bp, Homo sapien
cacggagttggggacgcagttatgt

SEQ ID NO: 1616897 - DNA, 25 bp, Homo sapien
gctgtaccccggcgggcaagcctcg

SEQ ID NO: 1616898 - DNA, 25 bp, Homo sapien
tggggccgctgtaccccggcgggca

SEQ ID NO: 1616899 - DNA, 25 bp, Homo sapien
gccttggcgaaagccagccccacgc

SEQ ID NO: 1616900 - DNA, 25 bp, Homo sapien
ggcgggcaagcctcgcagcggaacc

SEQ ID NO: 1616901 - DNA, 25 bp, Homo sapien
tgatacagcggactcgggggaagca

SEQ ID NO: 1616902 - DNA, 25 bp, Homo sapien
ggctggtgttgatacagcggactcg

SEQ ID NO: 1616903 - DNA, 25 bp, Homo sapien
ctggtgttgatacagcggactcggg

SEQ ID NO: 1616904 - DNA, 25 bp, Homo sapien
gttgatacagcggactcgggggaag

SEQ ID NO: 1616905 - DNA, 25 bp, Homo sapien
tcgttgacgtcggtgcagtgcgagc

SEQ ID NO: 1616906 - DNA, 25 bp, Homo sapien
gctctccgtctggatgcaggccacg

SEQ ID NO: 1616907 - DNA, 25 bp, Homo sapien
agtgcgagccgttgcccgtgaagcc

SEQ ID NO: 1616908 - DNA, 25 bp, Homo sapien
tccgtctggatgcaggccacgccgg

SEQ ID NO: 1616909 - DNA, 25 bp, Homo sapien
gggccgcacgctgggtaggccggtg

SEQ ID NO: 1616910 - DNA, 25 bp, Homo sapien
gcacgctgggtaggccggtgcgtac

SEQ ID NO: 1616911 - DNA, 25 bp, Homo sapien
gccggtgcgtactgactgctgcatc

SEQ ID NO: 1616912 - DNA, 25 bp, Homo sapien
ctgggtaggccggtgcgtactgact

SEQ ID NO: 1616913 - DNA, 25 bp, Homo sapien
ttttcaggaacgtgatctccctgac

SEQ ID NO: 1616914 - DNA, 25 bp, Homo sapien
gtttttcaggaacgtgatctccctg

SEQ ID NO: 1616915 - DNA, 25 bp, Homo sapien
gcacgcgtcacactccatcaccgtg

SEQ ID NO: 1616916 - DNA, 25 bp, Homo sapien
tccatcaccgtgtttttcaggaacg

SEQ ID NO: 1616917 - DNA, 25 bp, Homo sapien
tggtttcctgcagttcccgaagcat

SEQ ID NO: 1616918 - DNA, 25 bp, Homo sapien
acgtcccctacgaacagtccgtgag

SEQ ID NO: 1616919 - DNA, 25 bp, Homo sapien
gcacggcgcgggtgctaacgcggct

SEQ ID NO: 1616920 - DNA, 25 bp, Homo sapien
cacgggtcctacagtccgttgtggg

SEQ ID NO: 1616921 - DNA, 25 bp, Homo sapien
actgcgctcctctagtctcggtccc

SEQ ID NO: 1616922 - DNA, 25 bp, Homo sapien
gaacgcaggcggtgtcggggaccat

SEQ ID NO: 1616923 - DNA, 25 bp, Homo sapien
tggccctgtccggacgcgccgaggg

SEQ ID NO: 1616924 - DNA, 25 bp, Homo sapien
agaacgcaggcggtgtcggggacca

SEQ ID NO: 1616925 - DNA, 25 bp, Homo sapien
ggctctggccctgtccggacgcgcc

SEQ ID NO: 1616926 - DNA, 25 bp, Homo sapien
ggcggtggcggggagctgggtggct

SEQ ID NO: 1616927 - DNA, 25 bp, Homo sapien
gggagctgggtggctgctcgctttc

SEQ ID NO: 1616928 - DNA, 25 bp, Homo sapien
ggagctgggtggctgctcgctttct

SEQ ID NO: 1616929 - DNA, 25 bp, Homo sapien
gcggggagctgggtggctgctcgct

SEQ ID NO: 1616930 - DNA, 25 bp, Homo sapien
ggaattctcgggaaaaccacagctc

SEQ ID NO: 1616931 - DNA, 25 bp, Homo sapien
gcactggaattctcgggaaaaccac

SEQ ID NO: 1616932 - DNA, 25 bp, Homo sapien
cactggaattctcgggaaaaccaca

SEQ ID NO: 1616933 - DNA, 25 bp, Homo sapien
ctggaattctcgggaaaaccacagc

SEQ ID NO: 1616934 - DNA, 25 bp, Homo sapien
caattcgaaaagtccagatgtggag

SEQ ID NO: 1616935 - DNA, 25 bp, Homo sapien
cagttggaagccacgaccaattcga

SEQ ID NO: 1616936 - DNA, 25 bp, Homo sapien
gcaacccttggaccgtgcggtctgg

SEQ ID NO: 1616937 - DNA, 25 bp, Homo sapien
cagtggcccgtcatccaacaggtca

SEQ ID NO: 1616938 - DNA, 25 bp, Homo sapien
ggcgggaccaagtcctcgagctgcc

SEQ ID NO: 1616939 - DNA, 25 bp, Homo sapien
cccgggcgtccccaattagcagttg

SEQ ID NO: 1616940 - DNA, 25 bp, Homo sapien
ttaaaccgaaacaccgtcgcagcga

SEQ ID NO: 1616941 - DNA, 25 bp, Homo sapien
gccgcagcggcggttgaaagcccca

SEQ ID NO: 1616942 - DNA, 25 bp, Homo sapien
ggctcgagtgcagcgcggaaccggc

SEQ ID NO: 1616943 - DNA, 25 bp, Homo sapien
gcagcgacccgaggcctgcggccta

SEQ ID NO: 1616944 - DNA, 25 bp, Homo sapien
gcggcgggctcgagtgcagcgcgga

SEQ ID NO: 1616945 - DNA, 25 bp, Homo sapien
tgcggcctaggcctcagcgcggcgg

SEQ ID NO: 1616946 - DNA, 25 bp, Homo sapien
catgagcgtggaggcgtacgggccc

SEQ ID NO: 1616947 - DNA, 25 bp, Homo sapien
ccggaggcaccatgagcgtggaggc

SEQ ID NO: 1616948 - DNA, 25 bp, Homo sapien
gcaccatgagcgtggaggcgtacgg

SEQ ID NO: 1616949 - DNA, 25 bp, Homo sapien
agcgtggaggcgtacgggcccagct

SEQ ID NO: 1616950 - DNA, 25 bp, Homo sapien
gagttcgagttcaccgactttactc

SEQ ID NO: 1616951 - DNA, 25 bp, Homo sapien
aggccgagctgcttggcgccgacac

SEQ ID NO: 1616952 - DNA, 25 bp, Homo sapien
gacacacagggctccgagttcgagt

SEQ ID NO: 1616953 - DNA, 25 bp, Homo sapien
ttcgagttcaccgactttactcttc

SEQ ID NO: 1616954 - DNA, 25 bp, Homo sapien
cgctggccagcggaaggttgaggca

SEQ ID NO: 1616955 - DNA, 25 bp, Homo sapien
ttcacagtcacggagcgtaggttcg

SEQ ID NO: 1616956 - DNA, 25 bp, Homo sapien
gcagagaagaatttttgcctcccat

SEQ ID NO: 1616957 - DNA, 25 bp, Homo sapien
aggttcgactttccccatgcatagg

SEQ ID NO: 1616958 - DNA, 25 bp, Homo sapien
acttttgcaccctctgcgagctgct

SEQ ID NO: 1616959 - DNA, 25 bp, Homo sapien
gccccgtgtctgttaacttttgcac

SEQ ID NO: 1616960 - DNA, 25 bp, Homo sapien
cgtgtctgttaacttttgcaccctc

SEQ ID NO: 1616961 - DNA, 25 bp, Homo sapien
tctgcgagctgctgggcaacctctt

SEQ ID NO: 1616962 - DNA, 25 bp, Homo sapien
cagaggggtgggcacagcactttgc

SEQ ID NO: 1616963 - DNA, 25 bp, Homo sapien
ccaggcagaggggtgggcacagcac

SEQ ID NO: 1616964 - DNA, 25 bp, Homo sapien
gcagaggggtgggcacagcactttg

SEQ ID NO: 1616965 - DNA, 25 bp, Homo sapien
aggcagaggggtgggcacagcactt

SEQ ID NO: 1616966 - DNA, 25 bp, Homo sapien
ttttctgtgttggtcgaatagcagc

SEQ ID NO: 1616967 - DNA, 25 bp, Homo sapien
tttctctgatacatggagggctgct

SEQ ID NO: 1616968 - DNA, 25 bp, Homo sapien
tctcaggtcccgtgggcctttgcca

SEQ ID NO: 1616969 - DNA, 25 bp, Homo sapien
tagcagcttaagagccgggtaaccc

SEQ ID NO: 1616970 - DNA, 25 bp, Homo sapien
tgtagaaacgtctacgatgaattct

SEQ ID NO: 1616971 - DNA, 25 bp, Homo sapien
gctgcatcctccgtgtagaaacgtc

SEQ ID NO: 1616972 - DNA, 25 bp, Homo sapien
tccatgcgcatagcttgcagccctg

SEQ ID NO: 1616973 - DNA, 25 bp, Homo sapien
tctttttcagtacggggatccatgc

SEQ ID NO: 1616974 - DNA, 25 bp, Homo sapien
tttgacctgcagtatgtagtatgca

SEQ ID NO: 1616975 - DNA, 25 bp, Homo sapien
tgtgaattggcgatactcagccatt

SEQ ID NO: 1616976 - DNA, 25 bp, Homo sapien
cagccattttgacctgcagtatgta

SEQ ID NO: 1616977 - DNA, 25 bp, Homo sapien
tgaggtggagccctgtgaattggcg

SEQ ID NO: 1616978 - DNA, 25 bp, Homo sapien
caacaatggcttttcacgattgtcc

SEQ ID NO: 1616979 - DNA, 25 bp, Homo sapien
aatggcttttcacgattgtccgata

SEQ ID NO: 1616980 - DNA, 25 bp, Homo sapien
tatgtagggacagttggcctctctc

SEQ ID NO: 1616981 - DNA, 25 bp, Homo sapien
cacgattgtccgatatgtagggaca

SEQ ID NO: 1616982 - DNA, 25 bp, Homo sapien
tccgctgttgagatgatggctgtct

SEQ ID NO: 1616983 - DNA, 25 bp, Homo sapien
tgggccctgcgttccgagcggcctc

SEQ ID NO: 1616984 - DNA, 25 bp, Homo sapien
cctggaggtccgctgttgagatgat

SEQ ID NO: 1616985 - DNA, 25 bp, Homo sapien
gggatcctggaggtccgctgttgag

SEQ ID NO: 1616986 - DNA, 25 bp, Homo sapien
gcaccttctggactgaacccctcat

SEQ ID NO: 1616987 - DNA, 25 bp, Homo sapien
gtgcaccttctggactgaacccctc

SEQ ID NO: 1616988 - DNA, 25 bp, Homo sapien
tgcaccttctggactgaacccctca

SEQ ID NO: 1616989 - DNA, 25 bp, Homo sapien
agaaaatgaccaaagcccggaggca

SEQ ID NO: 1616990 - DNA, 25 bp, Homo sapien
tccggtcagcatagccaagaacagg

SEQ ID NO: 1616991 - DNA, 25 bp, Homo sapien
cagagctccgaggtgctagcaagga

SEQ ID NO: 1616992 - DNA, 25 bp, Homo sapien
ggaggcaggcttacttgtgctgaca

SEQ ID NO: 1616993 - DNA, 25 bp, Homo sapien
cactgttggctcaacagtgtcacac

SEQ ID NO: 1616994 - DNA, 25 bp, Homo sapien
ggctgtggcgcctttaaggcaagct

SEQ ID NO: 1616995 - DNA, 25 bp, Homo sapien
accggtcaacaggccctcagcagga

SEQ ID NO: 1616996 - DNA, 25 bp, Homo sapien
cgcctttaaggcaagcttctggaag

SEQ ID NO: 1616997 - DNA, 25 bp, Homo sapien
gctgcgaacgtggagaagatcacca

SEQ ID NO: 1616998 - DNA, 25 bp, Homo sapien
tcctgggccatgcaagggtattgac

SEQ ID NO: 1616999 - DNA, 25 bp, Homo sapien
gcagtacatgcagttcagcggctcc

SEQ ID NO: 1617000 - DNA, 25 bp, Homo sapien
ttggcatcatcacgccctacgaggg

SEQ ID NO: 1617001 - DNA, 25 bp, Homo sapien
ggagggcgcgtctgtccacgcctac

SEQ ID NO: 1617002 - DNA, 25 bp, Homo sapien
tcttttaaaggagtactgaagaata

SEQ ID NO: 1617003 - DNA, 25 bp, Homo sapien
tgcccgagcaggctccttgcaaaga

SEQ ID NO: 1617004 - DNA, 25 bp, Homo sapien
aaaaaacttcgcatttctgtgcccg

SEQ ID NO: 1617005 - DNA, 25 bp, Homo sapien
tggagaagaggagcaacacctgtgc

SEQ ID NO: 1617006 - DNA, 25 bp, Homo sapien
cgttctccgctggactcagaagcca

SEQ ID NO: 1617007 - DNA, 25 bp, Homo sapien
tgaggaaggtgcttttggccccatt

SEQ ID NO: 1617008 - DNA, 25 bp, Homo sapien
aacagtttaaacaagccagcgctac

SEQ ID NO: 1617009 - DNA, 25 bp, Homo sapien
cctgtgctggttagacacggagcgc

SEQ ID NO: 1617010 - DNA, 25 bp, Homo sapien
tgctggttagacacggagcgctgca

SEQ ID NO: 1617011 - DNA, 25 bp, Homo sapien
ccccaggaggtaccgacagtccctg

SEQ ID NO: 1617012 - DNA, 25 bp, Homo sapien
caggaggtaccgacagtccctgtgc

SEQ ID NO: 1617013 - DNA, 25 bp, Homo sapien
cgaaagcccaaattgggagctctgc

SEQ ID NO: 1617014 - DNA, 25 bp, Homo sapien
tgcctgccggcaactttgctgatgg

SEQ ID NO: 1617015 - DNA, 25 bp, Homo sapien
gcctgccggcaactttgctgatggg

SEQ ID NO: 1617016 - DNA, 25 bp, Homo sapien
ctctgcctgccggcaactttgctga

SEQ ID NO: 1617017 - DNA, 25 bp, Homo sapien
agaaattaccgcgttctgtgtgaag

SEQ ID NO: 1617018 - DNA, 25 bp, Homo sapien
caagttacagaaattaccgcgttct

SEQ ID NO: 1617019 - DNA, 25 bp, Homo sapien
aattaccgcgttctgtgtgaaggga

SEQ ID NO: 1617020 - DNA, 25 bp, Homo sapien
aagttacagaaattaccgcgttctg

SEQ ID NO: 1617021 - DNA, 25 bp, Homo sapien
cctccagattccggcttctacatgg

SEQ ID NO: 1617022 - DNA, 25 bp, Homo sapien
ccagattccggcttctacatgggac

SEQ ID NO: 1617023 - DNA, 25 bp, Homo sapien
tgatccgaacacctccagattccgg

SEQ ID NO: 1617024 - DNA, 25 bp, Homo sapien
gaacacctccagattccggcttcta

SEQ ID NO: 1617025 - DNA, 25 bp, Homo sapien
ccttctggcagggactcttatttat

SEQ ID NO: 1617026 - DNA, 25 bp, Homo sapien
cttccttctggcagggactcttatt

SEQ ID NO: 1617027 - DNA, 25 bp, Homo sapien
ggcagggactcttatttattcccat

SEQ ID NO: 1617028 - DNA, 25 bp, Homo sapien
ttctggcagggactcttatttattc

SEQ ID NO: 1617029 - DNA, 25 bp, Homo sapien
tgtagcagcagccttgacaaaccca

SEQ ID NO: 1617030 - DNA, 25 bp, Homo sapien
ctctgcttcgccctgtgctgtgttc

SEQ ID NO: 1617031 - DNA, 25 bp, Homo sapien
ccttcttccggtaggccgcgtagag

SEQ ID NO: 1617032 - DNA, 25 bp, Homo sapien
ggcgcactgtaccaaggcaatgtaa

SEQ ID NO: 1617033 - DNA, 25 bp, Homo sapien
ggcatttattgttgggcccgcgtcc

SEQ ID NO: 1617034 - DNA, 25 bp, Homo sapien
cacgcggcatttattgttgggcccg

SEQ ID NO: 1617035 - DNA, 25 bp, Homo sapien
cagaccacgcggcatttattgttgg

SEQ ID NO: 1617036 - DNA, 25 bp, Homo sapien
gagcagaccacgcggcatttattgt

SEQ ID NO: 1617037 - DNA, 25 bp, Homo sapien
agcggcagccgcactcgtccaccac

SEQ ID NO: 1617038 - DNA, 25 bp, Homo sapien
tagcggcagccgcactcgtccacca

SEQ ID NO: 1617039 - DNA, 25 bp, Homo sapien
ttagcggcagccgcactcgtccacc

SEQ ID NO: 1617040 - DNA, 25 bp, Homo sapien
ttgtcaaagaagagcacggagatgg

SEQ ID NO: 1617041 - DNA, 25 bp, Homo sapien
tcatactgccgcagcaccacgttgt

SEQ ID NO: 1617042 - DNA, 25 bp, Homo sapien
ccctggcagtagttggccaggaagc

SEQ ID NO: 1617043 - DNA, 25 bp, Homo sapien
gcagcacagcgtggttgagcgccgg

SEQ ID NO: 1617044 - DNA, 25 bp, Homo sapien
tggcacaggcgcgggtcgagggtca

SEQ ID NO: 1617045 - DNA, 25 bp, Homo sapien
gaagctcacgtacagccgccgcgcg

SEQ ID NO: 1617046 - DNA, 25 bp, Homo sapien
ccaacacgggttcggcgtcgcgccg

SEQ ID NO: 1617047 - DNA, 25 bp, Homo sapien
ctcgcggaagctcacgtacagccgc

SEQ ID NO: 1617048 - DNA, 25 bp, Homo sapien
cggccatgaggcgttgcgagcccaa

SEQ ID NO: 1617049 - DNA, 25 bp, Homo sapien
agcgggttccacagccgacaggtcg

SEQ ID NO: 1617050 - DNA, 25 bp, Homo sapien
cgggcaccaactggcggagcagcac

SEQ ID NO: 1617051 - DNA, 25 bp, Homo sapien
ggtcgaagacgactgtccactcagg

SEQ ID NO: 1617052 - DNA, 25 bp, Homo sapien
tccgggatgtggcgcacgatgtttc

SEQ ID NO: 1617053 - DNA, 25 bp, Homo sapien
tggcgcacgatgtttccggcgaccc

SEQ ID NO: 1617054 - DNA, 25 bp, Homo sapien
atgtggcgcacgatgtttccggcga

SEQ ID NO: 1617055 - DNA, 25 bp, Homo sapien
gcggtccgggatgtggcgcacgatg

SEQ ID NO: 1617056 - DNA, 25 bp, Homo sapien
gctcatcgcgcagtcctagagcctg

SEQ ID NO: 1617057 - DNA, 25 bp, Homo sapien
ccacgtggcacggttgcagggtgac

SEQ ID NO: 1617058 - DNA, 25 bp, Homo sapien
ggcgtcgaaacaggcgccacatgac

SEQ ID NO: 1617059 - DNA, 25 bp, Homo sapien
acgtccgccgcgagccagacctggt

SEQ ID NO: 1617060 - DNA, 25 bp, Homo sapien
ccaggcgatgaccagagagtgcgca

SEQ ID NO: 1617061 - DNA, 25 bp, Homo sapien
ttcctcccaggcgatgaccagagag

SEQ ID NO: 1617062 - DNA, 25 bp, Homo sapien
cctcccaggcgatgaccagagagtg

SEQ ID NO: 1617063 - DNA, 25 bp, Homo sapien
ctcccaggcgatgaccagagagtgc

SEQ ID NO: 1617064 - DNA, 25 bp, Homo sapien
tagaggagcagagttggagggggtg

SEQ ID NO: 1617065 - DNA, 25 bp, Homo sapien
cctagaggagcagagttggaggggg

SEQ ID NO: 1617066 - DNA, 25 bp, Homo sapien
ctagaggagcagagttggagggggt

SEQ ID NO: 1617067 - DNA, 25 bp, Homo sapien
gcggccaaggacggggagcgtggcc

SEQ ID NO: 1617068 - DNA, 25 bp, Homo sapien
gttcccacagagagtatagattcct

SEQ ID NO: 1617069 - DNA, 25 bp, Homo sapien
tagcatcctcggtgatgggtgcccc

SEQ ID NO: 1617070 - DNA, 25 bp, Homo sapien
tatagattcctctaatggtaaagtt

SEQ ID NO: 1617071 - DNA, 25 bp, Homo sapien
ttctctacccactcagaaacagctg

SEQ ID NO: 1617072 - DNA, 25 bp, Homo sapien
aaggaagctacgggcgtcagtgtag

SEQ ID NO: 1617073 - DNA, 25 bp, Homo sapien
gaagctacgggcgtcagtgtaggag

SEQ ID NO: 1617074 - DNA, 25 bp, Homo sapien
agagaagggtactggctacccacat

SEQ ID NO: 1617075 - DNA, 25 bp, Homo sapien
tacgggcgtcagtgtaggagagaag

SEQ ID NO: 1617076 - DNA, 25 bp, Homo sapien
tgcagctccctggcttaagtgatcc

SEQ ID NO: 1617077 - DNA, 25 bp, Homo sapien
ctcactgcagctccctggcttaagt

SEQ ID NO: 1617078 - DNA, 25 bp, Homo sapien
tgtgccacaacacatggctgttttt

SEQ ID NO: 1617079 - DNA, 25 bp, Homo sapien
gccacaacacatggctgttttttgt

SEQ ID NO: 1617080 - DNA, 25 bp, Homo sapien
caaggcgaatctgatgggttctccc

SEQ ID NO: 1617081 - DNA, 25 bp, Homo sapien
gtttcatctacacccaaggcgaatc

SEQ ID NO: 1617082 - DNA, 25 bp, Homo sapien
tcatctacacccaaggcgaatctga

SEQ ID NO: 1617083 - DNA, 25 bp, Homo sapien
tacacccaaggcgaatctgatgggt

SEQ ID NO: 1617084 - DNA, 25 bp, Homo sapien
gttaaatgtctgcatctcgcacctc

SEQ ID NO: 1617085 - DNA, 25 bp, Homo sapien
caaaaaacgtcacggagctctgagc

SEQ ID NO: 1617086 - DNA, 25 bp, Homo sapien
ttccaaaaaacgtcacggagctctg

SEQ ID NO: 1617087 - DNA, 25 bp, Homo sapien
tacagccccggatgtgttaaatgtc

SEQ ID NO: 1617088 - DNA, 25 bp, Homo sapien
gacatgggtcagaggtcgtcatcca

SEQ ID NO: 1617089 - DNA, 25 bp, Homo sapien
ttgcctatgagacactgcacacccg

SEQ ID NO: 1617090 - DNA, 25 bp, Homo sapien
gggcttcggacaccatctggctgtc

SEQ ID NO: 1617091 - DNA, 25 bp, Homo sapien
gccaggatgtctcggcccagatgga

SEQ ID NO: 1617092 - DNA, 25 bp, Homo sapien
catcgtccacgcctttattgcagtc

SEQ ID NO: 1617093 - DNA, 25 bp, Homo sapien
tccttcagggtactggccacatcgt

SEQ ID NO: 1617094 - DNA, 25 bp, Homo sapien
agggtactggccacatcgtccacgc

SEQ ID NO: 1617095 - DNA, 25 bp, Homo sapien
tggccacatcgtccacgcctttatt

SEQ ID NO: 1617096 - DNA, 25 bp, Homo sapien
atccgcgtcggcctcatctgctgct

SEQ ID NO: 1617097 - DNA, 25 bp, Homo sapien
tgcccacgaacacgcttggacgggt

SEQ ID NO: 1617098 - DNA, 25 bp, Homo sapien
cacgaacacgcttggacgggtgaca

SEQ ID NO: 1617099 - DNA, 25 bp, Homo sapien
cgcttggacgggtgacactaaagga

SEQ ID NO: 1617100 - DNA, 25 bp, Homo sapien
tgtgtcatactcccgcaggtccttc

SEQ ID NO: 1617101 - DNA, 25 bp, Homo sapien
tctgggcctcggctgtgtcatactc

SEQ ID NO: 1617102 - DNA, 25 bp, Homo sapien
ctgtgtcatactcccgcaggtcctt

SEQ ID NO: 1617103 - DNA, 25 bp, Homo sapien
gtgtcatactcccgcaggtccttca

SEQ ID NO: 1617104 - DNA, 25 bp, Homo sapien
atacaggaccttgagcgggaaccag

SEQ ID NO: 1617105 - DNA, 25 bp, Homo sapien
gcagcaggagcgcattgaagaagaa

SEQ ID NO: 1617106 - DNA, 25 bp, Homo sapien
tagaggttcataagggtgagcagca

SEQ ID NO: 1617107 - DNA, 25 bp, Homo sapien
gcagtgactggtggcatacaggacc

SEQ ID NO: 1617108 - DNA, 25 bp, Homo sapien
cagctgaagccgaagctgaggcagc

SEQ ID NO: 1617109 - DNA, 25 bp, Homo sapien
catgcagccgatggtaggagccgcc

SEQ ID NO: 1617110 - DNA, 25 bp, Homo sapien
agctgaagccgaagctgaggcagcc

SEQ ID NO: 1617111 - DNA, 25 bp, Homo sapien
cttggtgaactcaagctgcacgtca

SEQ ID NO: 1617112 - DNA, 25 bp, Homo sapien
cttgaagtaaatgttgagcttggtg

SEQ ID NO: 1617113 - DNA, 25 bp, Homo sapien
tcaagctgcacgtcactgatatcgt

SEQ ID NO: 1617114 - DNA, 25 bp, Homo sapien
acgtcactgatatcgtgcaggaaga

SEQ ID NO: 1617115 - DNA, 25 bp, Homo sapien
aataagcccgaaggccatcccctgt

SEQ ID NO: 1617116 - DNA, 25 bp, Homo sapien
gcccggccccattaggatcttaata

SEQ ID NO: 1617117 - DNA, 25 bp, Homo sapien
gatgagacttccaggtctgtacgtg

SEQ ID NO: 1617118 - DNA, 25 bp, Homo sapien
aggtctgtacgtgcagcctggccat

SEQ ID NO: 1617119 - DNA, 25 bp, Homo sapien
tcaccctggacgtggggaagtgtct

SEQ ID NO: 1617120 - DNA, 25 bp, Homo sapien
caccctggacgtggggaagtgtctc

SEQ ID NO: 1617121 - DNA, 25 bp, Homo sapien
tgggctcctgccacaggtcctttgc

SEQ ID NO: 1617122 - DNA, 25 bp, Homo sapien
ggcattcagcacctcccttcactcc

SEQ ID NO: 1617123 - DNA, 25 bp, Homo sapien
tcacccccagaccaactaacaccta

SEQ ID NO: 1617124 - DNA, 25 bp, Homo sapien
tctgtcacccccagaccaactaaca

SEQ ID NO: 1617125 - DNA, 25 bp, Homo sapien
tggcattcagcacctcccttcactc

SEQ ID NO: 1617126 - DNA, 25 bp, Homo sapien
gccaggtgtccatgtatagcgtagc

SEQ ID NO: 1617127 - DNA, 25 bp, Homo sapien
caggtaggcggctgcaatgtcccgt

SEQ ID NO: 1617128 - DNA, 25 bp, Homo sapien
gatggagtggccatagaagcttccc

SEQ ID NO: 1617129 - DNA, 25 bp, Homo sapien
ggtggagcagcatgaccaccgagtc

SEQ ID NO: 1617130 - DNA, 25 bp, Homo sapien
gtagtcggtgccaaacagcaggtag

SEQ ID NO: 1617131 - DNA, 25 bp, Homo sapien
gaagagaaacttccaagcgctctcg

SEQ ID NO: 1617132 - DNA, 25 bp, Homo sapien
cagcaggtaggcactgtagctccag

SEQ ID NO: 1617133 - DNA, 25 bp, Homo sapien
gcatcttggcggcatctctgggctg

SEQ ID NO: 1617134 - DNA, 25 bp, Homo sapien
atggatgcgtcagcccaagggagtt

SEQ ID NO: 1617135 - DNA, 25 bp, Homo sapien
agggagacggatggatgcgtcagcc

SEQ ID NO: 1617136 - DNA, 25 bp, Homo sapien
agacggatggatgcgtcagcccaag

SEQ ID NO: 1617137 - DNA, 25 bp, Homo sapien
atgagggagacggatggatgcgtca

SEQ ID NO: 1617138 - DNA, 25 bp, Homo sapien
ttcccgattacagcgggcaagccgg

SEQ ID NO: 1617139 - DNA, 25 bp, Homo sapien
ctccaagggagcgaccactggcgtg

SEQ ID NO: 1617140 - DNA, 25 bp, Homo sapien
gcgctgaccccagataggcacaagg

SEQ ID NO: 1617141 - DNA, 25 bp, Homo sapien
gttcccggtcctgggcttctcagtg

SEQ ID NO: 1617142 - DNA, 25 bp, Homo sapien
ccacgcagcactgtctgaagggggc

SEQ ID NO: 1617143 - DNA, 25 bp, Homo sapien
tggggctccaacgtcctgggcctct

SEQ ID NO: 1617144 - DNA, 25 bp, Homo sapien
gcggcccgagagaccttatcctggg

SEQ ID NO: 1617145 - DNA, 25 bp, Homo sapien
ttatcctggggctccaacgtcctgg

SEQ ID NO: 1617146 - DNA, 25 bp, Homo sapien
cacgttccggcgaccccttcatccg

SEQ ID NO: 1617147 - DNA, 25 bp, Homo sapien
gcgctggaagaaaggaacgcgccgg

SEQ ID NO: 1617148 - DNA, 25 bp, Homo sapien
ggcgaccccttcatccgcagcagcc

SEQ ID NO: 1617149 - DNA, 25 bp, Homo sapien
tggaagaaaggaacgcgccggcggc

SEQ ID NO: 1617150 - DNA, 25 bp, Homo sapien
cggagcgcagggcggtccagcccag

SEQ ID NO: 1617151 - DNA, 25 bp, Homo sapien
gagcgcagggcggtccagcccagcg

SEQ ID NO: 1617152 - DNA, 25 bp, Homo sapien
gcggagcgcagggcggtccagccca

SEQ ID NO: 1617153 - DNA, 25 bp, Homo sapien
cgcagggcggtccagcccagcgcgc

SEQ ID NO: 1617154 - DNA, 25 bp, Homo sapien
gtagctcggcatgggctcgggcccc

SEQ ID NO: 1617155 - DNA, 25 bp, Homo sapien
gctgcactagctgcgcgtagctcgg

SEQ ID NO: 1617156 - DNA, 25 bp, Homo sapien
actagctgcgcgtagctcggcatgg

SEQ ID NO: 1617157 - DNA, 25 bp, Homo sapien
agccgcgctgcactagctgcgcgta

SEQ ID NO: 1617158 - DNA, 25 bp, Homo sapien
ctgcgcccgcccgcggtagccgacg

SEQ ID NO: 1617159 - DNA, 25 bp, Homo sapien
cgcggtagccgacggagccgcgcgc

SEQ ID NO: 1617160 - DNA, 25 bp, Homo sapien
ccgcccgcggtagccgacggagccg

SEQ ID NO: 1617161 - DNA, 25 bp, Homo sapien
agccgcgcgccccgcgtcacgcgcc

SEQ ID NO: 1617162 - DNA, 25 bp, Homo sapien
tccttctcaaggacccgaggcctgg

SEQ ID NO: 1617163 - DNA, 25 bp, Homo sapien
agtcttgggaccatcccgtggccct

SEQ ID NO: 1617164 - DNA, 25 bp, Homo sapien
ggcctggcacgccttggcacagtct

SEQ ID NO: 1617165 - DNA, 25 bp, Homo sapien
tggcacagtcttgggaccatcccgt

SEQ ID NO: 1617166 - DNA, 25 bp, Homo sapien
cccagaggggatgcaggtggatgcc

SEQ ID NO: 1617167 - DNA, 25 bp, Homo sapien
tgtcctggcttcatggtcctgacag

SEQ ID NO: 1617168 - DNA, 25 bp, Homo sapien
cctctgtcctggcttcatggtcctg

SEQ ID NO: 1617169 - DNA, 25 bp, Homo sapien
cttcatggtcctgacagctctgggc

SEQ ID NO: 1617170 - DNA, 25 bp, Homo sapien
gctgggagcgtactgtagcaccagc

SEQ ID NO: 1617171 - DNA, 25 bp, Homo sapien
tcaggcgctgggagcgtactgtagc

SEQ ID NO: 1617172 - DNA, 25 bp, Homo sapien
gcgctgggagcgtactgtagcacca

SEQ ID NO: 1617173 - DNA, 25 bp, Homo sapien
caggcgctgggagcgtactgtagca

SEQ ID NO: 1617174 - DNA, 25 bp, Homo sapien
ctttagcaagacacatggcaacaca

SEQ ID NO: 1617175 - DNA, 25 bp, Homo sapien
gcctggtactccttgatgaagggat

SEQ ID NO: 1617176 - DNA, 25 bp, Homo sapien
ggcaggtgagccgaacacggggacc

SEQ ID NO: 1617177 - DNA, 25 bp, Homo sapien
gcaggtgagccgaacacggggaccc

SEQ ID NO: 1617178 - DNA, 25 bp, Homo sapien
gttgaccagcgtctctgggtagcca

SEQ ID NO: 1617179 - DNA, 25 bp, Homo sapien
aggacgatgaggttgaccagcgtct

SEQ ID NO: 1617180 - DNA, 25 bp, Homo sapien
caggtgctgggacaggacgatgagg

SEQ ID NO: 1617181 - DNA, 25 bp, Homo sapien
tgaggttgaccagcgtctctgggta

SEQ ID NO: 1617182 - DNA, 25 bp, Homo sapien
accatgaagggggacaccagcttgc

SEQ ID NO: 1617183 - DNA, 25 bp, Homo sapien
cagggcacctttttgcagaccggac

SEQ ID NO: 1617184 - DNA, 25 bp, Homo sapien
tgcagaccggacttttctgagcctc

SEQ ID NO: 1617185 - DNA, 25 bp, Homo sapien
acggcggcccatggcagggcacctt

SEQ ID NO: 1617186 - DNA, 25 bp, Homo sapien
tggggggacctgagtgcctcccaaa

SEQ ID NO: 1617187 - DNA, 25 bp, Homo sapien
gagtcatctaactggtgagtcacgg

SEQ ID NO: 1617188 - DNA, 25 bp, Homo sapien
aatgcagggtgaccacagccacggg

SEQ ID NO: 1617189 - DNA, 25 bp, Homo sapien
cccagcaagaatgcagggtgaccac

SEQ ID NO: 1617190 - DNA, 25 bp, Homo sapien
aagcccccagaggatgcggccatga

SEQ ID NO: 1617191 - DNA, 25 bp, Homo sapien
agaggtgtaacaaaagcccccagag

SEQ ID NO: 1617192 - DNA, 25 bp, Homo sapien
agaggatgcggccatgaacacaaca

SEQ ID NO: 1617193 - DNA, 25 bp, Homo sapien
ctgagaggtgtaacaaaagccccca

SEQ ID NO: 1617194 - DNA, 25 bp, Homo sapien
gggccatgtggcaggccgcctgccc

SEQ ID NO: 1617195 - DNA, 25 bp, Homo sapien
gggtgggcgagcacttgtcagccat

SEQ ID NO: 1617196 - DNA, 25 bp, Homo sapien
agggtgggcgagcacttgtcagcca

SEQ ID NO: 1617197 - DNA, 25 bp, Homo sapien
tggaagatgtagtaggcatcctgca

SEQ ID NO: 1617198 - DNA, 25 bp, Homo sapien
caaactacccgataggtctgccggg

SEQ ID NO: 1617199 - DNA, 25 bp, Homo sapien
gggcctgtcctaccatactagacgg

SEQ ID NO: 1617200 - DNA, 25 bp, Homo sapien
ggactacccgtaacttgtactctgc

SEQ ID NO: 1617201 - DNA, 25 bp, Homo sapien
cacagagacgaatctggtgtgcccg

SEQ ID NO: 1617202 - DNA, 25 bp, Homo sapien
gagggtggcatcctcgtccaggtcc

SEQ ID NO: 1617203 - DNA, 25 bp, Homo sapien
gggtggcatcctcgtccaggtcctg

SEQ ID NO: 1617204 - DNA, 25 bp, Homo sapien
cgtccaggtcctgcattctcttcag

SEQ ID NO: 1617205 - DNA, 25 bp, Homo sapien
ggcatcctcgtccaggtcctgcatt

SEQ ID NO: 1617206 - DNA, 25 bp, Homo sapien
cagcttcagcaggatctgcactgtc

SEQ ID NO: 1617207 - DNA, 25 bp, Homo sapien
gcgaggtccaggcggtccagcttca

SEQ ID NO: 1617208 - DNA, 25 bp, Homo sapien
tccaggcggtccagcttcagcagga

SEQ ID NO: 1617209 - DNA, 25 bp, Homo sapien
ttcagcaggatctgcactgtcatgg

SEQ ID NO: 1617210 - DNA, 25 bp, Homo sapien
tgttcctaagtcctgtgcttaggac

SEQ ID NO: 1617211 - DNA, 25 bp, Homo sapien
gttcctaagtcctgtgcttaggacc

SEQ ID NO: 1617212 - DNA, 25 bp, Homo sapien
cggtcagcgggtcgccacagacaca

SEQ ID NO: 1617213 - DNA, 25 bp, Homo sapien
agacacattgcatggccgctccaca

SEQ ID NO: 1617214 - DNA, 25 bp, Homo sapien
atggagggccctgcccggactcgac

SEQ ID NO: 1617215 - DNA, 25 bp, Homo sapien
ctgtgcttccagatggagggccctg

SEQ ID NO: 1617216 - DNA, 25 bp, Homo sapien
agcagcctccatgggctgtgcttcc

SEQ ID NO: 1617217 - DNA, 25 bp, Homo sapien
tggagaagcagcctccatgggctgt

SEQ ID NO: 1617218 - DNA, 25 bp, Homo sapien
ggcatcaacactcaggaacaaggcc

SEQ ID NO: 1617219 - DNA, 25 bp, Homo sapien
ggaggcatcaacactcaggaacaag

SEQ ID NO: 1617220 - DNA, 25 bp, Homo sapien
gaggcatcaacactcaggaacaagg

SEQ ID NO: 1617221 - DNA, 25 bp, Homo sapien
ctggaggcatcaacactcaggaaca

SEQ ID NO: 1617222 - DNA, 25 bp, Homo sapien
tggcccggagtcacatcctagggtg

SEQ ID NO: 1617223 - DNA, 25 bp, Homo sapien
gccgacagtgtgacatccctattta

SEQ ID NO: 1617224 - DNA, 25 bp, Homo sapien
gagcagatccacagcgaccatgaaa

SEQ ID NO: 1617225 - DNA, 25 bp, Homo sapien
gaattactcgtgaggcctcttgttc

SEQ ID NO: 1617226 - DNA, 25 bp, Homo sapien
gtccccctggtgcagcgcacgcagg

SEQ ID NO: 1617227 - DNA, 25 bp, Homo sapien
ccccctggtgcagcgcacgcagggc

SEQ ID NO: 1617228 - DNA, 25 bp, Homo sapien
gcgcacgcagggcggcatccgggtt

SEQ ID NO: 1617229 - DNA, 25 bp, Homo sapien
agcgcacgcagggcggcatccgggt

SEQ ID NO: 1617230 - DNA, 25 bp, Homo sapien
gtccagctcggccacgatgctgtcc

SEQ ID NO: 1617231 - DNA, 25 bp, Homo sapien
ggtccagctcggccacgatgctgtc

SEQ ID NO: 1617232 - DNA, 25 bp, Homo sapien
ctgagtctgtttccccgtgctgagg

SEQ ID NO: 1617233 - DNA, 25 bp, Homo sapien
tggcatgtctgataccaaccaggct

SEQ ID NO: 1617234 - DNA, 25 bp, Homo sapien
tcaaggccacgtcttctagcaggag

SEQ ID NO: 1617235 - DNA, 25 bp, Homo sapien
gaccatcttacaaagcttcctgagg

SEQ ID NO: 1617236 - DNA, 25 bp, Homo sapien
aaaatcaattactgggcggatcgct

SEQ ID NO: 1617237 - DNA, 25 bp, Homo sapien
aaatcaattactgggcggatcgctt

SEQ ID NO: 1617238 - DNA, 25 bp, Homo sapien
caaaatcaattactgggcggatcgc

SEQ ID NO: 1617239 - DNA, 25 bp, Homo sapien
acagcccgggcagttaaggacaaca

SEQ ID NO: 1617240 - DNA, 25 bp, Homo sapien
tcctgccaatgaggtcgcggctgtg

SEQ ID NO: 1617241 - DNA, 25 bp, Homo sapien
cactgtatgccaggctgaacgacag

SEQ ID NO: 1617242 - DNA, 25 bp, Homo sapien
ccctgggaggtcacctgtctcaatg

SEQ ID NO: 1617243 - DNA, 25 bp, Homo sapien
catgtgggataggatatggacgtac

SEQ ID NO: 1617244 - DNA, 25 bp, Homo sapien
tcatattcacaagcatgtgggatag

SEQ ID NO: 1617245 - DNA, 25 bp, Homo sapien
ccttatctcttaatctgatcggcaa

SEQ ID NO: 1617246 - DNA, 25 bp, Homo sapien
taatctgatcggcaaagaccctttt

SEQ ID NO: 1617247 - DNA, 25 bp, Homo sapien
gcctctgcacaggagtcagctccca

SEQ ID NO: 1617248 - DNA, 25 bp, Homo sapien
cggtagttgggacactgcctccgtg

SEQ ID NO: 1617249 - DNA, 25 bp, Homo sapien
catgggcgtttgaccaacgctggcc

SEQ ID NO: 1617250 - DNA, 25 bp, Homo sapien
aaggaagagcaggatcacagcagtc

SEQ ID NO: 1617251 - DNA, 25 bp, Homo sapien
gagatactggcaggttgcagtcccc

SEQ ID NO: 1617252 - DNA, 25 bp, Homo sapien
caggttcataaccaacaggccttga

SEQ ID NO: 1617253 - DNA, 25 bp, Homo sapien
cagagggctgctcggtaattgatat

SEQ ID NO: 1617254 - DNA, 25 bp, Homo sapien
tttgaagcaggatccatcaccagcc

SEQ ID NO: 1617255 - DNA, 25 bp, Homo sapien
taatctgagggatgctgtgcgctgc

SEQ ID NO: 1617256 - DNA, 25 bp, Homo sapien
ggccgaggagggcttgatctcatcc

SEQ ID NO: 1617257 - DNA, 25 bp, Homo sapien
ttgatctcatccaggaccacaccga

SEQ ID NO: 1617258 - DNA, 25 bp, Homo sapien
tccgactctcgtgggcgaggtagtc

SEQ ID NO: 1617259 - DNA, 25 bp, Homo sapien
tagtcagcaaacatgcgcacggcct

SEQ ID NO: 1617260 - DNA, 25 bp, Homo sapien
cagtagggacgaggcgtcagctgca

SEQ ID NO: 1617261 - DNA, 25 bp, Homo sapien
tagggacgaggcgtcagctgcaccc

SEQ ID NO: 1617262 - DNA, 25 bp, Homo sapien
ctgcagtagggacgaggcgtcagct

SEQ ID NO: 1617263 - DNA, 25 bp, Homo sapien
ggacgaggcgtcagctgcacccgtc

SEQ ID NO: 1617264 - DNA, 25 bp, Homo sapien
gccaggtacgctctatacaggaaga

SEQ ID NO: 1617265 - DNA, 25 bp, Homo sapien
ctgcgccaggtacgctctatacagg

SEQ ID NO: 1617266 - DNA, 25 bp, Homo sapien
tacgctctatacaggaagacgtccc

SEQ ID NO: 1617267 - DNA, 25 bp, Homo sapien
tacaggaagacgtccctctccacgt

SEQ ID NO: 1617268 - DNA, 25 bp, Homo sapien
catagtaagagcaccaacatctcag

SEQ ID NO: 1617269 - DNA, 25 bp, Homo sapien
tttgacatagtaagagcaccaacat

SEQ ID NO: 1617270 - DNA, 25 bp, Homo sapien
tagggtctcacttttgacatagtaa

SEQ ID NO: 1617271 - DNA, 25 bp, Homo sapien
tctcacttttgacatagtaagagca

SEQ ID NO: 1617272 - DNA, 25 bp, Homo sapien
actgctggtagctgccgatgtagaa

SEQ ID NO: 1617273 - DNA, 25 bp, Homo sapien
tgtagaaggcgttctttacgtcgaa

SEQ ID NO: 1617274 - DNA, 25 bp, Homo sapien
tttacgtcgaacagctcgtctacct

SEQ ID NO: 1617275 - DNA, 25 bp, Homo sapien
gtttatgcactgctggtagctgccg

SEQ ID NO: 1617276 - DNA, 25 bp, Homo sapien
aaagacacgtcagccggaagcaaga

SEQ ID NO: 1617277 - DNA, 25 bp, Homo sapien
gtcagccggaagcaagacacgggca

SEQ ID NO: 1617278 - DNA, 25 bp, Homo sapien
tcttcctgaaagacacgtcagccgg

SEQ ID NO: 1617279 - DNA, 25 bp, Homo sapien
tcctgaaagacacgtcagccggaag

SEQ ID NO: 1617280 - DNA, 25 bp, Homo sapien
ctgccaacaaccagagccgactggg

SEQ ID NO: 1617281 - DNA, 25 bp, Homo sapien
gaaattctacacaatgagaagctca

SEQ ID NO: 1617282 - DNA, 25 bp, Homo sapien
tgtaatcgggggatctagaaattct

SEQ ID NO: 1617283 - DNA, 25 bp, Homo sapien
cacgcttagaaatgtaatcggggga

SEQ ID NO: 1617284 - DNA, 25 bp, Homo sapien
catcccaggccggaatcgttcatag

SEQ ID NO: 1617285 - DNA, 25 bp, Homo sapien
tccctttccaggacgaatgggccca

SEQ ID NO: 1617286 - DNA, 25 bp, Homo sapien
atgggcccaactatgccgcctgcag

SEQ ID NO: 1617287 - DNA, 25 bp, Homo sapien
atcgttcatagaaaaccagccccgg

SEQ ID NO: 1617288 - DNA, 25 bp, Homo sapien
ggcgggccaggccctcacgcagctc

SEQ ID NO: 1617289 - DNA, 25 bp, Homo sapien
ctcacgcagctcactcagctcaaac

SEQ ID NO: 1617290 - DNA, 25 bp, Homo sapien
caggccctcacgcagctcactcagc

SEQ ID NO: 1617291 - DNA, 25 bp, Homo sapien
gccctcacgcagctcactcagctca

SEQ ID NO: 1617292 - DNA, 25 bp, Homo sapien
cgctccatcgcccgcagctggtgct

SEQ ID NO: 1617293 - DNA, 25 bp, Homo sapien
aggctgcgctccatcgcccgcagct

SEQ ID NO: 1617294 - DNA, 25 bp, Homo sapien
gctgcgctccatcgcccgcagctgg

SEQ ID NO: 1617295 - DNA, 25 bp, Homo sapien
ggtgctccaactccgcattgcgggt

SEQ ID NO: 1617296 - DNA, 25 bp, Homo sapien
gcctcgcggggccccccagtctgac

SEQ ID NO: 1617297 - DNA, 25 bp, Homo sapien
tcgcggggccccccagtctgactct

SEQ ID NO: 1617298 - DNA, 25 bp, Homo sapien
tgctgagtctcctcacgctcggcag

SEQ ID NO: 1617299 - DNA, 25 bp, Homo sapien
cggggccccccagtctgactcttca

SEQ ID NO: 1617300 - DNA, 25 bp, Homo sapien
tggtccttggtttgcaccagagctt

SEQ ID NO: 1617301 - DNA, 25 bp, Homo sapien
ggtccttggtttgcaccagagcttc

SEQ ID NO: 1617302 - DNA, 25 bp, Homo sapien
gtccttggtttgcaccagagcttcc

SEQ ID NO: 1617303 - DNA, 25 bp, Homo sapien
ctggtccttggtttgcaccagagct

SEQ ID NO: 1617304 - DNA, 25 bp, Homo sapien
tcaccggtgggggtcacctctgaag

SEQ ID NO: 1617305 - DNA, 25 bp, Homo sapien
tctcaccggtgggggtcacctctga

SEQ ID NO: 1617306 - DNA, 25 bp, Homo sapien
cttctcaccggtgggggtcacctct

SEQ ID NO: 1617307 - DNA, 25 bp, Homo sapien
cagcccctccttctcaccggtgggg

SEQ ID NO: 1617308 - DNA, 25 bp, Homo sapien
agccgctcggcctctgcacgctgag

SEQ ID NO: 1617309 - DNA, 25 bp, Homo sapien
gctgtcctgcagtgcgaaaaactcg

SEQ ID NO: 1617310 - DNA, 25 bp, Homo sapien
ggcgttggcctctcgcagggcgcct

SEQ ID NO: 1617311 - DNA, 25 bp, Homo sapien
gtgcgaaaaactcggcctcccactg

SEQ ID NO: 1617312 - DNA, 25 bp, Homo sapien
gggccgttggcactgacgagagggc

SEQ ID NO: 1617313 - DNA, 25 bp, Homo sapien
gggcatcagcgctctggctgcggaa

SEQ ID NO: 1617314 - DNA, 25 bp, Homo sapien
tctttagccgctcgcgctctgtggg

SEQ ID NO: 1617315 - DNA, 25 bp, Homo sapien
cgttggcactgacgagagggctcgg

SEQ ID NO: 1617316 - DNA, 25 bp, Homo sapien
aggcaggcataggggagtagggagt

SEQ ID NO: 1617317 - DNA, 25 bp, Homo sapien
gcaggcataggggagtagggagtgc

SEQ ID NO: 1617318 - DNA, 25 bp, Homo sapien
caggcataggggagtagggagtgct

SEQ ID NO: 1617319 - DNA, 25 bp, Homo sapien
ggcaggcataggggagtagggagtg

SEQ ID NO: 1617320 - DNA, 25 bp, Homo sapien
ccagggctggactggtgagctcccc

SEQ ID NO: 1617321 - DNA, 25 bp, Homo sapien
cagggctggactggtgagctccccg

SEQ ID NO: 1617322 - DNA, 25 bp, Homo sapien
ctggctgcttccttcacttcctgga

SEQ ID NO: 1617323 - DNA, 25 bp, Homo sapien
agcctggctgcttccttcacttcct

SEQ ID NO: 1617324 - DNA, 25 bp, Homo sapien
tccttcacttcctggaacttctcgg

SEQ ID NO: 1617325 - DNA, 25 bp, Homo sapien
tcacttcctggaacttctcggcaaa

SEQ ID NO: 1617326 - DNA, 25 bp, Homo sapien
gtgtcagatgctgttcagaggcaaa

SEQ ID NO: 1617327 - DNA, 25 bp, Homo sapien
ctgtgtcagatgctgttcagaggca

SEQ ID NO: 1617328 - DNA, 25 bp, Homo sapien
ttcagaggcaaagcccaggccgtag

SEQ ID NO: 1617329 - DNA, 25 bp, Homo sapien
cagaggcaaagcccaggccgtagac

SEQ ID NO: 1617330 - DNA, 25 bp, Homo sapien
tgtgttggcgcgactgtcggcccac

SEQ ID NO: 1617331 - DNA, 25 bp, Homo sapien
tgaaggtcatgttgggagtgacagt

SEQ ID NO: 1617332 - DNA, 25 bp, Homo sapien
gaaggtcatgttgggagtgacagtg

SEQ ID NO: 1617333 - DNA, 25 bp, Homo sapien
tggtgaaggtcatgttgggagtgac

SEQ ID NO: 1617334 - DNA, 25 bp, Homo sapien
ggtgaaggtcatgttgggagtgaca

SEQ ID NO: 1617335 - DNA, 25 bp, Homo sapien
actctgaaccctttcaggagataga

SEQ ID NO: 1617336 - DNA, 25 bp, Homo sapien
caaggtagatgggacagatactaac

SEQ ID NO: 1617337 - DNA, 25 bp, Homo sapien
ggagatagagactagggcctgggaa

SEQ ID NO: 1617338 - DNA, 25 bp, Homo sapien
ccttgtattagggtcttgaaggtct

SEQ ID NO: 1617339 - DNA, 25 bp, Homo sapien
gacagtgagtgcgtgcttgcccgct

SEQ ID NO: 1617340 - DNA, 25 bp, Homo sapien
cccgtgtgctgaagattggctgctc

SEQ ID NO: 1617341 - DNA, 25 bp, Homo sapien
ttggcgcctccgatgctgatgatgc

SEQ ID NO: 1617342 - DNA, 25 bp, Homo sapien
cacattgcgggtggcatcgtagaaa

SEQ ID NO: 1617343 - DNA, 25 bp, Homo sapien
cccccacttagaaagctcagggcca

SEQ ID NO: 1617344 - DNA, 25 bp, Homo sapien
ccccacttagaaagctcagggccag

SEQ ID NO: 1617345 - DNA, 25 bp, Homo sapien
ggtggcaggagcactggtttggccc

SEQ ID NO: 1617346 - DNA, 25 bp, Homo sapien
agaggtggcaggagcactggtttgg

SEQ ID NO: 1617347 - DNA, 25 bp, Homo sapien
gggcaggctctagggggcagccaga

SEQ ID NO: 1617348 - DNA, 25 bp, Homo sapien
gtcaggctgggatgggcaggctcta

SEQ ID NO: 1617349 - DNA, 25 bp, Homo sapien
tagataactcagagcaagcagaccc

SEQ ID NO: 1617350 - DNA, 25 bp, Homo sapien
ggagaggcccaaagtacacctggtg

SEQ ID NO: 1617351 - DNA, 25 bp, Homo sapien
tgtgcccgtcatggaactttcaatc

SEQ ID NO: 1617352 - DNA, 25 bp, Homo sapien
ggactatgagtgtccctcaggccag

SEQ ID NO: 1617353 - DNA, 25 bp, Homo sapien
attgggccattcagcaaccccgaat

SEQ ID NO: 1617354 - DNA, 25 bp, Homo sapien
acactgggagaccagggctccccaa

SEQ ID NO: 1617355 - DNA, 25 bp, Homo sapien
tccccattgggccattcagcaaccc

SEQ ID NO: 1617356 - DNA, 25 bp, Homo sapien
tgagggcagagcagaatccacactg

SEQ ID NO: 1617357 - DNA, 25 bp, Homo sapien
gggatccccaatctggccggtggat

SEQ ID NO: 1617358 - DNA, 25 bp, Homo sapien
ccggtgcccgggatccccaatctgg

SEQ ID NO: 1617359 - DNA, 25 bp, Homo sapien
aatctggccggtggatgaggcccca

SEQ ID NO: 1617360 - DNA, 25 bp, Homo sapien
aactagtcatgcgcctcggatgccg

SEQ ID NO: 1617361 - DNA, 25 bp, Homo sapien
tggaacttccgagattcccgcgacg

SEQ ID NO: 1617362 - DNA, 25 bp, Homo sapien
gggacgcgggctctgaccctggaac

SEQ ID NO: 1617363 - DNA, 25 bp, Homo sapien
tgtcctagactcctaaacttcgagg

SEQ ID NO: 1617364 - DNA, 25 bp, Homo sapien
ggactcccttcgtgactcctcctct

SEQ ID NO: 1617365 - DNA, 25 bp, Homo sapien
cgcgagtgtccaggcgcgagtcggg

SEQ ID NO: 1617366 - DNA, 25 bp, Homo sapien
gccccgcgagtgtccaggcgcgagt

SEQ ID NO: 1617367 - DNA, 25 bp, Homo sapien
gtccaggcgcgagtcgggtgcggcc

SEQ ID NO: 1617368 - DNA, 25 bp, Homo sapien
tgccaggtcggcgccccgcgagtgt

SEQ ID NO: 1617369 - DNA, 25 bp, Homo sapien
ctggctcccgggcccgcgccctccg

SEQ ID NO: 1617370 - DNA, 25 bp, Homo sapien
ctgccgggcgccccgctcgctccct

SEQ ID NO: 1617371 - DNA, 25 bp, Homo sapien
cgcgccgccctccacgccgcccgtg

SEQ ID NO: 1617372 - DNA, 25 bp, Homo sapien
ccgggcgccccgctcgctccctggc

SEQ ID NO: 1617373 - DNA, 25 bp, Homo sapien
gccgcccgcgccgcctccggtccca

SEQ ID NO: 1617374 - DNA, 25 bp, Homo sapien
ccaggcaagaaagggtcgtggagtt

SEQ ID NO: 1617375 - DNA, 25 bp, Homo sapien
agttggggtcgccagcactggttta

SEQ ID NO: 1617376 - DNA, 25 bp, Homo sapien
gggtcgccagcactggtttatggat

SEQ ID NO: 1617377 - DNA, 25 bp, Homo sapien
cgtggagttggggtcgccagcactg

SEQ ID NO: 1617378 - DNA, 25 bp, Homo sapien
tgtggcgtccttgaagcctccgcca

SEQ ID NO: 1617379 - DNA, 25 bp, Homo sapien
tttggctgtggcgtccttgaagcct

SEQ ID NO: 1617380 - DNA, 25 bp, Homo sapien
tggctgtggcgtccttgaagcctcc

SEQ ID NO: 1617381 - DNA, 25 bp, Homo sapien
tttttggctgtggcgtccttgaagc

SEQ ID NO: 1617382 - DNA, 25 bp, Homo sapien
tccttgctccagcatcttccgtggc

SEQ ID NO: 1617383 - DNA, 25 bp, Homo sapien
ttgctccagcatcttccgtggctct

SEQ ID NO: 1617384 - DNA, 25 bp, Homo sapien
tcctggacacctcagagagaggctc

SEQ ID NO: 1617385 - DNA, 25 bp, Homo sapien
tctcctggacacctcagagagaggc

SEQ ID NO: 1617386 - DNA, 25 bp, Homo sapien
cttactgtagtcacccaattggcat

SEQ ID NO: 1617387 - DNA, 25 bp, Homo sapien
attgacaccaaacttactgtagtca

SEQ ID NO: 1617388 - DNA, 25 bp, Homo sapien
caccaaacttactgtagtcacccaa

SEQ ID NO: 1617389 - DNA, 25 bp, Homo sapien
aaacttactgtagtcacccaattgg

SEQ ID NO: 1617390 - DNA, 25 bp, Homo sapien
gaagaattataactcgtagaagaat

SEQ ID NO: 1617391 - DNA, 25 bp, Homo sapien
ttataactcgtagaagaatgtcaaa

SEQ ID NO: 1617392 - DNA, 25 bp, Homo sapien
gaattataactcgtagaagaatgtc

SEQ ID NO: 1617393 - DNA, 25 bp, Homo sapien
cagagaagaattataactcgtagaa

SEQ ID NO: 1617394 - DNA, 25 bp, Homo sapien
cagcttcctagcctcgggcgccacc

SEQ ID NO: 1617395 - DNA, 25 bp, Homo sapien
ttgtccgctgaacccaggccagctt

SEQ ID NO: 1617396 - DNA, 25 bp, Homo sapien
cttggcctttgtccgctgaacccag

SEQ ID NO: 1617397 - DNA, 25 bp, Homo sapien
ttgccttggcctttgtccgctgaac

SEQ ID NO: 1617398 - DNA, 25 bp, Homo sapien
agaggccttgggtttcacggtcctg

SEQ ID NO: 1617399 - DNA, 25 bp, Homo sapien
tagaacaccacagcccgagccgggt

SEQ ID NO: 1617400 - DNA, 25 bp, Homo sapien
tgatcagccatccatagaacaccac

SEQ ID NO: 1617401 - DNA, 25 bp, Homo sapien
ggatgctgcttgatcagccatccat

SEQ ID NO: 1617402 - DNA, 25 bp, Homo sapien
gctgcttgatcagccatccatagaa

SEQ ID NO: 1617403 - DNA, 25 bp, Homo sapien
cagggaggtcctcagccgcaaaagg

SEQ ID NO: 1617404 - DNA, 25 bp, Homo sapien
agggaggtcctcagccgcaaaaggc

SEQ ID NO: 1617405 - DNA, 25 bp, Homo sapien
acagggaggtcctcagccgcaaaag

SEQ ID NO: 1617406 - DNA, 25 bp, Homo sapien
gggtagccctgataccctgcacagg

SEQ ID NO: 1617407 - DNA, 25 bp, Homo sapien
caggcacttctggttccagtgggca

SEQ ID NO: 1617408 - DNA, 25 bp, Homo sapien
ttccagtgggcattcaggcaaaggg

SEQ ID NO: 1617409 - DNA, 25 bp, Homo sapien
gggaatgtcaattccaggcacttct

SEQ ID NO: 1617410 - DNA, 25 bp, Homo sapien
aggggtatagatggaacagttcaga

SEQ ID NO: 1617411 - DNA, 25 bp, Homo sapien
aaccgaggggtatagatggaacagt

SEQ ID NO: 1617412 - DNA, 25 bp, Homo sapien
tggaaccgaggggtatagatggaac

SEQ ID NO: 1617413 - DNA, 25 bp, Homo sapien
ccgaggggtatagatggaacagttc

SEQ ID NO: 1617414 - DNA, 25 bp, Homo sapien
acacggtgaccccaaaccaccacag

SEQ ID NO: 1617415 - DNA, 25 bp, Homo sapien
cattggggtagtatgtggacacagg

SEQ ID NO: 1617416 - DNA, 25 bp, Homo sapien
ctgggcccctcagggaacacggtga

SEQ ID NO: 1617417 - DNA, 25 bp, Homo sapien
tgggcattggggtagtatgtggaca

SEQ ID NO: 1617418 - DNA, 25 bp, Homo sapien
tttcccacgggccatggagactgct

SEQ ID NO: 1617419 - DNA, 25 bp, Homo sapien
gagtggcacccttggagtgtcctgt

SEQ ID NO: 1617420 - DNA, 25 bp, Homo sapien
cattccgcatacatctgggtttggt

SEQ ID NO: 1617421 - DNA, 25 bp, Homo sapien
aggaaggcagtctccgagtggcacc

SEQ ID NO: 1617422 - DNA, 25 bp, Homo sapien
cttttgctactggggcttcttggca

SEQ ID NO: 1617423 - DNA, 25 bp, Homo sapien
tgtcttgccccaaggaagctccagg

SEQ ID NO: 1617424 - DNA, 25 bp, Homo sapien
ttctgcctgtcttgccccaaggaag

SEQ ID NO: 1617425 - DNA, 25 bp, Homo sapien
tactggggcttcttggcagcgcctt

SEQ ID NO: 1617426 - DNA, 25 bp, Homo sapien
caattctctaagtgatttccagtga

SEQ ID NO: 1617427 - DNA, 25 bp, Homo sapien
ccagagtggcgagagagcacttcca

SEQ ID NO: 1617428 - DNA, 25 bp, Homo sapien
tcttctaggctttatcaaggaccaa

SEQ ID NO: 1617429 - DNA, 25 bp, Homo sapien
gagacagtaaagcacccagagtggc

SEQ ID NO: 1617430 - DNA, 25 bp, Homo sapien
caaggacagcctcggttaagaggga

SEQ ID NO: 1617431 - DNA, 25 bp, Homo sapien
gaaaagacactgtgactttgacacg

SEQ ID NO: 1617432 - DNA, 25 bp, Homo sapien
atcacgcgcgacacgaggatcctgc

SEQ ID NO: 1617433 - DNA, 25 bp, Homo sapien
actttgacacggctgtgccaccaca

SEQ ID NO: 1617434 - DNA, 25 bp, Homo sapien
tcctctgagagtgtagggggctttc

SEQ ID NO: 1617435 - DNA, 25 bp, Homo sapien
gtggccacacgccacagattcctaa

SEQ ID NO: 1617436 - DNA, 25 bp, Homo sapien
tttctaggttcaaggagatgtgccc

SEQ ID NO: 1617437 - DNA, 25 bp, Homo sapien
cagctcaaacttggaggagcggcag

SEQ ID NO: 1617438 - DNA, 25 bp, Homo sapien
acgctgcaggtgtgtgcgcctcgct

SEQ ID NO: 1617439 - DNA, 25 bp, Homo sapien
cgcctcgctcgggtcaatgggctga

SEQ ID NO: 1617440 - DNA, 25 bp, Homo sapien
gaatgaacatgctaggacaaagcac

SEQ ID NO: 1617441 - DNA, 25 bp, Homo sapien
gagtgcgcttgatccacgctgcagg

SEQ ID NO: 1617442 - DNA, 25 bp, Homo sapien
ctgtcggaggggtcaggaaaggaga

SEQ ID NO: 1617443 - DNA, 25 bp, Homo sapien
gaaaggagaagatgaaccccccgca

SEQ ID NO: 1617444 - DNA, 25 bp, Homo sapien
tgtcggaggggtcaggaaaggagaa

SEQ ID NO: 1617445 - DNA, 25 bp, Homo sapien
gagaaggagaaaggagaagatgaac

SEQ ID NO: 1617446 - DNA, 25 bp, Homo sapien
cacaggctggttcgttcgagggttg

SEQ ID NO: 1617447 - DNA, 25 bp, Homo sapien
ccacaggctggttcgttcgagggtt

SEQ ID NO: 1617448 - DNA, 25 bp, Homo sapien
caggctggttcgttcgagggttggg

SEQ ID NO: 1617449 - DNA, 25 bp, Homo sapien
ccccacaggctggttcgttcgaggg

SEQ ID NO: 1617450 - DNA, 25 bp, Homo sapien
gctgatgccctagccactgctgtgt

SEQ ID NO: 1617451 - DNA, 25 bp, Homo sapien
tacgtgcgaaaagtgcagagtctca

SEQ ID NO: 1617452 - DNA, 25 bp, Homo sapien
tcagagctttggtacccgagtgcag

SEQ ID NO: 1617453 - DNA, 25 bp, Homo sapien
taataagacagcacttgacgatgcc

SEQ ID NO: 1617454 - DNA, 25 bp, Homo sapien
catctgtgatcgtttccacatcacg

SEQ ID NO: 1617455 - DNA, 25 bp, Homo sapien
caacgagaaaacaccatctgtgatc

SEQ ID NO: 1617456 - DNA, 25 bp, Homo sapien
cccgtataaattctggcgaacaacg

SEQ ID NO: 1617457 - DNA, 25 bp, Homo sapien
gagagcaatggccagtccaactgga

SEQ ID NO: 1617458 - DNA, 25 bp, Homo sapien
actgcagagacgtttgttttcatgt

SEQ ID NO: 1617459 - DNA, 25 bp, Homo sapien
aagcacattgaaaatggtgcatgtt

SEQ ID NO: 1617460 - DNA, 25 bp, Homo sapien
gctgcttcaaggcttatctttcaca

SEQ ID NO: 1617461 - DNA, 25 bp, Homo sapien
tgcttcaaggcttatctttcacatc

SEQ ID NO: 1617462 - DNA, 25 bp, Homo sapien
ggcttatctttcacatcagtggttt

SEQ ID NO: 1617463 - DNA, 25 bp, Homo sapien
aattgctgcttcaaggcttatcttt

SEQ ID NO: 1617464 - DNA, 25 bp, Homo sapien
agggcagacggccttacacactggc

SEQ ID NO: 1617465 - DNA, 25 bp, Homo sapien
gatttgaagaccctcacaaagggac

SEQ ID NO: 1617466 - DNA, 25 bp, Homo sapien
gatggcaaggccctctggactagga

SEQ ID NO: 1617467 - DNA, 25 bp, Homo sapien
tgaggatatttacaggcccaaggcc

SEQ ID NO: 1617468 - DNA, 25 bp, Homo sapien
tgcatcatcctctgtcggaacacat

SEQ ID NO: 1617469 - DNA, 25 bp, Homo sapien
cacatcgaatgtgtcttctttgtgc

SEQ ID NO: 1617470 - DNA, 25 bp, Homo sapien
gcccgcttgtgtctgtacatctgca

SEQ ID NO: 1617471 - DNA, 25 bp, Homo sapien
ttctttgtgctcctgcccgtcagca

SEQ ID NO: 1617472 - DNA, 25 bp, Homo sapien
ggaaaatcaagacgcgactcacagt

SEQ ID NO: 1617473 - DNA, 25 bp, Homo sapien
tagaaacaaggagtactcaccctcg

SEQ ID NO: 1617474 - DNA, 25 bp, Homo sapien
gatgcaggtgtttgggacacacact

SEQ ID NO: 1617475 - DNA, 25 bp, Homo sapien
gaaaaagagagtcagttgtgcacct

SEQ ID NO: 1617476 - DNA, 25 bp, Homo sapien
aaacaaaaatcaactgccagctgta

SEQ ID NO: 1617477 - DNA, 25 bp, Homo sapien
tcatctgaagatgccttctgtttaa

SEQ ID NO: 1617478 - DNA, 25 bp, Homo sapien
tgtgaaggagccaagcggcaggctg

SEQ ID NO: 1617479 - DNA, 25 bp, Homo sapien
ccagctgtaagccatcttggctgtg

SEQ ID NO: 1617480 - DNA, 25 bp, Homo sapien
agcttctgctgggcgaagtccaagt

SEQ ID NO: 1617481 - DNA, 25 bp, Homo sapien
gcttctgctgggcgaagtccaagtc

SEQ ID NO: 1617482 - DNA, 25 bp, Homo sapien
cttctgctgggcgaagtccaagtcc

SEQ ID NO: 1617483 - DNA, 25 bp, Homo sapien
ttctgctgggcgaagtccaagtcct

SEQ ID NO: 1617484 - DNA, 25 bp, Homo sapien
ggaagtgcagcaatctctgggccac

SEQ ID NO: 1617485 - DNA, 25 bp, Homo sapien
aagaccttgccatgtattccttggc

SEQ ID NO: 1617486 - DNA, 25 bp, Homo sapien
ctcaggactgagttctacttggaca

SEQ ID NO: 1617487 - DNA, 25 bp, Homo sapien
cacagagcagacctcactgagagct

SEQ ID NO: 1617488 - DNA, 25 bp, Homo sapien
gtctccccattaactggaactatag

SEQ ID NO: 1617489 - DNA, 25 bp, Homo sapien
tcggattcccggctttaagtgatcc

SEQ ID NO: 1617490 - DNA, 25 bp, Homo sapien
ctggtctcggattcccggctttaag

SEQ ID NO: 1617491 - DNA, 25 bp, Homo sapien
cagtctccccattaactggaactat

SEQ ID NO: 1617492 - DNA, 25 bp, Homo sapien
catgctgagtgctgtgagctcaggt

SEQ ID NO: 1617493 - DNA, 25 bp, Homo sapien
gcatgggaagcagggtgagaagggc

SEQ ID NO: 1617494 - DNA, 25 bp, Homo sapien
ggctgggagagggttagatgaccct

SEQ ID NO: 1617495 - DNA, 25 bp, Homo sapien
tgagctcaggtctttgggcagtcag

SEQ ID NO: 1617496 - DNA, 25 bp, Homo sapien
gaattatagcactttgacaggtggg

SEQ ID NO: 1617497 - DNA, 25 bp, Homo sapien
aagaaagcgataccccgaattatag

SEQ ID NO: 1617498 - DNA, 25 bp, Homo sapien
gacaggtgggactaaagtagcagcc

SEQ ID NO: 1617499 - DNA, 25 bp, Homo sapien
gaccactggctgttctctagtccca

SEQ ID NO: 1617500 - DNA, 25 bp, Homo sapien
ccttctgggagctgtgcacgacctg

SEQ ID NO: 1617501 - DNA, 25 bp, Homo sapien
tctgggagctgtgcacgacctgggc

SEQ ID NO: 1617502 - DNA, 25 bp, Homo sapien
ctgagatgagaaacggggcatccgt

SEQ ID NO: 1617503 - DNA, 25 bp, Homo sapien
gggcatccgtcaggcccttctggga

SEQ ID NO: 1617504 - DNA, 25 bp, Homo sapien
gtgtaagacacccaatcggccttag

SEQ ID NO: 1617505 - DNA, 25 bp, Homo sapien
ggatcacaagtgtaagacacccaat

SEQ ID NO: 1617506 - DNA, 25 bp, Homo sapien
caagtgtaagacacccaatcggcct

SEQ ID NO: 1617507 - DNA, 25 bp, Homo sapien
aagacacccaatcggccttagcttg

SEQ ID NO: 1617508 - DNA, 25 bp, Homo sapien
gaccccgaggcctgtcataggcaat

SEQ ID NO: 1617509 - DNA, 25 bp, Homo sapien
gaggcctgtcataggcaattcgaac

SEQ ID NO: 1617510 - DNA, 25 bp, Homo sapien
taggcaattcgaactggttcatgga

SEQ ID NO: 1617511 - DNA, 25 bp, Homo sapien
tttggacatgggacgaccccgaggc

SEQ ID NO: 1617512 - DNA, 25 bp, Homo sapien
tcaaaaggccacatgcgatgcaatt

SEQ ID NO: 1617513 - DNA, 25 bp, Homo sapien
cttgtaaagattaggtctggccatc

SEQ ID NO: 1617514 - DNA, 25 bp, Homo sapien
gaagtcccatgtgaaagcacggtcc

SEQ ID NO: 1617515 - DNA, 25 bp, Homo sapien
cataggttttgcagcagaagtccca

SEQ ID NO: 1617516 - DNA, 25 bp, Homo sapien
ggactgcaatgggacaagagacccg

SEQ ID NO: 1617517 - DNA, 25 bp, Homo sapien
tctgctgtactggtgggttctcgcc

SEQ ID NO: 1617518 - DNA, 25 bp, Homo sapien
aacagtcagtggttgctgaatcggg

SEQ ID NO: 1617519 - DNA, 25 bp, Homo sapien
tgggacaagagacccgttctgggaa

SEQ ID NO: 1617520 - DNA, 25 bp, Homo sapien
agatggcctctcatggccgaggcag

SEQ ID NO: 1617521 - DNA, 25 bp, Homo sapien
acagtcaacaaaattcaaatggtcc

SEQ ID NO: 1617522 - DNA, 25 bp, Homo sapien
agagcaggagatggcctctcatggc

SEQ ID NO: 1617523 - DNA, 25 bp, Homo sapien
caaatggtccacttgaaaagggtgc

SEQ ID NO: 1617524 - DNA, 25 bp, Homo sapien
cttcaatgacttgctgctgatcctc

SEQ ID NO: 1617525 - DNA, 25 bp, Homo sapien
gagacacactctcttgggagctgga

SEQ ID NO: 1617526 - DNA, 25 bp, Homo sapien
tcttccgagggaagcaggtacctga

SEQ ID NO: 1617527 - DNA, 25 bp, Homo sapien
tggaatcatgccaaccttcaatgac

SEQ ID NO: 1617528 - DNA, 25 bp, Homo sapien
ggtgctccagccaggtcgtcctcgg

SEQ ID NO: 1617529 - DNA, 25 bp, Homo sapien
gtgacaaggcaggtgctccagccag

SEQ ID NO: 1617530 - DNA, 25 bp, Homo sapien
ctccagccaggtcgtcctcggcagc

SEQ ID NO: 1617531 - DNA, 25 bp, Homo sapien
ctgtgacaaggcaggtgctccagcc

SEQ ID NO: 1617532 - DNA, 25 bp, Homo sapien
ctcgccgggaaggccgtcggcaggg

SEQ ID NO: 1617533 - DNA, 25 bp, Homo sapien
gccctcagacttgcccgcccctcca

SEQ ID NO: 1617534 - DNA, 25 bp, Homo sapien
tgccctcagacttgcccgcccctcc

SEQ ID NO: 1617535 - DNA, 25 bp, Homo sapien
ccctcagacttgcccgcccctccag

SEQ ID NO: 1617536 - DNA, 25 bp, Homo sapien
ctgccctcagacttgcccgcccctc

SEQ ID NO: 1617537 - DNA, 25 bp, Homo sapien
gaaacaaattgatggacatagttca

SEQ ID NO: 1617538 - DNA, 25 bp, Homo sapien
accaccagtgtgaaggttgtgcgga

SEQ ID NO: 1617539 - DNA, 25 bp, Homo sapien
gggctctcctgagaacccgtggtgt

SEQ ID NO: 1617540 - DNA, 25 bp, Homo sapien
gatgacgtgaaacaaattgatggac

SEQ ID NO: 1617541 - DNA, 25 bp, Homo sapien
agaactattttggtcatgtagaaac

SEQ ID NO: 1617542 - DNA, 25 bp, Homo sapien
ttgaaagcagaactattttggtcat

SEQ ID NO: 1617543 - DNA, 25 bp, Homo sapien
ttctttcgatagaatttgaaagcag

SEQ ID NO: 1617544 - DNA, 25 bp, Homo sapien
aagcagaactattttggtcatgtag

SEQ ID NO: 1617545 - DNA, 25 bp, Homo sapien
catgtgcaccatggaaccgtaaggt

SEQ ID NO: 1617546 - DNA, 25 bp, Homo sapien
gaataacctgaccagtctctacgcg

SEQ ID NO: 1617547 - DNA, 25 bp, Homo sapien
cagttactgctggaacatgtgcacc

SEQ ID NO: 1617548 - DNA, 25 bp, Homo sapien
cagaggcggacgaacaaggtatgca

SEQ ID NO: 1617549 - DNA, 25 bp, Homo sapien
tgggcaagggctgactatcactact

SEQ ID NO: 1617550 - DNA, 25 bp, Homo sapien
tgagctccacctatccaaggaatgg

SEQ ID NO: 1617551 - DNA, 25 bp, Homo sapien
caagctaggaccagcacgaggagtt

SEQ ID NO: 1617552 - DNA, 25 bp, Homo sapien
gacccagtcataagccaaggctgcg

SEQ ID NO: 1617553 - DNA, 25 bp, Homo sapien
ctcctatttagcctttggatgcaga

SEQ ID NO: 1617554 - DNA, 25 bp, Homo sapien
gatgcccgagatgaaggcaggtccc

SEQ ID NO: 1617555 - DNA, 25 bp, Homo sapien
ttagcctttggatgcagattaaatg

SEQ ID NO: 1617556 - DNA, 25 bp, Homo sapien
ggtttttcctgatgcccgagatgaa

SEQ ID NO: 1617557 - DNA, 25 bp, Homo sapien
tctatgctgaattgttcgatctctg

SEQ ID NO: 1617558 - DNA, 25 bp, Homo sapien
caggtcagggttatcggtgctgttt

SEQ ID NO: 1617559 - DNA, 25 bp, Homo sapien
gaattgttcgatctctggtcccacc

SEQ ID NO: 1617560 - DNA, 25 bp, Homo sapien
ttatcggtgctgttttctatgctga

SEQ ID NO: 1617561 - DNA, 25 bp, Homo sapien
tgtgggctagctcagcagatgaccc

SEQ ID NO: 1617562 - DNA, 25 bp, Homo sapien
gcaaattcacaataccggacgcctc

SEQ ID NO: 1617563 - DNA, 25 bp, Homo sapien
gccactggcaaattcacaataccgg

SEQ ID NO: 1617564 - DNA, 25 bp, Homo sapien
tgccactgaccgcagacatgtgtgg

SEQ ID NO: 1617565 - DNA, 25 bp, Homo sapien
ttagtcgattcggaggaagcagtgc

SEQ ID NO: 1617566 - DNA, 25 bp, Homo sapien
gcagtgcaggtcagcgaaccccaag

SEQ ID NO: 1617567 - DNA, 25 bp, Homo sapien
gcaggtcagcgaaccccaagaacag

SEQ ID NO: 1617568 - DNA, 25 bp, Homo sapien
tagtcgattcggaggaagcagtgca

SEQ ID NO: 1617569 - DNA, 25 bp, Homo sapien
gccgtggtgtttcagcctggtgcct

SEQ ID NO: 1617570 - DNA, 25 bp, Homo sapien
gacagcccgggagtacagcatggcc

SEQ ID NO: 1617571 - DNA, 25 bp, Homo sapien
gtctgggtcccggtggtcgctctcc

SEQ ID NO: 1617572 - DNA, 25 bp, Homo sapien
gcgggcagtccttggcagcatcatt

SEQ ID NO: 1617573 - DNA, 25 bp, Homo sapien
gcaagttctcgctcatccgctgcat

SEQ ID NO: 1617574 - DNA, 25 bp, Homo sapien
tccagactattttcatcagacaaaa

SEQ ID NO: 1617575 - DNA, 25 bp, Homo sapien
cttcagcttgtaatatttatactcc

SEQ ID NO: 1617576 - DNA, 25 bp, Homo sapien
ttctggtcggctcctcgcaagttct

SEQ ID NO: 1617577 - DNA, 25 bp, Homo sapien
ctggtcgatggtgcccactaccctg

SEQ ID NO: 1617578 - DNA, 25 bp, Homo sapien
cgatgacacgtttcacaagctggtc

SEQ ID NO: 1617579 - DNA, 25 bp, Homo sapien
gctgccttcgatgacacgtttcaca

SEQ ID NO: 1617580 - DNA, 25 bp, Homo sapien
cgatggtgcccactaccctgtgatc

SEQ ID NO: 1617581 - DNA, 25 bp, Homo sapien
aacagcttctctgagaaatatgctg

SEQ ID NO: 1617582 - DNA, 25 bp, Homo sapien
acagcttctctgagaaatatgctga

SEQ ID NO: 1617583 - DNA, 25 bp, Homo sapien
aaggtcagtgatcccaaattacatg

SEQ ID NO: 1617584 - DNA, 25 bp, Homo sapien
ataaaaaggtcagtgatcccaaatt

SEQ ID NO: 1617585 - DNA, 25 bp, Homo sapien
tctgctgaatgtataagaaacaaat

SEQ ID NO: 1617586 - DNA, 25 bp, Homo sapien
tgttcacagaaaatatctgctgaat

SEQ ID NO: 1617587 - DNA, 25 bp, Homo sapien
tgtactctcgcccaaacaaagtgga

SEQ ID NO: 1617588 - DNA, 25 bp, Homo sapien
gagggagctatatcttgcaggccga

SEQ ID NO: 1617589 - DNA, 25 bp, Homo sapien
gacacttagctcgtaggcattgcag

SEQ ID NO: 1617590 - DNA, 25 bp, Homo sapien
tttctagggcaagagccaagtccag

SEQ ID NO: 1617591 - DNA, 25 bp, Homo sapien
ctctgctctggatcttgggactgcc

SEQ ID NO: 1617592 - DNA, 25 bp, Homo sapien
tctgctctggatcttgggactgccc

SEQ ID NO: 1617593 - DNA, 25 bp, Homo sapien
ctgctctggatcttgggactgccct

SEQ ID NO: 1617594 - DNA, 25 bp, Homo sapien
tgagctttaaactgaagagtttcgc

SEQ ID NO: 1617595 - DNA, 25 bp, Homo sapien
cttgagctttaaactgaagagtttc

SEQ ID NO: 1617596 - DNA, 25 bp, Homo sapien
gagctttaaactgaagagtttcgct

SEQ ID NO: 1617597 - DNA, 25 bp, Homo sapien
gctttaaactgaagagtttcgctta

SEQ ID NO: 1617598 - DNA, 25 bp, Homo sapien
tcctgtgtaattcgtctggctgcca

SEQ ID NO: 1617599 - DNA, 25 bp, Homo sapien
cagcatcaaaagtctcctgtgtaat

SEQ ID NO: 1617600 - DNA, 25 bp, Homo sapien
actggcatccatgtgatatcgtttg

SEQ ID NO: 1617601 - DNA, 25 bp, Homo sapien
ccatgtgatatcgtttggctttttc

SEQ ID NO: 1617602 - DNA, 25 bp, Homo sapien
ctcccggcctctgcgggcgaggaaa

SEQ ID NO: 1617603 - DNA, 25 bp, Homo sapien
agagggccgagcctgcgacgccatc

SEQ ID NO: 1617604 - DNA, 25 bp, Homo sapien
tgcagcgctgggcgccgttatctcc

SEQ ID NO: 1617605 - DNA, 25 bp, Homo sapien
gctgaaccggttctaaagagggcaa

SEQ ID NO: 1617606 - DNA, 25 bp, Homo sapien
cccgagaccaccgcgcgcggagcca

SEQ ID NO: 1617607 - DNA, 25 bp, Homo sapien
cggagccacccccgccgccgcctca

SEQ ID NO: 1617608 - DNA, 25 bp, Homo sapien
cgagaccaccgcgcgcggagccacc

SEQ ID NO: 1617609 - DNA, 25 bp, Homo sapien
cccgccgccgcctcaggctcctcac

SEQ ID NO: 1617610 - DNA, 25 bp, Homo sapien
catgcaaatgaaccaacggtctccg

SEQ ID NO: 1617611 - DNA, 25 bp, Homo sapien
gcgcgaggcggggacatgcaaatga

SEQ ID NO: 1617612 - DNA, 25 bp, Homo sapien
aatgaaccaacggtctccgcagcgc

SEQ ID NO: 1617613 - DNA, 25 bp, Homo sapien
tgcaaatgaaccaacggtctccgca

SEQ ID NO: 1617614 - DNA, 25 bp, Homo sapien
tatcgtgagcgtccgcgagtctctg

SEQ ID NO: 1617615 - DNA, 25 bp, Homo sapien
cgcggtcgtccttggttatcgtgag

SEQ ID NO: 1617616 - DNA, 25 bp, Homo sapien
cgtccttggttatcgtgagcgtccg

SEQ ID NO: 1617617 - DNA, 25 bp, Homo sapien
tggttatcgtgagcgtccgcgagtc

SEQ ID NO: 1617618 - DNA, 25 bp, Homo sapien
taggtgagaccatgagttggtatgg

SEQ ID NO: 1617619 - DNA, 25 bp, Homo sapien
gtgcccgtggccactccaataggca

SEQ ID NO: 1617620 - DNA, 25 bp, Homo sapien
agggctggactcttccagtggagca

SEQ ID NO: 1617621 - DNA, 25 bp, Homo sapien
ctccaataggcagaagggctggact

SEQ ID NO: 1617622 - DNA, 25 bp, Homo sapien
tgtgtcggccaaggctgggatactt

SEQ ID NO: 1617623 - DNA, 25 bp, Homo sapien
agaatagagcagtgtccctactcat

SEQ ID NO: 1617624 - DNA, 25 bp, Homo sapien
acttgggttagttcccgcacctctg

SEQ ID NO: 1617625 - DNA, 25 bp, Homo sapien
tgcctgccagtgtcggaaccaaagt

SEQ ID NO: 1617626 - DNA, 25 bp, Homo sapien
ttaaaagtccctatagagagatctg

SEQ ID NO: 1617627 - DNA, 25 bp, Homo sapien
ggaagcgtggatggggatctgcctg

SEQ ID NO: 1617628 - DNA, 25 bp, Homo sapien
ttttaaaagtccctatagagagatc

SEQ ID NO: 1617629 - DNA, 25 bp, Homo sapien
aaaagtccctatagagagatctggg

SEQ ID NO: 1617630 - DNA, 25 bp, Homo sapien
atgctgatccgaaacctggtggccc

SEQ ID NO: 1617631 - DNA, 25 bp, Homo sapien
cctgggttgtcatgtcgagctccga

SEQ ID NO: 1617632 - DNA, 25 bp, Homo sapien
gaggcactcatcatgcaggcccgat

SEQ ID NO: 1617633 - DNA, 25 bp, Homo sapien
gatctgcccaccgtgactgtgagga

SEQ ID NO: 1617634 - DNA, 25 bp, Homo sapien
tgtgccttcagcttcccgtcagtgt

SEQ ID NO: 1617635 - DNA, 25 bp, Homo sapien
ccgtcagtgtttttgagtgttcacc

SEQ ID NO: 1617636 - DNA, 25 bp, Homo sapien
catgaggtttcagctcacgttgcct

SEQ ID NO: 1617637 - DNA, 25 bp, Homo sapien
taaactgacaagcactcgaggtccc

SEQ ID NO: 1617638 - DNA, 25 bp, Homo sapien
gtgggggtgtccattgctattgcca

SEQ ID NO: 1617639 - DNA, 25 bp, Homo sapien
ccattgctggaaggcggtagggagg

SEQ ID NO: 1617640 - DNA, 25 bp, Homo sapien
gctattgccaaggtgctttgcctgc

SEQ ID NO: 1617641 - DNA, 25 bp, Homo sapien
ggtagggaggttggctggcgccagc

SEQ ID NO: 1617642 - DNA, 25 bp, Homo sapien
catagttggtctgtgtccatgaagc

SEQ ID NO: 1617643 - DNA, 25 bp, Homo sapien
agtgggcgctcctcggcgtagatat

SEQ ID NO: 1617644 - DNA, 25 bp, Homo sapien
ctcggcgtagatatctccctcttgg

SEQ ID NO: 1617645 - DNA, 25 bp, Homo sapien
ctcttggtgtggcaagccacgccca

SEQ ID NO: 1617646 - DNA, 25 bp, Homo sapien
tgccaatcagcgattggctttaggg

SEQ ID NO: 1617647 - DNA, 25 bp, Homo sapien
gcttccagcgctgactggccaggga

SEQ ID NO: 1617648 - DNA, 25 bp, Homo sapien
gctttaggggctgcccatctgcttc

SEQ ID NO: 1617649 - DNA, 25 bp, Homo sapien
tcatactcgccaatcactgtcgctt

SEQ ID NO: 1617650 - DNA, 25 bp, Homo sapien
ccacgcccagctccaagtgtgtaca

SEQ ID NO: 1617651 - DNA, 25 bp, Homo sapien
ccgccacgcccagctccaagtgtgt

SEQ ID NO: 1617652 - DNA, 25 bp, Homo sapien
gtttctccatccttcccagactggt

SEQ ID NO: 1617653 - DNA, 25 bp, Homo sapien
acagggtttctccatccttcccaga

SEQ ID NO: 1617654 - DNA, 25 bp, Homo sapien
caatacttgtcacccactcgagtgg

SEQ ID NO: 1617655 - DNA, 25 bp, Homo sapien
tacttgtcacccactcgagtggcac

SEQ ID NO: 1617656 - DNA, 25 bp, Homo sapien
cttgtcacccactcgagtggcacta

SEQ ID NO: 1617657 - DNA, 25 bp, Homo sapien
tgtcacccactcgagtggcactatc

SEQ ID NO: 1617658 - DNA, 25 bp, Homo sapien
cacagacttgtcattggggcacatt

SEQ ID NO: 1617659 - DNA, 25 bp, Homo sapien
aggatgtcccaagtggccccagggt

SEQ ID NO: 1617660 - DNA, 25 bp, Homo sapien
cactggacccataaggaaccacagg

SEQ ID NO: 1617661 - DNA, 25 bp, Homo sapien
gggtgactttccagcactggaccca

SEQ ID NO: 1617662 - DNA, 25 bp, Homo sapien
attggcaaaccctcagcactcactg

SEQ ID NO: 1617663 - DNA, 25 bp, Homo sapien
tgtcgtggagggaagtcacaggagc

SEQ ID NO: 1617664 - DNA, 25 bp, Homo sapien
ggccagcacagtgaacgagtgtcgt

SEQ ID NO: 1617665 - DNA, 25 bp, Homo sapien
gaaggcctgaattggcaaaccctca

SEQ ID NO: 1617666 - DNA, 25 bp, Homo sapien
gctccatggagaaggacccggttgt

SEQ ID NO: 1617667 - DNA, 25 bp, Homo sapien
acccggttgtggctttcggatcctg

SEQ ID NO: 1617668 - DNA, 25 bp, Homo sapien
ctccatggagaaggacccggttgtg

SEQ ID NO: 1617669 - DNA, 25 bp, Homo sapien
tgtggctttcggatcctgcactggg

SEQ ID NO: 1617670 - DNA, 25 bp, Homo sapien
ggaaggaaggcctttgcctgagcat

SEQ ID NO: 1617671 - DNA, 25 bp, Homo sapien
cctggaggaaggaaggcctttgcct

SEQ ID NO: 1617672 - DNA, 25 bp, Homo sapien
cccacatgcagaggcagaaacaggc

SEQ ID NO: 1617673 - DNA, 25 bp, Homo sapien
ccccacatgcagaggcagaaacagg

SEQ ID NO: 1617674 - DNA, 25 bp, Homo sapien
aagcgcccaagtgcaaggacagccc

SEQ ID NO: 1617675 - DNA, 25 bp, Homo sapien
ggtggtgctgggcagtagtcagaca

SEQ ID NO: 1617676 - DNA, 25 bp, Homo sapien
cccagggtctgtagcggcaggggtg

SEQ ID NO: 1617677 - DNA, 25 bp, Homo sapien
ccaagcgcccaagtgcaaggacagc

SEQ ID NO: 1617678 - DNA, 25 bp, Homo sapien
aaaggctgaggtggcgtcatcttcc

SEQ ID NO: 1617679 - DNA, 25 bp, Homo sapien
ggccgaccgcacaggcagttttcaa

SEQ ID NO: 1617680 - DNA, 25 bp, Homo sapien
agaaatcatcgcactcccagggcct

SEQ ID NO: 1617681 - DNA, 25 bp, Homo sapien
ttccaggtgacatctcagagcagca

SEQ ID NO: 1617682 - DNA, 25 bp, Homo sapien
ccttaaatgcctaagtgagaggaac

SEQ ID NO: 1617683 - DNA, 25 bp, Homo sapien
aacctggactcactgccttaaatgc

SEQ ID NO: 1617684 - DNA, 25 bp, Homo sapien
catccaaatcgggagaaaacacact

SEQ ID NO: 1617685 - DNA, 25 bp, Homo sapien
gagacgctcaagagcttgcacagag

SEQ ID NO: 1617686 - DNA, 25 bp, Homo sapien
gtgcgcatgagtgcgaacacacgtg

SEQ ID NO: 1617687 - DNA, 25 bp, Homo sapien
cgagtttgagtgaaaggagcgaccc

SEQ ID NO: 1617688 - DNA, 25 bp, Homo sapien
ttatttctcgagtttgagtgaaagg

SEQ ID NO: 1617689 - DNA, 25 bp, Homo sapien
tatgtgcacgcaggttgctcctagg

SEQ ID NO: 1617690 - DNA, 25 bp, Homo sapien
caaaggcttgagcatgaactgggtc

SEQ ID NO: 1617691 - DNA, 25 bp, Homo sapien
tcagagtccacgtccaaacgcaaag

SEQ ID NO: 1617692 - DNA, 25 bp, Homo sapien
gaactgggtcaagggtcccatcgcc

SEQ ID NO: 1617693 - DNA, 25 bp, Homo sapien
ctttatggaacgagcaggtgggcct

SEQ ID NO: 1617694 - DNA, 25 bp, Homo sapien
gtgggagcctcatgatagagtatag

SEQ ID NO: 1617695 - DNA, 25 bp, Homo sapien
gcctcatgatagagtatagcttggg

SEQ ID NO: 1617696 - DNA, 25 bp, Homo sapien
gctagcctcaatcccccgaagtggg

SEQ ID NO: 1617697 - DNA, 25 bp, Homo sapien
gagcctcatgatagagtatagcttg

SEQ ID NO: 1617698 - DNA, 25 bp, Homo sapien
gcacttaaacttggcaggagaggca

SEQ ID NO: 1617699 - DNA, 25 bp, Homo sapien
gccagctatcacagggactcagaaa

SEQ ID NO: 1617700 - DNA, 25 bp, Homo sapien
gaacccctgactggtctgcctggtg

SEQ ID NO: 1617701 - DNA, 25 bp, Homo sapien
gaccccgggtctatgatctattcac

SEQ ID NO: 1617702 - DNA, 25 bp, Homo sapien
cagtgaaaagtaggtgaacagttcc

SEQ ID NO: 1617703 - DNA, 25 bp, Homo sapien
cagagattctgtgcatacactcatc

SEQ ID NO: 1617704 - DNA, 25 bp, Homo sapien
cttcaggcctgaacgtcagtcacca

SEQ ID NO: 1617705 - DNA, 25 bp, Homo sapien
tggccagagcaacttggaggaccca

SEQ ID NO: 1617706 - DNA, 25 bp, Homo sapien
acctcccagggtcaagtgattctcc

SEQ ID NO: 1617707 - DNA, 25 bp, Homo sapien
tgcgactacaggcgtgggccactat

SEQ ID NO: 1617708 - DNA, 25 bp, Homo sapien
cgactacaggcgtgggccactatgc

SEQ ID NO: 1617709 - DNA, 25 bp, Homo sapien
acaatcacatctcaccgcagcctca

SEQ ID NO: 1617710 - DNA, 25 bp, Homo sapien
cctgcacccgggcaggtgccacagg

SEQ ID NO: 1617711 - DNA, 25 bp, Homo sapien
agggacgtgcaagacagctaccacc

SEQ ID NO: 1617712 - DNA, 25 bp, Homo sapien
aagcccgagtcccaaaccactcaga

SEQ ID NO: 1617713 - DNA, 25 bp, Homo sapien
tgccacagggacgtgcaagacagct

SEQ ID NO: 1617714 - DNA, 25 bp, Homo sapien
catgctcctttatttgttcagaaga

SEQ ID NO: 1617715 - DNA, 25 bp, Homo sapien
gctcctttatttgttcagaagagca

SEQ ID NO: 1617716 - DNA, 25 bp, Homo sapien
cctttatttgttcagaagagcagcc

SEQ ID NO: 1617717 - DNA, 25 bp, Homo sapien
ctttatttgttcagaagagcagcca

SEQ ID NO: 1617718 - DNA, 25 bp, Homo sapien
aatggcctcgggaccctcatgctgc

SEQ ID NO: 1617719 - DNA, 25 bp, Homo sapien
ttgccactcaaacctggcacatacg

SEQ ID NO: 1617720 - DNA, 25 bp, Homo sapien
catacgcttcggagacaatggcctc

SEQ ID NO: 1617721 - DNA, 25 bp, Homo sapien
ttctgaggcagaaactcggcgtcca

SEQ ID NO: 1617722 - DNA, 25 bp, Homo sapien
ggccgaaaaggctggcgagcagctg

SEQ ID NO: 1617723 - DNA, 25 bp, Homo sapien
gagccccggcaatccgcgctgcagt

SEQ ID NO: 1617724 - DNA, 25 bp, Homo sapien
tgctggtggaagtagaggccgaaaa

SEQ ID NO: 1617725 - DNA, 25 bp, Homo sapien
ggtaggccaggacgccacggaggaa

SEQ ID NO: 1617726 - DNA, 25 bp, Homo sapien
ctggacttcgtcctccccagagccg

SEQ ID NO: 1617727 - DNA, 25 bp, Homo sapien
ctccccagagccgatgggggcagcg

SEQ ID NO: 1617728 - DNA, 25 bp, Homo sapien
ccccagagccgatgggggcagcgct

SEQ ID NO: 1617729 - DNA, 25 bp, Homo sapien
tcctccccagagccgatgggggcag

SEQ ID NO: 1617730 - DNA, 25 bp, Homo sapien
ggggatagtagaggagctgggccca

SEQ ID NO: 1617731 - DNA, 25 bp, Homo sapien
gctcaccacggtcacatagcagtag

SEQ ID NO: 1617732 - DNA, 25 bp, Homo sapien
tgagcggcgtcaggtactgcaagct

SEQ ID NO: 1617733 - DNA, 25 bp, Homo sapien
ccagcgtcttgagcagaagtgtgca

SEQ ID NO: 1617734 - DNA, 25 bp, Homo sapien
tcacatagcagtagactcggaccac

SEQ ID NO: 1617735 - DNA, 25 bp, Homo sapien
agagtcgaaggcagaatcggacagc

SEQ ID NO: 1617736 - DNA, 25 bp, Homo sapien
gatttcacgggcttcgatgcggcca

SEQ ID NO: 1617737 - DNA, 25 bp, Homo sapien
cagaggcgcccagagtcgaaggcag

SEQ ID NO: 1617738 - DNA, 25 bp, Homo sapien
acagcaccaccagcaaccagaggcg

SEQ ID NO: 1617739 - DNA, 25 bp, Homo sapien
aacgcgtctccccaaacggcggctg

SEQ ID NO: 1617740 - DNA, 25 bp, Homo sapien
ctccccaaacggcggctggtgcagg

SEQ ID NO: 1617741 - DNA, 25 bp, Homo sapien
gcgtctccccaaacggcggctggtg

SEQ ID NO: 1617742 - DNA, 25 bp, Homo sapien
aggaagtcccgtgcaatgggctttg

SEQ ID NO: 1617743 - DNA, 25 bp, Homo sapien
cctcgagtctctcccttaagctccc

SEQ ID NO: 1617744 - DNA, 25 bp, Homo sapien
tctcctcgagtctctcccttaagct

SEQ ID NO: 1617745 - DNA, 25 bp, Homo sapien
gtaccccctctcctcgagtctctcc

SEQ ID NO: 1617746 - DNA, 25 bp, Homo sapien
accccctctcctcgagtctctccct

SEQ ID NO: 1617747 - DNA, 25 bp, Homo sapien
cagtcccacgcggatagccagcttg

SEQ ID NO: 1617748 - DNA, 25 bp, Homo sapien
ccgacatggtcagtgcgtcccggtg

SEQ ID NO: 1617749 - DNA, 25 bp, Homo sapien
gcagcatgggtctgtcctccgacat

SEQ ID NO: 1617750 - DNA, 25 bp, Homo sapien
gtcccacgcggatagccagcttggc

SEQ ID NO: 1617751 - DNA, 25 bp, Homo sapien
gaccctgggagggtcccagcctgcc

SEQ ID NO: 1617752 - DNA, 25 bp, Homo sapien
gggagggtcccagcctgcccttgcc

SEQ ID NO: 1617753 - DNA, 25 bp, Homo sapien
ggaccctgggagggtcccagcctgc

SEQ ID NO: 1617754 - DNA, 25 bp, Homo sapien
agggtcccagcctgcccttgcctcc

SEQ ID NO: 1617755 - DNA, 25 bp, Homo sapien
tggctctaagttctgggtcatgctg

SEQ ID NO: 1617756 - DNA, 25 bp, Homo sapien
ttcttcagaagtggctctaagttct

SEQ ID NO: 1617757 - DNA, 25 bp, Homo sapien
ttcagaagtggctctaagttctggg

SEQ ID NO: 1617758 - DNA, 25 bp, Homo sapien
gaagtggctctaagttctgggtcat

SEQ ID NO: 1617759 - DNA, 25 bp, Homo sapien
gacgataagaagaggaccgagtaga

SEQ ID NO: 1617760 - DNA, 25 bp, Homo sapien
tagggtctctaaggccactctgttc

SEQ ID NO: 1617761 - DNA, 25 bp, Homo sapien
caggcatccgtttgcttcccaagta

SEQ ID NO: 1617762 - DNA, 25 bp, Homo sapien
ccgagtagagtgaattcctagggtc

SEQ ID NO: 1617763 - DNA, 25 bp, Homo sapien
cctcccgcaccacttgcaccagcat

SEQ ID NO: 1617764 - DNA, 25 bp, Homo sapien
tcctcggcgctgaagtacagccgtg

SEQ ID NO: 1617765 - DNA, 25 bp, Homo sapien
tccaggcccagctcgagggtctcct

SEQ ID NO: 1617766 - DNA, 25 bp, Homo sapien
tcggcgctgaagtacagccgtgtca

SEQ ID NO: 1617767 - DNA, 25 bp, Homo sapien
gatgacctagaggagttcggttttg

SEQ ID NO: 1617768 - DNA, 25 bp, Homo sapien
tgctggatctcagatcaggatgtgg

SEQ ID NO: 1617769 - DNA, 25 bp, Homo sapien
actccagggaacaagcactgctgca

SEQ ID NO: 1617770 - DNA, 25 bp, Homo sapien
accacactccgtctgggaccccaga

SEQ ID NO: 1617771 - DNA, 25 bp, Homo sapien
ctggcagggagcagagaggaaggat

SEQ ID NO: 1617772 - DNA, 25 bp, Homo sapien
ccgccccactggcagggagcagaga

SEQ ID NO: 1617773 - DNA, 25 bp, Homo sapien
cactggcagggagcagagaggaagg

SEQ ID NO: 1617774 - DNA, 25 bp, Homo sapien
ggcagggagcagagaggaaggatac

SEQ ID NO: 1617775 - DNA, 25 bp, Homo sapien
atggagaaggtcaccgtgagcaggc

SEQ ID NO: 1617776 - DNA, 25 bp, Homo sapien
tggagaaggtcaccgtgagcaggca

SEQ ID NO: 1617777 - DNA, 25 bp, Homo sapien
agcaatgttagtctccttggctggt

SEQ ID NO: 1617778 - DNA, 25 bp, Homo sapien
ggtcccagcatgtagtagtaggcct

SEQ ID NO: 1617779 - DNA, 25 bp, Homo sapien
tggtcccagcatgtagtagtaggcc

SEQ ID NO: 1617780 - DNA, 25 bp, Homo sapien
gctggtcccagcatgtagtagtagg

SEQ ID NO: 1617781 - DNA, 25 bp, Homo sapien
cacagcaaagtccacaaaccactgg

SEQ ID NO: 1617782 - DNA, 25 bp, Homo sapien
ctgtgaagaggtacacgccgcccga

SEQ ID NO: 1617783 - DNA, 25 bp, Homo sapien
actggtactccaggaagaagcgcag

SEQ ID NO: 1617784 - DNA, 25 bp, Homo sapien
tgaagaggtacacgccgcccgagta

SEQ ID NO: 1617785 - DNA, 25 bp, Homo sapien
ctgtggggggcactctgctcagccc

SEQ ID NO: 1617786 - DNA, 25 bp, Homo sapien
ccctggggcccagctcgctcccctc

SEQ ID NO: 1617787 - DNA, 25 bp, Homo sapien
gctcagccctggggcccagctcgct

SEQ ID NO: 1617788 - DNA, 25 bp, Homo sapien
tcagccctggggcccagctcgctcc

SEQ ID NO: 1617789 - DNA, 25 bp, Homo sapien
gagtagagtttagggatgggactgg

SEQ ID NO: 1617790 - DNA, 25 bp, Homo sapien
cagggctgagggagtagagtttagg

SEQ ID NO: 1617791 - DNA, 25 bp, Homo sapien
cccatgagggtgtggagaccttcag

SEQ ID NO: 1617792 - DNA, 25 bp, Homo sapien
cccacccccatgagggtgtggagac

SEQ ID NO: 1617793 - DNA, 25 bp, Homo sapien
gcttctcctcactaaggccattggc

SEQ ID NO: 1617794 - DNA, 25 bp, Homo sapien
ctggaacggggcatctcggggcaca

SEQ ID NO: 1617795 - DNA, 25 bp, Homo sapien
tccacggtcgtgagggggcaggtct

SEQ ID NO: 1617796 - DNA, 25 bp, Homo sapien
gggcatccacggtcgtgagggggca

SEQ ID NO: 1617797 - DNA, 25 bp, Homo sapien
tcagacgggtgcttgtatcggaaca

SEQ ID NO: 1617798 - DNA, 25 bp, Homo sapien
ctcctcagacgggtgcttgtatcgg

SEQ ID NO: 1617799 - DNA, 25 bp, Homo sapien
agctcctcctcagacgggtgcttgt

SEQ ID NO: 1617800 - DNA, 25 bp, Homo sapien
agacgggtgcttgtatcggaacaaa

SEQ ID NO: 1617801 - DNA, 25 bp, Homo sapien
ctgagagcaaggacgggcagtcagg

SEQ ID NO: 1617802 - DNA, 25 bp, Homo sapien
ccagggattctagttagagggtagc

SEQ ID NO: 1617803 - DNA, 25 bp, Homo sapien
cccaaatccagggattctagttaga

SEQ ID NO: 1617804 - DNA, 25 bp, Homo sapien
gcaaggacgggcagtcagggaagct

SEQ ID NO: 1617805 - DNA, 25 bp, Homo sapien
ggtgagggtacagcatggggaaatt

SEQ ID NO: 1617806 - DNA, 25 bp, Homo sapien
acactgggaggtaggtgagggtaca

SEQ ID NO: 1617807 - DNA, 25 bp, Homo sapien
ggaggtaggtgagggtacagcatgg

SEQ ID NO: 1617808 - DNA, 25 bp, Homo sapien
taggtgagggtacagcatggggaaa

SEQ ID NO: 1617809 - DNA, 25 bp, Homo sapien
ctgccgttacagagcagccagcgcg

SEQ ID NO: 1617810 - DNA, 25 bp, Homo sapien
gccagcgcgcgaaggagcagtgtgg

SEQ ID NO: 1617811 - DNA, 25 bp, Homo sapien
gtcaccaccagctgtactccgagga

SEQ ID NO: 1617812 - DNA, 25 bp, Homo sapien
cagtgtggcgccagcctgtgcatga

SEQ ID NO: 1617813 - DNA, 25 bp, Homo sapien
ggggaggggacatgactggcagcac

SEQ ID NO: 1617814 - DNA, 25 bp, Homo sapien
gggggaggggacatgactggcagca

SEQ ID NO: 1617815 - DNA, 25 bp, Homo sapien
ggggggaggggacatgactggcagc

SEQ ID NO: 1617816 - DNA, 25 bp, Homo sapien
ctggggggaggggacatgactggca

SEQ ID NO: 1617817 - DNA, 25 bp, Homo sapien
tttagaagaatcagtctgtggtgaa

SEQ ID NO: 1617818 - DNA, 25 bp, Homo sapien
cagtaaatacccatttgctgccagt

SEQ ID NO: 1617819 - DNA, 25 bp, Homo sapien
aacgttttagaagaatcagtctgtg

SEQ ID NO: 1617820 - DNA, 25 bp, Homo sapien
tgaatgcagtaaatacccatttgct

SEQ ID NO: 1617821 - DNA, 25 bp, Homo sapien
ccactttcaataattccggccatca

SEQ ID NO: 1617822 - DNA, 25 bp, Homo sapien
ctgcccaggccggtcccgtcagggt

SEQ ID NO: 1617823 - DNA, 25 bp, Homo sapien
caggccggtcccgtcagggttgtgg

SEQ ID NO: 1617824 - DNA, 25 bp, Homo sapien
ctccgcctgggacgacgccccactt

SEQ ID NO: 1617825 - DNA, 25 bp, Homo sapien
tctgcggaaactcgaccaattagag

SEQ ID NO: 1617826 - DNA, 25 bp, Homo sapien
tagggctccgggcactctgcggaaa

SEQ ID NO: 1617827 - DNA, 25 bp, Homo sapien
agcccgactctggtctgacgagcat

SEQ ID NO: 1617828 - DNA, 25 bp, Homo sapien
caattagagcccgactctggtctga

SEQ ID NO: 1617829 - DNA, 25 bp, Homo sapien
ggattgagtccagccgcccacctcc

SEQ ID NO: 1617830 - DNA, 25 bp, Homo sapien
agccccccagggtggattgagtcca

SEQ ID NO: 1617831 - DNA, 25 bp, Homo sapien
gtccacggacgccacgcgcgtttta

SEQ ID NO: 1617832 - DNA, 25 bp, Homo sapien
acgccacgcgcgttttatttgtgga

SEQ ID NO: 1617833 - DNA, 25 bp, Homo sapien
tcactgttgggtcttctctgaagag

SEQ ID NO: 1617834 - DNA, 25 bp, Homo sapien
cactgttgggtcttctctgaagagg

SEQ ID NO: 1617835 - DNA, 25 bp, Homo sapien
actgttgggtcttctctgaagaggc

SEQ ID NO: 1617836 - DNA, 25 bp, Homo sapien
gctctgggctggtgccaccgggtga

SEQ ID NO: 1617837 - DNA, 25 bp, Homo sapien
tgggctggtgccaccgggtgatctc

SEQ ID NO: 1617838 - DNA, 25 bp, Homo sapien
ctgggctggtgccaccgggtgatct

SEQ ID NO: 1617839 - DNA, 25 bp, Homo sapien
ctggcgagcgctctgggctggtgcc

SEQ ID NO: 1617840 - DNA, 25 bp, Homo sapien
gggccagccgtcggccaagggcagc

SEQ ID NO: 1617841 - DNA, 25 bp, Homo sapien
ctaccggggccagccgtcggccaag

SEQ ID NO: 1617842 - DNA, 25 bp, Homo sapien
cggggccagccgtcggccaagggca

SEQ ID NO: 1617843 - DNA, 25 bp, Homo sapien
agccgtcggccaagggcagccggcg

SEQ ID NO: 1617844 - DNA, 25 bp, Homo sapien
ccagggaccgggcgaggagcaaggg

SEQ ID NO: 1617845 - DNA, 25 bp, Homo sapien
gggaccgggcgaggagcaagggata

SEQ ID NO: 1617846 - DNA, 25 bp, Homo sapien
cagggaccgggcgaggagcaaggga

SEQ ID NO: 1617847 - DNA, 25 bp, Homo sapien
agggaccgggcgaggagcaagggat

SEQ ID NO: 1617848 - DNA, 25 bp, Homo sapien
ctcctcgcccaggcttcggccccca

SEQ ID NO: 1617849 - DNA, 25 bp, Homo sapien
gaccctcctcgcccaggcttcggcc

SEQ ID NO: 1617850 - DNA, 25 bp, Homo sapien
ggaccctcctcgcccaggcttcggc

SEQ ID NO: 1617851 - DNA, 25 bp, Homo sapien
aggggatggcacagcgtgggcaaag

SEQ ID NO: 1617852 - DNA, 25 bp, Homo sapien
ctcttggggcctcaaaatagctgcc

SEQ ID NO: 1617853 - DNA, 25 bp, Homo sapien
ggggatggcacagcgtgggcaaagg

SEQ ID NO: 1617854 - DNA, 25 bp, Homo sapien
caggggatggcacagcgtgggcaaa

SEQ ID NO: 1617855 - DNA, 25 bp, Homo sapien
acttgccgtcgtctcagggcactta

SEQ ID NO: 1617856 - DNA, 25 bp, Homo sapien
cggaagtgtgcgcagtaccagggat

SEQ ID NO: 1617857 - DNA, 25 bp, Homo sapien
gaggactgggacttgccgtcgtctc

SEQ ID NO: 1617858 - DNA, 25 bp, Homo sapien
tgtgcgcagtaccagggatggccac

SEQ ID NO: 1617859 - DNA, 25 bp, Homo sapien
tgcaacaagccagggggcggtggag

SEQ ID NO: 1617860 - DNA, 25 bp, Homo sapien
ccatcacccctcgagggctgccagg

SEQ ID NO: 1617861 - DNA, 25 bp, Homo sapien
gggcccatcacccctcgagggctgc

SEQ ID NO: 1617862 - DNA, 25 bp, Homo sapien
ctgcaacaagccagggggcggtgga

SEQ ID NO: 1617863 - DNA, 25 bp, Homo sapien
tgggggtccgggagttgcagtggag

SEQ ID NO: 1617864 - DNA, 25 bp, Homo sapien
cccagtgggggtccgggagttgcag

SEQ ID NO: 1617865 - DNA, 25 bp, Homo sapien
gttgcagtggagcaggggttctgca

SEQ ID NO: 1617866 - DNA, 25 bp, Homo sapien
ggtccgggagttgcagtggagcagg

SEQ ID NO: 1617867 - DNA, 25 bp, Homo sapien
ggtggtgtcttgctggtgaggtggc

SEQ ID NO: 1617868 - DNA, 25 bp, Homo sapien
gtgtcttgctggtgaggtggcttgg

SEQ ID NO: 1617869 - DNA, 25 bp, Homo sapien
tgacctccgcccttccgtcggcagg

SEQ ID NO: 1617870 - DNA, 25 bp, Homo sapien
cccttccgtcggcaggtacagtggg

SEQ ID NO: 1617871 - DNA, 25 bp, Homo sapien
gacaggcaggccatgtcaactaatg

SEQ ID NO: 1617872 - DNA, 25 bp, Homo sapien
ggtttagaggtgatgcacgcagcct

SEQ ID NO: 1617873 - DNA, 25 bp, Homo sapien
ctggcaatgccagagccaagatgca

SEQ ID NO: 1617874 - DNA, 25 bp, Homo sapien
ccatgtcaactaatgaagtctgagg

SEQ ID NO: 1617875 - DNA, 25 bp, Homo sapien
tcggaagggagatgggcggctctgg

SEQ ID NO: 1617876 - DNA, 25 bp, Homo sapien
atgggcggctctgggcgggcagtgc

SEQ ID NO: 1617877 - DNA, 25 bp, Homo sapien
tgctggtcggaagggagatgggcgg

SEQ ID NO: 1617878 - DNA, 25 bp, Homo sapien
tgggcgggcagtgcttccccaagcc

SEQ ID NO: 1617879 - DNA, 25 bp, Homo sapien
taaggccccgtataccacatctggg

SEQ ID NO: 1617880 - DNA, 25 bp, Homo sapien
ccccgtataccacatctgggctggg

SEQ ID NO: 1617881 - DNA, 25 bp, Homo sapien
cggtaaggccccgtataccacatct

SEQ ID NO: 1617882 - DNA, 25 bp, Homo sapien
tggcggtaaggccccgtataccaca

SEQ ID NO: 1617883 - DNA, 25 bp, Homo sapien
gaggaatgcctcattcacagggcca

SEQ ID NO: 1617884 - DNA, 25 bp, Homo sapien
gccaagacctctcacttagtgtaga

SEQ ID NO: 1617885 - DNA, 25 bp, Homo sapien
tacagtgcccacttctcaaagaagc

SEQ ID NO: 1617886 - DNA, 25 bp, Homo sapien
tcagtaccagcctcaacgacttggg

SEQ ID NO: 1617887 - DNA, 25 bp, Homo sapien
cagcctccgaaacttctctcctggc

SEQ ID NO: 1617888 - DNA, 25 bp, Homo sapien
aggccaatgcccctccgcttcagcg

SEQ ID NO: 1617889 - DNA, 25 bp, Homo sapien
aaggccggatcacccccttcgcctg

SEQ ID NO: 1617890 - DNA, 25 bp, Homo sapien
cagctctggcccatcgaggccaatg

SEQ ID NO: 1617891 - DNA, 25 bp, Homo sapien
cgctgttgaagatgatgagggctat

SEQ ID NO: 1617892 - DNA, 25 bp, Homo sapien
ggatgtcagtgttggtgcggctctc

SEQ ID NO: 1617893 - DNA, 25 bp, Homo sapien
gctggcatactggaagaggcggttg

SEQ ID NO: 1617894 - DNA, 25 bp, Homo sapien
cacggtccatgtccgtgctggcata

SEQ ID NO: 1617895 - DNA, 25 bp, Homo sapien
tccaggatgcgggagatctggattt

SEQ ID NO: 1617896 - DNA, 25 bp, Homo sapien
caggatgcgggagatctggattttt

SEQ ID NO: 1617897 - DNA, 25 bp, Homo sapien
ctgccgattcctttggtccaggatg

SEQ ID NO: 1617898 - DNA, 25 bp, Homo sapien
gattcctttggtccaggatgcggga

SEQ ID NO: 1617899 - DNA, 25 bp, Homo sapien
ccaggctgagtggaatgatctttgt

SEQ ID NO: 1617900 - DNA, 25 bp, Homo sapien
tcccaggctgagtggaatgatcttt

SEQ ID NO: 1617901 - DNA, 25 bp, Homo sapien
cccaggctgagtggaatgatctttg

SEQ ID NO: 1617902 - DNA, 25 bp, Homo sapien
cgtcccaggctgagtggaatgatct

SEQ ID NO: 1617903 - DNA, 25 bp, Homo sapien
tcacaggtgactgaggcttcaggca

SEQ ID NO: 1617904 - DNA, 25 bp, Homo sapien
ccagcctctaccatgtcacaggtga

SEQ ID NO: 1617905 - DNA, 25 bp, Homo sapien
gggtcacgcggacctacgctcaggc

SEQ ID NO: 1617906 - DNA, 25 bp, Homo sapien
ctgtgaatgggctggtaggaaatgc

SEQ ID NO: 1617907 - DNA, 25 bp, Homo sapien
tctttgaaatagacgggatctagcc

SEQ ID NO: 1617908 - DNA, 25 bp, Homo sapien
tatttcagtgaacttagatctttga

SEQ ID NO: 1617909 - DNA, 25 bp, Homo sapien
cgggatctagccgagtcactttttt

SEQ ID NO: 1617910 - DNA, 25 bp, Homo sapien
aaggcccaggtggttttacagctat

SEQ ID NO: 1617911 - DNA, 25 bp, Homo sapien
aaggttacagtgagcgatgatgatc

SEQ ID NO: 1617912 - DNA, 25 bp, Homo sapien
tgagacgggaggattctgtgagccc

SEQ ID NO: 1617913 - DNA, 25 bp, Homo sapien
gaaaaagggacaagcacttggataa

SEQ ID NO: 1617914 - DNA, 25 bp, Homo sapien
gatgatgatcttgtaagctcttcca

SEQ ID NO: 1617915 - DNA, 25 bp, Homo sapien
caagagaaatgggtccaagttacac

SEQ ID NO: 1617916 - DNA, 25 bp, Homo sapien
tcgatgttcaatattcacgcaagag

SEQ ID NO: 1617917 - DNA, 25 bp, Homo sapien
gaattccgctcctcgatgttcaata

SEQ ID NO: 1617918 - DNA, 25 bp, Homo sapien
tgacccaggaattccgctcctcgat

SEQ ID NO: 1617919 - DNA, 25 bp, Homo sapien
tatgatcagttatagcacagcacag

SEQ ID NO: 1617920 - DNA, 25 bp, Homo sapien
tcgctgcacacaaccacgtggatga

SEQ ID NO: 1617921 - DNA, 25 bp, Homo sapien
gactccatcgagaagatgcactgtg

SEQ ID NO: 1617922 - DNA, 25 bp, Homo sapien
tgaatctcagagaccattggccaat

SEQ ID NO: 1617923 - DNA, 25 bp, Homo sapien
taattgggggtgagaatccttctcc

SEQ ID NO: 1617924 - DNA, 25 bp, Homo sapien
ttaattgggggtgagaatccttctc

SEQ ID NO: 1617925 - DNA, 25 bp, Homo sapien
tgttaattgggggtgagaatccttc

SEQ ID NO: 1617926 - DNA, 25 bp, Homo sapien
gaccaccttgaaatactgtcatcag

SEQ ID NO: 1617927 - DNA, 25 bp, Homo sapien
gagtcagtacagcatcctgcaagac

SEQ ID NO: 1617928 - DNA, 25 bp, Homo sapien
gatgagctgcagagtcacttcgcca

SEQ ID NO: 1617929 - DNA, 25 bp, Homo sapien
gaggccacggcttggcagaggaacc

SEQ ID NO: 1617930 - DNA, 25 bp, Homo sapien
ccagctcagattgcgggccccaaaa

SEQ ID NO: 1617931 - DNA, 25 bp, Homo sapien
tcagattgcgggccccaaaaagtcc

SEQ ID NO: 1617932 - DNA, 25 bp, Homo sapien
gctcagattgcgggccccaaaaagt

SEQ ID NO: 1617933 - DNA, 25 bp, Homo sapien
ggaacccagctcagattgcgggccc

SEQ ID NO: 1617934 - DNA, 25 bp, Homo sapien
ttgcccaagtccaggagtgtctcca

SEQ ID NO: 1617935 - DNA, 25 bp, Homo sapien
cactctccctttgcccggactgtgt

SEQ ID NO: 1617936 - DNA, 25 bp, Homo sapien
tccctttgcccggactgtgtccaac

SEQ ID NO: 1617937 - DNA, 25 bp, Homo sapien
tacttgcccatcactctccctttgc

SEQ ID NO: 1617938 - DNA, 25 bp, Homo sapien
aacgctctttctggaggcatcaatc

SEQ ID NO: 1617939 - DNA, 25 bp, Homo sapien
tctaaagacctgcagaaaacgctct

SEQ ID NO: 1617940 - DNA, 25 bp, Homo sapien
tctggaggcatcaatcttttttaat

SEQ ID NO: 1617941 - DNA, 25 bp, Homo sapien
gacctgcagaaaacgctctttctgg

SEQ ID NO: 1617942 - DNA, 25 bp, Homo sapien
taatggcacaatctgggcctactgc

SEQ ID NO: 1617943 - DNA, 25 bp, Homo sapien
ggcgcctgcccctccacatggctaa

SEQ ID NO: 1617944 - DNA, 25 bp, Homo sapien
agctagggctgcaggcgcctgcccc

SEQ ID NO: 1617945 - DNA, 25 bp, Homo sapien
gtaatggcacaatctgggcctactg

SEQ ID NO: 1617946 - DNA, 25 bp, Homo sapien
aggtggacacaatggcaggtgcaaa

SEQ ID NO: 1617947 - DNA, 25 bp, Homo sapien
ggagccaggtggacacaatggcagg

SEQ ID NO: 1617948 - DNA, 25 bp, Homo sapien
caggtggacacaatggcaggtgcaa

SEQ ID NO: 1617949 - DNA, 25 bp, Homo sapien
ggtggacacaatggcaggtgcaaag

SEQ ID NO: 1617950 - DNA, 25 bp, Homo sapien
agacatctgtctctagaccactctg

SEQ ID NO: 1617951 - DNA, 25 bp, Homo sapien
ggcaaggtagcactcccctacaatc

SEQ ID NO: 1617952 - DNA, 25 bp, Homo sapien
tctgtctctagaccactctgtgcct

SEQ ID NO: 1617953 - DNA, 25 bp, Homo sapien
tgactgcaacactcaaggaaagaca

SEQ ID NO: 1617954 - DNA, 25 bp, Homo sapien
ctgggccctgggacgctgggcgcac

SEQ ID NO: 1617955 - DNA, 25 bp, Homo sapien
tgctcggcctgggccctgggacgct

SEQ ID NO: 1617956 - DNA, 25 bp, Homo sapien
gccctgggacgctgggcgcacggac

SEQ ID NO: 1617957 - DNA, 25 bp, Homo sapien
ctgctcggcctgggccctgggacgc

SEQ ID NO: 1617958 - DNA, 25 bp, Homo sapien
catacagggcgtcaccctggaggcg

SEQ ID NO: 1617959 - DNA, 25 bp, Homo sapien
gggcgggacgggcttatttgcatac

SEQ ID NO: 1617960 - DNA, 25 bp, Homo sapien
cggcgatgggcgtgcacttgggcgt

SEQ ID NO: 1617961 - DNA, 25 bp, Homo sapien
aggtgccttgggagcgggcggtcct

SEQ ID NO: 1617962 - DNA, 25 bp, Homo sapien
agtgaaatagactccgatcccggac

SEQ ID NO: 1617963 - DNA, 25 bp, Homo sapien
gaccctcgcgctcgctagaatggaa

SEQ ID NO: 1617964 - DNA, 25 bp, Homo sapien
tagaatggaaagactgcaagacggg

SEQ ID NO: 1617965 - DNA, 25 bp, Homo sapien
ctgggactcagacgcgaaaggatgc

SEQ ID NO: 1617966 - DNA, 25 bp, Homo sapien
ctagagtgtagtggctccatcttgg

SEQ ID NO: 1617967 - DNA, 25 bp, Homo sapien
gctagagtgtagtggctccatcttg

SEQ ID NO: 1617968 - DNA, 25 bp, Homo sapien
gctatgagtgactcagagccctaga

SEQ ID NO: 1617969 - DNA, 25 bp, Homo sapien
tgtttgctggagaaatggtcgcacg

SEQ ID NO: 1617970 - DNA, 25 bp, Homo sapien
tggtcgcacgaaggacagatggaca

SEQ ID NO: 1617971 - DNA, 25 bp, Homo sapien
agcaagagggctggctcacaaatac

SEQ ID NO: 1617972 - DNA, 25 bp, Homo sapien
aggccttcagatgccttgacaggcc

SEQ ID NO: 1617973 - DNA, 25 bp, Homo sapien
gacaggcccgatgtcctaacaggat

SEQ ID NO: 1617974 - DNA, 25 bp, Homo sapien
accccacagtgccaagctgagggac

SEQ ID NO: 1617975 - DNA, 25 bp, Homo sapien
gatgtcctaacaggatgccctctgt

SEQ ID NO: 1617976 - DNA, 25 bp, Homo sapien
tgtccatctcaaaccaatcactagg

SEQ ID NO: 1617977 - DNA, 25 bp, Homo sapien
ggtacagttggatccagggctccac

SEQ ID NO: 1617978 - DNA, 25 bp, Homo sapien
caggaaaggtcgctcattgggtcac

SEQ ID NO: 1617979 - DNA, 25 bp, Homo sapien
tgatgctcctggtagaactcccagg

SEQ ID NO: 1617980 - DNA, 25 bp, Homo sapien
ccaactcagcctgtagagaaggtgc

SEQ ID NO: 1617981 - DNA, 25 bp, Homo sapien
aggtgcagtccagccttccttatcc

SEQ ID NO: 1617982 - DNA, 25 bp, Homo sapien
gagggtagatctgcgaatgtccaac

SEQ ID NO: 1617983 - DNA, 25 bp, Homo sapien
ccagccttccttatccagatgaaga

SEQ ID NO: 1617984 - DNA, 25 bp, Homo sapien
cacacatgaattcggctgcctctgg

SEQ ID NO: 1617985 - DNA, 25 bp, Homo sapien
gatgaaatgagatgacccctgtgaa

SEQ ID NO: 1617986 - DNA, 25 bp, Homo sapien
tgaggaaaatctgacccctgctgcc

SEQ ID NO: 1617987 - DNA, 25 bp, Homo sapien
tacagcttgaaaggcctacagaggc

SEQ ID NO: 1617988 - DNA, 25 bp, Homo sapien
ggtggaacattctggacctgcagac

SEQ ID NO: 1617989 - DNA, 25 bp, Homo sapien
agtggttagacaagcaggtgcctgc

SEQ ID NO: 1617990 - DNA, 25 bp, Homo sapien
gaaatcatcccacaagcccagtgag

SEQ ID NO: 1617991 - DNA, 25 bp, Homo sapien
cagagagagaggctcgtggctaccc

SEQ ID NO: 1617992 - DNA, 25 bp, Homo sapien
ctggggggccccgagtctcttccag

SEQ ID NO: 1617993 - DNA, 25 bp, Homo sapien
gctggggggccccgagtctcttcca

SEQ ID NO: 1617994 - DNA, 25 bp, Homo sapien
tcaggctgaggagggcgggggtggt

SEQ ID NO: 1617995 - DNA, 25 bp, Homo sapien
caggctgaggagggcgggggtggtt

SEQ ID NO: 1617996 - DNA, 25 bp, Homo sapien
ccaatgttcaaggactgtgagtgct

SEQ ID NO: 1617997 - DNA, 25 bp, Homo sapien
tgagtgcttttcgttttcagacccc

SEQ ID NO: 1617998 - DNA, 25 bp, Homo sapien
tcagacccctggtcctgggcttaaa

SEQ ID NO: 1617999 - DNA, 25 bp, Homo sapien
ccggatcgtctctgtctgcatgtaa

SEQ ID NO: 1618000 - DNA, 25 bp, Homo sapien
tgaactcaggttatagatgccacag

SEQ ID NO: 1618001 - DNA, 25 bp, Homo sapien
ggacctcggtattaagtgactgaac

SEQ ID NO: 1618002 - DNA, 25 bp, Homo sapien
tctaataagcgagaagcagcggttc

SEQ ID NO: 1618003 - DNA, 25 bp, Homo sapien
tgccacaggacaagaggaggtcacc

SEQ ID NO: 1618004 - DNA, 25 bp, Homo sapien
gcactggcattcatatggtcccgga

SEQ ID NO: 1618005 - DNA, 25 bp, Homo sapien
agaccctccacgctgcggaagtaga

SEQ ID NO: 1618006 - DNA, 25 bp, Homo sapien
tccacgctgcggaagtagacgctgc

SEQ ID NO: 1618007 - DNA, 25 bp, Homo sapien
gatggcctgtttgagcagaccctcc

SEQ ID NO: 1618008 - DNA, 25 bp, Homo sapien
tgcttggacttgagaggcggacgtt

SEQ ID NO: 1618009 - DNA, 25 bp, Homo sapien
aacagccatatctgtgctttgggct

SEQ ID NO: 1618010 - DNA, 25 bp, Homo sapien
cttggacttgagaggcggacgttgc

SEQ ID NO: 1618011 - DNA, 25 bp, Homo sapien
ataaacagccatatctgtgctttgg

SEQ ID NO: 1618012 - DNA, 25 bp, Homo sapien
gcgtactccacagtgtagatggctc

SEQ ID NO: 1618013 - DNA, 25 bp, Homo sapien
tgcaggcgtactccacagtgtagat

SEQ ID NO: 1618014 - DNA, 25 bp, Homo sapien
tgctcctcccaacgctgcatgtctg

SEQ ID NO: 1618015 - DNA, 25 bp, Homo sapien
ccacagtgtagatggctccctggct

SEQ ID NO: 1618016 - DNA, 25 bp, Homo sapien
ttggccaggacgtagacgctctcag

SEQ ID NO: 1618017 - DNA, 25 bp, Homo sapien
ctgcagccggtacagggccacggat

SEQ ID NO: 1618018 - DNA, 25 bp, Homo sapien
ccacggatggctcgttggccaggac

SEQ ID NO: 1618019 - DNA, 25 bp, Homo sapien
gggagggagcgacgcacatgctcct

SEQ ID NO: 1618020 - DNA, 25 bp, Homo sapien
cctcgtgatccgctcaccatggcct

SEQ ID NO: 1618021 - DNA, 25 bp, Homo sapien
acctcgtgatccgctcaccatggcc

SEQ ID NO: 1618022 - DNA, 25 bp, Homo sapien
gttcaacctccatgcagcacgtgag

SEQ ID NO: 1618023 - DNA, 25 bp, Homo sapien
cgtgaggcaaactccaaatgaacaa

SEQ ID NO: 1618024 - DNA, 25 bp, Homo sapien
gaacaaatcatctattcccaccctt

SEQ ID NO: 1618025 - DNA, 25 bp, Homo sapien
gttctattataccacactgcccgca

SEQ ID NO: 1618026 - DNA, 25 bp, Homo sapien
ctttcttccccttgagctgcatctc

SEQ ID NO: 1618027 - DNA, 25 bp, Homo sapien
tgagctgcatctccggctcctccat

SEQ ID NO: 1618028 - DNA, 25 bp, Homo sapien
ttgagctgcatctccggctcctcca

SEQ ID NO: 1618029 - DNA, 25 bp, Homo sapien
tcttccccttgagctgcatctccgg

SEQ ID NO: 1618030 - DNA, 25 bp, Homo sapien
cacggctcctgttccggtgtcagag

SEQ ID NO: 1618031 - DNA, 25 bp, Homo sapien
taagcctttgagaccgcagaaggga

SEQ ID NO: 1618032 - DNA, 25 bp, Homo sapien
ccttttccttgagagacgagttggg

SEQ ID NO: 1618033 - DNA, 25 bp, Homo sapien
gctcctcagtctttgcggacaagaa

SEQ ID NO: 1618034 - DNA, 25 bp, Homo sapien
gtacgctgcccctttaagttccaga

SEQ ID NO: 1618035 - DNA, 25 bp, Homo sapien
gaacgggacggccaaggtacgctgc

SEQ ID NO: 1618036 - DNA, 25 bp, Homo sapien
gctgcccctttaagttccagacgcc

SEQ ID NO: 1618037 - DNA, 25 bp, Homo sapien
cttgttgtggaacgggacggccaag

SEQ ID NO: 1618038 - DNA, 25 bp, Homo sapien
ggtgagtcctcggttctcccagctt

SEQ ID NO: 1618039 - DNA, 25 bp, Homo sapien
caggtctctgcaagggtccctgttt

SEQ ID NO: 1618040 - DNA, 25 bp, Homo sapien
gctttgctctgtaatgcaggtctct

SEQ ID NO: 1618041 - DNA, 25 bp, Homo sapien
ttcctggggtgagtcctcggttctc

SEQ ID NO: 1618042 - DNA, 25 bp, Homo sapien
gggactcagacactcagggaacaaa

SEQ ID NO: 1618043 - DNA, 25 bp, Homo sapien
tcaagctcttccagagcaacctggt

SEQ ID NO: 1618044 - DNA, 25 bp, Homo sapien
gaacaaaatggtcagccagagctgg

SEQ ID NO: 1618045 - DNA, 25 bp, Homo sapien
cccatctcagtgcaacaggtgatcg

SEQ ID NO: 1618046 - DNA, 25 bp, Homo sapien
tagatgaccacacggccaaaaaagt

SEQ ID NO: 1618047 - DNA, 25 bp, Homo sapien
aagtcagtggcatcctcaaacgtca

SEQ ID NO: 1618048 - DNA, 25 bp, Homo sapien
tgaccacacggccaaaaaagtcagt

SEQ ID NO: 1618049 - DNA, 25 bp, Homo sapien
caggtggtagatgaccacacggcca

SEQ ID NO: 1618050 - DNA, 25 bp, Homo sapien
tgggtgagtccaaagcttccagagg

SEQ ID NO: 1618051 - DNA, 25 bp, Homo sapien
gttcaagatcacacatcagggttcc

SEQ ID NO: 1618052 - DNA, 25 bp, Homo sapien
taagcctctcacacagaacaggtgg

SEQ ID NO: 1618053 - DNA, 25 bp, Homo sapien
gagtcctagaggtcacgtgttcaag

SEQ ID NO: 1618054 - DNA, 25 bp, Homo sapien
gaaatctacaatcttgtggagagcc

SEQ ID NO: 1618055 - DNA, 25 bp, Homo sapien
ctgaagcgagttgttgtcctcaggg

SEQ ID NO: 1618056 - DNA, 25 bp, Homo sapien
gttgtcctcagggtagaaatctaca

SEQ ID NO: 1618057 - DNA, 25 bp, Homo sapien
tctacaatcttgtggagagcctgag

SEQ ID NO: 1618058 - DNA, 25 bp, Homo sapien
ggaaactccagcgtcacccactggg

SEQ ID NO: 1618059 - DNA, 25 bp, Homo sapien
aaactccagcgtcacccactgggag

SEQ ID NO: 1618060 - DNA, 25 bp, Homo sapien
agaagccaccctgaaactggatctg

SEQ ID NO: 1618061 - DNA, 25 bp, Homo sapien
caccctgaaactggatctgcagctg

SEQ ID NO: 1618062 - DNA, 25 bp, Homo sapien
gaatcaccctagagatggagggtcg

SEQ ID NO: 1618063 - DNA, 25 bp, Homo sapien
tctcaaggcatgagatctgaatctg

SEQ ID NO: 1618064 - DNA, 25 bp, Homo sapien
aaattcggcacatgttcctttcctg

SEQ ID NO: 1618065 - DNA, 25 bp, Homo sapien
acagagccctgctatgcctgtctca

SEQ ID NO: 1618066 - DNA, 25 bp, Homo sapien
acatgtctcctcatcctggtcgaaa

SEQ ID NO: 1618067 - DNA, 25 bp, Homo sapien
ttccaaactgccgagtgttgcgatt

SEQ ID NO: 1618068 - DNA, 25 bp, Homo sapien
gttgcgattcagcactgaactcacc

SEQ ID NO: 1618069 - DNA, 25 bp, Homo sapien
cctcatcctggtcgaaaagatgttt

SEQ ID NO: 1618070 - DNA, 25 bp, Homo sapien
ctgagggctcgaccccaggcttagg

SEQ ID NO: 1618071 - DNA, 25 bp, Homo sapien
ggcttagggcctcgccactgcctgt

SEQ ID NO: 1618072 - DNA, 25 bp, Homo sapien
ccagatctgtccactgagggctcga

SEQ ID NO: 1618073 - DNA, 25 bp, Homo sapien
ctggaggcaccaggatcaaggcgaa

SEQ ID NO: 1618074 - DNA, 25 bp, Homo sapien
ctgtctctggacaaaccaaagagtg

SEQ ID NO: 1618075 - DNA, 25 bp, Homo sapien
tgtctctggacaaaccaaagagtgg

SEQ ID NO: 1618076 - DNA, 25 bp, Homo sapien
actgtctctggacaaaccaaagagt

SEQ ID NO: 1618077 - DNA, 25 bp, Homo sapien
ctgtaacttgggacgagaaccgcca

SEQ ID NO: 1618078 - DNA, 25 bp, Homo sapien
tcttggagccaaatcttgggacccg

SEQ ID NO: 1618079 - DNA, 25 bp, Homo sapien
ggttccacaagacctcgcagggctt

SEQ ID NO: 1618080 - DNA, 25 bp, Homo sapien
agaggatcagggaaaccgccaatgc

SEQ ID NO: 1618081 - DNA, 25 bp, Homo sapien
gtgcatggctggatgtcgttgtaca

SEQ ID NO: 1618082 - DNA, 25 bp, Homo sapien
gcctgaccaggttgattgtgtatgt

SEQ ID NO: 1618083 - DNA, 25 bp, Homo sapien
caatgtggggccaacgtaggctctt

SEQ ID NO: 1618084 - DNA, 25 bp, Homo sapien
gcaagtgtgacttgtgtgtggccca

SEQ ID NO: 1618085 - DNA, 25 bp, Homo sapien
tcaggcagggcgaggttcgaatccc

SEQ ID NO: 1618086 - DNA, 25 bp, Homo sapien
accttgggaagcgactttgcctcct

SEQ ID NO: 1618087 - DNA, 25 bp, Homo sapien
ctctgcctctgtgcgtgaccttggg

SEQ ID NO: 1618088 - DNA, 25 bp, Homo sapien
gagaatcaggcagggcgaggttcga

SEQ ID NO: 1618089 - DNA, 25 bp, Homo sapien
tcgcggcccctttataagcactgag

SEQ ID NO: 1618090 - DNA, 25 bp, Homo sapien
agcgcagcgtcctttgtgcccggcg

SEQ ID NO: 1618091 - DNA, 25 bp, Homo sapien
ctttataagcactgaggcggcgctg

SEQ ID NO: 1618092 - DNA, 25 bp, Homo sapien
gcggagctggctgagtcggagcgca

SEQ ID NO: 1618093 - DNA, 25 bp, Homo sapien
ggttgtccgcggaatccggagacta

SEQ ID NO: 1618094 - DNA, 25 bp, Homo sapien
agaggacacccagatgccgaatggg

SEQ ID NO: 1618095 - DNA, 25 bp, Homo sapien
aagacttcgggattagagacagagc

SEQ ID NO: 1618096 - DNA, 25 bp, Homo sapien
cttgggaatgctaggtgaacagaca

SEQ ID NO: 1618097 - DNA, 25 bp, Homo sapien
aagtagtgacacctacctgcggtca

SEQ ID NO: 1618098 - DNA, 25 bp, Homo sapien
gagtgtattgctaacccttccaggt

SEQ ID NO: 1618099 - DNA, 25 bp, Homo sapien
gagatcccacgtactgcattttagg

SEQ ID NO: 1618100 - DNA, 25 bp, Homo sapien
taagcagacattggtagtgcccctg

SEQ ID NO: 1618101 - DNA, 25 bp, Homo sapien
tcactttcagcagtccgggtaaaat

SEQ ID NO: 1618102 - DNA, 25 bp, Homo sapien
tactcactttcagcagtccgggtaa

SEQ ID NO: 1618103 - DNA, 25 bp, Homo sapien
ttactcactttcagcagtccgggta

SEQ ID NO: 1618104 - DNA, 25 bp, Homo sapien
actcactttcagcagtccgggtaaa

SEQ ID NO: 1618105 - DNA, 25 bp, Homo sapien
tcaatgacccagtcaggacagagtt

SEQ ID NO: 1618106 - DNA, 25 bp, Homo sapien
catgatccactgtgcacggtcagga

SEQ ID NO: 1618107 - DNA, 25 bp, Homo sapien
agtttcccgaatttcatgccctgga

SEQ ID NO: 1618108 - DNA, 25 bp, Homo sapien
gctttgttgtatcctagaaacttcc

SEQ ID NO: 1618109 - DNA, 25 bp, Homo sapien
taacatcttatctaccaaagtgcat

SEQ ID NO: 1618110 - DNA, 25 bp, Homo sapien
caggaattacccactggctgcctca

SEQ ID NO: 1618111 - DNA, 25 bp, Homo sapien
taccaaagtgcatttatacaggaat

SEQ ID NO: 1618112 - DNA, 25 bp, Homo sapien
gaggaatgaaggaccccacttccaa

SEQ ID NO: 1618113 - DNA, 25 bp, Homo sapien
tactcctgcaggcaagacttcggga

SEQ ID NO: 1618114 - DNA, 25 bp, Homo sapien
taggtttcctagagatgacgtgaca

SEQ ID NO: 1618115 - DNA, 25 bp, Homo sapien
caaacggagggtggcttagcagctc

SEQ ID NO: 1618116 - DNA, 25 bp, Homo sapien
tggcccacaatgagaagttcctgag

SEQ ID NO: 1618117 - DNA, 25 bp, Homo sapien
gtgaacagggccccgttgtccacaa

SEQ ID NO: 1618118 - DNA, 25 bp, Homo sapien
tgaacagggccccgttgtccacaag

SEQ ID NO: 1618119 - DNA, 25 bp, Homo sapien
ttggtgaacagggccccgttgtcca

SEQ ID NO: 1618120 - DNA, 25 bp, Homo sapien
tggtgaacagggccccgttgtccac

SEQ ID NO: 1618121 - DNA, 25 bp, Homo sapien
gactccagagtttggtcaccatggc

SEQ ID NO: 1618122 - DNA, 25 bp, Homo sapien
ctcggactccagagtttggtcacca

SEQ ID NO: 1618123 - DNA, 25 bp, Homo sapien
caccatggcaacagtggtggggtcc

SEQ ID NO: 1618124 - DNA, 25 bp, Homo sapien
gtccaaaccgcctgggggtggagca

SEQ ID NO: 1618125 - DNA, 25 bp, Homo sapien
gggtgctcgcccatgaaactagagg

SEQ ID NO: 1618126 - DNA, 25 bp, Homo sapien
tgacatggatcttaccggtccccag

SEQ ID NO: 1618127 - DNA, 25 bp, Homo sapien
tgtgccctgttacccagaaactgca

SEQ ID NO: 1618128 - DNA, 25 bp, Homo sapien
tgtacggccggtctctagtcaatcc

SEQ ID NO: 1618129 - DNA, 25 bp, Homo sapien
tctcaggaggcgtggccagtcttca

SEQ ID NO: 1618130 - DNA, 25 bp, Homo sapien
tctagaccagtggtcaagcgccctg

SEQ ID NO: 1618131 - DNA, 25 bp, Homo sapien
gtactgttctgccaggactagccag

SEQ ID NO: 1618132 - DNA, 25 bp, Homo sapien
cacagttagtttgtaagggaccaca

SEQ ID NO: 1618133 - DNA, 25 bp, Homo sapien
ccgggtccggtgctcctggagcgcg

SEQ ID NO: 1618134 - DNA, 25 bp, Homo sapien
ctcctggagcgcggtagcagtagac

SEQ ID NO: 1618135 - DNA, 25 bp, Homo sapien
ccaggtgccgggtccggtgctcctg

SEQ ID NO: 1618136 - DNA, 25 bp, Homo sapien
ccaggcagcaggatcgcgcgcgccc

SEQ ID NO: 1618137 - DNA, 25 bp, Homo sapien
ccgaagagccgtcgggtggcgtccg

SEQ ID NO: 1618138 - DNA, 25 bp, Homo sapien
gccgaagagccgtcgggtggcgtcc

SEQ ID NO: 1618139 - DNA, 25 bp, Homo sapien
gggtagcgcgcactgccatcggcca

SEQ ID NO: 1618140 - DNA, 25 bp, Homo sapien
aagggtacaggtcgcagcggcttca

SEQ ID NO: 1618141 - DNA, 25 bp, Homo sapien
aacccgcggtgcagcggtctagcag

SEQ ID NO: 1618142 - DNA, 25 bp, Homo sapien
agcggcttcaggaagaacacgcgcc

SEQ ID NO: 1618143 - DNA, 25 bp, Homo sapien
cgttatggcgatacccgtagttgcg

SEQ ID NO: 1618144 - DNA, 25 bp, Homo sapien
tcgtagcgttcctcggcgttatggc

SEQ ID NO: 1618145 - DNA, 25 bp, Homo sapien
ggtattgcactgagccgtcgcgcaa

SEQ ID NO: 1618146 - DNA, 25 bp, Homo sapien
gaaggtcagcttgtatcggcctcca

SEQ ID NO: 1618147 - DNA, 25 bp, Homo sapien
tcatagcgcccgtagtcttgcagcg

SEQ ID NO: 1618148 - DNA, 25 bp, Homo sapien
cctcatagtggtagcggcagggcaa

SEQ ID NO: 1618149 - DNA, 25 bp, Homo sapien
tttgtccacttgagccggacgccgt

SEQ ID NO: 1618150 - DNA, 25 bp, Homo sapien
ggcctagtgccacgaagacgtcggt

SEQ ID NO: 1618151 - DNA, 25 bp, Homo sapien
ccagcacgtgcacgaccttcttccg

SEQ ID NO: 1618152 - DNA, 25 bp, Homo sapien
acgtgcacgaccttcttccggccac

SEQ ID NO: 1618153 - DNA, 25 bp, Homo sapien
agagcgcgccgggaccgagggccgc

SEQ ID NO: 1618154 - DNA, 25 bp, Homo sapien
gcacgaccttcttccggccacgctg

SEQ ID NO: 1618155 - DNA, 25 bp, Homo sapien
caggcggcgcaatcccggcgtctgc

SEQ ID NO: 1618156 - DNA, 25 bp, Homo sapien
ccggttaagactgggcaggtccctg

SEQ ID NO: 1618157 - DNA, 25 bp, Homo sapien
ggcccctacgcacccggactgcgct

SEQ ID NO: 1618158 - DNA, 25 bp, Homo sapien
ccgcacacccggttaagactgggca

SEQ ID NO: 1618159 - DNA, 25 bp, Homo sapien
ccatggggggatgatgggtaagttc

SEQ ID NO: 1618160 - DNA, 25 bp, Homo sapien
ggtagaagcgtttgtgtgggagttg

SEQ ID NO: 1618161 - DNA, 25 bp, Homo sapien
ggatgatgggtaagttctggaaggg

SEQ ID NO: 1618162 - DNA, 25 bp, Homo sapien
agggtttttactgaaaggatccatg

SEQ ID NO: 1618163 - DNA, 25 bp, Homo sapien
aggaacacttggtcgttggtctcca

SEQ ID NO: 1618164 - DNA, 25 bp, Homo sapien
gcaggaacacttggtcgttggtctc

SEQ ID NO: 1618165 - DNA, 25 bp, Homo sapien
aacacttggtcgttggtctccatcc

SEQ ID NO: 1618166 - DNA, 25 bp, Homo sapien
acttggtcgttggtctccatcccac

SEQ ID NO: 1618167 - DNA, 25 bp, Homo sapien
gtagggctgactgggcacgtaaaca

SEQ ID NO: 1618168 - DNA, 25 bp, Homo sapien
tgggcacgtaaacagagtcctgggt

SEQ ID NO: 1618169 - DNA, 25 bp, Homo sapien
aagactaaagacacccggagatgtc

SEQ ID NO: 1618170 - DNA, 25 bp, Homo sapien
aagacacccggagatgtccctcctg

SEQ ID NO: 1618171 - DNA, 25 bp, Homo sapien
ggaagaatgcgggccactgaaggca

SEQ ID NO: 1618172 - DNA, 25 bp, Homo sapien
tggtggaagaatgcgggccactgaa

SEQ ID NO: 1618173 - DNA, 25 bp, Homo sapien
ggctggtggaagaatgcgggccact

SEQ ID NO: 1618174 - DNA, 25 bp, Homo sapien
tggaagaatgcgggccactgaaggc

SEQ ID NO: 1618175 - DNA, 25 bp, Homo sapien
gcccagcgcatacagcagattgcac

SEQ ID NO: 1618176 - DNA, 25 bp, Homo sapien
ggtgggggcccagcgcatacagcag

SEQ ID NO: 1618177 - DNA, 25 bp, Homo sapien
gaagaagcagccccaggtgtcctca

SEQ ID NO: 1618178 - DNA, 25 bp, Homo sapien
taggtgaagggtgtgcgcaggtgca

SEQ ID NO: 1618179 - DNA, 25 bp, Homo sapien
tgcgcaggtgcatggaagcccccat

SEQ ID NO: 1618180 - DNA, 25 bp, Homo sapien
acggtaggtgaagggtgtgcgcagg

SEQ ID NO: 1618181 - DNA, 25 bp, Homo sapien
aagcccccatgtgcgagaactgtgc

SEQ ID NO: 1618182 - DNA, 25 bp, Homo sapien
gcgtgcacctctatgcccagttaat

SEQ ID NO: 1618183 - DNA, 25 bp, Homo sapien
gaggtcaggcaatccatccatcttg

SEQ ID NO: 1618184 - DNA, 25 bp, Homo sapien
cgagtagctagcacagcaggcacgt

SEQ ID NO: 1618185 - DNA, 25 bp, Homo sapien
agtagctagcacagcaggcacgtgc

SEQ ID NO: 1618186 - DNA, 25 bp, Homo sapien
gaggtcttggcacaaatcctgtgga

SEQ ID NO: 1618187 - DNA, 25 bp, Homo sapien
gggttatggccctgctaagtcactc

SEQ ID NO: 1618188 - DNA, 25 bp, Homo sapien
ccctagactagggaatcctgggata

SEQ ID NO: 1618189 - DNA, 25 bp, Homo sapien
gaaaaaggctcctagctctgactgg

SEQ ID NO: 1618190 - DNA, 25 bp, Homo sapien
ggaaggtgagagcataggcagccag

SEQ ID NO: 1618191 - DNA, 25 bp, Homo sapien
agcaaacaccaaggcccagtctgga

SEQ ID NO: 1618192 - DNA, 25 bp, Homo sapien
gtgagagcataggcagccaggccgc

SEQ ID NO: 1618193 - DNA, 25 bp, Homo sapien
aggtgagagcataggcagccaggcc

SEQ ID NO: 1618194 - DNA, 25 bp, Homo sapien
cctttctctgaaagtggcatgcgac

SEQ ID NO: 1618195 - DNA, 25 bp, Homo sapien
tgtgagatgagcagctaccccaggt

SEQ ID NO: 1618196 - DNA, 25 bp, Homo sapien
ccatgatgctcagtaagggatgggc

SEQ ID NO: 1618197 - DNA, 25 bp, Homo sapien
tggcctagccagtcggagcattcca

SEQ ID NO: 1618198 - DNA, 25 bp, Homo sapien
gcatctgtggggcaatcaagcacca

SEQ ID NO: 1618199 - DNA, 25 bp, Homo sapien
caggtatggctcatactggtagata

SEQ ID NO: 1618200 - DNA, 25 bp, Homo sapien
gctcatactggtagatatagacaaa

SEQ ID NO: 1618201 - DNA, 25 bp, Homo sapien
agggtcccgcaggtatggctcatac

SEQ ID NO: 1618202 - DNA, 25 bp, Homo sapien
aggccccggaacagagtgaagaagc

SEQ ID NO: 1618203 - DNA, 25 bp, Homo sapien
gatatatgacaagggccaggtcagc

SEQ ID NO: 1618204 - DNA, 25 bp, Homo sapien
gccggacgctgcaggagtccctttc

SEQ ID NO: 1618205 - DNA, 25 bp, Homo sapien
cccggaacagagtgaagaagccagc

SEQ ID NO: 1618206 - DNA, 25 bp, Homo sapien
catgttggcggtgcagcgggttagc

SEQ ID NO: 1618207 - DNA, 25 bp, Homo sapien
gcggtgcagcgggttagcgcccggg

SEQ ID NO: 1618208 - DNA, 25 bp, Homo sapien
gctgaagaccttcatgccagcccag

SEQ ID NO: 1618209 - DNA, 25 bp, Homo sapien
ggcaggcctgatctcggagctgtat

SEQ ID NO: 1618210 - DNA, 25 bp, Homo sapien
attctgggtcaaacccctggggctg

SEQ ID NO: 1618211 - DNA, 25 bp, Homo sapien
cattctgggtcaaacccctggggct

SEQ ID NO: 1618212 - DNA, 25 bp, Homo sapien
gaacccagccagtagagtccaaaat

SEQ ID NO: 1618213 - DNA, 25 bp, Homo sapien
gtttcctgtaaggaacaccaggatg

SEQ ID NO: 1618214 - DNA, 25 bp, Homo sapien
gagtccaaaattccggtatctcttc

SEQ ID NO: 1618215 - DNA, 25 bp, Homo sapien
tgctcatggcgaaggaacccagcca

SEQ ID NO: 1618216 - DNA, 25 bp, Homo sapien
tagtcactccgtaatctcagagccc

SEQ ID NO: 1618217 - DNA, 25 bp, Homo sapien
cacagggtggatgtaagcaatgcta

SEQ ID NO: 1618218 - DNA, 25 bp, Homo sapien
gagccctagagaggcgtcctgattt

SEQ ID NO: 1618219 - DNA, 25 bp, Homo sapien
ctacacctgagacgttccctggaac

SEQ ID NO: 1618220 - DNA, 25 bp, Homo sapien
tgaagactccgtgcgctgtgcgcag

SEQ ID NO: 1618221 - DNA, 25 bp, Homo sapien
gtagtgaacagtgccatcccagtag

SEQ ID NO: 1618222 - DNA, 25 bp, Homo sapien
ttctgcagatggcgccggccatggc

SEQ ID NO: 1618223 - DNA, 25 bp, Homo sapien
tcccagtagcagatgaagactccgt

SEQ ID NO: 1618224 - DNA, 25 bp, Homo sapien
gactcagacgggcagtgcggtaggg

SEQ ID NO: 1618225 - DNA, 25 bp, Homo sapien
gggagactcagacgggcagtgcggt

SEQ ID NO: 1618226 - DNA, 25 bp, Homo sapien
gtgggagactcagacgggcagtgcg

SEQ ID NO: 1618227 - DNA, 25 bp, Homo sapien
gcaggtgggagactcagacgggcag

SEQ ID NO: 1618228 - DNA, 25 bp, Homo sapien
atgaagcccaccacatagctgtctt

SEQ ID NO: 1618229 - DNA, 25 bp, Homo sapien
tggtgtagaactccatgaagcccac

SEQ ID NO: 1618230 - DNA, 25 bp, Homo sapien
tccttggtgtagaactccatgaagc

SEQ ID NO: 1618231 - DNA, 25 bp, Homo sapien
gaactccatgaagcccaccacatag

SEQ ID NO: 1618232 - DNA, 25 bp, Homo sapien
ggtccacaaccgaggtgaaggcgaa

SEQ ID NO: 1618233 - DNA, 25 bp, Homo sapien
ccacaaccgaggtgaaggcgaagac

SEQ ID NO: 1618234 - DNA, 25 bp, Homo sapien
cacaaccgaggtgaaggcgaagaca

SEQ ID NO: 1618235 - DNA, 25 bp, Homo sapien
caaccgaggtgaaggcgaagacagc

SEQ ID NO: 1618236 - DNA, 25 bp, Homo sapien
tcgccatgggacaagctgtagaccg

SEQ ID NO: 1618237 - DNA, 25 bp, Homo sapien
gacccaggattagggcgctcatcaa

SEQ ID NO: 1618238 - DNA, 25 bp, Homo sapien
ctgtagaccgccacgaaaagcagac

SEQ ID NO: 1618239 - DNA, 25 bp, Homo sapien
gcatagagtgggtcataggagacct

SEQ ID NO: 1618240 - DNA, 25 bp, Homo sapien
cgccctggcccctctccgcacgcac

SEQ ID NO: 1618241 - DNA, 25 bp, Homo sapien
ccccactgtccccaaggccgccctg

SEQ ID NO: 1618242 - DNA, 25 bp, Homo sapien
gccgccctggcccctctccgcacgc

SEQ ID NO: 1618243 - DNA, 25 bp, Homo sapien
ccactgtccccaaggccgccctggc

SEQ ID NO: 1618244 - DNA, 25 bp, Homo sapien
accgggagggcgctcagcgacagcg

SEQ ID NO: 1618245 - DNA, 25 bp, Homo sapien
cgccgagacgtggttgagcgcgtag

SEQ ID NO: 1618246 - DNA, 25 bp, Homo sapien
ttgagcgcgtaggacaccgggaggg

SEQ ID NO: 1618247 - DNA, 25 bp, Homo sapien
tcttgccggccagcggcgggatgtc

SEQ ID NO: 1618248 - DNA, 25 bp, Homo sapien
ggctcagccccgacgcgttctccag

SEQ ID NO: 1618249 - DNA, 25 bp, Homo sapien
cagccccgacgcgttctccagggcg

SEQ ID NO: 1618250 - DNA, 25 bp, Homo sapien
gacgcgttctccagggcgctcggct

SEQ ID NO: 1618251 - DNA, 25 bp, Homo sapien
ccgacgcgttctccagggcgctcgg

SEQ ID NO: 1618252 - DNA, 25 bp, Homo sapien
ccccgcacaaaggtcgaccccgctg

SEQ ID NO: 1618253 - DNA, 25 bp, Homo sapien
ccgcacaaaggtcgaccccgctgcg

SEQ ID NO: 1618254 - DNA, 25 bp, Homo sapien
gcacaaaggtcgaccccgctgcgcc

SEQ ID NO: 1618255 - DNA, 25 bp, Homo sapien
cgcacaaaggtcgaccccgctgcgc

SEQ ID NO: 1618256 - DNA, 25 bp, Homo sapien
gatggagactccacaggccaataag

SEQ ID NO: 1618257 - DNA, 25 bp, Homo sapien
gctttactatgctgaaaacaacttt

SEQ ID NO: 1618258 - DNA, 25 bp, Homo sapien
ccaggtgtggccaagtctccagctt

SEQ ID NO: 1618259 - DNA, 25 bp, Homo sapien
aggagagccccgagacagcatcttg

SEQ ID NO: 1618260 - DNA, 25 bp, Homo sapien
aaatgcaggccggaacattccacag

SEQ ID NO: 1618261 - DNA, 25 bp, Homo sapien
tgcaggccggaacattccacagtcc

SEQ ID NO: 1618262 - DNA, 25 bp, Homo sapien
ggccggaacattccacagtccaggg

SEQ ID NO: 1618263 - DNA, 25 bp, Homo sapien
agaaatgcaggccggaacattccac

SEQ ID NO: 1618264 - DNA, 25 bp, Homo sapien
agtagtaaggccgtctgggattgtt

SEQ ID NO: 1618265 - DNA, 25 bp, Homo sapien
tcagtagtaaggccgtctgggattg

SEQ ID NO: 1618266 - DNA, 25 bp, Homo sapien
cagtagtaaggccgtctgggattgt

SEQ ID NO: 1618267 - DNA, 25 bp, Homo sapien
ggtcaatgccgaagccagcgccgtc

SEQ ID NO: 1618268 - DNA, 25 bp, Homo sapien
tccttggagagctccgccggccggt

SEQ ID NO: 1618269 - DNA, 25 bp, Homo sapien
atcctcttgcggaacgcctcatact

SEQ ID NO: 1618270 - DNA, 25 bp, Homo sapien
gccggccggtcaatgccgaagccag

SEQ ID NO: 1618271 - DNA, 25 bp, Homo sapien
cttcatcagcatctggtagccgatg

SEQ ID NO: 1618272 - DNA, 25 bp, Homo sapien
catcagcatctggtagccgatgttc

SEQ ID NO: 1618273 - DNA, 25 bp, Homo sapien
cagcatctggtagccgatgttctcc

SEQ ID NO: 1618274 - DNA, 25 bp, Homo sapien
atctggtagccgatgttctccacag

SEQ ID NO: 1618275 - DNA, 25 bp, Homo sapien
ttgccccggcccatctttgtcagct

SEQ ID NO: 1618276 - DNA, 25 bp, Homo sapien
tttccagctcgtctggaggcaggaa

SEQ ID NO: 1618277 - DNA, 25 bp, Homo sapien
aaacttttccagctcgtctggaggc

SEQ ID NO: 1618278 - DNA, 25 bp, Homo sapien
aagtctccgatgaagtgcttgcccc

SEQ ID NO: 1618279 - DNA, 25 bp, Homo sapien
ggtgctgttggactgccttctccca

SEQ ID NO: 1618280 - DNA, 25 bp, Homo sapien
catgatcatgtcgtacatctgctgc

SEQ ID NO: 1618281 - DNA, 25 bp, Homo sapien
atcactgtcatagccgtgctggtgc

SEQ ID NO: 1618282 - DNA, 25 bp, Homo sapien
tggtcttatccatctccatgcgccg

SEQ ID NO: 1618283 - DNA, 25 bp, Homo sapien
ctgaaagctctgtgacgcccactag

SEQ ID NO: 1618284 - DNA, 25 bp, Homo sapien
tctgaaagctctgtgacgcccacta

SEQ ID NO: 1618285 - DNA, 25 bp, Homo sapien
caaagacacagggtagtcagagcct

SEQ ID NO: 1618286 - DNA, 25 bp, Homo sapien
gaagcacccggatctaagcactagg

SEQ ID NO: 1618287 - DNA, 25 bp, Homo sapien
gaaggcagctccgttgctaacagac

SEQ ID NO: 1618288 - DNA, 25 bp, Homo sapien
tgtaagcgcgcacagattcagagtc

SEQ ID NO: 1618289 - DNA, 25 bp, Homo sapien
ctgtttggaccctctgtcatctagg

SEQ ID NO: 1618290 - DNA, 25 bp, Homo sapien
gtagctagagctatagatgcacacc

SEQ ID NO: 1618291 - DNA, 25 bp, Homo sapien
ctgtctggttgctctgtttggaccc

SEQ ID NO: 1618292 - DNA, 25 bp, Homo sapien
caaattcctggactcgtgttcctcc

SEQ ID NO: 1618293 - DNA, 25 bp, Homo sapien
tacagatggagaaatcctcaataaa

SEQ ID NO: 1618294 - DNA, 25 bp, Homo sapien
gaatattcctatgaatacagatgga

SEQ ID NO: 1618295 - DNA, 25 bp, Homo sapien
aattcagcagcttatgaaaggatta

SEQ ID NO: 1618296 - DNA, 25 bp, Homo sapien
tgaaggaaagtaaccacacgatgat

SEQ ID NO: 1618297 - DNA, 25 bp, Homo sapien
gaagaagtgaagttcctcaacacaa

SEQ ID NO: 1618298 - DNA, 25 bp, Homo sapien
agaacaagaagaagtgaagttcctc

SEQ ID NO: 1618299 - DNA, 25 bp, Homo sapien
caagaagaagtgaagttcctcaaca

SEQ ID NO: 1618300 - DNA, 25 bp, Homo sapien
gaagtgaagttcctcaacacaataa

SEQ ID NO: 1618301 - DNA, 25 bp, Homo sapien
tatataataactgggcaaggctggg

SEQ ID NO: 1618302 - DNA, 25 bp, Homo sapien
tataaaagagaactcgtacaactca

SEQ ID NO: 1618303 - DNA, 25 bp, Homo sapien
caaatcacatagctgacgagggggt

SEQ ID NO: 1618304 - DNA, 25 bp, Homo sapien
tgcagtggcctgtaaacccaggact

SEQ ID NO: 1618305 - DNA, 25 bp, Homo sapien
tggccttggctttccggaactcctc

SEQ ID NO: 1618306 - DNA, 25 bp, Homo sapien
gggagctctaccttatcctcttcag

SEQ ID NO: 1618307 - DNA, 25 bp, Homo sapien
tgtcggtagtacttgtacccttggc

SEQ ID NO: 1618308 - DNA, 25 bp, Homo sapien
acttgcgcttcaggccgggatcagg

SEQ ID NO: 1618309 - DNA, 25 bp, Homo sapien
gctaacatccggtacctcaagaggg

SEQ ID NO: 1618310 - DNA, 25 bp, Homo sapien
tttggaaaagacacttgacagccgg

SEQ ID NO: 1618311 - DNA, 25 bp, Homo sapien
taagataaatagtgagcgagcagca

SEQ ID NO: 1618312 - DNA, 25 bp, Homo sapien
taatcctgggtcatggtacacgtgt

SEQ ID NO: 1618313 - DNA, 25 bp, Homo sapien
tacaatggcactcaatggtagaccc

SEQ ID NO: 1618314 - DNA, 25 bp, Homo sapien
aacaccccatctagaacacggctgg

SEQ ID NO: 1618315 - DNA, 25 bp, Homo sapien
tcacatgggtgccttctgaaggcgg

SEQ ID NO: 1618316 - DNA, 25 bp, Homo sapien
accactgttaaggtgtttcctgcca

SEQ ID NO: 1618317 - DNA, 25 bp, Homo sapien
ctgaatgcctggttctcacggttgt

SEQ ID NO: 1618318 - DNA, 25 bp, Homo sapien
ccccgtccgctatgaacctggccaa

SEQ ID NO: 1618319 - DNA, 25 bp, Homo sapien
tcacggttgttctggagggcaatgg

SEQ ID NO: 1618320 - DNA, 25 bp, Homo sapien
aatgcctggttctcacggttgttct

SEQ ID NO: 1618321 - DNA, 25 bp, Homo sapien
aagcaggctgtcagtactgggctca

SEQ ID NO: 1618322 - DNA, 25 bp, Homo sapien
actcaccacacccaacagcctaatt

SEQ ID NO: 1618323 - DNA, 25 bp, Homo sapien
agtactgggctcaactcaccacacc

SEQ ID NO: 1618324 - DNA, 25 bp, Homo sapien
ctttaagcaggctgtcagtactggg

SEQ ID NO: 1618325 - DNA, 25 bp, Homo sapien
tccaggaaccccgattccgcattgg

SEQ ID NO: 1618326 - DNA, 25 bp, Homo sapien
tctcccacccgctccgtccacctac

SEQ ID NO: 1618327 - DNA, 25 bp, Homo sapien
tggggcacggtatgtccacaggcct

SEQ ID NO: 1618328 - DNA, 25 bp, Homo sapien
cgcattggggcacggtatgtccaca

SEQ ID NO: 1618329 - DNA, 25 bp, Homo sapien
ttcctgtagtagaggaattccctgc

SEQ ID NO: 1618330 - DNA, 25 bp, Homo sapien
ttcttcctgtagtagaggaattccc

SEQ ID NO: 1618331 - DNA, 25 bp, Homo sapien
cctgtagtagaggaattccctgcta

SEQ ID NO: 1618332 - DNA, 25 bp, Homo sapien
tcttcctgtagtagaggaattccct

SEQ ID NO: 1618333 - DNA, 25 bp, Homo sapien
aaaacgcttggaacagcatccggcc

SEQ ID NO: 1618334 - DNA, 25 bp, Homo sapien
tctggtgagaatcagaaaacgcttg

SEQ ID NO: 1618335 - DNA, 25 bp, Homo sapien
gaaagcaagtctccgtgccacatgg

SEQ ID NO: 1618336 - DNA, 25 bp, Homo sapien
gcgactgtgcagcaaacgcattcaa

SEQ ID NO: 1618337 - DNA, 25 bp, Homo sapien
agtcctccatagctactttttctaa

SEQ ID NO: 1618338 - DNA, 25 bp, Homo sapien
ctccatagctactttttctaactcg

SEQ ID NO: 1618339 - DNA, 25 bp, Homo sapien
cttgtagtcctccatagctactttt

SEQ ID NO: 1618340 - DNA, 25 bp, Homo sapien
tgtagtcctccatagctactttttc

SEQ ID NO: 1618341 - DNA, 25 bp, Homo sapien
gggttcaactcacacaccccacagt

SEQ ID NO: 1618342 - DNA, 25 bp, Homo sapien
actcacacaccccacagtcaatagg

SEQ ID NO: 1618343 - DNA, 25 bp, Homo sapien
cagtactggggttcaactcacacac

SEQ ID NO: 1618344 - DNA, 25 bp, Homo sapien
cccacagtcaataggcacactctct

SEQ ID NO: 1618345 - DNA, 25 bp, Homo sapien
tatggaccacaacgacagagggggt

SEQ ID NO: 1618346 - DNA, 25 bp, Homo sapien
tggaccacaacgacagagggggtgg

SEQ ID NO: 1618347 - DNA, 25 bp, Homo sapien
ctatggaccacaacgacagaggggg

SEQ ID NO: 1618348 - DNA, 25 bp, Homo sapien
atggaccacaacgacagagggggtg

SEQ ID NO: 1618349 - DNA, 25 bp, Homo sapien
caggcacaaaacaccatgacgaggg

SEQ ID NO: 1618350 - DNA, 25 bp, Homo sapien
gtcgggcgtcccgagtccaggcaca

SEQ ID NO: 1618351 - DNA, 25 bp, Homo sapien
gcgtcccgagtccaggcacaaaaca

SEQ ID NO: 1618352 - DNA, 25 bp, Homo sapien
gggagtcggtctcactgtcttggtg

SEQ ID NO: 1618353 - DNA, 25 bp, Homo sapien
tatatacggattagcctccccactg

SEQ ID NO: 1618354 - DNA, 25 bp, Homo sapien
tcatcatagaagctctgcggccggt

SEQ ID NO: 1618355 - DNA, 25 bp, Homo sapien
aacacactgggtgggtttcgatcca

SEQ ID NO: 1618356 - DNA, 25 bp, Homo sapien
tgaggtcccgagagcattccgtgac

SEQ ID NO: 1618357 - DNA, 25 bp, Homo sapien
caacagggtacccttggagctgctg

SEQ ID NO: 1618358 - DNA, 25 bp, Homo sapien
aatgggcttcaagggccccgagatg

SEQ ID NO: 1618359 - DNA, 25 bp, Homo sapien
ccgagatggccaataccccttgtaa

SEQ ID NO: 1618360 - DNA, 25 bp, Homo sapien
caggtgcgtttctgaggccatgcag

SEQ ID NO: 1618361 - DNA, 25 bp, Homo sapien
ttagaagctcctcctagaagggatg

SEQ ID NO: 1618362 - DNA, 25 bp, Homo sapien
tgaggatgcccttttggagcaaatg

SEQ ID NO: 1618363 - DNA, 25 bp, Homo sapien
cagggactcgtcctgaatgtggaca

SEQ ID NO: 1618364 - DNA, 25 bp, Homo sapien
caagggatctcaaggctgtcatggc

SEQ ID NO: 1618365 - DNA, 25 bp, Homo sapien
gggagcagcagctcccacaacttac

SEQ ID NO: 1618366 - DNA, 25 bp, Homo sapien
ctagagcacgggcactggtggtggg

SEQ ID NO: 1618367 - DNA, 25 bp, Homo sapien
gggggagcagcagctcccacaactt

SEQ ID NO: 1618368 - DNA, 25 bp, Homo sapien
ctgctagagcacgggcactggtggt

SEQ ID NO: 1618369 - DNA, 25 bp, Homo sapien
tctccagccactgctcatagtcctc

SEQ ID NO: 1618370 - DNA, 25 bp, Homo sapien
tccagccactgctcatagtcctcct

SEQ ID NO: 1618371 - DNA, 25 bp, Homo sapien
tgatctccagccactgctcatagtc

SEQ ID NO: 1618372 - DNA, 25 bp, Homo sapien
ctttgatctccagccactgctcata

SEQ ID NO: 1618373 - DNA, 25 bp, Homo sapien
gctcttcacagggcccggcaggctg

SEQ ID NO: 1618374 - DNA, 25 bp, Homo sapien
ggcggtgcgccacgggcagctgctt

SEQ ID NO: 1618375 - DNA, 25 bp, Homo sapien
tgcttggcgtgggagtagctcttca

SEQ ID NO: 1618376 - DNA, 25 bp, Homo sapien
aggcctgtccgcctgctgatgagca

SEQ ID NO: 1618377 - DNA, 25 bp, Homo sapien
gggcgctgggcgcactggtcggggc

SEQ ID NO: 1618378 - DNA, 25 bp, Homo sapien
gcgctgggcgcactggtcggggcgt

SEQ ID NO: 1618379 - DNA, 25 bp, Homo sapien
ggaggggcgctgggcgcactggtcg

SEQ ID NO: 1618380 - DNA, 25 bp, Homo sapien
aggggcgctgggcgcactggtcggg

SEQ ID NO: 1618381 - DNA, 25 bp, Homo sapien
cagccattctagcccacactttggt

SEQ ID NO: 1618382 - DNA, 25 bp, Homo sapien
gacaggggtcccattccttgcacag

SEQ ID NO: 1618383 - DNA, 25 bp, Homo sapien
gcccactggagaaggccgggaatcc

SEQ ID NO: 1618384 - DNA, 25 bp, Homo sapien
gcccacactttggtgtccagaggac

SEQ ID NO: 1618385 - DNA, 25 bp, Homo sapien
tatcagacgtctaccaaagggaaac

SEQ ID NO: 1618386 - DNA, 25 bp, Homo sapien
tggaacaaaacgcacactatgtcgt

SEQ ID NO: 1618387 - DNA, 25 bp, Homo sapien
caaacatctgaaactacggcacaca

SEQ ID NO: 1618388 - DNA, 25 bp, Homo sapien
cacactgcttgactgagaggacaac

SEQ ID NO: 1618389 - DNA, 25 bp, Homo sapien
gatgaacactagtgccctggtggtc

SEQ ID NO: 1618390 - DNA, 25 bp, Homo sapien
cttgcacggagcaagggacatggca

SEQ ID NO: 1618391 - DNA, 25 bp, Homo sapien
gggtggtacccgatgaacactagtg

SEQ ID NO: 1618392 - DNA, 25 bp, Homo sapien
gagcacagacgtggtctgcttgcac

SEQ ID NO: 1618393 - DNA, 25 bp, Homo sapien
ggccagcccggtgtctctgaaaacc

SEQ ID NO: 1618394 - DNA, 25 bp, Homo sapien
gaaaaccctgtatgcagaagacctg

SEQ ID NO: 1618395 - DNA, 25 bp, Homo sapien
gcagcaggccccagaacctattgtt

SEQ ID NO: 1618396 - DNA, 25 bp, Homo sapien
tcctacagggtaagcacattgagtg

SEQ ID NO: 1618397 - DNA, 25 bp, Homo sapien
tgctgcaagaagctaccatcgttgg

SEQ ID NO: 1618398 - DNA, 25 bp, Homo sapien
ttgttggaaatgcaggaagagttgt

SEQ ID NO: 1618399 - DNA, 25 bp, Homo sapien
gctaccatcgttggcaaacttgttg

SEQ ID NO: 1618400 - DNA, 25 bp, Homo sapien
gaaatgcaggaagagttgtgtgcat

SEQ ID NO: 1618401 - DNA, 25 bp, Homo sapien
tacgctgctttttaaacccgcatga

SEQ ID NO: 1618402 - DNA, 25 bp, Homo sapien
catatggatgtacccaatggtgcaa

SEQ ID NO: 1618403 - DNA, 25 bp, Homo sapien
tggtgcaaaaagctcatggagtcca

SEQ ID NO: 1618404 - DNA, 25 bp, Homo sapien
gcatgacgttccaccatatggatgt

SEQ ID NO: 1618405 - DNA, 25 bp, Homo sapien
gaatctcctgaatccaacaggcgga

SEQ ID NO: 1618406 - DNA, 25 bp, Homo sapien
ctgaaataaaacaggcccggcacgg

SEQ ID NO: 1618407 - DNA, 25 bp, Homo sapien
tctgtgttgcagagttatgagtgac

SEQ ID NO: 1618408 - DNA, 25 bp, Homo sapien
aatggccgggctcagagacttatgc

SEQ ID NO: 1618409 - DNA, 25 bp, Homo sapien
ggcttcaatttcccgtttcttctga

SEQ ID NO: 1618410 - DNA, 25 bp, Homo sapien
gggctggccacctgattctgcttgg

SEQ ID NO: 1618411 - DNA, 25 bp, Homo sapien
cgtttcttctgagcgatgagctctt

SEQ ID NO: 1618412 - DNA, 25 bp, Homo sapien
ttcccgtttcttctgagcgatgagc

SEQ ID NO: 1618413 - DNA, 25 bp, Homo sapien
tccagatttagggggagcaacccca

SEQ ID NO: 1618414 - DNA, 25 bp, Homo sapien
ctggtgaaggatgttcatgttcatt

SEQ ID NO: 1618415 - DNA, 25 bp, Homo sapien
tggtgaaggatgttcatgttcattt

SEQ ID NO: 1618416 - DNA, 25 bp, Homo sapien
atgttcatttttccagatttagggg

SEQ ID NO: 1618417 - DNA, 25 bp, Homo sapien
tcccacaatgctccggcgcccctta

SEQ ID NO: 1618418 - DNA, 25 bp, Homo sapien
ccaatcccacaatgctccggcgccc

SEQ ID NO: 1618419 - DNA, 25 bp, Homo sapien
aatcccacaatgctccggcgcccct

SEQ ID NO: 1618420 - DNA, 25 bp, Homo sapien
acaatgctccggcgccccttaaggg

SEQ ID NO: 1618421 - DNA, 25 bp, Homo sapien
tacaccttcccggagcggcagtcat

SEQ ID NO: 1618422 - DNA, 25 bp, Homo sapien
ttccaggatgctttgggcggcagat

SEQ ID NO: 1618423 - DNA, 25 bp, Homo sapien
aaaatggcggctcaggcggcggcag

SEQ ID NO: 1618424 - DNA, 25 bp, Homo sapien
cctccctgtggcggcggcttgttgt

SEQ ID NO: 1618425 - DNA, 25 bp, Homo sapien
caaaatccgcctgtgcgtgcactgc

SEQ ID NO: 1618426 - DNA, 25 bp, Homo sapien
agaacagcgagcaggcgcgcagcca

SEQ ID NO: 1618427 - DNA, 25 bp, Homo sapien
ggcttcgctgagcacttccgcactt

SEQ ID NO: 1618428 - DNA, 25 bp, Homo sapien
gttctctatcaccacaccaagaaca

SEQ ID NO: 1618429 - DNA, 25 bp, Homo sapien
agtcgcgggctccttgcaagatctg

SEQ ID NO: 1618430 - DNA, 25 bp, Homo sapien
ggagtcgcgggctccttgcaagatc

SEQ ID NO: 1618431 - DNA, 25 bp, Homo sapien
gaggagtcgcgggctccttgcaaga

SEQ ID NO: 1618432 - DNA, 25 bp, Homo sapien
gagtcgcgggctccttgcaagatct

SEQ ID NO: 1618433 - DNA, 25 bp, Homo sapien
ctgaagctattagctcctcctggtt

SEQ ID NO: 1618434 - DNA, 25 bp, Homo sapien
ggtcctgaagctattagctcctcct

SEQ ID NO: 1618435 - DNA, 25 bp, Homo sapien
cagggtcctgaagctattagctcct

SEQ ID NO: 1618436 - DNA, 25 bp, Homo sapien
cacagggtcctgaagctattagctc

SEQ ID NO: 1618437 - DNA, 25 bp, Homo sapien
aaggctgcccccagccgtggatctc

SEQ ID NO: 1618438 - DNA, 25 bp, Homo sapien
ctagagatctccagccccaaggctg

SEQ ID NO: 1618439 - DNA, 25 bp, Homo sapien
ccttgccctagagatctccagcccc

SEQ ID NO: 1618440 - DNA, 25 bp, Homo sapien
ccagccgtggatctccaggcctcac

SEQ ID NO: 1618441 - DNA, 25 bp, Homo sapien
cattttccacccctgactgagtcag

SEQ ID NO: 1618442 - DNA, 25 bp, Homo sapien
tcccttcgtgaatactctctgctgc

SEQ ID NO: 1618443 - DNA, 25 bp, Homo sapien
cttcgtgaatactctctgctgcatc

SEQ ID NO: 1618444 - DNA, 25 bp, Homo sapien
actcccttcgtgaatactctctgct

SEQ ID NO: 1618445 - DNA, 25 bp, Homo sapien
ggaaatagacaccaagaggtagtag

SEQ ID NO: 1618446 - DNA, 25 bp, Homo sapien
aatagacaccaagaggtagtaggtg

SEQ ID NO: 1618447 - DNA, 25 bp, Homo sapien
tgtatatacgggaaggaaatagaca

SEQ ID NO: 1618448 - DNA, 25 bp, Homo sapien
acctggcgagtgtgtatatacggga

SEQ ID NO: 1618449 - DNA, 25 bp, Homo sapien
tgataagtactttcctgtgggtcgc

SEQ ID NO: 1618450 - DNA, 25 bp, Homo sapien
tgtcctaagaggaccaccgccatct

SEQ ID NO: 1618451 - DNA, 25 bp, Homo sapien
tctactcgagctttatggaagccaa

SEQ ID NO: 1618452 - DNA, 25 bp, Homo sapien
caccacggcgtgcatcatgttcatc

SEQ ID NO: 1618453 - DNA, 25 bp, Homo sapien
ggacaaggtcgcagaaaggcattct

SEQ ID NO: 1618454 - DNA, 25 bp, Homo sapien
gatgaacagccgaaagctggccaga

SEQ ID NO: 1618455 - DNA, 25 bp, Homo sapien
cctgtagtcacctgccggtgggcga

SEQ ID NO: 1618456 - DNA, 25 bp, Homo sapien
aaggcagacagcaagtccctgagga

SEQ ID NO: 1618457 - DNA, 25 bp, Homo sapien
ctttgttgtttcctctgtccgcttt

SEQ ID NO: 1618458 - DNA, 25 bp, Homo sapien
gagccatcccaaagacggctgccac

SEQ ID NO: 1618459 - DNA, 25 bp, Homo sapien
ttcctctgtccgctttgtgagccat

SEQ ID NO: 1618460 - DNA, 25 bp, Homo sapien
tgttgtttcctctgtccgctttgtg

SEQ ID NO: 1618461 - DNA, 25 bp, Homo sapien
tgttgagtcatttccgagtaggcta

SEQ ID NO: 1618462 - DNA, 25 bp, Homo sapien
catttccgagtaggctatgccctgt

SEQ ID NO: 1618463 - DNA, 25 bp, Homo sapien
gcccggcagactagggtcacacagc

SEQ ID NO: 1618464 - DNA, 25 bp, Homo sapien
ggcgcccggcagactagggtcacac

SEQ ID NO: 1618465 - DNA, 25 bp, Homo sapien
catctgcagttaggcacactctgtc

SEQ ID NO: 1618466 - DNA, 25 bp, Homo sapien
ccatctgcagttaggcacactctgt

SEQ ID NO: 1618467 - DNA, 25 bp, Homo sapien
tcagtgtttctgcagcgcagggttc

SEQ ID NO: 1618468 - DNA, 25 bp, Homo sapien
gtttctgcagcgcagggttcaggct

SEQ ID NO: 1618469 - DNA, 25 bp, Homo sapien
tgacatctggaagcacatccaggag

SEQ ID NO: 1618470 - DNA, 25 bp, Homo sapien
tttatggagggccagtccaccacca

SEQ ID NO: 1618471 - DNA, 25 bp, Homo sapien
caggctgcctgtcgcatttatggag

SEQ ID NO: 1618472 - DNA, 25 bp, Homo sapien
ctgggcccctgtgttcaggtgtgaa

SEQ ID NO: 1618473 - DNA, 25 bp, Homo sapien
taagtggattatccaaacccagact

SEQ ID NO: 1618474 - DNA, 25 bp, Homo sapien
ttccttggaaggcaccagtctgtgt

SEQ ID NO: 1618475 - DNA, 25 bp, Homo sapien
ctggaagtggattttgaagtggatt

SEQ ID NO: 1618476 - DNA, 25 bp, Homo sapien
aaaagactctgaccttcgtgtttga

SEQ ID NO: 1618477 - DNA, 25 bp, Homo sapien
caagttccagcatataattcaggca

SEQ ID NO: 1618478 - DNA, 25 bp, Homo sapien
tgtctcttcgaaaaagtttgccggc

SEQ ID NO: 1618479 - DNA, 25 bp, Homo sapien
ggaacatcagcgcacttgtaacaat

SEQ ID NO: 1618480 - DNA, 25 bp, Homo sapien
tggtaagtactatgacacaggtgca

SEQ ID NO: 1618481 - DNA, 25 bp, Homo sapien
ggacacaagtttcaactcgagctat

SEQ ID NO: 1618482 - DNA, 25 bp, Homo sapien
ctaaatctgtcggtggaccatgtgg

SEQ ID NO: 1618483 - DNA, 25 bp, Homo sapien
tcaactcgagctattttcttctggg

SEQ ID NO: 1618484 - DNA, 25 bp, Homo sapien
ggtggaccatgtggacacaagtttc

SEQ ID NO: 1618485 - DNA, 25 bp, Homo sapien
gatgaactatgtacgcctaagggat

SEQ ID NO: 1618486 - DNA, 25 bp, Homo sapien
tgagtccagcagttacctggtgagt

SEQ ID NO: 1618487 - DNA, 25 bp, Homo sapien
gtattactctaattagaccacaggc

SEQ ID NO: 1618488 - DNA, 25 bp, Homo sapien
gatcacatgcgtattatgagactgc

SEQ ID NO: 1618489 - DNA, 25 bp, Homo sapien
cttaccatgtcgacccggctggttt

SEQ ID NO: 1618490 - DNA, 25 bp, Homo sapien
tagtggggtttggtctatgaaagac

SEQ ID NO: 1618491 - DNA, 25 bp, Homo sapien
gggtttggtctatgaaagacaataa

SEQ ID NO: 1618492 - DNA, 25 bp, Homo sapien
gggtcttaccatgtcgacccggctg

SEQ ID NO: 1618493 - DNA, 25 bp, Homo sapien
gggtgcagatttgctttcttgaggg

SEQ ID NO: 1618494 - DNA, 25 bp, Homo sapien
gaggggtgcagatttgctttcttga

SEQ ID NO: 1618495 - DNA, 25 bp, Homo sapien
gcagatttgctttcttgaggggttt

SEQ ID NO: 1618496 - DNA, 25 bp, Homo sapien
gagagggaggggtgcagatttgctt

SEQ ID NO: 1618497 - DNA, 25 bp, Homo sapien
ctggtgcgcatgtcccgggcggtga

SEQ ID NO: 1618498 - DNA, 25 bp, Homo sapien
tccatgtgtgcggccgaggggcgca

SEQ ID NO: 1618499 - DNA, 25 bp, Homo sapien
gctccatgtgtgcggccgaggggcg

SEQ ID NO: 1618500 - DNA, 25 bp, Homo sapien
atgtcccgggcggtgacgccggcgc

SEQ ID NO: 1618501 - DNA, 25 bp, Homo sapien
gaaagtcgcggcgtcgccccgcttc

SEQ ID NO: 1618502 - DNA, 25 bp, Homo sapien
ctactccttgtattctgggagcgtc

SEQ ID NO: 1618503 - DNA, 25 bp, Homo sapien
tgtattctgggagcgtcttcttgcg

SEQ ID NO: 1618504 - DNA, 25 bp, Homo sapien
tcttcttgcgctgccctggaaagtt

SEQ ID NO: 1618505 - DNA, 25 bp, Homo sapien
tttctgtgccatcaaatggaacagg

SEQ ID NO: 1618506 - DNA, 25 bp, Homo sapien
cagggctattttctctagacctttc

SEQ ID NO: 1618507 - DNA, 25 bp, Homo sapien
atggaacaggcagggctattttctc

SEQ ID NO: 1618508 - DNA, 25 bp, Homo sapien
cttggactcggggtgtttctgtgcc

SEQ ID NO: 1618509 - DNA, 25 bp, Homo sapien
catggcaaactgtcactgtctgcat

SEQ ID NO: 1618510 - DNA, 25 bp, Homo sapien
tgacaccaccctcatggcaaactgt

SEQ ID NO: 1618511 - DNA, 25 bp, Homo sapien
gggatgacaccaccctcatggcaaa

SEQ ID NO: 1618512 - DNA, 25 bp, Homo sapien
cctcatggcaaactgtcactgtctg

SEQ ID NO: 1618513 - DNA, 25 bp, Homo sapien
ggttccgtcactctcgagacctgtg

SEQ ID NO: 1618514 - DNA, 25 bp, Homo sapien
tctcatgtagtgtccctgggtttgc

SEQ ID NO: 1618515 - DNA, 25 bp, Homo sapien
tcaggacttgcgtatcattgacgga

SEQ ID NO: 1618516 - DNA, 25 bp, Homo sapien
ggcatcgattgaattggttccgtca

SEQ ID NO: 1618517 - DNA, 25 bp, Homo sapien
tcagcaatgcccgacggacaatggg

SEQ ID NO: 1618518 - DNA, 25 bp, Homo sapien
ctagcggtaactttctccgttgagg

SEQ ID NO: 1618519 - DNA, 25 bp, Homo sapien
tttctccgttgagggtcaggtcctc

SEQ ID NO: 1618520 - DNA, 25 bp, Homo sapien
gtgaggatgcacgagcagtcccatt

SEQ ID NO: 1618521 - DNA, 25 bp, Homo sapien
acactgagagcagcgcgcttctctg

SEQ ID NO: 1618522 - DNA, 25 bp, Homo sapien
gttgtctaggcagcgctgtgcttca

SEQ ID NO: 1618523 - DNA, 25 bp, Homo sapien
tgacactttgtggttgacttgggac

SEQ ID NO: 1618524 - DNA, 25 bp, Homo sapien
gatggctgggttctcaaggaccaac

SEQ ID NO: 1618525 - DNA, 25 bp, Homo sapien
gcctcagaggcagcgactgtgctgt

SEQ ID NO: 1618526 - DNA, 25 bp, Homo sapien
ctcagaggcagcgactgtgctgtgc

SEQ ID NO: 1618527 - DNA, 25 bp, Homo sapien
cgactgtgctgtgcattggtgaagg

SEQ ID NO: 1618528 - DNA, 25 bp, Homo sapien
tggggcctcagaggcagcgactgtg

SEQ ID NO: 1618529 - DNA, 25 bp, Homo sapien
tcacatgcacgtagcgcacttgcgg

SEQ ID NO: 1618530 - DNA, 25 bp, Homo sapien
cacgtagcgcacttgcggctgaagt

SEQ ID NO: 1618531 - DNA, 25 bp, Homo sapien
cggctgaagtgggccgggccttgaa

SEQ ID NO: 1618532 - DNA, 25 bp, Homo sapien
atgcacgtagcgcacttgcggctga

SEQ ID NO: 1618533 - DNA, 25 bp, Homo sapien
tgcttccggatcaggtgctgacagc

SEQ ID NO: 1618534 - DNA, 25 bp, Homo sapien
gagcccatgcttccggatcaggtgc

SEQ ID NO: 1618535 - DNA, 25 bp, Homo sapien
cccatgcttccggatcaggtgctga

SEQ ID NO: 1618536 - DNA, 25 bp, Homo sapien
gtagagcccatgcttccggatcagg

SEQ ID NO: 1618537 - DNA, 25 bp, Homo sapien
tctgatgatacaaaccggaagtgga

SEQ ID NO: 1618538 - DNA, 25 bp, Homo sapien
gtggaagtccgaggcattttctcta

SEQ ID NO: 1618539 - DNA, 25 bp, Homo sapien
tagccctggacgtctgatgatacaa

SEQ ID NO: 1618540 - DNA, 25 bp, Homo sapien
gcctctggcccatagccctggacgt

SEQ ID NO: 1618541 - DNA, 25 bp, Homo sapien
atattgtagagcattagttttcctg

SEQ ID NO: 1618542 - DNA, 25 bp, Homo sapien
tggttttggaggtgaagccctctcg

SEQ ID NO: 1618543 - DNA, 25 bp, Homo sapien
ttggttttggaggtgaagccctctc

SEQ ID NO: 1618544 - DNA, 25 bp, Homo sapien
ggtgaagtccgctcattcccaggca

SEQ ID NO: 1618545 - DNA, 25 bp, Homo sapien
tggagggtgaagtccgctcattccc

SEQ ID NO: 1618546 - DNA, 25 bp, Homo sapien
gggtgaagtccgctcattcccaggc

SEQ ID NO: 1618547 - DNA, 25 bp, Homo sapien
gagggtgaagtccgctcattcccag

SEQ ID NO: 1618548 - DNA, 25 bp, Homo sapien
tgagtgactgcctcttgtcctgcag

SEQ ID NO: 1618549 - DNA, 25 bp, Homo sapien
ggaagtgagtgactgcctcttgtcc

SEQ ID NO: 1618550 - DNA, 25 bp, Homo sapien
aagtgagtgactgcctcttgtcctg

SEQ ID NO: 1618551 - DNA, 25 bp, Homo sapien
gtgagtgactgcctcttgtcctgca

SEQ ID NO: 1618552 - DNA, 25 bp, Homo sapien
cttcacaggcggcacctttgtttct

SEQ ID NO: 1618553 - DNA, 25 bp, Homo sapien
gcagggttgggcttgggcacaggcc

SEQ ID NO: 1618554 - DNA, 25 bp, Homo sapien
ttctatgtcgtgtgttccttgggca

SEQ ID NO: 1618555 - DNA, 25 bp, Homo sapien
cctttgtttctatgtcgtgtgttcc

SEQ ID NO: 1618556 - DNA, 25 bp, Homo sapien
ccacttcaagcacggcctcaaatga

SEQ ID NO: 1618557 - DNA, 25 bp, Homo sapien
tgtggggccacttcaagcacggcct

SEQ ID NO: 1618558 - DNA, 25 bp, Homo sapien
gcacggcctcaaatgagggcagtgt

SEQ ID NO: 1618559 - DNA, 25 bp, Homo sapien
ctggccaacagcggcgcaggtgtgg

SEQ ID NO: 1618560 - DNA, 25 bp, Homo sapien
tcatctcgtgttacccggaagggcc

SEQ ID NO: 1618561 - DNA, 25 bp, Homo sapien
tctctggaagatggcataatcccta

SEQ ID NO: 1618562 - DNA, 25 bp, Homo sapien
ggctggccctgcacaatagcgtggt

SEQ ID NO: 1618563 - DNA, 25 bp, Homo sapien
gacacagggccgatatacagaagca

SEQ ID NO: 1618564 - DNA, 25 bp, Homo sapien
gagagtctctatctagcatgtggca

SEQ ID NO: 1618565 - DNA, 25 bp, Homo sapien
ccaggtgatcctttagagcaagcca

SEQ ID NO: 1618566 - DNA, 25 bp, Homo sapien
gtgtagctgcaccataggaaccgct

SEQ ID NO: 1618567 - DNA, 25 bp, Homo sapien
tctgggccacaacaaggtaccctgg

SEQ ID NO: 1618568 - DNA, 25 bp, Homo sapien
aacgggacccaacagaggacgatgt

SEQ ID NO: 1618569 - DNA, 25 bp, Homo sapien
cagaaacgagcgcttgaacgggacc

SEQ ID NO: 1618570 - DNA, 25 bp, Homo sapien
aaatggagagaggattgttggcttc

SEQ ID NO: 1618571 - DNA, 25 bp, Homo sapien
tgacggagacatgagggtgacacct

SEQ ID NO: 1618572 - DNA, 25 bp, Homo sapien
ccagagaatgcactggctgatcatt

SEQ ID NO: 1618573 - DNA, 25 bp, Homo sapien
caggttaggccacccaccacggtga

SEQ ID NO: 1618574 - DNA, 25 bp, Homo sapien
gcactggctgatcatttgatattaa

SEQ ID NO: 1618575 - DNA, 25 bp, Homo sapien
catttgatattaagacaggttaggc

SEQ ID NO: 1618576 - DNA, 25 bp, Homo sapien
tcctagaaggcgttctggcagcgcc

SEQ ID NO: 1618577 - DNA, 25 bp, Homo sapien
cctagaaggcgttctggcagcgccg

SEQ ID NO: 1618578 - DNA, 25 bp, Homo sapien
tgcgttcctagaaggcgttctggca

SEQ ID NO: 1618579 - DNA, 25 bp, Homo sapien
gctgttgcgttcctagaaggcgttc

SEQ ID NO: 1618580 - DNA, 25 bp, Homo sapien
gctcctatccccttcaaggttgcat

SEQ ID NO: 1618581 - DNA, 25 bp, Homo sapien
atcttgcctctggaggccgtggtgc

SEQ ID NO: 1618582 - DNA, 25 bp, Homo sapien
tcactcctgcatgctcctatcccct

SEQ ID NO: 1618583 - DNA, 25 bp, Homo sapien
gcatcctgtcagagcatccatcttg

SEQ ID NO: 1618584 - DNA, 25 bp, Homo sapien
cagctcccggcaaacaactccattt

SEQ ID NO: 1618585 - DNA, 25 bp, Homo sapien
tccttctccgaggtgggaatgggac

SEQ ID NO: 1618586 - DNA, 25 bp, Homo sapien
tccatttccttctccgaggtgggaa

SEQ ID NO: 1618587 - DNA, 25 bp, Homo sapien
atttccttctccgaggtgggaatgg

SEQ ID NO: 1618588 - DNA, 25 bp, Homo sapien
gcaggctgtcggggcaaacctctct

SEQ ID NO: 1618589 - DNA, 25 bp, Homo sapien
aggctgtcggggcaaacctctctct

SEQ ID NO: 1618590 - DNA, 25 bp, Homo sapien
ggctgtcggggcaaacctctctctc

SEQ ID NO: 1618591 - DNA, 25 bp, Homo sapien
caggctgtcggggcaaacctctctc

SEQ ID NO: 1618592 - DNA, 25 bp, Homo sapien
ctgagcagctgaaagccataacctt

SEQ ID NO: 1618593 - DNA, 25 bp, Homo sapien
gccgctggttgctgagcagctgaaa

SEQ ID NO: 1618594 - DNA, 25 bp, Homo sapien
tggccgctggttgctgagcagctga

SEQ ID NO: 1618595 - DNA, 25 bp, Homo sapien
gagcagctgaaagccataacctttt

SEQ ID NO: 1618596 - DNA, 25 bp, Homo sapien
tgaaggctgcgtgtcacaaaccggt

SEQ ID NO: 1618597 - DNA, 25 bp, Homo sapien
gctgcgtgtcacaaaccggttggaa

SEQ ID NO: 1618598 - DNA, 25 bp, Homo sapien
tgtcacaaaccggttggaactggcc

SEQ ID NO: 1618599 - DNA, 25 bp, Homo sapien
tgcgtgtcacaaaccggttggaact

SEQ ID NO: 1618600 - DNA, 25 bp, Homo sapien
agcgttcaggtacagccaccacgta

SEQ ID NO: 1618601 - DNA, 25 bp, Homo sapien
tgggtggaattaggagggaccagag

SEQ ID NO: 1618602 - DNA, 25 bp, Homo sapien
caagtaaagcggttcctgagtccag

SEQ ID NO: 1618603 - DNA, 25 bp, Homo sapien
tgtccacgcccaggtctctggtgag

SEQ ID NO: 1618604 - DNA, 25 bp, Homo sapien
catctacctggtcggcctggaggag

SEQ ID NO: 1618605 - DNA, 25 bp, Homo sapien
tggagaagacgctactcgagatccc

SEQ ID NO: 1618606 - DNA, 25 bp, Homo sapien
agcgccgccaacaacgagttcatct

SEQ ID NO: 1618607 - DNA, 25 bp, Homo sapien
cgcaaacagctggagaagacgctac

SEQ ID NO: 1618608 - DNA, 25 bp, Homo sapien
tggacactgtgatgcgcatgggcaa

SEQ ID NO: 1618609 - DNA, 25 bp, Homo sapien
tcataggcagacgaggatcatcgct

SEQ ID NO: 1618610 - DNA, 25 bp, Homo sapien
gagttctgggctccactggttccaa

SEQ ID NO: 1618611 - DNA, 25 bp, Homo sapien
tggacgcaatcttaagccaccctgg

SEQ ID NO: 1618612 - DNA, 25 bp, Homo sapien
tgcaagccgtcagaatgtgggagcc

SEQ ID NO: 1618613 - DNA, 25 bp, Homo sapien
ggtttggacgcaccaggatagctat

SEQ ID NO: 1618614 - DNA, 25 bp, Homo sapien
gataagccccaagcgggttgttgta

SEQ ID NO: 1618615 - DNA, 25 bp, Homo sapien
caacagcacctggaaacggttccct

SEQ ID NO: 1618616 - DNA, 25 bp, Homo sapien
tgtactccacggacctcggtgaagc

SEQ ID NO: 1618617 - DNA, 25 bp, Homo sapien
tgctgcacatgacgttaacctaaag

SEQ ID NO: 1618618 - DNA, 25 bp, Homo sapien
tctgacgaggtctgtagcggccctt

SEQ ID NO: 1618619 - DNA, 25 bp, Homo sapien
tctcctattggacgtagaggcaggg

SEQ ID NO: 1618620 - DNA, 25 bp, Homo sapien
aagtctcttcgccatgagctctggg

SEQ ID NO: 1618621 - DNA, 25 bp, Homo sapien
caattgtctcgttttcggcagggat

SEQ ID NO: 1618622 - DNA, 25 bp, Homo sapien
ggatgggcccaagtctcttcgccat

SEQ ID NO: 1618623 - DNA, 25 bp, Homo sapien
tacttgacttttcaattgtctcgtt

SEQ ID NO: 1618624 - DNA, 25 bp, Homo sapien
tgcccgcttcggactcgcagtgttg

SEQ ID NO: 1618625 - DNA, 25 bp, Homo sapien
tcttaaaagatgtggacggcgaggc

SEQ ID NO: 1618626 - DNA, 25 bp, Homo sapien
tttggcaagtgacatccatgtgggc

SEQ ID NO: 1618627 - DNA, 25 bp, Homo sapien
tactttacgtggagacaggccaccc

SEQ ID NO: 1618628 - DNA, 25 bp, Homo sapien
gcttctccactagtccgcaaatggg

SEQ ID NO: 1618629 - DNA, 25 bp, Homo sapien
cttccccggatggagcgatcgcttc

SEQ ID NO: 1618630 - DNA, 25 bp, Homo sapien
caaatgggggccaccgttagagcca

SEQ ID NO: 1618631 - DNA, 25 bp, Homo sapien
gagcgatcgcttctccactagtccg

SEQ ID NO: 1618632 - DNA, 25 bp, Homo sapien
gcagcacgcggcagcttcgcatatt

SEQ ID NO: 1618633 - DNA, 25 bp, Homo sapien
gggaaaaagcgcatgtgcagcagca

SEQ ID NO: 1618634 - DNA, 25 bp, Homo sapien
ggattccgaacaagggcaactgcgg

SEQ ID NO: 1618635 - DNA, 25 bp, Homo sapien
cagcgagtttattgcaggttccaac

SEQ ID NO: 1618636 - DNA, 25 bp, Homo sapien
tgctccacacatcgtacttcttggg

SEQ ID NO: 1618637 - DNA, 25 bp, Homo sapien
acagctcgaggccttcgggatagag

SEQ ID NO: 1618638 - DNA, 25 bp, Homo sapien
gtgaccatgacgtagagcacgacgc

SEQ ID NO: 1618639 - DNA, 25 bp, Homo sapien
tgtccgagtcgtcgaagggcatgca

SEQ ID NO: 1618640 - DNA, 25 bp, Homo sapien
ctggcggccgaagccgaagtcggtg

SEQ ID NO: 1618641 - DNA, 25 bp, Homo sapien
cagcagcacgttttcgcacttgagg

SEQ ID NO: 1618642 - DNA, 25 bp, Homo sapien
gcaccaggtgatgatcgtgcaggta

SEQ ID NO: 1618643 - DNA, 25 bp, Homo sapien
aagtcggtgagcttgacgcggcgct

SEQ ID NO: 1618644 - DNA, 25 bp, Homo sapien
gcaaagaggtcgcgcgcctgaactc

SEQ ID NO: 1618645 - DNA, 25 bp, Homo sapien
aagaggtcgcgcgcctgaactccgg

SEQ ID NO: 1618646 - DNA, 25 bp, Homo sapien
tcgcgcgcctgaactccggggatgc

SEQ ID NO: 1618647 - DNA, 25 bp, Homo sapien
gcgcaaagaggtcgcgcgcctgaac

SEQ ID NO: 1618648 - DNA, 25 bp, Homo sapien
agttcgctcagaagtttgtctcccg

SEQ ID NO: 1618649 - DNA, 25 bp, Homo sapien
tgtgcggcccagcttataaccgagt

SEQ ID NO: 1618650 - DNA, 25 bp, Homo sapien
aactcgaagacgtgcacgatgtgcg

SEQ ID NO: 1618651 - DNA, 25 bp, Homo sapien
agtttcccgttgcacacctcgatga

SEQ ID NO: 1618652 - DNA, 25 bp, Homo sapien
tccaatctcgggtctaagccatggc

SEQ ID NO: 1618653 - DNA, 25 bp, Homo sapien
ggactccaatctcgggtctaagcca

SEQ ID NO: 1618654 - DNA, 25 bp, Homo sapien
tctcgggtctaagccatggcgcttg

SEQ ID NO: 1618655 - DNA, 25 bp, Homo sapien
ggcggccggactccaatctcgggtc

SEQ ID NO: 1618656 - DNA, 25 bp, Homo sapien
ccttgtgaagtgactgcgggcgtca

SEQ ID NO: 1618657 - DNA, 25 bp, Homo sapien
tcagtttccgatgagaggccactag

SEQ ID NO: 1618658 - DNA, 25 bp, Homo sapien
caaggtgaacgcgagggcctataat

SEQ ID NO: 1618659 - DNA, 25 bp, Homo sapien
tataatgcaagaaccaaggcgagtc

SEQ ID NO: 1618660 - DNA, 25 bp, Homo sapien
tgtgccagacagtgccctaaatacc

SEQ ID NO: 1618661 - DNA, 25 bp, Homo sapien
tgagctccctgcttccagcatctca

SEQ ID NO: 1618662 - DNA, 25 bp, Homo sapien
ttcttctccggtgtaacctgggcta

SEQ ID NO: 1618663 - DNA, 25 bp, Homo sapien
tttgtataaataccctggtcctctc

SEQ ID NO: 1618664 - DNA, 25 bp, Homo sapien
caaatcgaggacttcgaggctcgca

SEQ ID NO: 1618665 - DNA, 25 bp, Homo sapien
agtcttgtgggcagtcacccgtgca

SEQ ID NO: 1618666 - DNA, 25 bp, Homo sapien
tacaggcagaaaccgaccggaggta

SEQ ID NO: 1618667 - DNA, 25 bp, Homo sapien
tttcacaggcgcctacaaatcgagg

SEQ ID NO: 1618668 - DNA, 25 bp, Homo sapien
ggtcagctttgggtcagaccttctc

SEQ ID NO: 1618669 - DNA, 25 bp, Homo sapien
cttttgaaaccatgcctgtcagcag

SEQ ID NO: 1618670 - DNA, 25 bp, Homo sapien
gacgcagcagatatgcacagggtga

SEQ ID NO: 1618671 - DNA, 25 bp, Homo sapien
taggcaccaccggatcacatgtagc

SEQ ID NO: 1618672 - DNA, 25 bp, Homo sapien
ttctccaggttcaagccttagcctc

SEQ ID NO: 1618673 - DNA, 25 bp, Homo sapien
gcgattctccaggttcaagccttag

SEQ ID NO: 1618674 - DNA, 25 bp, Homo sapien
gattctccaggttcaagccttagcc

SEQ ID NO: 1618675 - DNA, 25 bp, Homo sapien
agcgattctccaggttcaagcctta

SEQ ID NO: 1618676 - DNA, 25 bp, Homo sapien
cagtagtcactactcgcctggcgct

SEQ ID NO: 1618677 - DNA, 25 bp, Homo sapien
caggtcaggactgcgctaagccttt

SEQ ID NO: 1618678 - DNA, 25 bp, Homo sapien
caaatgaaatagatcccgggtgagg

SEQ ID NO: 1618679 - DNA, 25 bp, Homo sapien
tgaaagccccttgtctgtccagaag

SEQ ID NO: 1618680 - DNA, 25 bp, Homo sapien
agccggccttgggtgaagccgcact

SEQ ID NO: 1618681 - DNA, 25 bp, Homo sapien
tcttccttggctaagccgggagtgt

SEQ ID NO: 1618682 - DNA, 25 bp, Homo sapien
tgtctctgtgtcgtcgctgcgcacc

SEQ ID NO: 1618683 - DNA, 25 bp, Homo sapien
gagtgtggataagaacctagggttc

SEQ ID NO: 1618684 - DNA, 25 bp, Homo sapien
aaagcaacggctggcgatacatggc

SEQ ID NO: 1618685 - DNA, 25 bp, Homo sapien
ggcggcacgttcagtaacaaagcaa

SEQ ID NO: 1618686 - DNA, 25 bp, Homo sapien
ttttctgaggtcgtcggcggcacgt

SEQ ID NO: 1618687 - DNA, 25 bp, Homo sapien
cgtttcaggccatctcgagtcgcag

SEQ ID NO: 1618688 - DNA, 25 bp, Homo sapien
ctggagttgatgctgccagggtctc

SEQ ID NO: 1618689 - DNA, 25 bp, Homo sapien
taattagatgtactggagttgatgc

SEQ ID NO: 1618690 - DNA, 25 bp, Homo sapien
tggagttgatgctgccagggtctcc

SEQ ID NO: 1618691 - DNA, 25 bp, Homo sapien
aattagatgtactggagttgatgct

SEQ ID NO: 1618692 - DNA, 25 bp, Homo sapien
ttaggcaaaggactgactggcatcg

SEQ ID NO: 1618693 - DNA, 25 bp, Homo sapien
gactgactggcatcgggtacaacaa

SEQ ID NO: 1618694 - DNA, 25 bp, Homo sapien
ctggcatcgggtacaacaagggctc

SEQ ID NO: 1618695 - DNA, 25 bp, Homo sapien
aaaggactgactggcatcgggtaca

SEQ ID NO: 1618696 - DNA, 25 bp, Homo sapien
acagacagcacaggaggcatccgtt

SEQ ID NO: 1618697 - DNA, 25 bp, Homo sapien
ccacagacagcacaggaggcatccg

SEQ ID NO: 1618698 - DNA, 25 bp, Homo sapien
agacagcacaggaggcatccgttct

SEQ ID NO: 1618699 - DNA, 25 bp, Homo sapien
gtgggacgtgtgcttcccaggacca

SEQ ID NO: 1618700 - DNA, 25 bp, Homo sapien
ggttcatccccactgactgttccca

SEQ ID NO: 1618701 - DNA, 25 bp, Homo sapien
catccccactgactgttcccagcgg

SEQ ID NO: 1618702 - DNA, 25 bp, Homo sapien
gttcatccccactgactgttcccag

SEQ ID NO: 1618703 - DNA, 25 bp, Homo sapien
ggggttcatccccactgactgttcc

SEQ ID NO: 1618704 - DNA, 25 bp, Homo sapien
agagaggccagagtccgcagggtga

SEQ ID NO: 1618705 - DNA, 25 bp, Homo sapien
agaggccagagtccgcagggtgagg

SEQ ID NO: 1618706 - DNA, 25 bp, Homo sapien
tgaggaaggcgtccccagcgctggg

SEQ ID NO: 1618707 - DNA, 25 bp, Homo sapien
ggtgaggaaggcgtccccagcgctg

SEQ ID NO: 1618708 - DNA, 25 bp, Homo sapien
gaggcctcgaatgtggctcctgccc

SEQ ID NO: 1618709 - DNA, 25 bp, Homo sapien
gcaggaggcctcgaatgtggctcct

SEQ ID NO: 1618710 - DNA, 25 bp, Homo sapien
cctccccaccacactactcatgtcc

SEQ ID NO: 1618711 - DNA, 25 bp, Homo sapien
cggggtgggcagagtcgtggcgcct

SEQ ID NO: 1618712 - DNA, 25 bp, Homo sapien
gaaagagttacacagagttgaccac

SEQ ID NO: 1618713 - DNA, 25 bp, Homo sapien
gatgcagctcagtggccgtccacat

SEQ ID NO: 1618714 - DNA, 25 bp, Homo sapien
tagtatcgccattctgtccccaaag

SEQ ID NO: 1618715 - DNA, 25 bp, Homo sapien
tatctgttggttgggatcatggcca

SEQ ID NO: 1618716 - DNA, 25 bp, Homo sapien
tatccacagccgttttacccgtgta

SEQ ID NO: 1618717 - DNA, 25 bp, Homo sapien
tacccgtgtaaatggtagcctcttc

SEQ ID NO: 1618718 - DNA, 25 bp, Homo sapien
cggagctaggtgttgacaggcagct

SEQ ID NO: 1618719 - DNA, 25 bp, Homo sapien
taaatggtagcctcttcttgaaact

SEQ ID NO: 1618720 - DNA, 25 bp, Homo sapien
gttacgttccgtgttctcttcagga

SEQ ID NO: 1618721 - DNA, 25 bp, Homo sapien
ctggcgtgtcttagaactctgctgc

SEQ ID NO: 1618722 - DNA, 25 bp, Homo sapien
ggaaggaaaacaagactgtctgagg

SEQ ID NO: 1618723 - DNA, 25 bp, Homo sapien
ccagtaactgcgatcgaatcccaaa

SEQ ID NO: 1618724 - DNA, 25 bp, Homo sapien
tctctgttccaaacatagtgtctgc

SEQ ID NO: 1618725 - DNA, 25 bp, Homo sapien
tgtcctccagacaattgttccttgg

SEQ ID NO: 1618726 - DNA, 25 bp, Homo sapien
tctcttgatccacatgggaggcccc

SEQ ID NO: 1618727 - DNA, 25 bp, Homo sapien
ccatcctggttgaagcagccctggt

SEQ ID NO: 1618728 - DNA, 25 bp, Homo sapien
cacttccgtcgcctgcttgctgaaa

SEQ ID NO: 1618729 - DNA, 25 bp, Homo sapien
gtaaaaatactcattcagcacttcc

SEQ ID NO: 1618730 - DNA, 25 bp, Homo sapien
tcttcgctggggtaagggttgttca

SEQ ID NO: 1618731 - DNA, 25 bp, Homo sapien
gggagatggtgaggccgcccttcct

SEQ ID NO: 1618732 - DNA, 25 bp, Homo sapien
ctgcaaaaacagccgccttcgtagg

SEQ ID NO: 1618733 - DNA, 25 bp, Homo sapien
ggcattaatatgctgggactccagt

SEQ ID NO: 1618734 - DNA, 25 bp, Homo sapien
cacctctagttctgagtatgatttt

SEQ ID NO: 1618735 - DNA, 25 bp, Homo sapien
gccgccttcgtaggcattaatatgc

SEQ ID NO: 1618736 - DNA, 25 bp, Homo sapien
gaatggcgccgaccatgcgctcaat

SEQ ID NO: 1618737 - DNA, 25 bp, Homo sapien
gatggcgctgaacttgccgtgaatg

SEQ ID NO: 1618738 - DNA, 25 bp, Homo sapien
agccgcgaacgcagggtcatcactg

SEQ ID NO: 1618739 - DNA, 25 bp, Homo sapien
ttggtgacgtgcgtggtgaactcac

SEQ ID NO: 1618740 - DNA, 25 bp, Homo sapien
tggggtgggagcacagacacgccgg

SEQ ID NO: 1618741 - DNA, 25 bp, Homo sapien
ggggtgggagcacagacacgccggc

SEQ ID NO: 1618742 - DNA, 25 bp, Homo sapien
ctggggtgggagcacagacacgccg

SEQ ID NO: 1618743 - DNA, 25 bp, Homo sapien
gaaagggctttcagtaacaatggac

SEQ ID NO: 1618744 - DNA, 25 bp, Homo sapien
ctgtagttcacacaccggcgggtga

SEQ ID NO: 1618745 - DNA, 25 bp, Homo sapien
tccgtgtttcgctttgacaaatgcg

SEQ ID NO: 1618746 - DNA, 25 bp, Homo sapien
tctgcgccacgaaagaaaggtggtt

SEQ ID NO: 1618747 - DNA, 25 bp, Homo sapien
tgtcggatctgggacagcttggccc

SEQ ID NO: 1618748 - DNA, 25 bp, Homo sapien
ccctgtagtcagagtgctcaatgct

SEQ ID NO: 1618749 - DNA, 25 bp, Homo sapien
tctctagctcagagtggtaaatctg

SEQ ID NO: 1618750 - DNA, 25 bp, Homo sapien
agtggtaaatctgtcggatctggga

SEQ ID NO: 1618751 - DNA, 25 bp, Homo sapien
tgttgctgtgccggccctggccacc

SEQ ID NO: 1618752 - DNA, 25 bp, Homo sapien
ttcctctcttctcgggcctgcacac

SEQ ID NO: 1618753 - DNA, 25 bp, Homo sapien
ctggtgttgctgtgccggccctggc

SEQ ID NO: 1618754 - DNA, 25 bp, Homo sapien
tggtgttgctgtgccggccctggcc

SEQ ID NO: 1618755 - DNA, 25 bp, Homo sapien
gagctgggcgtcagggggatcttcg

SEQ ID NO: 1618756 - DNA, 25 bp, Homo sapien
ttcgtcttgaatgccacggatgctt

SEQ ID NO: 1618757 - DNA, 25 bp, Homo sapien
tcttgaatgccacggatgcttacca

SEQ ID NO: 1618758 - DNA, 25 bp, Homo sapien
gatcttcgtcttgaatgccacggat

SEQ ID NO: 1618759 - DNA, 25 bp, Homo sapien
gagaccgggacaagtcacaattcat

SEQ ID NO: 1618760 - DNA, 25 bp, Homo sapien
aagagagaccgggacaagtcacaat

SEQ ID NO: 1618761 - DNA, 25 bp, Homo sapien
ctagataagagagaccgggacaagt

SEQ ID NO: 1618762 - DNA, 25 bp, Homo sapien
gagagaccgggacaagtcacaattc

SEQ ID NO: 1618763 - DNA, 25 bp, Homo sapien
aaaatgtgagcactggtgttatgtc

SEQ ID NO: 1618764 - DNA, 25 bp, Homo sapien
gagaaaatgtgagcactggtgttat

SEQ ID NO: 1618765 - DNA, 25 bp, Homo sapien
tgtgagcactggtgttatgtctgaa

SEQ ID NO: 1618766 - DNA, 25 bp, Homo sapien
gagcactggtgttatgtctgaagat

SEQ ID NO: 1618767 - DNA, 25 bp, Homo sapien
agggtcattcccagattctgccatg

SEQ ID NO: 1618768 - DNA, 25 bp, Homo sapien
caccttccattacaggcccatttga

SEQ ID NO: 1618769 - DNA, 25 bp, Homo sapien
tggcacatgcagtgtaatgagagtg

SEQ ID NO: 1618770 - DNA, 25 bp, Homo sapien
aaaggagcatggtcaatgttggcac

SEQ ID NO: 1618771 - DNA, 25 bp, Homo sapien
ccatttgaaatagggaaaggagcat

SEQ ID NO: 1618772 - DNA, 25 bp, Homo sapien
gctgtctcaaatcagcaagaagctg

SEQ ID NO: 1618773 - DNA, 25 bp, Homo sapien
tgtgccaatcaatcgatcgtggagg

SEQ ID NO: 1618774 - DNA, 25 bp, Homo sapien
aagctggcccctcaaaagcagaggc

SEQ ID NO: 1618775 - DNA, 25 bp, Homo sapien
ggcctcctgtgccaatcaatcgatc

SEQ ID NO: 1618776 - DNA, 25 bp, Homo sapien
cacagccggaatgagcgttggagac

SEQ ID NO: 1618777 - DNA, 25 bp, Homo sapien
aatctgggacagagggttgacgcct

SEQ ID NO: 1618778 - DNA, 25 bp, Homo sapien
aatgagcgttggagacggattaaac

SEQ ID NO: 1618779 - DNA, 25 bp, Homo sapien
agacggattaaactgtggaatctgg

SEQ ID NO: 1618780 - DNA, 25 bp, Homo sapien
gagctccccaaatagacaatcttca

SEQ ID NO: 1618781 - DNA, 25 bp, Homo sapien
acagagccccggtaagatccatagt

SEQ ID NO: 1618782 - DNA, 25 bp, Homo sapien
ggagtcacagataacacatttgcca

SEQ ID NO: 1618783 - DNA, 25 bp, Homo sapien
ttcaggcagccatccctattcttct

SEQ ID NO: 1618784 - DNA, 25 bp, Homo sapien
tcagatgacacaggtgggtgtgtgg

SEQ ID NO: 1618785 - DNA, 25 bp, Homo sapien
tggctgtgggtgactggtgtgccct

SEQ ID NO: 1618786 - DNA, 25 bp, Homo sapien
cctgggtccctttcatgagtgagga

SEQ ID NO: 1618787 - DNA, 25 bp, Homo sapien
ccatgagtgccggccatgagggaca

SEQ ID NO: 1618788 - DNA, 25 bp, Homo sapien
gaactgtgggttaaatcgagaagca

SEQ ID NO: 1618789 - DNA, 25 bp, Homo sapien
gttaaatcgagaagcacgccaggac

SEQ ID NO: 1618790 - DNA, 25 bp, Homo sapien
attgcccttcaagaggcggcccgtg

SEQ ID NO: 1618791 - DNA, 25 bp, Homo sapien
aggaccccggctcatgggattgccc

SEQ ID NO: 1618792 - DNA, 25 bp, Homo sapien
cgaatgctgaagcaccatcagggag

SEQ ID NO: 1618793 - DNA, 25 bp, Homo sapien
cacacgaatgctgaagcaccatcag

SEQ ID NO: 1618794 - DNA, 25 bp, Homo sapien
cacgaatgctgaagcaccatcaggg

SEQ ID NO: 1618795 - DNA, 25 bp, Homo sapien
aatgctgaagcaccatcagggagtg

SEQ ID NO: 1618796 - DNA, 25 bp, Homo sapien
cttggctcaccgcacactcttgttg

SEQ ID NO: 1618797 - DNA, 25 bp, Homo sapien
ttggctcaccgcacactcttgttgc

SEQ ID NO: 1618798 - DNA, 25 bp, Homo sapien
tcttggctcaccgcacactcttgtt

SEQ ID NO: 1618799 - DNA, 25 bp, Homo sapien
gcacgctgaacagagcaggcttcat

SEQ ID NO: 1618800 - DNA, 25 bp, Homo sapien
tgatctcacagagcacgctgaacag

SEQ ID NO: 1618801 - DNA, 25 bp, Homo sapien
caggcttcatccgatggcaattcag

SEQ ID NO: 1618802 - DNA, 25 bp, Homo sapien
ccgatggcaattcagagcatgcttt

SEQ ID NO: 1618803 - DNA, 25 bp, Homo sapien
tagactggcaagtggagattgactc

SEQ ID NO: 1618804 - DNA, 25 bp, Homo sapien
gagagctacgagaagttagactggc

SEQ ID NO: 1618805 - DNA, 25 bp, Homo sapien
tatggttggcaggataatggctccc

SEQ ID NO: 1618806 - DNA, 25 bp, Homo sapien
ctctaagggccttgaaagtcatggg

SEQ ID NO: 1618807 - DNA, 25 bp, Homo sapien
tattcactattgcaaaagtaccaag

SEQ ID NO: 1618808 - DNA, 25 bp, Homo sapien
tatattcactattgcaaaagtacca

SEQ ID NO: 1618809 - DNA, 25 bp, Homo sapien
cttatattcactattgcaaaagtac

SEQ ID NO: 1618810 - DNA, 25 bp, Homo sapien
attcactattgcaaaagtaccaagc

SEQ ID NO: 1618811 - DNA, 25 bp, Homo sapien
ctcactgccacgaccctgcgtggcc

SEQ ID NO: 1618812 - DNA, 25 bp, Homo sapien
ctcgtccaggctctggtcggtgatg

SEQ ID NO: 1618813 - DNA, 25 bp, Homo sapien
ctgtgcctcgtccaggctctggtcg

SEQ ID NO: 1618814 - DNA, 25 bp, Homo sapien
tccaggctctggtcggtgatggcca

SEQ ID NO: 1618815 - DNA, 25 bp, Homo sapien
ctggcctgtgcctcgtccaggctct

SEQ ID NO: 1618816 - DNA, 25 bp, Homo sapien
tgctgcaggacgtcgctcgtgtcga

SEQ ID NO: 1618817 - DNA, 25 bp, Homo sapien
tctgctgcaggacgtcgctcgtgtc

SEQ ID NO: 1618818 - DNA, 25 bp, Homo sapien
gatctgctgcaggacgtcgctcgtg

SEQ ID NO: 1618819 - DNA, 25 bp, Homo sapien
gtcgctcgtgtcgaggcgccgcggg

SEQ ID NO: 1618820 - DNA, 25 bp, Homo sapien
tccacagggcttaccaaggatacgc

SEQ ID NO: 1618821 - DNA, 25 bp, Homo sapien
tcataccgggtagcatggcccgaga

SEQ ID NO: 1618822 - DNA, 25 bp, Homo sapien
tgctaaagaatcagactcaggtaga

SEQ ID NO: 1618823 - DNA, 25 bp, Homo sapien
cgtggactgcttcaattctatcggg

SEQ ID NO: 1618824 - DNA, 25 bp, Homo sapien
gtggatttgttgcttgccgcgtacc

SEQ ID NO: 1618825 - DNA, 25 bp, Homo sapien
ttggttgggttgagccaggagcacc

SEQ ID NO: 1618826 - DNA, 25 bp, Homo sapien
ggagcacccacaagtcatcaggggc

SEQ ID NO: 1618827 - DNA, 25 bp, Homo sapien
gccgcgtaccgctgaagttcaaggt

SEQ ID NO: 1618828 - DNA, 25 bp, Homo sapien
tacagccaggacattgcaggactca

SEQ ID NO: 1618829 - DNA, 25 bp, Homo sapien
taggaagtacttttctacagccagg

SEQ ID NO: 1618830 - DNA, 25 bp, Homo sapien
cattgaccagggagttggcctcggc

SEQ ID NO: 1618831 - DNA, 25 bp, Homo sapien
gcatctcagcatctcggcaagagta

SEQ ID NO: 1618832 - DNA, 25 bp, Homo sapien
ccagattgccgagcaggtagtagat

SEQ ID NO: 1618833 - DNA, 25 bp, Homo sapien
tcgccgccgcacgtagaagaaaatg

SEQ ID NO: 1618834 - DNA, 25 bp, Homo sapien
gaaccagccctcaagtgaaagtcgg

SEQ ID NO: 1618835 - DNA, 25 bp, Homo sapien
gccactgttgttatagaagaagccg

SEQ ID NO: 1618836 - DNA, 25 bp, Homo sapien
agatcagtgcatgtggcacttcttg

SEQ ID NO: 1618837 - DNA, 25 bp, Homo sapien
gatcagtgcatgtggcacttcttgg

SEQ ID NO: 1618838 - DNA, 25 bp, Homo sapien
cagtgcatgtggcacttcttggaag

SEQ ID NO: 1618839 - DNA, 25 bp, Homo sapien
atcagtgcatgtggcacttcttgga

SEQ ID NO: 1618840 - DNA, 25 bp, Homo sapien
gcagtggtgaggactacggtggcct

SEQ ID NO: 1618841 - DNA, 25 bp, Homo sapien
gactacggtggcctggaaaaagcaa

SEQ ID NO: 1618842 - DNA, 25 bp, Homo sapien
cggtggcctggaaaaagcaagctcc

SEQ ID NO: 1618843 - DNA, 25 bp, Homo sapien
tgaggactacggtggcctggaaaaa

SEQ ID NO: 1618844 - DNA, 25 bp, Homo sapien
ctgcgggaagagatgagggaggatc

SEQ ID NO: 1618845 - DNA, 25 bp, Homo sapien
tttggtgccggagtcagtgtaggga

SEQ ID NO: 1618846 - DNA, 25 bp, Homo sapien
agggagcagagacccgggagcgtgt

SEQ ID NO: 1618847 - DNA, 25 bp, Homo sapien
acctgccgccaatgtgtgacccggt

SEQ ID NO: 1618848 - DNA, 25 bp, Homo sapien
gatttgggcgcgagtgcttcccaag

SEQ ID NO: 1618849 - DNA, 25 bp, Homo sapien
caataggctgttccgggtgggacgg

SEQ ID NO: 1618850 - DNA, 25 bp, Homo sapien
tctccgggacaaagacagcggttgg

SEQ ID NO: 1618851 - DNA, 25 bp, Homo sapien
cccagaagttagtcggcgggatttg

SEQ ID NO: 1618852 - DNA, 25 bp, Homo sapien
gggctcgaggcccatggcccggcga

SEQ ID NO: 1618853 - DNA, 25 bp, Homo sapien
ccagtcacgccgcagacaaggcggg

SEQ ID NO: 1618854 - DNA, 25 bp, Homo sapien
gcctccagtcacgccgcagacaagg

SEQ ID NO: 1618855 - DNA, 25 bp, Homo sapien
ctccagtcacgccgcagacaaggcg

SEQ ID NO: 1618856 - DNA, 25 bp, Homo sapien
tcagtcgcccctatttccggcgcgg

SEQ ID NO: 1618857 - DNA, 25 bp, Homo sapien
gggcggtgtcgcccggaaccgcagc

SEQ ID NO: 1618858 - DNA, 25 bp, Homo sapien
tccgggtgcgccctgtgcgggttgc

SEQ ID NO: 1618859 - DNA, 25 bp, Homo sapien
cgggagcggtagagcgtccgggtgc

SEQ ID NO: 1618860 - DNA, 25 bp, Homo sapien
gatcatcgggcgcacgctagggttt

SEQ ID NO: 1618861 - DNA, 25 bp, Homo sapien
caatcggccgccgagttacaagcca

SEQ ID NO: 1618862 - DNA, 25 bp, Homo sapien
acagccccattgtcccggttatcgg

SEQ ID NO: 1618863 - DNA, 25 bp, Homo sapien
tcggctttgccagctcgcagtatca

SEQ ID NO: 1618864 - DNA, 25 bp, Homo sapien
cacagtttattagaggccatcagac

SEQ ID NO: 1618865 - DNA, 25 bp, Homo sapien
cagtttattagaggccatcagacct

SEQ ID NO: 1618866 - DNA, 25 bp, Homo sapien
tttattagaggccatcagacctcag

SEQ ID NO: 1618867 - DNA, 25 bp, Homo sapien
tattagaggccatcagacctcaggc

SEQ ID NO: 1618868 - DNA, 25 bp, Homo sapien
tatatgggtccgtcttcacaatctg

SEQ ID NO: 1618869 - DNA, 25 bp, Homo sapien
gatgcttggcagtgacctgtgtcta

SEQ ID NO: 1618870 - DNA, 25 bp, Homo sapien
tgtcagagactagggtggaccccaa

SEQ ID NO: 1618871 - DNA, 25 bp, Homo sapien
cactgaccctgagtattgaccctga

SEQ ID NO: 1618872 - DNA, 25 bp, Homo sapien
taatctcaaaatgcttgggcagcgg

SEQ ID NO: 1618873 - DNA, 25 bp, Homo sapien
tagccgggctgtctcctgggtaatc

SEQ ID NO: 1618874 - DNA, 25 bp, Homo sapien
tggtgggttacaggcctcacaccgc

SEQ ID NO: 1618875 - DNA, 25 bp, Homo sapien
cacagcctcgctgtccaatttcgag

SEQ ID NO: 1618876 - DNA, 25 bp, Homo sapien
tctggtcactctgtggagttggaat

SEQ ID NO: 1618877 - DNA, 25 bp, Homo sapien
ccctcccccatctttggtgtcttca

SEQ ID NO: 1618878 - DNA, 25 bp, Homo sapien
actgtcccgagcactttatgaggca

SEQ ID NO: 1618879 - DNA, 25 bp, Homo sapien
cagatgcagcaagataccagcagca

SEQ ID NO: 1618880 - DNA, 25 bp, Homo sapien
tgttctagcaatccggagcagcggg

SEQ ID NO: 1618881 - DNA, 25 bp, Homo sapien
gttaaagattctacgccaggcggcc

SEQ ID NO: 1618882 - DNA, 25 bp, Homo sapien
ttactctaccttttcatgatccatt

SEQ ID NO: 1618883 - DNA, 25 bp, Homo sapien
taccttttcatgatccattaccctt

SEQ ID NO: 1618884 - DNA, 25 bp, Homo sapien
ttttcatgatccattacccttatca

SEQ ID NO: 1618885 - DNA, 25 bp, Homo sapien
tctaccttttcatgatccattaccc

SEQ ID NO: 1618886 - DNA, 25 bp, Homo sapien
tcccaaagatctgctcgtagtgcac

SEQ ID NO: 1618887 - DNA, 25 bp, Homo sapien
tgctgctccagggtactgtggtgct

SEQ ID NO: 1618888 - DNA, 25 bp, Homo sapien
ctcggtaggtgtggccgtgggatgc

SEQ ID NO: 1618889 - DNA, 25 bp, Homo sapien
ctgggagtctgggtcaaggtgcggg

SEQ ID NO: 1618890 - DNA, 25 bp, Homo sapien
ttgttttccataaatcgtgcagcca

SEQ ID NO: 1618891 - DNA, 25 bp, Homo sapien
gcaggtgacagggatggcgctggct

SEQ ID NO: 1618892 - DNA, 25 bp, Homo sapien
cacaagctgggcctgatgcccagag

SEQ ID NO: 1618893 - DNA, 25 bp, Homo sapien
gttttccataaatcgtgcagccacc

SEQ ID NO: 1618894 - DNA, 25 bp, Homo sapien
catgtcacaggtgtaagtcgtctga

SEQ ID NO: 1618895 - DNA, 25 bp, Homo sapien
tacaggatgcaagctcattggtctg

SEQ ID NO: 1618896 - DNA, 25 bp, Homo sapien
gaagttagtagtcgcatgtccaggg

SEQ ID NO: 1618897 - DNA, 25 bp, Homo sapien
aaaagggtcgcgtttcaaggctcag

SEQ ID NO: 1618898 - DNA, 25 bp, Homo sapien
tcttagccagagagatgaaggcgtc

SEQ ID NO: 1618899 - DNA, 25 bp, Homo sapien
tcagcgagcggataacctcagggct

SEQ ID NO: 1618900 - DNA, 25 bp, Homo sapien
ccgcagggtgttgtagttagagtca

SEQ ID NO: 1618901 - DNA, 25 bp, Homo sapien
cccagggtctgcatgcaaggtctta

SEQ ID NO: 1618902 - DNA, 25 bp, Homo sapien
ggacactcgagacgtcatgaggcga

SEQ ID NO: 1618903 - DNA, 25 bp, Homo sapien
gtcatgaggcgagttccccgacagc

SEQ ID NO: 1618904 - DNA, 25 bp, Homo sapien
ctcctgaagaaatcgcttgaggaca

SEQ ID NO: 1618905 - DNA, 25 bp, Homo sapien
ggccattctcgaaagcctggcacag

SEQ ID NO: 1618906 - DNA, 25 bp, Homo sapien
atccagggcacggtgttctatctca

SEQ ID NO: 1618907 - DNA, 25 bp, Homo sapien
cacttcgtgaccacaaagggtacct

SEQ ID NO: 1618908 - DNA, 25 bp, Homo sapien
gccgtgcacttcgtgaccacaaagg

SEQ ID NO: 1618909 - DNA, 25 bp, Homo sapien
tgttctatctcagccgtgcacttcg

SEQ ID NO: 1618910 - DNA, 25 bp, Homo sapien
tccaggcagcgcttgtggcaggtca

SEQ ID NO: 1618911 - DNA, 25 bp, Homo sapien
agcgcttgtggcaggtcagaaagca

SEQ ID NO: 1618912 - DNA, 25 bp, Homo sapien
ggtagctgcaggaagtcaaccccaa

SEQ ID NO: 1618913 - DNA, 25 bp, Homo sapien
aggcagcgcttgtggcaggtcagaa

SEQ ID NO: 1618914 - DNA, 25 bp, Homo sapien
tggtgggtctgagccgcgctggaca

SEQ ID NO: 1618915 - DNA, 25 bp, Homo sapien
tccgtcccgctgaccatgaaggctt

SEQ ID NO: 1618916 - DNA, 25 bp, Homo sapien
atgaaggcttcgcactcgcggcact

SEQ ID NO: 1618917 - DNA, 25 bp, Homo sapien
tggacagtgtccacttcccgaaggg

SEQ ID NO: 1618918 - DNA, 25 bp, Homo sapien
atcctgacctaccctgcttcagcct

SEQ ID NO: 1618919 - DNA, 25 bp, Homo sapien
tcctgacctaccctgcttcagcctc

SEQ ID NO: 1618920 - DNA, 25 bp, Homo sapien
cctgacctaccctgcttcagcctca

SEQ ID NO: 1618921 - DNA, 25 bp, Homo sapien
catcctgacctaccctgcttcagcc

SEQ ID NO: 1618922 - DNA, 25 bp, Homo sapien
tcagtgcctgtggacgaagccttca

SEQ ID NO: 1618923 - DNA, 25 bp, Homo sapien
gcctgtggacgaagccttcaccagc

SEQ ID NO: 1618924 - DNA, 25 bp, Homo sapien
cacccacgctgtccacatcgctgcc

SEQ ID NO: 1618925 - DNA, 25 bp, Homo sapien
tgtccacatcgctgcccggagtggg

SEQ ID NO: 1618926 - DNA, 25 bp, Homo sapien
gtgagtccagggaccgagactcgct

SEQ ID NO: 1618927 - DNA, 25 bp, Homo sapien
tgagtccagggaccgagactcgctg

SEQ ID NO: 1618928 - DNA, 25 bp, Homo sapien
agcgccagcctgtgcccggatcctc

SEQ ID NO: 1618929 - DNA, 25 bp, Homo sapien
gcctgtgcccggatcctcccaaggg

SEQ ID NO: 1618930 - DNA, 25 bp, Homo sapien
agcttctttctgatgtccagagggg

SEQ ID NO: 1618931 - DNA, 25 bp, Homo sapien
ccagcgccagcctgtgcccggatcc

SEQ ID NO: 1618932 - DNA, 25 bp, Homo sapien
cctcgggccgcagcgcccgtacaaa

SEQ ID NO: 1618933 - DNA, 25 bp, Homo sapien
ggcctcgggccgcagcgcccgtaca

SEQ ID NO: 1618934 - DNA, 25 bp, Homo sapien
ctgttcaaggagggaaggaactcct

SEQ ID NO: 1618935 - DNA, 25 bp, Homo sapien
gagggaaggaactcctggaaggaga

SEQ ID NO: 1618936 - DNA, 25 bp, Homo sapien
tggtagcgctggcccggctcaaagg

SEQ ID NO: 1618937 - DNA, 25 bp, Homo sapien
ggtagcgctggcccggctcaaaggg

SEQ ID NO: 1618938 - DNA, 25 bp, Homo sapien
cacgctctgcctgcgccccccgcag

SEQ ID NO: 1618939 - DNA, 25 bp, Homo sapien
gccccccgcagcccgaagagactca

SEQ ID NO: 1618940 - DNA, 25 bp, Homo sapien
gggccacgctctgcctgcgcccccc

SEQ ID NO: 1618941 - DNA, 25 bp, Homo sapien
cccgcagcccgaagagactcagcgt

SEQ ID NO: 1618942 - DNA, 25 bp, Homo sapien
aggtcctgctgccgcgcgttggcct

SEQ ID NO: 1618943 - DNA, 25 bp, Homo sapien
cgacacgattcgctgcttggcgatc

SEQ ID NO: 1618944 - DNA, 25 bp, Homo sapien
ctcgcggacacaggcctggtacagc

SEQ ID NO: 1618945 - DNA, 25 bp, Homo sapien
aaacaccagcttgcgcacgtgcgac

SEQ ID NO: 1618946 - DNA, 25 bp, Homo sapien
ctgctgcttgctaggtcccggcgag

SEQ ID NO: 1618947 - DNA, 25 bp, Homo sapien
acccctgggagcgtgcccgcaggtc

SEQ ID NO: 1618948 - DNA, 25 bp, Homo sapien
gcaggtcctcgctgcgttgcacata

SEQ ID NO: 1618949 - DNA, 25 bp, Homo sapien
ttgcacatactgcagctgggcgcgc

SEQ ID NO: 1618950 - DNA, 25 bp, Homo sapien
gccacttctcaatctcagtccgttt

SEQ ID NO: 1618951 - DNA, 25 bp, Homo sapien
aatctcagtccgtttggcggcgagg

SEQ ID NO: 1618952 - DNA, 25 bp, Homo sapien
ttctcaatctcagtccgtttggcgg

SEQ ID NO: 1618953 - DNA, 25 bp, Homo sapien
tgctccttgaactccttccgccact

SEQ ID NO: 1618954 - DNA, 25 bp, Homo sapien
ggttggggatggggatggagacgct

SEQ ID NO: 1618955 - DNA, 25 bp, Homo sapien
gttggggatggggatggagacgctg

SEQ ID NO: 1618956 - DNA, 25 bp, Homo sapien
ttggggatggggatggagacgctgc

SEQ ID NO: 1618957 - DNA, 25 bp, Homo sapien
caagggttggggatggggatggaga

SEQ ID NO: 1618958 - DNA, 25 bp, Homo sapien
tgcactaggcctagttaatttaaaa

SEQ ID NO: 1618959 - DNA, 25 bp, Homo sapien
gcatgtgcactaggcctagttaatt

SEQ ID NO: 1618960 - DNA, 25 bp, Homo sapien
caggcatgtgcactaggcctagtta

SEQ ID NO: 1618961 - DNA, 25 bp, Homo sapien
gcagcattgaacttgaactcttgag

SEQ ID NO: 1618962 - DNA, 25 bp, Homo sapien
caggctggacccttttctgagtcag

SEQ ID NO: 1618963 - DNA, 25 bp, Homo sapien
gcgacgttggtagtggtgccttcct

SEQ ID NO: 1618964 - DNA, 25 bp, Homo sapien
tgggcaagttcccaagcatccccgg

SEQ ID NO: 1618965 - DNA, 25 bp, Homo sapien
tttgcaattgcacaggaagcccagc

SEQ ID NO: 1618966 - DNA, 25 bp, Homo sapien
cctcatcaatgaaatggcgacgttg

SEQ ID NO: 1618967 - DNA, 25 bp, Homo sapien
gatcgtgctccagaaacagggtgta

SEQ ID NO: 1618968 - DNA, 25 bp, Homo sapien
tagatgtactgcagaggcatgtggc

SEQ ID NO: 1618969 - DNA, 25 bp, Homo sapien
gaaacagggtgtagatgtactgcag

SEQ ID NO: 1618970 - DNA, 25 bp, Homo sapien
gttcccaggctgagatcgtgctcca

SEQ ID NO: 1618971 - DNA, 25 bp, Homo sapien
cagagtggtgtaggaggatactgaa

SEQ ID NO: 1618972 - DNA, 25 bp, Homo sapien
gggaagacagagtggtgtaggagga

SEQ ID NO: 1618973 - DNA, 25 bp, Homo sapien
aagacagagtggtgtaggaggatac

SEQ ID NO: 1618974 - DNA, 25 bp, Homo sapien
gacagagtggtgtaggaggatactg

SEQ ID NO: 1618975 - DNA, 25 bp, Homo sapien
cagcttcagcgatcttcatggtgct

SEQ ID NO: 1618976 - DNA, 25 bp, Homo sapien
tgccagcttcagcgatcttcatggt

SEQ ID NO: 1618977 - DNA, 25 bp, Homo sapien
ttgccagcttcagcgatcttcatgg

SEQ ID NO: 1618978 - DNA, 25 bp, Homo sapien
atattccagggctgcgtccacaccc

SEQ ID NO: 1618979 - DNA, 25 bp, Homo sapien
agttccttggcatagcggctccagg

SEQ ID NO: 1618980 - DNA, 25 bp, Homo sapien
gaatgagccgcaagtccagttcctc

SEQ ID NO: 1618981 - DNA, 25 bp, Homo sapien
cccctttgtccgaatgagccgcaag

SEQ ID NO: 1618982 - DNA, 25 bp, Homo sapien
gagtgcaatggccctattttgcctc

SEQ ID NO: 1618983 - DNA, 25 bp, Homo sapien
ccgtgcccggcctgtgtttgatggg

SEQ ID NO: 1618984 - DNA, 25 bp, Homo sapien
tgcccggcctgtgtttgatgggttt

SEQ ID NO: 1618985 - DNA, 25 bp, Homo sapien
ggagtgcaatggccctattttgcct

SEQ ID NO: 1618986 - DNA, 25 bp, Homo sapien
gggccgctccaacagctggcttcgt

SEQ ID NO: 1618987 - DNA, 25 bp, Homo sapien
cgctccaacagctggcttcgttggt

SEQ ID NO: 1618988 - DNA, 25 bp, Homo sapien
gccgctccaacagctggcttcgttg

SEQ ID NO: 1618989 - DNA, 25 bp, Homo sapien
ggaggggccgctccaacagctggct

SEQ ID NO: 1618990 - DNA, 25 bp, Homo sapien
gggtcttgtcaggttctgggtcttc

SEQ ID NO: 1618991 - DNA, 25 bp, Homo sapien
gtcttgtcaggttctgggtcttctg

SEQ ID NO: 1618992 - DNA, 25 bp, Homo sapien
cttgtcaggttctgggtcttctgag

SEQ ID NO: 1618993 - DNA, 25 bp, Homo sapien
gctgtaggggtcttgtcaggttctg

SEQ ID NO: 1618994 - DNA, 25 bp, Homo sapien
agatttcgaggttgtccaggctccg

SEQ ID NO: 1618995 - DNA, 25 bp, Homo sapien
ttcgaggttgtccaggctccggaag

SEQ ID NO: 1618996 - DNA, 25 bp, Homo sapien
ccaggctccggaagatgtcactgta

SEQ ID NO: 1618997 - DNA, 25 bp, Homo sapien
ccccagtgagatttcgaggttgtcc

SEQ ID NO: 1618998 - DNA, 25 bp, Homo sapien
ctccctcagcagtcgtggcaccctg

SEQ ID NO: 1618999 - DNA, 25 bp, Homo sapien
ccctcagcagtcgtggcaccctgcc

SEQ ID NO: 1619000 - DNA, 25 bp, Homo sapien
cctgcccccatcacaaaaatcagaa

SEQ ID NO: 1619001 - DNA, 25 bp, Homo sapien
tccctcagcagtcgtggcaccctgc

SEQ ID NO: 1619002 - DNA, 25 bp, Homo sapien
gatggggatggggtcgcgcgccggc

SEQ ID NO: 1619003 - DNA, 25 bp, Homo sapien
atggggatggggtcgcgcgccggcg

SEQ ID NO: 1619004 - DNA, 25 bp, Homo sapien
tggggatggggtcgcgcgccggcgg

SEQ ID NO: 1619005 - DNA, 25 bp, Homo sapien
cgccgccgcctcggttccgcgtcgc

SEQ ID NO: 1619006 - DNA, 25 bp, Homo sapien
ccgccgccgcctcggttccgcgtcg

SEQ ID NO: 1619007 - DNA, 25 bp, Homo sapien
cctgagcgaccactcgaggctgcag

SEQ ID NO: 1619008 - DNA, 25 bp, Homo sapien
agccgcttgaaactgggtcgggcca

SEQ ID NO: 1619009 - DNA, 25 bp, Homo sapien
ctgagccgcttgaaactgggtcggg

SEQ ID NO: 1619010 - DNA, 25 bp, Homo sapien
agggccccctgagcgaccactcgag

SEQ ID NO: 1619011 - DNA, 25 bp, Homo sapien
tatttaccaaaggtgctggcttggg

SEQ ID NO: 1619012 - DNA, 25 bp, Homo sapien
ttatttaccaaaggtgctggcttgg

SEQ ID NO: 1619013 - DNA, 25 bp, Homo sapien
tcttccaagggcgagactgtacagc

SEQ ID NO: 1619014 - DNA, 25 bp, Homo sapien
ggcgagactgtacagccttgctgtg

SEQ ID NO: 1619015 - DNA, 25 bp, Homo sapien
tgtgggggtcccagctcagtcttcc

SEQ ID NO: 1619016 - DNA, 25 bp, Homo sapien
ctcagtcttccaagggcgagactgt

SEQ ID NO: 1619017 - DNA, 25 bp, Homo sapien
ttcagcttcggggtccccaggaaga

SEQ ID NO: 1619018 - DNA, 25 bp, Homo sapien
ggagcgccaggcagaagtccaggag

SEQ ID NO: 1619019 - DNA, 25 bp, Homo sapien
agcgccaggcagaagtccaggagca

SEQ ID NO: 1619020 - DNA, 25 bp, Homo sapien
aagaactgcaggacgcggtcggcca

SEQ ID NO: 1619021 - DNA, 25 bp, Homo sapien
taggagggacccatcaagctgagcc

SEQ ID NO: 1619022 - DNA, 25 bp, Homo sapien
gccataggagggacccatcaagctg

SEQ ID NO: 1619023 - DNA, 25 bp, Homo sapien
gagggatggtgagctggagacctgc

SEQ ID NO: 1619024 - DNA, 25 bp, Homo sapien
ctcagggtcactgccataggaggga

SEQ ID NO: 1619025 - DNA, 25 bp, Homo sapien
caggagtgaaactgccagactccac

SEQ ID NO: 1619026 - DNA, 25 bp, Homo sapien
ccagactccacaccaggggcttgtt

SEQ ID NO: 1619027 - DNA, 25 bp, Homo sapien
gagccgaggagcaggccaatgatgg

SEQ ID NO: 1619028 - DNA, 25 bp, Homo sapien
ggatgtccacgaggccaaactggct

SEQ ID NO: 1619029 - DNA, 25 bp, Homo sapien
tgagggacagatggcttcatggggt

SEQ ID NO: 1619030 - DNA, 25 bp, Homo sapien
gggatgagggacagatggcttcatg

SEQ ID NO: 1619031 - DNA, 25 bp, Homo sapien
ggatgagggacagatggcttcatgg

SEQ ID NO: 1619032 - DNA, 25 bp, Homo sapien
gatgagggacagatggcttcatggg

SEQ ID NO: 1619033 - DNA, 25 bp, Homo sapien
caaactccttgtacaagtccacgaa

SEQ ID NO: 1619034 - DNA, 25 bp, Homo sapien
tttgtaattgatggcgaaggtggcc

SEQ ID NO: 1619035 - DNA, 25 bp, Homo sapien
tgtacaagtccacgaactgctcctg

SEQ ID NO: 1619036 - DNA, 25 bp, Homo sapien
tggccatgatgtagacggtgctgtt

SEQ ID NO: 1619037 - DNA, 25 bp, Homo sapien
aaggacacatgggagtcagggcccc

SEQ ID NO: 1619038 - DNA, 25 bp, Homo sapien
ggcctagtgcccctccctggacacc

SEQ ID NO: 1619039 - DNA, 25 bp, Homo sapien
gtcatcctcctgctattctcagctg

SEQ ID NO: 1619040 - DNA, 25 bp, Homo sapien
tcagctgcagggacatcacctcctc

SEQ ID NO: 1619041 - DNA, 25 bp, Homo sapien
ctgggcctcacggtacaggtagaca

SEQ ID NO: 1619042 - DNA, 25 bp, Homo sapien
ggatggtgtacaggttgaagatgtt

SEQ ID NO: 1619043 - DNA, 25 bp, Homo sapien
gccgttctcgggagagggtcttgag

SEQ ID NO: 1619044 - DNA, 25 bp, Homo sapien
caaagaactggagcatgacggtgag

SEQ ID NO: 1619045 - DNA, 25 bp, Homo sapien
ctgagtgtcggtgtcgcacaggcct

SEQ ID NO: 1619046 - DNA, 25 bp, Homo sapien
cagcctgtcctgtgtagcctatgac

SEQ ID NO: 1619047 - DNA, 25 bp, Homo sapien
tcccgggagaccttgtgtacagcca

SEQ ID NO: 1619048 - DNA, 25 bp, Homo sapien
tctttacgccttggcctgagtgtcg

SEQ ID NO: 1619049 - DNA, 25 bp, Homo sapien
ttgatgattgttccttgcttgtggg

SEQ ID NO: 1619050 - DNA, 25 bp, Homo sapien
atgattgttccttgcttgtggggct

SEQ ID NO: 1619051 - DNA, 25 bp, Homo sapien
gatgattgttccttgcttgtggggc

SEQ ID NO: 1619052 - DNA, 25 bp, Homo sapien
tcttgatgattgttccttgcttgtg

SEQ ID NO: 1619053 - DNA, 25 bp, Homo sapien
gggatgacaattcccgtgcctatat

SEQ ID NO: 1619054 - DNA, 25 bp, Homo sapien
aggtgtggacgccaagctgtaccac

SEQ ID NO: 1619055 - DNA, 25 bp, Homo sapien
cctgggtcctgtaacttggggatga

SEQ ID NO: 1619056 - DNA, 25 bp, Homo sapien
aggggtctgggagcctcagtccaca

SEQ ID NO: 1619057 - DNA, 25 bp, Homo sapien
agcgtgcagcggccctgcttgatca

SEQ ID NO: 1619058 - DNA, 25 bp, Homo sapien
tgaacatctgtagcgtggtcaccag

SEQ ID NO: 1619059 - DNA, 25 bp, Homo sapien
tgagcgccaggatcttgaacatctg

SEQ ID NO: 1619060 - DNA, 25 bp, Homo sapien
aacttgactccctccaggtagagga

SEQ ID NO: 1619061 - DNA, 25 bp, Homo sapien
atgaagggagggggagcgggggcag

SEQ ID NO: 1619062 - DNA, 25 bp, Homo sapien
caggtgtgggtgtgggtaggggtgc

SEQ ID NO: 1619063 - DNA, 25 bp, Homo sapien
gagggggagcgggggcaggcaactc

SEQ ID NO: 1619064 - DNA, 25 bp, Homo sapien
tgtgggtgtgggtaggggtgccaag

SEQ ID NO: 1619065 - DNA, 25 bp, Homo sapien
aggtgaagggtgctgcgatgctggc

SEQ ID NO: 1619066 - DNA, 25 bp, Homo sapien
aatgggcgtactctcgtcctcgagg

SEQ ID NO: 1619067 - DNA, 25 bp, Homo sapien
tactctcgtcctcgaggtctcgcag

SEQ ID NO: 1619068 - DNA, 25 bp, Homo sapien
ccccagtttcacaatgggcgtactc

SEQ ID NO: 1619069 - DNA, 25 bp, Homo sapien
ctgcagggtagacagcaggctgtca

SEQ ID NO: 1619070 - DNA, 25 bp, Homo sapien
caggatggggtgcagcacctcccct

SEQ ID NO: 1619071 - DNA, 25 bp, Homo sapien
gatggggtgcagcacctcccctctt

SEQ ID NO: 1619072 - DNA, 25 bp, Homo sapien
gtagacagcaggctgtcagccctgg

SEQ ID NO: 1619073 - DNA, 25 bp, Homo sapien
ggggcattggccaagagcgccacac

SEQ ID NO: 1619074 - DNA, 25 bp, Homo sapien
gacaacccgctcaggggcattggcc

SEQ ID NO: 1619075 - DNA, 25 bp, Homo sapien
ccgtcgccgctcgacaacccgctca

SEQ ID NO: 1619076 - DNA, 25 bp, Homo sapien
ctcgacaacccgctcaggggcattg

SEQ ID NO: 1619077 - DNA, 25 bp, Homo sapien
gggcgcccacgtcgttggtgccatc

SEQ ID NO: 1619078 - DNA, 25 bp, Homo sapien
gtgccatccccacacatgagggtca

SEQ ID NO: 1619079 - DNA, 25 bp, Homo sapien
ccttcaggctggtgatgacaaactc

SEQ ID NO: 1619080 - DNA, 25 bp, Homo sapien
agcatgcttcagggcgcccacgtcg

SEQ ID NO: 1619081 - DNA, 25 bp, Homo sapien
acacgggcgaacacctgcacatggg

SEQ ID NO: 1619082 - DNA, 25 bp, Homo sapien
gaggcacagtgcgtactccagggcc

SEQ ID NO: 1619083 - DNA, 25 bp, Homo sapien
gccaagccgtcgcctgtgaggcaca

SEQ ID NO: 1619084 - DNA, 25 bp, Homo sapien
ttgggagccacacgggcgaacacct

SEQ ID NO: 1619085 - DNA, 25 bp, Homo sapien
ctgccgtcaatggagcgccactcgc

SEQ ID NO: 1619086 - DNA, 25 bp, Homo sapien
gtcaatggagcgccactcgcactgc

SEQ ID NO: 1619087 - DNA, 25 bp, Homo sapien
ggcagcacgatgctgccgtcaatgg

SEQ ID NO: 1619088 - DNA, 25 bp, Homo sapien
aatggagcgccactcgcactgccgg

SEQ ID NO: 1619089 - DNA, 25 bp, Homo sapien
gactccacaaagaatgtccctcagg

SEQ ID NO: 1619090 - DNA, 25 bp, Homo sapien
cctggaccatctcaagctgaagggc

SEQ ID NO: 1619091 - DNA, 25 bp, Homo sapien
ggaggcctgcgaccaatagaacaga

SEQ ID NO: 1619092 - DNA, 25 bp, Homo sapien
gggctattgcgctctccttgggaaa

SEQ ID NO: 1619093 - DNA, 25 bp, Homo sapien
catgggcagcttgccgggccaaaga

SEQ ID NO: 1619094 - DNA, 25 bp, Homo sapien
ctcgggaagggagcactcggtacat

SEQ ID NO: 1619095 - DNA, 25 bp, Homo sapien
cactcggtacatgggcagcttgccg

SEQ ID NO: 1619096 - DNA, 25 bp, Homo sapien
ggagcactcggtacatgggcagctt

SEQ ID NO: 1619097 - DNA, 25 bp, Homo sapien
aggaaacccgagctggcagtcagac

SEQ ID NO: 1619098 - DNA, 25 bp, Homo sapien
taagcgtggtaggagcagtatctgc

SEQ ID NO: 1619099 - DNA, 25 bp, Homo sapien
cagtatctgcccatgagtgcacagg

SEQ ID NO: 1619100 - DNA, 25 bp, Homo sapien
cagactatcgcctcattatggtaaa

SEQ ID NO: 1619101 - DNA, 25 bp, Homo sapien
gctgtgattagtggtgccaggcatt

SEQ ID NO: 1619102 - DNA, 25 bp, Homo sapien
ttagtggtgccaggcatttgaagac

SEQ ID NO: 1619103 - DNA, 25 bp, Homo sapien
tgctgaggcctggtacacaggtggg

SEQ ID NO: 1619104 - DNA, 25 bp, Homo sapien
acaggtgggctgttgcgatgggagc

SEQ ID NO: 1619105 - DNA, 25 bp, Homo sapien
ccacgtggcatgcagtgagcgggtt

SEQ ID NO: 1619106 - DNA, 25 bp, Homo sapien
tgagcgggttgtctcccgtgatcat

SEQ ID NO: 1619107 - DNA, 25 bp, Homo sapien
ttcaatgaagtgcagctcctgggcc

SEQ ID NO: 1619108 - DNA, 25 bp, Homo sapien
ggatcagcgtgtgggccttttcaat

SEQ ID NO: 1619109 - DNA, 25 bp, Homo sapien
tcttcccatgatgcggggagtgaag

SEQ ID NO: 1619110 - DNA, 25 bp, Homo sapien
ccccatcttcccatgatgcggggag

SEQ ID NO: 1619111 - DNA, 25 bp, Homo sapien
cccatcttcccatgatgcggggagt

SEQ ID NO: 1619112 - DNA, 25 bp, Homo sapien
catcttcccatgatgcggggagtga

SEQ ID NO: 1619113 - DNA, 25 bp, Homo sapien
gccttgagcgggcaggagaccacaa

SEQ ID NO: 1619114 - DNA, 25 bp, Homo sapien
cacaatgaagccgacgaacttgagg

SEQ ID NO: 1619115 - DNA, 25 bp, Homo sapien
ggatcacggccttggagtcagcctt

SEQ ID NO: 1619116 - DNA, 25 bp, Homo sapien
ccggtgggacgcattctggatctcc

SEQ ID NO: 1619117 - DNA, 25 bp, Homo sapien
taaattctggaaggatccgcagctg

SEQ ID NO: 1619118 - DNA, 25 bp, Homo sapien
gaaatcggagtgctgagtgccatga

SEQ ID NO: 1619119 - DNA, 25 bp, Homo sapien
gaaggccctgttcccgtagtgggca

SEQ ID NO: 1619120 - DNA, 25 bp, Homo sapien
tcctgcttgcggacatgggcacatc

SEQ ID NO: 1619121 - DNA, 25 bp, Homo sapien
cgggccaggcacatggtgaaggcag

SEQ ID NO: 1619122 - DNA, 25 bp, Homo sapien
gtgaaggcagggggagcctgggccc

SEQ ID NO: 1619123 - DNA, 25 bp, Homo sapien
tgaaggcagggggagcctgggcccg

SEQ ID NO: 1619124 - DNA, 25 bp, Homo sapien
gacgggccaggcacatggtgaaggc

SEQ ID NO: 1619125 - DNA, 25 bp, Homo sapien
cttcccgggagatctcggtgtggat

SEQ ID NO: 1619126 - DNA, 25 bp, Homo sapien
ttgtaccccagcgccaggacgcggg

SEQ ID NO: 1619127 - DNA, 25 bp, Homo sapien
tggtgagtgaggtgtcccagctcct

SEQ ID NO: 1619128 - DNA, 25 bp, Homo sapien
tgtggtggtagtcgggcgggcactg

SEQ ID NO: 1619129 - DNA, 25 bp, Homo sapien
tctcatacgaggcaagcacggacat

SEQ ID NO: 1619130 - DNA, 25 bp, Homo sapien
ttcacggccgcgatgtagcagaggt

SEQ ID NO: 1619131 - DNA, 25 bp, Homo sapien
cttcacggccgcgatgtagcagagg

SEQ ID NO: 1619132 - DNA, 25 bp, Homo sapien
gagcccagcttctcatacgaggcaa

SEQ ID NO: 1619133 - DNA, 25 bp, Homo sapien
ttcagcccctgagttttaatacttc

SEQ ID NO: 1619134 - DNA, 25 bp, Homo sapien
cagcccctgagttttaatacttcgg

SEQ ID NO: 1619135 - DNA, 25 bp, Homo sapien
atgaaagcgctggtgaattttcagc

SEQ ID NO: 1619136 - DNA, 25 bp, Homo sapien
tggcaaaatgaaagcgctggtgaat

SEQ ID NO: 1619137 - DNA, 25 bp, Homo sapien
gtgtgtttctacagggatgctggac

SEQ ID NO: 1619138 - DNA, 25 bp, Homo sapien
acgagggtgccgtcgtccagctgca

SEQ ID NO: 1619139 - DNA, 25 bp, Homo sapien
tctagagggtcacccacgagggtgc

SEQ ID NO: 1619140 - DNA, 25 bp, Homo sapien
ccagctgcatgagcgagtggcacga

SEQ ID NO: 1619141 - DNA, 25 bp, Homo sapien
gtcaaagcagcacacctcgaccttg

SEQ ID NO: 1619142 - DNA, 25 bp, Homo sapien
gtcaacgtccccgtcttgtcaaagc

SEQ ID NO: 1619143 - DNA, 25 bp, Homo sapien
cttgccagcaaaggggatccggaag

SEQ ID NO: 1619144 - DNA, 25 bp, Homo sapien
gcaccaccaggctgtcactggtcaa

SEQ ID NO: 1619145 - DNA, 25 bp, Homo sapien
ccagcccactcggcaccccatccca

SEQ ID NO: 1619146 - DNA, 25 bp, Homo sapien
agcccactcggcaccccatcccatt

SEQ ID NO: 1619147 - DNA, 25 bp, Homo sapien
cagcccactcggcaccccatcccat

SEQ ID NO: 1619148 - DNA, 25 bp, Homo sapien
gcccactcggcaccccatcccattt

SEQ ID NO: 1619149 - DNA, 25 bp, Homo sapien
agctcaggaggcacgaccgaggtga

SEQ ID NO: 1619150 - DNA, 25 bp, Homo sapien
tgttgacggccagggacagctcgat

SEQ ID NO: 1619151 - DNA, 25 bp, Homo sapien
gaaacagcttgtagcggttccggct

SEQ ID NO: 1619152 - DNA, 25 bp, Homo sapien
tgaggatcagggtgcactccagaaa

SEQ ID NO: 1619153 - DNA, 25 bp, Homo sapien
gtgggcgcaggggaccacagaggcc

SEQ ID NO: 1619154 - DNA, 25 bp, Homo sapien
ggggaccacagaggccgtggcgctt

SEQ ID NO: 1619155 - DNA, 25 bp, Homo sapien
gggcgcaggggaccacagaggccgt

SEQ ID NO: 1619156 - DNA, 25 bp, Homo sapien
ggtgggcgcaggggaccacagaggc

SEQ ID NO: 1619157 - DNA, 25 bp, Homo sapien
tgaaggtctccaggttgttcgcagt

SEQ ID NO: 1619158 - DNA, 25 bp, Homo sapien
tccatacataggcagctgcagcgat

SEQ ID NO: 1619159 - DNA, 25 bp, Homo sapien
aggttgttcgcagtcaccctcttga

SEQ ID NO: 1619160 - DNA, 25 bp, Homo sapien
ttgaccccgaagaggatggtgcgca

SEQ ID NO: 1619161 - DNA, 25 bp, Homo sapien
aggacgtaggccacgcacccgctgt

SEQ ID NO: 1619162 - DNA, 25 bp, Homo sapien
aatccggtccgcaggacgtaggcca

SEQ ID NO: 1619163 - DNA, 25 bp, Homo sapien
ctgggatgtgttgaatccggtccgc

SEQ ID NO: 1619164 - DNA, 25 bp, Homo sapien
gatgtgttgaatccggtccgcagga

SEQ ID NO: 1619165 - DNA, 25 bp, Homo sapien
cccggtctgggctgaggtcttcgat

SEQ ID NO: 1619166 - DNA, 25 bp, Homo sapien
agccgggaatcagcctggaggtcca

SEQ ID NO: 1619167 - DNA, 25 bp, Homo sapien
ccccgaagatgacgtgcagccggga

SEQ ID NO: 1619168 - DNA, 25 bp, Homo sapien
ttggtgcccccgaagatgacgtgca

SEQ ID NO: 1619169 - DNA, 25 bp, Homo sapien
gtctacgatgcagcggcctcgcagc

SEQ ID NO: 1619170 - DNA, 25 bp, Homo sapien
atctgtggcacggactcccccgtga

SEQ ID NO: 1619171 - DNA, 25 bp, Homo sapien
agcatggcctcgtctacgatgcagc

SEQ ID NO: 1619172 - DNA, 25 bp, Homo sapien
ctcgcagcagaagcacgtcacatgg

SEQ ID NO: 1619173 - DNA, 25 bp, Homo sapien
acgatgtcccctggtacgatctcat

SEQ ID NO: 1619174 - DNA, 25 bp, Homo sapien
gacgatgtcccctggtacgatctca

SEQ ID NO: 1619175 - DNA, 25 bp, Homo sapien
tgtcccctggtacgatctcatcact

SEQ ID NO: 1619176 - DNA, 25 bp, Homo sapien
gatgtcccctggtacgatctcatca

SEQ ID NO: 1619177 - DNA, 25 bp, Homo sapien
gcgtaaagacgctgtagtaccagta

SEQ ID NO: 1619178 - DNA, 25 bp, Homo sapien
ggatctccgacatgttccgcatctg

SEQ ID NO: 1619179 - DNA, 25 bp, Homo sapien
tgttgcccatcttccggatctccga

SEQ ID NO: 1619180 - DNA, 25 bp, Homo sapien
tcgaacgccaccagcatggatagcg

SEQ ID NO: 1619181 - DNA, 25 bp, Homo sapien
tggctctctccttgaaaagctccga

SEQ ID NO: 1619182 - DNA, 25 bp, Homo sapien
tgaaaagctccgagaagtcaggcac

SEQ ID NO: 1619183 - DNA, 25 bp, Homo sapien
ttgaaaagctccgagaagtcaggca

SEQ ID NO: 1619184 - DNA, 25 bp, Homo sapien
gaaaagctccgagaagtcaggcacc

SEQ ID NO: 1619185 - DNA, 25 bp, Homo sapien
acagcaagaccttctatttacaaaa

SEQ ID NO: 1619186 - DNA, 25 bp, Homo sapien
tctccagggcatcgtaggaatactt

SEQ ID NO: 1619187 - DNA, 25 bp, Homo sapien
cttgatcttctggaattcgaaggac

SEQ ID NO: 1619188 - DNA, 25 bp, Homo sapien
tatgagaaggcgtttcccacaggaa

SEQ ID NO: 1619189 - DNA, 25 bp, Homo sapien
ggaagcctctgttgctctgatagta

SEQ ID NO: 1619190 - DNA, 25 bp, Homo sapien
gttgggggttggcaccaccttcaca

SEQ ID NO: 1619191 - DNA, 25 bp, Homo sapien
agggccacgagctccgtggagccat

SEQ ID NO: 1619192 - DNA, 25 bp, Homo sapien
gccacgagctccgtggagccattgt

SEQ ID NO: 1619193 - DNA, 25 bp, Homo sapien
caaaggtcgctttgctggggtcgta

SEQ ID NO: 1619194 - DNA, 25 bp, Homo sapien
tgatggctgttcagctcctcccact

SEQ ID NO: 1619195 - DNA, 25 bp, Homo sapien
accaactcctccgacgacacttggt

SEQ ID NO: 1619196 - DNA, 25 bp, Homo sapien
cagggaagctcacagtcaccaactc

SEQ ID NO: 1619197 - DNA, 25 bp, Homo sapien
gggaagctcacagtcaccaactcct

SEQ ID NO: 1619198 - DNA, 25 bp, Homo sapien
tcctccgacgacacttggtcactca

SEQ ID NO: 1619199 - DNA, 25 bp, Homo sapien
caagcacgagcagcgcagcttcggg

SEQ ID NO: 1619200 - DNA, 25 bp, Homo sapien
aatgccccgagaggacagtgagcgc

SEQ ID NO: 1619201 - DNA, 25 bp, Homo sapien
gcgcaatgcgcgtgcacagaccaat

SEQ ID NO: 1619202 - DNA, 25 bp, Homo sapien
gcgtgcgcgaggcagatggtggcaa

SEQ ID NO: 1619203 - DNA, 25 bp, Homo sapien
gtcaccgttcgctatgagcgccggc

SEQ ID NO: 1619204 - DNA, 25 bp, Homo sapien
accagctcgtcaccgttcgctatga

SEQ ID NO: 1619205 - DNA, 25 bp, Homo sapien
gcagggcaccgcgttgcccaccgcc

SEQ ID NO: 1619206 - DNA, 25 bp, Homo sapien
cgtcaggccggaccccgcaaggccg

SEQ ID NO: 1619207 - DNA, 25 bp, Homo sapien
tttacttccggtaagccctgagcgc

SEQ ID NO: 1619208 - DNA, 25 bp, Homo sapien
gactggaagacctaacggtgcctgc

SEQ ID NO: 1619209 - DNA, 25 bp, Homo sapien
catggcagcctggactaggaagagc

SEQ ID NO: 1619210 - DNA, 25 bp, Homo sapien
gagaccggaaaagacaaggccggca

SEQ ID NO: 1619211 - DNA, 25 bp, Homo sapien
tgaaatcagatctcacgcgctggag

SEQ ID NO: 1619212 - DNA, 25 bp, Homo sapien
cgcaggttaccttcggacacatgaa

SEQ ID NO: 1619213 - DNA, 25 bp, Homo sapien
ggaggaaaactctacgaatgtcaaa

SEQ ID NO: 1619214 - DNA, 25 bp, Homo sapien
aagtctttagatgtcccacgtccct

SEQ ID NO: 1619215 - DNA, 25 bp, Homo sapien
tttcttaaggtggaagattacatta

SEQ ID NO: 1619216 - DNA, 25 bp, Homo sapien
aaggtggaagattacattattatta

SEQ ID NO: 1619217 - DNA, 25 bp, Homo sapien
tcttaaggtggaagattacattatt

SEQ ID NO: 1619218 - DNA, 25 bp, Homo sapien
ttaaggtggaagattacattattat

SEQ ID NO: 1619219 - DNA, 25 bp, Homo sapien
tcatgccacagaatggtgcacttaa

SEQ ID NO: 1619220 - DNA, 25 bp, Homo sapien
acctggcatggttatggtttaacat

SEQ ID NO: 1619221 - DNA, 25 bp, Homo sapien
ctctatgaaacacccagttaggctg

SEQ ID NO: 1619222 - DNA, 25 bp, Homo sapien
gtatgaaaaaccctttagctctatg

SEQ ID NO: 1619223 - DNA, 25 bp, Homo sapien
ttttatgggcatatacctggtgggc

SEQ ID NO: 1619224 - DNA, 25 bp, Homo sapien
gaacttttagcccactcagataagg

SEQ ID NO: 1619225 - DNA, 25 bp, Homo sapien
gagtcatgcctagagatatgcccac

SEQ ID NO: 1619226 - DNA, 25 bp, Homo sapien
catagtgggcaacccatttgggctc

SEQ ID NO: 1619227 - DNA, 25 bp, Homo sapien
attactgggctgtttacatgatact

SEQ ID NO: 1619228 - DNA, 25 bp, Homo sapien
ttactgggctgtttacatgatactt

SEQ ID NO: 1619229 - DNA, 25 bp, Homo sapien
tactgggctgtttacatgatacttt

SEQ ID NO: 1619230 - DNA, 25 bp, Homo sapien
actgggctgtttacatgatactttc

SEQ ID NO: 1619231 - DNA, 25 bp, Homo sapien
agcacgagtcctgtctttgaaatga

SEQ ID NO: 1619232 - DNA, 25 bp, Homo sapien
cacactctagaggacagttggaaga

SEQ ID NO: 1619233 - DNA, 25 bp, Homo sapien
gaaatgaattaggtcaactgaaggc

SEQ ID NO: 1619234 - DNA, 25 bp, Homo sapien
agtgggaattctttcgtgctcaaaa

SEQ ID NO: 1619235 - DNA, 25 bp, Homo sapien
caatcgaatttgactggaacgaagg

SEQ ID NO: 1619236 - DNA, 25 bp, Homo sapien
tcatgaattcgaacagaacttgaaa

SEQ ID NO: 1619237 - DNA, 25 bp, Homo sapien
tcatgcattcgaaatttactggaag

SEQ ID NO: 1619238 - DNA, 25 bp, Homo sapien
cctttcatgcagtcgaaagtgactg

SEQ ID NO: 1619239 - DNA, 25 bp, Homo sapien
agggtttctctgcattgtgagtcct

SEQ ID NO: 1619240 - DNA, 25 bp, Homo sapien
cctttcatgtctttgaagggaactt

SEQ ID NO: 1619241 - DNA, 25 bp, Homo sapien
ctctgcattgtgagtcctttcatgt

SEQ ID NO: 1619242 - DNA, 25 bp, Homo sapien
tcatgtctttgaagggaacttgaaa

SEQ ID NO: 1619243 - DNA, 25 bp, Homo sapien
tttcgtgttctcgaagggaacttga

SEQ ID NO: 1619244 - DNA, 25 bp, Homo sapien
tgtgagttgtttcgtgttctcgaag

SEQ ID NO: 1619245 - DNA, 25 bp, Homo sapien
tcgtgttctcgaagggaacttgaaa

SEQ ID NO: 1619246 - DNA, 25 bp, Homo sapien
gagttgtttcgtgttctcgaaggga

SEQ ID NO: 1619247 - DNA, 25 bp, Homo sapien
tttataaggtcgagccccagtgtgt

SEQ ID NO: 1619248 - DNA, 25 bp, Homo sapien
catgcactcgacaggaattagaaga

SEQ ID NO: 1619249 - DNA, 25 bp, Homo sapien
tacatgtgctcgaaagcttgcagaa

SEQ ID NO: 1619250 - DNA, 25 bp, Homo sapien
catgcaatcgaagagaaatggacca

SEQ ID NO: 1619251 - DNA, 25 bp, Homo sapien
tctttgaaatggctggtaatatata

SEQ ID NO: 1619252 - DNA, 25 bp, Homo sapien
ttcatgtttgcgaaagcagtggtga

SEQ ID NO: 1619253 - DNA, 25 bp, Homo sapien
ttctttcatgtttgcgaaagcagtg

SEQ ID NO: 1619254 - DNA, 25 bp, Homo sapien
catgtttgcgaaagcagtggtgata

SEQ ID NO: 1619255 - DNA, 25 bp, Homo sapien
gttctttcatgtttgcgaaagcagt

SEQ ID NO: 1619256 - DNA, 25 bp, Homo sapien
catttacatggttgcttttcatatt

SEQ ID NO: 1619257 - DNA, 25 bp, Homo sapien
tacatggttgcttttcatattcctg

SEQ ID NO: 1619258 - DNA, 25 bp, Homo sapien
tttacatggttgcttttcatattcc

SEQ ID NO: 1619259 - DNA, 25 bp, Homo sapien
tacatttacatggttgcttttcata

SEQ ID NO: 1619260 - DNA, 25 bp, Homo sapien
tattaagggacgaatgatgaatgaa

SEQ ID NO: 1619261 - DNA, 25 bp, Homo sapien
ctattaagggacgaatgatgaatga

SEQ ID NO: 1619262 - DNA, 25 bp, Homo sapien
attaagggacgaatgatgaatgaag

SEQ ID NO: 1619263 - DNA, 25 bp, Homo sapien
ttaagggacgaatgatgaatgaagt

SEQ ID NO: 1619264 - DNA, 25 bp, Homo sapien
ggcatctggctagtggtttctccac

SEQ ID NO: 1619265 - DNA, 25 bp, Homo sapien
tttggcatctggctagtggtttctc

SEQ ID NO: 1619266 - DNA, 25 bp, Homo sapien
ttggcatctggctagtggtttctcc

SEQ ID NO: 1619267 - DNA, 25 bp, Homo sapien
caatgtcctggtcttcccacttttt

SEQ ID NO: 1619268 - DNA, 25 bp, Homo sapien
tggtcatcttcaatgtcctggtctt

SEQ ID NO: 1619269 - DNA, 25 bp, Homo sapien
ttcaatgtcctggtcttcccacttt

SEQ ID NO: 1619270 - DNA, 25 bp, Homo sapien
gtcatcttcaatgtcctggtcttcc

SEQ ID NO: 1619271 - DNA, 25 bp, Homo sapien
tcctgcatcacatcttcatagagct

SEQ ID NO: 1619272 - DNA, 25 bp, Homo sapien
accaggtttttgaaggtctcctgca

SEQ ID NO: 1619273 - DNA, 25 bp, Homo sapien
ccaggtttttgaaggtctcctgcat

SEQ ID NO: 1619274 - DNA, 25 bp, Homo sapien
atagagctttttctgtgaagaatcc

SEQ ID NO: 1619275 - DNA, 25 bp, Homo sapien
gtgtgtaccatacctatctaatttt

SEQ ID NO: 1619276 - DNA, 25 bp, Homo sapien
catgtgaaaccttattgttctctaa

SEQ ID NO: 1619277 - DNA, 25 bp, Homo sapien
ttgttctctaaaggtggactcaagc

SEQ ID NO: 1619278 - DNA, 25 bp, Homo sapien
tgtgatcatgtgaaaccttattgtt

SEQ ID NO: 1619279 - DNA, 25 bp, Homo sapien
tataagtactcaaatccagctggct

SEQ ID NO: 1619280 - DNA, 25 bp, Homo sapien
taattcctgttccactataagtact

SEQ ID NO: 1619281 - DNA, 25 bp, Homo sapien
gcctgaggaggaacgtatggcaact

SEQ ID NO: 1619282 - DNA, 25 bp, Homo sapien
ggagattactaggaagttagagctc

SEQ ID NO: 1619283 - DNA, 25 bp, Homo sapien
ttggagcctcaaggccgagtactgt

SEQ ID NO: 1619284 - DNA, 25 bp, Homo sapien
gcaatgcacgcagcctaaaatattt

SEQ ID NO: 1619285 - DNA, 25 bp, Homo sapien
caccgtaaaaattcctgagcctcga

SEQ ID NO: 1619286 - DNA, 25 bp, Homo sapien
tgagcctcgaatacatagatatcca

SEQ ID NO: 1619287 - DNA, 25 bp, Homo sapien
tgggcctacacacacgacttctgaa

SEQ ID NO: 1619288 - DNA, 25 bp, Homo sapien
tgtacagaatcacccaatgagacac

SEQ ID NO: 1619289 - DNA, 25 bp, Homo sapien
cacattcgtggcaagcttggctaca

SEQ ID NO: 1619290 - DNA, 25 bp, Homo sapien
ggctacatatacctagaccgataag

SEQ ID NO: 1619291 - DNA, 25 bp, Homo sapien
caagtgaggaaacgcacccgtggat

SEQ ID NO: 1619292 - DNA, 25 bp, Homo sapien
caggcttcggttctcacaagtgagg

SEQ ID NO: 1619293 - DNA, 25 bp, Homo sapien
gcgaaatctcttgggtagaaaccac

SEQ ID NO: 1619294 - DNA, 25 bp, Homo sapien
tcatcatggcactccaacataggcg

SEQ ID NO: 1619295 - DNA, 25 bp, Homo sapien
cggtgtcctccctacggatctgtca

SEQ ID NO: 1619296 - DNA, 25 bp, Homo sapien
ggtgaaacgcaatcttcccatgggc

SEQ ID NO: 1619297 - DNA, 25 bp, Homo sapien
gcgtccgggaagtcacggtgtcctc

SEQ ID NO: 1619298 - DNA, 25 bp, Homo sapien
gtcacggcgcgacaaaggatgcgct

SEQ ID NO: 1619299 - DNA, 25 bp, Homo sapien
tattctttcatttcttcaacgtgga

SEQ ID NO: 1619300 - DNA, 25 bp, Homo sapien
tctttcatttcttcaacgtggataa

SEQ ID NO: 1619301 - DNA, 25 bp, Homo sapien
tcatttcttcaacgtggataaagaa

SEQ ID NO: 1619302 - DNA, 25 bp, Homo sapien
tttcatttcttcaacgtggataaag

SEQ ID NO: 1619303 - DNA, 25 bp, Homo sapien
aggagccctgtcctgagaagacccc

SEQ ID NO: 1619304 - DNA, 25 bp, Homo sapien
tgaggctgaccgtccctccctgtgt

SEQ ID NO: 1619305 - DNA, 25 bp, Homo sapien
tcactgtccccttggagatgggccc

SEQ ID NO: 1619306 - DNA, 25 bp, Homo sapien
tggagcctgaggctgaccgtccctc

SEQ ID NO: 1619307 - DNA, 25 bp, Homo sapien
acggttgtcttgttcatcctcgtgg

SEQ ID NO: 1619308 - DNA, 25 bp, Homo sapien
ttgttctgtgctgaccatgtacacg

SEQ ID NO: 1619309 - DNA, 25 bp, Homo sapien
gctgtccccaagtatacccattcga

SEQ ID NO: 1619310 - DNA, 25 bp, Homo sapien
gggtgggtgctgtccccaagtatac

SEQ ID NO: 1619311 - DNA, 25 bp, Homo sapien
ctgaggttataagggcggtcactgg

SEQ ID NO: 1619312 - DNA, 25 bp, Homo sapien
gtccaggaacccagacgtgaccctg

SEQ ID NO: 1619313 - DNA, 25 bp, Homo sapien
gttataagggcggtcactggtccag

SEQ ID NO: 1619314 - DNA, 25 bp, Homo sapien
ggaacccagacgtgaccctgggcca

SEQ ID NO: 1619315 - DNA, 25 bp, Homo sapien
cacctggaggctagtacttgaccaa

SEQ ID NO: 1619316 - DNA, 25 bp, Homo sapien
aagctgccatcgatcagtgccctgg

SEQ ID NO: 1619317 - DNA, 25 bp, Homo sapien
gatcctggcctggtaatgtggtcac

SEQ ID NO: 1619318 - DNA, 25 bp, Homo sapien
cacagacgcctgttcagtcagaggg

SEQ ID NO: 1619319 - DNA, 25 bp, Homo sapien
caggatacagcatccaaaggctgct

SEQ ID NO: 1619320 - DNA, 25 bp, Homo sapien
tagctccgctaacttctggtcatag

SEQ ID NO: 1619321 - DNA, 25 bp, Homo sapien
ttcaggaagccttggtagctccgct

SEQ ID NO: 1619322 - DNA, 25 bp, Homo sapien
tcatagttgacagcaaagacgtcag

SEQ ID NO: 1619323 - DNA, 25 bp, Homo sapien
gggcagggatataggagtggcaagg

SEQ ID NO: 1619324 - DNA, 25 bp, Homo sapien
cgggcagggatataggagtggcaag

SEQ ID NO: 1619325 - DNA, 25 bp, Homo sapien
gactatctcagggatagggacaccc

SEQ ID NO: 1619326 - DNA, 25 bp, Homo sapien
gaaaaaccaacaagtcagagactgg

SEQ ID NO: 1619327 - DNA, 25 bp, Homo sapien
gatgccagggcatgagccaggacta

SEQ ID NO: 1619328 - DNA, 25 bp, Homo sapien
tggtcctaggtaaactgcacatccc

SEQ ID NO: 1619329 - DNA, 25 bp, Homo sapien
gaaatacgaggtatgacccttccga

SEQ ID NO: 1619330 - DNA, 25 bp, Homo sapien
tcaggcggacatcctgggcagagac

SEQ ID NO: 1619331 - DNA, 25 bp, Homo sapien
tgtaaggaaccaagccagaggagga

SEQ ID NO: 1619332 - DNA, 25 bp, Homo sapien
cagagtgttctgtcccaagttgata

SEQ ID NO: 1619333 - DNA, 25 bp, Homo sapien
ctgcagaaggaaaccaaccttcctt

SEQ ID NO: 1619334 - DNA, 25 bp, Homo sapien
tgcagaaggaaaccaaccttccttc

SEQ ID NO: 1619335 - DNA, 25 bp, Homo sapien
tgggagcttcaccagagcagaggca

SEQ ID NO: 1619336 - DNA, 25 bp, Homo sapien
gaaaccacatgatgttttggccaca

SEQ ID NO: 1619337 - DNA, 25 bp, Homo sapien
tggccacaatgcagtgtcaattaag

SEQ ID NO: 1619338 - DNA, 25 bp, Homo sapien
cagatcaacctggatgtcagccata

SEQ ID NO: 1619339 - DNA, 25 bp, Homo sapien
caaatgccgagacgatgtgcggtcc

SEQ ID NO: 1619340 - DNA, 25 bp, Homo sapien
gcggctctgcacgaaactcggtgga

SEQ ID NO: 1619341 - DNA, 25 bp, Homo sapien
ttcagtaacctacgggagggcggca

SEQ ID NO: 1619342 - DNA, 25 bp, Homo sapien
tcgtgccacatgtcccagaagattc

SEQ ID NO: 1619343 - DNA, 25 bp, Homo sapien
gtatctgacacctaccaagacgcag

SEQ ID NO: 1619344 - DNA, 25 bp, Homo sapien
tcccatattcataggcacgggtgtc

SEQ ID NO: 1619345 - DNA, 25 bp, Homo sapien
tattctgcgcatcatctggacctgg

SEQ ID NO: 1619346 - DNA, 25 bp, Homo sapien
caaggcaacaatattcgcgggtcac

SEQ ID NO: 1619347 - DNA, 25 bp, Homo sapien
atcagtcctctcaggtgacctcagc

SEQ ID NO: 1619348 - DNA, 25 bp, Homo sapien
ctcctcaatgacatcagtcctctca

SEQ ID NO: 1619349 - DNA, 25 bp, Homo sapien
catcagtcctctcaggtgacctcag

SEQ ID NO: 1619350 - DNA, 25 bp, Homo sapien
aggcactccttgcagggtaggtgga

SEQ ID NO: 1619351 - DNA, 25 bp, Homo sapien
ctccttgcagggtaggtggacagct

SEQ ID NO: 1619352 - DNA, 25 bp, Homo sapien
actccttgcagggtaggtggacagc

SEQ ID NO: 1619353 - DNA, 25 bp, Homo sapien
gcactccttgcagggtaggtggaca

SEQ ID NO: 1619354 - DNA, 25 bp, Homo sapien
tagcctgaccctatgaatgtccaga

SEQ ID NO: 1619355 - DNA, 25 bp, Homo sapien
cgtttggagcctctaggatgttgcc

SEQ ID NO: 1619356 - DNA, 25 bp, Homo sapien
gatgaaacccagacagtaatgcttc

SEQ ID NO: 1619357 - DNA, 25 bp, Homo sapien
taccttctgtatcccggaggcttgg

SEQ ID NO: 1619358 - DNA, 25 bp, Homo sapien
aggtgaaagcgtagcaggcacgtct

SEQ ID NO: 1619359 - DNA, 25 bp, Homo sapien
gaaagcgtagcaggcacgtctttgc

SEQ ID NO: 1619360 - DNA, 25 bp, Homo sapien
tatctattcggcttctggagaggcc

SEQ ID NO: 1619361 - DNA, 25 bp, Homo sapien
ctggtatctattcggcttctggaga

SEQ ID NO: 1619362 - DNA, 25 bp, Homo sapien
cggccacaggcatgtcttacgtggc

SEQ ID NO: 1619363 - DNA, 25 bp, Homo sapien
cgcccggccacaggcatgtcttacg

SEQ ID NO: 1619364 - DNA, 25 bp, Homo sapien
ccagatgtcatgcaaactctctcac

SEQ ID NO: 1619365 - DNA, 25 bp, Homo sapien
caaccagatgtcatgcaaactctct

SEQ ID NO: 1619366 - DNA, 25 bp, Homo sapien
catgagggttccactcgtgcagcag

SEQ ID NO: 1619367 - DNA, 25 bp, Homo sapien
acatcaagggcgtgctggtacaagg

SEQ ID NO: 1619368 - DNA, 25 bp, Homo sapien
gggctacaagcctacacaagtccaa

SEQ ID NO: 1619369 - DNA, 25 bp, Homo sapien
tagctccactaggaagtcctccagt

SEQ ID NO: 1619370 - DNA, 25 bp, Homo sapien
cactgaaccatcaaagaccaggtac

SEQ ID NO: 1619371 - DNA, 25 bp, Homo sapien
tggtagtgcaggtccactgaaccat

SEQ ID NO: 1619372 - DNA, 25 bp, Homo sapien
tcaactcttgcactttgcactgcaa

SEQ ID NO: 1619373 - DNA, 25 bp, Homo sapien
cactttgcactgcaatggtagtgca

SEQ ID NO: 1619374 - DNA, 25 bp, Homo sapien
tacggtcatcatcgctgccctggct

SEQ ID NO: 1619375 - DNA, 25 bp, Homo sapien
tttcattacggtcatcatcgctgcc

SEQ ID NO: 1619376 - DNA, 25 bp, Homo sapien
attacggtcatcatcgctgccctgg

SEQ ID NO: 1619377 - DNA, 25 bp, Homo sapien
tcattacggtcatcatcgctgccct

SEQ ID NO: 1619378 - DNA, 25 bp, Homo sapien
cagcagcagctagagggctttggga

SEQ ID NO: 1619379 - DNA, 25 bp, Homo sapien
agtccccggctctggaaagcctgca

SEQ ID NO: 1619380 - DNA, 25 bp, Homo sapien
ggtgatgactgcaggttccccagtc

SEQ ID NO: 1619381 - DNA, 25 bp, Homo sapien
tgccaccagaattgctgaggtgatg

SEQ ID NO: 1619382 - DNA, 25 bp, Homo sapien
ccaggcctggcctaggggcaatgga

SEQ ID NO: 1619383 - DNA, 25 bp, Homo sapien
cctggcctaggggcaatggagtgag

SEQ ID NO: 1619384 - DNA, 25 bp, Homo sapien
accaggcctggcctaggggcaatgg

SEQ ID NO: 1619385 - DNA, 25 bp, Homo sapien
aggcctggcctaggggcaatggagt

SEQ ID NO: 1619386 - DNA, 25 bp, Homo sapien
taaaacatactcaactgaggaagat

SEQ ID NO: 1619387 - DNA, 25 bp, Homo sapien
cattcatcataactgtgagacatac

SEQ ID NO: 1619388 - DNA, 25 bp, Homo sapien
caactgaggaagatccaggagatac

SEQ ID NO: 1619389 - DNA, 25 bp, Homo sapien
agatacaccattcatcataactgtg

SEQ ID NO: 1619390 - DNA, 25 bp, Homo sapien
tcaccacacttctctgtaggacaga

SEQ ID NO: 1619391 - DNA, 25 bp, Homo sapien
tgagaggagtcccagtatctccaaa

SEQ ID NO: 1619392 - DNA, 25 bp, Homo sapien
gtcccagtatctccaaagagcttga

SEQ ID NO: 1619393 - DNA, 25 bp, Homo sapien
tctccaaagagcttgatcaccacac

SEQ ID NO: 1619394 - DNA, 25 bp, Homo sapien
gttgccaccgaaatgaaaaatctaa

SEQ ID NO: 1619395 - DNA, 25 bp, Homo sapien
gactgcaggatttaagtggcagcac

SEQ ID NO: 1619396 - DNA, 25 bp, Homo sapien
gaaaaatctaaatgcattggttata

SEQ ID NO: 1619397 - DNA, 25 bp, Homo sapien
ggttataaccggatctcgggactgc

SEQ ID NO: 1619398 - DNA, 25 bp, Homo sapien
cagagtaggagcttatggaggtcag

SEQ ID NO: 1619399 - DNA, 25 bp, Homo sapien
tcaattctaattcccagttggcctg

SEQ ID NO: 1619400 - DNA, 25 bp, Homo sapien
caggcgatcaatggagttttgaatc

SEQ ID NO: 1619401 - DNA, 25 bp, Homo sapien
ggtcaggcgatcaatggagttttga

SEQ ID NO: 1619402 - DNA, 25 bp, Homo sapien
cggatcataatggagtcagactaga

SEQ ID NO: 1619403 - DNA, 25 bp, Homo sapien
cagattacacggagtgtgttctcgg

SEQ ID NO: 1619404 - DNA, 25 bp, Homo sapien
tctcctaggccatgaaacaaacttc

SEQ ID NO: 1619405 - DNA, 25 bp, Homo sapien
aaagtaagatagaccatctcctagg

SEQ ID NO: 1619406 - DNA, 25 bp, Homo sapien
caagtggaacaaacgaggcaacctc

SEQ ID NO: 1619407 - DNA, 25 bp, Homo sapien
cacttgtgggcgagggtaatcagac

SEQ ID NO: 1619408 - DNA, 25 bp, Homo sapien
acattcgcgaaaaaggtgccagtgc

SEQ ID NO: 1619409 - DNA, 25 bp, Homo sapien
caagataagtacagggccagtggac

SEQ ID NO: 1619410 - DNA, 25 bp, Homo sapien
ggcggcgtagaatcggcggccagca

SEQ ID NO: 1619411 - DNA, 25 bp, Homo sapien
gcggccagcagtgctttagacacag

SEQ ID NO: 1619412 - DNA, 25 bp, Homo sapien
tcacgtccctagctgtattcactct

SEQ ID NO: 1619413 - DNA, 25 bp, Homo sapien
tctccctggcgaccgggcggcgtag

SEQ ID NO: 1619414 - DNA, 25 bp, Homo sapien
tgaacaacttagacctcaggagctg

SEQ ID NO: 1619415 - DNA, 25 bp, Homo sapien
tagaccagaaggtaaggcacaagct

SEQ ID NO: 1619416 - DNA, 25 bp, Homo sapien
gaggtaatcgaatcacgggtgtgca

SEQ ID NO: 1619417 - DNA, 25 bp, Homo sapien
gtctttctgaattacccctggtgca

SEQ ID NO: 1619418 - DNA, 25 bp, Homo sapien
taagagcatgagcaacttcagggaa

SEQ ID NO: 1619419 - DNA, 25 bp, Homo sapien
tagtattaggcatgcgacctttcgg

SEQ ID NO: 1619420 - DNA, 25 bp, Homo sapien
aaatgtcacgggaggaaactctggg

SEQ ID NO: 1619421 - DNA, 25 bp, Homo sapien
tgactaagccaagagagcgccatct

SEQ ID NO: 1619422 - DNA, 25 bp, Homo sapien
tttctctttcatgacttttgcagac

SEQ ID NO: 1619423 - DNA, 25 bp, Homo sapien
atttttctctttcatgacttttgca

SEQ ID NO: 1619424 - DNA, 25 bp, Homo sapien
acatttttctctttcatgacttttg

SEQ ID NO: 1619425 - DNA, 25 bp, Homo sapien
tctctttcatgacttttgcagacaa

SEQ ID NO: 1619426 - DNA, 25 bp, Homo sapien
ggagtcttatagggttatggagaat

SEQ ID NO: 1619427 - DNA, 25 bp, Homo sapien
gtcttatagggttatggagaatacc

SEQ ID NO: 1619428 - DNA, 25 bp, Homo sapien
tgctttcagaatacgcccttgttta

SEQ ID NO: 1619429 - DNA, 25 bp, Homo sapien
caatgaggtttcctcacaatgaggt

SEQ ID NO: 1619430 - DNA, 25 bp, Homo sapien
agaacctaatgcagacgtttcccag

SEQ ID NO: 1619431 - DNA, 25 bp, Homo sapien
taagtgactgaaggctgcatgcacc

SEQ ID NO: 1619432 - DNA, 25 bp, Homo sapien
taggagctgtatctgacatgaggcc

SEQ ID NO: 1619433 - DNA, 25 bp, Homo sapien
caagaagtggaaacctatgcagaca

SEQ ID NO: 1619434 - DNA, 25 bp, Homo sapien
ctttcaaacctgcagaattggccag

SEQ ID NO: 1619435 - DNA, 25 bp, Homo sapien
gaatgaagccaatccatggacccct

SEQ ID NO: 1619436 - DNA, 25 bp, Homo sapien
tctagggcaagtagggtcagcatta

SEQ ID NO: 1619437 - DNA, 25 bp, Homo sapien
gtttaaaggaccagcagagtgtgcc

SEQ ID NO: 1619438 - DNA, 25 bp, Homo sapien
aagcttcacatataggtgcatggcc

SEQ ID NO: 1619439 - DNA, 25 bp, Homo sapien
ttaaattccccagcctacactgcgg

SEQ ID NO: 1619440 - DNA, 25 bp, Homo sapien
tatccatctaagctgatctaagtgg

SEQ ID NO: 1619441 - DNA, 25 bp, Homo sapien
tatggatccataccatctcagactg

SEQ ID NO: 1619442 - DNA, 25 bp, Homo sapien
gaaatgcagccaggtaacatgtacc

SEQ ID NO: 1619443 - DNA, 25 bp, Homo sapien
ttttcacaaggagctctggcctggc

SEQ ID NO: 1619444 - DNA, 25 bp, Homo sapien
gagtctaatcaaaacagctcatggg

SEQ ID NO: 1619445 - DNA, 25 bp, Homo sapien
tcagacataccagtgggcctaacct

SEQ ID NO: 1619446 - DNA, 25 bp, Homo sapien
tccataccttagttattatcagtaa

SEQ ID NO: 1619447 - DNA, 25 bp, Homo sapien
cataccttagttattatcagtaatc

SEQ ID NO: 1619448 - DNA, 25 bp, Homo sapien
gattccataccttagttattatcag

SEQ ID NO: 1619449 - DNA, 25 bp, Homo sapien
attatcagtaatccacttccttccc

SEQ ID NO: 1619450 - DNA, 25 bp, Homo sapien
cttcatgatctttcagggattgtat

SEQ ID NO: 1619451 - DNA, 25 bp, Homo sapien
cctcctgttttttagccaatggatg

SEQ ID NO: 1619452 - DNA, 25 bp, Homo sapien
tattgagctcccgtaatatttgata

SEQ ID NO: 1619453 - DNA, 25 bp, Homo sapien
gcataggcatcaataatgtttgtgg

SEQ ID NO: 1619454 - DNA, 25 bp, Homo sapien
gaccctcagctggactggcagagca

SEQ ID NO: 1619455 - DNA, 25 bp, Homo sapien
ttggagcctgtaagcggctcggacc

SEQ ID NO: 1619456 - DNA, 25 bp, Homo sapien
gtcagtgtactttattcatccacag

SEQ ID NO: 1619457 - DNA, 25 bp, Homo sapien
tttattcatccacagcgagtgcccc

SEQ ID NO: 1619458 - DNA, 25 bp, Homo sapien
ccactacgtaccaaacagtatattg

SEQ ID NO: 1619459 - DNA, 25 bp, Homo sapien
gatgttattccactacgtaccaaac

SEQ ID NO: 1619460 - DNA, 25 bp, Homo sapien
tggcaaagtgacaagtagagatgtt

SEQ ID NO: 1619461 - DNA, 25 bp, Homo sapien
caaatactagtaatagatttcaata

SEQ ID NO: 1619462 - DNA, 25 bp, Homo sapien
aatgcttcagaaaatctccctttta

SEQ ID NO: 1619463 - DNA, 25 bp, Homo sapien
tcacatgtgaccacaataggaataa

SEQ ID NO: 1619464 - DNA, 25 bp, Homo sapien
ttttcaagaaacaagtacactttca

SEQ ID NO: 1619465 - DNA, 25 bp, Homo sapien
gttttaaaatggtctgccaacatgt

SEQ ID NO: 1619466 - DNA, 25 bp, Homo sapien
cagtgccttattctagtgtaaattc

SEQ ID NO: 1619467 - DNA, 25 bp, Homo sapien
gtgccttattctagtgtaaattctc

SEQ ID NO: 1619468 - DNA, 25 bp, Homo sapien
tctcatatttacgtaaaatcaattt

SEQ ID NO: 1619469 - DNA, 25 bp, Homo sapien
tcatatttacgtaaaatcaattttg

SEQ ID NO: 1619470 - DNA, 25 bp, Homo sapien
gtctcatttcatacatttccagggt

SEQ ID NO: 1619471 - DNA, 25 bp, Homo sapien
gtggtggtaaaagcactgttgcatc

SEQ ID NO: 1619472 - DNA, 25 bp, Homo sapien
catataaacgctttgtctcatttca

SEQ ID NO: 1619473 - DNA, 25 bp, Homo sapien
ttccagggtttcacattagtataat

SEQ ID NO: 1619474 - DNA, 25 bp, Homo sapien
caaaaagagttgacaggttgttata

SEQ ID NO: 1619475 - DNA, 25 bp, Homo sapien
cagagtccagggctagttaaaggct

SEQ ID NO: 1619476 - DNA, 25 bp, Homo sapien
agttgacaggttgttataggctttg

SEQ ID NO: 1619477 - DNA, 25 bp, Homo sapien
attctcatatttagtcagagtccag

SEQ ID NO: 1619478 - DNA, 25 bp, Homo sapien
ttcatcacattcatacggtttctct

SEQ ID NO: 1619479 - DNA, 25 bp, Homo sapien
cattcatacggtttctctccagtat

SEQ ID NO: 1619480 - DNA, 25 bp, Homo sapien
attcatcacattcatacggtttctc

SEQ ID NO: 1619481 - DNA, 25 bp, Homo sapien
tcatacggtttctctccagtatgaa

SEQ ID NO: 1619482 - DNA, 25 bp, Homo sapien
actatgcagggtttctgtctaatat

SEQ ID NO: 1619483 - DNA, 25 bp, Homo sapien
tcttcactatgcagggtttctgtct

SEQ ID NO: 1619484 - DNA, 25 bp, Homo sapien
tcactatgcagggtttctgtctaat

SEQ ID NO: 1619485 - DNA, 25 bp, Homo sapien
tatgcagggtttctgtctaatatga

SEQ ID NO: 1619486 - DNA, 25 bp, Homo sapien
atcttatgttcagttagagttgaga

SEQ ID NO: 1619487 - DNA, 25 bp, Homo sapien
tatgttcagttagagttgagaatgc

SEQ ID NO: 1619488 - DNA, 25 bp, Homo sapien
gttcagttagagttgagaatgcagt

SEQ ID NO: 1619489 - DNA, 25 bp, Homo sapien
ttatgttcagttagagttgagaatg

SEQ ID NO: 1619490 - DNA, 25 bp, Homo sapien
tgtgcactggacactcatctacact

SEQ ID NO: 1619491 - DNA, 25 bp, Homo sapien
gagctctcttatgtttagagaggct

SEQ ID NO: 1619492 - DNA, 25 bp, Homo sapien
tagagaggcttgagtaccaggtaaa

SEQ ID NO: 1619493 - DNA, 25 bp, Homo sapien
tacaggactgcttataggctttgcc

SEQ ID NO: 1619494 - DNA, 25 bp, Homo sapien
tgagtctaaaggtaaatgtttcaga

SEQ ID NO: 1619495 - DNA, 25 bp, Homo sapien
taatgtctcccacgacatgaaatgg

SEQ ID NO: 1619496 - DNA, 25 bp, Homo sapien
tggtaatatacgttggaatgacact

SEQ ID NO: 1619497 - DNA, 25 bp, Homo sapien
aatactggttaatgtctcccacgac

SEQ ID NO: 1619498 - DNA, 25 bp, Homo sapien
ccaaataaattgaacaggccaggct

SEQ ID NO: 1619499 - DNA, 25 bp, Homo sapien
aattccaagaatcgctatccaagac

SEQ ID NO: 1619500 - DNA, 25 bp, Homo sapien
caaaaaattagctagccgtgttgac

SEQ ID NO: 1619501 - DNA, 25 bp, Homo sapien
ttttcagactatgcgaggacagagc

SEQ ID NO: 1619502 - DNA, 25 bp, Homo sapien
gattaattcatggaaacctatgaca

SEQ ID NO: 1619503 - DNA, 25 bp, Homo sapien
caagctacattgttaaagtcaaaag

SEQ ID NO: 1619504 - DNA, 25 bp, Homo sapien
caatagctcataaaacattcctctt

SEQ ID NO: 1619505 - DNA, 25 bp, Homo sapien
catacttctaaaaaggctcattaaa

SEQ ID NO: 1619506 - DNA, 25 bp, Homo sapien
cttgagcatgcacttgttgaaataa

SEQ ID NO: 1619507 - DNA, 25 bp, Homo sapien
tttctatgacaaaaatggaattaga

SEQ ID NO: 1619508 - DNA, 25 bp, Homo sapien
tgtctataccgctcaatttaaccta

SEQ ID NO: 1619509 - DNA, 25 bp, Homo sapien
ccgctcaatttaacctatagattta

SEQ ID NO: 1619510 - DNA, 25 bp, Homo sapien
agatgtctataccgctcaatttaac

SEQ ID NO: 1619511 - DNA, 25 bp, Homo sapien
tataccgctcaatttaacctataga

SEQ ID NO: 1619512 - DNA, 25 bp, Homo sapien
gggggtttggcaatcatctcatgcc

SEQ ID NO: 1619513 - DNA, 25 bp, Homo sapien
gggtttggcaatcatctcatgcctc

SEQ ID NO: 1619514 - DNA, 25 bp, Homo sapien
gtttggcaatcatctcatgcctctt

SEQ ID NO: 1619515 - DNA, 25 bp, Homo sapien
ttggcaatcatctcatgcctcttca

SEQ ID NO: 1619516 - DNA, 25 bp, Homo sapien
gacaggtgatcaggtttggtttaga

SEQ ID NO: 1619517 - DNA, 25 bp, Homo sapien
tgatcaggtttggtttagagacaac

SEQ ID NO: 1619518 - DNA, 25 bp, Homo sapien
ggtgatcaggtttggtttagagaca

SEQ ID NO: 1619519 - DNA, 25 bp, Homo sapien
caggtgatcaggtttggtttagaga

SEQ ID NO: 1619520 - DNA, 25 bp, Homo sapien
catccctatatagattccgctgtgc

SEQ ID NO: 1619521 - DNA, 25 bp, Homo sapien
cctatatagattccgctgtgcagcg

SEQ ID NO: 1619522 - DNA, 25 bp, Homo sapien
cacatccctatatagattccgctgt

SEQ ID NO: 1619523 - DNA, 25 bp, Homo sapien
tccctatatagattccgctgtgcag

SEQ ID NO: 1619524 - DNA, 25 bp, Homo sapien
tctggtacagataaggacaacccat

SEQ ID NO: 1619525 - DNA, 25 bp, Homo sapien
cttctggtacagataaggacaaccc

SEQ ID NO: 1619526 - DNA, 25 bp, Homo sapien
ttctggtacagataaggacaaccca

SEQ ID NO: 1619527 - DNA, 25 bp, Homo sapien
cacaattctgcatgggacatctcaa

SEQ ID NO: 1619528 - DNA, 25 bp, Homo sapien
cttccctggtggaactccacaacct

SEQ ID NO: 1619529 - DNA, 25 bp, Homo sapien
gaactccacaacctggatcacccat

SEQ ID NO: 1619530 - DNA, 25 bp, Homo sapien
cacctaggtgattttgaaggaattc

SEQ ID NO: 1619531 - DNA, 25 bp, Homo sapien
tcttttcaaggtacagatcctatca

SEQ ID NO: 1619532 - DNA, 25 bp, Homo sapien
aacagcacaaacacctgaggttaaa

SEQ ID NO: 1619533 - DNA, 25 bp, Homo sapien
ctcccaggagacaccgcgccatgcc

SEQ ID NO: 1619534 - DNA, 25 bp, Homo sapien
gtacatgctcaataactaccctccc

SEQ ID NO: 1619535 - DNA, 25 bp, Homo sapien
cccacccaagagaatccaggggtca

SEQ ID NO: 1619536 - DNA, 25 bp, Homo sapien
acccaagagaatccaggggtcagaa

SEQ ID NO: 1619537 - DNA, 25 bp, Homo sapien
gagcagtgaagacgatagctggatc

SEQ ID NO: 1619538 - DNA, 25 bp, Homo sapien
tgtgaccctcctaatacctgcaggt

SEQ ID NO: 1619539 - DNA, 25 bp, Homo sapien
cagtgaagacgatagctggatctct

SEQ ID NO: 1619540 - DNA, 25 bp, Homo sapien
gtcccggcgtcctagctgtgaccct

SEQ ID NO: 1619541 - DNA, 25 bp, Homo sapien
tagtgagtagaagcgaagtggataa

SEQ ID NO: 1619542 - DNA, 25 bp, Homo sapien
agtagtgagtagaagcgaagtggat

SEQ ID NO: 1619543 - DNA, 25 bp, Homo sapien
gtagtgagtagaagcgaagtggata

SEQ ID NO: 1619544 - DNA, 25 bp, Homo sapien
tagtagtgagtagaagcgaagtgga

SEQ ID NO: 1619545 - DNA, 25 bp, Homo sapien
tcatgtctcttcacagtgaaaggtt

SEQ ID NO: 1619546 - DNA, 25 bp, Homo sapien
atgtctcttcacagtgaaaggtttt

SEQ ID NO: 1619547 - DNA, 25 bp, Homo sapien
gtttggcaatcatctcatgtctctt

SEQ ID NO: 1619548 - DNA, 25 bp, Homo sapien
gggggtttggcaatcatctcatgtc

SEQ ID NO: 1619549 - DNA, 25 bp, Homo sapien
aattgcaatggtcccgaaaagacac

SEQ ID NO: 1619550 - DNA, 25 bp, Homo sapien
gacatccatataaaaattctgctgt

SEQ ID NO: 1619551 - DNA, 25 bp, Homo sapien
gttctttaacatgacatccatataa

SEQ ID NO: 1619552 - DNA, 25 bp, Homo sapien
gcaatggtcccgaaaagacacacat

SEQ ID NO: 1619553 - DNA, 25 bp, Homo sapien
gaacttaattgtgacatgcatcatc

SEQ ID NO: 1619554 - DNA, 25 bp, Homo sapien
tagtttagtagctttaatccaggtg

SEQ ID NO: 1619555 - DNA, 25 bp, Homo sapien
tcagtctgcttaagggatcgcaaag

SEQ ID NO: 1619556 - DNA, 25 bp, Homo sapien
tagttcacaaatagaagaatttcca

SEQ ID NO: 1619557 - DNA, 25 bp, Homo sapien
gggataggtcagtgtggcacatatt

SEQ ID NO: 1619558 - DNA, 25 bp, Homo sapien
tcagtgtggcacatatttccattac

SEQ ID NO: 1619559 - DNA, 25 bp, Homo sapien
ggtttggtagggataggtcagtgtg

SEQ ID NO: 1619560 - DNA, 25 bp, Homo sapien
cagtgtggcacatatttccattact

SEQ ID NO: 1619561 - DNA, 25 bp, Homo sapien
gccctgacagacaaaccttcaactt

SEQ ID NO: 1619562 - DNA, 25 bp, Homo sapien
tgtcttaaatctattgaagtgtaca

SEQ ID NO: 1619563 - DNA, 25 bp, Homo sapien
tgcaaaagacttctagaaactttac

SEQ ID NO: 1619564 - DNA, 25 bp, Homo sapien
gatccctggagcctaaaagtttgag

SEQ ID NO: 1619565 - DNA, 25 bp, Homo sapien
cacgggtggtacctgatgaattcaa

SEQ ID NO: 1619566 - DNA, 25 bp, Homo sapien
agacacaactggagtcccacgggtg

SEQ ID NO: 1619567 - DNA, 25 bp, Homo sapien
gagtcccacgggtggtacctgatga

SEQ ID NO: 1619568 - DNA, 25 bp, Homo sapien
aatcaatatttccacgggtaactat

SEQ ID NO: 1619569 - DNA, 25 bp, Homo sapien
tacttccaacggtattattaatatg

SEQ ID NO: 1619570 - DNA, 25 bp, Homo sapien
gaccttaagaattatccaatcaggg

SEQ ID NO: 1619571 - DNA, 25 bp, Homo sapien
agccggaccgaacagggcggcttct

SEQ ID NO: 1619572 - DNA, 25 bp, Homo sapien
caatcaggcaagcagccggaccgaa

SEQ ID NO: 1619573 - DNA, 25 bp, Homo sapien
acatcacattcgtatacaacttccg

SEQ ID NO: 1619574 - DNA, 25 bp, Homo sapien
tacaacttccgctgtacagtgtcca

SEQ ID NO: 1619575 - DNA, 25 bp, Homo sapien
aaagaccatatttccatagttctct

SEQ ID NO: 1619576 - DNA, 25 bp, Homo sapien
atcctcaacaagaaagaccatattt

SEQ ID NO: 1619577 - DNA, 25 bp, Homo sapien
tatgacgtacagaatgtagagaagt

SEQ ID NO: 1619578 - DNA, 25 bp, Homo sapien
ctgtcttttaaacagaatagattca

SEQ ID NO: 1619579 - DNA, 25 bp, Homo sapien
tttaaacagaatagattcaggaata

SEQ ID NO: 1619580 - DNA, 25 bp, Homo sapien
taaacagaatagattcaggaataat

SEQ ID NO: 1619581 - DNA, 25 bp, Homo sapien
tcttttaaacagaatagattcagga

SEQ ID NO: 1619582 - DNA, 25 bp, Homo sapien
gcaggtcagagggacacagagcctg

SEQ ID NO: 1619583 - DNA, 25 bp, Homo sapien
agagggacacagagcctgggcctct

SEQ ID NO: 1619584 - DNA, 25 bp, Homo sapien
cccaaaacctgcaggtcagagggac

SEQ ID NO: 1619585 - DNA, 25 bp, Homo sapien
aaaacctgcaggtcagagggacaca

SEQ ID NO: 1619586 - DNA, 25 bp, Homo sapien
agctacctgtaccaggggatccgaa

SEQ ID NO: 1619587 - DNA, 25 bp, Homo sapien
acaattgagcaacccacatttgtgg

SEQ ID NO: 1619588 - DNA, 25 bp, Homo sapien
ttgagcaacccacatttgtggtttt

SEQ ID NO: 1619589 - DNA, 25 bp, Homo sapien
caggggatccgaatcccccagttct

SEQ ID NO: 1619590 - DNA, 25 bp, Homo sapien
ttacgaatgggctcaaggaacgcaa

SEQ ID NO: 1619591 - DNA, 25 bp, Homo sapien
ggcttagtcatgagggccttttacg

SEQ ID NO: 1619592 - DNA, 25 bp, Homo sapien
agttttttggcatgaggcttagtca

SEQ ID NO: 1619593 - DNA, 25 bp, Homo sapien
tcatgaagctttggcgctatctggg

SEQ ID NO: 1619594 - DNA, 25 bp, Homo sapien
accccgagcagcagaaattgaccac

SEQ ID NO: 1619595 - DNA, 25 bp, Homo sapien
taagtcaaccacaaaagtttctctg

SEQ ID NO: 1619596 - DNA, 25 bp, Homo sapien
taagttcacacagtctaagaaaagc

SEQ ID NO: 1619597 - DNA, 25 bp, Homo sapien
aattgaccacatgctttcatacaga

SEQ ID NO: 1619598 - DNA, 25 bp, Homo sapien
tttatctagcacaaaacctctgatg

SEQ ID NO: 1619599 - DNA, 25 bp, Homo sapien
tcagcaatggttgaagactttcccc

SEQ ID NO: 1619600 - DNA, 25 bp, Homo sapien
tgtgatttcaatgccttgagcaaga

SEQ ID NO: 1619601 - DNA, 25 bp, Homo sapien
gcgtcttagtggtttctactgtgaa

SEQ ID NO: 1619602 - DNA, 25 bp, Homo sapien
cattttttatacttgcaggatttct

SEQ ID NO: 1619603 - DNA, 25 bp, Homo sapien
gagcagtgattaaaagcttccccac

SEQ ID NO: 1619604 - DNA, 25 bp, Homo sapien
gtagtaaggtttgagcagtgattaa

SEQ ID NO: 1619605 - DNA, 25 bp, Homo sapien
ttccccacattttttatacttgcag

SEQ ID NO: 1619606 - DNA, 25 bp, Homo sapien
ttcacatttatagcgtttgacggca

SEQ ID NO: 1619607 - DNA, 25 bp, Homo sapien
tgtttagtaagactcgagcaccagt

SEQ ID NO: 1619608 - DNA, 25 bp, Homo sapien
tgagatgtgagtgccggttaaacgc

SEQ ID NO: 1619609 - DNA, 25 bp, Homo sapien
ggtgaacaccagtgaaaggcttttc

SEQ ID NO: 1619610 - DNA, 25 bp, Homo sapien
ttcacacatttattatatgggaaaa

SEQ ID NO: 1619611 - DNA, 25 bp, Homo sapien
attttgctaggtagagttgacaaac

SEQ ID NO: 1619612 - DNA, 25 bp, Homo sapien
tatatgggaaaattttgctaggtag

SEQ ID NO: 1619613 - DNA, 25 bp, Homo sapien
tctgtagtatgtcttatgttttctc

SEQ ID NO: 1619614 - DNA, 25 bp, Homo sapien
catgcactgttctggcaaaaggtct

SEQ ID NO: 1619615 - DNA, 25 bp, Homo sapien
tcttgcatgcactgttctggcaaaa

SEQ ID NO: 1619616 - DNA, 25 bp, Homo sapien
tgcatgcactgttctggcaaaaggt

SEQ ID NO: 1619617 - DNA, 25 bp, Homo sapien
ttgcatgcactgttctggcaaaagg

SEQ ID NO: 1619618 - DNA, 25 bp, Homo sapien
cttaaactcttgtggaaatctgcag

SEQ ID NO: 1619619 - DNA, 25 bp, Homo sapien
gctcctgattatagactctcatatg

SEQ ID NO: 1619620 - DNA, 25 bp, Homo sapien
cagcttaaactcttgtggaaatctg

SEQ ID NO: 1619621 - DNA, 25 bp, Homo sapien
cacagcttaaactcttgtggaaatc

SEQ ID NO: 1619622 - DNA, 25 bp, Homo sapien
gcatcttgcactgaggggatccatc

SEQ ID NO: 1619623 - DNA, 25 bp, Homo sapien
tgcatcttgcactgaggggatccat

SEQ ID NO: 1619624 - DNA, 25 bp, Homo sapien
tctgcatcttgcactgaggggatcc

SEQ ID NO: 1619625 - DNA, 25 bp, Homo sapien
gctctgcatcttgcactgaggggat

SEQ ID NO: 1619626 - DNA, 25 bp, Homo sapien
caaggttgtagctatcatgggactg

SEQ ID NO: 1619627 - DNA, 25 bp, Homo sapien
gatccatgcaccactttgcctgctg

SEQ ID NO: 1619628 - DNA, 25 bp, Homo sapien
tgctggcaccgtccaagatgaccta

SEQ ID NO: 1619629 - DNA, 25 bp, Homo sapien
tgggactgaggtgaatctgatccat

SEQ ID NO: 1619630 - DNA, 25 bp, Homo sapien
gaagggtgcccacagcatggcatcc

SEQ ID NO: 1619631 - DNA, 25 bp, Homo sapien
agaagggtgcccacagcatggcatc

SEQ ID NO: 1619632 - DNA, 25 bp, Homo sapien
aagggtgcccacagcatggcatcca

SEQ ID NO: 1619633 - DNA, 25 bp, Homo sapien
gggcccagtgccaactgcccaggtc

SEQ ID NO: 1619634 - DNA, 25 bp, Homo sapien
gcccagtgccaactgcccaggtctt

SEQ ID NO: 1619635 - DNA, 25 bp, Homo sapien
ccagtgccaactgcccaggtcttca

SEQ ID NO: 1619636 - DNA, 25 bp, Homo sapien
agtgccaactgcccaggtcttcagc

SEQ ID NO: 1619637 - DNA, 25 bp, Homo sapien
tatcaagctgatatatgtggtctga

SEQ ID NO: 1619638 - DNA, 25 bp, Homo sapien
atcaagctgatatatgtggtctgag

SEQ ID NO: 1619639 - DNA, 25 bp, Homo sapien
gggacaagcctagccaattcagcct

SEQ ID NO: 1619640 - DNA, 25 bp, Homo sapien
cagcacacagagaagtcatgggatc

SEQ ID NO: 1619641 - DNA, 25 bp, Homo sapien
tacctgctggactaaaaatcctggg

SEQ ID NO: 1619642 - DNA, 25 bp, Homo sapien
ggaagacactggagacagacctgct

SEQ ID NO: 1619643 - DNA, 25 bp, Homo sapien
acatccaccaatgaatagatgttga

SEQ ID NO: 1619644 - DNA, 25 bp, Homo sapien
aatactagggaaacttattaatatg

SEQ ID NO: 1619645 - DNA, 25 bp, Homo sapien
ctttttacacaaaatggtaaggctg

SEQ ID NO: 1619646 - DNA, 25 bp, Homo sapien
ctagggaaacttattaatatgttgc

SEQ ID NO: 1619647 - DNA, 25 bp, Homo sapien
gggaaacttattaatatgttgctct

SEQ ID NO: 1619648 - DNA, 25 bp, Homo sapien
tttcaaggtgatcacaaaaatacct

SEQ ID NO: 1619649 - DNA, 25 bp, Homo sapien
gagggaaaacgtatttatgacaagc

SEQ ID NO: 1619650 - DNA, 25 bp, Homo sapien
tacctatagaagatatgcaaaagaa

SEQ ID NO: 1619651 - DNA, 25 bp, Homo sapien
actgaagtaaagatgagatttaagc

SEQ ID NO: 1619652 - DNA, 25 bp, Homo sapien
caaacagtaagctcaagtgggtggg

SEQ ID NO: 1619653 - DNA, 25 bp, Homo sapien
caataattatagatttcacggcctc

SEQ ID NO: 1619654 - DNA, 25 bp, Homo sapien
gagacacatacagaacgttccagtt

SEQ ID NO: 1619655 - DNA, 25 bp, Homo sapien
ccatttaccgggaatctataacaca

SEQ ID NO: 1619656 - DNA, 25 bp, Homo sapien
tctttgctccagacggctaatcagt

SEQ ID NO: 1619657 - DNA, 25 bp, Homo sapien
tcctgtctttgctccagacggctaa

SEQ ID NO: 1619658 - DNA, 25 bp, Homo sapien
cagacggctaatcagttctggctta

SEQ ID NO: 1619659 - DNA, 25 bp, Homo sapien
tgctccagacggctaatcagttctg

SEQ ID NO: 1619660 - DNA, 25 bp, Homo sapien
tcttttgtgtgaaatagaaattgtg

SEQ ID NO: 1619661 - DNA, 25 bp, Homo sapien
aatcttttgtgtgaaatagaaattg

SEQ ID NO: 1619662 - DNA, 25 bp, Homo sapien
taaaatcttttgtgtgaaatagaaa

SEQ ID NO: 1619663 - DNA, 25 bp, Homo sapien
tttgtgtgaaatagaaattgtgtat

SEQ ID NO: 1619664 - DNA, 25 bp, Homo sapien
tgagcagggttcagaaactcccact

SEQ ID NO: 1619665 - DNA, 25 bp, Homo sapien
ctctgctgagcagggttcagaaact

SEQ ID NO: 1619666 - DNA, 25 bp, Homo sapien
tttcctatacaaactctgctgagca

SEQ ID NO: 1619667 - DNA, 25 bp, Homo sapien
actttcctatacaaactctgctgag

SEQ ID NO: 1619668 - DNA, 25 bp, Homo sapien
ggccctaaatcccctgcacacgtcc

SEQ ID NO: 1619669 - DNA, 25 bp, Homo sapien
tggccctaaatcccctgcacacgtc

SEQ ID NO: 1619670 - DNA, 25 bp, Homo sapien
tctaatcgccatatgaaatgaaagt

SEQ ID NO: 1619671 - DNA, 25 bp, Homo sapien
gaaagtaattggttgatcagtctcc

SEQ ID NO: 1619672 - DNA, 25 bp, Homo sapien
cagacacagttcctggattgcagag

SEQ ID NO: 1619673 - DNA, 25 bp, Homo sapien
gcagagattatgattgcctcatctg

SEQ ID NO: 1619674 - DNA, 25 bp, Homo sapien
accaaccaaagagattatttttgtg

SEQ ID NO: 1619675 - DNA, 25 bp, Homo sapien
accaaagagattatttttgtgagaa

SEQ ID NO: 1619676 - DNA, 25 bp, Homo sapien
caaccaaagagattatttttgtgag

SEQ ID NO: 1619677 - DNA, 25 bp, Homo sapien
ctaggaaccaaccaaagagattatt

SEQ ID NO: 1619678 - DNA, 25 bp, Homo sapien
tgcacacaacaacctcaaatgtctc

SEQ ID NO: 1619679 - DNA, 25 bp, Homo sapien
ctgggaagagggtctacagtcactc

SEQ ID NO: 1619680 - DNA, 25 bp, Homo sapien
aaatgtctcaaagactctcaggtgc

SEQ ID NO: 1619681 - DNA, 25 bp, Homo sapien
tacagtcactctgggttgatgtcct

SEQ ID NO: 1619682 - DNA, 25 bp, Homo sapien
ccgggatgtcgtggagtcttagctc

SEQ ID NO: 1619683 - DNA, 25 bp, Homo sapien
ccgggaactactagagcagaggata

SEQ ID NO: 1619684 - DNA, 25 bp, Homo sapien
aggctgcgacagtcaccgggaacta

SEQ ID NO: 1619685 - DNA, 25 bp, Homo sapien
tagctctggatctcacagcatctgc

SEQ ID NO: 1619686 - DNA, 25 bp, Homo sapien
tggtcccggtgagcatcattctcag

SEQ ID NO: 1619687 - DNA, 25 bp, Homo sapien
tgattgaacctggttccatgtgtgc

SEQ ID NO: 1619688 - DNA, 25 bp, Homo sapien
gctactcgctttgttcctgattgaa

SEQ ID NO: 1619689 - DNA, 25 bp, Homo sapien
tcagtgtatactatgcacagggcac

SEQ ID NO: 1619690 - DNA, 25 bp, Homo sapien
cggtgtccaaagcattgctagcagc

SEQ ID NO: 1619691 - DNA, 25 bp, Homo sapien
ccaaagcattgctagcagccaattc

SEQ ID NO: 1619692 - DNA, 25 bp, Homo sapien
gtccaaagcattgctagcagccaat

SEQ ID NO: 1619693 - DNA, 25 bp, Homo sapien
aagcattgctagcagccaattccat

SEQ ID NO: 1619694 - DNA, 25 bp, Homo sapien
cccgttgccagggagagtgaataca

SEQ ID NO: 1619695 - DNA, 25 bp, Homo sapien
gccgccccgttgccagggagagtga

SEQ ID NO: 1619696 - DNA, 25 bp, Homo sapien
gccccgttgccagggagagtgaata

SEQ ID NO: 1619697 - DNA, 25 bp, Homo sapien
ccgttgccagggagagtgaatacag

SEQ ID NO: 1619698 - DNA, 25 bp, Homo sapien
tgtccaaatcgggtggttcggcctc

SEQ ID NO: 1619699 - DNA, 25 bp, Homo sapien
atcgggtggttcggcctcctctcat

SEQ ID NO: 1619700 - DNA, 25 bp, Homo sapien
aatcgggtggttcggcctcctctca

SEQ ID NO: 1619701 - DNA, 25 bp, Homo sapien
caaatcgggtggttcggcctcctct

SEQ ID NO: 1619702 - DNA, 25 bp, Homo sapien
ttatgtactcaagttatcctcacca

SEQ ID NO: 1619703 - DNA, 25 bp, Homo sapien
catccctatataaattccactgtgc

SEQ ID NO: 1619704 - DNA, 25 bp, Homo sapien
caagttatcctcaccaaggaagatc

SEQ ID NO: 1619705 - DNA, 25 bp, Homo sapien
tactcaagttatcctcaccaaggaa

SEQ ID NO: 1619706 - DNA, 25 bp, Homo sapien
ttggtacggactagctcgttattag

SEQ ID NO: 1619707 - DNA, 25 bp, Homo sapien
tgtattgtagacaacatggacgatc

SEQ ID NO: 1619708 - DNA, 25 bp, Homo sapien
tagatgtattgtagacaacatggac

SEQ ID NO: 1619709 - DNA, 25 bp, Homo sapien
ggtacggactagctcgttattagat

SEQ ID NO: 1619710 - DNA, 25 bp, Homo sapien
cctggacttgcagcgtttgtgccag

SEQ ID NO: 1619711 - DNA, 25 bp, Homo sapien
cccctggacttgcagcgtttgtgcc

SEQ ID NO: 1619712 - DNA, 25 bp, Homo sapien
acttgcagcgtttgtgccagttgtc

SEQ ID NO: 1619713 - DNA, 25 bp, Homo sapien
tggacttgcagcgtttgtgccagtt

SEQ ID NO: 1619714 - DNA, 25 bp, Homo sapien
cagttgcattggtcttatgcattaa

SEQ ID NO: 1619715 - DNA, 25 bp, Homo sapien
cgcgcccggccagttgcattggtct

SEQ ID NO: 1619716 - DNA, 25 bp, Homo sapien
gtttcatataatatctttctctctt

SEQ ID NO: 1619717 - DNA, 25 bp, Homo sapien
cggccagttgcattggtcttatgca

SEQ ID NO: 1619718 - DNA, 25 bp, Homo sapien
aggactggccatttacacttctgtg

SEQ ID NO: 1619719 - DNA, 25 bp, Homo sapien
atcacctgagtgcaggtgggctgat

SEQ ID NO: 1619720 - DNA, 25 bp, Homo sapien
actggccatttacacttctgtggtg

SEQ ID NO: 1619721 - DNA, 25 bp, Homo sapien
caaggactggccatttacacttctg

SEQ ID NO: 1619722 - DNA, 25 bp, Homo sapien
gactatgatgcatgtcacacttaat

SEQ ID NO: 1619723 - DNA, 25 bp, Homo sapien
aaccacctcctgttatgaagatggg

SEQ ID NO: 1619724 - DNA, 25 bp, Homo sapien
tctgtactattattgtggcatttct

SEQ ID NO: 1619725 - DNA, 25 bp, Homo sapien
tatgagcaattagcatacacacatg

SEQ ID NO: 1619726 - DNA, 25 bp, Homo sapien
agcattgacaatgagcacaatatag

SEQ ID NO: 1619727 - DNA, 25 bp, Homo sapien
tgttttgctaatttactgagtattt

SEQ ID NO: 1619728 - DNA, 25 bp, Homo sapien
tgatgaagcaaatacctcttcaggt

SEQ ID NO: 1619729 - DNA, 25 bp, Homo sapien
attgctgtctgaatttgatgaagca

SEQ ID NO: 1619730 - DNA, 25 bp, Homo sapien
tgtgctaaacttaatcagaggtgct

SEQ ID NO: 1619731 - DNA, 25 bp, Homo sapien
ggagattgtcctgactgtgctaaac

SEQ ID NO: 1619732 - DNA, 25 bp, Homo sapien
taagataatacgctggattcccagt

SEQ ID NO: 1619733 - DNA, 25 bp, Homo sapien
gaatctgcctattgaagcacaggca

SEQ ID NO: 1619734 - DNA, 25 bp, Homo sapien
taggtattgtgagtaatctgcttct

SEQ ID NO: 1619735 - DNA, 25 bp, Homo sapien
tatttttaaggactgaatagcattg

SEQ ID NO: 1619736 - DNA, 25 bp, Homo sapien
tttttaaggactgaatagcattgca

SEQ ID NO: 1619737 - DNA, 25 bp, Homo sapien
tccataccttaggtattgtgagtaa

SEQ ID NO: 1619738 - DNA, 25 bp, Homo sapien
aactgcagatcttttgaatcattgg

SEQ ID NO: 1619739 - DNA, 25 bp, Homo sapien
actgcagatcttttgaatcattggc

SEQ ID NO: 1619740 - DNA, 25 bp, Homo sapien
tattaaagttatactcacaaaggaa

SEQ ID NO: 1619741 - DNA, 25 bp, Homo sapien
ttaaagaactaagcccagaggatca

SEQ ID NO: 1619742 - DNA, 25 bp, Homo sapien
tgggctttgctggaaatggaacacc

SEQ ID NO: 1619743 - DNA, 25 bp, Homo sapien
ggagacattatattcaccacttggg

SEQ ID NO: 1619744 - DNA, 25 bp, Homo sapien
ttttgaacccagaaattgccagagg

SEQ ID NO: 1619745 - DNA, 25 bp, Homo sapien
ccaagatgccgggaccccttagaag

SEQ ID NO: 1619746 - DNA, 25 bp, Homo sapien
catctggagctctaggtcgcctctt

SEQ ID NO: 1619747 - DNA, 25 bp, Homo sapien
ctggagcaaagaggacggcttccgg

SEQ ID NO: 1619748 - DNA, 25 bp, Homo sapien
ccccttagaagcctagaaatggtga

SEQ ID NO: 1619749 - DNA, 25 bp, Homo sapien
agctctgaagttcaaataggtctca

SEQ ID NO: 1619750 - DNA, 25 bp, Homo sapien
tataaagccacaatacttactttga

SEQ ID NO: 1619751 - DNA, 25 bp, Homo sapien
tgaaatatagtgttttggctgaagt

SEQ ID NO: 1619752 - DNA, 25 bp, Homo sapien
gagatggttgtcaccatgttcgcca

SEQ ID NO: 1619753 - DNA, 25 bp, Homo sapien
ggtgtgagccataaacagtattttc

SEQ ID NO: 1619754 - DNA, 25 bp, Homo sapien
cttcagtttgctatgttgcaagttc

SEQ ID NO: 1619755 - DNA, 25 bp, Homo sapien
tattttctggcagacatgatcaatt

SEQ ID NO: 1619756 - DNA, 25 bp, Homo sapien
gaacctccattcaatggctaggaga

SEQ ID NO: 1619757 - DNA, 25 bp, Homo sapien
gcttttaggagaatattttctggca

SEQ ID NO: 1619758 - DNA, 25 bp, Homo sapien
tggctgggaagaggtgctcgtcact

SEQ ID NO: 1619759 - DNA, 25 bp, Homo sapien
cagagaccctcctcactttcagact

SEQ ID NO: 1619760 - DNA, 25 bp, Homo sapien
gatggtggctgggaagaggtgctcg

SEQ ID NO: 1619761 - DNA, 25 bp, Homo sapien
agagaccctcctcactttcagactg

SEQ ID NO: 1619762 - DNA, 25 bp, Homo sapien
tcagggctttgctccgtagttaaaa

SEQ ID NO: 1619763 - DNA, 25 bp, Homo sapien
tatggtgggccttatatctggatat

SEQ ID NO: 1619764 - DNA, 25 bp, Homo sapien
tattgagtatcagagagcattccct

SEQ ID NO: 1619765 - DNA, 25 bp, Homo sapien
cagactgcatatccttcagggcttt

SEQ ID NO: 1619766 - DNA, 25 bp, Homo sapien
cggacaggcactaaatgcctaccaa

SEQ ID NO: 1619767 - DNA, 25 bp, Homo sapien
gacacggacaggcactaaatgccta

SEQ ID NO: 1619768 - DNA, 25 bp, Homo sapien
aagacacatctatatgcatgttcac

SEQ ID NO: 1619769 - DNA, 25 bp, Homo sapien
ccagaatttattaagagctcaaaca

SEQ ID NO: 1619770 - DNA, 25 bp, Homo sapien
ttaaagcagaaggtatttgggaaca

SEQ ID NO: 1619771 - DNA, 25 bp, Homo sapien
aaagcagaaggtatttgggaacaat

SEQ ID NO: 1619772 - DNA, 25 bp, Homo sapien
taaagcagaaggtatttgggaacaa

SEQ ID NO: 1619773 - DNA, 25 bp, Homo sapien
ataccttatctgcagattctaggta

SEQ ID NO: 1619774 - DNA, 25 bp, Homo sapien
ctggacactcttacagtctgaccct

SEQ ID NO: 1619775 - DNA, 25 bp, Homo sapien
cagattctaggtaggacccacctgg

SEQ ID NO: 1619776 - DNA, 25 bp, Homo sapien
gacactcttacagtctgaccctttt

SEQ ID NO: 1619777 - DNA, 25 bp, Homo sapien
cagagaagagatcccctaatagagg

SEQ ID NO: 1619778 - DNA, 25 bp, Homo sapien
gaagagatcccctaatagaggctgc

SEQ ID NO: 1619779 - DNA, 25 bp, Homo sapien
agcaagtggagtacaatcagagaag

SEQ ID NO: 1619780 - DNA, 25 bp, Homo sapien
acaatcagagaagagatcccctaat

SEQ ID NO: 1619781 - DNA, 25 bp, Homo sapien
acagcagttgcaagaggagttgtga

SEQ ID NO: 1619782 - DNA, 25 bp, Homo sapien
gggagcaaagactgaagttgcctag

SEQ ID NO: 1619783 - DNA, 25 bp, Homo sapien
cagcagttgcaagaggagttgtgaa

SEQ ID NO: 1619784 - DNA, 25 bp, Homo sapien
gactgaagttgcctagaatctacac

SEQ ID NO: 1619785 - DNA, 25 bp, Homo sapien
tgtgaccagtgtttcagcccgtttt

SEQ ID NO: 1619786 - DNA, 25 bp, Homo sapien
taacaaaagaatgttctccagcccc

SEQ ID NO: 1619787 - DNA, 25 bp, Homo sapien
catggcattgggctacagcactttc

SEQ ID NO: 1619788 - DNA, 25 bp, Homo sapien
catctgccactgagggacagccttg

SEQ ID NO: 1619789 - DNA, 25 bp, Homo sapien
taaccacccaaagtgcacaattact

SEQ ID NO: 1619790 - DNA, 25 bp, Homo sapien
cattgtggagtatattagaacttcc

SEQ ID NO: 1619791 - DNA, 25 bp, Homo sapien
ggtcaagagttcacaatcaagctgg

SEQ ID NO: 1619792 - DNA, 25 bp, Homo sapien
ttgcagtgagcagaacacgccccta

SEQ ID NO: 1619793 - DNA, 25 bp, Homo sapien
agaattaatgagaacttaaacaagt

SEQ ID NO: 1619794 - DNA, 25 bp, Homo sapien
cagaattaatgagaacttaaacaag

SEQ ID NO: 1619795 - DNA, 25 bp, Homo sapien
cagagaccttcctccgtccctttat

SEQ ID NO: 1619796 - DNA, 25 bp, Homo sapien
ctctaagggctttctttattaatct

SEQ ID NO: 1619797 - DNA, 25 bp, Homo sapien
tctctaagggctttctttattaatc

SEQ ID NO: 1619798 - DNA, 25 bp, Homo sapien
ttgcttcagagaccttcctccgtcc

SEQ ID NO: 1619799 - DNA, 25 bp, Homo sapien
cattatgttagctagttattttact

SEQ ID NO: 1619800 - DNA, 25 bp, Homo sapien
tcctaacattgatggtgtttacgat

SEQ ID NO: 1619801 - DNA, 25 bp, Homo sapien
caggatttgtttgtccgtaaaggat

SEQ ID NO: 1619802 - DNA, 25 bp, Homo sapien
ggtctgggccctttatccaatttgc

SEQ ID NO: 1619803 - DNA, 25 bp, Homo sapien
aaagtgtagaaggtgcctcaaaaca

SEQ ID NO: 1619804 - DNA, 25 bp, Homo sapien
taacctcctgttgcaggcttaatat

SEQ ID NO: 1619805 - DNA, 25 bp, Homo sapien
actgtgtttatataagggatggaaa

SEQ ID NO: 1619806 - DNA, 25 bp, Homo sapien
tcatcatcattagtaagaccgtccc

SEQ ID NO: 1619807 - DNA, 25 bp, Homo sapien
ccaggagacactgcgatatgaccca

SEQ ID NO: 1619808 - DNA, 25 bp, Homo sapien
ctcccaggagacactgcgatatgac

SEQ ID NO: 1619809 - DNA, 25 bp, Homo sapien
acactgcgatatgacccagtgagtc

SEQ ID NO: 1619810 - DNA, 25 bp, Homo sapien
actgcgatatgacccagtgagtcct

SEQ ID NO: 1619811 - DNA, 25 bp, Homo sapien
cagggtgtcctggggttttagctgt

SEQ ID NO: 1619812 - DNA, 25 bp, Homo sapien
tgtcctggggttttagctgtggatc

SEQ ID NO: 1619813 - DNA, 25 bp, Homo sapien
ttctatgcttccagggtgtcctggg

SEQ ID NO: 1619814 - DNA, 25 bp, Homo sapien
ggtgtcctggggttttagctgtgga

SEQ ID NO: 1619815 - DNA, 25 bp, Homo sapien
gcttcagcccagtctggtatcctag

SEQ ID NO: 1619816 - DNA, 25 bp, Homo sapien
taactagttgtttcgcatgaggcct

SEQ ID NO: 1619817 - DNA, 25 bp, Homo sapien
ttcatgacccggcacgaggaacata

SEQ ID NO: 1619818 - DNA, 25 bp, Homo sapien
ccacaaattcgcctgtcttgatgaa

SEQ ID NO: 1619819 - DNA, 25 bp, Homo sapien
atctccgctcaccacaacatccact

SEQ ID NO: 1619820 - DNA, 25 bp, Homo sapien
ccgctcaccacaacatccacttcct

SEQ ID NO: 1619821 - DNA, 25 bp, Homo sapien
tctccgctcaccacaacatccactt

SEQ ID NO: 1619822 - DNA, 25 bp, Homo sapien
tgggttcaagcaattctcttgcctc

SEQ ID NO: 1619823 - DNA, 25 bp, Homo sapien
tagtactgcagtggcatagacacca

SEQ ID NO: 1619824 - DNA, 25 bp, Homo sapien
cagaattctatgtagggttgccacc

SEQ ID NO: 1619825 - DNA, 25 bp, Homo sapien
ctaccttggagtcctgcctcagata

SEQ ID NO: 1619826 - DNA, 25 bp, Homo sapien
ggttgccaccttgccgcagatctgt

SEQ ID NO: 1619827 - DNA, 25 bp, Homo sapien
taagcactcctctacacttaccaga

SEQ ID NO: 1619828 - DNA, 25 bp, Homo sapien
caaaccttagtagacatgagataat

SEQ ID NO: 1619829 - DNA, 25 bp, Homo sapien
ggaagttctcaacccttattataca

SEQ ID NO: 1619830 - DNA, 25 bp, Homo sapien
tgggaaagcctttaaccagctatca

SEQ ID NO: 1619831 - DNA, 25 bp, Homo sapien
catgatgtctgctcactgtaaactc

SEQ ID NO: 1619832 - DNA, 25 bp, Homo sapien
acggcgtctctttctgtcgcccaag

SEQ ID NO: 1619833 - DNA, 25 bp, Homo sapien
tggcatgatgtctgctcactgtaaa

SEQ ID NO: 1619834 - DNA, 25 bp, Homo sapien
gacggcgtctctttctgtcgcccaa

SEQ ID NO: 1619835 - DNA, 25 bp, Homo sapien
gacccctgaaggatgcataaagaca

SEQ ID NO: 1619836 - DNA, 25 bp, Homo sapien
cctgcatcagagcactagcccagat

SEQ ID NO: 1619837 - DNA, 25 bp, Homo sapien
tgttgtcaagcatttctggtaattt

SEQ ID NO: 1619838 - DNA, 25 bp, Homo sapien
gatattgaatagtcgctgaagtgcc

SEQ ID NO: 1619839 - DNA, 25 bp, Homo sapien
catttcaaatgggtgatattgaata

SEQ ID NO: 1619840 - DNA, 25 bp, Homo sapien
tgaatagtcgctgaagtgccacagg

SEQ ID NO: 1619841 - DNA, 25 bp, Homo sapien
tcagttgagatctaatgacaaaaaa

SEQ ID NO: 1619842 - DNA, 25 bp, Homo sapien
tgaaatcaagattcaacttgacttt

SEQ ID NO: 1619843 - DNA, 25 bp, Homo sapien
tgtgaaatcaagattcaacttgact

SEQ ID NO: 1619844 - DNA, 25 bp, Homo sapien
cttgactttctacaagagtcagttg

SEQ ID NO: 1619845 - DNA, 25 bp, Homo sapien
agattaccttctacgacaaaaaatg

SEQ ID NO: 1619846 - DNA, 25 bp, Homo sapien
taacaatacatagattcattccctg

SEQ ID NO: 1619847 - DNA, 25 bp, Homo sapien
tgataaatttacagctatatagaaa

SEQ ID NO: 1619848 - DNA, 25 bp, Homo sapien
ttcattccctgtgaatgtatgacaa

SEQ ID NO: 1619849 - DNA, 25 bp, Homo sapien
ctccatctgtaagggtgcacccttc

SEQ ID NO: 1619850 - DNA, 25 bp, Homo sapien
ccttctatagaagtacctcggcttg

SEQ ID NO: 1619851 - DNA, 25 bp, Homo sapien
tctgtaagggtgcacccttctatag

SEQ ID NO: 1619852 - DNA, 25 bp, Homo sapien
ccatctgtaagggtgcacccttcta

SEQ ID NO: 1619853 - DNA, 25 bp, Homo sapien
tgtccagttttattcattacaaata

SEQ ID NO: 1619854 - DNA, 25 bp, Homo sapien
aaatgtccagttttattcattacaa

SEQ ID NO: 1619855 - DNA, 25 bp, Homo sapien
taacaaatgtccagttttattcatt

SEQ ID NO: 1619856 - DNA, 25 bp, Homo sapien
ttaacaaatgtccagttttattcat

SEQ ID NO: 1619857 - DNA, 25 bp, Homo sapien
tatgcatcattttatacattcacac

SEQ ID NO: 1619858 - DNA, 25 bp, Homo sapien
tattagtcacctaattaacatattg

SEQ ID NO: 1619859 - DNA, 25 bp, Homo sapien
taagcagaaactcatacttacacaa

SEQ ID NO: 1619860 - DNA, 25 bp, Homo sapien
gctttcagcattcccgaggtgttta

SEQ ID NO: 1619861 - DNA, 25 bp, Homo sapien
caaagaggtttgtcagcctggtgca

SEQ ID NO: 1619862 - DNA, 25 bp, Homo sapien
aacttatggctaggaatggaggctc

SEQ ID NO: 1619863 - DNA, 25 bp, Homo sapien
tagaaaatagtctgaacacctagct

SEQ ID NO: 1619864 - DNA, 25 bp, Homo sapien
caagtgcggcaaccaaataaaggct

SEQ ID NO: 1619865 - DNA, 25 bp, Homo sapien
agtattggtttctgtccactatgaa

SEQ ID NO: 1619866 - DNA, 25 bp, Homo sapien
ttatattcacttagagttgaggatg

SEQ ID NO: 1619867 - DNA, 25 bp, Homo sapien
tcttatattcacttagagttgagga

SEQ ID NO: 1619868 - DNA, 25 bp, Homo sapien
attgtcttatattcacttagagttg

SEQ ID NO: 1619869 - DNA, 25 bp, Homo sapien
tgaggaccatgtaaaggtttttata

SEQ ID NO: 1619870 - DNA, 25 bp, Homo sapien
agtaaggtgtgaggaatgggtgaaa

SEQ ID NO: 1619871 - DNA, 25 bp, Homo sapien
atcttctcatgttcactaagggttg

SEQ ID NO: 1619872 - DNA, 25 bp, Homo sapien
ggaatgggtgaaagctttgccatat

SEQ ID NO: 1619873 - DNA, 25 bp, Homo sapien
tatagtaaggtgtgaaaaatggttg

SEQ ID NO: 1619874 - DNA, 25 bp, Homo sapien
ttcagtaagcgtagaggaatactta

SEQ ID NO: 1619875 - DNA, 25 bp, Homo sapien
tcttatgaatagcaagctgtgaggg

SEQ ID NO: 1619876 - DNA, 25 bp, Homo sapien
aagcgtagaggaatacttaaagcca

SEQ ID NO: 1619877 - DNA, 25 bp, Homo sapien
tatgaatagcaagctgtgagggcca

SEQ ID NO: 1619878 - DNA, 25 bp, Homo sapien
tgaagaaggggttgtgggatggtta

SEQ ID NO: 1619879 - DNA, 25 bp, Homo sapien
gagttatcttatgaatagcaagctg

SEQ ID NO: 1619880 - DNA, 25 bp, Homo sapien
tgagttatcttatgaatagcaagct

SEQ ID NO: 1619881 - DNA, 25 bp, Homo sapien
agttatcttatgaatagcaagctgt

SEQ ID NO: 1619882 - DNA, 25 bp, Homo sapien
tgtgtagtaagggtacaggagtact

SEQ ID NO: 1619883 - DNA, 25 bp, Homo sapien
tgtagtaagggtacaggagtactta

SEQ ID NO: 1619884 - DNA, 25 bp, Homo sapien
cttatgtgtagtaagggtacaggag

SEQ ID NO: 1619885 - DNA, 25 bp, Homo sapien
tatgtgtagtaagggtacaggagta

SEQ ID NO: 1619886 - DNA, 25 bp, Homo sapien
gttgagtaccagttaaagtctttgc

SEQ ID NO: 1619887 - DNA, 25 bp, Homo sapien
tgtagtaaaggttgagtaccagtta

SEQ ID NO: 1619888 - DNA, 25 bp, Homo sapien
tatctgtagtaaaggttgagtacca

SEQ ID NO: 1619889 - DNA, 25 bp, Homo sapien
tcttatctgtagtaaaggttgagta

SEQ ID NO: 1619890 - DNA, 25 bp, Homo sapien
tgccacattctatatgtttcaaagg

SEQ ID NO: 1619891 - DNA, 25 bp, Homo sapien
gatttgccacattctatatgtttca

SEQ ID NO: 1619892 - DNA, 25 bp, Homo sapien
aagatttgccacattctatatgttt

SEQ ID NO: 1619893 - DNA, 25 bp, Homo sapien
taaaagatttgccacattctatatg

SEQ ID NO: 1619894 - DNA, 25 bp, Homo sapien
ctgtttgaatttgaaaattgatgaa

SEQ ID NO: 1619895 - DNA, 25 bp, Homo sapien
gtttgaatttgaaaattgatgaaag

SEQ ID NO: 1619896 - DNA, 25 bp, Homo sapien
tgtttgaatttgaaaattgatgaaa

SEQ ID NO: 1619897 - DNA, 25 bp, Homo sapien
tttgaatttgaaaattgatgaaaga

SEQ ID NO: 1619898 - DNA, 25 bp, Homo sapien
ttttgcaatgggtagttgtcaagca

SEQ ID NO: 1619899 - DNA, 25 bp, Homo sapien
tttgcaatgggtagttgtcaagcat

SEQ ID NO: 1619900 - DNA, 25 bp, Homo sapien
ttgcaatgggtagttgtcaagcatt

SEQ ID NO: 1619901 - DNA, 25 bp, Homo sapien
gcaatgggtagttgtcaagcattgg

SEQ ID NO: 1619902 - DNA, 25 bp, Homo sapien
atgttctgctctagccaaagttctt

SEQ ID NO: 1619903 - DNA, 25 bp, Homo sapien
ttatgttctgctctagccaaagttc

SEQ ID NO: 1619904 - DNA, 25 bp, Homo sapien
tctgctctagccaaagttcttgggc

SEQ ID NO: 1619905 - DNA, 25 bp, Homo sapien
cactttcacatcctttttttaactg

SEQ ID NO: 1619906 - DNA, 25 bp, Homo sapien
aagttaattgccaaccaggcatgat

SEQ ID NO: 1619907 - DNA, 25 bp, Homo sapien
gttaattgccaaccaggcatgatgg

SEQ ID NO: 1619908 - DNA, 25 bp, Homo sapien
aaaaagttaattgccaaccaggcat

SEQ ID NO: 1619909 - DNA, 25 bp, Homo sapien
gaatagagagctccggaatgaaccc

SEQ ID NO: 1619910 - DNA, 25 bp, Homo sapien
ggttgccatgagtacaaaatagaga

SEQ ID NO: 1619911 - DNA, 25 bp, Homo sapien
gtgatactgacacaaagataaacag

SEQ ID NO: 1619912 - DNA, 25 bp, Homo sapien
gttaaaagctacagtaacataaaca

SEQ ID NO: 1619913 - DNA, 25 bp, Homo sapien
cgggcagcggagctgtctcagtctt

SEQ ID NO: 1619914 - DNA, 25 bp, Homo sapien
gccccagctgcagatatgaagcgga

SEQ ID NO: 1619915 - DNA, 25 bp, Homo sapien
cgcccgaccgccgggaggatggagt

SEQ ID NO: 1619916 - DNA, 25 bp, Homo sapien
aggatggagttcagcgggcagcgga

SEQ ID NO: 1619917 - DNA, 25 bp, Homo sapien
taaatgcatgagcaacaaatacaag

SEQ ID NO: 1619918 - DNA, 25 bp, Homo sapien
gaaacatttgacaggatgcacaaaa

SEQ ID NO: 1619919 - DNA, 25 bp, Homo sapien
tgacagcgaaatcatctcacaccca

SEQ ID NO: 1619920 - DNA, 25 bp, Homo sapien
ttggccaacataatgtacgctatct

SEQ ID NO: 1619921 - DNA, 25 bp, Homo sapien
tcatgtctcttcacggtcagaggtt

SEQ ID NO: 1619922 - DNA, 25 bp, Homo sapien
ggggtttggcaatcatctcatgtct

SEQ ID NO: 1619923 - DNA, 25 bp, Homo sapien
tcagaggtttttttccttgctccag

SEQ ID NO: 1619924 - DNA, 25 bp, Homo sapien
ctgggggtttggcaatcatctcatg

SEQ ID NO: 1619925 - DNA, 25 bp, Homo sapien
atgtatttaagttgtcctcaccaag

SEQ ID NO: 1619926 - DNA, 25 bp, Homo sapien
ctcaccaaggaagaccaggtgtctg

SEQ ID NO: 1619927 - DNA, 25 bp, Homo sapien
ttatgtatttaagttgtcctcacca

SEQ ID NO: 1619928 - DNA, 25 bp, Homo sapien
caccaaggaagaccaggtgtctgta

SEQ ID NO: 1619929 - DNA, 25 bp, Homo sapien
agactatgcctttaaatgtgtcagt

SEQ ID NO: 1619930 - DNA, 25 bp, Homo sapien
gactatgcctttaaatgtgtcagta

SEQ ID NO: 1619931 - DNA, 25 bp, Homo sapien
actatgcctttaaatgtgtcagtac

SEQ ID NO: 1619932 - DNA, 25 bp, Homo sapien
ctatgcctttaaatgtgtcagtacc

SEQ ID NO: 1619933 - DNA, 25 bp, Homo sapien
tttacaacaaaaagattcaagaaca

SEQ ID NO: 1619934 - DNA, 25 bp, Homo sapien
tacaacaaaaagattcaagaacaat

SEQ ID NO: 1619935 - DNA, 25 bp, Homo sapien
caacaaaaagattcaagaacaatga

SEQ ID NO: 1619936 - DNA, 25 bp, Homo sapien
acaaaaagattcaagaacaatgaga

SEQ ID NO: 1619937 - DNA, 25 bp, Homo sapien
tcctctggtgccctttctgccacag

SEQ ID NO: 1619938 - DNA, 25 bp, Homo sapien
cctctggtgccctttctgccacaga

SEQ ID NO: 1619939 - DNA, 25 bp, Homo sapien
gtcctctggtgccctttctgccaca

SEQ ID NO: 1619940 - DNA, 25 bp, Homo sapien
ctctggtgccctttctgccacagac

SEQ ID NO: 1619941 - DNA, 25 bp, Homo sapien
tgtgcgcaccacttagtgcaaaggt

SEQ ID NO: 1619942 - DNA, 25 bp, Homo sapien
gaaagtattttgagaccctcatacc

SEQ ID NO: 1619943 - DNA, 25 bp, Homo sapien
aaccaaacagaacaggtcctgtgcg

SEQ ID NO: 1619944 - DNA, 25 bp, Homo sapien
ggaacttcttaactctcatgaaagt

SEQ ID NO: 1619945 - DNA, 25 bp, Homo sapien
tgggtctccagatctccttgtttat

SEQ ID NO: 1619946 - DNA, 25 bp, Homo sapien
ggtctccagatctccttgtttatca

SEQ ID NO: 1619947 - DNA, 25 bp, Homo sapien
cagatctccttgtttatcatccaag

SEQ ID NO: 1619948 - DNA, 25 bp, Homo sapien
atcatccaagtaccaggaaactgga

SEQ ID NO: 1619949 - DNA, 25 bp, Homo sapien
tgtacaaaccaaagacaactcttgt

SEQ ID NO: 1619950 - DNA, 25 bp, Homo sapien
caaagacaactcttgtatgatgggt

SEQ ID NO: 1619951 - DNA, 25 bp, Homo sapien
actcttgtatgatgggttgaacaaa

SEQ ID NO: 1619952 - DNA, 25 bp, Homo sapien
ccctgtacaaaccaaagacaactct

SEQ ID NO: 1619953 - DNA, 25 bp, Homo sapien
cagttcagtttgttggccccacggt

SEQ ID NO: 1619954 - DNA, 25 bp, Homo sapien
caggtgttacttgcacattagtgag

SEQ ID NO: 1619955 - DNA, 25 bp, Homo sapien
tatggagctacagatttaggtcctg

SEQ ID NO: 1619956 - DNA, 25 bp, Homo sapien
tcaattcacatgttactccagttca

SEQ ID NO: 1619957 - DNA, 25 bp, Homo sapien
cattgcaccccagcctcagcaacag

SEQ ID NO: 1619958 - DNA, 25 bp, Homo sapien
attgcaccccagcctcagcaacaga

SEQ ID NO: 1619959 - DNA, 25 bp, Homo sapien
atgccattgcaccccagcctcagca

SEQ ID NO: 1619960 - DNA, 25 bp, Homo sapien
atcatgccattgcaccccagcctca

SEQ ID NO: 1619961 - DNA, 25 bp, Homo sapien
ggccgcgccataccagaaagccgtc

SEQ ID NO: 1619962 - DNA, 25 bp, Homo sapien
aggccgcgccataccagaaagccgt

SEQ ID NO: 1619963 - DNA, 25 bp, Homo sapien
acaaaggccgcgccataccagaaag

SEQ ID NO: 1619964 - DNA, 25 bp, Homo sapien
aaaggccgcgccataccagaaagcc

SEQ ID NO: 1619965 - DNA, 25 bp, Homo sapien
actccaaatgccagttccttctggg

SEQ ID NO: 1619966 - DNA, 25 bp, Homo sapien
tacagatgtccagactccaaatgcc

SEQ ID NO: 1619967 - DNA, 25 bp, Homo sapien
gttacagatgtccagactccaaatg

SEQ ID NO: 1619968 - DNA, 25 bp, Homo sapien
aaatgccagttccttctgggtgttc

SEQ ID NO: 1619969 - DNA, 25 bp, Homo sapien
ttcaatcgctaggagatgagacagc

SEQ ID NO: 1619970 - DNA, 25 bp, Homo sapien
tatcccatggtgtctgaataaagtg

SEQ ID NO: 1619971 - DNA, 25 bp, Homo sapien
ggagctatcactatctagagacatg

SEQ ID NO: 1619972 - DNA, 25 bp, Homo sapien
gattaaacttacatcttgtcagagc

SEQ ID NO: 1619973 - DNA, 25 bp, Homo sapien
taaacagcagtcacaggggtggtgc

SEQ ID NO: 1619974 - DNA, 25 bp, Homo sapien
ctaaacagcagtcacaggggtggtg

SEQ ID NO: 1619975 - DNA, 25 bp, Homo sapien
gtcgcatgcttcaaggggcaaaaag

SEQ ID NO: 1619976 - DNA, 25 bp, Homo sapien
ggtctatgttctgtagtgcatgtat

SEQ ID NO: 1619977 - DNA, 25 bp, Homo sapien
tttctaagggaacaggacaagggca

SEQ ID NO: 1619978 - DNA, 25 bp, Homo sapien
aacagggagtaggtcgcatgcttca

SEQ ID NO: 1619979 - DNA, 25 bp, Homo sapien
cccagagtattaatatcagtattcc

SEQ ID NO: 1619980 - DNA, 25 bp, Homo sapien
ggacagacattcccaaagaggccat

SEQ ID NO: 1619981 - DNA, 25 bp, Homo sapien
gatcagagcatatctcagtccttat

SEQ ID NO: 1619982 - DNA, 25 bp, Homo sapien
tccctacttgcacatccgtttatag

SEQ ID NO: 1619983 - DNA, 25 bp, Homo sapien
tttattaaaatgtgcatcattcttt

SEQ ID NO: 1619984 - DNA, 25 bp, Homo sapien
tttttattaaaatgtgcatcattct

SEQ ID NO: 1619985 - DNA, 25 bp, Homo sapien
ttcctaggcagagtgtttgtgtccc

SEQ ID NO: 1619986 - DNA, 25 bp, Homo sapien
tattaaaatgtgcatcattctttta

SEQ ID NO: 1619987 - DNA, 25 bp, Homo sapien
tcagccataacagtaagcaaagaca

SEQ ID NO: 1619988 - DNA, 25 bp, Homo sapien
agaaatgaaggtttttaccagtcat

SEQ ID NO: 1619989 - DNA, 25 bp, Homo sapien
atgaaggtttttaccagtcataatt

SEQ ID NO: 1619990 - DNA, 25 bp, Homo sapien
acaaatgaaaagcagcctggtcaac

SEQ ID NO: 1619991 - DNA, 25 bp, Homo sapien
ttttttgtctggttaagagagcttc

SEQ ID NO: 1619992 - DNA, 25 bp, Homo sapien
tttatccgcttcacttccattcact

SEQ ID NO: 1619993 - DNA, 25 bp, Homo sapien
ttttgtctggttaagagagcttctt

SEQ ID NO: 1619994 - DNA, 25 bp, Homo sapien
cacatttaccttttatccgcttcac

SEQ ID NO: 1619995 - DNA, 25 bp, Homo sapien
tgcccacaaggttcacacaactctt

SEQ ID NO: 1619996 - DNA, 25 bp, Homo sapien
tctgcccacaaggttcacacaactc

SEQ ID NO: 1619997 - DNA, 25 bp, Homo sapien
aaggttcacacaactcttctgcctc

SEQ ID NO: 1619998 - DNA, 25 bp, Homo sapien
ccacaaggttcacacaactcttctg

SEQ ID NO: 1619999 - DNA, 25 bp, Homo sapien
tatggaagaagtgtattaaccatgt

SEQ ID NO: 1620000 - DNA, 25 bp, Homo sapien
ctcagttcacagtgtaaaaagtgaa

SEQ ID NO: 1620001 - DNA, 25 bp, Homo sapien
tatcatatggaagaagtgtattaac

SEQ ID NO: 1620002 - DNA, 25 bp, Homo sapien
cagttcacagtgtaaaaagtgaagt

SEQ ID NO: 1620003 - DNA, 25 bp, Homo sapien
aattgggctgttatttgcatagcta

SEQ ID NO: 1620004 - DNA, 25 bp, Homo sapien
agcaactaatggcatctgttaccca

SEQ ID NO: 1620005 - DNA, 25 bp, Homo sapien
ccattatggaccctgagtaattcag

SEQ ID NO: 1620006 - DNA, 25 bp, Homo sapien
tgcatagctagataattaccaactt

SEQ ID NO: 1620007 - DNA, 25 bp, Homo sapien
gactattggtatcccagaggctgat

SEQ ID NO: 1620008 - DNA, 25 bp, Homo sapien
ccttactggaagcaacatggaggag

SEQ ID NO: 1620009 - DNA, 25 bp, Homo sapien
gattctaataccagcaccgtgggag

SEQ ID NO: 1620010 - DNA, 25 bp, Homo sapien
aatgagttcagccttgttggtagac

SEQ ID NO: 1620011 - DNA, 25 bp, Homo sapien
taaaactaaaagtctatgtgtttgc

SEQ ID NO: 1620012 - DNA, 25 bp, Homo sapien
tgtgctttaataggcagactctggg

SEQ ID NO: 1620013 - DNA, 25 bp, Homo sapien
ggagaatccgaatcacaggccagaa

SEQ ID NO: 1620014 - DNA, 25 bp, Homo sapien
tactcacacaaaaacactcaattca

SEQ ID NO: 1620015 - DNA, 25 bp, Homo sapien
ggcacaataatggttcattaaacgc

SEQ ID NO: 1620016 - DNA, 25 bp, Homo sapien
aaagcatataattacactattggta

SEQ ID NO: 1620017 - DNA, 25 bp, Homo sapien
taaagtgggatacagttagtggcac

SEQ ID NO: 1620018 - DNA, 25 bp, Homo sapien
cacatattatatacccacgaataca

SEQ ID NO: 1620019 - DNA, 25 bp, Homo sapien
gaacatttacgttatacattactta

SEQ ID NO: 1620020 - DNA, 25 bp, Homo sapien
caagtagtaaagtaatatactcatt

SEQ ID NO: 1620021 - DNA, 25 bp, Homo sapien
acaagtagtaaagtaatatactcat

SEQ ID NO: 1620022 - DNA, 25 bp, Homo sapien
gctctgaacatttacgttatacatt

SEQ ID NO: 1620023 - DNA, 25 bp, Homo sapien
ttctgtgagataaggtgtaagaact

SEQ ID NO: 1620024 - DNA, 25 bp, Homo sapien
agcttttctgtgagataaggtgtaa

SEQ ID NO: 1620025 - DNA, 25 bp, Homo sapien
attatccaacctacaatcaagagtg

SEQ ID NO: 1620026 - DNA, 25 bp, Homo sapien
aattatccaacctacaatcaagagt

SEQ ID NO: 1620027 - DNA, 25 bp, Homo sapien
tatgtctagtaagggcagaggtgtc

SEQ ID NO: 1620028 - DNA, 25 bp, Homo sapien
tgttgggtttctttcccgcatgaat

SEQ ID NO: 1620029 - DNA, 25 bp, Homo sapien
ttgttgggtttctttcccgcatgaa

SEQ ID NO: 1620030 - DNA, 25 bp, Homo sapien
atttgttgggtttctttcccgcatg

SEQ ID NO: 1620031 - DNA, 25 bp, Homo sapien
ctactaaggtttgaggatgaaataa

SEQ ID NO: 1620032 - DNA, 25 bp, Homo sapien
taaaggctttgccacatttatcaca

SEQ ID NO: 1620033 - DNA, 25 bp, Homo sapien
aaaggctttgccacatttatcacac

SEQ ID NO: 1620034 - DNA, 25 bp, Homo sapien
aaataaaggctttgccacatttatc

SEQ ID NO: 1620035 - DNA, 25 bp, Homo sapien
aaaaagcatagtgggatagcttaaa

SEQ ID NO: 1620036 - DNA, 25 bp, Homo sapien
aaaaaagcatagtgggatagcttaa

SEQ ID NO: 1620037 - DNA, 25 bp, Homo sapien
aaagcatagtgggatagcttaaagc

SEQ ID NO: 1620038 - DNA, 25 bp, Homo sapien
aagcatagtgggatagcttaaagct

SEQ ID NO: 1620039 - DNA, 25 bp, Homo sapien
atgtgtagtaagggtagaggggcac

SEQ ID NO: 1620040 - DNA, 25 bp, Homo sapien
ttatcttatgcgcagtaaggataga

SEQ ID NO: 1620041 - DNA, 25 bp, Homo sapien
atcttatgcgcagtaaggatagagg

SEQ ID NO: 1620042 - DNA, 25 bp, Homo sapien
tatcttatgcgcagtaaggatagag

SEQ ID NO: 1620043 - DNA, 25 bp, Homo sapien
aaattgtcatgtccatagttttcat

SEQ ID NO: 1620044 - DNA, 25 bp, Homo sapien
tgtcatgtccatagttttcatatct

SEQ ID NO: 1620045 - DNA, 25 bp, Homo sapien
tcatctacactttcacagccctttt

SEQ ID NO: 1620046 - DNA, 25 bp, Homo sapien
tctacactttcacagccctttttaa

SEQ ID NO: 1620047 - DNA, 25 bp, Homo sapien
gctgcacatcactatggctggctat

SEQ ID NO: 1620048 - DNA, 25 bp, Homo sapien
aaataagagcctccaccaagcctgg

SEQ ID NO: 1620049 - DNA, 25 bp, Homo sapien
gcacacttcaatagatttaaggtgg

SEQ ID NO: 1620050 - DNA, 25 bp, Homo sapien
ttatgtcacctgaactaatccagtg

SEQ ID NO: 1620051 - DNA, 25 bp, Homo sapien
ctgaggggttggctaccatctcatg

SEQ ID NO: 1620052 - DNA, 25 bp, Homo sapien
tggctaccatctcatgtttcttcat

SEQ ID NO: 1620053 - DNA, 25 bp, Homo sapien
gaggggttggctaccatctcatgtt

SEQ ID NO: 1620054 - DNA, 25 bp, Homo sapien
ggttggctaccatctcatgtttctt

SEQ ID NO: 1620055 - DNA, 25 bp, Homo sapien
aggtttttttccttgctccagacag

SEQ ID NO: 1620056 - DNA, 25 bp, Homo sapien
cagacaggtgatgaggtctggctta

SEQ ID NO: 1620057 - DNA, 25 bp, Homo sapien
tgatgaggtctggcttagagacaac

SEQ ID NO: 1620058 - DNA, 25 bp, Homo sapien
tgaggtctggcttagagacaacaat

SEQ ID NO: 1620059 - DNA, 25 bp, Homo sapien
tcctatataaattccgctgtgcagt

SEQ ID NO: 1620060 - DNA, 25 bp, Homo sapien
atataaattccgctgtgcagtgtcc

SEQ ID NO: 1620061 - DNA, 25 bp, Homo sapien
cgctgtgcagtgtccaggcaatgcc

SEQ ID NO: 1620062 - DNA, 25 bp, Homo sapien
caggcaatgccactcctccagagag

SEQ ID NO: 1620063 - DNA, 25 bp, Homo sapien
ccacgtctctaaattgcaatggccc

SEQ ID NO: 1620064 - DNA, 25 bp, Homo sapien
ctatggccacgtctctaaattgcaa

SEQ ID NO: 1620065 - DNA, 25 bp, Homo sapien
tggccacgtctctaaattgcaatgg

SEQ ID NO: 1620066 - DNA, 25 bp, Homo sapien
tatggccacgtctctaaattgcaat

SEQ ID NO: 1620067 - DNA, 25 bp, Homo sapien
cacacaacatacgtttttaccaagt

SEQ ID NO: 1620068 - DNA, 25 bp, Homo sapien
cacaacatacgtttttaccaagtag

SEQ ID NO: 1620069 - DNA, 25 bp, Homo sapien
acacacacaacatacgtttttacca

SEQ ID NO: 1620070 - DNA, 25 bp, Homo sapien
catacgtttttaccaagtagccaag

SEQ ID NO: 1620071 - DNA, 25 bp, Homo sapien
ttgctacagatagttgtcctggtgc

SEQ ID NO: 1620072 - DNA, 25 bp, Homo sapien
gctgattcaaaatgctaggttggtg

SEQ ID NO: 1620073 - DNA, 25 bp, Homo sapien
caaaaacgccgtggtgaaggtcctg

SEQ ID NO: 1620074 - DNA, 25 bp, Homo sapien
ttactgtgtgcacgcagacatatga

SEQ ID NO: 1620075 - DNA, 25 bp, Homo sapien
gcagtcactacgcagggaagacaca

SEQ ID NO: 1620076 - DNA, 25 bp, Homo sapien
agagctgcccacggagcgctccagg

SEQ ID NO: 1620077 - DNA, 25 bp, Homo sapien
tgcacattctgggagagacgggagg

SEQ ID NO: 1620078 - DNA, 25 bp, Homo sapien
tgcgcccggccccataaattttgaa

SEQ ID NO: 1620079 - DNA, 25 bp, Homo sapien
ccaggggctcccgggcgtcttagct

SEQ ID NO: 1620080 - DNA, 25 bp, Homo sapien
caggggctcccgggcgtcttagctg

SEQ ID NO: 1620081 - DNA, 25 bp, Homo sapien
aggggctcccgggcgtcttagctgt

SEQ ID NO: 1620082 - DNA, 25 bp, Homo sapien
ggggctcccgggcgtcttagctgtg

SEQ ID NO: 1620083 - DNA, 25 bp, Homo sapien
gtataactgatagggattaccaggg

SEQ ID NO: 1620084 - DNA, 25 bp, Homo sapien
ccataactgcgatcttgaatgtggg

SEQ ID NO: 1620085 - DNA, 25 bp, Homo sapien
cttgacagactatttaatcagcagg

SEQ ID NO: 1620086 - DNA, 25 bp, Homo sapien
catgttcaagccttgcaatgagagg

SEQ ID NO: 1620087 - DNA, 25 bp, Homo sapien
ttacaggtgatggaattagctgttg

SEQ ID NO: 1620088 - DNA, 25 bp, Homo sapien
gaatgctagttgttctagcagtgaa

SEQ ID NO: 1620089 - DNA, 25 bp, Homo sapien
ttagccaggatgttacaggtgatgg

SEQ ID NO: 1620090 - DNA, 25 bp, Homo sapien
ctgaggaggacttctggttagccag

SEQ ID NO: 1620091 - DNA, 25 bp, Homo sapien
caatgtatttgggagcttgtagtct

SEQ ID NO: 1620092 - DNA, 25 bp, Homo sapien
gataatgttgtacatagtaatctgg

SEQ ID NO: 1620093 - DNA, 25 bp, Homo sapien
cacctggagttcatggggctgataa

SEQ ID NO: 1620094 - DNA, 25 bp, Homo sapien
gttggaggacccaatgtatttggga

SEQ ID NO: 1620095 - DNA, 25 bp, Homo sapien
tgaccaagatgttggctatagccag

SEQ ID NO: 1620096 - DNA, 25 bp, Homo sapien
gatgttggctatagccaggtgcttg

SEQ ID NO: 1620097 - DNA, 25 bp, Homo sapien
cacctggtataacaaagtggcaaaa

SEQ ID NO: 1620098 - DNA, 25 bp, Homo sapien
tgtttgcatgcactatcactgagga

SEQ ID NO: 1620099 - DNA, 25 bp, Homo sapien
tgttaatagatgatctggatcttca

SEQ ID NO: 1620100 - DNA, 25 bp, Homo sapien
tggacccttgatcctaaaatagaaa

SEQ ID NO: 1620101 - DNA, 25 bp, Homo sapien
tatatctacctatcaagtaccatgc

SEQ ID NO: 1620102 - DNA, 25 bp, Homo sapien
gtaccatgctcactacttgcctgat

SEQ ID NO: 1620103 - DNA, 25 bp, Homo sapien
tttatataagttaaatgccgatgga

SEQ ID NO: 1620104 - DNA, 25 bp, Homo sapien
gatttaggtaatagtatacatccat

SEQ ID NO: 1620105 - DNA, 25 bp, Homo sapien
gttaaatgccgatggatttaggtaa

SEQ ID NO: 1620106 - DNA, 25 bp, Homo sapien
ccgatggatttaggtaatagtatac

SEQ ID NO: 1620107 - DNA, 25 bp, Homo sapien
ggtcagagcatacctccacttgtgt

SEQ ID NO: 1620108 - DNA, 25 bp, Homo sapien
cattaaatgcagcaagatgcaggtc

SEQ ID NO: 1620109 - DNA, 25 bp, Homo sapien
tacattgctataagtacaaacaccc

SEQ ID NO: 1620110 - DNA, 25 bp, Homo sapien
ccacttgtgtgctcttacggataaa

SEQ ID NO: 1620111 - DNA, 25 bp, Homo sapien
tttgatgtaagttcaactctaggac

SEQ ID NO: 1620112 - DNA, 25 bp, Homo sapien
ccaaaagcatgataattaagccaag

SEQ ID NO: 1620113 - DNA, 25 bp, Homo sapien
acattacccactggtcttcatggta

SEQ ID NO: 1620114 - DNA, 25 bp, Homo sapien
tcttgttagtcatctggccatttcc

SEQ ID NO: 1620115 - DNA, 25 bp, Homo sapien
aaagtctttacgtttgcaggcagag

SEQ ID NO: 1620116 - DNA, 25 bp, Homo sapien
gggagaatccgagccataagccata

SEQ ID NO: 1620117 - DNA, 25 bp, Homo sapien
ggcagagtgaccacatgttcaaaga

SEQ ID NO: 1620118 - DNA, 25 bp, Homo sapien
caccatttgagtaaggccggatagg

SEQ ID NO: 1620119 - DNA, 25 bp, Homo sapien
aatgtgtgtaataaacctcctgtat

SEQ ID NO: 1620120 - DNA, 25 bp, Homo sapien
gcccaactcataaagaatctctaat

SEQ ID NO: 1620121 - DNA, 25 bp, Homo sapien
taaatacaaagcttcaaaaaatctc

SEQ ID NO: 1620122 - DNA, 25 bp, Homo sapien
gatcacatactttcacgtgaatata

SEQ ID NO: 1620123 - DNA, 25 bp, Homo sapien
cttactatcaaatgtggcaaccata

SEQ ID NO: 1620124 - DNA, 25 bp, Homo sapien
cagaacttgttatatgctttgccac

SEQ ID NO: 1620125 - DNA, 25 bp, Homo sapien
catgcttgtaggaattttgccagta

SEQ ID NO: 1620126 - DNA, 25 bp, Homo sapien
tcttcatgcttgtaggaattttgcc

SEQ ID NO: 1620127 - DNA, 25 bp, Homo sapien
gtagtaaggttagagaaatgcttaa

SEQ ID NO: 1620128 - DNA, 25 bp, Homo sapien
taagtttagaggagtgcttaaaggc

SEQ ID NO: 1620129 - DNA, 25 bp, Homo sapien
tgtgtagtaagtttagaggagtgct

SEQ ID NO: 1620130 - DNA, 25 bp, Homo sapien
agtttagaggagtgcttaaaggctt

SEQ ID NO: 1620131 - DNA, 25 bp, Homo sapien
gtaaggtgtgaggaccgcttgaagg

SEQ ID NO: 1620132 - DNA, 25 bp, Homo sapien
gtgtagtaaggtgtgaggaccgctt

SEQ ID NO: 1620133 - DNA, 25 bp, Homo sapien
tagtaaggtgtgaggaccgcttgaa

SEQ ID NO: 1620134 - DNA, 25 bp, Homo sapien
tatgtgtagtaaggtgtgaggaccg

SEQ ID NO: 1620135 - DNA, 25 bp, Homo sapien
tagaatttctctccagtatgattct

SEQ ID NO: 1620136 - DNA, 25 bp, Homo sapien
tttgtagaatttctctccagtatga

SEQ ID NO: 1620137 - DNA, 25 bp, Homo sapien
tgtagaatttctctccagtatgatt

SEQ ID NO: 1620138 - DNA, 25 bp, Homo sapien
atttgtagaatttctctccagtatg

SEQ ID NO: 1620139 - DNA, 25 bp, Homo sapien
ctcatgtgtagtaaggattgaggac

SEQ ID NO: 1620140 - DNA, 25 bp, Homo sapien
tgtagtaaggttagaggagcactta

SEQ ID NO: 1620141 - DNA, 25 bp, Homo sapien
gtagtaaggttagaggagcacttaa

SEQ ID NO: 1620142 - DNA, 25 bp, Homo sapien
tgtgtagtaaggttagaggagcact

SEQ ID NO: 1620143 - DNA, 25 bp, Homo sapien
tatgtgtagtaaggttagaggagca

SEQ ID NO: 1620144 - DNA, 25 bp, Homo sapien
taaggctacaagagtggttaaaggc

SEQ ID NO: 1620145 - DNA, 25 bp, Homo sapien
tctagtaaggctacaagagtggtta

SEQ ID NO: 1620146 - DNA, 25 bp, Homo sapien
atgtcctctcttttgtccgtttgaa

SEQ ID NO: 1620147 - DNA, 25 bp, Homo sapien
ttatgtctagtaaggctacaagagt

SEQ ID NO: 1620148 - DNA, 25 bp, Homo sapien
tcttgggcaaaatgagaacacatta

SEQ ID NO: 1620149 - DNA, 25 bp, Homo sapien
ctgctctggccaaaggtcttgggca

SEQ ID NO: 1620150 - DNA, 25 bp, Homo sapien
gctctgctctggccaaaggtcttgg

SEQ ID NO: 1620151 - DNA, 25 bp, Homo sapien
gtcttgggcaaaatgagaacacatt

SEQ ID NO: 1620152 - DNA, 25 bp, Homo sapien
cattcactgggaacctattacaaat

SEQ ID NO: 1620153 - DNA, 25 bp, Homo sapien
tcattacctcatacaactttcttct

SEQ ID NO: 1620154 - DNA, 25 bp, Homo sapien
caaagaaggacattagattcattca

SEQ ID NO: 1620155 - DNA, 25 bp, Homo sapien
agagaatattagtaaggaaacagaa

SEQ ID NO: 1620156 - DNA, 25 bp, Homo sapien
gcacatatgttagctttcacataat

SEQ ID NO: 1620157 - DNA, 25 bp, Homo sapien
tggaatctaaagagttaataaagta

SEQ ID NO: 1620158 - DNA, 25 bp, Homo sapien
gaatgcagcacatatgttagctttc

SEQ ID NO: 1620159 - DNA, 25 bp, Homo sapien
aagtatatggaatctaaagagttaa

SEQ ID NO: 1620160 - DNA, 25 bp, Homo sapien
tatattggcaatagatacatggctt

SEQ ID NO: 1620161 - DNA, 25 bp, Homo sapien
atggcatgaacctagaagttggagg

SEQ ID NO: 1620162 - DNA, 25 bp, Homo sapien
cattggcacagtcctacaagatata

SEQ ID NO: 1620163 - DNA, 25 bp, Homo sapien
taatatacagggttgtgctccctgg

SEQ ID NO: 1620164 - DNA, 25 bp, Homo sapien
cctgggcaacgtagtcagatccgaa

SEQ ID NO: 1620165 - DNA, 25 bp, Homo sapien
aactgcttctggtgaagatctcagg

SEQ ID NO: 1620166 - DNA, 25 bp, Homo sapien
gacatctagtgcgtatctgtagtcc

SEQ ID NO: 1620167 - DNA, 25 bp, Homo sapien
caaggtaagaggatccattggtgcc

SEQ ID NO: 1620168 - DNA, 25 bp, Homo sapien
cctaagttgaatgttggtggataac

SEQ ID NO: 1620169 - DNA, 25 bp, Homo sapien
tggtggataacaaaggtgcagtcat

SEQ ID NO: 1620170 - DNA, 25 bp, Homo sapien
aaatgaaacctaagttgaatgttgg

SEQ ID NO: 1620171 - DNA, 25 bp, Homo sapien
tactagtttatagagaaatgaaaaa

SEQ ID NO: 1620172 - DNA, 25 bp, Homo sapien
atcagctaagaatataagataagcc

SEQ ID NO: 1620173 - DNA, 25 bp, Homo sapien
tatattcatcattaaacccatgttg

SEQ ID NO: 1620174 - DNA, 25 bp, Homo sapien
aaatcagctaagaatataagataag

SEQ ID NO: 1620175 - DNA, 25 bp, Homo sapien
atatattcatcattaaacccatgtt

SEQ ID NO: 1620176 - DNA, 25 bp, Homo sapien
ctttggaaggccaaggtgggcagat

SEQ ID NO: 1620177 - DNA, 25 bp, Homo sapien
gtggctcatgactataattgcagca

SEQ ID NO: 1620178 - DNA, 25 bp, Homo sapien
cactttggaaggccaaggtgggcag

SEQ ID NO: 1620179 - DNA, 25 bp, Homo sapien
agcactttggaaggccaaggtgggc

SEQ ID NO: 1620180 - DNA, 25 bp, Homo sapien
gggttagaccctctgatatgtaaaa

SEQ ID NO: 1620181 - DNA, 25 bp, Homo sapien
gatccagggatgcagttgtgaaacc

SEQ ID NO: 1620182 - DNA, 25 bp, Homo sapien
tcattggcatgcactgtgtagcagt

SEQ ID NO: 1620183 - DNA, 25 bp, Homo sapien
ttatgagacaaccaggcattatggt

SEQ ID NO: 1620184 - DNA, 25 bp, Homo sapien
acatttcagatctgatgcaaagaga

SEQ ID NO: 1620185 - DNA, 25 bp, Homo sapien
cttcctattaaaattgcagtggtac

SEQ ID NO: 1620186 - DNA, 25 bp, Homo sapien
catgcagacatttgtgcgtcccaaa

SEQ ID NO: 1620187 - DNA, 25 bp, Homo sapien
tatggaaaagcagccacactgtgca

SEQ ID NO: 1620188 - DNA, 25 bp, Homo sapien
gtcatgaagaggactttggctctca

SEQ ID NO: 1620189 - DNA, 25 bp, Homo sapien
ctgagggtttggctatcatctcatt

SEQ ID NO: 1620190 - DNA, 25 bp, Homo sapien
tgagggtttggctatcatctcattt

SEQ ID NO: 1620191 - DNA, 25 bp, Homo sapien
gagggtttggctatcatctcatttc

SEQ ID NO: 1620192 - DNA, 25 bp, Homo sapien
ccacatctctaaattgcaatggtcc

SEQ ID NO: 1620193 - DNA, 25 bp, Homo sapien
tatggccacatctctaaattgcaat

SEQ ID NO: 1620194 - DNA, 25 bp, Homo sapien
tctatggccacatctctaaattgca

SEQ ID NO: 1620195 - DNA, 25 bp, Homo sapien
tggccacatctctaaattgcaatgg

SEQ ID NO: 1620196 - DNA, 25 bp, Homo sapien
cactacacacgttactctacttggg

SEQ ID NO: 1620197 - DNA, 25 bp, Homo sapien
tacagattatatataacctgcgagc

SEQ ID NO: 1620198 - DNA, 25 bp, Homo sapien
gtagcagcatttacaagaagatttg

SEQ ID NO: 1620199 - DNA, 25 bp, Homo sapien
tggagtagcacgcatgttacctgca

SEQ ID NO: 1620200 - DNA, 25 bp, Homo sapien
atctaagctgatcctggtaagctta

SEQ ID NO: 1620201 - DNA, 25 bp, Homo sapien
gctgggatcagaccgcacaatctaa

SEQ ID NO: 1620202 - DNA, 25 bp, Homo sapien
tgccaacacgccgatagttttcgta

SEQ ID NO: 1620203 - DNA, 25 bp, Homo sapien
gatcctggtaagcttagacccaaac

SEQ ID NO: 1620204 - DNA, 25 bp, Homo sapien
tcaccggttccaaccagtccctctc

SEQ ID NO: 1620205 - DNA, 25 bp, Homo sapien
atctgggagagacgccacgctgcgg

SEQ ID NO: 1620206 - DNA, 25 bp, Homo sapien
cagcgtccggccccatacattttta

SEQ ID NO: 1620207 - DNA, 25 bp, Homo sapien
gtagtcaccgcgcagtgaagagaca

SEQ ID NO: 1620208 - DNA, 25 bp, Homo sapien
ttggcttccaggaggtcccggtgtc

SEQ ID NO: 1620209 - DNA, 25 bp, Homo sapien
acagcctgggcctttaggagaagaa

SEQ ID NO: 1620210 - DNA, 25 bp, Homo sapien
cagcctgggcctttaggagaagaac

SEQ ID NO: 1620211 - DNA, 25 bp, Homo sapien
aaccagacctggagctctgactgca

SEQ ID NO: 1620212 - DNA, 25 bp, Homo sapien
ctgctggagtgtctagtgactatta

SEQ ID NO: 1620213 - DNA, 25 bp, Homo sapien
ttctcccataggaccacgtgaagta

SEQ ID NO: 1620214 - DNA, 25 bp, Homo sapien
accacgtgaagtatggagtgtagcc

SEQ ID NO: 1620215 - DNA, 25 bp, Homo sapien
tctagtgactattagctcttgggtc

SEQ ID NO: 1620216 - DNA, 25 bp, Homo sapien
taatggctgattggatttacccggc

SEQ ID NO: 1620217 - DNA, 25 bp, Homo sapien
taaaacaccttggtggccagtaatg

SEQ ID NO: 1620218 - DNA, 25 bp, Homo sapien
aacgtgatttgatgtgtggcttgga

SEQ ID NO: 1620219 - DNA, 25 bp, Homo sapien
taaatcttcactgaggtaatggctg

SEQ ID NO: 1620220 - DNA, 25 bp, Homo sapien
taacggatagagtctagcactcttt

SEQ ID NO: 1620221 - DNA, 25 bp, Homo sapien
gaagtagtgtcattatggtaacgga

SEQ ID NO: 1620222 - DNA, 25 bp, Homo sapien
tatgagtatgtaacgtaaaagtaca

SEQ ID NO: 1620223 - DNA, 25 bp, Homo sapien
catctctgtggctgaagtagtgtca

SEQ ID NO: 1620224 - DNA, 25 bp, Homo sapien
attcacagaagtgccaattgtggcc

SEQ ID NO: 1620225 - DNA, 25 bp, Homo sapien
agtgaacattcacagaagtgccaat

SEQ ID NO: 1620226 - DNA, 25 bp, Homo sapien
aacacatttcaaccagaccatagtg

SEQ ID NO: 1620227 - DNA, 25 bp, Homo sapien
ggccaggccaaaacttctttctgag

SEQ ID NO: 1620228 - DNA, 25 bp, Homo sapien
aggagaagtggcgacctcataccat

SEQ ID NO: 1620229 - DNA, 25 bp, Homo sapien
ggagaagtggcgacctcataccata

SEQ ID NO: 1620230 - DNA, 25 bp, Homo sapien
tcaagcacctggctatagccaacat

SEQ ID NO: 1620231 - DNA, 25 bp, Homo sapien
cctggctatagccaacatcttggtc

SEQ ID NO: 1620232 - DNA, 25 bp, Homo sapien
ggtggatattaaagtccacagattt

SEQ ID NO: 1620233 - DNA, 25 bp, Homo sapien
ggatattaaagtccacagatttgat

SEQ ID NO: 1620234 - DNA, 25 bp, Homo sapien
ggacacctcttgtgggagatctgct

SEQ ID NO: 1620235 - DNA, 25 bp, Homo sapien
ctccatgatatgtttggacacctct

SEQ ID NO: 1620236 - DNA, 25 bp, Homo sapien
cactcttgagtacctgatgccccat

SEQ ID NO: 1620237 - DNA, 25 bp, Homo sapien
tgccactcttgagtacctgatgccc

SEQ ID NO: 1620238 - DNA, 25 bp, Homo sapien
atcctggagctggtgaccaatgaag

SEQ ID NO: 1620239 - DNA, 25 bp, Homo sapien
cctggagctggtgaccaatgaagct

SEQ ID NO: 1620240 - DNA, 25 bp, Homo sapien
ggagctggtgaccaatgaagctcat

SEQ ID NO: 1620241 - DNA, 25 bp, Homo sapien
tggagctggtgaccaatgaagctca

SEQ ID NO: 1620242 - DNA, 25 bp, Homo sapien
gctcctctatccttactacacataa

SEQ ID NO: 1620243 - DNA, 25 bp, Homo sapien
ggcctttaagcgctcctctatcctt

SEQ ID NO: 1620244 - DNA, 25 bp, Homo sapien
taagcgctcctctatccttactaca

SEQ ID NO: 1620245 - DNA, 25 bp, Homo sapien
atgtggcaaggcctttaagcgctcc

SEQ ID NO: 1620246 - DNA, 25 bp, Homo sapien
caccatacacggctatcattaattt

SEQ ID NO: 1620247 - DNA, 25 bp, Homo sapien
tggtgaaaataaggctatctccatg

SEQ ID NO: 1620248 - DNA, 25 bp, Homo sapien
ctactcagacaagataaaattacca

SEQ ID NO: 1620249 - DNA, 25 bp, Homo sapien
aaattaccatcgaaaattagctgag

SEQ ID NO: 1620250 - DNA, 25 bp, Homo sapien
gaagaatggcttaaactcggaaggc

SEQ ID NO: 1620251 - DNA, 25 bp, Homo sapien
cagaagaatggcttaaactcggaag

SEQ ID NO: 1620252 - DNA, 25 bp, Homo sapien
gaatggcttaaactcggaaggcaga

SEQ ID NO: 1620253 - DNA, 25 bp, Homo sapien
atggcttaaactcggaaggcagaag

SEQ ID NO: 1620254 - DNA, 25 bp, Homo sapien
aacaaaaaaggagcgcaccagcatg

SEQ ID NO: 1620255 - DNA, 25 bp, Homo sapien
tacagtgtgcaggttggtaacataa

SEQ ID NO: 1620256 - DNA, 25 bp, Homo sapien
tgatcattgtgcattcaacgatgcg

SEQ ID NO: 1620257 - DNA, 25 bp, Homo sapien
caacgatgcgttgtgatgccactaa

SEQ ID NO: 1620258 - DNA, 25 bp, Homo sapien
gacgctgactcatttctggacacag

SEQ ID NO: 1620259 - DNA, 25 bp, Homo sapien
tataaagcccttgggttacacagag

SEQ ID NO: 1620260 - DNA, 25 bp, Homo sapien
caggattcagaacactggtgaggct

SEQ ID NO: 1620261 - DNA, 25 bp, Homo sapien
tgaaattgtgactctcctacgtgaa

SEQ ID NO: 1620262 - DNA, 25 bp, Homo sapien
tatctggtgttcttgcgattttgaa

SEQ ID NO: 1620263 - DNA, 25 bp, Homo sapien
agcaatgatgtagaaaggatttaaa

SEQ ID NO: 1620264 - DNA, 25 bp, Homo sapien
cagcaatgatgtagaaaggatttaa

SEQ ID NO: 1620265 - DNA, 25 bp, Homo sapien
tcagcaatgatgtagaaaggattta

SEQ ID NO: 1620266 - DNA, 25 bp, Homo sapien
aggtgctggctatggtctcttgtct

SEQ ID NO: 1620267 - DNA, 25 bp, Homo sapien
gagagttgatcaggcccagattaga

SEQ ID NO: 1620268 - DNA, 25 bp, Homo sapien
gcttcagagagttgatcaggcccag

SEQ ID NO: 1620269 - DNA, 25 bp, Homo sapien
tttgcttcagagagttgatcaggcc

SEQ ID NO: 1620270 - DNA, 25 bp, Homo sapien
ctgatctagcggtgctgtttctggt

SEQ ID NO: 1620271 - DNA, 25 bp, Homo sapien
tgatctagcggtgctgtttctggtt

SEQ ID NO: 1620272 - DNA, 25 bp, Homo sapien
gctgtttctggttttgagcttagtt

SEQ ID NO: 1620273 - DNA, 25 bp, Homo sapien
ctcctcatctaagcttctatctgta

SEQ ID NO: 1620274 - DNA, 25 bp, Homo sapien
aaagatttgttgaaaatggagctgg

SEQ ID NO: 1620275 - DNA, 25 bp, Homo sapien
gggccttggatgaagaggtagagaa

SEQ ID NO: 1620276 - DNA, 25 bp, Homo sapien
ggtagagaagatcttggtcttcagt

SEQ ID NO: 1620277 - DNA, 25 bp, Homo sapien
aacctgggaaacatatggagagtcc

SEQ ID NO: 1620278 - DNA, 25 bp, Homo sapien
ggagagtccctctctacaaaatgtt

SEQ ID NO: 1620279 - DNA, 25 bp, Homo sapien
taggtgtaccttttagggccagaca

SEQ ID NO: 1620280 - DNA, 25 bp, Homo sapien
tcacctaagtgagtagtcatggaaa

SEQ ID NO: 1620281 - DNA, 25 bp, Homo sapien
taacatggagaaaacacggctctac

SEQ ID NO: 1620282 - DNA, 25 bp, Homo sapien
tagcttccgagattgggcacggtca

SEQ ID NO: 1620283 - DNA, 25 bp, Homo sapien
cgagattgggcacggtcagaagggt

SEQ ID NO: 1620284 - DNA, 25 bp, Homo sapien
gcttccgagattgggcacggtcaga

SEQ ID NO: 1620285 - DNA, 25 bp, Homo sapien
gattgggcacggtcagaagggtgtg

SEQ ID NO: 1620286 - DNA, 25 bp, Homo sapien
aaggatacactccatacttcaggtc

SEQ ID NO: 1620287 - DNA, 25 bp, Homo sapien
ctagaaaggatacactccatacttc

SEQ ID NO: 1620288 - DNA, 25 bp, Homo sapien
ggatacactccatacttcaggtcat

SEQ ID NO: 1620289 - DNA, 25 bp, Homo sapien
gaaaggatacactccatacttcagg

SEQ ID NO: 1620290 - DNA, 25 bp, Homo sapien
gacacagagttttattatcctgtgg

SEQ ID NO: 1620291 - DNA, 25 bp, Homo sapien
tcctgtggccccaacattctttctt

SEQ ID NO: 1620292 - DNA, 25 bp, Homo sapien
ctgttttctccatatctaaacattt

SEQ ID NO: 1620293 - DNA, 25 bp, Homo sapien
caagagtgtggacagatctgaagac

SEQ ID NO: 1620294 - DNA, 25 bp, Homo sapien
acaggtggctatcagtggtctcctt

SEQ ID NO: 1620295 - DNA, 25 bp, Homo sapien
aacaggtggctatcagtggtctcct

SEQ ID NO: 1620296 - DNA, 25 bp, Homo sapien
caggtggctatcagtggtctccttg

SEQ ID NO: 1620297 - DNA, 25 bp, Homo sapien
gataattggtgagttacatagattc

SEQ ID NO: 1620298 - DNA, 25 bp, Homo sapien
ttctggctgtacagaatgaatacat

SEQ ID NO: 1620299 - DNA, 25 bp, Homo sapien
tctattcattctggctgtacagaat

SEQ ID NO: 1620300 - DNA, 25 bp, Homo sapien
tttgtgactaaatatctctgttcaa

SEQ ID NO: 1620301 - DNA, 25 bp, Homo sapien
gtctttgcctttttgagcttggcga

SEQ ID NO: 1620302 - DNA, 25 bp, Homo sapien
ctttttgagcttggcgatctgagcc

SEQ ID NO: 1620303 - DNA, 25 bp, Homo sapien
tgcctttttgagcttggcgatctga

SEQ ID NO: 1620304 - DNA, 25 bp, Homo sapien
agtctttgcctttttgagcttggcg

SEQ ID NO: 1620305 - DNA, 25 bp, Homo sapien
cggatctcatcctgtcattgtagtt

SEQ ID NO: 1620306 - DNA, 25 bp, Homo sapien
gatctcatcctgtcattgtagttgg

SEQ ID NO: 1620307 - DNA, 25 bp, Homo sapien
catcctgtcattgtagttggtcctg

SEQ ID NO: 1620308 - DNA, 25 bp, Homo sapien
tctcatcctgtcattgtagttggtc

SEQ ID NO: 1620309 - DNA, 25 bp, Homo sapien
cctgtggactagacgtcctagtctt

SEQ ID NO: 1620310 - DNA, 25 bp, Homo sapien
tcctgtggactagacgtcctagtct

SEQ ID NO: 1620311 - DNA, 25 bp, Homo sapien
ttcctgtggactagacgtcctagtc

SEQ ID NO: 1620312 - DNA, 25 bp, Homo sapien
tgtggactagacgtcctagtcttac

SEQ ID NO: 1620313 - DNA, 25 bp, Homo sapien
tcttaataaggatgtcccctttgtc

SEQ ID NO: 1620314 - DNA, 25 bp, Homo sapien
taataaggatgtcccctttgtcagc

SEQ ID NO: 1620315 - DNA, 25 bp, Homo sapien
cacgtggtctcttaataaggatgtc

SEQ ID NO: 1620316 - DNA, 25 bp, Homo sapien
aaggacacgtggtctcttaataagg

SEQ ID NO: 1620317 - DNA, 25 bp, Homo sapien
tttggtggtccaggccctgggtgaa

SEQ ID NO: 1620318 - DNA, 25 bp, Homo sapien
tgtttggtggtccaggccctgggtg

SEQ ID NO: 1620319 - DNA, 25 bp, Homo sapien
gtttggtggtccaggccctgggtga

SEQ ID NO: 1620320 - DNA, 25 bp, Homo sapien
ctgtttggtggtccaggccctgggt

SEQ ID NO: 1620321 - DNA, 25 bp, Homo sapien
gaaaaacactttcagccgcctatag

SEQ ID NO: 1620322 - DNA, 25 bp, Homo sapien
aaaacactttcagccgcctatagag

SEQ ID NO: 1620323 - DNA, 25 bp, Homo sapien
aaaaacactttcagccgcctataga

SEQ ID NO: 1620324 - DNA, 25 bp, Homo sapien
tagtggggccatttcgggtgaggtc

SEQ ID NO: 1620325 - DNA, 25 bp, Homo sapien
gatgtcctgcccagtgccacaattc

SEQ ID NO: 1620326 - DNA, 25 bp, Homo sapien
ggctggatgtcctgcccagtgccac

SEQ ID NO: 1620327 - DNA, 25 bp, Homo sapien
ctggatgtcctgcccagtgccacaa

SEQ ID NO: 1620328 - DNA, 25 bp, Homo sapien
cttcttcacaacagcaggggttgga

SEQ ID NO: 1620329 - DNA, 25 bp, Homo sapien
ttcacaacagcaggggttggagcca

SEQ ID NO: 1620330 - DNA, 25 bp, Homo sapien
tcacaacagcaggggttggagccac

SEQ ID NO: 1620331 - DNA, 25 bp, Homo sapien
tcttcacaacagcaggggttggagc

SEQ ID NO: 1620332 - DNA, 25 bp, Homo sapien
gtgtaaaatgtcatgctggagcaga

SEQ ID NO: 1620333 - DNA, 25 bp, Homo sapien
gataggtgatccaggttctggagct

SEQ ID NO: 1620334 - DNA, 25 bp, Homo sapien
caaaagtgaatgaatcaggataggt

SEQ ID NO: 1620335 - DNA, 25 bp, Homo sapien
gaatcaggataggtgatccaggttc

SEQ ID NO: 1620336 - DNA, 25 bp, Homo sapien
tgaatgaatcaggataggtgatcca

SEQ ID NO: 1620337 - DNA, 25 bp, Homo sapien
gtgaagattggagtaagccaagatt

SEQ ID NO: 1620338 - DNA, 25 bp, Homo sapien
cggaggtgaagattggagtaagcca

SEQ ID NO: 1620339 - DNA, 25 bp, Homo sapien
gaacccggaggtgaagattggagta

SEQ ID NO: 1620340 - DNA, 25 bp, Homo sapien
cccggaggtgaagattggagtaagc

SEQ ID NO: 1620341 - DNA, 25 bp, Homo sapien
ccatgaaataatagcaagctgagtt

SEQ ID NO: 1620342 - DNA, 25 bp, Homo sapien
aataatagcaagctgagttcacagg

SEQ ID NO: 1620343 - DNA, 25 bp, Homo sapien
cctgtgtcatcttgataccgaagtc

SEQ ID NO: 1620344 - DNA, 25 bp, Homo sapien
cttgataccgaagtctagtgaagac

SEQ ID NO: 1620345 - DNA, 25 bp, Homo sapien
aaatcatattcgtaagttgtggtag

SEQ ID NO: 1620346 - DNA, 25 bp, Homo sapien
tgtgatacatctttggataatctgt

SEQ ID NO: 1620347 - DNA, 25 bp, Homo sapien
catatgttctagtgtcttcttgcag

SEQ ID NO: 1620348 - DNA, 25 bp, Homo sapien
tggcagctcatggtattattgacca

SEQ ID NO: 1620349 - DNA, 25 bp, Homo sapien
gccttaatatagaaggtatctaaaa

SEQ ID NO: 1620350 - DNA, 25 bp, Homo sapien
taaatattataaggatgctactgtc

SEQ ID NO: 1620351 - DNA, 25 bp, Homo sapien
tgtgcatgataaactattgagatca

SEQ ID NO: 1620352 - DNA, 25 bp, Homo sapien
tgagccaacgtgccttaatatagaa

SEQ ID NO: 1620353 - DNA, 25 bp, Homo sapien
ctagctaaagcctttgccatatttt

SEQ ID NO: 1620354 - DNA, 25 bp, Homo sapien
tctcctgaatgaattattttgttca

SEQ ID NO: 1620355 - DNA, 25 bp, Homo sapien
tatttttcacactcatggggtttct

SEQ ID NO: 1620356 - DNA, 25 bp, Homo sapien
cctgaatgaattattttgttcaata

SEQ ID NO: 1620357 - DNA, 25 bp, Homo sapien
gtatgagttatgcttagtaagtttt

SEQ ID NO: 1620358 - DNA, 25 bp, Homo sapien
gagttatgcttagtaagttttgagg

SEQ ID NO: 1620359 - DNA, 25 bp, Homo sapien
tatgtgcagtaagttggggggacag

SEQ ID NO: 1620360 - DNA, 25 bp, Homo sapien
agcatgaattaacatatgtgtagta

SEQ ID NO: 1620361 - DNA, 25 bp, Homo sapien
tagtaatggatgaagatttgttaaa

SEQ ID NO: 1620362 - DNA, 25 bp, Homo sapien
cttatgtttagtaatggatgaagat

SEQ ID NO: 1620363 - DNA, 25 bp, Homo sapien
tgtttagtaatggatgaagatttgt

SEQ ID NO: 1620364 - DNA, 25 bp, Homo sapien
gtaatggatgaagatttgttaaaag

SEQ ID NO: 1620365 - DNA, 25 bp, Homo sapien
tttcatatttgtataatttctctcc

SEQ ID NO: 1620366 - DNA, 25 bp, Homo sapien
gcaagatttttcatatttgtataat

SEQ ID NO: 1620367 - DNA, 25 bp, Homo sapien
ttttcatatttgtataatttctctc

SEQ ID NO: 1620368 - DNA, 25 bp, Homo sapien
ctttgcaagatttttcatatttgta

SEQ ID NO: 1620369 - DNA, 25 bp, Homo sapien
tgtaggcaagattgaaaagtggtta

SEQ ID NO: 1620370 - DNA, 25 bp, Homo sapien
gaagaggaccagtaaagccctttgc

SEQ ID NO: 1620371 - DNA, 25 bp, Homo sapien
agaggaccagtaaagccctttgcca

SEQ ID NO: 1620372 - DNA, 25 bp, Homo sapien
tgaattccaatatgaatgaccttat

SEQ ID NO: 1620373 - DNA, 25 bp, Homo sapien
tcctcagtatgaattccaatatgaa

SEQ ID NO: 1620374 - DNA, 25 bp, Homo sapien
ctaaggtatgaggaccacttaaaag

SEQ ID NO: 1620375 - DNA, 25 bp, Homo sapien
agaaagaaagaagcaagtgttaact

SEQ ID NO: 1620376 - DNA, 25 bp, Homo sapien
gctcaagctgaagtgcaatggaaat

SEQ ID NO: 1620377 - DNA, 25 bp, Homo sapien
agctgaagtgcaatggaaatgatct

SEQ ID NO: 1620378 - DNA, 25 bp, Homo sapien
ttgctcaagctgaagtgcaatggaa

SEQ ID NO: 1620379 - DNA, 25 bp, Homo sapien
tataaggaattgtgtattagagtta

SEQ ID NO: 1620380 - DNA, 25 bp, Homo sapien
tatacaaatcctgttgagcagtgtc

SEQ ID NO: 1620381 - DNA, 25 bp, Homo sapien
caaatcctgttgagcagtgtccagg

SEQ ID NO: 1620382 - DNA, 25 bp, Homo sapien
ttcctatacaaatcctgttgagcag

SEQ ID NO: 1620383 - DNA, 25 bp, Homo sapien
tttttgtcttcaggtgctcgccctt

SEQ ID NO: 1620384 - DNA, 25 bp, Homo sapien
ttcaggtgctcgcccttgccacaaa

SEQ ID NO: 1620385 - DNA, 25 bp, Homo sapien
tcttcaggtgctcgcccttgccaca

SEQ ID NO: 1620386 - DNA, 25 bp, Homo sapien
ttgtcttcaggtgctcgcccttgcc

SEQ ID NO: 1620387 - DNA, 25 bp, Homo sapien
attaaaacaatgtgaatactttcac

SEQ ID NO: 1620388 - DNA, 25 bp, Homo sapien
tagagtcacatgagacacaattaaa

SEQ ID NO: 1620389 - DNA, 25 bp, Homo sapien
cacaattaaaacaatgtgaatactt

SEQ ID NO: 1620390 - DNA, 25 bp, Homo sapien
ttagagtcacatgagacacaattaa

SEQ ID NO: 1620391 - DNA, 25 bp, Homo sapien
tacttaacgggctgaggtaggattc

SEQ ID NO: 1620392 - DNA, 25 bp, Homo sapien
cttggatgttaaggctgaagtgagc

SEQ ID NO: 1620393 - DNA, 25 bp, Homo sapien
aattaggcatgatgttgtgtgccta

SEQ ID NO: 1620394 - DNA, 25 bp, Homo sapien
attgaagcagagagtcagaggttgc

SEQ ID NO: 1620395 - DNA, 25 bp, Homo sapien
ttggagttgattttcgattttatcc

SEQ ID NO: 1620396 - DNA, 25 bp, Homo sapien
tgattttcgattttatccccctgta

SEQ ID NO: 1620397 - DNA, 25 bp, Homo sapien
gattttatccccctgtagtttgaga

SEQ ID NO: 1620398 - DNA, 25 bp, Homo sapien
ttttatccccctgtagtttgagaga

SEQ ID NO: 1620399 - DNA, 25 bp, Homo sapien
tcgtagtggagagtcttattcttgc

SEQ ID NO: 1620400 - DNA, 25 bp, Homo sapien
gggacttcgtagtggagagtcttat

SEQ ID NO: 1620401 - DNA, 25 bp, Homo sapien
ggagagtcttattcttgcgcaaagc

SEQ ID NO: 1620402 - DNA, 25 bp, Homo sapien
caacatggggacttcgtagtggaga

SEQ ID NO: 1620403 - DNA, 25 bp, Homo sapien
gaggtttgggcacttaataatccca

SEQ ID NO: 1620404 - DNA, 25 bp, Homo sapien
cctaagtggcatacatcatacctgt

SEQ ID NO: 1620405 - DNA, 25 bp, Homo sapien
tgcatgatgtacaagtatctaagtt

SEQ ID NO: 1620406 - DNA, 25 bp, Homo sapien
tcatggctacctagtttaattctgt

SEQ ID NO: 1620407 - DNA, 25 bp, Homo sapien
ggccagtgactagaagagtactttt

SEQ ID NO: 1620408 - DNA, 25 bp, Homo sapien
tattccatactctaggttgtctgca

SEQ ID NO: 1620409 - DNA, 25 bp, Homo sapien
ggtgttagtcataaatcctttccag

SEQ ID NO: 1620410 - DNA, 25 bp, Homo sapien
taggcagcacggacattttaattat

SEQ ID NO: 1620411 - DNA, 25 bp, Homo sapien
caccaagaatagtgaccggtaattt

SEQ ID NO: 1620412 - DNA, 25 bp, Homo sapien
gataaaatgtggctgtgaactcatc

SEQ ID NO: 1620413 - DNA, 25 bp, Homo sapien
tccagggctttctatggttggtagc

SEQ ID NO: 1620414 - DNA, 25 bp, Homo sapien
gaactcaacttgctagtacttcatg

SEQ ID NO: 1620415 - DNA, 25 bp, Homo sapien
ggacaaatgcatctcaagccaataa

SEQ ID NO: 1620416 - DNA, 25 bp, Homo sapien
aaaaaatgtccagctaacaacatat

SEQ ID NO: 1620417 - DNA, 25 bp, Homo sapien
cattccctcatgataatctctaaaa

SEQ ID NO: 1620418 - DNA, 25 bp, Homo sapien
aagccaataaatgccatgtatagaa

SEQ ID NO: 1620419 - DNA, 25 bp, Homo sapien
caaagataggcagattggaagaaaa

SEQ ID NO: 1620420 - DNA, 25 bp, Homo sapien
aagataggcagattggaagaaaaga

SEQ ID NO: 1620421 - DNA, 25 bp, Homo sapien
aaagcaaagataggcagattggaag

SEQ ID NO: 1620422 - DNA, 25 bp, Homo sapien
aacataatactaaatgtccaaagag

SEQ ID NO: 1620423 - DNA, 25 bp, Homo sapien
gagaaactttacagccacatgcaaa

SEQ ID NO: 1620424 - DNA, 25 bp, Homo sapien
cacaaaagtagagtaaaagccccat

SEQ ID NO: 1620425 - DNA, 25 bp, Homo sapien
gaaaggttgaaggtatcacacaacc

SEQ ID NO: 1620426 - DNA, 25 bp, Homo sapien
tgagaccctcatttgacaccacatg

SEQ ID NO: 1620427 - DNA, 25 bp, Homo sapien
ttacttcaaattaaaaagctgctgc

SEQ ID NO: 1620428 - DNA, 25 bp, Homo sapien
tatgatttaaactcaaaccccagga

SEQ ID NO: 1620429 - DNA, 25 bp, Homo sapien
ggaaaaatagatgactcagattact

SEQ ID NO: 1620430 - DNA, 25 bp, Homo sapien
cacacccggctggcagtgactttat

SEQ ID NO: 1620431 - DNA, 25 bp, Homo sapien
tattgaaagccaagacaaaataact

SEQ ID NO: 1620432 - DNA, 25 bp, Homo sapien
ctaccatataatacagcaattgcac

SEQ ID NO: 1620433 - DNA, 25 bp, Homo sapien
tattggtatgagtgtaaatgaggac

SEQ ID NO: 1620434 - DNA, 25 bp, Homo sapien
catacatagagccaacagatacata

SEQ ID NO: 1620435 - DNA, 25 bp, Homo sapien
ccattagaactcctaaaattttgat

SEQ ID NO: 1620436 - DNA, 25 bp, Homo sapien
cattagaactcctaaaattttgatt

SEQ ID NO: 1620437 - DNA, 25 bp, Homo sapien
gaaactctcctatctttgatgccgt

SEQ ID NO: 1620438 - DNA, 25 bp, Homo sapien
tgggatcatttttaacagtcagcac

SEQ ID NO: 1620439 - DNA, 25 bp, Homo sapien
tgatgccgtgacaactgatcacatg

SEQ ID NO: 1620440 - DNA, 25 bp, Homo sapien
aatgtctgaagcatccataccttag

SEQ ID NO: 1620441 - DNA, 25 bp, Homo sapien
atgaaccctctggtgttgtctaagt

SEQ ID NO: 1620442 - DNA, 25 bp, Homo sapien
aaaatatatctcagtatgaaccctc

SEQ ID NO: 1620443 - DNA, 25 bp, Homo sapien
gaaccctctggtgttgtctaagttg

SEQ ID NO: 1620444 - DNA, 25 bp, Homo sapien
aaatatatctcagtatgaaccctct

SEQ ID NO: 1620445 - DNA, 25 bp, Homo sapien
ttgaggtgttgtcagaattactgtg

SEQ ID NO: 1620446 - DNA, 25 bp, Homo sapien
gaattactgtgatgtcttccagctt

SEQ ID NO: 1620447 - DNA, 25 bp, Homo sapien
taagatttagggaccagttaaatgc

SEQ ID NO: 1620448 - DNA, 25 bp, Homo sapien
gaggtgttgtcagaattactgtgat

SEQ ID NO: 1620449 - DNA, 25 bp, Homo sapien
taagatgagaggacagaataaagct

SEQ ID NO: 1620450 - DNA, 25 bp, Homo sapien
tatgtgtagtaagatgagaggacag

SEQ ID NO: 1620451 - DNA, 25 bp, Homo sapien
gaggacagaataaagcttttgccac

SEQ ID NO: 1620452 - DNA, 25 bp, Homo sapien
tatgattagtaaaatttgaggagta

SEQ ID NO: 1620453 - DNA, 25 bp, Homo sapien
ttagtaaggattgagaatatactaa

SEQ ID NO: 1620454 - DNA, 25 bp, Homo sapien
taaggattgagaatatactaaaggc

SEQ ID NO: 1620455 - DNA, 25 bp, Homo sapien
aggattgagaatatactaaaggctt

SEQ ID NO: 1620456 - DNA, 25 bp, Homo sapien
agtaaggattgagaatatactaaag

SEQ ID NO: 1620457 - DNA, 25 bp, Homo sapien
tgtcacacaccggttaagtcccttg

SEQ ID NO: 1620458 - DNA, 25 bp, Homo sapien
ttttatatattgctctggcctaagg

SEQ ID NO: 1620459 - DNA, 25 bp, Homo sapien
tcacacaccggttaagtcccttgtg

SEQ ID NO: 1620460 - DNA, 25 bp, Homo sapien
cacacaccggttaagtcccttgtga

SEQ ID NO: 1620461 - DNA, 25 bp, Homo sapien
gtgtacagacgcacatctcacatga

SEQ ID NO: 1620462 - DNA, 25 bp, Homo sapien
ctaacagaggtatagagagctgaac

SEQ ID NO: 1620463 - DNA, 25 bp, Homo sapien
tgcaagtcagttgaaacctaatgat

SEQ ID NO: 1620464 - DNA, 25 bp, Homo sapien
aaacaagatggaatattagcaaggg

SEQ ID NO: 1620465 - DNA, 25 bp, Homo sapien
gattatcaaaaggatggtgccaaac

SEQ ID NO: 1620466 - DNA, 25 bp, Homo sapien
aatggacatcctctaaccttaggcc

SEQ ID NO: 1620467 - DNA, 25 bp, Homo sapien
gctcctagtgtgttctgttacgaca

SEQ ID NO: 1620468 - DNA, 25 bp, Homo sapien
caaacaggaggattatattgcagca

SEQ ID NO: 1620469 - DNA, 25 bp, Homo sapien
agtgcagtggctgtagtggcctgat

SEQ ID NO: 1620470 - DNA, 25 bp, Homo sapien
catgttctccaggatggtctctaac

SEQ ID NO: 1620471 - DNA, 25 bp, Homo sapien
acctcatgatctgcccgcctgggcc

SEQ ID NO: 1620472 - DNA, 25 bp, Homo sapien
ggagtgcagtggctgtagtggcctg

SEQ ID NO: 1620473 - DNA, 25 bp, Homo sapien
gggtttggctgccatctcgtgtctc

SEQ ID NO: 1620474 - DNA, 25 bp, Homo sapien
gtttggctgccatctcgtgtctctt

SEQ ID NO: 1620475 - DNA, 25 bp, Homo sapien
ttggctgccatctcgtgtctcttca

SEQ ID NO: 1620476 - DNA, 25 bp, Homo sapien
ggctgccatctcgtgtctcttcata

SEQ ID NO: 1620477 - DNA, 25 bp, Homo sapien
gtttctataattctctaacatgaca

SEQ ID NO: 1620478 - DNA, 25 bp, Homo sapien
ccaggaataccaggtttctataatt

SEQ ID NO: 1620479 - DNA, 25 bp, Homo sapien
tctataattctctaacatgacattc

SEQ ID NO: 1620480 - DNA, 25 bp, Homo sapien
gaataccaggtttctataattctct

SEQ ID NO: 1620481 - DNA, 25 bp, Homo sapien
atataaattctgctgtgctgtgtcc

SEQ ID NO: 1620482 - DNA, 25 bp, Homo sapien
tggccacatccataaatgtcaatgg

SEQ ID NO: 1620483 - DNA, 25 bp, Homo sapien
ctgctgtgctgtgtccaggcactgc

SEQ ID NO: 1620484 - DNA, 25 bp, Homo sapien
gtgctgtgtccaggcactgccactc

SEQ ID NO: 1620485 - DNA, 25 bp, Homo sapien
gtacagaaagataagagctttcatt

SEQ ID NO: 1620486 - DNA, 25 bp, Homo sapien
aagagctttcattttccaaagacat

SEQ ID NO: 1620487 - DNA, 25 bp, Homo sapien
ataagagctttcattttccaaagac

SEQ ID NO: 1620488 - DNA, 25 bp, Homo sapien
ctgtacagaaagataagagctttca

SEQ ID NO: 1620489 - DNA, 25 bp, Homo sapien
acaagcaaaaagatgaagacttgca

SEQ ID NO: 1620490 - DNA, 25 bp, Homo sapien
tgataccaccacatccacaagcaaa

SEQ ID NO: 1620491 - DNA, 25 bp, Homo sapien
ctgataccaccacatccacaagcaa

SEQ ID NO: 1620492 - DNA, 25 bp, Homo sapien
caaaaagatgaagacttgcagaaaa

SEQ ID NO: 1620493 - DNA, 25 bp, Homo sapien
taagtgggatcaacctgactctgca

SEQ ID NO: 1620494 - DNA, 25 bp, Homo sapien
gctgatggtccaataataagccagg

SEQ ID NO: 1620495 - DNA, 25 bp, Homo sapien
taagccaggctagagagagtcatgc

SEQ ID NO: 1620496 - DNA, 25 bp, Homo sapien
tctcacgtaactgtggcagacctgc

SEQ ID NO: 1620497 - DNA, 25 bp, Homo sapien
cacctgtctatttgtcctggaatgg

SEQ ID NO: 1620498 - DNA, 25 bp, Homo sapien
aatgactgcttaggagattcaaagt

SEQ ID NO: 1620499 - DNA, 25 bp, Homo sapien
ccgcataactaactgaagggctatt

SEQ ID NO: 1620500 - DNA, 25 bp, Homo sapien
gaaaccaaagtacaactacaggctc

SEQ ID NO: 1620501 - DNA, 25 bp, Homo sapien
tttcaaagtctataaactgcctcaa

SEQ ID NO: 1620502 - DNA, 25 bp, Homo sapien
aaagaccttgtagttggtacttctg

SEQ ID NO: 1620503 - DNA, 25 bp, Homo sapien
gcctttgtctgcctgaactttgcaa

SEQ ID NO: 1620504 - DNA, 25 bp, Homo sapien
ttaacatcaactgcatccacctgtg

SEQ ID NO: 1620505 - DNA, 25 bp, Homo sapien
gatattcactagacactctagcaga

SEQ ID NO: 1620506 - DNA, 25 bp, Homo sapien
aaaatgacccaggagctgatattca

SEQ ID NO: 1620507 - DNA, 25 bp, Homo sapien
gaagacacatcactccgtaaagttt

SEQ ID NO: 1620508 - DNA, 25 bp, Homo sapien
cagaaaaagtcatgatgtgtatctt

SEQ ID NO: 1620509 - DNA, 25 bp, Homo sapien
gaagacgagaccggagctccggctg

SEQ ID NO: 1620510 - DNA, 25 bp, Homo sapien
gaagccgccctgtccggtccagctg

SEQ ID NO: 1620511 - DNA, 25 bp, Homo sapien
aagacgagaccggagctccggctgc

SEQ ID NO: 1620512 - DNA, 25 bp, Homo sapien
agccgccctgtccggtccagctgcg

SEQ ID NO: 1620513 - DNA, 25 bp, Homo sapien
tgaatctgtcattaaatcctggcat

SEQ ID NO: 1620514 - DNA, 25 bp, Homo sapien
gtactgaatctgtcattaaatcctg

SEQ ID NO: 1620515 - DNA, 25 bp, Homo sapien
gaaggtaagtagtactgaatctgtc

SEQ ID NO: 1620516 - DNA, 25 bp, Homo sapien
ctgtgtgaaggtaagtagtactgaa

SEQ ID NO: 1620517 - DNA, 25 bp, Homo sapien
cacccatatttccattactgtagca

SEQ ID NO: 1620518 - DNA, 25 bp, Homo sapien
gagaggtcagtgtcacccatatttc

SEQ ID NO: 1620519 - DNA, 25 bp, Homo sapien
tgtttggttttgatagggagaggtc

SEQ ID NO: 1620520 - DNA, 25 bp, Homo sapien
tggtgtttgtggcaaaagcaggcac

SEQ ID NO: 1620521 - DNA, 25 bp, Homo sapien
caggaatttttgatctgcactatta

SEQ ID NO: 1620522 - DNA, 25 bp, Homo sapien
tctgcactattaaaagtgtttccct

SEQ ID NO: 1620523 - DNA, 25 bp, Homo sapien
tactcaagattcctattgggggaac

SEQ ID NO: 1620524 - DNA, 25 bp, Homo sapien
ctcaagattcctattgggggaacgt

SEQ ID NO: 1620525 - DNA, 25 bp, Homo sapien
aatctatcttgccaccttcagtatg

SEQ ID NO: 1620526 - DNA, 25 bp, Homo sapien
ctgctctcatttggttaatatttgc

SEQ ID NO: 1620527 - DNA, 25 bp, Homo sapien
tgcatgcaatgtctaaatctatctt

SEQ ID NO: 1620528 - DNA, 25 bp, Homo sapien
taagatgtggcttttgtaatactat

SEQ ID NO: 1620529 - DNA, 25 bp, Homo sapien
ctttcagcactatatgtcatgggtg

SEQ ID NO: 1620530 - DNA, 25 bp, Homo sapien
atactcagtaatcactcactgcacc

SEQ ID NO: 1620531 - DNA, 25 bp, Homo sapien
taacatttacctttgatctcagcag

SEQ ID NO: 1620532 - DNA, 25 bp, Homo sapien
actatatgtcatgggtgacagaaac

SEQ ID NO: 1620533 - DNA, 25 bp, Homo sapien
aagtggatcaacaattatattattg

SEQ ID NO: 1620534 - DNA, 25 bp, Homo sapien
tataagtggatcaacaattatatta

SEQ ID NO: 1620535 - DNA, 25 bp, Homo sapien
ctcatgagcatttacataaaactac

SEQ ID NO: 1620536 - DNA, 25 bp, Homo sapien
aattataagtggatcaacaattata

SEQ ID NO: 1620537 - DNA, 25 bp, Homo sapien
tccctttgatgtttgggttattgaa

SEQ ID NO: 1620538 - DNA, 25 bp, Homo sapien
tacagccacacgtccctttgatgtt

SEQ ID NO: 1620539 - DNA, 25 bp, Homo sapien
agctttctctacagccacacgtccc

SEQ ID NO: 1620540 - DNA, 25 bp, Homo sapien
tctacagccacacgtccctttgatg

SEQ ID NO: 1620541 - DNA, 25 bp, Homo sapien
ttgtcttcaacatagtccatttccg

SEQ ID NO: 1620542 - DNA, 25 bp, Homo sapien
ggataatttgtcttcaacatagtcc

SEQ ID NO: 1620543 - DNA, 25 bp, Homo sapien
gataatttgtcttcaacatagtcca

SEQ ID NO: 1620544 - DNA, 25 bp, Homo sapien
tcttcaacatagtccatttccgctc

SEQ ID NO: 1620545 - DNA, 25 bp, Homo sapien
atcttgaataacttcttcatcagaa

SEQ ID NO: 1620546 - DNA, 25 bp, Homo sapien
ctaaaactgttagctttgctttctt

SEQ ID NO: 1620547 - DNA, 25 bp, Homo sapien
tttttgatgaatactctgactccat

SEQ ID NO: 1620548 - DNA, 25 bp, Homo sapien
ttctttttgatgaatactctgactc

SEQ ID NO: 1620549 - DNA, 25 bp, Homo sapien
ctcacagcctggacagttgcctgga

SEQ ID NO: 1620550 - DNA, 25 bp, Homo sapien
gcctggacagttgcctggactaagg

SEQ ID NO: 1620551 - DNA, 25 bp, Homo sapien
tgctcacagcctggacagttgcctg

SEQ ID NO: 1620552 - DNA, 25 bp, Homo sapien
acagcctggacagttgcctggacta

SEQ ID NO: 1620553 - DNA, 25 bp, Homo sapien
caccatcccaatgccccagtgcctc

SEQ ID NO: 1620554 - DNA, 25 bp, Homo sapien
cctcagcctgtctccatggacatgg

SEQ ID NO: 1620555 - DNA, 25 bp, Homo sapien
gtctccatggacatggcaggtgcat

SEQ ID NO: 1620556 - DNA, 25 bp, Homo sapien
agtgcctcaggccagagctcggctg

SEQ ID NO: 1620557 - DNA, 25 bp, Homo sapien
acaacagctattggccatgtatggc

SEQ ID NO: 1620558 - DNA, 25 bp, Homo sapien
gttccaccctcggaacagcacagag

SEQ ID NO: 1620559 - DNA, 25 bp, Homo sapien
cacagagactttggtagagagaggc

SEQ ID NO: 1620560 - DNA, 25 bp, Homo sapien
gcagaatatggacgttcagaccctt

SEQ ID NO: 1620561 - DNA, 25 bp, Homo sapien
ccattggatctcagcttctggttta

SEQ ID NO: 1620562 - DNA, 25 bp, Homo sapien
catggttatgttagctagagtgtcc

SEQ ID NO: 1620563 - DNA, 25 bp, Homo sapien
aaccaagataactgccatggttatg

SEQ ID NO: 1620564 - DNA, 25 bp, Homo sapien
tcctctcaagggagcaagtggatat

SEQ ID NO: 1620565 - DNA, 25 bp, Homo sapien
attttgcccacgtgtaaatgtgtgt

SEQ ID NO: 1620566 - DNA, 25 bp, Homo sapien
tttgcataagtgagtttctggtgcc

SEQ ID NO: 1620567 - DNA, 25 bp, Homo sapien
cttgaagaactgtccgtgtggaaaa

SEQ ID NO: 1620568 - DNA, 25 bp, Homo sapien
cactgctcagcaggatttgtatagg

SEQ ID NO: 1620569 - DNA, 25 bp, Homo sapien
tccaataccatcaaaggcctggata

SEQ ID NO: 1620570 - DNA, 25 bp, Homo sapien
caaacagagtggcactgattagccc

SEQ ID NO: 1620571 - DNA, 25 bp, Homo sapien
gcagagtagccttacgcagattacc

SEQ ID NO: 1620572 - DNA, 25 bp, Homo sapien
tgtcgttgcctgtgctagcagagta

SEQ ID NO: 1620573 - DNA, 25 bp, Homo sapien
gacaaagcttttaaccacttctcaa

SEQ ID NO: 1620574 - DNA, 25 bp, Homo sapien
caaaggctttaattagttctcatcc

SEQ ID NO: 1620575 - DNA, 25 bp, Homo sapien
tatgaggaatgtctcaaagcttttt

SEQ ID NO: 1620576 - DNA, 25 bp, Homo sapien
tctcaaccctgcctacacgtaagat

SEQ ID NO: 1620577 - DNA, 25 bp, Homo sapien
tggtaacatcatggactaacatctg

SEQ ID NO: 1620578 - DNA, 25 bp, Homo sapien
caaatggcatacgtaaaagatggta

SEQ ID NO: 1620579 - DNA, 25 bp, Homo sapien
catcagaggtatgagagattcttct

SEQ ID NO: 1620580 - DNA, 25 bp, Homo sapien
gccagtggcttcgaactgcaaataa

SEQ ID NO: 1620581 - DNA, 25 bp, Homo sapien
tatgctctggctcagtgaattcaca

SEQ ID NO: 1620582 - DNA, 25 bp, Homo sapien
tatctcattgagaggcttctgatca

SEQ ID NO: 1620583 - DNA, 25 bp, Homo sapien
cacaggtgatcttctggtgtaaggg

SEQ ID NO: 1620584 - DNA, 25 bp, Homo sapien
gcagttcaagtgactgtgctgagct

SEQ ID NO: 1620585 - DNA, 25 bp, Homo sapien
aatctgatctctctttccttcccca

SEQ ID NO: 1620586 - DNA, 25 bp, Homo sapien
atgtgaacaagggtctgtggttttc

SEQ ID NO: 1620587 - DNA, 25 bp, Homo sapien
taaacatgtgaacaagggtctgtgg

SEQ ID NO: 1620588 - DNA, 25 bp, Homo sapien
acatgtgaacaagggtctgtggttt

SEQ ID NO: 1620589 - DNA, 25 bp, Homo sapien
cactgattaacaggttgagcaaatt

SEQ ID NO: 1620590 - DNA, 25 bp, Homo sapien
taattgaatgccagtagtgtgtgaa

SEQ ID NO: 1620591 - DNA, 25 bp, Homo sapien
ctgtcactgcactcaaaaatcaaga

SEQ ID NO: 1620592 - DNA, 25 bp, Homo sapien
gtttgctaaaccctaccataatctg

SEQ ID NO: 1620593 - DNA, 25 bp, Homo sapien
atgaaatttctttcttatgttatgc

SEQ ID NO: 1620594 - DNA, 25 bp, Homo sapien
atcatgcccagctaatgaaatttct

SEQ ID NO: 1620595 - DNA, 25 bp, Homo sapien
gcccagctaatgaaatttctttctt

SEQ ID NO: 1620596 - DNA, 25 bp, Homo sapien
gaaatttctttcttatgttatgctt

SEQ ID NO: 1620597 - DNA, 25 bp, Homo sapien
actcatccttttttacacctgcaca

SEQ ID NO: 1620598 - DNA, 25 bp, Homo sapien
gatatcaatttctgaggccctgttc

SEQ ID NO: 1620599 - DNA, 25 bp, Homo sapien
cagttttattacatacgtgtacaca

SEQ ID NO: 1620600 - DNA, 25 bp, Homo sapien
tgaagccaggtagcctgatgtttcc

SEQ ID NO: 1620601 - DNA, 25 bp, Homo sapien
tcaaaggaccgtttattcatcttaa

SEQ ID NO: 1620602 - DNA, 25 bp, Homo sapien
tgaacaattcaagtagcattagact

SEQ ID NO: 1620603 - DNA, 25 bp, Homo sapien
tcctattttgatacgctgtattgct

SEQ ID NO: 1620604 - DNA, 25 bp, Homo sapien
aacatcatgagccacacaagtgtca

SEQ ID NO: 1620605 - DNA, 25 bp, Homo sapien
tttatcagcaggagcttgttttcaa

SEQ ID NO: 1620606 - DNA, 25 bp, Homo sapien
tcagcaggagcttgttttcaatgac

SEQ ID NO: 1620607 - DNA, 25 bp, Homo sapien
acagatgggtgagctttccttggca

SEQ ID NO: 1620608 - DNA, 25 bp, Homo sapien
aaccagagcatttcgcacagatggg

SEQ ID NO: 1620609 - DNA, 25 bp, Homo sapien
gtttggtgcgcaaaaacccaatgtc

SEQ ID NO: 1620610 - DNA, 25 bp, Homo sapien
catgcccggagacaccttggttata

SEQ ID NO: 1620611 - DNA, 25 bp, Homo sapien
tggaagagtccagggagttaggagg

SEQ ID NO: 1620612 - DNA, 25 bp, Homo sapien
ggagcccaggctcccccagccagcc

SEQ ID NO: 1620613 - DNA, 25 bp, Homo sapien
ctcggggaggacagaggagcccagg

SEQ ID NO: 1620614 - DNA, 25 bp, Homo sapien
agcccaggctcccccagccagcctc

SEQ ID NO: 1620615 - DNA, 25 bp, Homo sapien
ccaggctcccccagccagcctcact

SEQ ID NO: 1620616 - DNA, 25 bp, Homo sapien
ggattataaaacataggataaatgc

SEQ ID NO: 1620617 - DNA, 25 bp, Homo sapien
cataggataaatgctacaggtgaag

SEQ ID NO: 1620618 - DNA, 25 bp, Homo sapien
tattatcttactaaacagtatattg

SEQ ID NO: 1620619 - DNA, 25 bp, Homo sapien
tatattgcatagatactcatgcagc

SEQ ID NO: 1620620 - DNA, 25 bp, Homo sapien
actggaaggcggagacggaagtgag

SEQ ID NO: 1620621 - DNA, 25 bp, Homo sapien
aaactggaaggcggagacggaagtg

SEQ ID NO: 1620622 - DNA, 25 bp, Homo sapien
cttgaaactggaaggcggagacgga

SEQ ID NO: 1620623 - DNA, 25 bp, Homo sapien
tgaaactggaaggcggagacggaag

SEQ ID NO: 1620624 - DNA, 25 bp, Homo sapien
ctccaagataaacctggggttcctg

SEQ ID NO: 1620625 - DNA, 25 bp, Homo sapien
tgcatctgtaattcagctgagatca

SEQ ID NO: 1620626 - DNA, 25 bp, Homo sapien
catctgtaattcagctgagatcaca

SEQ ID NO: 1620627 - DNA, 25 bp, Homo sapien
ttctaatagttcaatgcatgcactt

SEQ ID NO: 1620628 - DNA, 25 bp, Homo sapien
gcatgcatctgtaattcagctgaga

SEQ ID NO: 1620629 - DNA, 25 bp, Homo sapien
cactggggcccctattctggtcttg

SEQ ID NO: 1620630 - DNA, 25 bp, Homo sapien
ctattctggtcttgcattagtgtgc

SEQ ID NO: 1620631 - DNA, 25 bp, Homo sapien
tgttaatctaacactggggccccta

SEQ ID NO: 1620632 - DNA, 25 bp, Homo sapien
atataacttctataagcctttatta

SEQ ID NO: 1620633 - DNA, 25 bp, Homo sapien
tcatctcatctgcttcgaaggtggc

SEQ ID NO: 1620634 - DNA, 25 bp, Homo sapien
gtggctcatggttgggctatcttca

SEQ ID NO: 1620635 - DNA, 25 bp, Homo sapien
tgtgatagtctctgggcctttagga

SEQ ID NO: 1620636 - DNA, 25 bp, Homo sapien
atcttcatctaggagagtattccag

SEQ ID NO: 1620637 - DNA, 25 bp, Homo sapien
gtccctgcaccggaggagagtgagg

SEQ ID NO: 1620638 - DNA, 25 bp, Homo sapien
gcaggagacccgcacaaccagtcgg

SEQ ID NO: 1620639 - DNA, 25 bp, Homo sapien
caaccagtcggagtctttccctgat

SEQ ID NO: 1620640 - DNA, 25 bp, Homo sapien
tcacaacctggggaagatgacgggc

SEQ ID NO: 1620641 - DNA, 25 bp, Homo sapien
cagttcaccgcgtgatggaggctga

SEQ ID NO: 1620642 - DNA, 25 bp, Homo sapien
gccgaatcaccgagacccttggaaa

SEQ ID NO: 1620643 - DNA, 25 bp, Homo sapien
cagggcagtgaagagctaacctcga

SEQ ID NO: 1620644 - DNA, 25 bp, Homo sapien
gaagagctaacctcgagctctggct

SEQ ID NO: 1620645 - DNA, 25 bp, Homo sapien
ctgacggcacggcttgtggcccaca

SEQ ID NO: 1620646 - DNA, 25 bp, Homo sapien
ggccggctagcagtacaggcctcct

SEQ ID NO: 1620647 - DNA, 25 bp, Homo sapien
ggcggccacctttctagagttctct

SEQ ID NO: 1620648 - DNA, 25 bp, Homo sapien
ctagcggccggctagcagtacaggc

SEQ ID NO: 1620649 - DNA, 25 bp, Homo sapien
tgtcctggccgtttgaggctctggc

SEQ ID NO: 1620650 - DNA, 25 bp, Homo sapien
tttccgagcgccgaaggggccacat

SEQ ID NO: 1620651 - DNA, 25 bp, Homo sapien
catggagaatcagggaccgtcctgt

SEQ ID NO: 1620652 - DNA, 25 bp, Homo sapien
accgtcctgtgccatcttccgagag

SEQ ID NO: 1620653 - DNA, 25 bp, Homo sapien
tcactgtgctatatatttgggccca

SEQ ID NO: 1620654 - DNA, 25 bp, Homo sapien
gacaaagcccaggtaaatgccctat

SEQ ID NO: 1620655 - DNA, 25 bp, Homo sapien
gattggaacataaagctgatcccca

SEQ ID NO: 1620656 - DNA, 25 bp, Homo sapien
tactgctgggcctaacactaaggtg

SEQ ID NO: 1620657 - DNA, 25 bp, Homo sapien
ttttcccgatttgaagttggatgtc

SEQ ID NO: 1620658 - DNA, 25 bp, Homo sapien
ggatgtctcctaagacaatgttgag

SEQ ID NO: 1620659 - DNA, 25 bp, Homo sapien
atgttgagtaatgcagaaatacagg

SEQ ID NO: 1620660 - DNA, 25 bp, Homo sapien
ttctgacagtggacaccctaaagat

SEQ ID NO: 1620661 - DNA, 25 bp, Homo sapien
taaaccaagatatcagtcatggcta

SEQ ID NO: 1620662 - DNA, 25 bp, Homo sapien
gggttccagtactgtctgtgaataa

SEQ ID NO: 1620663 - DNA, 25 bp, Homo sapien
tatgagaatgttttggcatcaaggt

SEQ ID NO: 1620664 - DNA, 25 bp, Homo sapien
tcatggctatgtctgcaagactgtc

SEQ ID NO: 1620665 - DNA, 25 bp, Homo sapien
tttacaaagcgcataaaagaggtgg

SEQ ID NO: 1620666 - DNA, 25 bp, Homo sapien
ttttagatgaaacttggtgcctcct

SEQ ID NO: 1620667 - DNA, 25 bp, Homo sapien
ggtgcctcctagaagtgttcccata

SEQ ID NO: 1620668 - DNA, 25 bp, Homo sapien
acactgtcgcgccagcctatttttg

SEQ ID NO: 1620669 - DNA, 25 bp, Homo sapien
cctagaggcagtaacaggcacagcc

SEQ ID NO: 1620670 - DNA, 25 bp, Homo sapien
taagcagcacattgaaggtcatgag

SEQ ID NO: 1620671 - DNA, 25 bp, Homo sapien
gattgcagccacctaggcaccatag

SEQ ID NO: 1620672 - DNA, 25 bp, Homo sapien
ggttataagataagcccatgcaagg

SEQ ID NO: 1620673 - DNA, 25 bp, Homo sapien
gtagccattacttgtaacatttatc

SEQ ID NO: 1620674 - DNA, 25 bp, Homo sapien
tgctattgactgcatggttatcttt

SEQ ID NO: 1620675 - DNA, 25 bp, Homo sapien
taaattgctattgactgcatggtta

SEQ ID NO: 1620676 - DNA, 25 bp, Homo sapien
caaatctggcatattttgatagagg

SEQ ID NO: 1620677 - DNA, 25 bp, Homo sapien
tgggattatgggcctgcgccatcac

SEQ ID NO: 1620678 - DNA, 25 bp, Homo sapien
gattatgggcctgcgccatcacatc

SEQ ID NO: 1620679 - DNA, 25 bp, Homo sapien
gggattatgggcctgcgccatcaca

SEQ ID NO: 1620680 - DNA, 25 bp, Homo sapien
gctgggattatgggcctgcgccatc

SEQ ID NO: 1620681 - DNA, 25 bp, Homo sapien
ttaggaaggagtccctcttcttcca

SEQ ID NO: 1620682 - DNA, 25 bp, Homo sapien
aaggagtccctcttcttccattgtt

SEQ ID NO: 1620683 - DNA, 25 bp, Homo sapien
aggaaggagtccctcttcttccatt

SEQ ID NO: 1620684 - DNA, 25 bp, Homo sapien
gaaggagtccctcttcttccattgt

SEQ ID NO: 1620685 - DNA, 25 bp, Homo sapien
taaatcattcatcaccgttaccgtg

SEQ ID NO: 1620686 - DNA, 25 bp, Homo sapien
gagatcaagtgccagagaaaggtca

SEQ ID NO: 1620687 - DNA, 25 bp, Homo sapien
aataatccagcccagagacgaagag

SEQ ID NO: 1620688 - DNA, 25 bp, Homo sapien
taatggctggtccatataggtttgc

SEQ ID NO: 1620689 - DNA, 25 bp, Homo sapien
ctaggagcccggcctaagatgggct

SEQ ID NO: 1620690 - DNA, 25 bp, Homo sapien
ggagcccggcctaagatgggctcct

SEQ ID NO: 1620691 - DNA, 25 bp, Homo sapien
taggagcccggcctaagatgggctc

SEQ ID NO: 1620692 - DNA, 25 bp, Homo sapien
agcccggcctaagatgggctcctac

SEQ ID NO: 1620693 - DNA, 25 bp, Homo sapien
caggactgcaggaaacttgggggac

SEQ ID NO: 1620694 - DNA, 25 bp, Homo sapien
tgctgcttgggctgctggcctcagg

SEQ ID NO: 1620695 - DNA, 25 bp, Homo sapien
ctggcataatcaacaccttcttctg

SEQ ID NO: 1620696 - DNA, 25 bp, Homo sapien
gccacactggcataatcaacacctt

SEQ ID NO: 1620697 - DNA, 25 bp, Homo sapien
tcaaccatcgtgaaaaccagtgtgg

SEQ ID NO: 1620698 - DNA, 25 bp, Homo sapien
tcaacatgctcatcaaaaatggcag

SEQ ID NO: 1620699 - DNA, 25 bp, Homo sapien
tcatcaccaatcagtagagatatgc

SEQ ID NO: 1620700 - DNA, 25 bp, Homo sapien
gattgcctaagttcgagtttgagac

SEQ ID NO: 1620701 - DNA, 25 bp, Homo sapien
acagtcttggctcaatgcaaactct

SEQ ID NO: 1620702 - DNA, 25 bp, Homo sapien
gcctcctgggttcaagtgattgtcc

SEQ ID NO: 1620703 - DNA, 25 bp, Homo sapien
ttcaagtgattgtcctgcctcctca

SEQ ID NO: 1620704 - DNA, 25 bp, Homo sapien
aagtgattgtcctgcctcctcagcc

SEQ ID NO: 1620705 - DNA, 25 bp, Homo sapien
gctcaatgactaacctctcaggaga

SEQ ID NO: 1620706 - DNA, 25 bp, Homo sapien
gaacccagggtgtagcagtgatgat

SEQ ID NO: 1620707 - DNA, 25 bp, Homo sapien
gtcaggtcatccaatcacgtgagag

SEQ ID NO: 1620708 - DNA, 25 bp, Homo sapien
gcactatgttccagtgagtggccca

SEQ ID NO: 1620709 - DNA, 25 bp, Homo sapien
actagggaaacgaggctggcatttg

SEQ ID NO: 1620710 - DNA, 25 bp, Homo sapien
tgaactagggaaacgaggctggcat

SEQ ID NO: 1620711 - DNA, 25 bp, Homo sapien
gagggctagacttgagaccgcactt

SEQ ID NO: 1620712 - DNA, 25 bp, Homo sapien
gaccgcacttgggacacatttaaaa

SEQ ID NO: 1620713 - DNA, 25 bp, Homo sapien
tctttaatctttttgcggtgactcc

SEQ ID NO: 1620714 - DNA, 25 bp, Homo sapien
tcactgtgcagacaggacgcccagt

SEQ ID NO: 1620715 - DNA, 25 bp, Homo sapien
ttcatgaaccctcacccgagtcggg

SEQ ID NO: 1620716 - DNA, 25 bp, Homo sapien
aattggccagagacaaggcgctgcg

SEQ ID NO: 1620717 - DNA, 25 bp, Homo sapien
ccacttgccaccagttccaatcaac

SEQ ID NO: 1620718 - DNA, 25 bp, Homo sapien
agctgactgacgggagacccgagtc

SEQ ID NO: 1620719 - DNA, 25 bp, Homo sapien
gcaacccacaccttcagcccagggt

SEQ ID NO: 1620720 - DNA, 25 bp, Homo sapien
ttgccaccagttccaatcaactcct

SEQ ID NO: 1620721 - DNA, 25 bp, Homo sapien
cacattgaagtgcagctctgttgtc

SEQ ID NO: 1620722 - DNA, 25 bp, Homo sapien
ggtcgggtcgtacaatctgaactaa

SEQ ID NO: 1620723 - DNA, 25 bp, Homo sapien
tctgtgaaaggcctgaatatccctt

SEQ ID NO: 1620724 - DNA, 25 bp, Homo sapien
tcacacatggtcaatacctgtcaca

SEQ ID NO: 1620725 - DNA, 25 bp, Homo sapien
tacatgtctacaagtattcctgcat

SEQ ID NO: 1620726 - DNA, 25 bp, Homo sapien
tcagtcaacattgccttacaagaca

SEQ ID NO: 1620727 - DNA, 25 bp, Homo sapien
caaactttggctatttggccttggc

SEQ ID NO: 1620728 - DNA, 25 bp, Homo sapien
gacctccaatttttagatatgaaga

SEQ ID NO: 1620729 - DNA, 25 bp, Homo sapien
tgtgcttcaagatctgtcaacaggg

SEQ ID NO: 1620730 - DNA, 25 bp, Homo sapien
cctctaggtggctaacatggacttt

SEQ ID NO: 1620731 - DNA, 25 bp, Homo sapien
agatggtccgccatttaggctaggc

SEQ ID NO: 1620732 - DNA, 25 bp, Homo sapien
catgtattagttaggtatggcagca

SEQ ID NO: 1620733 - DNA, 25 bp, Homo sapien
caagggtgccttgagccacttgttg

SEQ ID NO: 1620734 - DNA, 25 bp, Homo sapien
tgcaaacggactgcgctccaggtgg

SEQ ID NO: 1620735 - DNA, 25 bp, Homo sapien
acgtccttctcctactttctgggct

SEQ ID NO: 1620736 - DNA, 25 bp, Homo sapien
tcagtgtccctggtcgttagacaag

SEQ ID NO: 1620737 - DNA, 25 bp, Homo sapien
ccatttgacagaggaaggcaccacg

SEQ ID NO: 1620738 - DNA, 25 bp, Homo sapien
cttcataacatgagggccagggccc

SEQ ID NO: 1620739 - DNA, 25 bp, Homo sapien
ggcaccacgtggagaagcttcataa

SEQ ID NO: 1620740 - DNA, 25 bp, Homo sapien
tctgtccatccctgggtaacctgct

SEQ ID NO: 1620741 - DNA, 25 bp, Homo sapien
gcctctgcaaggtcccagagttcag

SEQ ID NO: 1620742 - DNA, 25 bp, Homo sapien
cacaggcctagtagaggcttccagg

SEQ ID NO: 1620743 - DNA, 25 bp, Homo sapien
gattcgagctcagaggtgttgagca

SEQ ID NO: 1620744 - DNA, 25 bp, Homo sapien
ggaaggaccaccatagtgacaggga

SEQ ID NO: 1620745 - DNA, 25 bp, Homo sapien
tcttatggtgacacggagaaaccca

SEQ ID NO: 1620746 - DNA, 25 bp, Homo sapien
gattgtgaccacgtgaagtaaggca

SEQ ID NO: 1620747 - DNA, 25 bp, Homo sapien
aatagtgctgcaaagtccgggacac

SEQ ID NO: 1620748 - DNA, 25 bp, Homo sapien
tatgcagcagtagatgaggctcctg

SEQ ID NO: 1620749 - DNA, 25 bp, Homo sapien
caccagtgggttggcgactctcaga

SEQ ID NO: 1620750 - DNA, 25 bp, Homo sapien
gaccaagattcaacacaccgtgagg

SEQ ID NO: 1620751 - DNA, 25 bp, Homo sapien
gactcttgtaagtggatccggtcca

SEQ ID NO: 1620752 - DNA, 25 bp, Homo sapien
gtgaggcttttactccactgaggag

SEQ ID NO: 1620753 - DNA, 25 bp, Homo sapien
tgtgtctcatgtacttagacccaaa

SEQ ID NO: 1620754 - DNA, 25 bp, Homo sapien
gaattgaggctctcagtatagattg

SEQ ID NO: 1620755 - DNA, 25 bp, Homo sapien
caccattgtgtctcatgtacttaga

SEQ ID NO: 1620756 - DNA, 25 bp, Homo sapien
ggctctcagtatagattgtccacca

SEQ ID NO: 1620757 - DNA, 25 bp, Homo sapien
acaaggacatgttcagtattgttaa

SEQ ID NO: 1620758 - DNA, 25 bp, Homo sapien
gacatgttcagtattgttaatctca

SEQ ID NO: 1620759 - DNA, 25 bp, Homo sapien
tgttcagtattgttaatctcatccc

SEQ ID NO: 1620760 - DNA, 25 bp, Homo sapien
ttcagtattgttaatctcatccctg

SEQ ID NO: 1620761 - DNA, 25 bp, Homo sapien
cacctagatgatgtgatgctccttt

SEQ ID NO: 1620762 - DNA, 25 bp, Homo sapien
tggaacctgtctacagtgggcattg

SEQ ID NO: 1620763 - DNA, 25 bp, Homo sapien
cactggatccagcacacaggttata

SEQ ID NO: 1620764 - DNA, 25 bp, Homo sapien
cacttggcccagcacctacatgttg

SEQ ID NO: 1620765 - DNA, 25 bp, Homo sapien
ctcaggtggacctcaaatcatggct

SEQ ID NO: 1620766 - DNA, 25 bp, Homo sapien
atgccacctggccttaaatattttt

SEQ ID NO: 1620767 - DNA, 25 bp, Homo sapien
gccatgccacctggccttaaatatt

SEQ ID NO: 1620768 - DNA, 25 bp, Homo sapien
agccatgccacctggccttaaatat

SEQ ID NO: 1620769 - DNA, 25 bp, Homo sapien
tgagccatgccacctggccttaaat

SEQ ID NO: 1620770 - DNA, 25 bp, Homo sapien
tggccatacccacgatattcagctt

SEQ ID NO: 1620771 - DNA, 25 bp, Homo sapien
atacaaatctatctggccataccca

SEQ ID NO: 1620772 - DNA, 25 bp, Homo sapien
aatctatctggccatacccacgata

SEQ ID NO: 1620773 - DNA, 25 bp, Homo sapien
atgtgtatagacaacattaggtgcc

SEQ ID NO: 1620774 - DNA, 25 bp, Homo sapien
tcttcacccacatctcgtaaatgtc

SEQ ID NO: 1620775 - DNA, 25 bp, Homo sapien
cacccacatctcgtaaatgtctatg

SEQ ID NO: 1620776 - DNA, 25 bp, Homo sapien
taactcttcacccacatctcgtaaa

SEQ ID NO: 1620777 - DNA, 25 bp, Homo sapien
ctggtttaactcttcacccacatct

SEQ ID NO: 1620778 - DNA, 25 bp, Homo sapien
tgacttcatcgacttcccaaagttc

SEQ ID NO: 1620779 - DNA, 25 bp, Homo sapien
cctgacttcatcgacttcccaaagt

SEQ ID NO: 1620780 - DNA, 25 bp, Homo sapien
ctcctgacttcatcgacttcccaaa

SEQ ID NO: 1620781 - DNA, 25 bp, Homo sapien
aactcctgacttcatcgacttccca

SEQ ID NO: 1620782 - DNA, 25 bp, Homo sapien
tggcgactgcgatgagatttactgt

SEQ ID NO: 1620783 - DNA, 25 bp, Homo sapien
tggtaacttgctgagtggcgactgc

SEQ ID NO: 1620784 - DNA, 25 bp, Homo sapien
cctctttgaggagttcgcgcagctt

SEQ ID NO: 1620785 - DNA, 25 bp, Homo sapien
caagctgtcgggcatttttcctggt

SEQ ID NO: 1620786 - DNA, 25 bp, Homo sapien
gtcgcctcggctctaacccttggtc

SEQ ID NO: 1620787 - DNA, 25 bp, Homo sapien
cgtcaatcagagcattttgcgcagc

SEQ ID NO: 1620788 - DNA, 25 bp, Homo sapien
gcagcagatggagcgcccacgtccg

SEQ ID NO: 1620789 - DNA, 25 bp, Homo sapien
cagccacggtttagccgagaacagg

SEQ ID NO: 1620790 - DNA, 25 bp, Homo sapien
ggtggtagccatggttcctgaaaac

SEQ ID NO: 1620791 - DNA, 25 bp, Homo sapien
ccaaatgaacggactgctggagcag

SEQ ID NO: 1620792 - DNA, 25 bp, Homo sapien
aagagccaccctgcaggtggaacga

SEQ ID NO: 1620793 - DNA, 25 bp, Homo sapien
gaaactgcccaagagcttgagccaa

SEQ ID NO: 1620794 - DNA, 25 bp, Homo sapien
caggaaccggattggaatgtgctca

SEQ ID NO: 1620795 - DNA, 25 bp, Homo sapien
aatgtgctcaccagaaaagtggctg

SEQ ID NO: 1620796 - DNA, 25 bp, Homo sapien
ggataccatccacctttagagccgt

SEQ ID NO: 1620797 - DNA, 25 bp, Homo sapien
gcttaggcaagctagtgcacccctt

SEQ ID NO: 1620798 - DNA, 25 bp, Homo sapien
ttgagaagttcaggtggtttcaccc

SEQ ID NO: 1620799 - DNA, 25 bp, Homo sapien
agaagttcaggtggtttcaccctca

SEQ ID NO: 1620800 - DNA, 25 bp, Homo sapien
gagaagttcaggtggtttcaccctc

SEQ ID NO: 1620801 - DNA, 25 bp, Homo sapien
agtttgagaagttcaggtggtttca

SEQ ID NO: 1620802 - DNA, 25 bp, Homo sapien
caagacaagtactattgaggcaggc

SEQ ID NO: 1620803 - DNA, 25 bp, Homo sapien
tattgtcaacacgataagccccagc

SEQ ID NO: 1620804 - DNA, 25 bp, Homo sapien
tgaggcaggctaggtagtcaagaaa

SEQ ID NO: 1620805 - DNA, 25 bp, Homo sapien
gatacacagctagtgacccaacaag

SEQ ID NO: 1620806 - DNA, 25 bp, Homo sapien
aaattagacgcttaaatgtaaggct

SEQ ID NO: 1620807 - DNA, 25 bp, Homo sapien
aatgtaaggcttgagatgagcctgg

SEQ ID NO: 1620808 - DNA, 25 bp, Homo sapien
tagacgcttaaatgtaaggcttgag

SEQ ID NO: 1620809 - DNA, 25 bp, Homo sapien
cgcttaaatgtaaggcttgagatga

SEQ ID NO: 1620810 - DNA, 25 bp, Homo sapien
atgcttttatcttaactaatccgaa

SEQ ID NO: 1620811 - DNA, 25 bp, Homo sapien
tgccacactttaagaatctaatttt

SEQ ID NO: 1620812 - DNA, 25 bp, Homo sapien
tatcttaactaatccgaaagttata

SEQ ID NO: 1620813 - DNA, 25 bp, Homo sapien
agcaagattcagcattgcagcctgg

SEQ ID NO: 1620814 - DNA, 25 bp, Homo sapien
tacttatggcttactatggagcatc

SEQ ID NO: 1620815 - DNA, 25 bp, Homo sapien
tgcaggcagacaggaaacatgctca

SEQ ID NO: 1620816 - DNA, 25 bp, Homo sapien
taaagcttccctagtacttacctga

SEQ ID NO: 1620817 - DNA, 25 bp, Homo sapien
ctaaagggctatagagttctccaac

SEQ ID NO: 1620818 - DNA, 25 bp, Homo sapien
taaaactgggttgcttgtaatacaa

SEQ ID NO: 1620819 - DNA, 25 bp, Homo sapien
tttagtaaaatacctgaagcatcag

SEQ ID NO: 1620820 - DNA, 25 bp, Homo sapien
gcatcagtgccttacatatttctac

SEQ ID NO: 1620821 - DNA, 25 bp, Homo sapien
gaatattactctgaatgcctaacgc

SEQ ID NO: 1620822 - DNA, 25 bp, Homo sapien
acagtcacaggagttccctccagta

SEQ ID NO: 1620823 - DNA, 25 bp, Homo sapien
atgtctgttaggaattgagaattta

SEQ ID NO: 1620824 - DNA, 25 bp, Homo sapien
cacagtcacaggagttccctccagt

SEQ ID NO: 1620825 - DNA, 25 bp, Homo sapien
tatgtctgttaggaattgagaattt

SEQ ID NO: 1620826 - DNA, 25 bp, Homo sapien
ccagtatgagttattttgtttaata

SEQ ID NO: 1620827 - DNA, 25 bp, Homo sapien
tccagtatgagttattttgtttaat

SEQ ID NO: 1620828 - DNA, 25 bp, Homo sapien
ctccagtatgagttattttgtttaa

SEQ ID NO: 1620829 - DNA, 25 bp, Homo sapien
agtatgagttattttgtttaataag

SEQ ID NO: 1620830 - DNA, 25 bp, Homo sapien
atcatcttatgtgcagttagttgtg

SEQ ID NO: 1620831 - DNA, 25 bp, Homo sapien
gaatcatcttatgtgcagttagttg

SEQ ID NO: 1620832 - DNA, 25 bp, Homo sapien
tatgtgcagttagttgtgaggaccg

SEQ ID NO: 1620833 - DNA, 25 bp, Homo sapien
tgcagttagttgtgaggaccggtta

SEQ ID NO: 1620834 - DNA, 25 bp, Homo sapien
tgtttagtaaggtatgagaatcggt

SEQ ID NO: 1620835 - DNA, 25 bp, Homo sapien
tatgtttagtaaggtatgagaatcg

SEQ ID NO: 1620836 - DNA, 25 bp, Homo sapien
tagtaaggtatgagaatcggtaaaa

SEQ ID NO: 1620837 - DNA, 25 bp, Homo sapien
tttagtaaggtatgagaatcggtaa

SEQ ID NO: 1620838 - DNA, 25 bp, Homo sapien
agttatcttatgtgtagtaagggtt

SEQ ID NO: 1620839 - DNA, 25 bp, Homo sapien
tccagcatgagttatcttatgtgta

SEQ ID NO: 1620840 - DNA, 25 bp, Homo sapien
tgagttatcttatgtgtagtaaggg

SEQ ID NO: 1620841 - DNA, 25 bp, Homo sapien
tctccagcatgagttatcttatgtg

SEQ ID NO: 1620842 - DNA, 25 bp, Homo sapien
ggaattctctgtaatatgaaatctt

SEQ ID NO: 1620843 - DNA, 25 bp, Homo sapien
aatgtatgaaagacttttgcagatg

SEQ ID NO: 1620844 - DNA, 25 bp, Homo sapien
tgcagatggatcacattgaaatatg

SEQ ID NO: 1620845 - DNA, 25 bp, Homo sapien
cacaatctttacattggtaggaatt

SEQ ID NO: 1620846 - DNA, 25 bp, Homo sapien
tttcagaatcgcttcttgaaaagaa

SEQ ID NO: 1620847 - DNA, 25 bp, Homo sapien
tattttttcagaatcgcttcttgaa

SEQ ID NO: 1620848 - DNA, 25 bp, Homo sapien
atattttttcagaatcgcttcttga

SEQ ID NO: 1620849 - DNA, 25 bp, Homo sapien
cagaatcgcttcttgaaaagaatct

SEQ ID NO: 1620850 - DNA, 25 bp, Homo sapien
aataagatggcataggaaaatacca

SEQ ID NO: 1620851 - DNA, 25 bp, Homo sapien
gacacagatagtttacaaatctaac

SEQ ID NO: 1620852 - DNA, 25 bp, Homo sapien
aaaggccctcattcctttatagaca

SEQ ID NO: 1620853 - DNA, 25 bp, Homo sapien
tgcccctggtgagaacaatgcaaag

SEQ ID NO: 1620854 - DNA, 25 bp, Homo sapien
tggactcagctctaggtcaagtgga

SEQ ID NO: 1620855 - DNA, 25 bp, Homo sapien
tccagccagcactcagatttataaa

SEQ ID NO: 1620856 - DNA, 25 bp, Homo sapien
tgccaatactagacagatctctgag

SEQ ID NO: 1620857 - DNA, 25 bp, Homo sapien
gatatttacagaactcaccagccaa

SEQ ID NO: 1620858 - DNA, 25 bp, Homo sapien
tcaggtctggcttagtgagagcaat

SEQ ID NO: 1620859 - DNA, 25 bp, Homo sapien
ctcatgtctctttatattccagggc

SEQ ID NO: 1620860 - DNA, 25 bp, Homo sapien
ggtgatcaggtctggcttagtgaga

SEQ ID NO: 1620861 - DNA, 25 bp, Homo sapien
gatcaggtctggcttagtgagagca

SEQ ID NO: 1620862 - DNA, 25 bp, Homo sapien
ttaatttcactacccggtactcatg

SEQ ID NO: 1620863 - DNA, 25 bp, Homo sapien
cctaacgtactaattaatgagagaa

SEQ ID NO: 1620864 - DNA, 25 bp, Homo sapien
atcaaaaaattggtggtgatgaatg

SEQ ID NO: 1620865 - DNA, 25 bp, Homo sapien
tacccggtactcatgaatcaaaaaa

SEQ ID NO: 1620866 - DNA, 25 bp, Homo sapien
cctttacggtatattagaaattgtg

SEQ ID NO: 1620867 - DNA, 25 bp, Homo sapien
ttacggtatattagaaattgtgtat

SEQ ID NO: 1620868 - DNA, 25 bp, Homo sapien
aattgtgtattaaagttattctcac

SEQ ID NO: 1620869 - DNA, 25 bp, Homo sapien
aaattgtgtattaaagttattctca

SEQ ID NO: 1620870 - DNA, 25 bp, Homo sapien
tttcctatacaaaccctgctgagca

SEQ ID NO: 1620871 - DNA, 25 bp, Homo sapien
ccacatccctaaacgtcaatggccc

SEQ ID NO: 1620872 - DNA, 25 bp, Homo sapien
cctatacaaaccctgctgagcactg

SEQ ID NO: 1620873 - DNA, 25 bp, Homo sapien
ggccacatccctaaacgtcaatggc

SEQ ID NO: 1620874 - DNA, 25 bp, Homo sapien
ctggcctgtaaaacaaagagccttc

SEQ ID NO: 1620875 - DNA, 25 bp, Homo sapien
tctggcctgtaaaacaaagagcctt

SEQ ID NO: 1620876 - DNA, 25 bp, Homo sapien
ggcctgtaaaacaaagagccttcat

SEQ ID NO: 1620877 - DNA, 25 bp, Homo sapien
tttctggcctgtaaaacaaagagcc

SEQ ID NO: 1620878 - DNA, 25 bp, Homo sapien
ttaatccccataacacattggaagt

SEQ ID NO: 1620879 - DNA, 25 bp, Homo sapien
agggcccagcattattacttcttcc

SEQ ID NO: 1620880 - DNA, 25 bp, Homo sapien
tcaagagtacaatatagagcactgt

SEQ ID NO: 1620881 - DNA, 25 bp, Homo sapien
cattggaagttgatactaagtgttc

SEQ ID NO: 1620882 - DNA, 25 bp, Homo sapien
tgggcgggtgaactgccagcgagga

SEQ ID NO: 1620883 - DNA, 25 bp, Homo sapien
cacctgcttgcgcgggtgcagcctg

SEQ ID NO: 1620884 - DNA, 25 bp, Homo sapien
agaaaaacacataattatctccaga

SEQ ID NO: 1620885 - DNA, 25 bp, Homo sapien
attatctccagatgagtcagcttgg

SEQ ID NO: 1620886 - DNA, 25 bp, Homo sapien
cctccaaggtttgggatgatcaggc

SEQ ID NO: 1620887 - DNA, 25 bp, Homo sapien
tggaatgtggactactgccagatcc

SEQ ID NO: 1620888 - DNA, 25 bp, Homo sapien
aatgttcctgctagtgtttatgcca

SEQ ID NO: 1620889 - DNA, 25 bp, Homo sapien
tggaaaggcatttttcggagcttct

SEQ ID NO: 1620890 - DNA, 25 bp, Homo sapien
tagagccggtcagaaagcatgaatc

SEQ ID NO: 1620891 - DNA, 25 bp, Homo sapien
catcttggagacaatagagttcaca

SEQ ID NO: 1620892 - DNA, 25 bp, Homo sapien
ggtggctaacacaacaggtaatatc

SEQ ID NO: 1620893 - DNA, 25 bp, Homo sapien
cagagttgagtctgtggctagagcc

SEQ ID NO: 1620894 - DNA, 25 bp, Homo sapien
cacttctaaacagtaccgagtttca

SEQ ID NO: 1620895 - DNA, 25 bp, Homo sapien
aacagtaccgagtttcatctcataa

SEQ ID NO: 1620896 - DNA, 25 bp, Homo sapien
atgggagcacttctaaacagtaccg

SEQ ID NO: 1620897 - DNA, 25 bp, Homo sapien
tcaaaaatcaatgtaacaggatctg

SEQ ID NO: 1620898 - DNA, 25 bp, Homo sapien
gccccccttagatgatccagggagc

SEQ ID NO: 1620899 - DNA, 25 bp, Homo sapien
ccccccttagatgatccagggagca

SEQ ID NO: 1620900 - DNA, 25 bp, Homo sapien
tgagaggacacattccatacctcgg

SEQ ID NO: 1620901 - DNA, 25 bp, Homo sapien
gacacattccatacctcgggtcatc

SEQ ID NO: 1620902 - DNA, 25 bp, Homo sapien
gagaggacacattccatacctcggg

SEQ ID NO: 1620903 - DNA, 25 bp, Homo sapien
gaggacacattccatacctcgggtc

SEQ ID NO: 1620904 - DNA, 25 bp, Homo sapien
gatatctcggtttatccacagatag

SEQ ID NO: 1620905 - DNA, 25 bp, Homo sapien
cactttagctgacagaaccatggcg

SEQ ID NO: 1620906 - DNA, 25 bp, Homo sapien
gaaccatggcggatatctcggttta

SEQ ID NO: 1620907 - DNA, 25 bp, Homo sapien
gcactttagctgacagaaccatggc

SEQ ID NO: 1620908 - DNA, 25 bp, Homo sapien
ggaaagccacggaccaaagatcttc

SEQ ID NO: 1620909 - DNA, 25 bp, Homo sapien
tgggcaaggcgcagattgtgaagct

SEQ ID NO: 1620910 - DNA, 25 bp, Homo sapien
gcaaggcgcagattgtgaagctgac

SEQ ID NO: 1620911 - DNA, 25 bp, Homo sapien
aggccaaggcacagtcactacgcag

SEQ ID NO: 1620912 - DNA, 25 bp, Homo sapien
gagaagtgagagcaaaacctggagc

SEQ ID NO: 1620913 - DNA, 25 bp, Homo sapien
agagaagtgagagcaaaacctggag

SEQ ID NO: 1620914 - DNA, 25 bp, Homo sapien
tgctggcatgggcacatgagcctca

SEQ ID NO: 1620915 - DNA, 25 bp, Homo sapien
agccctgtgtgtagccctcatcctg

SEQ ID NO: 1620916 - DNA, 25 bp, Homo sapien
tagtcgacaccttttgctggagcat

SEQ ID NO: 1620917 - DNA, 25 bp, Homo sapien
tgctcctgttgagcccatggcaacc

SEQ ID NO: 1620918 - DNA, 25 bp, Homo sapien
gacctggctcaccaagaagtttgtg

SEQ ID NO: 1620919 - DNA, 25 bp, Homo sapien
gctcaccaagaagtttgtgttggga

SEQ ID NO: 1620920 - DNA, 25 bp, Homo sapien
tatctgctgctcaaaagatcttgac

SEQ ID NO: 1620921 - DNA, 25 bp, Homo sapien
caaaagatcttgacctggctcacca

SEQ ID NO: 1620922 - DNA, 25 bp, Homo sapien
ctagcctaggcccttcttttggtca

SEQ ID NO: 1620923 - DNA, 25 bp, Homo sapien
gcacattctgcacaaggataagggt

SEQ ID NO: 1620924 - DNA, 25 bp, Homo sapien
aaagtccaccttatgacctggccca

SEQ ID NO: 1620925 - DNA, 25 bp, Homo sapien
tgtggaccatcctgttctccaggtc

SEQ ID NO: 1620926 - DNA, 25 bp, Homo sapien
cacttcttctggatcgtgtggacca

SEQ ID NO: 1620927 - DNA, 25 bp, Homo sapien
aataatgaagtgtagaattggcttg

SEQ ID NO: 1620928 - DNA, 25 bp, Homo sapien
aacccaaacaagtagtgggcgcctg

SEQ ID NO: 1620929 - DNA, 25 bp, Homo sapien
ctgaaggtaatagatactttatcct

SEQ ID NO: 1620930 - DNA, 25 bp, Homo sapien
actttatcctgatgtgactaataca

SEQ ID NO: 1620931 - DNA, 25 bp, Homo sapien
aaaaacttttgtcactataatgcag

SEQ ID NO: 1620932 - DNA, 25 bp, Homo sapien
aaaacttttgtcactataatgcaga

SEQ ID NO: 1620933 - DNA, 25 bp, Homo sapien
taaaaaacttttgtcactataatgc

SEQ ID NO: 1620934 - DNA, 25 bp, Homo sapien
gaaaacctatctcctgcatcactcc

SEQ ID NO: 1620935 - DNA, 25 bp, Homo sapien
atgtctgaagtgtccgcgccttaga

SEQ ID NO: 1620936 - DNA, 25 bp, Homo sapien
ccctgatgttgaataaactttgtac

SEQ ID NO: 1620937 - DNA, 25 bp, Homo sapien
tttggtgcagcaacaattggtcaca

SEQ ID NO: 1620938 - DNA, 25 bp, Homo sapien
gaccctcatgttttataagctgtag

SEQ ID NO: 1620939 - DNA, 25 bp, Homo sapien
ctgtgcaataaggtacgagcattaa

SEQ ID NO: 1620940 - DNA, 25 bp, Homo sapien
tgacaaccatgtaaagcctttatca

SEQ ID NO: 1620941 - DNA, 25 bp, Homo sapien
cacttgtagaagtttactccaatgt

SEQ ID NO: 1620942 - DNA, 25 bp, Homo sapien
tggttttattaagtacagactctct

SEQ ID NO: 1620943 - DNA, 25 bp, Homo sapien
tgtagaaagggttgaggacagttta

SEQ ID NO: 1620944 - DNA, 25 bp, Homo sapien
caaaatcactgtcacatcttcaggt

SEQ ID NO: 1620945 - DNA, 25 bp, Homo sapien
tgtagtaaggtttgaatattggttg

SEQ ID NO: 1620946 - DNA, 25 bp, Homo sapien
tgtgtattaaggtgtgaggaatagt

SEQ ID NO: 1620947 - DNA, 25 bp, Homo sapien
tatgtttggtaaggattgagaaatg

SEQ ID NO: 1620948 - DNA, 25 bp, Homo sapien
ctgtacatttatagaatttctctgc

SEQ ID NO: 1620949 - DNA, 25 bp, Homo sapien
tgaggaccggctaaaagcttcacca

SEQ ID NO: 1620950 - DNA, 25 bp, Homo sapien
tttggtaaggattgagaaatggtta

SEQ ID NO: 1620951 - DNA, 25 bp, Homo sapien
acatttgtagagtttgtatctagta

SEQ ID NO: 1620952 - DNA, 25 bp, Homo sapien
taaggcgtgaggaccaattaaagac

SEQ ID NO: 1620953 - DNA, 25 bp, Homo sapien
agagtttgtatctagtataattttt

SEQ ID NO: 1620954 - DNA, 25 bp, Homo sapien
cagtgcgaattatcttatgggtagt

SEQ ID NO: 1620955 - DNA, 25 bp, Homo sapien
tcttatgtttagtgatgattgaagg

SEQ ID NO: 1620956 - DNA, 25 bp, Homo sapien
gcagaaattcactctggtatgaatt

SEQ ID NO: 1620957 - DNA, 25 bp, Homo sapien
tatgtttagtgatgattgaagggca

SEQ ID NO: 1620958 - DNA, 25 bp, Homo sapien
ttatgtttagtgatgattgaagggc

SEQ ID NO: 1620959 - DNA, 25 bp, Homo sapien
ccaaagttgtcaatacaagctacag

SEQ ID NO: 1620960 - DNA, 25 bp, Homo sapien
tgctcaaggaccgaagaatttaact

SEQ ID NO: 1620961 - DNA, 25 bp, Homo sapien
ttttccaaagttgtcaatacaagct

SEQ ID NO: 1620962 - DNA, 25 bp, Homo sapien
actatagccaagcaactatgaaaac

SEQ ID NO: 1620963 - DNA, 25 bp, Homo sapien
caataaactgatgttaagaaaccta

SEQ ID NO: 1620964 - DNA, 25 bp, Homo sapien
cgtgcccggccaattaaagcccaat

SEQ ID NO: 1620965 - DNA, 25 bp, Homo sapien
cggccaattaaagcccaatatggga

SEQ ID NO: 1620966 - DNA, 25 bp, Homo sapien
cataaaatctggtatgcaaggccag

SEQ ID NO: 1620967 - DNA, 25 bp, Homo sapien
tctgcctaactagaaacccacacag

SEQ ID NO: 1620968 - DNA, 25 bp, Homo sapien
tgttctgccctacagaggaaagtcc

SEQ ID NO: 1620969 - DNA, 25 bp, Homo sapien
gactgcaaaaaactgccctagtgtt

SEQ ID NO: 1620970 - DNA, 25 bp, Homo sapien
gaaatcctctctggtactcagtgaa

SEQ ID NO: 1620971 - DNA, 25 bp, Homo sapien
atgtctcctcataggctcccaaggc

SEQ ID NO: 1620972 - DNA, 25 bp, Homo sapien
catttcatgtctcctcataggctcc

SEQ ID NO: 1620973 - DNA, 25 bp, Homo sapien
tcataggctcccaaggctctttttc

SEQ ID NO: 1620974 - DNA, 25 bp, Homo sapien
gctaccatttcatgtctcctcatag

SEQ ID NO: 1620975 - DNA, 25 bp, Homo sapien
aaaaataaattacgtgaatcttgct

SEQ ID NO: 1620976 - DNA, 25 bp, Homo sapien
aaataaattacgtgaatcttgctca

SEQ ID NO: 1620977 - DNA, 25 bp, Homo sapien
atcttgctcatattctcccattatt

SEQ ID NO: 1620978 - DNA, 25 bp, Homo sapien
ataaattacgtgaatcttgctcata

SEQ ID NO: 1620979 - DNA, 25 bp, Homo sapien
gaattgagtattgaagttatgctca

SEQ ID NO: 1620980 - DNA, 25 bp, Homo sapien
gggtatattaggaattgagtattga

SEQ ID NO: 1620981 - DNA, 25 bp, Homo sapien
tatattaggaattgagtattgaagt

SEQ ID NO: 1620982 - DNA, 25 bp, Homo sapien
caaaaatgaaatctttagggtatat

SEQ ID NO: 1620983 - DNA, 25 bp, Homo sapien
attctgctgtgcaatgtccaggcat

SEQ ID NO: 1620984 - DNA, 25 bp, Homo sapien
tctgctgtgcaatgtccaggcattg

SEQ ID NO: 1620985 - DNA, 25 bp, Homo sapien
tgctgtgcaatgtccaggcattgcc

SEQ ID NO: 1620986 - DNA, 25 bp, Homo sapien
atataaattctgctgtgcaatgtcc

SEQ ID NO: 1620987 - DNA, 25 bp, Homo sapien
tgttcaacaaccatgaaaggatcat

SEQ ID NO: 1620988 - DNA, 25 bp, Homo sapien
catgttcaacaaccatgaaaggatc

SEQ ID NO: 1620989 - DNA, 25 bp, Homo sapien
ttcccatgttcaacaaccatgaaag

SEQ ID NO: 1620990 - DNA, 25 bp, Homo sapien
tcaacaaccatgaaaggatcatttt

SEQ ID NO: 1620991 - DNA, 25 bp, Homo sapien
atggacaccagcaatttttgctaca

SEQ ID NO: 1620992 - DNA, 25 bp, Homo sapien
catggacaccagcaatttttgctac

SEQ ID NO: 1620993 - DNA, 25 bp, Homo sapien
tcaaatgtcgcaaagatgtctagtt

SEQ ID NO: 1620994 - DNA, 25 bp, Homo sapien
tgagaggattccagtgacccagagc

SEQ ID NO: 1620995 - DNA, 25 bp, Homo sapien
taagccgggcaagaaagaatcaggc

SEQ ID NO: 1620996 - DNA, 25 bp, Homo sapien
gctgactgcccaatgataagccggg

SEQ ID NO: 1620997 - DNA, 25 bp, Homo sapien
aaagttgtcaggaagtcttatttat

SEQ ID NO: 1620998 - DNA, 25 bp, Homo sapien
gattggatatacattgttaaggttt

SEQ ID NO: 1620999 - DNA, 25 bp, Homo sapien
tgattggatatacattgttaaggtt

SEQ ID NO: 1621000 - DNA, 25 bp, Homo sapien
agttgtcaggaagtcttatttattt

SEQ ID NO: 1621001 - DNA, 25 bp, Homo sapien
caatgcacacgttactttgatcggg

SEQ ID NO: 1621002 - DNA, 25 bp, Homo sapien
tgtggcagcaggtttcacctacaca

SEQ ID NO: 1621003 - DNA, 25 bp, Homo sapien
aaagtggagatcctcatgtcctcat

SEQ ID NO: 1621004 - DNA, 25 bp, Homo sapien
tcaaaacccagaatcagaatttggg

SEQ ID NO: 1621005 - DNA, 25 bp, Homo sapien
aaggtaaaatagcctgggtcagtgg

SEQ ID NO: 1621006 - DNA, 25 bp, Homo sapien
aggtaaaatagcctgggtcagtggc

SEQ ID NO: 1621007 - DNA, 25 bp, Homo sapien
aaaggtaaaatagcctgggtcagtg

SEQ ID NO: 1621008 - DNA, 25 bp, Homo sapien
tcctttctagaagcgactacagtta

SEQ ID NO: 1621009 - DNA, 25 bp, Homo sapien
tttgcagcacaattgtgaatagatg

SEQ ID NO: 1621010 - DNA, 25 bp, Homo sapien
cagcatgacagtaaatctgcttaag

SEQ ID NO: 1621011 - DNA, 25 bp, Homo sapien
gttcagcaggctcactaagcctgag

SEQ ID NO: 1621012 - DNA, 25 bp, Homo sapien
gactagaaatgccacggaccaaagc

SEQ ID NO: 1621013 - DNA, 25 bp, Homo sapien
ctctcctgacgaccctcctgtggcc

SEQ ID NO: 1621014 - DNA, 25 bp, Homo sapien
gactctcctgtttctaatagaccaa

SEQ ID NO: 1621015 - DNA, 25 bp, Homo sapien
ttcatgaaactgcatcacgagtcag

SEQ ID NO: 1621016 - DNA, 25 bp, Homo sapien
cacagaagaacgaagacgagacgca

SEQ ID NO: 1621017 - DNA, 25 bp, Homo sapien
gatgaagcctcactagatagcccag

SEQ ID NO: 1621018 - DNA, 25 bp, Homo sapien
tgggctcaatgaatcctacaaagtc

SEQ ID NO: 1621019 - DNA, 25 bp, Homo sapien
tgaaagatgtgatcagacgctgggc

SEQ ID NO: 1621020 - DNA, 25 bp, Homo sapien
atatgtataagatcttccttcccta

SEQ ID NO: 1621021 - DNA, 25 bp, Homo sapien
tatgtataagatcttccttccctac

SEQ ID NO: 1621022 - DNA, 25 bp, Homo sapien
agtaatgcaggacaacttgaggtga

SEQ ID NO: 1621023 - DNA, 25 bp, Homo sapien
gtaatgcaggacaacttgaggtgag

SEQ ID NO: 1621024 - DNA, 25 bp, Homo sapien
cagatttgcctgacatagttctcaa

SEQ ID NO: 1621025 - DNA, 25 bp, Homo sapien
tcaactgaatacaatttagtctggc

SEQ ID NO: 1621026 - DNA, 25 bp, Homo sapien
cagtgaacctgcatatctaaattaa

SEQ ID NO: 1621027 - DNA, 25 bp, Homo sapien
tgagtccttgataagcattcaactg

SEQ ID NO: 1621028 - DNA, 25 bp, Homo sapien
gccaccgcacccagggtagaatagc

SEQ ID NO: 1621029 - DNA, 25 bp, Homo sapien
accgcacccagggtagaatagccca

SEQ ID NO: 1621030 - DNA, 25 bp, Homo sapien
caccgcacccagggtagaatagccc

SEQ ID NO: 1621031 - DNA, 25 bp, Homo sapien
ccaccgcacccagggtagaatagcc

SEQ ID NO: 1621032 - DNA, 25 bp, Homo sapien
cagaatcacatatttagatcatgga

SEQ ID NO: 1621033 - DNA, 25 bp, Homo sapien
cccctagatgttggtctcagcaata

SEQ ID NO: 1621034 - DNA, 25 bp, Homo sapien
tatgtgagacccaggcaaaaaggag

SEQ ID NO: 1621035 - DNA, 25 bp, Homo sapien
aagctcctgtggttagggtcaagaa

SEQ ID NO: 1621036 - DNA, 25 bp, Homo sapien
gctggcccagtgataggtaacaatt

SEQ ID NO: 1621037 - DNA, 25 bp, Homo sapien
ggtgtttagcccagcagtatgtcaa

SEQ ID NO: 1621038 - DNA, 25 bp, Homo sapien
tcacaacagctaggtgctggcccag

SEQ ID NO: 1621039 - DNA, 25 bp, Homo sapien
cacattaccttagttctgggccaaa

SEQ ID NO: 1621040 - DNA, 25 bp, Homo sapien
ctggatacatccatgagagcctcaa

SEQ ID NO: 1621041 - DNA, 25 bp, Homo sapien
cacaagtcacaatctcaacggtgga

SEQ ID NO: 1621042 - DNA, 25 bp, Homo sapien
tgtaggaatgaacaatcccacacat

SEQ ID NO: 1621043 - DNA, 25 bp, Homo sapien
tgttgagtccaagtacacaagtcac

SEQ ID NO: 1621044 - DNA, 25 bp, Homo sapien
gctgggtttgcatacgagtgtcaca

SEQ ID NO: 1621045 - DNA, 25 bp, Homo sapien
gtttgagagtcaccagcccacgtgt

SEQ ID NO: 1621046 - DNA, 25 bp, Homo sapien
taatcatacctgtggacctaggctc

SEQ ID NO: 1621047 - DNA, 25 bp, Homo sapien
catcgcaactgtgaactgggctaaa

SEQ ID NO: 1621048 - DNA, 25 bp, Homo sapien
gacaacaaagtcacgttacttggta

SEQ ID NO: 1621049 - DNA, 25 bp, Homo sapien
attccttctcgaaagcaaggcacag

SEQ ID NO: 1621050 - DNA, 25 bp, Homo sapien
ggcacagacaacaaagtcacgttac

SEQ ID NO: 1621051 - DNA, 25 bp, Homo sapien
tgtccagggttatgttacaattcct

SEQ ID NO: 1621052 - DNA, 25 bp, Homo sapien
ggcaagagtatagggtcacatgatc

SEQ ID NO: 1621053 - DNA, 25 bp, Homo sapien
gcagaggtatgtgtcacaatcacac

SEQ ID NO: 1621054 - DNA, 25 bp, Homo sapien
cacatgatctacatgctgggtccag

SEQ ID NO: 1621055 - DNA, 25 bp, Homo sapien
tctgcgacagcaccaaggcaagagt

SEQ ID NO: 1621056 - DNA, 25 bp, Homo sapien
aaaatatgcaaggtccaggcaaaag

SEQ ID NO: 1621057 - DNA, 25 bp, Homo sapien
ggtccaggcaaaagatgagagttac

SEQ ID NO: 1621058 - DNA, 25 bp, Homo sapien
aatatgcaaggtccaggcaaaagat

SEQ ID NO: 1621059 - DNA, 25 bp, Homo sapien
ccaaaatatgcaaggtccaggcaaa

SEQ ID NO: 1621060 - DNA, 25 bp, Homo sapien
tcacaatcctcttttggcagggtgc

SEQ ID NO: 1621061 - DNA, 25 bp, Homo sapien
caatcctcttttggcagggtgcagg

SEQ ID NO: 1621062 - DNA, 25 bp, Homo sapien
acatcacaatcctcttttggcaggg

SEQ ID NO: 1621063 - DNA, 25 bp, Homo sapien
cctcttttggcagggtgcaggctga

SEQ ID NO: 1621064 - DNA, 25 bp, Homo sapien
aagaaagtaacattactggtcaggc

SEQ ID NO: 1621065 - DNA, 25 bp, Homo sapien
acatcaccttgatgttaggtctctg

SEQ ID NO: 1621066 - DNA, 25 bp, Homo sapien
gtaacattactggtcaggcgcggtg

SEQ ID NO: 1621067 - DNA, 25 bp, Homo sapien
gagtcacatcaccttgatgttaggt

SEQ ID NO: 1621068 - DNA, 25 bp, Homo sapien
caggttccaggtatgagggtcaaca

SEQ ID NO: 1621069 - DNA, 25 bp, Homo sapien
ccaggttccaggtatgagggtcaac

SEQ ID NO: 1621070 - DNA, 25 bp, Homo sapien
caacacctcctgtatgttgggtctg

SEQ ID NO: 1621071 - DNA, 25 bp, Homo sapien
aggttccaggtatgagggtcaacac

SEQ ID NO: 1621072 - DNA, 25 bp, Homo sapien
aacggaggctgcgacaaagtcaccg

SEQ ID NO: 1621073 - DNA, 25 bp, Homo sapien
gattcccgagttggagaacgcggaa

SEQ ID NO: 1621074 - DNA, 25 bp, Homo sapien
aggacttgcagatcacagggtaacg

SEQ ID NO: 1621075 - DNA, 25 bp, Homo sapien
ccgagttggagaacgcggaaaagca

SEQ ID NO: 1621076 - DNA, 25 bp, Homo sapien
tgctgtaccacactgctgtacacat

SEQ ID NO: 1621077 - DNA, 25 bp, Homo sapien
gtgctgtaccacactgctgtacaca

SEQ ID NO: 1621078 - DNA, 25 bp, Homo sapien
cgtgctgtaccacactgctgtacac

SEQ ID NO: 1621079 - DNA, 25 bp, Homo sapien
ctggattctctgagattcgtgggaa

SEQ ID NO: 1621080 - DNA, 25 bp, Homo sapien
ctggtattgaggtgaaaacagaaac

SEQ ID NO: 1621081 - DNA, 25 bp, Homo sapien
gagattcgtgggaaaaatggtatcc

SEQ ID NO: 1621082 - DNA, 25 bp, Homo sapien
aacagaaacgatttctgcctctgga

SEQ ID NO: 1621083 - DNA, 25 bp, Homo sapien
ctgcgggacggattgaggctttcac

SEQ ID NO: 1621084 - DNA, 25 bp, Homo sapien
cactctcgtgaggttgtgactccgc

SEQ ID NO: 1621085 - DNA, 25 bp, Homo sapien
tgactccgctaaggagacaggctgc

SEQ ID NO: 1621086 - DNA, 25 bp, Homo sapien
tccactgttgagactgtgaatcacg

SEQ ID NO: 1621087 - DNA, 25 bp, Homo sapien
cgggatggttaaatatcactggacc

SEQ ID NO: 1621088 - DNA, 25 bp, Homo sapien
ctgggccaaacacctagaagatggg

SEQ ID NO: 1621089 - DNA, 25 bp, Homo sapien
tagcacctagggaatgtgactcttg

SEQ ID NO: 1621090 - DNA, 25 bp, Homo sapien
gcatcagccccactcgttttgagaa

SEQ ID NO: 1621091 - DNA, 25 bp, Homo sapien
tcatagacaagtgaggactctcctg

SEQ ID NO: 1621092 - DNA, 25 bp, Homo sapien
tacctgggcttagggagcagtacaa

SEQ ID NO: 1621093 - DNA, 25 bp, Homo sapien
gagaatgtcctaacagggttcagca

SEQ ID NO: 1621094 - DNA, 25 bp, Homo sapien
tgacagtgatatccacacccagctg

SEQ ID NO: 1621095 - DNA, 25 bp, Homo sapien
tatgcatttggccacaagtaggatg

SEQ ID NO: 1621096 - DNA, 25 bp, Homo sapien
tagagagagtgctgatacaaggccc

SEQ ID NO: 1621097 - DNA, 25 bp, Homo sapien
cattcaaacatggagagagcccact

SEQ ID NO: 1621098 - DNA, 25 bp, Homo sapien
gattcattattggacccagctcaca

SEQ ID NO: 1621099 - DNA, 25 bp, Homo sapien
caaaggcagacgctaacgcagtgca

SEQ ID NO: 1621100 - DNA, 25 bp, Homo sapien
gatttctgcgcactaagctgagccg

SEQ ID NO: 1621101 - DNA, 25 bp, Homo sapien
tcagacgccaagaacagaagaacgg

SEQ ID NO: 1621102 - DNA, 25 bp, Homo sapien
taaaacttctaggagaggctcggtg

SEQ ID NO: 1621103 - DNA, 25 bp, Homo sapien
ttacaggtacacaccaccacagcca

SEQ ID NO: 1621104 - DNA, 25 bp, Homo sapien
caatggtgcaatcttggttcactgc

SEQ ID NO: 1621105 - DNA, 25 bp, Homo sapien
tcttgcactgtcatccgggctggaa

SEQ ID NO: 1621106 - DNA, 25 bp, Homo sapien
aacctccgcctcctgggttcacaca

SEQ ID NO: 1621107 - DNA, 25 bp, Homo sapien
gagacctggtatagaaacattcacc

SEQ ID NO: 1621108 - DNA, 25 bp, Homo sapien
tttcaactattaacccagcactgga

SEQ ID NO: 1621109 - DNA, 25 bp, Homo sapien
cactttttgggctatagactaagaa

SEQ ID NO: 1621110 - DNA, 25 bp, Homo sapien
taatttttagtctcacccattcaca

SEQ ID NO: 1621111 - DNA, 25 bp, Homo sapien
tagcttggagactcacagatcaagt

SEQ ID NO: 1621112 - DNA, 25 bp, Homo sapien
ccagtaatcggcttgattggtcaaa

SEQ ID NO: 1621113 - DNA, 25 bp, Homo sapien
catcaatgtccagtgtgttgacaac

SEQ ID NO: 1621114 - DNA, 25 bp, Homo sapien
tacagaggccagtattatctaagtg

SEQ ID NO: 1621115 - DNA, 25 bp, Homo sapien
ttaagaattgaggatctattagagg

SEQ ID NO: 1621116 - DNA, 25 bp, Homo sapien
gggcattgcaacattccacacaatt

SEQ ID NO: 1621117 - DNA, 25 bp, Homo sapien
taaggactggttaagggcattgcaa

SEQ ID NO: 1621118 - DNA, 25 bp, Homo sapien
aggtttgtagagtctctcttgtgta

SEQ ID NO: 1621119 - DNA, 25 bp, Homo sapien
ttgtagggtttttcctccagtatga

SEQ ID NO: 1621120 - DNA, 25 bp, Homo sapien
tgtagggtttttcctccagtatgaa

SEQ ID NO: 1621121 - DNA, 25 bp, Homo sapien
ctgtttaaaagctttgccaaattct

SEQ ID NO: 1621122 - DNA, 25 bp, Homo sapien
atgtgtaggagggttgggaactgtt

SEQ ID NO: 1621123 - DNA, 25 bp, Homo sapien
ttaaaagctttgccaaattcttcac

SEQ ID NO: 1621124 - DNA, 25 bp, Homo sapien
ttatgtgtaggagggttgggaactg

SEQ ID NO: 1621125 - DNA, 25 bp, Homo sapien
atttttagaatttctctccagcatg

SEQ ID NO: 1621126 - DNA, 25 bp, Homo sapien
ctctccagcatgaattttcttatgt

SEQ ID NO: 1621127 - DNA, 25 bp, Homo sapien
ctccagcatgaattttcttatgttt

SEQ ID NO: 1621128 - DNA, 25 bp, Homo sapien
ccagcatgaattttcttatgtttac

SEQ ID NO: 1621129 - DNA, 25 bp, Homo sapien
gagaaccagctgaaggctttgccac

SEQ ID NO: 1621130 - DNA, 25 bp, Homo sapien
aagactgagaaccagctgaaggctt

SEQ ID NO: 1621131 - DNA, 25 bp, Homo sapien
ctgagaaccagctgaaggctttgcc

SEQ ID NO: 1621132 - DNA, 25 bp, Homo sapien
taaagactgagaaccagctgaaggc

SEQ ID NO: 1621133 - DNA, 25 bp, Homo sapien
agttgaaagcctcaccacattcttc

SEQ ID NO: 1621134 - DNA, 25 bp, Homo sapien
attttcttatgtttactgaagactg

SEQ ID NO: 1621135 - DNA, 25 bp, Homo sapien
tcttatgtttactgaagactgataa

SEQ ID NO: 1621136 - DNA, 25 bp, Homo sapien
ttcttatgtttactgaagactgata

SEQ ID NO: 1621137 - DNA, 25 bp, Homo sapien
ttttcttatgtttactgaagactga

SEQ ID NO: 1621138 - DNA, 25 bp, Homo sapien
caaggattgagaacataacaaagcc

SEQ ID NO: 1621139 - DNA, 25 bp, Homo sapien
tttgatgaccagttgaaagctttgc

SEQ ID NO: 1621140 - DNA, 25 bp, Homo sapien
tatgttccataaggtttgatgacca

SEQ ID NO: 1621141 - DNA, 25 bp, Homo sapien
cttatgtttactaaagactgacaac

SEQ ID NO: 1621142 - DNA, 25 bp, Homo sapien
gattgagaatgtactaaagcctttg

SEQ ID NO: 1621143 - DNA, 25 bp, Homo sapien
tacctcatgtttagtaaggatggag

SEQ ID NO: 1621144 - DNA, 25 bp, Homo sapien
ttatgataactaagggttgagggcc

SEQ ID NO: 1621145 - DNA, 25 bp, Homo sapien
tggagaacatactaaaacctttgcc

SEQ ID NO: 1621146 - DNA, 25 bp, Homo sapien
gttgagggccatttataggctttgc

SEQ ID NO: 1621147 - DNA, 25 bp, Homo sapien
tgtagtaagggttgagaccttacta

SEQ ID NO: 1621148 - DNA, 25 bp, Homo sapien
agggcttttctccagcatgaattgc

SEQ ID NO: 1621149 - DNA, 25 bp, Homo sapien
tgagaccttactaaaggttttgcca

SEQ ID NO: 1621150 - DNA, 25 bp, Homo sapien
cagcatgaattgccttatgtgtagt

SEQ ID NO: 1621151 - DNA, 25 bp, Homo sapien
tgagaccttaataaaggttttgcca

SEQ ID NO: 1621152 - DNA, 25 bp, Homo sapien
ctgagaatgtactaaagcttttgcc

SEQ ID NO: 1621153 - DNA, 25 bp, Homo sapien
tgtttaataagaattgcagattggt

SEQ ID NO: 1621154 - DNA, 25 bp, Homo sapien
tatgtttaataaggattgcagatcg

SEQ ID NO: 1621155 - DNA, 25 bp, Homo sapien
attttcttatgataactaagggttg

SEQ ID NO: 1621156 - DNA, 25 bp, Homo sapien
ttatgataactaagggttgaggacc

SEQ ID NO: 1621157 - DNA, 25 bp, Homo sapien
tcttatgataactaagggttgagga

SEQ ID NO: 1621158 - DNA, 25 bp, Homo sapien
tttcttatgataactaagggttgag

SEQ ID NO: 1621159 - DNA, 25 bp, Homo sapien
catgagttgccttatcacattcttc

SEQ ID NO: 1621160 - DNA, 25 bp, Homo sapien
tgagaatgtactgaagcttttgcca

SEQ ID NO: 1621161 - DNA, 25 bp, Homo sapien
ggattgagaatgtactgaagctttt

SEQ ID NO: 1621162 - DNA, 25 bp, Homo sapien
ctccagcatgagttgccttatcaca

SEQ ID NO: 1621163 - DNA, 25 bp, Homo sapien
cttatgtttagtaaggattgagaac

SEQ ID NO: 1621164 - DNA, 25 bp, Homo sapien
ccattatgaattaccttatgtttag

SEQ ID NO: 1621165 - DNA, 25 bp, Homo sapien
tatgtttagtaaggattgagaacat

SEQ ID NO: 1621166 - DNA, 25 bp, Homo sapien
ctccattatgaattaccttatgttt

SEQ ID NO: 1621167 - DNA, 25 bp, Homo sapien
atgaatgacctcatgtttagtaagg

SEQ ID NO: 1621168 - DNA, 25 bp, Homo sapien
ttatgttccataaggtttgaggacc

SEQ ID NO: 1621169 - DNA, 25 bp, Homo sapien
tttcttatgttccataaggtttgag

SEQ ID NO: 1621170 - DNA, 25 bp, Homo sapien
gaatgacctcatgtttagtaaggat

SEQ ID NO: 1621171 - DNA, 25 bp, Homo sapien
aagggttgagggccacttataggct

SEQ ID NO: 1621172 - DNA, 25 bp, Homo sapien
agggttgagggccacttataggctt

SEQ ID NO: 1621173 - DNA, 25 bp, Homo sapien
gttgagggccacttataggctttgc

SEQ ID NO: 1621174 - DNA, 25 bp, Homo sapien
gcatgcaaaatgatctgacgtattc

SEQ ID NO: 1621175 - DNA, 25 bp, Homo sapien
agcatgcaaaatgatctgacgtatt

SEQ ID NO: 1621176 - DNA, 25 bp, Homo sapien
ttacactcatccacattggtataac

SEQ ID NO: 1621177 - DNA, 25 bp, Homo sapien
atgcaaaatgatctgacgtattctt

SEQ ID NO: 1621178 - DNA, 25 bp, Homo sapien
gatcttgagcaaaatgagaacatat

SEQ ID NO: 1621179 - DNA, 25 bp, Homo sapien
tgctctggccaaagatcttgagcaa

SEQ ID NO: 1621180 - DNA, 25 bp, Homo sapien
aagaatcttctatgccctgctctgg

SEQ ID NO: 1621181 - DNA, 25 bp, Homo sapien
tctggccaaagatcttgagcaaaat

SEQ ID NO: 1621182 - DNA, 25 bp, Homo sapien
tgccatgaacagtactttggctgtc

SEQ ID NO: 1621183 - DNA, 25 bp, Homo sapien
catgaacagtactttggctgtcact

SEQ ID NO: 1621184 - DNA, 25 bp, Homo sapien
tatgccatgaacagtactttggctg

SEQ ID NO: 1621185 - DNA, 25 bp, Homo sapien
ccatgaacagtactttggctgtcac

SEQ ID NO: 1621186 - DNA, 25 bp, Homo sapien
atcactttaaggactggcttcctcc

SEQ ID NO: 1621187 - DNA, 25 bp, Homo sapien
tcactttaaggactggcttcctcct

SEQ ID NO: 1621188 - DNA, 25 bp, Homo sapien
cctccagaaaaatgatcaggtctgg

SEQ ID NO: 1621189 - DNA, 25 bp, Homo sapien
tcctccagaaaaatgatcaggtctg

SEQ ID NO: 1621190 - DNA, 25 bp, Homo sapien
cttcctccagaaaaatgatcaggtc

SEQ ID NO: 1621191 - DNA, 25 bp, Homo sapien
tccttcctccagaaaaatgatcagg

SEQ ID NO: 1621192 - DNA, 25 bp, Homo sapien
ctgttttattaaaaatgaacaacat

SEQ ID NO: 1621193 - DNA, 25 bp, Homo sapien
tggccacatccctaaatgtcaatga

SEQ ID NO: 1621194 - DNA, 25 bp, Homo sapien
ccacatccctaaatgtcaatgatcc

SEQ ID NO: 1621195 - DNA, 25 bp, Homo sapien
atttctatataaattctgctgtgca

SEQ ID NO: 1621196 - DNA, 25 bp, Homo sapien
ctgtgcagtgtccaggcattgccac

SEQ ID NO: 1621197 - DNA, 25 bp, Homo sapien
taaagcaatagctctctactccctg

SEQ ID NO: 1621198 - DNA, 25 bp, Homo sapien
catggtagttgggaaggccatccat

SEQ ID NO: 1621199 - DNA, 25 bp, Homo sapien
ccccggtgcctactgaaggtaggct

SEQ ID NO: 1621200 - DNA, 25 bp, Homo sapien
tttgcaacttgaaccccggtgccta

SEQ ID NO: 1621201 - DNA, 25 bp, Homo sapien
gccacgcccggccaaggagtttcat

SEQ ID NO: 1621202 - DNA, 25 bp, Homo sapien
cacgcccggccaaggagtttcattc

SEQ ID NO: 1621203 - DNA, 25 bp, Homo sapien
gcccggccaaggagtttcattcttg

SEQ ID NO: 1621204 - DNA, 25 bp, Homo sapien
cgcccggccaaggagtttcattctt

SEQ ID NO: 1621205 - DNA, 25 bp, Homo sapien
tttaatttaccatgtcagagtcatt

SEQ ID NO: 1621206 - DNA, 25 bp, Homo sapien
cttagcttgcagtcattaggctcaa

SEQ ID NO: 1621207 - DNA, 25 bp, Homo sapien
tagacgctctcgcagacatagccat

SEQ ID NO: 1621208 - DNA, 25 bp, Homo sapien
tgaccaacatggtgaaaccccgtcc

SEQ ID NO: 1621209 - DNA, 25 bp, Homo sapien
aagcaggtgaatcacttgaaatcag

SEQ ID NO: 1621210 - DNA, 25 bp, Homo sapien
gagttcgagaccagcctgaccaaca

SEQ ID NO: 1621211 - DNA, 25 bp, Homo sapien
gcctgaccaacatggtgaaaccccg

SEQ ID NO: 1621212 - DNA, 25 bp, Homo sapien
taaggacgagaccttgacctccggc

SEQ ID NO: 1621213 - DNA, 25 bp, Homo sapien
gacgagaccttgacctccggctgca

SEQ ID NO: 1621214 - DNA, 25 bp, Homo sapien
cacagcagtaaggacgagaccttga

SEQ ID NO: 1621215 - DNA, 25 bp, Homo sapien
aggacgagaccttgacctccggctg

SEQ ID NO: 1621216 - DNA, 25 bp, Homo sapien
gattataaatcacatgaacacgtat

SEQ ID NO: 1621217 - DNA, 25 bp, Homo sapien
catctcatgacagttagaatgcaat

SEQ ID NO: 1621218 - DNA, 25 bp, Homo sapien
aaagattataaatcacatgaacacg

SEQ ID NO: 1621219 - DNA, 25 bp, Homo sapien
atctcatgacagttagaatgcaatc

SEQ ID NO: 1621220 - DNA, 25 bp, Homo sapien
aattctcctgcctcaacctcccatg

SEQ ID NO: 1621221 - DNA, 25 bp, Homo sapien
aacccctgccttccagtttcaagca

SEQ ID NO: 1621222 - DNA, 25 bp, Homo sapien
tagctgagattacaggtgcctgcca

SEQ ID NO: 1621223 - DNA, 25 bp, Homo sapien
gccaccacgtctagctaatttttta

SEQ ID NO: 1621224 - DNA, 25 bp, Homo sapien
cactcaggaggttcattcacatacc

SEQ ID NO: 1621225 - DNA, 25 bp, Homo sapien
tcatgggcctattgggcaatgacgg

SEQ ID NO: 1621226 - DNA, 25 bp, Homo sapien
tcctagaaaggaactgtagtgccgc

SEQ ID NO: 1621227 - DNA, 25 bp, Homo sapien
gaaagacgctgagtgatgtcaacaa

SEQ ID NO: 1621228 - DNA, 25 bp, Homo sapien
cctctggcatgcaaacgtctcatga

SEQ ID NO: 1621229 - DNA, 25 bp, Homo sapien
aggactatcttgacaggccttggac

SEQ ID NO: 1621230 - DNA, 25 bp, Homo sapien
catgaataagtctggtgtgtttgct

SEQ ID NO: 1621231 - DNA, 25 bp, Homo sapien
gacccctggaagttttactgagcta

SEQ ID NO: 1621232 - DNA, 25 bp, Homo sapien
cacttgattaacctcatgataatcc

SEQ ID NO: 1621233 - DNA, 25 bp, Homo sapien
agttaccacttgattaacctcatga

SEQ ID NO: 1621234 - DNA, 25 bp, Homo sapien
tggagttaccacttgattaacctca

SEQ ID NO: 1621235 - DNA, 25 bp, Homo sapien
taccacttgattaacctcatgataa

SEQ ID NO: 1621236 - DNA, 25 bp, Homo sapien
tgagcatacaagagtcacaatctca

SEQ ID NO: 1621237 - DNA, 25 bp, Homo sapien
atgagcatacaagagtcacaatctc

SEQ ID NO: 1621238 - DNA, 25 bp, Homo sapien
gagcatacaagagtcacaatctcac

SEQ ID NO: 1621239 - DNA, 25 bp, Homo sapien
gcatacaagagtcacaatctcacct

SEQ ID NO: 1621240 - DNA, 25 bp, Homo sapien
cacctccatttgcataacctagaga

SEQ ID NO: 1621241 - DNA, 25 bp, Homo sapien
tgagagtcccaattccacctgtaga

SEQ ID NO: 1621242 - DNA, 25 bp, Homo sapien
ctgtgtgttgtgttggccctatgat

SEQ ID NO: 1621243 - DNA, 25 bp, Homo sapien
gaaaatagaagagtcgcagagcctt

SEQ ID NO: 1621244 - DNA, 25 bp, Homo sapien
gatgtcacaacatttcctgggagca

SEQ ID NO: 1621245 - DNA, 25 bp, Homo sapien
gagacactatctcccctattagctg

SEQ ID NO: 1621246 - DNA, 25 bp, Homo sapien
tatttgtcacaatcccaagtataag

SEQ ID NO: 1621247 - DNA, 25 bp, Homo sapien
catagcacctatgagttggaccagg

SEQ ID NO: 1621248 - DNA, 25 bp, Homo sapien
cacaatcctcttctttggcatggca

SEQ ID NO: 1621249 - DNA, 25 bp, Homo sapien
agaagtagagagtcacaccacctag

SEQ ID NO: 1621250 - DNA, 25 bp, Homo sapien
ggaagaagtagagagtcacaccacc

SEQ ID NO: 1621251 - DNA, 25 bp, Homo sapien
ggtgttggaccaagccatatgtcac

SEQ ID NO: 1621252 - DNA, 25 bp, Homo sapien
aaaattcccttgagaggtgagccca

SEQ ID NO: 1621253 - DNA, 25 bp, Homo sapien
catcatttcggtgagaaccccacag

SEQ ID NO: 1621254 - DNA, 25 bp, Homo sapien
cacagatgtgtcactattttccctg

SEQ ID NO: 1621255 - DNA, 25 bp, Homo sapien
tgtcaaaattcccttgagaggtgag

SEQ ID NO: 1621256 - DNA, 25 bp, Homo sapien
cactttcccttgtgtgggcatggct

SEQ ID NO: 1621257 - DNA, 25 bp, Homo sapien
actttcccttgtgtgggcatggctt

SEQ ID NO: 1621258 - DNA, 25 bp, Homo sapien
aatgcacagcatatccagggctcaa

SEQ ID NO: 1621259 - DNA, 25 bp, Homo sapien
caatgcacagcatatccagggctca

SEQ ID NO: 1621260 - DNA, 25 bp, Homo sapien
tggacccagccatatatcacaatgc

SEQ ID NO: 1621261 - DNA, 25 bp, Homo sapien
cagccatatatcacaatgcacagca

SEQ ID NO: 1621262 - DNA, 25 bp, Homo sapien
gcacacggtccaaacaaaagatgaa

SEQ ID NO: 1621263 - DNA, 25 bp, Homo sapien
gtgcacacggtccaaacaaaagatg

SEQ ID NO: 1621264 - DNA, 25 bp, Homo sapien
tttgtgcacacggtccaaacaaaag

SEQ ID NO: 1621265 - DNA, 25 bp, Homo sapien
tccttttgtgcacacggtccaaaca

SEQ ID NO: 1621266 - DNA, 25 bp, Homo sapien
ttgtcttgattcgatcctcttcaag

SEQ ID NO: 1621267 - DNA, 25 bp, Homo sapien
ccgctatggaactttgccaggtatt

SEQ ID NO: 1621268 - DNA, 25 bp, Homo sapien
ttgattcgatcctcttcaagaggtg

SEQ ID NO: 1621269 - DNA, 25 bp, Homo sapien
aagaggtgatttatggtccgctatg

SEQ ID NO: 1621270 - DNA, 25 bp, Homo sapien
gaaccgaatccatgtatgaatcaat

SEQ ID NO: 1621271 - DNA, 25 bp, Homo sapien
ctgtgaaccgaatccatgtatgaat

SEQ ID NO: 1621272 - DNA, 25 bp, Homo sapien
accgaatccatgtatgaatcaattt

SEQ ID NO: 1621273 - DNA, 25 bp, Homo sapien
gtgaaccgaatccatgtatgaatca

SEQ ID NO: 1621274 - DNA, 25 bp, Homo sapien
tgaaagtacgacgaagccaacaggt

SEQ ID NO: 1621275 - DNA, 25 bp, Homo sapien
taaactcagcagtatgtcacagtag

SEQ ID NO: 1621276 - DNA, 25 bp, Homo sapien
cagagatgcatcaccatgtccgagg

SEQ ID NO: 1621277 - DNA, 25 bp, Homo sapien
catctcggtgttgggcaaggtaaaa

SEQ ID NO: 1621278 - DNA, 25 bp, Homo sapien
tccggacctatcatcctttgctccc

SEQ ID NO: 1621279 - DNA, 25 bp, Homo sapien
agatatgaagacttagagttttctt

SEQ ID NO: 1621280 - DNA, 25 bp, Homo sapien
tctcctccggacctatcatcctttg

SEQ ID NO: 1621281 - DNA, 25 bp, Homo sapien
gttttcttctcctccggacctatca

SEQ ID NO: 1621282 - DNA, 25 bp, Homo sapien
gcatgtgcaaaggtgctgcacctcc

SEQ ID NO: 1621283 - DNA, 25 bp, Homo sapien
tacagagacaccaatttccctagtg

SEQ ID NO: 1621284 - DNA, 25 bp, Homo sapien
catgtgcaaaggtgctgcacctcca

SEQ ID NO: 1621285 - DNA, 25 bp, Homo sapien
ttacagagacaccaatttccctagt

SEQ ID NO: 1621286 - DNA, 25 bp, Homo sapien
gtggaagtgatgtgtggatgaaaag

SEQ ID NO: 1621287 - DNA, 25 bp, Homo sapien
ctacccacattgactaatagtgagt

SEQ ID NO: 1621288 - DNA, 25 bp, Homo sapien
cagcatctcctttttcatccattgg

SEQ ID NO: 1621289 - DNA, 25 bp, Homo sapien
cattgactaatagtgagtggaagtg

SEQ ID NO: 1621290 - DNA, 25 bp, Homo sapien
gcatggcctggatagtaagctttca

SEQ ID NO: 1621291 - DNA, 25 bp, Homo sapien
ctggatagtaagctttcagaactac

SEQ ID NO: 1621292 - DNA, 25 bp, Homo sapien
tggcctggatagtaagctttcagaa

SEQ ID NO: 1621293 - DNA, 25 bp, Homo sapien
gataagagcaataaagctaagagga

SEQ ID NO: 1621294 - DNA, 25 bp, Homo sapien
cctttaagttcaggttagcattcca

SEQ ID NO: 1621295 - DNA, 25 bp, Homo sapien
ttctcaggtatgcccgtgttattca

SEQ ID NO: 1621296 - DNA, 25 bp, Homo sapien
aggtatgcccgtgttattcacagcc

SEQ ID NO: 1621297 - DNA, 25 bp, Homo sapien
cattccaagaccctgcttttttctc

SEQ ID NO: 1621298 - DNA, 25 bp, Homo sapien
tgtgtaataaagattgaggactgtt

SEQ ID NO: 1621299 - DNA, 25 bp, Homo sapien
ctccagtatgaattttcttatgata

SEQ ID NO: 1621300 - DNA, 25 bp, Homo sapien
tccagtatgaattttcttatgataa

SEQ ID NO: 1621301 - DNA, 25 bp, Homo sapien
acttaaaagctttgccacattcttc

SEQ ID NO: 1621302 - DNA, 25 bp, Homo sapien
ttaaaagctttgccacattcttcac

SEQ ID NO: 1621303 - DNA, 25 bp, Homo sapien
tgacttaaaagctttgccacattct

SEQ ID NO: 1621304 - DNA, 25 bp, Homo sapien
agttgaggatgacttaaaagctttg

SEQ ID NO: 1621305 - DNA, 25 bp, Homo sapien
gattgagaacgtactaaagcctttg

SEQ ID NO: 1621306 - DNA, 25 bp, Homo sapien
tagtaaagcttgaggaccaggtgaa

SEQ ID NO: 1621307 - DNA, 25 bp, Homo sapien
gcttgaggatctgctgaaggctttg

SEQ ID NO: 1621308 - DNA, 25 bp, Homo sapien
ggatcgaggaccagctgaaggcttt

SEQ ID NO: 1621309 - DNA, 25 bp, Homo sapien
tatgttccatgagctttgaggatga

SEQ ID NO: 1621310 - DNA, 25 bp, Homo sapien
ttatgttccatgagctttgaggatg

SEQ ID NO: 1621311 - DNA, 25 bp, Homo sapien
cttatgttccatgagctttgaggat

SEQ ID NO: 1621312 - DNA, 25 bp, Homo sapien
tgtgtattaagggttgagaccttac

SEQ ID NO: 1621313 - DNA, 25 bp, Homo sapien
tatgtgtattaagggttgagacctt

SEQ ID NO: 1621314 - DNA, 25 bp, Homo sapien
cttcagcatgaattgccttatgtgt

SEQ ID NO: 1621315 - DNA, 25 bp, Homo sapien
tcagcatgaattgccttatgtgtat

SEQ ID NO: 1621316 - DNA, 25 bp, Homo sapien
ctcttgtgttcagtaaggcttgagg

SEQ ID NO: 1621317 - DNA, 25 bp, Homo sapien
agtaaggattgaggatcgattaaaa

SEQ ID NO: 1621318 - DNA, 25 bp, Homo sapien
gattgaggatcgattaaaagctttc

SEQ ID NO: 1621319 - DNA, 25 bp, Homo sapien
tcagtaaggcttgaggaccagctga

SEQ ID NO: 1621320 - DNA, 25 bp, Homo sapien
tatgttccatgagctttgaggacga

SEQ ID NO: 1621321 - DNA, 25 bp, Homo sapien
tccatgagctttgaggacgagttgg

SEQ ID NO: 1621322 - DNA, 25 bp, Homo sapien
ttatgttccatgagctttgaggacg

SEQ ID NO: 1621323 - DNA, 25 bp, Homo sapien
tgttccatgagctttgaggacgagt

SEQ ID NO: 1621324 - DNA, 25 bp, Homo sapien
tagggcttctcttcagcatgaattg

SEQ ID NO: 1621325 - DNA, 25 bp, Homo sapien
agggcttctcttcagcatgaattgc

SEQ ID NO: 1621326 - DNA, 25 bp, Homo sapien
taagggttgagacgctactaaatcc

SEQ ID NO: 1621327 - DNA, 25 bp, Homo sapien
attaagggttgagacgctactaaat

SEQ ID NO: 1621328 - DNA, 25 bp, Homo sapien
ttgagacgctactaaatcctttgcc

SEQ ID NO: 1621329 - DNA, 25 bp, Homo sapien
gacgctactaaatcctttgccacat

SEQ ID NO: 1621330 - DNA, 25 bp, Homo sapien
aaatgatctgacatattctttacat

SEQ ID NO: 1621331 - DNA, 25 bp, Homo sapien
aaaatgatctgacatattctttaca

SEQ ID NO: 1621332 - DNA, 25 bp, Homo sapien
ttacactcatccacattggtacaac

SEQ ID NO: 1621333 - DNA, 25 bp, Homo sapien
tacatattagactcagataagtaca

SEQ ID NO: 1621334 - DNA, 25 bp, Homo sapien
catattagactcagataagtacagt

SEQ ID NO: 1621335 - DNA, 25 bp, Homo sapien
ttagactcagataagtacagtttcc

SEQ ID NO: 1621336 - DNA, 25 bp, Homo sapien
tctacatattagactcagataagta

SEQ ID NO: 1621337 - DNA, 25 bp, Homo sapien
ttgctccagaaaaatgatcaggtct

SEQ ID NO: 1621338 - DNA, 25 bp, Homo sapien
tttccttgctccagaaaaatgatca

SEQ ID NO: 1621339 - DNA, 25 bp, Homo sapien
cttgctccagaaaaatgatcaggtc

SEQ ID NO: 1621340 - DNA, 25 bp, Homo sapien
tccagaaaaatgatcaggtctggct

SEQ ID NO: 1621341 - DNA, 25 bp, Homo sapien
caatgttagcacaagcaatggctag

SEQ ID NO: 1621342 - DNA, 25 bp, Homo sapien
taccttaaagcttgtcagaatgcag

SEQ ID NO: 1621343 - DNA, 25 bp, Homo sapien
gattgcaagtgtgcaatggctcctg

SEQ ID NO: 1621344 - DNA, 25 bp, Homo sapien
tcctgtgagatccacacaaagcttg

SEQ ID NO: 1621345 - DNA, 25 bp, Homo sapien
attctgctgtgtagaatccaggcat

SEQ ID NO: 1621346 - DNA, 25 bp, Homo sapien
taccaattggtcatgggcagaactt

SEQ ID NO: 1621347 - DNA, 25 bp, Homo sapien
tttaccaattggtcatgggcagaac

SEQ ID NO: 1621348 - DNA, 25 bp, Homo sapien
tatttaccaattggtcatgggcaga

SEQ ID NO: 1621349 - DNA, 25 bp, Homo sapien
accaattggtcatgggcagaacttt

SEQ ID NO: 1621350 - DNA, 25 bp, Homo sapien
tagtggacacagatcttgatctcag

SEQ ID NO: 1621351 - DNA, 25 bp, Homo sapien
gaatagtggacacagatcttgatct

SEQ ID NO: 1621352 - DNA, 25 bp, Homo sapien
taaacgtatgtttcctggaggaaga

SEQ ID NO: 1621353 - DNA, 25 bp, Homo sapien
ttgcaagtactaaacgtatgtttcc

SEQ ID NO: 1621354 - DNA, 25 bp, Homo sapien
tttcattagcagcacttacaagtgg

SEQ ID NO: 1621355 - DNA, 25 bp, Homo sapien
tcctgcatgggtaaagtagcagcag

SEQ ID NO: 1621356 - DNA, 25 bp, Homo sapien
taatggctctctgactttgataact

SEQ ID NO: 1621357 - DNA, 25 bp, Homo sapien
tggattctcacgtctacaggtctac

SEQ ID NO: 1621358 - DNA, 25 bp, Homo sapien
aaagcaatagctctctactctctga

SEQ ID NO: 1621359 - DNA, 25 bp, Homo sapien
catctggtagctgggaaggccatcc

SEQ ID NO: 1621360 - DNA, 25 bp, Homo sapien
gaaagacagtcaccataattcatct

SEQ ID NO: 1621361 - DNA, 25 bp, Homo sapien
agttcatcctgaattcatctggtag

SEQ ID NO: 1621362 - DNA, 25 bp, Homo sapien
tcctaaccattgaatgtgagatcta

SEQ ID NO: 1621363 - DNA, 25 bp, Homo sapien
accattgaatgtgagatctacactg

SEQ ID NO: 1621364 - DNA, 25 bp, Homo sapien
cctaaccattgaatgtgagatctac

SEQ ID NO: 1621365 - DNA, 25 bp, Homo sapien
taaccattgaatgtgagatctacac

SEQ ID NO: 1621366 - DNA, 25 bp, Homo sapien
tatcttcaataagacactcccaaac

SEQ ID NO: 1621367 - DNA, 25 bp, Homo sapien
tttatcttcaataagacactcccaa

SEQ ID NO: 1621368 - DNA, 25 bp, Homo sapien
atcttcaataagacactcccaaacc

SEQ ID NO: 1621369 - DNA, 25 bp, Homo sapien
cttagcttgcagtcattgggctcaa

SEQ ID NO: 1621370 - DNA, 25 bp, Homo sapien
tgctctcctgaaaggctacattcca

SEQ ID NO: 1621371 - DNA, 25 bp, Homo sapien
tcaggtcgcatagtgacttgataaa

SEQ ID NO: 1621372 - DNA, 25 bp, Homo sapien
acctgctcaagcccgatcacatata

SEQ ID NO: 1621373 - DNA, 25 bp, Homo sapien
cttgataaaacatagtcaaacgttc

SEQ ID NO: 1621374 - DNA, 25 bp, Homo sapien
gctcaagcccgatcacatatatacc

SEQ ID NO: 1621375 - DNA, 25 bp, Homo sapien
tggccgagcccagtgatattttaca

SEQ ID NO: 1621376 - DNA, 25 bp, Homo sapien
cagggtctagatcagagagtcttca

SEQ ID NO: 1621377 - DNA, 25 bp, Homo sapien
gaatatcacctgtctgttagcctag

SEQ ID NO: 1621378 - DNA, 25 bp, Homo sapien
caaggtccagattacagagtcccca

SEQ ID NO: 1621379 - DNA, 25 bp, Homo sapien
ccaaccacccgccaggagggcccat

SEQ ID NO: 1621380 - DNA, 25 bp, Homo sapien
gtgacggtgagtgtcctggcaggac

SEQ ID NO: 1621381 - DNA, 25 bp, Homo sapien
caggacaaggtgctctaggacccac

SEQ ID NO: 1621382 - DNA, 25 bp, Homo sapien
taggacccacgaggtagatagacat

SEQ ID NO: 1621383 - DNA, 25 bp, Homo sapien
aaggtgctctaggacccacgaggta

SEQ ID NO: 1621384 - DNA, 25 bp, Homo sapien
tgtatgggaactggtctcggtgacc

SEQ ID NO: 1621385 - DNA, 25 bp, Homo sapien
gacaggttaccttgtgacatacctc

SEQ ID NO: 1621386 - DNA, 25 bp, Homo sapien
ggccatctgcagattactaggttaa

SEQ ID NO: 1621387 - DNA, 25 bp, Homo sapien
acatacctctgaaacaagggacctc

SEQ ID NO: 1621388 - DNA, 25 bp, Homo sapien
ttcggggcagtctagttttgttgga

SEQ ID NO: 1621389 - DNA, 25 bp, Homo sapien
tcggggcagtctagttttgttggac

SEQ ID NO: 1621390 - DNA, 25 bp, Homo sapien
gtgactttgtacttgtgccttcaac

SEQ ID NO: 1621391 - DNA, 25 bp, Homo sapien
agctttgtgactttgtacttgtgcc

SEQ ID NO: 1621392 - DNA, 25 bp, Homo sapien
gaaagcctacattggtatgtcaaac

SEQ ID NO: 1621393 - DNA, 25 bp, Homo sapien
gcctacattggtatgtcaaacgctg

SEQ ID NO: 1621394 - DNA, 25 bp, Homo sapien
tgtaggaaagcctacattggtatgt

SEQ ID NO: 1621395 - DNA, 25 bp, Homo sapien
gtaggaaagcctacattggtatgtc

SEQ ID NO: 1621396 - DNA, 25 bp, Homo sapien
ctgagtgcctacagacaacgtcact

SEQ ID NO: 1621397 - DNA, 25 bp, Homo sapien
actactattatagccccagatggaa

SEQ ID NO: 1621398 - DNA, 25 bp, Homo sapien
tcctcactgtacagctgaagagtca

SEQ ID NO: 1621399 - DNA, 25 bp, Homo sapien
gagctaataaacttcctgtacacta

SEQ ID NO: 1621400 - DNA, 25 bp, Homo sapien
ttgccaaggatagtgttagaaacat

SEQ ID NO: 1621401 - DNA, 25 bp, Homo sapien
taattcagtctacaattgatggaca

SEQ ID NO: 1621402 - DNA, 25 bp, Homo sapien
tacaatggacatgacctcatccatt

SEQ ID NO: 1621403 - DNA, 25 bp, Homo sapien
cttaattcagtctacaattgatgga

SEQ ID NO: 1621404 - DNA, 25 bp, Homo sapien
cctacaatggacatgacctcatcca

SEQ ID NO: 1621405 - DNA, 25 bp, Homo sapien
tgcaataaggtttgagcattgtgta

SEQ ID NO: 1621406 - DNA, 25 bp, Homo sapien
gcaataaggtttgagcattgtgtaa

SEQ ID NO: 1621407 - DNA, 25 bp, Homo sapien
agcattgtgtaagttttgccacact

SEQ ID NO: 1621408 - DNA, 25 bp, Homo sapien
tgtctgttaagaatagaggagttgt

SEQ ID NO: 1621409 - DNA, 25 bp, Homo sapien
tgtagtaagttgtgatgataggtta

SEQ ID NO: 1621410 - DNA, 25 bp, Homo sapien
tttatatttggaaatctttgcaatg

SEQ ID NO: 1621411 - DNA, 25 bp, Homo sapien
caatgttgtcacaagcattgttaca

SEQ ID NO: 1621412 - DNA, 25 bp, Homo sapien
agaaaggtttgaggcctcattatag

SEQ ID NO: 1621413 - DNA, 25 bp, Homo sapien
tagaaaggtttgaggcctcattata

SEQ ID NO: 1621414 - DNA, 25 bp, Homo sapien
gtagaaaggtttgaggcctcattat

SEQ ID NO: 1621415 - DNA, 25 bp, Homo sapien
gaaaaagcagtcagatttcacagtc

SEQ ID NO: 1621416 - DNA, 25 bp, Homo sapien
tataataagacagaatgcaatgtgc

SEQ ID NO: 1621417 - DNA, 25 bp, Homo sapien
ctgctctcacacatttaggacatga

SEQ ID NO: 1621418 - DNA, 25 bp, Homo sapien
gaaaccactgctctcacacatttag

SEQ ID NO: 1621419 - DNA, 25 bp, Homo sapien
tcttcacattccaaggttcttttcc

SEQ ID NO: 1621420 - DNA, 25 bp, Homo sapien
acattccaaggttcttttccttgct

SEQ ID NO: 1621421 - DNA, 25 bp, Homo sapien
tcacattccaaggttcttttccttg

SEQ ID NO: 1621422 - DNA, 25 bp, Homo sapien
ctgggggttcagttaccatctcatg

SEQ ID NO: 1621423 - DNA, 25 bp, Homo sapien
ctgttttattacaaataacatgaat

SEQ ID NO: 1621424 - DNA, 25 bp, Homo sapien
tattacaaataacatgaatcttgct

SEQ ID NO: 1621425 - DNA, 25 bp, Homo sapien
ttacaaataacatgaatcttgctca

SEQ ID NO: 1621426 - DNA, 25 bp, Homo sapien
gttttattacaaataacatgaatct

SEQ ID NO: 1621427 - DNA, 25 bp, Homo sapien
attctgctgtgcggtgtccaggcat

SEQ ID NO: 1621428 - DNA, 25 bp, Homo sapien
taaattctgctgtgcggtgtccagg

SEQ ID NO: 1621429 - DNA, 25 bp, Homo sapien
tctgctgtgcggtgtccaggcattg

SEQ ID NO: 1621430 - DNA, 25 bp, Homo sapien
tgctgtgcggtgtccaggcattgcc

SEQ ID NO: 1621431 - DNA, 25 bp, Homo sapien
gcgagatctgcacttactgcaacct

SEQ ID NO: 1621432 - DNA, 25 bp, Homo sapien
gcagtggcgagatctgcacttactg

SEQ ID NO: 1621433 - DNA, 25 bp, Homo sapien
agagccaggatctcaccatgttggt

SEQ ID NO: 1621434 - DNA, 25 bp, Homo sapien
gtggcgagatctgcacttactgcaa

SEQ ID NO: 1621435 - DNA, 25 bp, Homo sapien
tcaaatactgagaatgcccagtaac

SEQ ID NO: 1621436 - DNA, 25 bp, Homo sapien
taaagtgcaatgctatttccttccc

SEQ ID NO: 1621437 - DNA, 25 bp, Homo sapien
catatgttccatattcaaatactga

SEQ ID NO: 1621438 - DNA, 25 bp, Homo sapien
ctgagaatgcccagtaacttactat

SEQ ID NO: 1621439 - DNA, 25 bp, Homo sapien
gacaaagtcgcactctgtagtccag

SEQ ID NO: 1621440 - DNA, 25 bp, Homo sapien
caggccaataagtacatttttgatg

SEQ ID NO: 1621441 - DNA, 25 bp, Homo sapien
tgatggtgacggagtgatattaata

SEQ ID NO: 1621442 - DNA, 25 bp, Homo sapien
tggtgacggagtgatattaatatct

SEQ ID NO: 1621443 - DNA, 25 bp, Homo sapien
ccatgccaggccaataagtacattt

SEQ ID NO: 1621444 - DNA, 25 bp, Homo sapien
gaatcgtcttaattgagaaccacag

SEQ ID NO: 1621445 - DNA, 25 bp, Homo sapien
caaagataggattacatttagcact

SEQ ID NO: 1621446 - DNA, 25 bp, Homo sapien
atttacagctagatcaatcttgtgg

SEQ ID NO: 1621447 - DNA, 25 bp, Homo sapien
tttaagagccacaaaaattgaacac

SEQ ID NO: 1621448 - DNA, 25 bp, Homo sapien
gacgtcttgacagttcaacatgttc

SEQ ID NO: 1621449 - DNA, 25 bp, Homo sapien
tactgaaattccgacgtcttgacag

SEQ ID NO: 1621450 - DNA, 25 bp, Homo sapien
aattcattgtctactgaaattccga

SEQ ID NO: 1621451 - DNA, 25 bp, Homo sapien
tgctttatttatttgcacccataaa

SEQ ID NO: 1621452 - DNA, 25 bp, Homo sapien
ggttgaagtacttacactgcaaaag

SEQ ID NO: 1621453 - DNA, 25 bp, Homo sapien
catacaatagtaggaatataagggc

SEQ ID NO: 1621454 - DNA, 25 bp, Homo sapien
tgcacacaaaagtttggcaccaaga

SEQ ID NO: 1621455 - DNA, 25 bp, Homo sapien
cccatatgggtagttacagataagc

SEQ ID NO: 1621456 - DNA, 25 bp, Homo sapien
gaatgccgtgctttcagtacttgca

SEQ ID NO: 1621457 - DNA, 25 bp, Homo sapien
ccagatccaggtgtaatttgtccgg

SEQ ID NO: 1621458 - DNA, 25 bp, Homo sapien
tccggagaatctcatctgaagtgaa

SEQ ID NO: 1621459 - DNA, 25 bp, Homo sapien
tcagctaaacatgcctcagataaag

SEQ ID NO: 1621460 - DNA, 25 bp, Homo sapien
gtgtttgcaatcgaggtgtgtccat

SEQ ID NO: 1621461 - DNA, 25 bp, Homo sapien
tctagaaggattctggtgtgtttgc

SEQ ID NO: 1621462 - DNA, 25 bp, Homo sapien
gtgtgtttgcaatcgaggtgtgtcc

SEQ ID NO: 1621463 - DNA, 25 bp, Homo sapien
tagaaggattctggtgtgtttgcaa

SEQ ID NO: 1621464 - DNA, 25 bp, Homo sapien
tgggcaagacctgatgctatcttag

SEQ ID NO: 1621465 - DNA, 25 bp, Homo sapien
agctggtgggctatgagtaacttcc

SEQ ID NO: 1621466 - DNA, 25 bp, Homo sapien
gctgggtctgccacatttataggca

SEQ ID NO: 1621467 - DNA, 25 bp, Homo sapien
tgaaaaggtgcaaacgaataccaac

SEQ ID NO: 1621468 - DNA, 25 bp, Homo sapien
ttccacaagcattttattcaggcat

SEQ ID NO: 1621469 - DNA, 25 bp, Homo sapien
cagtgtgttgtttatcgctaagaag

SEQ ID NO: 1621470 - DNA, 25 bp, Homo sapien
ttcgttcactgaagaaaggaggatg

SEQ ID NO: 1621471 - DNA, 25 bp, Homo sapien
ctaagaagtggttgtcctcccagga

SEQ ID NO: 1621472 - DNA, 25 bp, Homo sapien
tcagatcattcgttttctatgggcc

SEQ ID NO: 1621473 - DNA, 25 bp, Homo sapien
tctatgggccttccctgcttcatag

SEQ ID NO: 1621474 - DNA, 25 bp, Homo sapien
gcttcatagatgaatgctacattgg

SEQ ID NO: 1621475 - DNA, 25 bp, Homo sapien
tgctacattggcactcatgggtggc

SEQ ID NO: 1621476 - DNA, 25 bp, Homo sapien
gcaactgaggtctcggacaatgact

SEQ ID NO: 1621477 - DNA, 25 bp, Homo sapien
tccaagacccatctggcatgccatg

SEQ ID NO: 1621478 - DNA, 25 bp, Homo sapien
tacccctgcgtatctaaccttatgg

SEQ ID NO: 1621479 - DNA, 25 bp, Homo sapien
gatctaagtgagaacaggccctcct

SEQ ID NO: 1621480 - DNA, 25 bp, Homo sapien
tcttctggtgtcaagcttggaaccc

SEQ ID NO: 1621481 - DNA, 25 bp, Homo sapien
tgttccacaacaggcaactgcatta

SEQ ID NO: 1621482 - DNA, 25 bp, Homo sapien
gaaaaactaaggtagccacctgcac

SEQ ID NO: 1621483 - DNA, 25 bp, Homo sapien
ggaacagatcctctactttacaatg

SEQ ID NO: 1621484 - DNA, 25 bp, Homo sapien
tgatctgagctccaccttgctcgga

SEQ ID NO: 1621485 - DNA, 25 bp, Homo sapien
tttgattggagctccatcatgctca

SEQ ID NO: 1621486 - DNA, 25 bp, Homo sapien
caccttctttggagctttatcttgc

SEQ ID NO: 1621487 - DNA, 25 bp, Homo sapien
tggctcatagctctatatgctctga

SEQ ID NO: 1621488 - DNA, 25 bp, Homo sapien
gtaccatgctgccaggttaccgctg

SEQ ID NO: 1621489 - DNA, 25 bp, Homo sapien
caagtctgtttgtagggtagtacca

SEQ ID NO: 1621490 - DNA, 25 bp, Homo sapien
gctgccaggttaccgctgggtagtt

SEQ ID NO: 1621491 - DNA, 25 bp, Homo sapien
tgctctgagtaccatcttgcaggag

SEQ ID NO: 1621492 - DNA, 25 bp, Homo sapien
gactggcacattgcactcaaaaatg

SEQ ID NO: 1621493 - DNA, 25 bp, Homo sapien
agcacaaagcgcagatgtttccact

SEQ ID NO: 1621494 - DNA, 25 bp, Homo sapien
cagaacttagcactatgactggcac

SEQ ID NO: 1621495 - DNA, 25 bp, Homo sapien
tggtgcaagcatagcccatctggct

SEQ ID NO: 1621496 - DNA, 25 bp, Homo sapien
tcaaccaccctaagacatgggtagt

SEQ ID NO: 1621497 - DNA, 25 bp, Homo sapien
cacttgcccttactatctgactcag

SEQ ID NO: 1621498 - DNA, 25 bp, Homo sapien
gaagggttctgaggtctggacctcc

SEQ ID NO: 1621499 - DNA, 25 bp, Homo sapien
cctaaaggcatattaaattacttgc

SEQ ID NO: 1621500 - DNA, 25 bp, Homo sapien
cagtcccttcttgatagatatttgg

SEQ ID NO: 1621501 - DNA, 25 bp, Homo sapien
tatccaataagatattatgcaccca

SEQ ID NO: 1621502 - DNA, 25 bp, Homo sapien
tccactaataggacaatggttaagt

SEQ ID NO: 1621503 - DNA, 25 bp, Homo sapien
gaaggagaatcaaagtgttccatgg

SEQ ID NO: 1621504 - DNA, 25 bp, Homo sapien
gtcaggcttacagacgggacggacc

SEQ ID NO: 1621505 - DNA, 25 bp, Homo sapien
agcacgcaggcaggttgcttcagcc

SEQ ID NO: 1621506 - DNA, 25 bp, Homo sapien
cgggacggaccctcaggcacagtga

SEQ ID NO: 1621507 - DNA, 25 bp, Homo sapien
agccactagggcctgtccacaagcc

SEQ ID NO: 1621508 - DNA, 25 bp, Homo sapien
cttgcatacattgaagaggaaatgg

SEQ ID NO: 1621509 - DNA, 25 bp, Homo sapien
cagcctctttccatacaggactctg

SEQ ID NO: 1621510 - DNA, 25 bp, Homo sapien
gcatctaacacgagcaggtccacag

SEQ ID NO: 1621511 - DNA, 25 bp, Homo sapien
cagcaaccttgctggtagcctctct

SEQ ID NO: 1621512 - DNA, 25 bp, Homo sapien
acactcagcctaggtgggaccagcc

SEQ ID NO: 1621513 - DNA, 25 bp, Homo sapien
gggtccttccggaccagacagtctg

SEQ ID NO: 1621514 - DNA, 25 bp, Homo sapien
agacagtctgtgatagccatgagca

SEQ ID NO: 1621515 - DNA, 25 bp, Homo sapien
cctccatcgtatggcgtgtggacca

SEQ ID NO: 1621516 - DNA, 25 bp, Homo sapien
ctccctccatcgtatggcgtgtgga

SEQ ID NO: 1621517 - DNA, 25 bp, Homo sapien
cagagtcaggtccagtagtaacagt

SEQ ID NO: 1621518 - DNA, 25 bp, Homo sapien
gtaacagtaacaggtccgacatggc

SEQ ID NO: 1621519 - DNA, 25 bp, Homo sapien
cagtagtaacagtaacaggtccgac

SEQ ID NO: 1621520 - DNA, 25 bp, Homo sapien
caggtccagtagtaacagtaacagg

SEQ ID NO: 1621521 - DNA, 25 bp, Homo sapien
acagcaaaatggcctgagcagctag

SEQ ID NO: 1621522 - DNA, 25 bp, Homo sapien
gagcagctagaacaaagtccaccat

SEQ ID NO: 1621523 - DNA, 25 bp, Homo sapien
ctgagcagctagaacaaagtccacc

SEQ ID NO: 1621524 - DNA, 25 bp, Homo sapien
ccatccagaaccagagggaagacca

SEQ ID NO: 1621525 - DNA, 25 bp, Homo sapien
taagcttcccagacttgaaccaccc

SEQ ID NO: 1621526 - DNA, 25 bp, Homo sapien
agcttcccagacttgaaccacccat

SEQ ID NO: 1621527 - DNA, 25 bp, Homo sapien
aagcttcccagacttgaaccaccca

SEQ ID NO: 1621528 - DNA, 25 bp, Homo sapien
taacttcagcgacgctgaagtttgc

SEQ ID NO: 1621529 - DNA, 25 bp, Homo sapien
ttgcagcccgcgtgagaggcgcggc

SEQ ID NO: 1621530 - DNA, 25 bp, Homo sapien
tccttgccgagtcccgcacatctgt

SEQ ID NO: 1621531 - DNA, 25 bp, Homo sapien
catctgtaacttcagcgacgctgaa

SEQ ID NO: 1621532 - DNA, 25 bp, Homo sapien
tcacgttcttccttccgcaggcagg

SEQ ID NO: 1621533 - DNA, 25 bp, Homo sapien
ccggcggaataggtagctggcccct

SEQ ID NO: 1621534 - DNA, 25 bp, Homo sapien
ggtcagtgcagatcgcggcagttat

SEQ ID NO: 1621535 - DNA, 25 bp, Homo sapien
cacaggcactgcgatccgggtcagt

SEQ ID NO: 1621536 - DNA, 25 bp, Homo sapien
agtctctggggcaagaactccagcc

SEQ ID NO: 1621537 - DNA, 25 bp, Homo sapien
gtcacagaaacagccacttgtccag

SEQ ID NO: 1621538 - DNA, 25 bp, Homo sapien
aaactgataggcaattatactgact

SEQ ID NO: 1621539 - DNA, 25 bp, Homo sapien
ttttttaagcaacatgaaacgccag

SEQ ID NO: 1621540 - DNA, 25 bp, Homo sapien
aaagccaggcacaggtcccaggcct

SEQ ID NO: 1621541 - DNA, 25 bp, Homo sapien
agctggatcgccaagccacagatgc

SEQ ID NO: 1621542 - DNA, 25 bp, Homo sapien
ccccagcagctggatcgccaagcca

SEQ ID NO: 1621543 - DNA, 25 bp, Homo sapien
ggatcgccaagccacagatgctcct

SEQ ID NO: 1621544 - DNA, 25 bp, Homo sapien
tcgttgtaagactcgggtataaata

SEQ ID NO: 1621545 - DNA, 25 bp, Homo sapien
agtggcacagaacagacattaaggg

SEQ ID NO: 1621546 - DNA, 25 bp, Homo sapien
caggacccggaagagcaaagaaggt

SEQ ID NO: 1621547 - DNA, 25 bp, Homo sapien
ctcaggacactcttcgttgtaagac

SEQ ID NO: 1621548 - DNA, 25 bp, Homo sapien
cagaaggccacggtttacagggaga

SEQ ID NO: 1621549 - DNA, 25 bp, Homo sapien
ggagagatgacttctcttaggagtt

SEQ ID NO: 1621550 - DNA, 25 bp, Homo sapien
tcagtgcttgagatgcagattccag

SEQ ID NO: 1621551 - DNA, 25 bp, Homo sapien
ccaatggagagcacagcattctcag

SEQ ID NO: 1621552 - DNA, 25 bp, Homo sapien
gaagcaggaagttatatccagaaca

SEQ ID NO: 1621553 - DNA, 25 bp, Homo sapien
aaagtgggaagcaggaagttatatc

SEQ ID NO: 1621554 - DNA, 25 bp, Homo sapien
aagtgggaagcaggaagttatatcc

SEQ ID NO: 1621555 - DNA, 25 bp, Homo sapien
tgggaagcaggaagttatatccaga

SEQ ID NO: 1621556 - DNA, 25 bp, Homo sapien
tcagacaccaggacattcagaatgt

SEQ ID NO: 1621557 - DNA, 25 bp, Homo sapien
aattttctctttcgctcctctagga

SEQ ID NO: 1621558 - DNA, 25 bp, Homo sapien
gtctcagggttactgccattttaaa

SEQ ID NO: 1621559 - DNA, 25 bp, Homo sapien
tcctctaggaacaccaaggctgttc

SEQ ID NO: 1621560 - DNA, 25 bp, Homo sapien
aaggctgttcctccactgatagttt

SEQ ID NO: 1621561 - DNA, 25 bp, Homo sapien
gtcaaaatagtcaagcaggccgtcc

SEQ ID NO: 1621562 - DNA, 25 bp, Homo sapien
aagtaacaagctaggcacgccaagg

SEQ ID NO: 1621563 - DNA, 25 bp, Homo sapien
gaagctagtttataggagccaccag

SEQ ID NO: 1621564 - DNA, 25 bp, Homo sapien
tcgccggcagacacagagttaaagg

SEQ ID NO: 1621565 - DNA, 25 bp, Homo sapien
agccgccaatttgctctgtagggtt

SEQ ID NO: 1621566 - DNA, 25 bp, Homo sapien
gcagccgccaatttgctctgtaggg

SEQ ID NO: 1621567 - DNA, 25 bp, Homo sapien
tttgcagccgccaatttgctctgta

SEQ ID NO: 1621568 - DNA, 25 bp, Homo sapien
tgcagccgccaatttgctctgtagg

SEQ ID NO: 1621569 - DNA, 25 bp, Homo sapien
gatgaaccaggacttatccgaaggt

SEQ ID NO: 1621570 - DNA, 25 bp, Homo sapien
cttatccgaaggtaccaagtgaact

SEQ ID NO: 1621571 - DNA, 25 bp, Homo sapien
ggatcctctgcagatgaaccaggac

SEQ ID NO: 1621572 - DNA, 25 bp, Homo sapien
ctgattccgggagcacatttgcccc

SEQ ID NO: 1621573 - DNA, 25 bp, Homo sapien
ataggcgtcacttctcttctaccct

SEQ ID NO: 1621574 - DNA, 25 bp, Homo sapien
taggcgtcacttctcttctaccctc

SEQ ID NO: 1621575 - DNA, 25 bp, Homo sapien
aggcgtcacttctcttctaccctcc

SEQ ID NO: 1621576 - DNA, 25 bp, Homo sapien
cataggcgtcacttctcttctaccc

SEQ ID NO: 1621577 - DNA, 25 bp, Homo sapien
gactaaacacgatgcctgatcctct

SEQ ID NO: 1621578 - DNA, 25 bp, Homo sapien
cgagtagacggtgggaagatggata

SEQ ID NO: 1621579 - DNA, 25 bp, Homo sapien
ggatagatatttgctggcccaatga

SEQ ID NO: 1621580 - DNA, 25 bp, Homo sapien
aacatggttggctgcgagtagacgg

SEQ ID NO: 1621581 - DNA, 25 bp, Homo sapien
ttcaccccaaactccatgaggctct

SEQ ID NO: 1621582 - DNA, 25 bp, Homo sapien
tcggtgtcctggtctttcaccccaa

SEQ ID NO: 1621583 - DNA, 25 bp, Homo sapien
tcaaaatgggccatgtcggtgtcct

SEQ ID NO: 1621584 - DNA, 25 bp, Homo sapien
ctggtggtcaaaatgggccatgtcg

SEQ ID NO: 1621585 - DNA, 25 bp, Homo sapien
tgtcattcaaggcaatagacacact

SEQ ID NO: 1621586 - DNA, 25 bp, Homo sapien
cagtgcacaacagtctgcctggggc

SEQ ID NO: 1621587 - DNA, 25 bp, Homo sapien
agacacactagcagggacagaggca

SEQ ID NO: 1621588 - DNA, 25 bp, Homo sapien
gaagaatgcagcgacctgtgctccc

SEQ ID NO: 1621589 - DNA, 25 bp, Homo sapien
gtttgttgtttgataacattgatct

SEQ ID NO: 1621590 - DNA, 25 bp, Homo sapien
ctggcttgaccaacagtcccaggaa

SEQ ID NO: 1621591 - DNA, 25 bp, Homo sapien
aggagacgcagtggattttattttg

SEQ ID NO: 1621592 - DNA, 25 bp, Homo sapien
cccaggaaacaagttgtgaaggaga

SEQ ID NO: 1621593 - DNA, 25 bp, Homo sapien
aagtctcctggcctgttgtcatagg

SEQ ID NO: 1621594 - DNA, 25 bp, Homo sapien
ggcctgttgtcataggcctgaacat

SEQ ID NO: 1621595 - DNA, 25 bp, Homo sapien
aaaatcatctaaagtctcctggcct

SEQ ID NO: 1621596 - DNA, 25 bp, Homo sapien
cctggcctgttgtcataggcctgaa

SEQ ID NO: 1621597 - DNA, 25 bp, Homo sapien
tctgcttgagtacctgctcaggaac

SEQ ID NO: 1621598 - DNA, 25 bp, Homo sapien
cacgggattatggaggttcttctga

SEQ ID NO: 1621599 - DNA, 25 bp, Homo sapien
gcgctatctcagtgcagaggctaca

SEQ ID NO: 1621600 - DNA, 25 bp, Homo sapien
ttactaagggaactgactcacggga

SEQ ID NO: 1621601 - DNA, 25 bp, Homo sapien
ttccagggcttatgacagagcccaa

SEQ ID NO: 1621602 - DNA, 25 bp, Homo sapien
tcagctgtcgcattcattttcttac

SEQ ID NO: 1621603 - DNA, 25 bp, Homo sapien
agggcttatgacagagcccaagaga

SEQ ID NO: 1621604 - DNA, 25 bp, Homo sapien
cacttggtaacctcaggtaagtcct

SEQ ID NO: 1621605 - DNA, 25 bp, Homo sapien
ctttcagatgcccaagaccttgtgg

SEQ ID NO: 1621606 - DNA, 25 bp, Homo sapien
taaataaaggaatggccgagagtcc

SEQ ID NO: 1621607 - DNA, 25 bp, Homo sapien
gttccagtaggaaaacggccagctg

SEQ ID NO: 1621608 - DNA, 25 bp, Homo sapien
cctgagtgaaggtgaggaatctccc

SEQ ID NO: 1621609 - DNA, 25 bp, Homo sapien
tctcctttacttcctaacctggtca

SEQ ID NO: 1621610 - DNA, 25 bp, Homo sapien
ctttacttcctaacctggtcactgg

SEQ ID NO: 1621611 - DNA, 25 bp, Homo sapien
ttcctaacctggtcactggccatgg

SEQ ID NO: 1621612 - DNA, 25 bp, Homo sapien
tggggcagcaatggcaggcccttct

SEQ ID NO: 1621613 - DNA, 25 bp, Homo sapien
cctggccataggaactgacatgatg

SEQ ID NO: 1621614 - DNA, 25 bp, Homo sapien
cctggtagccgggagacttcatttg

SEQ ID NO: 1621615 - DNA, 25 bp, Homo sapien
gatgagtgacacgagttctggaagc

SEQ ID NO: 1621616 - DNA, 25 bp, Homo sapien
tgtgggccgacactcctgttgtatc

SEQ ID NO: 1621617 - DNA, 25 bp, Homo sapien
tctctgtaggagtcataagtttggg

SEQ ID NO: 1621618 - DNA, 25 bp, Homo sapien
gctgggttgagggacttttgatttc

SEQ ID NO: 1621619 - DNA, 25 bp, Homo sapien
aatgtcttcggatgacccacatggg

SEQ ID NO: 1621620 - DNA, 25 bp, Homo sapien
tccatcttcaaaggaccatggagaa

SEQ ID NO: 1621621 - DNA, 25 bp, Homo sapien
tcggactccgtttccctgctgccat

SEQ ID NO: 1621622 - DNA, 25 bp, Homo sapien
gctgccatgtgtattcttctcttct

SEQ ID NO: 1621623 - DNA, 25 bp, Homo sapien
tgctgccatgtgtattcttctcttc

SEQ ID NO: 1621624 - DNA, 25 bp, Homo sapien
cttcggactccgtttccctgctgcc

SEQ ID NO: 1621625 - DNA, 25 bp, Homo sapien
gagcagacagtgtccaccttctttg

SEQ ID NO: 1621626 - DNA, 25 bp, Homo sapien
ccttttgcaggtctattggacatag

SEQ ID NO: 1621627 - DNA, 25 bp, Homo sapien
ccgagtcttacaacgaagagtgtcc

SEQ ID NO: 1621628 - DNA, 25 bp, Homo sapien
ctattggacatagtaatccggtgtg

SEQ ID NO: 1621629 - DNA, 25 bp, Homo sapien
aagaatcccctcagtctgcccaaga

SEQ ID NO: 1621630 - DNA, 25 bp, Homo sapien
aatcccctcagtctgcccaagacag

SEQ ID NO: 1621631 - DNA, 25 bp, Homo sapien
tggaagaatcccctcagtctgccca

SEQ ID NO: 1621632 - DNA, 25 bp, Homo sapien
atcccctcagtctgcccaagacagg

SEQ ID NO: 1621633 - DNA, 25 bp, Homo sapien
gaagagggatgtatttccaggctcc

SEQ ID NO: 1621634 - DNA, 25 bp, Homo sapien
ctcagccatgacaagtcctgcacgg

SEQ ID NO: 1621635 - DNA, 25 bp, Homo sapien
ctgaagagggatgtatttccaggct

SEQ ID NO: 1621636 - DNA, 25 bp, Homo sapien
acaagtcctgcacggacagccctga

SEQ ID NO: 1621637 - DNA, 25 bp, Homo sapien
ggtcgggtaaagaaagtgccttgca

SEQ ID NO: 1621638 - DNA, 25 bp, Homo sapien
gctcatgatagggaaatctgtgcta

SEQ ID NO: 1621639 - DNA, 25 bp, Homo sapien
cccaggtcacgtcagggctcatgat

SEQ ID NO: 1621640 - DNA, 25 bp, Homo sapien
cccacttataggctagagcaaggtt

SEQ ID NO: 1621641 - DNA, 25 bp, Homo sapien
tgctgaactgtgatgtgggactctg

SEQ ID NO: 1621642 - DNA, 25 bp, Homo sapien
ttggaagcggcctgagatgaagctg

SEQ ID NO: 1621643 - DNA, 25 bp, Homo sapien
cttgcatggatcttgccaagggagt

SEQ ID NO: 1621644 - DNA, 25 bp, Homo sapien
ttccacgaaagacttgctgaagctc

SEQ ID NO: 1621645 - DNA, 25 bp, Homo sapien
aagcagaactgaccagcaggccctg

SEQ ID NO: 1621646 - DNA, 25 bp, Homo sapien
gctgtcagtctctgagccagtgcca

SEQ ID NO: 1621647 - DNA, 25 bp, Homo sapien
gatgagaagcagaactgaccagcag

SEQ ID NO: 1621648 - DNA, 25 bp, Homo sapien
aggctgtcagtctctgagccagtgc

SEQ ID NO: 1621649 - DNA, 25 bp, Homo sapien
tattccgccagtccgcctggagggc

SEQ ID NO: 1621650 - DNA, 25 bp, Homo sapien
gcttggtcctgtggacgaggttcca

SEQ ID NO: 1621651 - DNA, 25 bp, Homo sapien
ctgtggacgaggttccatctcccct

SEQ ID NO: 1621652 - DNA, 25 bp, Homo sapien
ctattccgccagtccgcctggaggg

SEQ ID NO: 1621653 - DNA, 25 bp, Homo sapien
gtagagtttgctgaaggcgggaagg

SEQ ID NO: 1621654 - DNA, 25 bp, Homo sapien
tgctgaaggcgggaaggtagtccga

SEQ ID NO: 1621655 - DNA, 25 bp, Homo sapien
gagtttgctgaaggcgggaaggtag

SEQ ID NO: 1621656 - DNA, 25 bp, Homo sapien
ctgaaggcgggaaggtagtccgagg

SEQ ID NO: 1621657 - DNA, 25 bp, Homo sapien
gtgttcctgggcccgctcttgaaca

SEQ ID NO: 1621658 - DNA, 25 bp, Homo sapien
ctgggcccgctcttgaacagcttcc

SEQ ID NO: 1621659 - DNA, 25 bp, Homo sapien
ctgttgtgagactccccttctggca

SEQ ID NO: 1621660 - DNA, 25 bp, Homo sapien
tatgcgtagctgttacttcttcctg

SEQ ID NO: 1621661 - DNA, 25 bp, Homo sapien
tgcaaagacgctctggtccccgagg

SEQ ID NO: 1621662 - DNA, 25 bp, Homo sapien
gcaaagacgctctggtccccgaggg

SEQ ID NO: 1621663 - DNA, 25 bp, Homo sapien
cttgcaaagacgctctggtccccga

SEQ ID NO: 1621664 - DNA, 25 bp, Homo sapien
caaagacgctctggtccccgagggg

SEQ ID NO: 1621665 - DNA, 25 bp, Homo sapien
tttattcattgattgggccaatttg

SEQ ID NO: 1621666 - DNA, 25 bp, Homo sapien
tctgtgttatggctacagttttccc

SEQ ID NO: 1621667 - DNA, 25 bp, Homo sapien
gccatgtcatttcatacggtgtttt

SEQ ID NO: 1621668 - DNA, 25 bp, Homo sapien
tgattcttcatgtggcgagtacttt

SEQ ID NO: 1621669 - DNA, 25 bp, Homo sapien
gtgaagtgtaagtaagaaccaaatg

SEQ ID NO: 1621670 - DNA, 25 bp, Homo sapien
agtgtaagtaagaaccaaatgtgtc

SEQ ID NO: 1621671 - DNA, 25 bp, Homo sapien
gaagtgtaagtaagaaccaaatgtg

SEQ ID NO: 1621672 - DNA, 25 bp, Homo sapien
gaagtgaagtgtaagtaagaaccaa

SEQ ID NO: 1621673 - DNA, 25 bp, Homo sapien
gcccaggaacgccttagttgcaacc

SEQ ID NO: 1621674 - DNA, 25 bp, Homo sapien
gcatttcctggacgagtcctctcgg

SEQ ID NO: 1621675 - DNA, 25 bp, Homo sapien
ttagttgcaaccctgcgtcgaggcc

SEQ ID NO: 1621676 - DNA, 25 bp, Homo sapien
gcagaaagccgaggccaaccagagc

SEQ ID NO: 1621677 - DNA, 25 bp, Homo sapien
taggaggagccaatgtacattaggg

SEQ ID NO: 1621678 - DNA, 25 bp, Homo sapien
cattaacttggctaaatagtatcca

SEQ ID NO: 1621679 - DNA, 25 bp, Homo sapien
gaatgcagtactgtgcataggagga

SEQ ID NO: 1621680 - DNA, 25 bp, Homo sapien
taagcttgggacagcaggagtttct

SEQ ID NO: 1621681 - DNA, 25 bp, Homo sapien
gctgcaggactaatgctcatcggaa

SEQ ID NO: 1621682 - DNA, 25 bp, Homo sapien
cattaggaccatagaggatgctgca

SEQ ID NO: 1621683 - DNA, 25 bp, Homo sapien
cattaggcatgctggtaaaggacca

SEQ ID NO: 1621684 - DNA, 25 bp, Homo sapien
gacttgaggcaaactgaaatagccc

SEQ ID NO: 1621685 - DNA, 25 bp, Homo sapien
tataaaaatgtaacctacgagaaca

SEQ ID NO: 1621686 - DNA, 25 bp, Homo sapien
gaagaatccctcatttaccctgacg

SEQ ID NO: 1621687 - DNA, 25 bp, Homo sapien
tagatttggattgcttgtaattcaa

SEQ ID NO: 1621688 - DNA, 25 bp, Homo sapien
tgaccacaaaaatgacgctataata

SEQ ID NO: 1621689 - DNA, 25 bp, Homo sapien
ctttcctatgcgataaggtgtgagt

SEQ ID NO: 1621690 - DNA, 25 bp, Homo sapien
aattagcttatactcaagtgtgaca

SEQ ID NO: 1621691 - DNA, 25 bp, Homo sapien
tagtgtagtctgaagtgccagtgcc

SEQ ID NO: 1621692 - DNA, 25 bp, Homo sapien
tcattgaatgtacaacagacttaac

SEQ ID NO: 1621693 - DNA, 25 bp, Homo sapien
actttgccacattcgaccgggctca

SEQ ID NO: 1621694 - DNA, 25 bp, Homo sapien
aagagcactgtcatgtcttttaggt

SEQ ID NO: 1621695 - DNA, 25 bp, Homo sapien
tgccacattcgaccgggctcaatgg

SEQ ID NO: 1621696 - DNA, 25 bp, Homo sapien
agagcactgtcatgtcttttaggtt

SEQ ID NO: 1621697 - DNA, 25 bp, Homo sapien
ctcttatatttagtatgagttgaag

SEQ ID NO: 1621698 - DNA, 25 bp, Homo sapien
tgaagaccagttaaagactttgtta

SEQ ID NO: 1621699 - DNA, 25 bp, Homo sapien
tatgaattatcttaatgtgtggtaa

SEQ ID NO: 1621700 - DNA, 25 bp, Homo sapien
gaaatggttacagtgtttgccacat

SEQ ID NO: 1621701 - DNA, 25 bp, Homo sapien
tttgtagggctagtttccattatga

SEQ ID NO: 1621702 - DNA, 25 bp, Homo sapien
tagggctagtttccattatgaatta

SEQ ID NO: 1621703 - DNA, 25 bp, Homo sapien
atttgtagggctagtttccattatg

SEQ ID NO: 1621704 - DNA, 25 bp, Homo sapien
tgtagggctagtttccattatgaat

SEQ ID NO: 1621705 - DNA, 25 bp, Homo sapien
atgttgtttagcaagagttgaggac

SEQ ID NO: 1621706 - DNA, 25 bp, Homo sapien
cccattgaattatgttgtttagcaa

SEQ ID NO: 1621707 - DNA, 25 bp, Homo sapien
ctctcccattgaattatgttgttta

SEQ ID NO: 1621708 - DNA, 25 bp, Homo sapien
gttgtttagcaagagttgaggactg

SEQ ID NO: 1621709 - DNA, 25 bp, Homo sapien
tcttatattcagtaagatctgagaa

SEQ ID NO: 1621710 - DNA, 25 bp, Homo sapien
cttatattcagtaagatctgagaac

SEQ ID NO: 1621711 - DNA, 25 bp, Homo sapien
ttatcttatattcagtaagatctga

SEQ ID NO: 1621712 - DNA, 25 bp, Homo sapien
ctaatttatcttatattcagtaaga

SEQ ID NO: 1621713 - DNA, 25 bp, Homo sapien
tgtagtgttcctctccaagataaat

SEQ ID NO: 1621714 - DNA, 25 bp, Homo sapien
gtagtgttcctctccaagataaatt

SEQ ID NO: 1621715 - DNA, 25 bp, Homo sapien
tagtgttcctctccaagataaatta

SEQ ID NO: 1621716 - DNA, 25 bp, Homo sapien
agtgttcctctccaagataaattat

SEQ ID NO: 1621717 - DNA, 25 bp, Homo sapien
ttagtaagggctgaaagatggttaa

SEQ ID NO: 1621718 - DNA, 25 bp, Homo sapien
tgaattgttttatgttgagtaaggt

SEQ ID NO: 1621719 - DNA, 25 bp, Homo sapien
gaattgttttatgttgagtaaggtg

SEQ ID NO: 1621720 - DNA, 25 bp, Homo sapien
ttatgtttagtaagggctgaaagat

SEQ ID NO: 1621721 - DNA, 25 bp, Homo sapien
taaggtttgaggactaaatgcttta

SEQ ID NO: 1621722 - DNA, 25 bp, Homo sapien
ttagtaaggtttgaggactaaatgc

SEQ ID NO: 1621723 - DNA, 25 bp, Homo sapien
tagtaaggtttgaggactaaatgct

SEQ ID NO: 1621724 - DNA, 25 bp, Homo sapien
agtaaggtttgaggactaaatgctt

SEQ ID NO: 1621725 - DNA, 25 bp, Homo sapien
tcataagggtcgagaaattgttaaa

SEQ ID NO: 1621726 - DNA, 25 bp, Homo sapien
atcctatgtttagtaaggcgtgaga

SEQ ID NO: 1621727 - DNA, 25 bp, Homo sapien
tgtttcataagggtcgagaaattgt

SEQ ID NO: 1621728 - DNA, 25 bp, Homo sapien
gtttagtaaggcgtgagaaatggct

SEQ ID NO: 1621729 - DNA, 25 bp, Homo sapien
catgttttctaagggctgagaaatg

SEQ ID NO: 1621730 - DNA, 25 bp, Homo sapien
ttaccttatgttccataagttttga

SEQ ID NO: 1621731 - DNA, 25 bp, Homo sapien
tatgttccataagttttgagaccac

SEQ ID NO: 1621732 - DNA, 25 bp, Homo sapien
ttctaagggctgagaaatgcttaaa

SEQ ID NO: 1621733 - DNA, 25 bp, Homo sapien
tccccagtatgaactgctttatgtc

SEQ ID NO: 1621734 - DNA, 25 bp, Homo sapien
atgtttcctaagggttgaggaattg

SEQ ID NO: 1621735 - DNA, 25 bp, Homo sapien
tcacatttgtacgatttctccctag

SEQ ID NO: 1621736 - DNA, 25 bp, Homo sapien
tcctaagggctgagaaattgctaaa

SEQ ID NO: 1621737 - DNA, 25 bp, Homo sapien
catgttttctaagggctgagaaatg

SEQ ID NO: 1621738 - DNA, 25 bp, Homo sapien
tctaagggctgagaaatgtttaaaa

SEQ ID NO: 1621739 - DNA, 25 bp, Homo sapien
ctcatgttttctaagggctgagaaa

SEQ ID NO: 1621740 - DNA, 25 bp, Homo sapien
ttttctaagggctgagaaatgttta

SEQ ID NO: 1621741 - DNA, 25 bp, Homo sapien
tatgtaaagtaagttttgaggacca

SEQ ID NO: 1621742 - DNA, 25 bp, Homo sapien
taaagtaagttttgaggaccactga

SEQ ID NO: 1621743 - DNA, 25 bp, Homo sapien
tttgaggaccactgaaaagctttac

SEQ ID NO: 1621744 - DNA, 25 bp, Homo sapien
taagttttgaggaccactgaaaagc

SEQ ID NO: 1621745 - DNA, 25 bp, Homo sapien
ttctaagggctgagaaatgcttaaa

SEQ ID NO: 1621746 - DNA, 25 bp, Homo sapien
atgttttctaagggctgagaaatgc

SEQ ID NO: 1621747 - DNA, 25 bp, Homo sapien
catgttttctaagggttgaggaatt

SEQ ID NO: 1621748 - DNA, 25 bp, Homo sapien
gttttctaagggctgagaaatgctt

SEQ ID NO: 1621749 - DNA, 25 bp, Homo sapien
ttcctaagggctgagaaatggttaa

SEQ ID NO: 1621750 - DNA, 25 bp, Homo sapien
catgttttctaagggctgaaaaatt

SEQ ID NO: 1621751 - DNA, 25 bp, Homo sapien
ctgatgttttctaagggctgagaag

SEQ ID NO: 1621752 - DNA, 25 bp, Homo sapien
tgtctagtaagatgtgaagattgct

SEQ ID NO: 1621753 - DNA, 25 bp, Homo sapien
tctaagggctgagaaacgcttaaaa

SEQ ID NO: 1621754 - DNA, 25 bp, Homo sapien
tgttttctaagggctgagaaacgct

SEQ ID NO: 1621755 - DNA, 25 bp, Homo sapien
ttttctaagggctgagaaacgctta

SEQ ID NO: 1621756 - DNA, 25 bp, Homo sapien
taagggctgagaaacgcttaaaagc

SEQ ID NO: 1621757 - DNA, 25 bp, Homo sapien
gtgaacattgaagagatgttaaaag

SEQ ID NO: 1621758 - DNA, 25 bp, Homo sapien
gaacattgaagagatgttaaaagct

SEQ ID NO: 1621759 - DNA, 25 bp, Homo sapien
tagtgaacattgaagagatgttaaa

SEQ ID NO: 1621760 - DNA, 25 bp, Homo sapien
tttagtgaacattgaagagatgtta

SEQ ID NO: 1621761 - DNA, 25 bp, Homo sapien
attctcttatgttgaattaagtgtg

SEQ ID NO: 1621762 - DNA, 25 bp, Homo sapien
tgttgaattaagtgtgaaagcatga

SEQ ID NO: 1621763 - DNA, 25 bp, Homo sapien
ctcttatgttgaattaagtgtgaaa

SEQ ID NO: 1621764 - DNA, 25 bp, Homo sapien
gaattctcttatgttgaattaagtg

SEQ ID NO: 1621765 - DNA, 25 bp, Homo sapien
atttcatacatttgaaagttttctt

SEQ ID NO: 1621766 - DNA, 25 bp, Homo sapien
catttcatacatttgaaagttttct

SEQ ID NO: 1621767 - DNA, 25 bp, Homo sapien
acatttcatacatttgaaagttttc

SEQ ID NO: 1621768 - DNA, 25 bp, Homo sapien
ctacatttcatacatttgaaagttt

SEQ ID NO: 1621769 - DNA, 25 bp, Homo sapien
ttccctgggtagttgtccaacattg

SEQ ID NO: 1621770 - DNA, 25 bp, Homo sapien
ctcattgacactttcacaatctttt

SEQ ID NO: 1621771 - DNA, 25 bp, Homo sapien
cctcattgacactttcacaatcttt

SEQ ID NO: 1621772 - DNA, 25 bp, Homo sapien
aaattcttatgtccacatcttgcat

SEQ ID NO: 1621773 - DNA, 25 bp, Homo sapien
gttctcaatattatttcttggaaag

SEQ ID NO: 1621774 - DNA, 25 bp, Homo sapien
aatcgtaaattcttatgtccacatc

SEQ ID NO: 1621775 - DNA, 25 bp, Homo sapien
ccacatcttgcatatgttctcaata

SEQ ID NO: 1621776 - DNA, 25 bp, Homo sapien
tggccaaaagtcttgtgtaaaatga

SEQ ID NO: 1621777 - DNA, 25 bp, Homo sapien
ctggccaaaagtcttgtgtaaaatg

SEQ ID NO: 1621778 - DNA, 25 bp, Homo sapien
aagtcttgtgtaaaatgagaactaa

SEQ ID NO: 1621779 - DNA, 25 bp, Homo sapien
tcttgtgtaaaatgagaactaataa

SEQ ID NO: 1621780 - DNA, 25 bp, Homo sapien
cagacaagttatcaagtctagctta

SEQ ID NO: 1621781 - DNA, 25 bp, Homo sapien
ttcagacaagttatcaagtctagct

SEQ ID NO: 1621782 - DNA, 25 bp, Homo sapien
agtctagcttagagacagcgatacc

SEQ ID NO: 1621783 - DNA, 25 bp, Homo sapien
tcccttgcttcagacaagttatcaa

SEQ ID NO: 1621784 - DNA, 25 bp, Homo sapien
aggaagaccaggtttctgtagttct

SEQ ID NO: 1621785 - DNA, 25 bp, Homo sapien
ccaggaagaccaggtttctgtagtt

SEQ ID NO: 1621786 - DNA, 25 bp, Homo sapien
caggaagaccaggtttctgtagttc

SEQ ID NO: 1621787 - DNA, 25 bp, Homo sapien
atataaattctgctgagccatgtcc

SEQ ID NO: 1621788 - DNA, 25 bp, Homo sapien
tcctatataaattctgctgagccat

SEQ ID NO: 1621789 - DNA, 25 bp, Homo sapien
aaattctgctgagccatgtccaggc

SEQ ID NO: 1621790 - DNA, 25 bp, Homo sapien
tctgctgagccatgtccaggcattg

SEQ ID NO: 1621791 - DNA, 25 bp, Homo sapien
tcacatcccaaaatgtcaacgatcc

SEQ ID NO: 1621792 - DNA, 25 bp, Homo sapien
ctatggtcacatcccaaaatgtcaa

SEQ ID NO: 1621793 - DNA, 25 bp, Homo sapien
atggtcacatcccaaaatgtcaacg

SEQ ID NO: 1621794 - DNA, 25 bp, Homo sapien
ggtcacatcccaaaatgtcaacgat

SEQ ID NO: 1621795 - DNA, 25 bp, Homo sapien
aaagatacatatagatttcccaatt

SEQ ID NO: 1621796 - DNA, 25 bp, Homo sapien
tacatatagatttcccaattggcca

SEQ ID NO: 1621797 - DNA, 25 bp, Homo sapien
gatacatatagatttcccaattggc

SEQ ID NO: 1621798 - DNA, 25 bp, Homo sapien
acatatagatttcccaattggccat

SEQ ID NO: 1621799 - DNA, 25 bp, Homo sapien
ccagcctggtgtgtagttctttttg

SEQ ID NO: 1621800 - DNA, 25 bp, Homo sapien
cctggtgtgtagttctttttgagga

SEQ ID NO: 1621801 - DNA, 25 bp, Homo sapien
ccgtgaccagcctggtgtgtagttc

SEQ ID NO: 1621802 - DNA, 25 bp, Homo sapien
gaatgaaaattcatgcatgatttca

SEQ ID NO: 1621803 - DNA, 25 bp, Homo sapien
gcagggatggcttcgaatccgagcc

SEQ ID NO: 1621804 - DNA, 25 bp, Homo sapien
caaatttcccagagcggtaagccgg

SEQ ID NO: 1621805 - DNA, 25 bp, Homo sapien
ttcggcgaatctggaccggacgcgt

SEQ ID NO: 1621806 - DNA, 25 bp, Homo sapien
gattccagtgtctgacttcggcgaa

SEQ ID NO: 1621807 - DNA, 25 bp, Homo sapien
taaatcttctggacttattcctcct

SEQ ID NO: 1621808 - DNA, 25 bp, Homo sapien
cattataatgaactatagtcactgt

SEQ ID NO: 1621809 - DNA, 25 bp, Homo sapien
catttttgttgtgagaccacatagc

SEQ ID NO: 1621810 - DNA, 25 bp, Homo sapien
aacacgttggcatctggtattcacc

SEQ ID NO: 1621811 - DNA, 25 bp, Homo sapien
ccaatttctccttcgtgactaaggg

SEQ ID NO: 1621812 - DNA, 25 bp, Homo sapien
gatgtgcagtgtcgtgcacctccac

SEQ ID NO: 1621813 - DNA, 25 bp, Homo sapien
tctccttcgtgactaagggtgaata

SEQ ID NO: 1621814 - DNA, 25 bp, Homo sapien
tggaaagcattgatgtgcagtgtcg

SEQ ID NO: 1621815 - DNA, 25 bp, Homo sapien
gggagtttctggagtctattccttg

SEQ ID NO: 1621816 - DNA, 25 bp, Homo sapien
aacatggtccttggcgaattctggc

SEQ ID NO: 1621817 - DNA, 25 bp, Homo sapien
gaattctggctcttaagtcgctgtc

SEQ ID NO: 1621818 - DNA, 25 bp, Homo sapien
tcaaatctatcctccatgcatggcc

SEQ ID NO: 1621819 - DNA, 25 bp, Homo sapien
gaccttcgcttgcacctttccagaa

SEQ ID NO: 1621820 - DNA, 25 bp, Homo sapien
gatgtgggctgcgagccgcgaacat

SEQ ID NO: 1621821 - DNA, 25 bp, Homo sapien
cagctgggcggaacagtctcaggtc

SEQ ID NO: 1621822 - DNA, 25 bp, Homo sapien
gctgtagggtggacccggtgcgcca

SEQ ID NO: 1621823 - DNA, 25 bp, Homo sapien
tcgggccactgggtcgaccagatgt

SEQ ID NO: 1621824 - DNA, 25 bp, Homo sapien
caatgaatgtttcataacctcagtg

SEQ ID NO: 1621825 - DNA, 25 bp, Homo sapien
tttcagaagtgagcaacaaggaatg

SEQ ID NO: 1621826 - DNA, 25 bp, Homo sapien
aaagagaagggtcacccttgacctg

SEQ ID NO: 1621827 - DNA, 25 bp, Homo sapien
tggtcctatgtttaccagaaagaga

SEQ ID NO: 1621828 - DNA, 25 bp, Homo sapien
gagctaattgtctgattggattcac

SEQ ID NO: 1621829 - DNA, 25 bp, Homo sapien
cacctgccttgagctaattgtctga

SEQ ID NO: 1621830 - DNA, 25 bp, Homo sapien
gctgattggaatcacctgccttgag

SEQ ID NO: 1621831 - DNA, 25 bp, Homo sapien
ggaatcacctgccttgagctaattg

SEQ ID NO: 1621832 - DNA, 25 bp, Homo sapien
gctgtcacgtctactattttgggcc

SEQ ID NO: 1621833 - DNA, 25 bp, Homo sapien
gatgaatctgcagtcgctatttaga

SEQ ID NO: 1621834 - DNA, 25 bp, Homo sapien
ttgattgaatccaagtttgctgagc

SEQ ID NO: 1621835 - DNA, 25 bp, Homo sapien
gtcgctatttagataactgtttgat

SEQ ID NO: 1621836 - DNA, 25 bp, Homo sapien
tgccgcccgaccgccgggaggatgg

SEQ ID NO: 1621837 - DNA, 25 bp, Homo sapien
gctgcagatatgaagcggagctgct

SEQ ID NO: 1621838 - DNA, 25 bp, Homo sapien
gctgctgccgcgaccgaccgcagca

SEQ ID NO: 1621839 - DNA, 25 bp, Homo sapien
tgggcagcggagctgtctcagtctt

SEQ ID NO: 1621840 - DNA, 25 bp, Homo sapien
ttcatgggtaactggtttaattctg

SEQ ID NO: 1621841 - DNA, 25 bp, Homo sapien
attcatgggtaactggtttaattct

SEQ ID NO: 1621842 - DNA, 25 bp, Homo sapien
gattcatgggtaactggtttaattc

SEQ ID NO: 1621843 - DNA, 25 bp, Homo sapien
aagattcatgggtaactggtttaat

SEQ ID NO: 1621844 - DNA, 25 bp, Homo sapien
tagccaaagcaaccaagcaatagaa

SEQ ID NO: 1621845 - DNA, 25 bp, Homo sapien
gacacacaggcaagtagagaagaaa

SEQ ID NO: 1621846 - DNA, 25 bp, Homo sapien
gaaggtatcactctaccggactgaa

SEQ ID NO: 1621847 - DNA, 25 bp, Homo sapien
aagcaacatccaagtgtccatagaa

SEQ ID NO: 1621848 - DNA, 25 bp, Homo sapien
tagaatattacttagggctgggcac

SEQ ID NO: 1621849 - DNA, 25 bp, Homo sapien
ttaactataagaatgattttctctc

SEQ ID NO: 1621850 - DNA, 25 bp, Homo sapien
tattgaatgtataacagtatttaac

SEQ ID NO: 1621851 - DNA, 25 bp, Homo sapien
taacgcattagaatattacttaggg

SEQ ID NO: 1621852 - DNA, 25 bp, Homo sapien
ataaactttcgtgttttataatctg

SEQ ID NO: 1621853 - DNA, 25 bp, Homo sapien
aactttcgtgttttataatctgtag

SEQ ID NO: 1621854 - DNA, 25 bp, Homo sapien
tgaggatctgttagaggctttccca

SEQ ID NO: 1621855 - DNA, 25 bp, Homo sapien
caattgtaggaattccctccagtat

SEQ ID NO: 1621856 - DNA, 25 bp, Homo sapien
taagaattgaggatctgttagaggc

SEQ ID NO: 1621857 - DNA, 25 bp, Homo sapien
aattgtaggaattccctccagtatg

SEQ ID NO: 1621858 - DNA, 25 bp, Homo sapien
aaggtgtgaggattggttgaagtct

SEQ ID NO: 1621859 - DNA, 25 bp, Homo sapien
tgtgaggattggttgaagtctttac

SEQ ID NO: 1621860 - DNA, 25 bp, Homo sapien
ggtgtgaggattggttgaagtcttt

SEQ ID NO: 1621861 - DNA, 25 bp, Homo sapien
gtaaggtgtgaggattggttgaagt

SEQ ID NO: 1621862 - DNA, 25 bp, Homo sapien
ttatgtttgttaaggactgagaccc

SEQ ID NO: 1621863 - DNA, 25 bp, Homo sapien
ctaagtcttgaggaccagatgaagg

SEQ ID NO: 1621864 - DNA, 25 bp, Homo sapien
attctcttatgttcactaagtcttg

SEQ ID NO: 1621865 - DNA, 25 bp, Homo sapien
ggactgagacccagctaaaggcttt

SEQ ID NO: 1621866 - DNA, 25 bp, Homo sapien
caataaggcttgaggaccgggtgaa

SEQ ID NO: 1621867 - DNA, 25 bp, Homo sapien
tcaataaggcttgaggaccgggtga

SEQ ID NO: 1621868 - DNA, 25 bp, Homo sapien
tgtttagtaaggctcgaaaatgtag

SEQ ID NO: 1621869 - DNA, 25 bp, Homo sapien
taaggctcgaaaatgtagtaaaggc

SEQ ID NO: 1621870 - DNA, 25 bp, Homo sapien
aaatgatctgacatattctttacat

SEQ ID NO: 1621871 - DNA, 25 bp, Homo sapien
aaaatgatctgacatattctttaca

SEQ ID NO: 1621872 - DNA, 25 bp, Homo sapien
cactcatccacattggtacaaccaa

SEQ ID NO: 1621873 - DNA, 25 bp, Homo sapien
actcatccacattggtacaaccaat

SEQ ID NO: 1621874 - DNA, 25 bp, Homo sapien
acactcatccacattggtacaacca

SEQ ID NO: 1621875 - DNA, 25 bp, Homo sapien
tacactcatccacattggtacaacc

SEQ ID NO: 1621876 - DNA, 25 bp, Homo sapien
aaaggtcttgagcaaaatgagaaca

SEQ ID NO: 1621877 - DNA, 25 bp, Homo sapien
ggtcttgagcaaaatgagaacatat

SEQ ID NO: 1621878 - DNA, 25 bp, Homo sapien
ctggccaaaggtcttgagcaaaatg

SEQ ID NO: 1621879 - DNA, 25 bp, Homo sapien
gtcttgagcaaaatgagaacatata

SEQ ID NO: 1621880 - DNA, 25 bp, Homo sapien
tttccttgctccagaaaaatgatca

SEQ ID NO: 1621881 - DNA, 25 bp, Homo sapien
cttgctccagaaaaatgatcaggtc

SEQ ID NO: 1621882 - DNA, 25 bp, Homo sapien
ctggcggttctttcaccagctcatg

SEQ ID NO: 1621883 - DNA, 25 bp, Homo sapien
tccagaaaaatgatcaggtctggct

SEQ ID NO: 1621884 - DNA, 25 bp, Homo sapien
tgtatactaggaattgcgtattaaa

SEQ ID NO: 1621885 - DNA, 25 bp, Homo sapien
tatactaggaattgcgtattaaagt

SEQ ID NO: 1621886 - DNA, 25 bp, Homo sapien
tagtgtatactaggaattgcgtatt

SEQ ID NO: 1621887 - DNA, 25 bp, Homo sapien
ctatagtgtatactaggaattgcgt

SEQ ID NO: 1621888 - DNA, 25 bp, Homo sapien
gccacatcccgaaatgtcaacgatc

SEQ ID NO: 1621889 - DNA, 25 bp, Homo sapien
gagaattgtatggccacatcccgaa

SEQ ID NO: 1621890 - DNA, 25 bp, Homo sapien
ggccacatcccgaaatgtcaacgat

SEQ ID NO: 1621891 - DNA, 25 bp, Homo sapien
ttgtatggccacatcccgaaatgtc

SEQ ID NO: 1621892 - DNA, 25 bp, Homo sapien
tttaggagcggacgacacacagcag

SEQ ID NO: 1621893 - DNA, 25 bp, Homo sapien
gggcctttaggagcggacgacacac

SEQ ID NO: 1621894 - DNA, 25 bp, Homo sapien
gggtcctggcgacttagttgtgaat

SEQ ID NO: 1621895 - DNA, 25 bp, Homo sapien
cacagggccatagaagctgggcctt

SEQ ID NO: 1621896 - DNA, 25 bp, Homo sapien
gagagttatcaatgtgcctgtgagc

SEQ ID NO: 1621897 - DNA, 25 bp, Homo sapien
acaagattcaagacctaaccagagg

SEQ ID NO: 1621898 - DNA, 25 bp, Homo sapien
cctgtggctggatctacatatgaca

SEQ ID NO: 1621899 - DNA, 25 bp, Homo sapien
gagcatacgagatacttcacctgtg

SEQ ID NO: 1621900 - DNA, 25 bp, Homo sapien
cctgcagactgtgtattatgttggc

SEQ ID NO: 1621901 - DNA, 25 bp, Homo sapien
tgtgagttgcatccaagtacatgag

SEQ ID NO: 1621902 - DNA, 25 bp, Homo sapien
cacacatgtcccagcttcaggtaaa

SEQ ID NO: 1621903 - DNA, 25 bp, Homo sapien
taggattcacaattccacacatgtc

SEQ ID NO: 1621904 - DNA, 25 bp, Homo sapien
gatatgccacaatcccttttttggg

SEQ ID NO: 1621905 - DNA, 25 bp, Homo sapien
gaattggatcacttgcatgcagggt

SEQ ID NO: 1621906 - DNA, 25 bp, Homo sapien
tgcagggtccggtgacatattataa

SEQ ID NO: 1621907 - DNA, 25 bp, Homo sapien
caatctcctctatgggcaaggccca

SEQ ID NO: 1621908 - DNA, 25 bp, Homo sapien
tggttactgggcagagctatatgtc

SEQ ID NO: 1621909 - DNA, 25 bp, Homo sapien
cacctggttactgggcagagctata

SEQ ID NO: 1621910 - DNA, 25 bp, Homo sapien
catcacctggttactgggcagagct

SEQ ID NO: 1621911 - DNA, 25 bp, Homo sapien
tactgggcagagctatatgtcacaa

SEQ ID NO: 1621912 - DNA, 25 bp, Homo sapien
atttcggtgagaaccccacagatgt

SEQ ID NO: 1621913 - DNA, 25 bp, Homo sapien
atcatttcggtgagaaccccacaga

SEQ ID NO: 1621914 - DNA, 25 bp, Homo sapien
tcatttcggtgagaaccccacagat

SEQ ID NO: 1621915 - DNA, 25 bp, Homo sapien
catttcggtgagaaccccacagatg

SEQ ID NO: 1621916 - DNA, 25 bp, Homo sapien
actttcccttgtgtgggcatggctt

SEQ ID NO: 1621917 - DNA, 25 bp, Homo sapien
cactttcccttgtgtgggcatggct

SEQ ID NO: 1621918 - DNA, 25 bp, Homo sapien
cagccatatatcacaatacacagca

SEQ ID NO: 1621919 - DNA, 25 bp, Homo sapien
cccagccatatatcacaatacacag

SEQ ID NO: 1621920 - DNA, 25 bp, Homo sapien
ccagccatatatcacaatacacagc

SEQ ID NO: 1621921 - DNA, 25 bp, Homo sapien
gtacttggtccaggaatatgtcaca

SEQ ID NO: 1621922 - DNA, 25 bp, Homo sapien
ggtacttggtccaggaatatgtcac

SEQ ID NO: 1621923 - DNA, 25 bp, Homo sapien
gtccaggaatatgtcacaatacctc

SEQ ID NO: 1621924 - DNA, 25 bp, Homo sapien
ttggtccaggaatatgtcacaatac

SEQ ID NO: 1621925 - DNA, 25 bp, Homo sapien
tttgtgcacagggtctaagcaaaag

SEQ ID NO: 1621926 - DNA, 25 bp, Homo sapien
tccttttgtgcacagggtctaagca

SEQ ID NO: 1621927 - DNA, 25 bp, Homo sapien
gcacagggtctaagcaaaagatgaa

SEQ ID NO: 1621928 - DNA, 25 bp, Homo sapien
tgtgcacagggtctaagcaaaagat

SEQ ID NO: 1621929 - DNA, 25 bp, Homo sapien
agagaggagccacagaaggacccag

SEQ ID NO: 1621930 - DNA, 25 bp, Homo sapien
cagccactgagagaggagccacaga

SEQ ID NO: 1621931 - DNA, 25 bp, Homo sapien
acagaaggacccagaacccctgcat

SEQ ID NO: 1621932 - DNA, 25 bp, Homo sapien
ggagccacagaaggacccagaaccc

SEQ ID NO: 1621933 - DNA, 25 bp, Homo sapien
caaccatgagctgtgctaaagtgta

SEQ ID NO: 1621934 - DNA, 25 bp, Homo sapien
tacagaagactcaggagtttattca

SEQ ID NO: 1621935 - DNA, 25 bp, Homo sapien
tctgtaagtctagctacaagtggca

SEQ ID NO: 1621936 - DNA, 25 bp, Homo sapien
tcctattggctgttttgtggcgtaa

SEQ ID NO: 1621937 - DNA, 25 bp, Homo sapien
cacatcagctatatgctgtgaaagg

SEQ ID NO: 1621938 - DNA, 25 bp, Homo sapien
gagcagacagcaggtaacagaagag

SEQ ID NO: 1621939 - DNA, 25 bp, Homo sapien
aaaaagagtaatatccatttggtgc

SEQ ID NO: 1621940 - DNA, 25 bp, Homo sapien
tatccatttggtgctaggttcagca

SEQ ID NO: 1621941 - DNA, 25 bp, Homo sapien
tgcagggcttagcagtatgtcataa

SEQ ID NO: 1621942 - DNA, 25 bp, Homo sapien
tagcagtatgtcataatccaccctg

SEQ ID NO: 1621943 - DNA, 25 bp, Homo sapien
gcttagcagtatgtcataatccacc

SEQ ID NO: 1621944 - DNA, 25 bp, Homo sapien
cagggcttagcagtatgtcataatc

SEQ ID NO: 1621945 - DNA, 25 bp, Homo sapien
agtgcagttacagcctcacatgtgt

SEQ ID NO: 1621946 - DNA, 25 bp, Homo sapien
gccttggatgttggatctaagtgtg

SEQ ID NO: 1621947 - DNA, 25 bp, Homo sapien
atctaagtgtgtgagtcacagtctc

SEQ ID NO: 1621948 - DNA, 25 bp, Homo sapien
cctttcagtgcagttacagcctcac

SEQ ID NO: 1621949 - DNA, 25 bp, Homo sapien
ggttctacgtccagatatgacagtc

SEQ ID NO: 1621950 - DNA, 25 bp, Homo sapien
tgaaaattccaactgtgaacggcat

SEQ ID NO: 1621951 - DNA, 25 bp, Homo sapien
cattcacgtgtgattcaggacctca

SEQ ID NO: 1621952 - DNA, 25 bp, Homo sapien
tcaccttcctacaagctgggtttag

SEQ ID NO: 1621953 - DNA, 25 bp, Homo sapien
tgattgtcacaatcttccgagtggg

SEQ ID NO: 1621954 - DNA, 25 bp, Homo sapien
tggttgctgggcctaatgattgtca

SEQ ID NO: 1621955 - DNA, 25 bp, Homo sapien
tcatctcctgggtgatggatacaga

SEQ ID NO: 1621956 - DNA, 25 bp, Homo sapien
tcacaatcttccgagtgggcagaat

SEQ ID NO: 1621957 - DNA, 25 bp, Homo sapien
tcagtgttttctaagggcacagcca

SEQ ID NO: 1621958 - DNA, 25 bp, Homo sapien
caccttagggttagatgccacaatc

SEQ ID NO: 1621959 - DNA, 25 bp, Homo sapien
tgctggacccagcagtatgtttcag

SEQ ID NO: 1621960 - DNA, 25 bp, Homo sapien
gcaatgggtcaagagatatgttaca

SEQ ID NO: 1621961 - DNA, 25 bp, Homo sapien
agattgagaccatcctgactaacac

SEQ ID NO: 1621962 - DNA, 25 bp, Homo sapien
aaggcgggcagatcacgaggtcagg

SEQ ID NO: 1621963 - DNA, 25 bp, Homo sapien
tgtaattgcagcactttgggaggcc

SEQ ID NO: 1621964 - DNA, 25 bp, Homo sapien
ctggccaggtgcgatggcttacgcc

SEQ ID NO: 1621965 - DNA, 25 bp, Homo sapien
agccataagtagagagtagcatcac

SEQ ID NO: 1621966 - DNA, 25 bp, Homo sapien
cccagccataagtagagagtagcat

SEQ ID NO: 1621967 - DNA, 25 bp, Homo sapien
tccacctcttaggttcagcgtccag

SEQ ID NO: 1621968 - DNA, 25 bp, Homo sapien
gttcagcgtccagggatatgtccca

SEQ ID NO: 1621969 - DNA, 25 bp, Homo sapien
taggtccagaaatgcatcacaatgt

SEQ ID NO: 1621970 - DNA, 25 bp, Homo sapien
tactgggccacgtacatgatgtatc

SEQ ID NO: 1621971 - DNA, 25 bp, Homo sapien
aatgtctctcatgggcaaacaccag

SEQ ID NO: 1621972 - DNA, 25 bp, Homo sapien
tgggccaagagatatgtcacagtgc

SEQ ID NO: 1621973 - DNA, 25 bp, Homo sapien
atggcccatgttggcagagcacagg

SEQ ID NO: 1621974 - DNA, 25 bp, Homo sapien
gagagtcacataacttgtaggggac

SEQ ID NO: 1621975 - DNA, 25 bp, Homo sapien
tcacaatggcccatgttggcagagc

SEQ ID NO: 1621976 - DNA, 25 bp, Homo sapien
aggttttggacccagcaacatgtca

SEQ ID NO: 1621977 - DNA, 25 bp, Homo sapien
agaatagagttacgtcacctaggtg

SEQ ID NO: 1621978 - DNA, 25 bp, Homo sapien
tgtcctttttgggtagcaccaaagc

SEQ ID NO: 1621979 - DNA, 25 bp, Homo sapien
aagcaggagaatagagttacgtcac

SEQ ID NO: 1621980 - DNA, 25 bp, Homo sapien
ctttttgggtagcaccaaagcagga

SEQ ID NO: 1621981 - DNA, 25 bp, Homo sapien
gatggaggagtgtctacaaattgcc

SEQ ID NO: 1621982 - DNA, 25 bp, Homo sapien
tgccccttcacgtcagttgaggaaa

SEQ ID NO: 1621983 - DNA, 25 bp, Homo sapien
ttctccataagtcccactgtgctgt

SEQ ID NO: 1621984 - DNA, 25 bp, Homo sapien
tcttagggtaggttttagtgtgagc

SEQ ID NO: 1621985 - DNA, 25 bp, Homo sapien
tggagaaattacagggccctttaca

SEQ ID NO: 1621986 - DNA, 25 bp, Homo sapien
catgagtttcagaactgtcttaacc

SEQ ID NO: 1621987 - DNA, 25 bp, Homo sapien
cttaaccaacccaggatgcccgtag

SEQ ID NO: 1621988 - DNA, 25 bp, Homo sapien
ggatgcccgtagtgaccatatctct

SEQ ID NO: 1621989 - DNA, 25 bp, Homo sapien
atgggtaaagggtctgtcctgagga

SEQ ID NO: 1621990 - DNA, 25 bp, Homo sapien
gacatgggtaaagggtctgtcctga

SEQ ID NO: 1621991 - DNA, 25 bp, Homo sapien
cctgacatgggtaaagggtctgtcc

SEQ ID NO: 1621992 - DNA, 25 bp, Homo sapien
ccagcctgacatgggtaaagggtct

SEQ ID NO: 1621993 - DNA, 25 bp, Homo sapien
gtggtggcagcttgatccccgggct

SEQ ID NO: 1621994 - DNA, 25 bp, Homo sapien
tagggggtacccctgcttggcatcc

SEQ ID NO: 1621995 - DNA, 25 bp, Homo sapien
ctaattgccggaagggacggcatgc

SEQ ID NO: 1621996 - DNA, 25 bp, Homo sapien
ttgcctgtgggctttctaattgccg

SEQ ID NO: 1621997 - DNA, 25 bp, Homo sapien
gttgatcaacagacggggtcagggg

SEQ ID NO: 1621998 - DNA, 25 bp, Homo sapien
ggttgatcaacagacggggtcaggg

SEQ ID NO: 1621999 - DNA, 25 bp, Homo sapien
gattgttacctattgctgggctcag

SEQ ID NO: 1622000 - DNA, 25 bp, Homo sapien
tgggccttgaccacagagaggattg

SEQ ID NO: 1622001 - DNA, 25 bp, Homo sapien
aaagattgtgatgtactcctggcca

SEQ ID NO: 1622002 - DNA, 25 bp, Homo sapien
ccccatgtggtgtgactgtactgtc

SEQ ID NO: 1622003 - DNA, 25 bp, Homo sapien
tccggaaataattactccatctgct

SEQ ID NO: 1622004 - DNA, 25 bp, Homo sapien
tctattgtaataatctgcagcactt

SEQ ID NO: 1622005 - DNA, 25 bp, Homo sapien
tctcggttatgatattctaaaagaa

SEQ ID NO: 1622006 - DNA, 25 bp, Homo sapien
gatcttgtccttctatgagttagca

SEQ ID NO: 1622007 - DNA, 25 bp, Homo sapien
ttctctttttatttttccttgcaca

SEQ ID NO: 1622008 - DNA, 25 bp, Homo sapien
tctctttttatttttccttgcacac

SEQ ID NO: 1622009 - DNA, 25 bp, Homo sapien
tgtcacatgacataggaacacttca

SEQ ID NO: 1622010 - DNA, 25 bp, Homo sapien
gatgtgctgtcacatgacataggaa

SEQ ID NO: 1622011 - DNA, 25 bp, Homo sapien
catgcatcacaactgtgttcttgga

SEQ ID NO: 1622012 - DNA, 25 bp, Homo sapien
tcatgcatcacaactgtgttcttgg

SEQ ID NO: 1622013 - DNA, 25 bp, Homo sapien
aattgctcatgttgctgaacaacag

SEQ ID NO: 1622014 - DNA, 25 bp, Homo sapien
attgctcatgttgctgaacaacaga

SEQ ID NO: 1622015 - DNA, 25 bp, Homo sapien
aaattgctcatgttgctgaacaaca

SEQ ID NO: 1622016 - DNA, 25 bp, Homo sapien
gatggttgccgggtctgtgtggata

SEQ ID NO: 1622017 - DNA, 25 bp, Homo sapien
tgtgcccagcggctcattggggatg

SEQ ID NO: 1622018 - DNA, 25 bp, Homo sapien
ccgggtctgtgtggatagaagtaga

SEQ ID NO: 1622019 - DNA, 25 bp, Homo sapien
cagcggctcattggggatgggccat

SEQ ID NO: 1622020 - DNA, 25 bp, Homo sapien
tgagaaatcggatggttgccgtgtc

SEQ ID NO: 1622021 - DNA, 25 bp, Homo sapien
cggatggttgccgtgtctgtgtaga

SEQ ID NO: 1622022 - DNA, 25 bp, Homo sapien
ggatggttgccgtgtctgtgtagaa

SEQ ID NO: 1622023 - DNA, 25 bp, Homo sapien
agattgagaaatcggatggttgccg

SEQ ID NO: 1622024 - DNA, 25 bp, Homo sapien
caaacacggttacataggagctgca

SEQ ID NO: 1622025 - DNA, 25 bp, Homo sapien
tgagcacttaagcatcaagaacacg

SEQ ID NO: 1622026 - DNA, 25 bp, Homo sapien
accattcagggtgtgtttgacaaac

SEQ ID NO: 1622027 - DNA, 25 bp, Homo sapien
gatggatacagcaacataatacttg

SEQ ID NO: 1622028 - DNA, 25 bp, Homo sapien
tattccttcacttgttagttatttg

SEQ ID NO: 1622029 - DNA, 25 bp, Homo sapien
tacaatactataaaagactctaaag

SEQ ID NO: 1622030 - DNA, 25 bp, Homo sapien
ctacatttcaacgtattaaatcaaa

SEQ ID NO: 1622031 - DNA, 25 bp, Homo sapien
aaaagactctaaagcaactgcttac

SEQ ID NO: 1622032 - DNA, 25 bp, Homo sapien
tccgtatttatatccatgctgggtg

SEQ ID NO: 1622033 - DNA, 25 bp, Homo sapien
caaacactcggcatttaggtgctta

SEQ ID NO: 1622034 - DNA, 25 bp, Homo sapien
tatagccccagattgactgattaga

SEQ ID NO: 1622035 - DNA, 25 bp, Homo sapien
tatatgctgggtgctcttcgggcac

SEQ ID NO: 1622036 - DNA, 25 bp, Homo sapien
aaattataggtctggcatgagtgcc

SEQ ID NO: 1622037 - DNA, 25 bp, Homo sapien
tatggcgagattctgaaccttaagc

SEQ ID NO: 1622038 - DNA, 25 bp, Homo sapien
cctaaggtttagagtaatacatgca

SEQ ID NO: 1622039 - DNA, 25 bp, Homo sapien
taatcacgaccaactcatgtaatgg

SEQ ID NO: 1622040 - DNA, 25 bp, Homo sapien
aaatacgtattcaagactcacaaat

SEQ ID NO: 1622041 - DNA, 25 bp, Homo sapien
taaaatacgtattcaagactcacaa

SEQ ID NO: 1622042 - DNA, 25 bp, Homo sapien
gaaattaccctgtagtcaatgtcta

SEQ ID NO: 1622043 - DNA, 25 bp, Homo sapien
atagaaattaccctgtagtcaatgt

SEQ ID NO: 1622044 - DNA, 25 bp, Homo sapien
tccatcctgcacgatgggaacaaga

SEQ ID NO: 1622045 - DNA, 25 bp, Homo sapien
tgtttcctaggctgtagtttgtaaa

SEQ ID NO: 1622046 - DNA, 25 bp, Homo sapien
tatttatgtacaaacttcagttctc

SEQ ID NO: 1622047 - DNA, 25 bp, Homo sapien
gaagtgtcagttccttagatatacc

SEQ ID NO: 1622048 - DNA, 25 bp, Homo sapien
ttatcttatgtctagcaagtgtcga

SEQ ID NO: 1622049 - DNA, 25 bp, Homo sapien
atcttatgtctagcaagtgtcgagg

SEQ ID NO: 1622050 - DNA, 25 bp, Homo sapien
tatcttatgtctagcaagtgtcgag

SEQ ID NO: 1622051 - DNA, 25 bp, Homo sapien
tcttcaagtttgtaggaattgacag

SEQ ID NO: 1622052 - DNA, 25 bp, Homo sapien
tataacttcctttgtgcaccttgta

SEQ ID NO: 1622053 - DNA, 25 bp, Homo sapien
agtgtttttgtcctgtatgaattct

SEQ ID NO: 1622054 - DNA, 25 bp, Homo sapien
tctttgcaaagaagcttttatgctc

SEQ ID NO: 1622055 - DNA, 25 bp, Homo sapien
tccttgacatttggacctctcatct

SEQ ID NO: 1622056 - DNA, 25 bp, Homo sapien
ccttgacatttggacctctcatctg

SEQ ID NO: 1622057 - DNA, 25 bp, Homo sapien
cttgacatttggacctctcatctgt

SEQ ID NO: 1622058 - DNA, 25 bp, Homo sapien
gggggtttggccaccatctcatgtc

SEQ ID NO: 1622059 - DNA, 25 bp, Homo sapien
ggccaccatctcatgtctctccata

SEQ ID NO: 1622060 - DNA, 25 bp, Homo sapien
tttggccaccatctcatgtctctcc

SEQ ID NO: 1622061 - DNA, 25 bp, Homo sapien
atgtctctccatattccagggctct

SEQ ID NO: 1622062 - DNA, 25 bp, Homo sapien
atttagggtagattaggaattgtgt

SEQ ID NO: 1622063 - DNA, 25 bp, Homo sapien
tatttagggtagattaggaattgtg

SEQ ID NO: 1622064 - DNA, 25 bp, Homo sapien
atatttagggtagattaggaattgt

SEQ ID NO: 1622065 - DNA, 25 bp, Homo sapien
gttctctaacatcacgttcctatat

SEQ ID NO: 1622066 - DNA, 25 bp, Homo sapien
tggccacatccataaatgtcaatgg

SEQ ID NO: 1622067 - DNA, 25 bp, Homo sapien
catcacgttcctatataaattctgc

SEQ ID NO: 1622068 - DNA, 25 bp, Homo sapien
ctatggccacatccataaatgtcaa

SEQ ID NO: 1622069 - DNA, 25 bp, Homo sapien
tattttcagatgagattttctggac

SEQ ID NO: 1622070 - DNA, 25 bp, Homo sapien
ttattttcagatgagattttctgga

SEQ ID NO: 1622071 - DNA, 25 bp, Homo sapien
ctgtttacatgctacgaccacaccc

SEQ ID NO: 1622072 - DNA, 25 bp, Homo sapien
acaggcagaaggaccaagaccctca

SEQ ID NO: 1622073 - DNA, 25 bp, Homo sapien
gaccaagaccctcagaaaaagtcca

SEQ ID NO: 1622074 - DNA, 25 bp, Homo sapien
tgtttacatgctacgaccacaccca

SEQ ID NO: 1622075 - DNA, 25 bp, Homo sapien
gaacctgtgaagaaggcacaagtaa

SEQ ID NO: 1622076 - DNA, 25 bp, Homo sapien
ccaacctaatagaagtccagctgat

SEQ ID NO: 1622077 - DNA, 25 bp, Homo sapien
gccatgtaatttgagtgcctacacc

SEQ ID NO: 1622078 - DNA, 25 bp, Homo sapien
ataatggaaatatgggccacgctgc

SEQ ID NO: 1622079 - DNA, 25 bp, Homo sapien
tttggaccttccctatgtattttga

SEQ ID NO: 1622080 - DNA, 25 bp, Homo sapien
tcatgaatgtgcgttttaaataagt

SEQ ID NO: 1622081 - DNA, 25 bp, Homo sapien
ggttcatgaatgtgcgttttaaata

SEQ ID NO: 1622082 - DNA, 25 bp, Homo sapien
aaagggttcatgaatgtgcgtttta

SEQ ID NO: 1622083 - DNA, 25 bp, Homo sapien
ccaggatttagattaaggcttagca

SEQ ID NO: 1622084 - DNA, 25 bp, Homo sapien
caggatttagattaaggcttagcat

SEQ ID NO: 1622085 - DNA, 25 bp, Homo sapien
ctgcacttcgaaaacaacatgtact

SEQ ID NO: 1622086 - DNA, 25 bp, Homo sapien
tcgaaaacaacatgtactattgaaa

SEQ ID NO: 1622087 - DNA, 25 bp, Homo sapien
cttcttcttgagaggctacactcca

SEQ ID NO: 1622088 - DNA, 25 bp, Homo sapien
ggctacactccatacctcagcttgt

SEQ ID NO: 1622089 - DNA, 25 bp, Homo sapien
gctacactccatacctcagcttgtt

SEQ ID NO: 1622090 - DNA, 25 bp, Homo sapien
agaggctacactccatacctcagct

SEQ ID NO: 1622091 - DNA, 25 bp, Homo sapien
cctctaagagcaggggacacaaagc

SEQ ID NO: 1622092 - DNA, 25 bp, Homo sapien
gatctcccaatgcttgcaggtcaga

SEQ ID NO: 1622093 - DNA, 25 bp, Homo sapien
gcctctaagagcaggggacacaaag

SEQ ID NO: 1622094 - DNA, 25 bp, Homo sapien
tctaagagcaggggacacaaagcag

SEQ ID NO: 1622095 - DNA, 25 bp, Homo sapien
catgtggcaaaggtgttcttcaaag

SEQ ID NO: 1622096 - DNA, 25 bp, Homo sapien
cagctatgtgctgcaaaaggtcact

SEQ ID NO: 1622097 - DNA, 25 bp, Homo sapien
ggactctcacacactccagaagaaa

SEQ ID NO: 1622098 - DNA, 25 bp, Homo sapien
aaaggcacggattctgctgctgccc

SEQ ID NO: 1622099 - DNA, 25 bp, Homo sapien
tacaatgttcctgtaagcagggacc

SEQ ID NO: 1622100 - DNA, 25 bp, Homo sapien
tacatcacttgggtgttgagcccag

SEQ ID NO: 1622101 - DNA, 25 bp, Homo sapien
cacatcgcctagatgctgggcctag

SEQ ID NO: 1622102 - DNA, 25 bp, Homo sapien
tagtcaaggcccaggaaaatgttac

SEQ ID NO: 1622103 - DNA, 25 bp, Homo sapien
ctggatctgtgcatgagagctgaga

SEQ ID NO: 1622104 - DNA, 25 bp, Homo sapien
caactggatctgtgcatgagagctg

SEQ ID NO: 1622105 - DNA, 25 bp, Homo sapien
gtgcatgagagctgagagccttcat

SEQ ID NO: 1622106 - DNA, 25 bp, Homo sapien
gatctgtgcatgagagctgagagcc

SEQ ID NO: 1622107 - DNA, 25 bp, Homo sapien
catgacctttgtacaaggagaccca

SEQ ID NO: 1622108 - DNA, 25 bp, Homo sapien
gactctaggcctagctgttaagaga

SEQ ID NO: 1622109 - DNA, 25 bp, Homo sapien
tctgtatgctgaaccctgtaatgac

SEQ ID NO: 1622110 - DNA, 25 bp, Homo sapien
tttatacagtatgcaagaaagtggc

SEQ ID NO: 1622111 - DNA, 25 bp, Homo sapien
gtgtgactgcatactcagccaggaa

SEQ ID NO: 1622112 - DNA, 25 bp, Homo sapien
gcttgacacaaccttttctgagggc

SEQ ID NO: 1622113 - DNA, 25 bp, Homo sapien
tcagtcaggagtgtgactgcatact

SEQ ID NO: 1622114 - DNA, 25 bp, Homo sapien
gcccggcttgacacaaccttttctg

SEQ ID NO: 1622115 - DNA, 25 bp, Homo sapien
catgtccaggttctaaaggtatgaa

SEQ ID NO: 1622116 - DNA, 25 bp, Homo sapien
tacatgtgcgctgaaccttggtctg

SEQ ID NO: 1622117 - DNA, 25 bp, Homo sapien
gggtctaagtacatgagtcgcaatc

SEQ ID NO: 1622118 - DNA, 25 bp, Homo sapien
aaagagcccaggtggtagtctccca

SEQ ID NO: 1622119 - DNA, 25 bp, Homo sapien
cattctctgtaacacactagggcgt

SEQ ID NO: 1622120 - DNA, 25 bp, Homo sapien
tagcagactctgtcaatgggtcagg

SEQ ID NO: 1622121 - DNA, 25 bp, Homo sapien
tccaactgcggactgtgttcacatg

SEQ ID NO: 1622122 - DNA, 25 bp, Homo sapien
gagtcttcaccttcctatgagctgg

SEQ ID NO: 1622123 - DNA, 25 bp, Homo sapien
gggatgttacaatccctcctgaaag

SEQ ID NO: 1622124 - DNA, 25 bp, Homo sapien
caggagccttccaacccctaggtgt

SEQ ID NO: 1622125 - DNA, 25 bp, Homo sapien
gttttatctcctgcatgatggatgc

SEQ ID NO: 1622126 - DNA, 25 bp, Homo sapien
tatgacagacaaaacgactggttgc

SEQ ID NO: 1622127 - DNA, 25 bp, Homo sapien
tttggcaggcctgaagcagaagagt

SEQ ID NO: 1622128 - DNA, 25 bp, Homo sapien
caatcttttcttttggcaggcctga

SEQ ID NO: 1622129 - DNA, 25 bp, Homo sapien
gcctgaagcagaagagtcacgttac

SEQ ID NO: 1622130 - DNA, 25 bp, Homo sapien
ccagtgatctgtcacaatcttttct

SEQ ID NO: 1622131 - DNA, 25 bp, Homo sapien
tcacaatctcctttgttgtcagaac

SEQ ID NO: 1622132 - DNA, 25 bp, Homo sapien
ctagaataaagaaaagtcacatcag

SEQ ID NO: 1622133 - DNA, 25 bp, Homo sapien
gagtcacataacatacgcccagcaa

SEQ ID NO: 1622134 - DNA, 25 bp, Homo sapien
taactcagatgctaggccaaggtat

SEQ ID NO: 1622135 - DNA, 25 bp, Homo sapien
ttagccaacatggtagtgagcacct

SEQ ID NO: 1622136 - DNA, 25 bp, Homo sapien
caaattgtgtgccttagactgggca

SEQ ID NO: 1622137 - DNA, 25 bp, Homo sapien
ctgtatgagttgcaacctactctga

SEQ ID NO: 1622138 - DNA, 25 bp, Homo sapien
tgtatgagttgcaacctactctgag

SEQ ID NO: 1622139 - DNA, 25 bp, Homo sapien
ggactgtatgagttgcaacctactc

SEQ ID NO: 1622140 - DNA, 25 bp, Homo sapien
gactgtatgagttgcaacctactct

SEQ ID NO: 1622141 - DNA, 25 bp, Homo sapien
taaccccatgctcaaggtccatgtg

SEQ ID NO: 1622142 - DNA, 25 bp, Homo sapien
ccaggcaggagtcaaactacgtaaa

SEQ ID NO: 1622143 - DNA, 25 bp, Homo sapien
atatacaatttatgcagggcccagg

SEQ ID NO: 1622144 - DNA, 25 bp, Homo sapien
gagagttgaatcacccatgtgttga

SEQ ID NO: 1622145 - DNA, 25 bp, Homo sapien
ccttactgggatgggagcttcttgt

SEQ ID NO: 1622146 - DNA, 25 bp, Homo sapien
taagccgagattgggataatgcact

SEQ ID NO: 1622147 - DNA, 25 bp, Homo sapien
actgtaagcctcaggtgcattttgc

SEQ ID NO: 1622148 - DNA, 25 bp, Homo sapien
ggctcaccaccaacgtgtctactaa

SEQ ID NO: 1622149 - DNA, 25 bp, Homo sapien
aatatttaatagaagcggctgggcg

SEQ ID NO: 1622150 - DNA, 25 bp, Homo sapien
atatttaatagaagcggctgggcgc

SEQ ID NO: 1622151 - DNA, 25 bp, Homo sapien
tatttaatagaagcggctgggcgcg

SEQ ID NO: 1622152 - DNA, 25 bp, Homo sapien
agaccaccttccaccatggtgaaac

SEQ ID NO: 1622153 - DNA, 25 bp, Homo sapien
gctgtgacagtcaccgggggctccc

SEQ ID NO: 1622154 - DNA, 25 bp, Homo sapien
taaaacagcagagaccgatcccaag

SEQ ID NO: 1622155 - DNA, 25 bp, Homo sapien
gaggctgtgacagtcaccgggggct

SEQ ID NO: 1622156 - DNA, 25 bp, Homo sapien
ccgaggtggaggacgtaaaacagca

SEQ ID NO: 1622157 - DNA, 25 bp, Homo sapien
ctaagtactgttgaagccaactgaa

SEQ ID NO: 1622158 - DNA, 25 bp, Homo sapien
tactgccactggttatagctatctg

SEQ ID NO: 1622159 - DNA, 25 bp, Homo sapien
tatctggtccacctgagacatggca

SEQ ID NO: 1622160 - DNA, 25 bp, Homo sapien
gatcaaggctatagggaatcacaat

SEQ ID NO: 1622161 - DNA, 25 bp, Homo sapien
tgaatggaaagaccaccagggtgag

SEQ ID NO: 1622162 - DNA, 25 bp, Homo sapien
caggtccaatgctcgcagctgacaa

SEQ ID NO: 1622163 - DNA, 25 bp, Homo sapien
tactgctgccggtgagagctatctg

SEQ ID NO: 1622164 - DNA, 25 bp, Homo sapien
tctggctgaccttagacaaggcaag

SEQ ID NO: 1622165 - DNA, 25 bp, Homo sapien
gagctatctggctgaccttagacaa

SEQ ID NO: 1622166 - DNA, 25 bp, Homo sapien
agcaagagccaaatggtcgacctta

SEQ ID NO: 1622167 - DNA, 25 bp, Homo sapien
caagtccaacactcgtggctgacat

SEQ ID NO: 1622168 - DNA, 25 bp, Homo sapien
aagagccaaatggtcgaccttagac

SEQ ID NO: 1622169 - DNA, 25 bp, Homo sapien
ctggcgaccaagtccaacactcgtg

SEQ ID NO: 1622170 - DNA, 25 bp, Homo sapien
gctggtggctaagaccaagggtcat

SEQ ID NO: 1622171 - DNA, 25 bp, Homo sapien
ccacaggtgagaaccatctggtcaa

SEQ ID NO: 1622172 - DNA, 25 bp, Homo sapien
aagctggtggctaagaccaagggtc

SEQ ID NO: 1622173 - DNA, 25 bp, Homo sapien
gagaaccatctggtcaaccttagac

SEQ ID NO: 1622174 - DNA, 25 bp, Homo sapien
tatttttgaacatgtgacattggaa

SEQ ID NO: 1622175 - DNA, 25 bp, Homo sapien
tcttgaattggggtagaaaagccaa

SEQ ID NO: 1622176 - DNA, 25 bp, Homo sapien
tgacttcttgaattggggtagaaaa

SEQ ID NO: 1622177 - DNA, 25 bp, Homo sapien
tttgaacatgtgacattggaacaca

SEQ ID NO: 1622178 - DNA, 25 bp, Homo sapien
cagtcagccgatatttgagcccaga

SEQ ID NO: 1622179 - DNA, 25 bp, Homo sapien
cccagtggtgcatgagaatagctca

SEQ ID NO: 1622180 - DNA, 25 bp, Homo sapien
cctagaacccggacctgtgtgagat

SEQ ID NO: 1622181 - DNA, 25 bp, Homo sapien
tagtttagcccaggtgactccagtc

SEQ ID NO: 1622182 - DNA, 25 bp, Homo sapien
tattgtgatgtgagtcccctgcctg

SEQ ID NO: 1622183 - DNA, 25 bp, Homo sapien
tcaaccacttgatgtgactctgctc

SEQ ID NO: 1622184 - DNA, 25 bp, Homo sapien
tgatatatctctgggcccatcaacc

SEQ ID NO: 1622185 - DNA, 25 bp, Homo sapien
tgctgcactcaacacaaagattatg

SEQ ID NO: 1622186 - DNA, 25 bp, Homo sapien
gagattggggcctatctgcgaatcc

SEQ ID NO: 1622187 - DNA, 25 bp, Homo sapien
ccgagcattgcccaaaaaagagatt

SEQ ID NO: 1622188 - DNA, 25 bp, Homo sapien
cctatctgcgaatccagagcttagg

SEQ ID NO: 1622189 - DNA, 25 bp, Homo sapien
gcttaggtgatatgacccttctctc

SEQ ID NO: 1622190 - DNA, 25 bp, Homo sapien
catatctcttgacccagcgcttagg

SEQ ID NO: 1622191 - DNA, 25 bp, Homo sapien
ggtgatgtgactctcccgcatgggt

SEQ ID NO: 1622192 - DNA, 25 bp, Homo sapien
tcggctgtgcccaaaaaaggattgt

SEQ ID NO: 1622193 - DNA, 25 bp, Homo sapien
tttaatggacctgcccactagggtg

SEQ ID NO: 1622194 - DNA, 25 bp, Homo sapien
ccaaaatactgcagacattgtgata

SEQ ID NO: 1622195 - DNA, 25 bp, Homo sapien
tgagtccaacacctagaaggtgcaa

SEQ ID NO: 1622196 - DNA, 25 bp, Homo sapien
taagtaatggtgactctcctctcct

SEQ ID NO: 1622197 - DNA, 25 bp, Homo sapien
gaagcactgcccaaaggagaataat

SEQ ID NO: 1622198 - DNA, 25 bp, Homo sapien
gataatgaattaccactaggcccag

SEQ ID NO: 1622199 - DNA, 25 bp, Homo sapien
taggcccagcacacaagcaatgtca

SEQ ID NO: 1622200 - DNA, 25 bp, Homo sapien
tttgggcccatgacctgacctaggt

SEQ ID NO: 1622201 - DNA, 25 bp, Homo sapien
gacatattgcctggtgcagcaccta

SEQ ID NO: 1622202 - DNA, 25 bp, Homo sapien
tgtatccctggatgcagcacctagg

SEQ ID NO: 1622203 - DNA, 25 bp, Homo sapien
tacctagaaaatggaaggctccgcc

SEQ ID NO: 1622204 - DNA, 25 bp, Homo sapien
tgtctctcgtaattgggccttgccc

SEQ ID NO: 1622205 - DNA, 25 bp, Homo sapien
taacgtattcctggctgagtaccca

SEQ ID NO: 1622206 - DNA, 25 bp, Homo sapien
attcttctcctcttcgtttcctatt

SEQ ID NO: 1622207 - DNA, 25 bp, Homo sapien
ccttcttctgctcccgattctcctc

SEQ ID NO: 1622208 - DNA, 25 bp, Homo sapien
tccttcttctgctcccgattctcct

SEQ ID NO: 1622209 - DNA, 25 bp, Homo sapien
tcctcctattcttctcctcttcgtt

SEQ ID NO: 1622210 - DNA, 25 bp, Homo sapien
tgggcccctggtagcactgattttc

SEQ ID NO: 1622211 - DNA, 25 bp, Homo sapien
cataaatatcattaggatggacacc

SEQ ID NO: 1622212 - DNA, 25 bp, Homo sapien
tctgcatcaccacaccataaatatc

SEQ ID NO: 1622213 - DNA, 25 bp, Homo sapien
taatcctgacagatgtaacctgaac

SEQ ID NO: 1622214 - DNA, 25 bp, Homo sapien
tggttgttagcttttttacatagaa

SEQ ID NO: 1622215 - DNA, 25 bp, Homo sapien
caataatcaaaagttgaactttaat

SEQ ID NO: 1622216 - DNA, 25 bp, Homo sapien
cttttttacatagaaacacactcac

SEQ ID NO: 1622217 - DNA, 25 bp, Homo sapien
tagcttttttacatagaaacacact

SEQ ID NO: 1622218 - DNA, 25 bp, Homo sapien
ggaggcagccagctattagaactca

SEQ ID NO: 1622219 - DNA, 25 bp, Homo sapien
catcaagcgaaaagatgggcacccc

SEQ ID NO: 1622220 - DNA, 25 bp, Homo sapien
gagttctccctgttaggcacatcaa

SEQ ID NO: 1622221 - DNA, 25 bp, Homo sapien
catgatggcagtaagagcagaagtc

SEQ ID NO: 1622222 - DNA, 25 bp, Homo sapien
aatatttgacgacataagtgggacc

SEQ ID NO: 1622223 - DNA, 25 bp, Homo sapien
gggcttgcataggtcgtgttactac

SEQ ID NO: 1622224 - DNA, 25 bp, Homo sapien
aggtcgtgttactacatgaactgac

SEQ ID NO: 1622225 - DNA, 25 bp, Homo sapien
ctaatatttgacgacataagtggga

SEQ ID NO: 1622226 - DNA, 25 bp, Homo sapien
tgggtaccagtagaggctgcagagc

SEQ ID NO: 1622227 - DNA, 25 bp, Homo sapien
cgttggaaaagtgtagcattagggt

SEQ ID NO: 1622228 - DNA, 25 bp, Homo sapien
aggtttgttatagtcaggaacctca

SEQ ID NO: 1622229 - DNA, 25 bp, Homo sapien
agaccgttggaaaagtgtagcatta

SEQ ID NO: 1622230 - DNA, 25 bp, Homo sapien
gatcaggtatggatgtttacacagc

SEQ ID NO: 1622231 - DNA, 25 bp, Homo sapien
tatgcaaatggagcacttgccagca

SEQ ID NO: 1622232 - DNA, 25 bp, Homo sapien
cttttcctattagcagagctgcagg

SEQ ID NO: 1622233 - DNA, 25 bp, Homo sapien
tgcctgttcgttactctacacgtgg

SEQ ID NO: 1622234 - DNA, 25 bp, Homo sapien
tttctgagacttagacttagactta

SEQ ID NO: 1622235 - DNA, 25 bp, Homo sapien
taccttcttactctttcatgtcagg

SEQ ID NO: 1622236 - DNA, 25 bp, Homo sapien
gacttagacttagacttagaattca

SEQ ID NO: 1622237 - DNA, 25 bp, Homo sapien
taatttctcaccatctaccccaccc

SEQ ID NO: 1622238 - DNA, 25 bp, Homo sapien
tatatcaagctagaataaccttcac

SEQ ID NO: 1622239 - DNA, 25 bp, Homo sapien
gaaactaattaccactagactgggc

SEQ ID NO: 1622240 - DNA, 25 bp, Homo sapien
cataatggcacatgataatcagaat

SEQ ID NO: 1622241 - DNA, 25 bp, Homo sapien
tgaaaactttccaactctagcaata

SEQ ID NO: 1622242 - DNA, 25 bp, Homo sapien
aatgtatagatttggttgggtgcgg

SEQ ID NO: 1622243 - DNA, 25 bp, Homo sapien
atgtatagatttggttgggtgcggt

SEQ ID NO: 1622244 - DNA, 25 bp, Homo sapien
gcagtgagcagtgggacgagatcgc

SEQ ID NO: 1622245 - DNA, 25 bp, Homo sapien
cagtgagcagtgggacgagatcgcg

SEQ ID NO: 1622246 - DNA, 25 bp, Homo sapien
agtgagcagtgggacgagatcgcgc

SEQ ID NO: 1622247 - DNA, 25 bp, Homo sapien
tagcctaaaggcctgcatcaaaaaa

SEQ ID NO: 1622248 - DNA, 25 bp, Homo sapien
tcaaatcccaagttagaagaggaaa

SEQ ID NO: 1622249 - DNA, 25 bp, Homo sapien
gaaagcttacatattaaggacctga

SEQ ID NO: 1622250 - DNA, 25 bp, Homo sapien
ctcgggaggctaatataaaacgatc

SEQ ID NO: 1622251 - DNA, 25 bp, Homo sapien
taagggtatgggacaaaagatgctc

SEQ ID NO: 1622252 - DNA, 25 bp, Homo sapien
gagctatcactcgaaatctgttagg

SEQ ID NO: 1622253 - DNA, 25 bp, Homo sapien
ggaagcagagcattctataccacat

SEQ ID NO: 1622254 - DNA, 25 bp, Homo sapien
gctctcacggtaccctctaaggaaa

SEQ ID NO: 1622255 - DNA, 25 bp, Homo sapien
tccctcgtctctgttatctgcttca

SEQ ID NO: 1622256 - DNA, 25 bp, Homo sapien
tcgtatccctcgtctctgttatctg

SEQ ID NO: 1622257 - DNA, 25 bp, Homo sapien
gtatccctcgtctctgttatctgct

SEQ ID NO: 1622258 - DNA, 25 bp, Homo sapien
cttcgtatccctcgtctctgttatc

SEQ ID NO: 1622259 - DNA, 25 bp, Homo sapien
caaagcaggatatcagatcagagtt

SEQ ID NO: 1622260 - DNA, 25 bp, Homo sapien
tagcatgactttctgggatcctcca

SEQ ID NO: 1622261 - DNA, 25 bp, Homo sapien
ggatacagattagctcaagagaggg

SEQ ID NO: 1622262 - DNA, 25 bp, Homo sapien
catttctgggtccttagctctacta

SEQ ID NO: 1622263 - DNA, 25 bp, Homo sapien
cactgtaggtactgtagttttctga

SEQ ID NO: 1622264 - DNA, 25 bp, Homo sapien
catatttagcaaatggccatgggca

SEQ ID NO: 1622265 - DNA, 25 bp, Homo sapien
agagttacagagactggaattatcc

SEQ ID NO: 1622266 - DNA, 25 bp, Homo sapien
taattttactctaggtgtttgagag

SEQ ID NO: 1622267 - DNA, 25 bp, Homo sapien
tcagatggaacctaaacggtgcact

SEQ ID NO: 1622268 - DNA, 25 bp, Homo sapien
aaagttcaagccacatatgatgccc

SEQ ID NO: 1622269 - DNA, 25 bp, Homo sapien
tactgtctctttagcattctagaag

SEQ ID NO: 1622270 - DNA, 25 bp, Homo sapien
cagcagcaaccccaataagaatgtt

SEQ ID NO: 1622271 - DNA, 25 bp, Homo sapien
gaagaccctacctcttatattagag

SEQ ID NO: 1622272 - DNA, 25 bp, Homo sapien
tctccccagaagacgaggaccgtat

SEQ ID NO: 1622273 - DNA, 25 bp, Homo sapien
tagagtttcagtacctcacccagtg

SEQ ID NO: 1622274 - DNA, 25 bp, Homo sapien
aggaccgtatctagaccccagctca

SEQ ID NO: 1622275 - DNA, 25 bp, Homo sapien
aaagctaccgtcattcattgcaggg

SEQ ID NO: 1622276 - DNA, 25 bp, Homo sapien
gtgcattcacactcgtccatctgga

SEQ ID NO: 1622277 - DNA, 25 bp, Homo sapien
tcattcgagctctcactctagcagc

SEQ ID NO: 1622278 - DNA, 25 bp, Homo sapien
taaatgactctatcagcaagctcct

SEQ ID NO: 1622279 - DNA, 25 bp, Homo sapien
tagtaaccctccagtggtggacaaa

SEQ ID NO: 1622280 - DNA, 25 bp, Homo sapien
catgtatggctgaatgttgcgggaa

SEQ ID NO: 1622281 - DNA, 25 bp, Homo sapien
cctcatgagattctgtgcaacacca

SEQ ID NO: 1622282 - DNA, 25 bp, Homo sapien
tcaccaagttggctctagtaaccct

SEQ ID NO: 1622283 - DNA, 25 bp, Homo sapien
caaagaaaatactttcatgccgggc

SEQ ID NO: 1622284 - DNA, 25 bp, Homo sapien
gaaaatactttcatgccgggcacgg

SEQ ID NO: 1622285 - DNA, 25 bp, Homo sapien
gctgatctgtcaacaaagaaaatac

SEQ ID NO: 1622286 - DNA, 25 bp, Homo sapien
agctgatctgtcaacaaagaaaata

SEQ ID NO: 1622287 - DNA, 25 bp, Homo sapien
tatatattgtgtgtccgtatcaaaa

SEQ ID NO: 1622288 - DNA, 25 bp, Homo sapien
gctagaggtaatggagaccgcattt

SEQ ID NO: 1622289 - DNA, 25 bp, Homo sapien
taacttaatggcaattaaaactcac

SEQ ID NO: 1622290 - DNA, 25 bp, Homo sapien
aatcactagagatgtcagtccatta

SEQ ID NO: 1622291 - DNA, 25 bp, Homo sapien
tatgaacgctctgaatttgagtacg

SEQ ID NO: 1622292 - DNA, 25 bp, Homo sapien
tacacttcttatttagtatgaacgc

SEQ ID NO: 1622293 - DNA, 25 bp, Homo sapien
taaggtgtgagcattagttcaaagc

SEQ ID NO: 1622294 - DNA, 25 bp, Homo sapien
gatcagtcgtttgacagtaattaca

SEQ ID NO: 1622295 - DNA, 25 bp, Homo sapien
gacttgtcaaaagcgttggcacatc

SEQ ID NO: 1622296 - DNA, 25 bp, Homo sapien
gtttgacttgtcaaaagcgttggca

SEQ ID NO: 1622297 - DNA, 25 bp, Homo sapien
ttgacttgtcaaaagcgttggcaca

SEQ ID NO: 1622298 - DNA, 25 bp, Homo sapien
aaagtttgacttgtcaaaagcgttg

SEQ ID NO: 1622299 - DNA, 25 bp, Homo sapien
ctgttaagaattcaggactttttat

SEQ ID NO: 1622300 - DNA, 25 bp, Homo sapien
taagaattcaggactttttatagac

SEQ ID NO: 1622301 - DNA, 25 bp, Homo sapien
tcaggactttttatagactttacca

SEQ ID NO: 1622302 - DNA, 25 bp, Homo sapien
atagactttaccacattattcacac

SEQ ID NO: 1622303 - DNA, 25 bp, Homo sapien
gctgaggaccagaaaaaggatttgc

SEQ ID NO: 1622304 - DNA, 25 bp, Homo sapien
tttcttatgtctggttagggctgag

SEQ ID NO: 1622305 - DNA, 25 bp, Homo sapien
ttcctgtttgtagggttgctgtcca

SEQ ID NO: 1622306 - DNA, 25 bp, Homo sapien
tagggctgaggaccagaaaaaggat

SEQ ID NO: 1622307 - DNA, 25 bp, Homo sapien
acaggtgtgatagtatgaattttct

SEQ ID NO: 1622308 - DNA, 25 bp, Homo sapien
tacaggtgtgatagtatgaattttc

SEQ ID NO: 1622309 - DNA, 25 bp, Homo sapien
tatcttatgtttagtaagagctgag

SEQ ID NO: 1622310 - DNA, 25 bp, Homo sapien
cttatgtttagtaagagctgaggac

SEQ ID NO: 1622311 - DNA, 25 bp, Homo sapien
tcttatgtttagtaagagctgagga

SEQ ID NO: 1622312 - DNA, 25 bp, Homo sapien
attatcttatgtttagtaagagctg

SEQ ID NO: 1622313 - DNA, 25 bp, Homo sapien
catttagggttgaggatgatataaa

SEQ ID NO: 1622314 - DNA, 25 bp, Homo sapien
gtaaggtgtgaaggctggctaaatg

SEQ ID NO: 1622315 - DNA, 25 bp, Homo sapien
tgttcagtaagagttgaagatttcc

SEQ ID NO: 1622316 - DNA, 25 bp, Homo sapien
agagttgaagatttcctaaaagctt

SEQ ID NO: 1622317 - DNA, 25 bp, Homo sapien
ccagtgtgcatcctcgtatgtctag

SEQ ID NO: 1622318 - DNA, 25 bp, Homo sapien
cacattcttcacatttgtaggtttt

SEQ ID NO: 1622319 - DNA, 25 bp, Homo sapien
cattcttcacatttgtaggttttct

SEQ ID NO: 1622320 - DNA, 25 bp, Homo sapien
ttcttcacatttgtaggttttctct

SEQ ID NO: 1622321 - DNA, 25 bp, Homo sapien
acattcttcacatttgtaggttttc

SEQ ID NO: 1622322 - DNA, 25 bp, Homo sapien
ttatgtgtcgtaagatttgaagatt

SEQ ID NO: 1622323 - DNA, 25 bp, Homo sapien
gttgaggaccagataaatgctttgt

SEQ ID NO: 1622324 - DNA, 25 bp, Homo sapien
tgtgtcgtaagatttgaagattgat

SEQ ID NO: 1622325 - DNA, 25 bp, Homo sapien
tcactcttggaaggtttctctttag

SEQ ID NO: 1622326 - DNA, 25 bp, Homo sapien
gtgcttaaaagctttgccacattct

SEQ ID NO: 1622327 - DNA, 25 bp, Homo sapien
ctgaggagtgcttaaaagctttgcc

SEQ ID NO: 1622328 - DNA, 25 bp, Homo sapien
gcttaaaagctttgccacattcttt

SEQ ID NO: 1622329 - DNA, 25 bp, Homo sapien
ttaaaagctttgccacattctttac

SEQ ID NO: 1622330 - DNA, 25 bp, Homo sapien
gaattgtcttatgcttagtaagggt

SEQ ID NO: 1622331 - DNA, 25 bp, Homo sapien
gttgaggaacggctaaaagctttgc

SEQ ID NO: 1622332 - DNA, 25 bp, Homo sapien
tgtcttatgcttagtaagggttgag

SEQ ID NO: 1622333 - DNA, 25 bp, Homo sapien
ttgaggaacggctaaaagctttgcc

SEQ ID NO: 1622334 - DNA, 25 bp, Homo sapien
agtgtgtatcctcttatgtctagtt

SEQ ID NO: 1622335 - DNA, 25 bp, Homo sapien
tgagagtcgcttaaaagttttgtca

SEQ ID NO: 1622336 - DNA, 25 bp, Homo sapien
ttgagagtcgcttaaaagttttgtc

SEQ ID NO: 1622337 - DNA, 25 bp, Homo sapien
agtgtgtatcctcttatgtctagtt

SEQ ID NO: 1622338 - DNA, 25 bp, Homo sapien
aagggttgagagtcgcttaaaagct

SEQ ID NO: 1622339 - DNA, 25 bp, Homo sapien
tagcaagggttgaagaacggctaaa

SEQ ID NO: 1622340 - DNA, 25 bp, Homo sapien
gttgagagtcgcttaaaagctttgt

SEQ ID NO: 1622341 - DNA, 25 bp, Homo sapien
tgtttagcaagggttgaagaacggc

SEQ ID NO: 1622342 - DNA, 25 bp, Homo sapien
agtgtgtatcctcttatgtctagtt

SEQ ID NO: 1622343 - DNA, 25 bp, Homo sapien
gtaatataaacgcatttatgttggg

SEQ ID NO: 1622344 - DNA, 25 bp, Homo sapien
taatataaacgcatttatgttgggt

SEQ ID NO: 1622345 - DNA, 25 bp, Homo sapien
tgtaatataaacgcatttatgttgg

SEQ ID NO: 1622346 - DNA, 25 bp, Homo sapien
attttttacatttgaagcatttctt

SEQ ID NO: 1622347 - DNA, 25 bp, Homo sapien
cttatcgtatgtctgtttgaattta

SEQ ID NO: 1622348 - DNA, 25 bp, Homo sapien
tagaagactttcaaatatttcccac

SEQ ID NO: 1622349 - DNA, 25 bp, Homo sapien
ggatgcaaaatgacttgacacattt

SEQ ID NO: 1622350 - DNA, 25 bp, Homo sapien
aaatactttgctctgggcagttgtg

SEQ ID NO: 1622351 - DNA, 25 bp, Homo sapien
ttgtgagacactggttaagtttatt

SEQ ID NO: 1622352 - DNA, 25 bp, Homo sapien
tgggcagttgtgagacactggttaa

SEQ ID NO: 1622353 - DNA, 25 bp, Homo sapien
tattttctcagtaatactttttgaa

SEQ ID NO: 1622354 - DNA, 25 bp, Homo sapien
gctcaacaaactaggatcacagaaa

SEQ ID NO: 1622355 - DNA, 25 bp, Homo sapien
gaagctcaacaaactaggatcacag

SEQ ID NO: 1622356 - DNA, 25 bp, Homo sapien
aagctcaacaaactaggatcacaga

SEQ ID NO: 1622357 - DNA, 25 bp, Homo sapien
agctcaacaaactaggatcacagaa

SEQ ID NO: 1622358 - DNA, 25 bp, Homo sapien
cccctcacacccacttaaatggtca

SEQ ID NO: 1622359 - DNA, 25 bp, Homo sapien
ctcacacccacttaaatggtcacta

SEQ ID NO: 1622360 - DNA, 25 bp, Homo sapien
tggagtgtgataggatcgtgccatt

SEQ ID NO: 1622361 - DNA, 25 bp, Homo sapien
cccacttaaatggtcactatccatt

SEQ ID NO: 1622362 - DNA, 25 bp, Homo sapien
gaaaacggcaatgtttgactaactg

SEQ ID NO: 1622363 - DNA, 25 bp, Homo sapien
taaatcccacactgacttaaagtat

SEQ ID NO: 1622364 - DNA, 25 bp, Homo sapien
cacactaatgtagaactgcaagaaa

SEQ ID NO: 1622365 - DNA, 25 bp, Homo sapien
aattactggtatctattgtatggca

SEQ ID NO: 1622366 - DNA, 25 bp, Homo sapien
gtgggttcatccaccatctcatgtt

SEQ ID NO: 1622367 - DNA, 25 bp, Homo sapien
catccaccatctcatgttgcttcat

SEQ ID NO: 1622368 - DNA, 25 bp, Homo sapien
ttccttgctccagataagtaatcag

SEQ ID NO: 1622369 - DNA, 25 bp, Homo sapien
tccttgctccagataagtaatcagg

SEQ ID NO: 1622370 - DNA, 25 bp, Homo sapien
ccagacattgccactcctccggaga

SEQ ID NO: 1622371 - DNA, 25 bp, Homo sapien
tgtccagacattgccactcctccgg

SEQ ID NO: 1622372 - DNA, 25 bp, Homo sapien
tctgctgtgcagtgtccagacattg

SEQ ID NO: 1622373 - DNA, 25 bp, Homo sapien
tgctgtgcagtgtccagacattgcc

SEQ ID NO: 1622374 - DNA, 25 bp, Homo sapien
gcattttgagaatttgcctttaata

SEQ ID NO: 1622375 - DNA, 25 bp, Homo sapien
gtctgcattttgagaatttgccttt

SEQ ID NO: 1622376 - DNA, 25 bp, Homo sapien
gatgagtttttctggactaattatg

SEQ ID NO: 1622377 - DNA, 25 bp, Homo sapien
tacaggtacagaagtaaaaatttgc

SEQ ID NO: 1622378 - DNA, 25 bp, Homo sapien
tagaatcctgagcttataaccactt

SEQ ID NO: 1622379 - DNA, 25 bp, Homo sapien
caaatccaaatagaacaggttcctg

SEQ ID NO: 1622380 - DNA, 25 bp, Homo sapien
caggttcctggaccaccctttagtg

SEQ ID NO: 1622381 - DNA, 25 bp, Homo sapien
gtcccctgtcagtgctgatgtcact

SEQ ID NO: 1622382 - DNA, 25 bp, Homo sapien
tgaagtcgagacctggaaactccgg

SEQ ID NO: 1622383 - DNA, 25 bp, Homo sapien
cagtgaagtcgagacctggaaactc

SEQ ID NO: 1622384 - DNA, 25 bp, Homo sapien
gcagtgaagtcgagacctggaaact

SEQ ID NO: 1622385 - DNA, 25 bp, Homo sapien
gagcagtgaagtcgagacctggaaa

SEQ ID NO: 1622386 - DNA, 25 bp, Homo sapien
taacatcattatgcggctgggccca

SEQ ID NO: 1622387 - DNA, 25 bp, Homo sapien
tgggccgggccaattctgaagaatc

SEQ ID NO: 1622388 - DNA, 25 bp, Homo sapien
cattgtggacggcaccaaagcagga

SEQ ID NO: 1622389 - DNA, 25 bp, Homo sapien
tccagtaagacaacacctaggtgct

SEQ ID NO: 1622390 - DNA, 25 bp, Homo sapien
gtcacaatgctttctatgagcaaag

SEQ ID NO: 1622391 - DNA, 25 bp, Homo sapien
cggaagactcatgccaccttgttgc

SEQ ID NO: 1622392 - DNA, 25 bp, Homo sapien
tctgttgtcagggtccatacggaag

SEQ ID NO: 1622393 - DNA, 25 bp, Homo sapien
gtgccagaagatgtgtcacaatctc

SEQ ID NO: 1622394 - DNA, 25 bp, Homo sapien
tgtgctgggtcttgttagtacactt

SEQ ID NO: 1622395 - DNA, 25 bp, Homo sapien
cctctatgtgtgagattcagaactc

SEQ ID NO: 1622396 - DNA, 25 bp, Homo sapien
caaatatgagagtcaagttttccac

SEQ ID NO: 1622397 - DNA, 25 bp, Homo sapien
catacaatggtaaaagtctcctctg

SEQ ID NO: 1622398 - DNA, 25 bp, Homo sapien
ccaggagtaggtacagtggagtgta

SEQ ID NO: 1622399 - DNA, 25 bp, Homo sapien
tcggaaggttctgcaaagacccagg

SEQ ID NO: 1622400 - DNA, 25 bp, Homo sapien
gagggatcagtcagaatggtaagaa

SEQ ID NO: 1622401 - DNA, 25 bp, Homo sapien
ctgaaagttcggaaggttctgcaaa

SEQ ID NO: 1622402 - DNA, 25 bp, Homo sapien
ttgatcatccacgggagtgacgatc

SEQ ID NO: 1622403 - DNA, 25 bp, Homo sapien
ctttgatcatccacgggagtgacga

SEQ ID NO: 1622404 - DNA, 25 bp, Homo sapien
tgatcatccacgggagtgacgatcc

SEQ ID NO: 1622405 - DNA, 25 bp, Homo sapien
tttgatcatccacgggagtgacgat

SEQ ID NO: 1622406 - DNA, 25 bp, Homo sapien
tttggcattgtgcctgcactgaaag

SEQ ID NO: 1622407 - DNA, 25 bp, Homo sapien
tatgtcacaaggtcactgtgggcac

SEQ ID NO: 1622408 - DNA, 25 bp, Homo sapien
gagaagtcgcaatctttcctgtgca

SEQ ID NO: 1622409 - DNA, 25 bp, Homo sapien
gttgcaggcaagaagtgtcacatct

SEQ ID NO: 1622410 - DNA, 25 bp, Homo sapien
gcatgcaatctcataggtagtgggc

SEQ ID NO: 1622411 - DNA, 25 bp, Homo sapien
agcacaatcccatctgtacgctggg

SEQ ID NO: 1622412 - DNA, 25 bp, Homo sapien
gtccaggcaggagagtcaaattact

SEQ ID NO: 1622413 - DNA, 25 bp, Homo sapien
tgggtccagcaatgaagcacaatcc

SEQ ID NO: 1622414 - DNA, 25 bp, Homo sapien
taaatgctgggtccagcaatgaagc

SEQ ID NO: 1622415 - DNA, 25 bp, Homo sapien
aagtgtcacaccacctgggtgctca

SEQ ID NO: 1622416 - DNA, 25 bp, Homo sapien
attagggatacgttacagtctcctc

SEQ ID NO: 1622417 - DNA, 25 bp, Homo sapien
gggacagggcagaagtgtcacacca

SEQ ID NO: 1622418 - DNA, 25 bp, Homo sapien
ggtgctcaattagggatacgttaca

SEQ ID NO: 1622419 - DNA, 25 bp, Homo sapien
ggttatatcacaatgtccgctgtag

SEQ ID NO: 1622420 - DNA, 25 bp, Homo sapien
tgtcacaatggcctacatgggtagg

SEQ ID NO: 1622421 - DNA, 25 bp, Homo sapien
ctgtaggcaggaccgaggcagtaga

SEQ ID NO: 1622422 - DNA, 25 bp, Homo sapien
acacaatgccccctgtgaaagagcc

SEQ ID NO: 1622423 - DNA, 25 bp, Homo sapien
tgaacaagaaaagaccggagggctg

SEQ ID NO: 1622424 - DNA, 25 bp, Homo sapien
ggcatcttgggttatccctgacggt

SEQ ID NO: 1622425 - DNA, 25 bp, Homo sapien
aatggtatgcgaggaaatttccaca

SEQ ID NO: 1622426 - DNA, 25 bp, Homo sapien
cagtgtatacgcgttcctttgtgaa

SEQ ID NO: 1622427 - DNA, 25 bp, Homo sapien
agggcaacagcctgtcaccggctgg

SEQ ID NO: 1622428 - DNA, 25 bp, Homo sapien
aagcgatcccaagctctggctgcag

SEQ ID NO: 1622429 - DNA, 25 bp, Homo sapien
tggaggacgttgaatagcagaaagc

SEQ ID NO: 1622430 - DNA, 25 bp, Homo sapien
ttagctgtctgtgcacgtcccagga

SEQ ID NO: 1622431 - DNA, 25 bp, Homo sapien
ccaggccctgagtaaccaacacaag

SEQ ID NO: 1622432 - DNA, 25 bp, Homo sapien
tggatctacgatccccactacctct

SEQ ID NO: 1622433 - DNA, 25 bp, Homo sapien
cctgagtaaccaacacaaggcggtg

SEQ ID NO: 1622434 - DNA, 25 bp, Homo sapien
gcttcccaccctggatctacgatcc

SEQ ID NO: 1622435 - DNA, 25 bp, Homo sapien
tttctggtctaccttagacatggca

SEQ ID NO: 1622436 - DNA, 25 bp, Homo sapien
cactcgcgtctcttaggaaactgcg

SEQ ID NO: 1622437 - DNA, 25 bp, Homo sapien
accggcccgcatcctagtgttgctt

SEQ ID NO: 1622438 - DNA, 25 bp, Homo sapien
cgaacaatttgcagctagttccggg

SEQ ID NO: 1622439 - DNA, 25 bp, Homo sapien
gatccgtcgatgtggagtgcacctt

SEQ ID NO: 1622440 - DNA, 25 bp, Homo sapien
tgtccacacatgtcgtcttgagaga

SEQ ID NO: 1622441 - DNA, 25 bp, Homo sapien
tatctgcccttttcatagactggtg

SEQ ID NO: 1622442 - DNA, 25 bp, Homo sapien
catagactggtgtttctgagccagg

SEQ ID NO: 1622443 - DNA, 25 bp, Homo sapien
gagtggatgttagccagctgccctg

SEQ ID NO: 1622444 - DNA, 25 bp, Homo sapien
ggtctgcaattctttttgacctttg

SEQ ID NO: 1622445 - DNA, 25 bp, Homo sapien
taaggtctgcaattctttttgacct

SEQ ID NO: 1622446 - DNA, 25 bp, Homo sapien
tttaaggtctgcaattctttttgac

SEQ ID NO: 1622447 - DNA, 25 bp, Homo sapien
cacattttaaggtctgcaattcttt

SEQ ID NO: 1622448 - DNA, 25 bp, Homo sapien
tctcgtctgtgttatctgcttcatt

SEQ ID NO: 1622449 - DNA, 25 bp, Homo sapien
tcgtctgtgttatctgcttcattca

SEQ ID NO: 1622450 - DNA, 25 bp, Homo sapien
ctctcgtctgtgttatctgcttcat

SEQ ID NO: 1622451 - DNA, 25 bp, Homo sapien
cgtctgtgttatctgcttcattcat

SEQ ID NO: 1622452 - DNA, 25 bp, Homo sapien
ggcaggagatgcgatcaggtttaga

SEQ ID NO: 1622453 - DNA, 25 bp, Homo sapien
aggagatgcgatcaggtttagagac

SEQ ID NO: 1622454 - DNA, 25 bp, Homo sapien
gcaggagatgcgatcaggtttagag

SEQ ID NO: 1622455 - DNA, 25 bp, Homo sapien
caggagatgcgatcaggtttagaga

SEQ ID NO: 1622456 - DNA, 25 bp, Homo sapien
ccagtatgaacaattgtatgtttcg

SEQ ID NO: 1622457 - DNA, 25 bp, Homo sapien
ttatgtgcactaagatttgagaatc

SEQ ID NO: 1622458 - DNA, 25 bp, Homo sapien
tttagttagatttgaggaccattta

SEQ ID NO: 1622459 - DNA, 25 bp, Homo sapien
tatgtttcgtaagatttgagtaacg

SEQ ID NO: 1622460 - DNA, 25 bp, Homo sapien
aaaaagcacactaactgcaagtaca

SEQ ID NO: 1622461 - DNA, 25 bp, Homo sapien
actaaaaagcacactaactgcaagt

SEQ ID NO: 1622462 - DNA, 25 bp, Homo sapien
aaaagcacactaactgcaagtacaa

SEQ ID NO: 1622463 - DNA, 25 bp, Homo sapien
taaaaagcacactaactgcaagtac

SEQ ID NO: 1622464 - DNA, 25 bp, Homo sapien
catgaacagtactttggctgtcact

SEQ ID NO: 1622465 - DNA, 25 bp, Homo sapien
tgccatgaacagtactttggctgtc

SEQ ID NO: 1622466 - DNA, 25 bp, Homo sapien
tatgccatgaacagtactttggctg

SEQ ID NO: 1622467 - DNA, 25 bp, Homo sapien
ccatgaacagtactttggctgtcac

SEQ ID NO: 1622468 - DNA, 25 bp, Homo sapien
tcttgactttggacctctcatccat

SEQ ID NO: 1622469 - DNA, 25 bp, Homo sapien
cttcttgactttggacctctcatcc

SEQ ID NO: 1622470 - DNA, 25 bp, Homo sapien
tcttcttgactttggacctctcatc

SEQ ID NO: 1622471 - DNA, 25 bp, Homo sapien
tttcttcttgactttggacctctca

SEQ ID NO: 1622472 - DNA, 25 bp, Homo sapien
gggtttcatccaccatctcatgtcg

SEQ ID NO: 1622473 - DNA, 25 bp, Homo sapien
tcatccaccatctcatgtcgcttca

SEQ ID NO: 1622474 - DNA, 25 bp, Homo sapien
tttcatccaccatctcatgtcgctt

SEQ ID NO: 1622475 - DNA, 25 bp, Homo sapien
atccaccatctcatgtcgcttcata

SEQ ID NO: 1622476 - DNA, 25 bp, Homo sapien
acatcatcttcctatataaattctt

SEQ ID NO: 1622477 - DNA, 25 bp, Homo sapien
catcttcctatataaattcttctgt

SEQ ID NO: 1622478 - DNA, 25 bp, Homo sapien
tcttcctatataaattcttctgtgc

SEQ ID NO: 1622479 - DNA, 25 bp, Homo sapien
caggaaggccaggtttatgtagttc

SEQ ID NO: 1622480 - DNA, 25 bp, Homo sapien
acaccctggatcacaagaccaacaa

SEQ ID NO: 1622481 - DNA, 25 bp, Homo sapien
ggatcacaagaccaacaaaaccact

SEQ ID NO: 1622482 - DNA, 25 bp, Homo sapien
ccatcagccacagacagagaagcca

SEQ ID NO: 1622483 - DNA, 25 bp, Homo sapien
cacagaagaacccagaaccactgca

SEQ ID NO: 1622484 - DNA, 25 bp, Homo sapien
gggaatgtcacacacgcaaatgatc

SEQ ID NO: 1622485 - DNA, 25 bp, Homo sapien
ccaattggtcacgttgtcagaggct

SEQ ID NO: 1622486 - DNA, 25 bp, Homo sapien
gcaggttgggccctagtcatgccgt

SEQ ID NO: 1622487 - DNA, 25 bp, Homo sapien
catacagatctgagcagcgacaggt

SEQ ID NO: 1622488 - DNA, 25 bp, Homo sapien
tttcattgcttcttacatggggcac

SEQ ID NO: 1622489 - DNA, 25 bp, Homo sapien
attgcttcttacatggggcaccacc

SEQ ID NO: 1622490 - DNA, 25 bp, Homo sapien
tgcatttcattgcttcttacatggg

SEQ ID NO: 1622491 - DNA, 25 bp, Homo sapien
tcattgcttcttacatggggcacca

SEQ ID NO: 1622492 - DNA, 25 bp, Homo sapien
cataatcaaagtgtgagacccagca

SEQ ID NO: 1622493 - DNA, 25 bp, Homo sapien
ttacaatgccctctgtagaaaggtc

SEQ ID NO: 1622494 - DNA, 25 bp, Homo sapien
gcctatgtaggtagggcacaagcat

SEQ ID NO: 1622495 - DNA, 25 bp, Homo sapien
cctggctgatggacttagcaatatg

SEQ ID NO: 1622496 - DNA, 25 bp, Homo sapien
ctaagagcagtcactcggggcgccg

SEQ ID NO: 1622497 - DNA, 25 bp, Homo sapien
taagagcagtcactcggggcgccgc

SEQ ID NO: 1622498 - DNA, 25 bp, Homo sapien
actcggggcgccgctcgaacagtca

SEQ ID NO: 1622499 - DNA, 25 bp, Homo sapien
aatgttctccaagttaatccatgta

SEQ ID NO: 1622500 - DNA, 25 bp, Homo sapien
taggcgaaagtatgaaattttaatc

SEQ ID NO: 1622501 - DNA, 25 bp, Homo sapien
gtgtatataccatactgtctttatt

SEQ ID NO: 1622502 - DNA, 25 bp, Homo sapien
agttttatagaatccatgtgtaggc

SEQ ID NO: 1622503 - DNA, 25 bp, Homo sapien
aatggcatactaactttattaaatg

SEQ ID NO: 1622504 - DNA, 25 bp, Homo sapien
tcttttgcctacaccagtgagtaaa

SEQ ID NO: 1622505 - DNA, 25 bp, Homo sapien
aactgtagaattggtttataataca

SEQ ID NO: 1622506 - DNA, 25 bp, Homo sapien
aagtataaacttagatgagaaataa

SEQ ID NO: 1622507 - DNA, 25 bp, Homo sapien
tattaatggctattttacactcttt

SEQ ID NO: 1622508 - DNA, 25 bp, Homo sapien
cattctgatattaagatgtcaacag

SEQ ID NO: 1622509 - DNA, 25 bp, Homo sapien
gtttgagccttaattaacagtattg

SEQ ID NO: 1622510 - DNA, 25 bp, Homo sapien
gagccttaattaacagtattgccaa

SEQ ID NO: 1622511 - DNA, 25 bp, Homo sapien
ttcctatgttccgtaagatttgagg

SEQ ID NO: 1622512 - DNA, 25 bp, Homo sapien
ttttcctatgttccgtaagatttga

SEQ ID NO: 1622513 - DNA, 25 bp, Homo sapien
cctatgttccgtaagatttgaggat

SEQ ID NO: 1622514 - DNA, 25 bp, Homo sapien
attttcctatgttccgtaagatttg

SEQ ID NO: 1622515 - DNA, 25 bp, Homo sapien
ttctctcgagcataatcttttttat

SEQ ID NO: 1622516 - DNA, 25 bp, Homo sapien
tctctcgagcataatcttttttata

SEQ ID NO: 1622517 - DNA, 25 bp, Homo sapien
tggtttctctcgagcataatctttt

SEQ ID NO: 1622518 - DNA, 25 bp, Homo sapien
tgtatggtttctctcgagcataatc

SEQ ID NO: 1622519 - DNA, 25 bp, Homo sapien
atttgcagaaattcaccttggtata

SEQ ID NO: 1622520 - DNA, 25 bp, Homo sapien
ctttgaagattggttaacagctttt

SEQ ID NO: 1622521 - DNA, 25 bp, Homo sapien
gtaagctttgaagattggttaacag

SEQ ID NO: 1622522 - DNA, 25 bp, Homo sapien
tgcagaaattcaccttggtataatt

SEQ ID NO: 1622523 - DNA, 25 bp, Homo sapien
aacctcccttgtgcaacttacattc

SEQ ID NO: 1622524 - DNA, 25 bp, Homo sapien
gcatagttggtaaacattggttaag

SEQ ID NO: 1622525 - DNA, 25 bp, Homo sapien
gtctatctgaatgtgaaaatttatt

SEQ ID NO: 1622526 - DNA, 25 bp, Homo sapien
gaaacattttgctctgcatagttgg

SEQ ID NO: 1622527 - DNA, 25 bp, Homo sapien
aaaatgctcaaatgtgagagcataa

SEQ ID NO: 1622528 - DNA, 25 bp, Homo sapien
atcagtgtcacctgttgtattcact

SEQ ID NO: 1622529 - DNA, 25 bp, Homo sapien
caaatgtgagagcataaaatactca

SEQ ID NO: 1622530 - DNA, 25 bp, Homo sapien
tcagtgtcacctgttgtattcactt

SEQ ID NO: 1622531 - DNA, 25 bp, Homo sapien
tgtctcttcacagtcaaaggctctt

SEQ ID NO: 1622532 - DNA, 25 bp, Homo sapien
tttttatataaattccgctgtgcag

SEQ ID NO: 1622533 - DNA, 25 bp, Homo sapien
gcagtgtccaggcattgccattctt

SEQ ID NO: 1622534 - DNA, 25 bp, Homo sapien
tagttctctaaaatcacatttttat

SEQ ID NO: 1622535 - DNA, 25 bp, Homo sapien
ctgtagttctctaaaatcacatttt

SEQ ID NO: 1622536 - DNA, 25 bp, Homo sapien
gtccttcataccagaagcgattcag

SEQ ID NO: 1622537 - DNA, 25 bp, Homo sapien
gctgctccacggagataaaagtaaa

SEQ ID NO: 1622538 - DNA, 25 bp, Homo sapien
tgctccacggagataaaagtaaaag

SEQ ID NO: 1622539 - DNA, 25 bp, Homo sapien
ccagaagcgattcaggaaccatgag

SEQ ID NO: 1622540 - DNA, 25 bp, Homo sapien
ggttctcagggtgagtagcgaccat

SEQ ID NO: 1622541 - DNA, 25 bp, Homo sapien
ctggttctcagggtgagtagcgacc

SEQ ID NO: 1622542 - DNA, 25 bp, Homo sapien
tggttctcagggtgagtagcgacca

SEQ ID NO: 1622543 - DNA, 25 bp, Homo sapien
ccctcacccttggaggagacctgaa

SEQ ID NO: 1622544 - DNA, 25 bp, Homo sapien
ctgaaatcacaggacaacgagcttg

SEQ ID NO: 1622545 - DNA, 25 bp, Homo sapien
tcagcatagaccctgattcagagca

SEQ ID NO: 1622546 - DNA, 25 bp, Homo sapien
acactgtctttactgcagatgccag

SEQ ID NO: 1622547 - DNA, 25 bp, Homo sapien
tatgttcaccctaagaatatgctaa

SEQ ID NO: 1622548 - DNA, 25 bp, Homo sapien
atacataggaccaggaaaaaaggtg

SEQ ID NO: 1622549 - DNA, 25 bp, Homo sapien
tcacctgttgtagagccagacatag

SEQ ID NO: 1622550 - DNA, 25 bp, Homo sapien
tttcccacagcaactaaactttgag

SEQ ID NO: 1622551 - DNA, 25 bp, Homo sapien
aatatttttgtggtgatccccataa

SEQ ID NO: 1622552 - DNA, 25 bp, Homo sapien
caatatttttgtggtgatccccata

SEQ ID NO: 1622553 - DNA, 25 bp, Homo sapien
atatttttgtggtgatccccataat

SEQ ID NO: 1622554 - DNA, 25 bp, Homo sapien
gacacagagcaatgaaagcgagacc

SEQ ID NO: 1622555 - DNA, 25 bp, Homo sapien
ggacacagagcaatgaaagcgagac

SEQ ID NO: 1622556 - DNA, 25 bp, Homo sapien
cacagagcaatgaaagcgagacctg

SEQ ID NO: 1622557 - DNA, 25 bp, Homo sapien
acagagcaatgaaagcgagacctgg

SEQ ID NO: 1622558 - DNA, 25 bp, Homo sapien
tatatcaaggcagccagcgtgcaga

SEQ ID NO: 1622559 - DNA, 25 bp, Homo sapien
tcatacagagcaccaagaaaagcga

SEQ ID NO: 1622560 - DNA, 25 bp, Homo sapien
caggatacccgttcaggattctcag

SEQ ID NO: 1622561 - DNA, 25 bp, Homo sapien
tatagacttgccctagttaaccagg

SEQ ID NO: 1622562 - DNA, 25 bp, Homo sapien
tggctgacaatggttttatataagt

SEQ ID NO: 1622563 - DNA, 25 bp, Homo sapien
tgacaatggttttatataagttagg

SEQ ID NO: 1622564 - DNA, 25 bp, Homo sapien
tttatataagttagggaggaatcac

SEQ ID NO: 1622565 - DNA, 25 bp, Homo sapien
ttttatataagttagggaggaatca

SEQ ID NO: 1622566 - DNA, 25 bp, Homo sapien
gccatctgtcttaagggagtgttcc

SEQ ID NO: 1622567 - DNA, 25 bp, Homo sapien
ccgagctggtctcagtagccagtga

SEQ ID NO: 1622568 - DNA, 25 bp, Homo sapien
caattaattcgtcctatcccttcgt

SEQ ID NO: 1622569 - DNA, 25 bp, Homo sapien
gctgggagacccgattcctcacttc

SEQ ID NO: 1622570 - DNA, 25 bp, Homo sapien
ctagtactcacctaaataaatgggc

SEQ ID NO: 1622571 - DNA, 25 bp, Homo sapien
tctaaaagctgccatgatcttcgaa

SEQ ID NO: 1622572 - DNA, 25 bp, Homo sapien
aaaagcttttgtactgcatggtgcc

SEQ ID NO: 1622573 - DNA, 25 bp, Homo sapien
aaagtaggcttatacagcgttctcc

SEQ ID NO: 1622574 - DNA, 25 bp, Homo sapien
ctgacttatttgcaatttaaagcca

SEQ ID NO: 1622575 - DNA, 25 bp, Homo sapien
ttctctgacttatttgcaatttaaa

SEQ ID NO: 1622576 - DNA, 25 bp, Homo sapien
tattctctgacttatttgcaattta

SEQ ID NO: 1622577 - DNA, 25 bp, Homo sapien
taatattctctgacttatttgcaat

SEQ ID NO: 1622578 - DNA, 25 bp, Homo sapien
tagattttagtatgaaccctctagt

SEQ ID NO: 1622579 - DNA, 25 bp, Homo sapien
cttatgttcataatgtgtgtcttca

SEQ ID NO: 1622580 - DNA, 25 bp, Homo sapien
ggaatgaagagcataacttgagtta

SEQ ID NO: 1622581 - DNA, 25 bp, Homo sapien
ggtaccacaaccctccttatgttca

SEQ ID NO: 1622582 - DNA, 25 bp, Homo sapien
tttctagtacaaatgctttcctgtg

SEQ ID NO: 1622583 - DNA, 25 bp, Homo sapien
gctttttcacattctgtatatttga

SEQ ID NO: 1622584 - DNA, 25 bp, Homo sapien
gatgtgaacagatattaatggcttt

SEQ ID NO: 1622585 - DNA, 25 bp, Homo sapien
tatcttatgcacaatcaagtgtgac

SEQ ID NO: 1622586 - DNA, 25 bp, Homo sapien
cagcataatttcttttatgtttaga

SEQ ID NO: 1622587 - DNA, 25 bp, Homo sapien
agtgttttcaaaatcactgttacat

SEQ ID NO: 1622588 - DNA, 25 bp, Homo sapien
actttgaagtgttttcaaaatcact

SEQ ID NO: 1622589 - DNA, 25 bp, Homo sapien
gcataatttcttttatgtttagaaa

SEQ ID NO: 1622590 - DNA, 25 bp, Homo sapien
ggtgtgtcttaccttatgtccattt

SEQ ID NO: 1622591 - DNA, 25 bp, Homo sapien
tgtaatgtgtgacgacaggttaaag

SEQ ID NO: 1622592 - DNA, 25 bp, Homo sapien
tatgtgttgtaatgtgtgacgacag

SEQ ID NO: 1622593 - DNA, 25 bp, Homo sapien
ccttatgtgtagcaagatgtgagga

SEQ ID NO: 1622594 - DNA, 25 bp, Homo sapien
gaacgtgaacattcaggttgtacca

SEQ ID NO: 1622595 - DNA, 25 bp, Homo sapien
tgcatgccagcatcgacttctggtg

SEQ ID NO: 1622596 - DNA, 25 bp, Homo sapien
ggttgtaccatagataaactaggct

SEQ ID NO: 1622597 - DNA, 25 bp, Homo sapien
tctgcatccaacattgaggactgcg

SEQ ID NO: 1622598 - DNA, 25 bp, Homo sapien
ctctttctagtccaaggctcttttt

SEQ ID NO: 1622599 - DNA, 25 bp, Homo sapien
tctctttctagtccaaggctctttt

SEQ ID NO: 1622600 - DNA, 25 bp, Homo sapien
gtctctttctagtccaaggctcttt

SEQ ID NO: 1622601 - DNA, 25 bp, Homo sapien
ctttagggtataataggaattgtat

SEQ ID NO: 1622602 - DNA, 25 bp, Homo sapien
taggaattgtatattgaagttatcc

SEQ ID NO: 1622603 - DNA, 25 bp, Homo sapien
ggaattgtatattgaagttatcctc

SEQ ID NO: 1622604 - DNA, 25 bp, Homo sapien
aattgtatattgaagttatcctcac

SEQ ID NO: 1622605 - DNA, 25 bp, Homo sapien
tataaattctgctgtatagtgtcca

SEQ ID NO: 1622606 - DNA, 25 bp, Homo sapien
ccacatccctaaatttcaatggttc

SEQ ID NO: 1622607 - DNA, 25 bp, Homo sapien
gccacatccctaaatttcaatggtt

SEQ ID NO: 1622608 - DNA, 25 bp, Homo sapien
ctgctgtatagtgtccaggcattgc

SEQ ID NO: 1622609 - DNA, 25 bp, Homo sapien
gctatggatcgccaatacctgcagg

SEQ ID NO: 1622610 - DNA, 25 bp, Homo sapien
cgtcttagctatggatcgccaatac

SEQ ID NO: 1622611 - DNA, 25 bp, Homo sapien
ggcgtcttagctatggatcgccaat

SEQ ID NO: 1622612 - DNA, 25 bp, Homo sapien
ctggcgtcttagctatggatcgcca

SEQ ID NO: 1622613 - DNA, 25 bp, Homo sapien
atgtggtcagcagtgtggtacggca

SEQ ID NO: 1622614 - DNA, 25 bp, Homo sapien
gatgtggtcagcagtgtggtacggc

SEQ ID NO: 1622615 - DNA, 25 bp, Homo sapien
tgtggtcagcagtgtggtacggcat

SEQ ID NO: 1622616 - DNA, 25 bp, Homo sapien
agcgcctgctatcaaggccggctaa

SEQ ID NO: 1622617 - DNA, 25 bp, Homo sapien
aagcgcctgctatcaaggccggcta

SEQ ID NO: 1622618 - DNA, 25 bp, Homo sapien
gcgcctgctatcaaggccggctaat

SEQ ID NO: 1622619 - DNA, 25 bp, Homo sapien
cccgacctcttagctcattttcaat

SEQ ID NO: 1622620 - DNA, 25 bp, Homo sapien
tgggcccgacctcttagctcatttt

SEQ ID NO: 1622621 - DNA, 25 bp, Homo sapien
ggcccgacctcttagctcattttca

SEQ ID NO: 1622622 - DNA, 25 bp, Homo sapien
ctgggcccgacctcttagctcattt

SEQ ID NO: 1622623 - DNA, 25 bp, Homo sapien
gatgagaactaacccctgaagaggg

SEQ ID NO: 1622624 - DNA, 25 bp, Homo sapien
gattttattaaggtgcaccctggca

SEQ ID NO: 1622625 - DNA, 25 bp, Homo sapien
tgcgtacaagttcctcaatgggtcc

SEQ ID NO: 1622626 - DNA, 25 bp, Homo sapien
catctagtggcgcaaagctcgtggt

SEQ ID NO: 1622627 - DNA, 25 bp, Homo sapien
ggcacctgaggtcatgggtctctcc

SEQ ID NO: 1622628 - DNA, 25 bp, Homo sapien
attgggttgtgggatagctgatccc

SEQ ID NO: 1622629 - DNA, 25 bp, Homo sapien
agctgatcccttcttcaggtttaag

SEQ ID NO: 1622630 - DNA, 25 bp, Homo sapien
ttcaggtttaagttctcctgagggc

SEQ ID NO: 1622631 - DNA, 25 bp, Homo sapien
taaactcttagtctctagtgttctg

SEQ ID NO: 1622632 - DNA, 25 bp, Homo sapien
ttgtagaactgtgctagtggtgatg

SEQ ID NO: 1622633 - DNA, 25 bp, Homo sapien
tcctaaatctagttgatggttatct

SEQ ID NO: 1622634 - DNA, 25 bp, Homo sapien
tgcctggtcaccatgtacctttttt

SEQ ID NO: 1622635 - DNA, 25 bp, Homo sapien
taacaatgctgcagcttttccgcgc

SEQ ID NO: 1622636 - DNA, 25 bp, Homo sapien
tacagtaacaatgctgcagcttttc

SEQ ID NO: 1622637 - DNA, 25 bp, Homo sapien
aatgctgcagcttttccgcgctacc

SEQ ID NO: 1622638 - DNA, 25 bp, Homo sapien
tatttgcttacagtaacaatgctgc

SEQ ID NO: 1622639 - DNA, 25 bp, Homo sapien
tctgtacttctacagagatcctgaa

SEQ ID NO: 1622640 - DNA, 25 bp, Homo sapien
tgatctgtacttctacagagatcct

SEQ ID NO: 1622641 - DNA, 25 bp, Homo sapien
tgtacttctacagagatcctgaaga

SEQ ID NO: 1622642 - DNA, 25 bp, Homo sapien
gcctgatctgtacttctacagagat

SEQ ID NO: 1622643 - DNA, 25 bp, Homo sapien
ttgaggagtgttctccataactctg

SEQ ID NO: 1622644 - DNA, 25 bp, Homo sapien
tatactgcctttaagtagtctgttc

SEQ ID NO: 1622645 - DNA, 25 bp, Homo sapien
ctttcaagggaaatgttgtatgagc

SEQ ID NO: 1622646 - DNA, 25 bp, Homo sapien
tgtcctaagatgtggtctttcaagg

SEQ ID NO: 1622647 - DNA, 25 bp, Homo sapien
cagatttcctaatataccctaaggc

SEQ ID NO: 1622648 - DNA, 25 bp, Homo sapien
tgttttatcttaacaggaaccatcc

SEQ ID NO: 1622649 - DNA, 25 bp, Homo sapien
caacagaaacctggtctctcagaat

SEQ ID NO: 1622650 - DNA, 25 bp, Homo sapien
tgattttgggagtttttgctccaca

SEQ ID NO: 1622651 - DNA, 25 bp, Homo sapien
gggattgatttcctgcaactaaatg

SEQ ID NO: 1622652 - DNA, 25 bp, Homo sapien
ttagattctcataaatagtgtacag

SEQ ID NO: 1622653 - DNA, 25 bp, Homo sapien
taaatagtgtacagcctacatccct

SEQ ID NO: 1622654 - DNA, 25 bp, Homo sapien
gaatcagtgagagcactgggattga

SEQ ID NO: 1622655 - DNA, 25 bp, Homo sapien
gatgagaggtccaacgtcaagaaga

SEQ ID NO: 1622656 - DNA, 25 bp, Homo sapien
gaatacaacagatgacctggatgag

SEQ ID NO: 1622657 - DNA, 25 bp, Homo sapien
gtaccaggcagtgaaattaagaacc

SEQ ID NO: 1622658 - DNA, 25 bp, Homo sapien
caatttttgcttcagtagtaccagg

SEQ ID NO: 1622659 - DNA, 25 bp, Homo sapien
tatttatggttgagacagttttgcc

SEQ ID NO: 1622660 - DNA, 25 bp, Homo sapien
tgagacagttttgccgcgttgccaa

SEQ ID NO: 1622661 - DNA, 25 bp, Homo sapien
ttctcaaactcagaagattctctca

SEQ ID NO: 1622662 - DNA, 25 bp, Homo sapien
gatcagcccatcttaacctctcaaa

SEQ ID NO: 1622663 - DNA, 25 bp, Homo sapien
tcatagttggttgagtggcagcaca

SEQ ID NO: 1622664 - DNA, 25 bp, Homo sapien
cggattatccaatgcaaagtaagct

SEQ ID NO: 1622665 - DNA, 25 bp, Homo sapien
caagaaacatctacaaggtggctat

SEQ ID NO: 1622666 - DNA, 25 bp, Homo sapien
caaaccacattcttaggaggctgtg

SEQ ID NO: 1622667 - DNA, 25 bp, Homo sapien
tcatcctgaaatcccatactctgac

SEQ ID NO: 1622668 - DNA, 25 bp, Homo sapien
aacctcagtaagattactggtaaca

SEQ ID NO: 1622669 - DNA, 25 bp, Homo sapien
acttatgtcgccagtcttttctcag

SEQ ID NO: 1622670 - DNA, 25 bp, Homo sapien
caaacagaggtccttgatgcggcac

SEQ ID NO: 1622671 - DNA, 25 bp, Homo sapien
gatggaactattggatggagtccca

SEQ ID NO: 1622672 - DNA, 25 bp, Homo sapien
gtcaggtgccttccaagttatcact

SEQ ID NO: 1622673 - DNA, 25 bp, Homo sapien
cactgtcagttttggtcgattctcc

SEQ ID NO: 1622674 - DNA, 25 bp, Homo sapien
gggctcccatagatgcaagccagat

SEQ ID NO: 1622675 - DNA, 25 bp, Homo sapien
caagccagatagttccctgttggtc

SEQ ID NO: 1622676 - DNA, 25 bp, Homo sapien
ttttcagtagtctctaactcatatt

SEQ ID NO: 1622677 - DNA, 25 bp, Homo sapien
cattttatggggatccactctagtc

SEQ ID NO: 1622678 - DNA, 25 bp, Homo sapien
tctctaactcatattatggcttcac

SEQ ID NO: 1622679 - DNA, 25 bp, Homo sapien
tcactcattttatggggatccactc

SEQ ID NO: 1622680 - DNA, 25 bp, Homo sapien
gatgcaggtcgtgtgaagggtggag

SEQ ID NO: 1622681 - DNA, 25 bp, Homo sapien
acagatgcaggtcgtgtgaagggtg

SEQ ID NO: 1622682 - DNA, 25 bp, Homo sapien
gcaggtcgtgtgaagggtggaggaa

SEQ ID NO: 1622683 - DNA, 25 bp, Homo sapien
caacagatgcaggtcgtgtgaaggg

SEQ ID NO: 1622684 - DNA, 25 bp, Homo sapien
cagactctatggtgcactgaataac

SEQ ID NO: 1622685 - DNA, 25 bp, Homo sapien
cacagaacatgccagactccaggtg

SEQ ID NO: 1622686 - DNA, 25 bp, Homo sapien
cagactccaggtgatcaaaacggta

SEQ ID NO: 1622687 - DNA, 25 bp, Homo sapien
tgctctttggacaactcctgatcca

SEQ ID NO: 1622688 - DNA, 25 bp, Homo sapien
ccgacccctggtattatagacgtcg

SEQ ID NO: 1622689 - DNA, 25 bp, Homo sapien
cctggtattatagacgtcggtgctg

SEQ ID NO: 1622690 - DNA, 25 bp, Homo sapien
cccctggtattatagacgtcggtgc

SEQ ID NO: 1622691 - DNA, 25 bp, Homo sapien
tattatagacgtcggtgctgtcctc

SEQ ID NO: 1622692 - DNA, 25 bp, Homo sapien
gagtcaccacttgatcacgtccgag

SEQ ID NO: 1622693 - DNA, 25 bp, Homo sapien
catgcataacttcaaggcaatcacg

SEQ ID NO: 1622694 - DNA, 25 bp, Homo sapien
gatcatgtccgagtcaccacttgat

SEQ ID NO: 1622695 - DNA, 25 bp, Homo sapien
gagtcaccacttgatcatgtccgag

SEQ ID NO: 1622696 - DNA, 25 bp, Homo sapien
gaaagcttaacacaccagggacttg

SEQ ID NO: 1622697 - DNA, 25 bp, Homo sapien
tgtaacatatccagaagacagccat

SEQ ID NO: 1622698 - DNA, 25 bp, Homo sapien
agacagccatatgtaagacatgccc

SEQ ID NO: 1622699 - DNA, 25 bp, Homo sapien
tactccgaagcatggaaagcttaac

SEQ ID NO: 1622700 - DNA, 25 bp, Homo sapien
cagtgtcttttcttcttccaaacac

SEQ ID NO: 1622701 - DNA, 25 bp, Homo sapien
agtgtcttttcttcttccaaacaca

SEQ ID NO: 1622702 - DNA, 25 bp, Homo sapien
tcagtgtcttttcttcttccaaaca

SEQ ID NO: 1622703 - DNA, 25 bp, Homo sapien
gtgtcttttcttcttccaaacacac

SEQ ID NO: 1622704 - DNA, 25 bp, Homo sapien
ttctcccacttccctggacacatcc

SEQ ID NO: 1622705 - DNA, 25 bp, Homo sapien
ctcccacttccctggacacatccac

SEQ ID NO: 1622706 - DNA, 25 bp, Homo sapien
tctcccacttccctggacacatcca

SEQ ID NO: 1622707 - DNA, 25 bp, Homo sapien
ttccttgacctgcatcccgacatcc

SEQ ID NO: 1622708 - DNA, 25 bp, Homo sapien
ttcaacctcagcttctgtacctgct

SEQ ID NO: 1622709 - DNA, 25 bp, Homo sapien
cttcagatattagctcaaatgtcac

SEQ ID NO: 1622710 - DNA, 25 bp, Homo sapien
cttcctgtcacccattcttcagata

SEQ ID NO: 1622711 - DNA, 25 bp, Homo sapien
tgcttggcgccaaaagtgagcccct

SEQ ID NO: 1622712 - DNA, 25 bp, Homo sapien
gtagtggaatttcaccggcagccca

SEQ ID NO: 1622713 - DNA, 25 bp, Homo sapien
taagggtgaatccactacagggtgc

SEQ ID NO: 1622714 - DNA, 25 bp, Homo sapien
cgatgtcgctatgaactcttggcca

SEQ ID NO: 1622715 - DNA, 25 bp, Homo sapien
tgacccatcttcaactggaaccctt

SEQ ID NO: 1622716 - DNA, 25 bp, Homo sapien
gggaccgagtgacccatcttcaact

SEQ ID NO: 1622717 - DNA, 25 bp, Homo sapien
gaccgagtgacccatcttcaactgg

SEQ ID NO: 1622718 - DNA, 25 bp, Homo sapien
gagtgacccatcttcaactggaacc

SEQ ID NO: 1622719 - DNA, 25 bp, Homo sapien
aaggctcattgcagcggtcctccca

SEQ ID NO: 1622720 - DNA, 25 bp, Homo sapien
ggcaccctaacatggcatttggttc

SEQ ID NO: 1622721 - DNA, 25 bp, Homo sapien
ggtctaatgggcatcagcatcaggc

SEQ ID NO: 1622722 - DNA, 25 bp, Homo sapien
ccatccatttttcagggcgagttga

SEQ ID NO: 1622723 - DNA, 25 bp, Homo sapien
aaaagttgcccgctaggcactcgca

SEQ ID NO: 1622724 - DNA, 25 bp, Homo sapien
gcccgctaggcactcgcatttcata

SEQ ID NO: 1622725 - DNA, 25 bp, Homo sapien
gacccctaatcattcgctttaccaa

SEQ ID NO: 1622726 - DNA, 25 bp, Homo sapien
catgccatcgagctgggcttctaac

SEQ ID NO: 1622727 - DNA, 25 bp, Homo sapien
tactgctgagggactgtaacactcg

SEQ ID NO: 1622728 - DNA, 25 bp, Homo sapien
gagagcgcccgttatccttaggaaa

SEQ ID NO: 1622729 - DNA, 25 bp, Homo sapien
cacacgtgttagaccctttggacca

SEQ ID NO: 1622730 - DNA, 25 bp, Homo sapien
aaatgagtgcatggccgaagagtcc

SEQ ID NO: 1622731 - DNA, 25 bp, Homo sapien
acaagtggcgttggggagtgagtct

SEQ ID NO: 1622732 - DNA, 25 bp, Homo sapien
cttgggcccccacaagtggcgttgg

SEQ ID NO: 1622733 - DNA, 25 bp, Homo sapien
tgagtcttccatacgccacatttcc

SEQ ID NO: 1622734 - DNA, 25 bp, Homo sapien
gtgagtcttccatacgccacatttc

SEQ ID NO: 1622735 - DNA, 25 bp, Homo sapien
ttagttccattttctccgctgacta

SEQ ID NO: 1622736 - DNA, 25 bp, Homo sapien
ggcactgggatcactgttcacctaa

SEQ ID NO: 1622737 - DNA, 25 bp, Homo sapien
ggttgccacctctagcctgaggtcg

SEQ ID NO: 1622738 - DNA, 25 bp, Homo sapien
tactaagggcatcctggttagttcc

SEQ ID NO: 1622739 - DNA, 25 bp, Homo sapien
ggcggcacagccatgaaccagaggc

SEQ ID NO: 1622740 - DNA, 25 bp, Homo sapien
ccaatgcggaagctcaagggggcca

SEQ ID NO: 1622741 - DNA, 25 bp, Homo sapien
caagcacacaatggcggatgctgcc

SEQ ID NO: 1622742 - DNA, 25 bp, Homo sapien
tccagaggactgcgactgaggatgt

SEQ ID NO: 1622743 - DNA, 25 bp, Homo sapien
agaggaggagggtgcagggaggagc

SEQ ID NO: 1622744 - DNA, 25 bp, Homo sapien
ggtgggagaggaggagggtgcaggg

SEQ ID NO: 1622745 - DNA, 25 bp, Homo sapien
aggagggtgcagggaggagcagcat

SEQ ID NO: 1622746 - DNA, 25 bp, Homo sapien
aggaggagggtgcagggaggagcag

SEQ ID NO: 1622747 - DNA, 25 bp, Homo sapien
gccctgggaggaacacggagtcaca

SEQ ID NO: 1622748 - DNA, 25 bp, Homo sapien
caagtgatgactcagacaggtgtag

SEQ ID NO: 1622749 - DNA, 25 bp, Homo sapien
gaacacggagtcacaagtgcatttg

SEQ ID NO: 1622750 - DNA, 25 bp, Homo sapien
tgatgactcagacaggtgtagccct

SEQ ID NO: 1622751 - DNA, 25 bp, Homo sapien
cttcatcaatgcaggagtggagtga

SEQ ID NO: 1622752 - DNA, 25 bp, Homo sapien
catcaatgcaggagtggagtgatcc

SEQ ID NO: 1622753 - DNA, 25 bp, Homo sapien
caatgcaggagtggagtgatccacc

SEQ ID NO: 1622754 - DNA, 25 bp, Homo sapien
tcaatgcaggagtggagtgatccac

SEQ ID NO: 1622755 - DNA, 25 bp, Homo sapien
cctgctctttagcaccgccttgtgt

SEQ ID NO: 1622756 - DNA, 25 bp, Homo sapien
tcacctgctctttagcaccgccttg

SEQ ID NO: 1622757 - DNA, 25 bp, Homo sapien
ccgccttgtgttggttactcagggc

SEQ ID NO: 1622758 - DNA, 25 bp, Homo sapien
accgccttgtgttggttactcaggg

SEQ ID NO: 1622759 - DNA, 25 bp, Homo sapien
catttctttctttattctacatttt

SEQ ID NO: 1622760 - DNA, 25 bp, Homo sapien
cttgcttgcttgcttctttccttca

SEQ ID NO: 1622761 - DNA, 25 bp, Homo sapien
ccttcatttctttctttattctaca

SEQ ID NO: 1622762 - DNA, 25 bp, Homo sapien
ttgcttgcttgcttctttccttcat

SEQ ID NO: 1622763 - DNA, 25 bp, Homo sapien
tcttctgtttcagacaccctgcttc

SEQ ID NO: 1622764 - DNA, 25 bp, Homo sapien
tccacagtacattgagttttgttgg

SEQ ID NO: 1622765 - DNA, 25 bp, Homo sapien
tcctgtacactgcagttgctgttgt

SEQ ID NO: 1622766 - DNA, 25 bp, Homo sapien
acaccctgcttccttagtaactggg

SEQ ID NO: 1622767 - DNA, 25 bp, Homo sapien
gctgggccccacacataggttatgt

SEQ ID NO: 1622768 - DNA, 25 bp, Homo sapien
tgtgacatatcgttggacccagaat

SEQ ID NO: 1622769 - DNA, 25 bp, Homo sapien
tggcccctactcacagaaaggattg

SEQ ID NO: 1622770 - DNA, 25 bp, Homo sapien
tgttgggtcccaaacctaggtgatg

SEQ ID NO: 1622771 - DNA, 25 bp, Homo sapien
tattgctaggcccactacctatggg

SEQ ID NO: 1622772 - DNA, 25 bp, Homo sapien
tatgggattgcatgctcctgcctgg

SEQ ID NO: 1622773 - DNA, 25 bp, Homo sapien
tctgcgtccatgacctaaaaggtga

SEQ ID NO: 1622774 - DNA, 25 bp, Homo sapien
gaattgtaacatatccctggctgag

SEQ ID NO: 1622775 - DNA, 25 bp, Homo sapien
tctgggtccaacaacattatgatga

SEQ ID NO: 1622776 - DNA, 25 bp, Homo sapien
gacttttctgttccgcttgagcact

SEQ ID NO: 1622777 - DNA, 25 bp, Homo sapien
cacctgggagatgaaaccctctact

SEQ ID NO: 1622778 - DNA, 25 bp, Homo sapien
aaaatttgtggcagatcactggacc

SEQ ID NO: 1622779 - DNA, 25 bp, Homo sapien
gactctcatacatggatttgggcta

SEQ ID NO: 1622780 - DNA, 25 bp, Homo sapien
tacagagagttttataatgaggccc

SEQ ID NO: 1622781 - DNA, 25 bp, Homo sapien
gctatatgtgggttgatgactctca

SEQ ID NO: 1622782 - DNA, 25 bp, Homo sapien
ccaagattcaacataccgctgaggc

SEQ ID NO: 1622783 - DNA, 25 bp, Homo sapien
tctggggtgaaaactcatcgtcagg

SEQ ID NO: 1622784 - DNA, 25 bp, Homo sapien
ggtgaaaactcatcgtcagggctgt

SEQ ID NO: 1622785 - DNA, 25 bp, Homo sapien
gggtgaaaactcatcgtcagggctg

SEQ ID NO: 1622786 - DNA, 25 bp, Homo sapien
tggggtgaaaactcatcgtcagggc

SEQ ID NO: 1622787 - DNA, 25 bp, Homo sapien
ctaatgatgggtaaaacagccaggc

SEQ ID NO: 1622788 - DNA, 25 bp, Homo sapien
tgaagagagccatcagcacgtgaac

SEQ ID NO: 1622789 - DNA, 25 bp, Homo sapien
gccttgggcataaatcaggttgcac

SEQ ID NO: 1622790 - DNA, 25 bp, Homo sapien
taaacctgggtgtccgagtcactgt

SEQ ID NO: 1622791 - DNA, 25 bp, Homo sapien
cattataatgggtctgtttcacccc

SEQ ID NO: 1622792 - DNA, 25 bp, Homo sapien
tcacccccaaactgtatggtcacgg

SEQ ID NO: 1622793 - DNA, 25 bp, Homo sapien
ggactgcttactctgttttgaccca

SEQ ID NO: 1622794 - DNA, 25 bp, Homo sapien
gacaagcccatagatgccattttac

SEQ ID NO: 1622795 - DNA, 25 bp, Homo sapien
tctttctcagagtgagtttaggaag

SEQ ID NO: 1622796 - DNA, 25 bp, Homo sapien
tgagtttaggaagtttctcggacat

SEQ ID NO: 1622797 - DNA, 25 bp, Homo sapien
gagtgagtttaggaagtttctcgga

SEQ ID NO: 1622798 - DNA, 25 bp, Homo sapien
ttctcagagtgagtttaggaagttt

SEQ ID NO: 1622799 - DNA, 25 bp, Homo sapien
ggttatagtttacttgtatatattc

SEQ ID NO: 1622800 - DNA, 25 bp, Homo sapien
cttgtatatattctttcttagctaa

SEQ ID NO: 1622801 - DNA, 25 bp, Homo sapien
tcttgttgctgagtctggagtacag

SEQ ID NO: 1622802 - DNA, 25 bp, Homo sapien
caaatatgacccaaatttggttata

SEQ ID NO: 1622803 - DNA, 25 bp, Homo sapien
cattgcgtgcaagcttgggtgacag

SEQ ID NO: 1622804 - DNA, 25 bp, Homo sapien
aattgtgccattgcgtgcaagcttg

SEQ ID NO: 1622805 - DNA, 25 bp, Homo sapien
tgtgccattgcgtgcaagcttgggt

SEQ ID NO: 1622806 - DNA, 25 bp, Homo sapien
ccataattgtgccattgcgtgcaag

SEQ ID NO: 1622807 - DNA, 25 bp, Homo sapien
ggttttaatcgatcttcaaatctta

SEQ ID NO: 1622808 - DNA, 25 bp, Homo sapien
acaaatgcttagaatgtggcaaagc

SEQ ID NO: 1622809 - DNA, 25 bp, Homo sapien
gcaaaggttttaatcgatcttcaaa

SEQ ID NO: 1622810 - DNA, 25 bp, Homo sapien
agagaaacgctacaaatgcttagaa

SEQ ID NO: 1622811 - DNA, 25 bp, Homo sapien
gtcttcaatccttactaaccataag

SEQ ID NO: 1622812 - DNA, 25 bp, Homo sapien
tcttcaatccttactaaccataaga

SEQ ID NO: 1622813 - DNA, 25 bp, Homo sapien
cagtcttcaatccttactaaccata

SEQ ID NO: 1622814 - DNA, 25 bp, Homo sapien
agtcttcaatccttactaaccataa

SEQ ID NO: 1622815 - DNA, 25 bp, Homo sapien
tatgccactaactttaacctattcc

SEQ ID NO: 1622816 - DNA, 25 bp, Homo sapien
cattgctggtgtattcatatgtgaa

SEQ ID NO: 1622817 - DNA, 25 bp, Homo sapien
taagatgcgtgaggaaaatttaggt

SEQ ID NO: 1622818 - DNA, 25 bp, Homo sapien
tcccttactcaaggatgtaggtaaa

SEQ ID NO: 1622819 - DNA, 25 bp, Homo sapien
tatatgtatgccatatatggtatat

SEQ ID NO: 1622820 - DNA, 25 bp, Homo sapien
ttgatgcaggcatactctatataat

SEQ ID NO: 1622821 - DNA, 25 bp, Homo sapien
gaggaaatgagatatccattacctc

SEQ ID NO: 1622822 - DNA, 25 bp, Homo sapien
gccatatatggtatattttgatgca

SEQ ID NO: 1622823 - DNA, 25 bp, Homo sapien
ttgtgcagagggaaagactggataa

SEQ ID NO: 1622824 - DNA, 25 bp, Homo sapien
aaatctatattttgaagccttctaa

SEQ ID NO: 1622825 - DNA, 25 bp, Homo sapien
cacatttcccattcatactctaaat

SEQ ID NO: 1622826 - DNA, 25 bp, Homo sapien
tattaccatgatgtttatcacatag

SEQ ID NO: 1622827 - DNA, 25 bp, Homo sapien
catctgtggactatatgctggggac

SEQ ID NO: 1622828 - DNA, 25 bp, Homo sapien
cctttagtggtgttgaccatctgtg

SEQ ID NO: 1622829 - DNA, 25 bp, Homo sapien
tggactatatgctggggacagttga

SEQ ID NO: 1622830 - DNA, 25 bp, Homo sapien
acacttagttgttgagtctcctctt

SEQ ID NO: 1622831 - DNA, 25 bp, Homo sapien
tttctccctgaagtgtcatagggtg

SEQ ID NO: 1622832 - DNA, 25 bp, Homo sapien
ttctccctgaagtgtcatagggtgg

SEQ ID NO: 1622833 - DNA, 25 bp, Homo sapien
cgtgggcaatggcgttggaggaaca

SEQ ID NO: 1622834 - DNA, 25 bp, Homo sapien
tgattgatggttctgcgtgggcaat

SEQ ID NO: 1622835 - DNA, 25 bp, Homo sapien
gtgggcaatggcgttggaggaacaa

SEQ ID NO: 1622836 - DNA, 25 bp, Homo sapien
tgatggttctgcgtgggcaatggcg

SEQ ID NO: 1622837 - DNA, 25 bp, Homo sapien
tcaaacagtagtggcggttggaaca

SEQ ID NO: 1622838 - DNA, 25 bp, Homo sapien
aacagtgatgctcgttcaaacagta

SEQ ID NO: 1622839 - DNA, 25 bp, Homo sapien
cattgaaatgctcgttgttgttgga

SEQ ID NO: 1622840 - DNA, 25 bp, Homo sapien
ggaacgcttgttgtcattggaacag

SEQ ID NO: 1622841 - DNA, 25 bp, Homo sapien
gctctccagtgcggaacagaggaac

SEQ ID NO: 1622842 - DNA, 25 bp, Homo sapien
ctctccagtgcggaacagaggaaca

SEQ ID NO: 1622843 - DNA, 25 bp, Homo sapien
tctccagtgcggaacagaggaacaa

SEQ ID NO: 1622844 - DNA, 25 bp, Homo sapien
gatgttaataagacctccggagtct

SEQ ID NO: 1622845 - DNA, 25 bp, Homo sapien
aaatacttgtttgccacgctaaggg

SEQ ID NO: 1622846 - DNA, 25 bp, Homo sapien
taggtatgaatgtaccacctgtacc

SEQ ID NO: 1622847 - DNA, 25 bp, Homo sapien
tccggagtctgcctgaagtaacata

SEQ ID NO: 1622848 - DNA, 25 bp, Homo sapien
tgtgctgctgctagctcggaagctc

SEQ ID NO: 1622849 - DNA, 25 bp, Homo sapien
gcctggatctcctaaccagtaagga

SEQ ID NO: 1622850 - DNA, 25 bp, Homo sapien
ggacaaatccgctgagcaggtaaaa

SEQ ID NO: 1622851 - DNA, 25 bp, Homo sapien
gcacgttctgcaccgagcagggtcc

SEQ ID NO: 1622852 - DNA, 25 bp, Homo sapien
tgatggatccctgtaaaacacgcac

SEQ ID NO: 1622853 - DNA, 25 bp, Homo sapien
cccccgactcgcacaaggaaggtga

SEQ ID NO: 1622854 - DNA, 25 bp, Homo sapien
gaggcacctggcaccgagcccccga

SEQ ID NO: 1622855 - DNA, 25 bp, Homo sapien
gagcccccgactcgcacaaggaagg

SEQ ID NO: 1622856 - DNA, 25 bp, Homo sapien
tccaatggaagggcgaggaacgatc

SEQ ID NO: 1622857 - DNA, 25 bp, Homo sapien
gaagggcgaggaacgatcggcgccc

SEQ ID NO: 1622858 - DNA, 25 bp, Homo sapien
aatggaagggcgaggaacgatcggc

SEQ ID NO: 1622859 - DNA, 25 bp, Homo sapien
tgtccaatggaagggcgaggaacga

SEQ ID NO: 1622860 - DNA, 25 bp, Homo sapien
accgccagccaggaaaaggccaggg

SEQ ID NO: 1622861 - DNA, 25 bp, Homo sapien
gggcttccaccaaataccttggcga

SEQ ID NO: 1622862 - DNA, 25 bp, Homo sapien
caaatccgcagagcagggtgcgaca

SEQ ID NO: 1622863 - DNA, 25 bp, Homo sapien
tgccttaggtggtagtcggccacaa

SEQ ID NO: 1622864 - DNA, 25 bp, Homo sapien
acttgccagttctccacgtgttctt

SEQ ID NO: 1622865 - DNA, 25 bp, Homo sapien
gccagttctccacgtgttcttgctg

SEQ ID NO: 1622866 - DNA, 25 bp, Homo sapien
tcacttgccagttctccacgtgttc

SEQ ID NO: 1622867 - DNA, 25 bp, Homo sapien
ttgccagttctccacgtgttcttgc

SEQ ID NO: 1622868 - DNA, 25 bp, Homo sapien
tctttaagggcacacaaatccaaat

SEQ ID NO: 1622869 - DNA, 25 bp, Homo sapien
tccaaatcagtcagttcatgcacta

SEQ ID NO: 1622870 - DNA, 25 bp, Homo sapien
atccaaatcagtcagttcatgcact

SEQ ID NO: 1622871 - DNA, 25 bp, Homo sapien
ccctctttaagggcacacaaatcca

SEQ ID NO: 1622872 - DNA, 25 bp, Homo sapien
gccgatttgaagtcaatcgtagaaa

SEQ ID NO: 1622873 - DNA, 25 bp, Homo sapien
tttcagccgatttgaagtcaatcgt

SEQ ID NO: 1622874 - DNA, 25 bp, Homo sapien
ttgaagtcaatcgtagaaaaggaga

SEQ ID NO: 1622875 - DNA, 25 bp, Homo sapien
agtcaatcgtagaaaaggagatatc

SEQ ID NO: 1622876 - DNA, 25 bp, Homo sapien
tttcttcatattatgctagaaagaa

SEQ ID NO: 1622877 - DNA, 25 bp, Homo sapien
gttaggaaacactctgtttgtaatg

SEQ ID NO: 1622878 - DNA, 25 bp, Homo sapien
tgcgttcaattcacagagtttaacc

SEQ ID NO: 1622879 - DNA, 25 bp, Homo sapien
atattatgctagaaagaagaattct

SEQ ID NO: 1622880 - DNA, 25 bp, Homo sapien
tgattctcagaaactgcgctgtgat

SEQ ID NO: 1622881 - DNA, 25 bp, Homo sapien
gaaactgcgctgtgatgtgtgcgtt

SEQ ID NO: 1622882 - DNA, 25 bp, Homo sapien
atttcagccgctttgaggtcaatgg

SEQ ID NO: 1622883 - DNA, 25 bp, Homo sapien
atttgtaagtggagatttcagccgc

SEQ ID NO: 1622884 - DNA, 25 bp, Homo sapien
ggacctctttgaggccttcgttcga

SEQ ID NO: 1622885 - DNA, 25 bp, Homo sapien
tcgaaacgggatttcttcatatact

SEQ ID NO: 1622886 - DNA, 25 bp, Homo sapien
tggaaacactctgtttgtaaattct

SEQ ID NO: 1622887 - DNA, 25 bp, Homo sapien
actctgtttgtaaattctgcaagtg

SEQ ID NO: 1622888 - DNA, 25 bp, Homo sapien
gcagatttgaaaccctccttctgtg

SEQ ID NO: 1622889 - DNA, 25 bp, Homo sapien
cagatttgaaaccctccttctgtgg

SEQ ID NO: 1622890 - DNA, 25 bp, Homo sapien
agatttgaaaccctccttctgtgga

SEQ ID NO: 1622891 - DNA, 25 bp, Homo sapien
tatgctagacaaaagaattctcact

SEQ ID NO: 1622892 - DNA, 25 bp, Homo sapien
tcaaccttcttttagacagagcaga

SEQ ID NO: 1622893 - DNA, 25 bp, Homo sapien
gtgtgcaactcacagagttcaacct

SEQ ID NO: 1622894 - DNA, 25 bp, Homo sapien
cagagttcaaccttcttttagacag

SEQ ID NO: 1622895 - DNA, 25 bp, Homo sapien
ttttgtggaatttgcaagtagagat

SEQ ID NO: 1622896 - DNA, 25 bp, Homo sapien
aagtagagatttcaagcgctttgag

SEQ ID NO: 1622897 - DNA, 25 bp, Homo sapien
tgcaagtagagatttcaagcgcttt

SEQ ID NO: 1622898 - DNA, 25 bp, Homo sapien
tttgtggaatttgcaagtagagatt

SEQ ID NO: 1622899 - DNA, 25 bp, Homo sapien
gtagaaaaggaaatatcttcgcata

SEQ ID NO: 1622900 - DNA, 25 bp, Homo sapien
atggtagaaaaggaaatatcttcgc

SEQ ID NO: 1622901 - DNA, 25 bp, Homo sapien
ggtagaaaaggaaatatcttcgcat

SEQ ID NO: 1622902 - DNA, 25 bp, Homo sapien
agaaaaggaaatatcttcgcataaa

SEQ ID NO: 1622903 - DNA, 25 bp, Homo sapien
aattctcagtaacttccttgtgttg

SEQ ID NO: 1622904 - DNA, 25 bp, Homo sapien
ttctcagtaacttccttgtgttgtg

SEQ ID NO: 1622905 - DNA, 25 bp, Homo sapien
gaagaattctcagtaacttccttgt

SEQ ID NO: 1622906 - DNA, 25 bp, Homo sapien
agaattctcagtaacttccttgtgt

SEQ ID NO: 1622907 - DNA, 25 bp, Homo sapien
tgatgtgtgcgttcacctcacggac

SEQ ID NO: 1622908 - DNA, 25 bp, Homo sapien
gatgtgtgcgttcacctcacggacc

SEQ ID NO: 1622909 - DNA, 25 bp, Homo sapien
agagcagttaggaaacactctgttt

SEQ ID NO: 1622910 - DNA, 25 bp, Homo sapien
tcatagagcagttaggaaacactct

SEQ ID NO: 1622911 - DNA, 25 bp, Homo sapien
cagttaggaaacactctgtttgtaa

SEQ ID NO: 1622912 - DNA, 25 bp, Homo sapien
cttttcatagagcagttaggaaaca

SEQ ID NO: 1622913 - DNA, 25 bp, Homo sapien
tattttgacctccttgaggcgttcg

SEQ ID NO: 1622914 - DNA, 25 bp, Homo sapien
tttgacctccttgaggcgttcgttg

SEQ ID NO: 1622915 - DNA, 25 bp, Homo sapien
tataaggcacgacagaagaattctc

SEQ ID NO: 1622916 - DNA, 25 bp, Homo sapien
atttcttcatataaggcacgacaga

SEQ ID NO: 1622917 - DNA, 25 bp, Homo sapien
tttcttcatataaggctagacagaa

SEQ ID NO: 1622918 - DNA, 25 bp, Homo sapien
cgggatttcttcatataaggctaga

SEQ ID NO: 1622919 - DNA, 25 bp, Homo sapien
ggacctccttgaggcgttcgttgga

SEQ ID NO: 1622920 - DNA, 25 bp, Homo sapien
gatttcttcatataaggctagacag

SEQ ID NO: 1622921 - DNA, 25 bp, Homo sapien
aacttcgttgtgatgtgtgtgttca

SEQ ID NO: 1622922 - DNA, 25 bp, Homo sapien
ttcgttgtgatgtgtgtgttcacct

SEQ ID NO: 1622923 - DNA, 25 bp, Homo sapien
acttcgttgtgatgtgtgtgttcac

SEQ ID NO: 1622924 - DNA, 25 bp, Homo sapien
gaaacttcgttgtgatgtgtgtgtt

SEQ ID NO: 1622925 - DNA, 25 bp, Homo sapien
tcttgagacttggttttcagttcct

SEQ ID NO: 1622926 - DNA, 25 bp, Homo sapien
catcttctatcactgattccctttg

SEQ ID NO: 1622927 - DNA, 25 bp, Homo sapien
tgttatcctagttacacattcttct

SEQ ID NO: 1622928 - DNA, 25 bp, Homo sapien
tttcagttcctttaagcagttctct

SEQ ID NO: 1622929 - DNA, 25 bp, Homo sapien
ctctcttgcttttccccacatttcc

SEQ ID NO: 1622930 - DNA, 25 bp, Homo sapien
tctcttgcttttccccacatttccc

SEQ ID NO: 1622931 - DNA, 25 bp, Homo sapien
tgatctctcttgcttttccccacat

SEQ ID NO: 1622932 - DNA, 25 bp, Homo sapien
atctctcttgcttttccccacattt

SEQ ID NO: 1622933 - DNA, 25 bp, Homo sapien
tctccgtctccgcggaggtgctttt

SEQ ID NO: 1622934 - DNA, 25 bp, Homo sapien
ctccgtctccgcggaggtgcttttc

SEQ ID NO: 1622935 - DNA, 25 bp, Homo sapien
gtctccgtctccgcggaggtgcttt

SEQ ID NO: 1622936 - DNA, 25 bp, Homo sapien
caaccaattctgctctttgagccga

SEQ ID NO: 1622937 - DNA, 25 bp, Homo sapien
aatgactgcaaccaattctgctctt

SEQ ID NO: 1622938 - DNA, 25 bp, Homo sapien
tgactgcaaccaattctgctctttg

SEQ ID NO: 1622939 - DNA, 25 bp, Homo sapien
accaattctgctctttgagccgatt

SEQ ID NO: 1622940 - DNA, 25 bp, Homo sapien
taagctcaaaaacgtctcttcatag

SEQ ID NO: 1622941 - DNA, 25 bp, Homo sapien
tacctatttatcaggggatgcttgg

SEQ ID NO: 1622942 - DNA, 25 bp, Homo sapien
ctactacctatttatcaggggatgc

SEQ ID NO: 1622943 - DNA, 25 bp, Homo sapien
aatgttttcaaccagttgaatcaaa

SEQ ID NO: 1622944 - DNA, 25 bp, Homo sapien
gtaagatgaatccacacaaggcaaa

SEQ ID NO: 1622945 - DNA, 25 bp, Homo sapien
tagcttacttctagtgtttatcaca

SEQ ID NO: 1622946 - DNA, 25 bp, Homo sapien
acttctagtgtttatcacaggataa

SEQ ID NO: 1622947 - DNA, 25 bp, Homo sapien
tgtaagatgaatccacacaaggcaa

SEQ ID NO: 1622948 - DNA, 25 bp, Homo sapien
cagttttcgcacattcaatatgata

SEQ ID NO: 1622949 - DNA, 25 bp, Homo sapien
aatcatctcattggcaaacagggaa

SEQ ID NO: 1622950 - DNA, 25 bp, Homo sapien
tagatatacaatcatctcattggca

SEQ ID NO: 1622951 - DNA, 25 bp, Homo sapien
atgcttccagttttcgcacattcaa

SEQ ID NO: 1622952 - DNA, 25 bp, Homo sapien
tggctccacccctgatgtttggttt

SEQ ID NO: 1622953 - DNA, 25 bp, Homo sapien
gcacaaaaatgtccctgcatagatt

SEQ ID NO: 1622954 - DNA, 25 bp, Homo sapien
tcctatttggcttttttggctccac

SEQ ID NO: 1622955 - DNA, 25 bp, Homo sapien
gtaggcctcaatgagcacaaaaatg

SEQ ID NO: 1622956 - DNA, 25 bp, Homo sapien
gtctcaattgactcataaatgtccc

SEQ ID NO: 1622957 - DNA, 25 bp, Homo sapien
tgagatgaatcaacatatcacaagc

SEQ ID NO: 1622958 - DNA, 25 bp, Homo sapien
ggtctcaatgagctcagaaattaca

SEQ ID NO: 1622959 - DNA, 25 bp, Homo sapien
caatttctagattctacaaggagag

SEQ ID NO: 1622960 - DNA, 25 bp, Homo sapien
tttctttattataggcctcaatggc

SEQ ID NO: 1622961 - DNA, 25 bp, Homo sapien
agcattttcacacatagcgttttta

SEQ ID NO: 1622962 - DNA, 25 bp, Homo sapien
tgtaggacttaatggcctcaaaaac

SEQ ID NO: 1622963 - DNA, 25 bp, Homo sapien
gatgaactcacatatggcaaagcat

SEQ ID NO: 1622964 - DNA, 25 bp, Homo sapien
cattagtctggtgcaggtcggtcgc

SEQ ID NO: 1622965 - DNA, 25 bp, Homo sapien
ccttaggcagtctagggttggacca

SEQ ID NO: 1622966 - DNA, 25 bp, Homo sapien
ttatactgccttgggtcagccagca

SEQ ID NO: 1622967 - DNA, 25 bp, Homo sapien
ccattattatgcctggagtcgccca

SEQ ID NO: 1622968 - DNA, 25 bp, Homo sapien
tactataggcctcaagggactcaaa

SEQ ID NO: 1622969 - DNA, 25 bp, Homo sapien
ttccaacccgttgaatcaaacacag

SEQ ID NO: 1622970 - DNA, 25 bp, Homo sapien
ccaatgtagtggatcaaaaccaggt

SEQ ID NO: 1622971 - DNA, 25 bp, Homo sapien
taaaacacaggttgcattcagtgag

SEQ ID NO: 1622972 - DNA, 25 bp, Homo sapien
aatacacgcttatatctgttagatg

SEQ ID NO: 1622973 - DNA, 25 bp, Homo sapien
gactcaatgcactcagaaatgtttc

SEQ ID NO: 1622974 - DNA, 25 bp, Homo sapien
cctgcctagtttttatcacgagata

SEQ ID NO: 1622975 - DNA, 25 bp, Homo sapien
tattcgatttttcaacatatgactc

SEQ ID NO: 1622976 - DNA, 25 bp, Homo sapien
cagtttctattgcaggacattcggt

SEQ ID NO: 1622977 - DNA, 25 bp, Homo sapien
tgtatcacgggatattcggtttacc

SEQ ID NO: 1622978 - DNA, 25 bp, Homo sapien
cctttataggcctaactgggctaag

SEQ ID NO: 1622979 - DNA, 25 bp, Homo sapien
tcactagaggcctcaaaatgctaaa

SEQ ID NO: 1622980 - DNA, 25 bp, Homo sapien
tttgctataatctccataggctcag

SEQ ID NO: 1622981 - DNA, 25 bp, Homo sapien
agttttttgctataatctccatagg

SEQ ID NO: 1622982 - DNA, 25 bp, Homo sapien
ctccataggctcagaattgtccctt

SEQ ID NO: 1622983 - DNA, 25 bp, Homo sapien
tttttgctataatctccataggctc

SEQ ID NO: 1622984 - DNA, 25 bp, Homo sapien
caaaggtctaactctcgatgaatcc

SEQ ID NO: 1622985 - DNA, 25 bp, Homo sapien
caagagattcacttcgcaataggcc

SEQ ID NO: 1622986 - DNA, 25 bp, Homo sapien
gcaataggcctcaacgggctcagaa

SEQ ID NO: 1622987 - DNA, 25 bp, Homo sapien
cactacagacttcaattggctcaga

SEQ ID NO: 1622988 - DNA, 25 bp, Homo sapien
gtttttctctacaggcctcagtggg

SEQ ID NO: 1622989 - DNA, 25 bp, Homo sapien
cactataggtctccgtgggctcaga

SEQ ID NO: 1622990 - DNA, 25 bp, Homo sapien
catcgggaaccatttacacggagag

SEQ ID NO: 1622991 - DNA, 25 bp, Homo sapien
cagtgggctcagaaacgtcttttca

SEQ ID NO: 1622992 - DNA, 25 bp, Homo sapien
tcttgatggtctcagaaatgtccct

SEQ ID NO: 1622993 - DNA, 25 bp, Homo sapien
ttttgtagattcaactaaaagagtg

SEQ ID NO: 1622994 - DNA, 25 bp, Homo sapien
agtgtttgcagactgtcaaatcaaa

SEQ ID NO: 1622995 - DNA, 25 bp, Homo sapien
gcctcaacggactttgaaatatctt

SEQ ID NO: 1622996 - DNA, 25 bp, Homo sapien
ttcactgtaggcctcaatgaggcct

SEQ ID NO: 1622997 - DNA, 25 bp, Homo sapien
ggcctcagaaatgtgcctgcacaga

SEQ ID NO: 1622998 - DNA, 25 bp, Homo sapien
aaagtgattccacctgtaataccaa

SEQ ID NO: 1622999 - DNA, 25 bp, Homo sapien
tttttcactgtaggcctcagaaatg

SEQ ID NO: 1623000 - DNA, 25 bp, Homo sapien
atcatgggatatttcgttttcacca

SEQ ID NO: 1623001 - DNA, 25 bp, Homo sapien
caaggcattttcataagtagttctt

SEQ ID NO: 1623002 - DNA, 25 bp, Homo sapien
ttatcatgggatatttcgttttcac

SEQ ID NO: 1623003 - DNA, 25 bp, Homo sapien
tatcatgggatatttcgttttcacc

SEQ ID NO: 1623004 - DNA, 25 bp, Homo sapien
tagacctcaataggctcagaaatcg

SEQ ID NO: 1623005 - DNA, 25 bp, Homo sapien
tattcggattttgccaataggcctc

SEQ ID NO: 1623006 - DNA, 25 bp, Homo sapien
tcagcatatgcctcaatgggatcag

SEQ ID NO: 1623007 - DNA, 25 bp, Homo sapien
cgtttaactctgtaagatggatgca

SEQ ID NO: 1623008 - DNA, 25 bp, Homo sapien
acatgaatccatacgctgcaaggca

SEQ ID NO: 1623009 - DNA, 25 bp, Homo sapien
taagcaagggcataactctgaaaga

SEQ ID NO: 1623010 - DNA, 25 bp, Homo sapien
aacataggtgtaactctgtgacatg

SEQ ID NO: 1623011 - DNA, 25 bp, Homo sapien
tggttaatcactataggcatcaatg

SEQ ID NO: 1623012 - DNA, 25 bp, Homo sapien
aaaaacaaaggtggaactctgtgag

SEQ ID NO: 1623013 - DNA, 25 bp, Homo sapien
ataaaaacaaaggtggaactctgtg

SEQ ID NO: 1623014 - DNA, 25 bp, Homo sapien
acaaaggtggaactctgtgagatga

SEQ ID NO: 1623015 - DNA, 25 bp, Homo sapien
aaacaaaggtggaactctgtgagat

SEQ ID NO: 1623016 - DNA, 25 bp, Homo sapien
tatctttgtgaaacaaattcacaca

SEQ ID NO: 1623017 - DNA, 25 bp, Homo sapien
taggctaaaaacatcccttcatagg

SEQ ID NO: 1623018 - DNA, 25 bp, Homo sapien
gtttccaacctgttgaatccatgca

SEQ ID NO: 1623019 - DNA, 25 bp, Homo sapien
cataggttctacaataatgtttcca

SEQ ID NO: 1623020 - DNA, 25 bp, Homo sapien
aaacagaggttccattcgatgagaa

SEQ ID NO: 1623021 - DNA, 25 bp, Homo sapien
tcacccttgtgagtcaaaacagagg

SEQ ID NO: 1623022 - DNA, 25 bp, Homo sapien
tattgcagggtattcagtttctcac

SEQ ID NO: 1623023 - DNA, 25 bp, Homo sapien
tggtttcacatgataggcctcaatg

SEQ ID NO: 1623024 - DNA, 25 bp, Homo sapien
tgaaatcctcgttgtttcctgcccc

SEQ ID NO: 1623025 - DNA, 25 bp, Homo sapien
cagagtcctcattgggttcacaaag

SEQ ID NO: 1623026 - DNA, 25 bp, Homo sapien
tttttcacgtcaggcttcaatgggc

SEQ ID NO: 1623027 - DNA, 25 bp, Homo sapien
gatgaatccggacattgctaagcat

SEQ ID NO: 1623028 - DNA, 25 bp, Homo sapien
caataagctcagtaatgtcccttcg

SEQ ID NO: 1623029 - DNA, 25 bp, Homo sapien
ttgctatagacctaaaggagctcag

SEQ ID NO: 1623030 - DNA, 25 bp, Homo sapien
cacaggctccttttaatgagatgca

SEQ ID NO: 1623031 - DNA, 25 bp, Homo sapien
tcaatgagctcagaaatgtcccact

SEQ ID NO: 1623032 - DNA, 25 bp, Homo sapien
ctgtgaaatgaattcaaacattgaa

SEQ ID NO: 1623033 - DNA, 25 bp, Homo sapien
agcttgttactagtttttatcgtgt

SEQ ID NO: 1623034 - DNA, 25 bp, Homo sapien
gaaatgaattcaaacattgaaaagc

SEQ ID NO: 1623035 - DNA, 25 bp, Homo sapien
gtttaactctgtgaaatgaattcaa

SEQ ID NO: 1623036 - DNA, 25 bp, Homo sapien
actcaggtttcagtcagtgagatga

SEQ ID NO: 1623037 - DNA, 25 bp, Homo sapien
gtttcagtcagtgagatgaatccat

SEQ ID NO: 1623038 - DNA, 25 bp, Homo sapien
ggtgaatcaaaactcaggtttcagt

SEQ ID NO: 1623039 - DNA, 25 bp, Homo sapien
tggtgaatcaaaactcaggtttcag

SEQ ID NO: 1623040 - DNA, 25 bp, Homo sapien
aaatgtccatttgtatgttctacaa

SEQ ID NO: 1623041 - DNA, 25 bp, Homo sapien
aatgtccatttgtatgttctacaaa

SEQ ID NO: 1623042 - DNA, 25 bp, Homo sapien
cattagaatgcctggagtcacccaa

SEQ ID NO: 1623043 - DNA, 25 bp, Homo sapien
gcctgaagctgcctagatgtctcca

SEQ ID NO: 1623044 - DNA, 25 bp, Homo sapien
gcctgtggtcatgaaggagtctcta

SEQ ID NO: 1623045 - DNA, 25 bp, Homo sapien
gaatcactgggtttggccaggaccc

SEQ ID NO: 1623046 - DNA, 25 bp, Homo sapien
ggtggtgaccccgacatgatcaagg

SEQ ID NO: 1623047 - DNA, 25 bp, Homo sapien
tattcatccgtcgttgagtcagggt

SEQ ID NO: 1623048 - DNA, 25 bp, Homo sapien
tgctaaataaatgccgggagggcca

SEQ ID NO: 1623049 - DNA, 25 bp, Homo sapien
cgtggctgacaggactcttcttgga

SEQ ID NO: 1623050 - DNA, 25 bp, Homo sapien
ccccaaaacttggcctgcgtagcag

SEQ ID NO: 1623051 - DNA, 25 bp, Homo sapien
tagaatgcctgttgtcgcccaagtg

SEQ ID NO: 1623052 - DNA, 25 bp, Homo sapien
tagaatggctaggttcaccccagtg

SEQ ID NO: 1623053 - DNA, 25 bp, Homo sapien
gttagaatgccttgggtcgcccagt

SEQ ID NO: 1623054 - DNA, 25 bp, Homo sapien
tgtttctgtcactaggccacctggt

SEQ ID NO: 1623055 - DNA, 25 bp, Homo sapien
tagaatgccactggtcgctcaggtg

SEQ ID NO: 1623056 - DNA, 25 bp, Homo sapien
gaacctatccccttacaatgcctgg

SEQ ID NO: 1623057 - DNA, 25 bp, Homo sapien
tagaaagcctgtggtcgctcaaatg

SEQ ID NO: 1623058 - DNA, 25 bp, Homo sapien
tgccttgggtcaaccaggagactct

SEQ ID NO: 1623059 - DNA, 25 bp, Homo sapien
tgtggtcgcccaggtgtctctatta

SEQ ID NO: 1623060 - DNA, 25 bp, Homo sapien
tgcctagggttgatcagttgtctct

SEQ ID NO: 1623061 - DNA, 25 bp, Homo sapien
tctgtggttgatcgggagtttctcc

SEQ ID NO: 1623062 - DNA, 25 bp, Homo sapien
taattagaccacctggtgttggcca

SEQ ID NO: 1623063 - DNA, 25 bp, Homo sapien
taccatgtctaaggttgcccagaca

SEQ ID NO: 1623064 - DNA, 25 bp, Homo sapien
ttagaatccctgtcgaccagatggc

SEQ ID NO: 1623065 - DNA, 25 bp, Homo sapien
gaatgatgcgactgtgactcactgc

SEQ ID NO: 1623066 - DNA, 25 bp, Homo sapien
tatctgagattgctcggaccttctt

SEQ ID NO: 1623067 - DNA, 25 bp, Homo sapien
gtgtgtgacaaatagagagagagac

SEQ ID NO: 1623068 - DNA, 25 bp, Homo sapien
ctgtgtgtgacaaatagagagagag

SEQ ID NO: 1623069 - DNA, 25 bp, Homo sapien
tgtgtgacaaatagagagagagaca

SEQ ID NO: 1623070 - DNA, 25 bp, Homo sapien
tgtgtgtgacaaatagagagagaga

SEQ ID NO: 1623071 - DNA, 25 bp, Homo sapien
gggtctcctcttcgagtgagttcaa

SEQ ID NO: 1623072 - DNA, 25 bp, Homo sapien
ggcacttgcctagccatgtctaaga

SEQ ID NO: 1623073 - DNA, 25 bp, Homo sapien
taaggtcggccagatgactcttgcc

SEQ ID NO: 1623074 - DNA, 25 bp, Homo sapien
gattgaccagatgattctcaccttg

SEQ ID NO: 1623075 - DNA, 25 bp, Homo sapien
cgaaggtcgcccagatggctctcat

SEQ ID NO: 1623076 - DNA, 25 bp, Homo sapien
taaggctgatcagatggctcgcacc

SEQ ID NO: 1623077 - DNA, 25 bp, Homo sapien
cttaccatgttgaaggtggacctga

SEQ ID NO: 1623078 - DNA, 25 bp, Homo sapien
tcaaaggtcgaccaggtggctgtcc

SEQ ID NO: 1623079 - DNA, 25 bp, Homo sapien
caaacagagacagctagagagtaac

SEQ ID NO: 1623080 - DNA, 25 bp, Homo sapien
tcttttaatcacactctagcatggg

SEQ ID NO: 1623081 - DNA, 25 bp, Homo sapien
cagcgagcactggacttagctttca

SEQ ID NO: 1623082 - DNA, 25 bp, Homo sapien
ttgagaaacgtgttggcagcgagca

SEQ ID NO: 1623083 - DNA, 25 bp, Homo sapien
tcttccaggtctctacagggtggcc

SEQ ID NO: 1623084 - DNA, 25 bp, Homo sapien
tcccacgagggttgtatttagccac

SEQ ID NO: 1623085 - DNA, 25 bp, Homo sapien
ccagcttggtaagtctagggtcgag

SEQ ID NO: 1623086 - DNA, 25 bp, Homo sapien
gagaggattggacttagctgccagc

SEQ ID NO: 1623087 - DNA, 25 bp, Homo sapien
ttggcttccctagtccctcaggcta

SEQ ID NO: 1623088 - DNA, 25 bp, Homo sapien
gcctgggtgtgacaaatggaaaggg

SEQ ID NO: 1623089 - DNA, 25 bp, Homo sapien
taactgaagttttagagagacttgc

SEQ ID NO: 1623090 - DNA, 25 bp, Homo sapien
tgtggtctcgatcttcccagtgtca

SEQ ID NO: 1623091 - DNA, 25 bp, Homo sapien
gcagaatattttaattgtgatatta

SEQ ID NO: 1623092 - DNA, 25 bp, Homo sapien
gatagcagaatattttaattgtgat

SEQ ID NO: 1623093 - DNA, 25 bp, Homo sapien
tagcagaatattttaattgtgatat

SEQ ID NO: 1623094 - DNA, 25 bp, Homo sapien
atagcagaatattttaattgtgata

SEQ ID NO: 1623095 - DNA, 25 bp, Homo sapien
ttgttcactcccacttatttattgg

SEQ ID NO: 1623096 - DNA, 25 bp, Homo sapien
ccattcaggtccagcagaggtatgt

SEQ ID NO: 1623097 - DNA, 25 bp, Homo sapien
cagtgagcactggacttagccacca

SEQ ID NO: 1623098 - DNA, 25 bp, Homo sapien
cagatggctctagctggcgccagga

SEQ ID NO: 1623099 - DNA, 25 bp, Homo sapien
tgagacagatgtcggcagtgagcac

SEQ ID NO: 1623100 - DNA, 25 bp, Homo sapien
tggactaaggtcgacctgatggacc

SEQ ID NO: 1623101 - DNA, 25 bp, Homo sapien
gcttcttcctgcacggtgaagttta

SEQ ID NO: 1623102 - DNA, 25 bp, Homo sapien
atgtcggctgtgagcgttggactaa

SEQ ID NO: 1623103 - DNA, 25 bp, Homo sapien
cagcagcagtacaattcaggttgag

SEQ ID NO: 1623104 - DNA, 25 bp, Homo sapien
gtctaaggacgaacagaaggctctc

SEQ ID NO: 1623105 - DNA, 25 bp, Homo sapien
cattaaggtccagcagagagatgca

SEQ ID NO: 1623106 - DNA, 25 bp, Homo sapien
cctgcgcgatgaagctaacctttta

SEQ ID NO: 1623107 - DNA, 25 bp, Homo sapien
gaatatcggccataagcactggact

SEQ ID NO: 1623108 - DNA, 25 bp, Homo sapien
tatctacttatcttttgaggagaga

SEQ ID NO: 1623109 - DNA, 25 bp, Homo sapien
tgacctgccatgcacggtctggtta

SEQ ID NO: 1623110 - DNA, 25 bp, Homo sapien
ccagtcctcgtttccactttgggtg

SEQ ID NO: 1623111 - DNA, 25 bp, Homo sapien
gactacccaaactgctgctattaca

SEQ ID NO: 1623112 - DNA, 25 bp, Homo sapien
tgccatccagaatcttaacagtgtt

SEQ ID NO: 1623113 - DNA, 25 bp, Homo sapien
gaggaacgattcatgacttctgggc

SEQ ID NO: 1623114 - DNA, 25 bp, Homo sapien
gatagtcctgttgttgtagcgaaga

SEQ ID NO: 1623115 - DNA, 25 bp, Homo sapien
gaagataattacacatacaacctgg

SEQ ID NO: 1623116 - DNA, 25 bp, Homo sapien
tgtagaaacactagatgccttcctg

SEQ ID NO: 1623117 - DNA, 25 bp, Homo sapien
caacccagtgagatttattacaggc

SEQ ID NO: 1623118 - DNA, 25 bp, Homo sapien
acaggcatgcaaatctggttcaaca

SEQ ID NO: 1623119 - DNA, 25 bp, Homo sapien
tcaagataagcgcagacaacatagc

SEQ ID NO: 1623120 - DNA, 25 bp, Homo sapien
tctgcactgccaaagatgctgttaa

SEQ ID NO: 1623121 - DNA, 25 bp, Homo sapien
ttgcaaaagatccagataccttact

SEQ ID NO: 1623122 - DNA, 25 bp, Homo sapien
caggttttgctcctttctacaacac

SEQ ID NO: 1623123 - DNA, 25 bp, Homo sapien
gtatccagaatatgcgacaagaaat

SEQ ID NO: 1623124 - DNA, 25 bp, Homo sapien
catcaaacaatgtactccagggtga

SEQ ID NO: 1623125 - DNA, 25 bp, Homo sapien
tgaagttgaacatttaccctacacc

SEQ ID NO: 1623126 - DNA, 25 bp, Homo sapien
gggatacaaagaccgttcaatgggc

SEQ ID NO: 1623127 - DNA, 25 bp, Homo sapien
cattgatcacctcatggatgcagag

SEQ ID NO: 1623128 - DNA, 25 bp, Homo sapien
ccagtttcagaagcgtgtaggcacg

SEQ ID NO: 1623129 - DNA, 25 bp, Homo sapien
cagaactgaggttgttcctacacca

SEQ ID NO: 1623130 - DNA, 25 bp, Homo sapien
tgcgtccgcctttcacagaactgag

SEQ ID NO: 1623131 - DNA, 25 bp, Homo sapien
tgtaggcacgctttattacagtggc

SEQ ID NO: 1623132 - DNA, 25 bp, Homo sapien
ctgcagccagcccgggggtccaatg

SEQ ID NO: 1623133 - DNA, 25 bp, Homo sapien
ccctgcagccagcccgggggtccaa

SEQ ID NO: 1623134 - DNA, 25 bp, Homo sapien
ctaacccaggtgtgggccctgcagc

SEQ ID NO: 1623135 - DNA, 25 bp, Homo sapien
cagccagcccgggggtccaatgggt

SEQ ID NO: 1623136 - DNA, 25 bp, Homo sapien
ggcaggccagagatagacaaaaggt

SEQ ID NO: 1623137 - DNA, 25 bp, Homo sapien
accttcggccctgcccatagaaagg

SEQ ID NO: 1623138 - DNA, 25 bp, Homo sapien
ggagcacaggaagaatcgtggcagg

SEQ ID NO: 1623139 - DNA, 25 bp, Homo sapien
tttacacgcggaccttcggccctgc

SEQ ID NO: 1623140 - DNA, 25 bp, Homo sapien
ggtctgcgagaaatcaaactttggg

SEQ ID NO: 1623141 - DNA, 25 bp, Homo sapien
caagctatcttctcgctagcaggtg

SEQ ID NO: 1623142 - DNA, 25 bp, Homo sapien
cttgttagttgtacgcctgcaggac

SEQ ID NO: 1623143 - DNA, 25 bp, Homo sapien
acaagtcatgaagccgacaagcccg

SEQ ID NO: 1623144 - DNA, 25 bp, Homo sapien
gagccatggtccagaactcaggtgg

SEQ ID NO: 1623145 - DNA, 25 bp, Homo sapien
gcttgagccatggtccagaactcag

SEQ ID NO: 1623146 - DNA, 25 bp, Homo sapien
atggtccagaactcaggtggcccca

SEQ ID NO: 1623147 - DNA, 25 bp, Homo sapien
tggtccagaactcaggtggccccat

SEQ ID NO: 1623148 - DNA, 25 bp, Homo sapien
tacagcccctggaatgtggtgaaac

SEQ ID NO: 1623149 - DNA, 25 bp, Homo sapien
ctacagcccctggaatgtggtgaaa

SEQ ID NO: 1623150 - DNA, 25 bp, Homo sapien
acagcccctggaatgtggtgaaacc

SEQ ID NO: 1623151 - DNA, 25 bp, Homo sapien
gataaacactatggccacatgcagg

SEQ ID NO: 1623152 - DNA, 25 bp, Homo sapien
tagatgataaacactatggccacat

SEQ ID NO: 1623153 - DNA, 25 bp, Homo sapien
tcctcacctcatcatagatgataaa

SEQ ID NO: 1623154 - DNA, 25 bp, Homo sapien
agacccggcccaggcaggcaatagt

SEQ ID NO: 1623155 - DNA, 25 bp, Homo sapien
gtgcccttccctcaggatttgcagc

SEQ ID NO: 1623156 - DNA, 25 bp, Homo sapien
tgtagaaggtcttgtgcccttccct

SEQ ID NO: 1623157 - DNA, 25 bp, Homo sapien
aggtcttgtgcccttccctcaggat

SEQ ID NO: 1623158 - DNA, 25 bp, Homo sapien
tcttgtgcccttccctcaggatttg

SEQ ID NO: 1623159 - DNA, 25 bp, Homo sapien
tctcgtgcagaggagcatttccgaa

SEQ ID NO: 1623160 - DNA, 25 bp, Homo sapien
gatctcgtgcagaggagcatttccg

SEQ ID NO: 1623161 - DNA, 25 bp, Homo sapien
ggctcgatctcgtgcagaggagcat

SEQ ID NO: 1623162 - DNA, 25 bp, Homo sapien
tgcagaggagcatttccgaagacac

SEQ ID NO: 1623163 - DNA, 25 bp, Homo sapien
agaacccagcgaccagcgggttcat

SEQ ID NO: 1623164 - DNA, 25 bp, Homo sapien
cacaatggctccgaagaacccagcg

SEQ ID NO: 1623165 - DNA, 25 bp, Homo sapien
ccgctcccacaatggctccgaagaa

SEQ ID NO: 1623166 - DNA, 25 bp, Homo sapien
tcccacaatggctccgaagaaccca

SEQ ID NO: 1623167 - DNA, 25 bp, Homo sapien
aggacaaagaaacaagttgcctggt

SEQ ID NO: 1623168 - DNA, 25 bp, Homo sapien
aagaaacaagttgcctggttccagc

SEQ ID NO: 1623169 - DNA, 25 bp, Homo sapien
caaagaaacaagttgcctggttcca

SEQ ID NO: 1623170 - DNA, 25 bp, Homo sapien
taagtcccggtgttcccgcacaatc

SEQ ID NO: 1623171 - DNA, 25 bp, Homo sapien
atcccctgtacttggatttggagag

SEQ ID NO: 1623172 - DNA, 25 bp, Homo sapien
cttggatttggagaggtctggccat

SEQ ID NO: 1623173 - DNA, 25 bp, Homo sapien
cctgtacttggatttggagaggtct

SEQ ID NO: 1623174 - DNA, 25 bp, Homo sapien
tcccctgtacttggatttggagagg

SEQ ID NO: 1623175 - DNA, 25 bp, Homo sapien
gagcatcagccgtgcgttccaggac

SEQ ID NO: 1623176 - DNA, 25 bp, Homo sapien
cttgggatcggagcctcctgaattc

SEQ ID NO: 1623177 - DNA, 25 bp, Homo sapien
attccacgctgggaccttaatttgg

SEQ ID NO: 1623178 - DNA, 25 bp, Homo sapien
gttttaacacaaataaagatctcac

SEQ ID NO: 1623179 - DNA, 25 bp, Homo sapien
taaaaattggcaaaccttcagcaga

SEQ ID NO: 1623180 - DNA, 25 bp, Homo sapien
tatggcagtaataagagcaacagag

SEQ ID NO: 1623181 - DNA, 25 bp, Homo sapien
tggtttgtggctactataagcaact

SEQ ID NO: 1623182 - DNA, 25 bp, Homo sapien
agttttctctcaggccatagtgtag

SEQ ID NO: 1623183 - DNA, 25 bp, Homo sapien
caaagcgcttaagccacaactcagc

SEQ ID NO: 1623184 - DNA, 25 bp, Homo sapien
ttagatgtcaaagcgcttaagccac

SEQ ID NO: 1623185 - DNA, 25 bp, Homo sapien
gcacatggtccaagctgcctgccaa

SEQ ID NO: 1623186 - DNA, 25 bp, Homo sapien
catgcacatggtccaagctgcctgc

SEQ ID NO: 1623187 - DNA, 25 bp, Homo sapien
atcctcactgaacacatagactgat

SEQ ID NO: 1623188 - DNA, 25 bp, Homo sapien
tgaataaccaaagctacatggctgg

SEQ ID NO: 1623189 - DNA, 25 bp, Homo sapien
ccttttggcaagctgagcagcccct

SEQ ID NO: 1623190 - DNA, 25 bp, Homo sapien
cagtggtctaaaacaatgccaggaa

SEQ ID NO: 1623191 - DNA, 25 bp, Homo sapien
tgagtggctgcttagaaagaataaa

SEQ ID NO: 1623192 - DNA, 25 bp, Homo sapien
gcagcccaatctacttcttccaggt

SEQ ID NO: 1623193 - DNA, 25 bp, Homo sapien
cttccaggtctgagtcggcagtaat

SEQ ID NO: 1623194 - DNA, 25 bp, Homo sapien
gtctgagtcggcagtaatagtagaa

SEQ ID NO: 1623195 - DNA, 25 bp, Homo sapien
ccaggtctgagtcggcagtaatagt

SEQ ID NO: 1623196 - DNA, 25 bp, Homo sapien
tcgccatgtttgaggtcgaccagca

SEQ ID NO: 1623197 - DNA, 25 bp, Homo sapien
ctagatgtcggccacgaacgccaga

SEQ ID NO: 1623198 - DNA, 25 bp, Homo sapien
tgtcggccacgaacgccagacttag

SEQ ID NO: 1623199 - DNA, 25 bp, Homo sapien
cttagcctccggctcgccatgtttg

SEQ ID NO: 1623200 - DNA, 25 bp, Homo sapien
cacgcctgacttagccgctggcttg

SEQ ID NO: 1623201 - DNA, 25 bp, Homo sapien
tggcttgctgtgtccgaggtcgacc

SEQ ID NO: 1623202 - DNA, 25 bp, Homo sapien
ctgtgtccgaggtcgaccagcaggt

SEQ ID NO: 1623203 - DNA, 25 bp, Homo sapien
ggtcgaccagcaggtcttctcatca

SEQ ID NO: 1623204 - DNA, 25 bp, Homo sapien
gaagcccactggaccaagtgagatg

SEQ ID NO: 1623205 - DNA, 25 bp, Homo sapien
gagggaagcccactggaccaagtga

SEQ ID NO: 1623206 - DNA, 25 bp, Homo sapien
agcccactggaccaagtgagatgcc

SEQ ID NO: 1623207 - DNA, 25 bp, Homo sapien
gggaagcccactggaccaagtgaga

SEQ ID NO: 1623208 - DNA, 25 bp, Homo sapien
gggtcatcacgatgttgactgccag

SEQ ID NO: 1623209 - DNA, 25 bp, Homo sapien
gatgttgactgccagcaccgtacat

SEQ ID NO: 1623210 - DNA, 25 bp, Homo sapien
tcatcacgatgttgactgccagcac

SEQ ID NO: 1623211 - DNA, 25 bp, Homo sapien
cacgatgttgactgccagcaccgta

SEQ ID NO: 1623212 - DNA, 25 bp, Homo sapien
gacatgttgttagcttctcagagca

SEQ ID NO: 1623213 - DNA, 25 bp, Homo sapien
ttccctcccataaaggacatgttgt

SEQ ID NO: 1623214 - DNA, 25 bp, Homo sapien
cagagtggacaaatacatctggatc

SEQ ID NO: 1623215 - DNA, 25 bp, Homo sapien
gagcaccttgctttttgtattcagg

SEQ ID NO: 1623216 - DNA, 25 bp, Homo sapien
ttgtggacaaagaatgaagtcttgc

SEQ ID NO: 1623217 - DNA, 25 bp, Homo sapien
aaagaatgaagtcttgccattatct

SEQ ID NO: 1623218 - DNA, 25 bp, Homo sapien
tgtggacaaagaatgaagtcttgcc

SEQ ID NO: 1623219 - DNA, 25 bp, Homo sapien
gcatctacagctcctgtccttgaaa

SEQ ID NO: 1623220 - DNA, 25 bp, Homo sapien
ctacagctcctgtccttgaaagaat

SEQ ID NO: 1623221 - DNA, 25 bp, Homo sapien
actactatgttgcatctacagctcc

SEQ ID NO: 1623222 - DNA, 25 bp, Homo sapien
tatgttgcatctacagctcctgtcc

SEQ ID NO: 1623223 - DNA, 25 bp, Homo sapien
cacactactagcagatccacagcag

SEQ ID NO: 1623224 - DNA, 25 bp, Homo sapien
actactagcagatccacagcagggc

SEQ ID NO: 1623225 - DNA, 25 bp, Homo sapien
catgtgggcctccacactactagca

SEQ ID NO: 1623226 - DNA, 25 bp, Homo sapien
tgggcctccacactactagcagatc

SEQ ID NO: 1623227 - DNA, 25 bp, Homo sapien
cctctctggttatggatagcaccag

SEQ ID NO: 1623228 - DNA, 25 bp, Homo sapien
tctggttatggatagcaccaggata

SEQ ID NO: 1623229 - DNA, 25 bp, Homo sapien
ggttatggatagcaccaggatagtc

SEQ ID NO: 1623230 - DNA, 25 bp, Homo sapien
ttatggatagcaccaggatagtcaa

SEQ ID NO: 1623231 - DNA, 25 bp, Homo sapien
gtaggccgatctgccagttccttct

SEQ ID NO: 1623232 - DNA, 25 bp, Homo sapien
aagaggtggtgtttgctgactatac

SEQ ID NO: 1623233 - DNA, 25 bp, Homo sapien
agctcagagacttaatggattctga

SEQ ID NO: 1623234 - DNA, 25 bp, Homo sapien
ctgactatacccacacaaacaatga

SEQ ID NO: 1623235 - DNA, 25 bp, Homo sapien
gggaaccaagaacacaaactgctcc

SEQ ID NO: 1623236 - DNA, 25 bp, Homo sapien
tgggaaccaagaacacaaactgctc

SEQ ID NO: 1623237 - DNA, 25 bp, Homo sapien
ctgggaaccaagaacacaaactgct

SEQ ID NO: 1623238 - DNA, 25 bp, Homo sapien
gctgtgtgtatcctgccagtgtctc

SEQ ID NO: 1623239 - DNA, 25 bp, Homo sapien
tgctggccgggagcctcatgctggc

SEQ ID NO: 1623240 - DNA, 25 bp, Homo sapien
ctgtgtgtatcctgccagtgtctct

SEQ ID NO: 1623241 - DNA, 25 bp, Homo sapien
gctggccgggagcctcatgctggca

SEQ ID NO: 1623242 - DNA, 25 bp, Homo sapien
ggattaaattcctaacacatacgtg

SEQ ID NO: 1623243 - DNA, 25 bp, Homo sapien
gagggcagcaactctgccattcatc

SEQ ID NO: 1623244 - DNA, 25 bp, Homo sapien
gcctgctgaggtagaggctttccct

SEQ ID NO: 1623245 - DNA, 25 bp, Homo sapien
tgaatacagcacaagtggattaaat

SEQ ID NO: 1623246 - DNA, 25 bp, Homo sapien
gaagatcgatgctttctcagacacc

SEQ ID NO: 1623247 - DNA, 25 bp, Homo sapien
tggtgacctctcgaagatcgatgct

SEQ ID NO: 1623248 - DNA, 25 bp, Homo sapien
tctcgaagatcgatgctttctcaga

SEQ ID NO: 1623249 - DNA, 25 bp, Homo sapien
gacctctcgaagatcgatgctttct

SEQ ID NO: 1623250 - DNA, 25 bp, Homo sapien
tgagaccagtctctcatccagtgct

SEQ ID NO: 1623251 - DNA, 25 bp, Homo sapien
ccactgtcttctcagatagagatgt

SEQ ID NO: 1623252 - DNA, 25 bp, Homo sapien
tcttggcgatggaggttttttctga

SEQ ID NO: 1623253 - DNA, 25 bp, Homo sapien
gctttatcaccactatcttctccta

SEQ ID NO: 1623254 - DNA, 25 bp, Homo sapien
aatgaaatctattcccatcaacttc

SEQ ID NO: 1623255 - DNA, 25 bp, Homo sapien
gctaggatttagattaccataacta

SEQ ID NO: 1623256 - DNA, 25 bp, Homo sapien
tattcatcctctttaagctaggatt

SEQ ID NO: 1623257 - DNA, 25 bp, Homo sapien
aaatgaaatctattcccatcaactt

SEQ ID NO: 1623258 - DNA, 25 bp, Homo sapien
cctgcaagctaaggcacaggtagtg

SEQ ID NO: 1623259 - DNA, 25 bp, Homo sapien
gaacacaacgccagtagcaccagtg

SEQ ID NO: 1623260 - DNA, 25 bp, Homo sapien
gcaagctaaggcacaggtagtggca

SEQ ID NO: 1623261 - DNA, 25 bp, Homo sapien
ctgtgaggcaataactgggaacaca

SEQ ID NO: 1623262 - DNA, 25 bp, Homo sapien
tgttgagagcctccatgtacaccac

SEQ ID NO: 1623263 - DNA, 25 bp, Homo sapien
gtatcctctacataggtctccttca

SEQ ID NO: 1623264 - DNA, 25 bp, Homo sapien
gggaggtatcctctacataggtctc

SEQ ID NO: 1623265 - DNA, 25 bp, Homo sapien
tgctcttggcacacctttggctgcc

SEQ ID NO: 1623266 - DNA, 25 bp, Homo sapien
agatgtgaagtgctactgccagggc

SEQ ID NO: 1623267 - DNA, 25 bp, Homo sapien
caaaggaatttacccatgaagttct

SEQ ID NO: 1623268 - DNA, 25 bp, Homo sapien
gaagctgctaattccttctaactat

SEQ ID NO: 1623269 - DNA, 25 bp, Homo sapien
gaaaatggagcgtgcttaaaataat

SEQ ID NO: 1623270 - DNA, 25 bp, Homo sapien
taccaaggagagtgcgagaaatctt

SEQ ID NO: 1623271 - DNA, 25 bp, Homo sapien
gaagaacaatatcatgacaggcagt

SEQ ID NO: 1623272 - DNA, 25 bp, Homo sapien
gacggtgccaacatgatactgaaac

SEQ ID NO: 1623273 - DNA, 25 bp, Homo sapien
tataaagggacacctgttgctgtcg

SEQ ID NO: 1623274 - DNA, 25 bp, Homo sapien
ctcctgtgaggtgtttgtcttccat

SEQ ID NO: 1623275 - DNA, 25 bp, Homo sapien
ggtccagcattcagctcctgtgagg

SEQ ID NO: 1623276 - DNA, 25 bp, Homo sapien
tgtggtccagcattcagctcctgtg

SEQ ID NO: 1623277 - DNA, 25 bp, Homo sapien
gctgtggtccagcattcagctcctg

SEQ ID NO: 1623278 - DNA, 25 bp, Homo sapien
caatgatgcttaaaagccagaccgc

SEQ ID NO: 1623279 - DNA, 25 bp, Homo sapien
cagaccgcacacatgagcttcttga

SEQ ID NO: 1623280 - DNA, 25 bp, Homo sapien
caacattcacagacaatgatgctta

SEQ ID NO: 1623281 - DNA, 25 bp, Homo sapien
ttaaaagccagaccgcacacatgag

SEQ ID NO: 1623282 - DNA, 25 bp, Homo sapien
gagctgccagcatgatcatgtgatt

SEQ ID NO: 1623283 - DNA, 25 bp, Homo sapien
catgtgattgcaaaccctgagctcc

SEQ ID NO: 1623284 - DNA, 25 bp, Homo sapien
tgagctccttccaataaccatgtgt

SEQ ID NO: 1623285 - DNA, 25 bp, Homo sapien
aacagtgatggtgtgagctgtgccc

SEQ ID NO: 1623286 - DNA, 25 bp, Homo sapien
gctccttcaggaggtcctcgatcat

SEQ ID NO: 1623287 - DNA, 25 bp, Homo sapien
ctggggagcagtacagctccttcag

SEQ ID NO: 1623288 - DNA, 25 bp, Homo sapien
agcagtacagctccttcaggaggtc

SEQ ID NO: 1623289 - DNA, 25 bp, Homo sapien
agctccttcaggaggtcctcgatca

SEQ ID NO: 1623290 - DNA, 25 bp, Homo sapien
caggaagactatggtgaagccgttc

SEQ ID NO: 1623291 - DNA, 25 bp, Homo sapien
cagagttgttgacagtcaggaagac

SEQ ID NO: 1623292 - DNA, 25 bp, Homo sapien
gacctcctccctctatttgccgggc

SEQ ID NO: 1623293 - DNA, 25 bp, Homo sapien
gtgaagccgttccatgggacctcct

SEQ ID NO: 1623294 - DNA, 25 bp, Homo sapien
aggaatacatgttgataaacttctg

SEQ ID NO: 1623295 - DNA, 25 bp, Homo sapien
tgtcttatctttatggaaattcaaa

SEQ ID NO: 1623296 - DNA, 25 bp, Homo sapien
caaaattccagaactgtacccaaat

SEQ ID NO: 1623297 - DNA, 25 bp, Homo sapien
ttaacaagggatcctagctaagacc

SEQ ID NO: 1623298 - DNA, 25 bp, Homo sapien
ctttcctgagttcaaaaggaaggtg

SEQ ID NO: 1623299 - DNA, 25 bp, Homo sapien
aacatgtcattgtcggcctgcctcc

SEQ ID NO: 1623300 - DNA, 25 bp, Homo sapien
tgcagctatagccttgacaaacatg

SEQ ID NO: 1623301 - DNA, 25 bp, Homo sapien
agaacaggcctttacccctcaggag

SEQ ID NO: 1623302 - DNA, 25 bp, Homo sapien
cgttaataacagttgtagcccagag

SEQ ID NO: 1623303 - DNA, 25 bp, Homo sapien
gtctgatttcacaaagacctctagg

SEQ ID NO: 1623304 - DNA, 25 bp, Homo sapien
tgcagggccttgtctgatttcacaa

SEQ ID NO: 1623305 - DNA, 25 bp, Homo sapien
tgctgcagggccttgtctgatttca

SEQ ID NO: 1623306 - DNA, 25 bp, Homo sapien
tttcacaaagacctctaggtccaca

SEQ ID NO: 1623307 - DNA, 25 bp, Homo sapien
cacaataagacagcccagaggtatg

SEQ ID NO: 1623308 - DNA, 25 bp, Homo sapien
ggtgtttacaatggaggtgttgaca

SEQ ID NO: 1623309 - DNA, 25 bp, Homo sapien
tctaggtccacaataagacagccca

SEQ ID NO: 1623310 - DNA, 25 bp, Homo sapien
gatttcacaagagaactctaggtcc

SEQ ID NO: 1623311 - DNA, 25 bp, Homo sapien
taggttgtccctgacaaggaccaca

SEQ ID NO: 1623312 - DNA, 25 bp, Homo sapien
ctaggttgtccctgacaaggaccac

SEQ ID NO: 1623313 - DNA, 25 bp, Homo sapien
aggttgtccctgacaaggaccacag

SEQ ID NO: 1623314 - DNA, 25 bp, Homo sapien
cctgatgaggacagctgtgaatact

SEQ ID NO: 1623315 - DNA, 25 bp, Homo sapien
gatgaggacagctgtgaatactttg

SEQ ID NO: 1623316 - DNA, 25 bp, Homo sapien
tgaggacagctgtgaatactttgac

SEQ ID NO: 1623317 - DNA, 25 bp, Homo sapien
gaggacagctgtgaatactttgact

SEQ ID NO: 1623318 - DNA, 25 bp, Homo sapien
aagagaacagccatgaacacctggc

SEQ ID NO: 1623319 - DNA, 25 bp, Homo sapien
tgaagagaacagccatgaacacctg

SEQ ID NO: 1623320 - DNA, 25 bp, Homo sapien
gaagagaacagccatgaacacctgg

SEQ ID NO: 1623321 - DNA, 25 bp, Homo sapien
ctgaagagaacagccatgaacacct

SEQ ID NO: 1623322 - DNA, 25 bp, Homo sapien
agccattctcatcaaggcatatctg

SEQ ID NO: 1623323 - DNA, 25 bp, Homo sapien
aaattgttcattgccattctcattg

SEQ ID NO: 1623324 - DNA, 25 bp, Homo sapien
cattctcatcaaggcatatctggtt

SEQ ID NO: 1623325 - DNA, 25 bp, Homo sapien
cattgccattctcattggagcttcc

SEQ ID NO: 1623326 - DNA, 25 bp, Homo sapien
tgttcacagccatccaaatactcat

SEQ ID NO: 1623327 - DNA, 25 bp, Homo sapien
ccatccaaatactcattagggcaag

SEQ ID NO: 1623328 - DNA, 25 bp, Homo sapien
tagggcaagtccagatgttcagggc

SEQ ID NO: 1623329 - DNA, 25 bp, Homo sapien
caaatactcattagggcaagtccag

SEQ ID NO: 1623330 - DNA, 25 bp, Homo sapien
tccacagtcatccttatcaggaaca

SEQ ID NO: 1623331 - DNA, 25 bp, Homo sapien
gaacacccctggtgttcacatccat

SEQ ID NO: 1623332 - DNA, 25 bp, Homo sapien
ggccagcctgggtttccacagtcat

SEQ ID NO: 1623333 - DNA, 25 bp, Homo sapien
tcatccttatcaggaacacccctgg

SEQ ID NO: 1623334 - DNA, 25 bp, Homo sapien
tgaatccagtagattcccagacatg

SEQ ID NO: 1623335 - DNA, 25 bp, Homo sapien
ctaactgggccacaaactctttctg

SEQ ID NO: 1623336 - DNA, 25 bp, Homo sapien
tgcctcttgacattttcaggcatag

SEQ ID NO: 1623337 - DNA, 25 bp, Homo sapien
acatgcagggtcatgtctaactggg

SEQ ID NO: 1623338 - DNA, 25 bp, Homo sapien
ggctccatggcagaacaggtctccc

SEQ ID NO: 1623339 - DNA, 25 bp, Homo sapien
gtggctccatggcagaacaggtctc

SEQ ID NO: 1623340 - DNA, 25 bp, Homo sapien
gctccatggcagaacaggtctccca

SEQ ID NO: 1623341 - DNA, 25 bp, Homo sapien
tggctccatggcagaacaggtctcc

SEQ ID NO: 1623342 - DNA, 25 bp, Homo sapien
tcccgtggcaccaacagtggcagca

SEQ ID NO: 1623343 - DNA, 25 bp, Homo sapien
cctcccgtggcaccaacagtggcag

SEQ ID NO: 1623344 - DNA, 25 bp, Homo sapien
cccgtggcaccaacagtggcagcag

SEQ ID NO: 1623345 - DNA, 25 bp, Homo sapien
ctcccgtggcaccaacagtggcagc

SEQ ID NO: 1623346 - DNA, 25 bp, Homo sapien
ctccacatccaaggaacacggggct

SEQ ID NO: 1623347 - DNA, 25 bp, Homo sapien
ccacatccaaggaacacggggcttc

SEQ ID NO: 1623348 - DNA, 25 bp, Homo sapien
tccacatccaaggaacacggggctt

SEQ ID NO: 1623349 - DNA, 25 bp, Homo sapien
gcagctgtcctttgcaaggtggtct

SEQ ID NO: 1623350 - DNA, 25 bp, Homo sapien
agctgtcctttgcaaggtggtctgt

SEQ ID NO: 1623351 - DNA, 25 bp, Homo sapien
ggcaggttgagtatgcagctgtcct

SEQ ID NO: 1623352 - DNA, 25 bp, Homo sapien
agaaacagcggcaggttgagtatgc

SEQ ID NO: 1623353 - DNA, 25 bp, Homo sapien
cgcaaagacaaagagtgtgcttgtt

SEQ ID NO: 1623354 - DNA, 25 bp, Homo sapien
caaagagtgtgcttgttgaatacca

SEQ ID NO: 1623355 - DNA, 25 bp, Homo sapien
gcttgttgaataccaagttgtatag

SEQ ID NO: 1623356 - DNA, 25 bp, Homo sapien
tcaaaactgcagaagcgcaaagaca

SEQ ID NO: 1623357 - DNA, 25 bp, Homo sapien
ccaggaaatgatgggcacacccttg

SEQ ID NO: 1623358 - DNA, 25 bp, Homo sapien
gccatggcaatcttccaggaaatga

SEQ ID NO: 1623359 - DNA, 25 bp, Homo sapien
cacccttgtcattataggatgagca

SEQ ID NO: 1623360 - DNA, 25 bp, Homo sapien
gaaatgatgggcacacccttgtcat

SEQ ID NO: 1623361 - DNA, 25 bp, Homo sapien
caggcatgactgtacgtttttggtt

SEQ ID NO: 1623362 - DNA, 25 bp, Homo sapien
tcagcaaacaggcatgactgtacgt

SEQ ID NO: 1623363 - DNA, 25 bp, Homo sapien
ccatttaagttctgggctgtaaagg

SEQ ID NO: 1623364 - DNA, 25 bp, Homo sapien
tgtaaaggcacttcctgagtaggcc

SEQ ID NO: 1623365 - DNA, 25 bp, Homo sapien
tgccaactatgctgtgctctgccct

SEQ ID NO: 1623366 - DNA, 25 bp, Homo sapien
tccatcaggaaggaatctaatttga

SEQ ID NO: 1623367 - DNA, 25 bp, Homo sapien
gaaggaatctaatttgagtcctgca

SEQ ID NO: 1623368 - DNA, 25 bp, Homo sapien
tctctgtgttcctccgtgacgtccc

SEQ ID NO: 1623369 - DNA, 25 bp, Homo sapien
catgttcgtcatcgtggaatggtta

SEQ ID NO: 1623370 - DNA, 25 bp, Homo sapien
ctgctgcatgttcgtcatcgtggaa

SEQ ID NO: 1623371 - DNA, 25 bp, Homo sapien
cgtggaatggttatgaatgactgag

SEQ ID NO: 1623372 - DNA, 25 bp, Homo sapien
tcgtcatcgtggaatggttatgaat

SEQ ID NO: 1623373 - DNA, 25 bp, Homo sapien
tatctcttctgtccggtgttggcaa

SEQ ID NO: 1623374 - DNA, 25 bp, Homo sapien
tctgcagcaagcatggtgtcataca

SEQ ID NO: 1623375 - DNA, 25 bp, Homo sapien
gaagctgcgaggtatgggtccctca

SEQ ID NO: 1623376 - DNA, 25 bp, Homo sapien
catggtgtcatacaaggaagctgcg

SEQ ID NO: 1623377 - DNA, 25 bp, Homo sapien
aacattgcattggcagagcaagctg

SEQ ID NO: 1623378 - DNA, 25 bp, Homo sapien
cattgcattggcagagcaagctgcc

SEQ ID NO: 1623379 - DNA, 25 bp, Homo sapien
acattgcattggcagagcaagctgc

SEQ ID NO: 1623380 - DNA, 25 bp, Homo sapien
tgatgccaccatcgtattcaggaca

SEQ ID NO: 1623381 - DNA, 25 bp, Homo sapien
aaccatgacgtcattgatgccacca

SEQ ID NO: 1623382 - DNA, 25 bp, Homo sapien
attgatgccaccatcgtattcagga

SEQ ID NO: 1623383 - DNA, 25 bp, Homo sapien
ccccaaaccatgacgtcattgatgc

SEQ ID NO: 1623384 - DNA, 25 bp, Homo sapien
gcagagccagcacatctagaagctg

SEQ ID NO: 1623385 - DNA, 25 bp, Homo sapien
gcttaggatacatgtccagctgccc

SEQ ID NO: 1623386 - DNA, 25 bp, Homo sapien
tagaagctgcgctatggcattttcc

SEQ ID NO: 1623387 - DNA, 25 bp, Homo sapien
tcagaagactcatgagcagcagagc

SEQ ID NO: 1623388 - DNA, 25 bp, Homo sapien
ggtcatggatcttttgtggccggct

SEQ ID NO: 1623389 - DNA, 25 bp, Homo sapien
tggatcttttgtggccggcttgagc

SEQ ID NO: 1623390 - DNA, 25 bp, Homo sapien
ctaaggccacgtgtgctgcagcttg

SEQ ID NO: 1623391 - DNA, 25 bp, Homo sapien
cggcttgagcttggtgatttctgtg

SEQ ID NO: 1623392 - DNA, 25 bp, Homo sapien
tgaatgccttctctcagacccagca

SEQ ID NO: 1623393 - DNA, 25 bp, Homo sapien
gaatgccttctctcagacccagcag

SEQ ID NO: 1623394 - DNA, 25 bp, Homo sapien
ttaaagtcggaccacaaagaagcaa

SEQ ID NO: 1623395 - DNA, 25 bp, Homo sapien
taaagtcggaccacaaagaagcaac

SEQ ID NO: 1623396 - DNA, 25 bp, Homo sapien
ccagatggcaagcttcttacctcca

SEQ ID NO: 1623397 - DNA, 25 bp, Homo sapien
agctctccacttaattctgtggatg

SEQ ID NO: 1623398 - DNA, 25 bp, Homo sapien
tggcaagcttcttacctccaccttt

SEQ ID NO: 1623399 - DNA, 25 bp, Homo sapien
atctgacaggagaataagaatcaaa

SEQ ID NO: 1623400 - DNA, 25 bp, Homo sapien
tccgggaggcctgaaagagtaaata

SEQ ID NO: 1623401 - DNA, 25 bp, Homo sapien
ttcatgaggcgccaatagtccggga

SEQ ID NO: 1623402 - DNA, 25 bp, Homo sapien
ttcctggcattggacaaggtgcaca

SEQ ID NO: 1623403 - DNA, 25 bp, Homo sapien
gcagccaccggctcatagcatttgg

SEQ ID NO: 1623404 - DNA, 25 bp, Homo sapien
tactgcagggccatggtataaggaa

SEQ ID NO: 1623405 - DNA, 25 bp, Homo sapien
gaccaatctgagctaaaaagcggtg

SEQ ID NO: 1623406 - DNA, 25 bp, Homo sapien
caatcagtgatgtgagatgcttagg

SEQ ID NO: 1623407 - DNA, 25 bp, Homo sapien
aaaagcggtgatagtgatttctgct

SEQ ID NO: 1623408 - DNA, 25 bp, Homo sapien
caatcaggggcctccggaggccatg

SEQ ID NO: 1623409 - DNA, 25 bp, Homo sapien
tgtgtggcaagctgtaaagtctaca

SEQ ID NO: 1623410 - DNA, 25 bp, Homo sapien
caaaatgtgtggcaagctgtaaagt

SEQ ID NO: 1623411 - DNA, 25 bp, Homo sapien
ccatgtgcgcagtcccaggagagtg

SEQ ID NO: 1623412 - DNA, 25 bp, Homo sapien
gcagcatccgttcctctcccggggg

SEQ ID NO: 1623413 - DNA, 25 bp, Homo sapien
gagcagcatccgttcctctcccggg

SEQ ID NO: 1623414 - DNA, 25 bp, Homo sapien
gcctgagcagcatccgttcctctcc

SEQ ID NO: 1623415 - DNA, 25 bp, Homo sapien
tgagcagcatccgttcctctcccgg

SEQ ID NO: 1623416 - DNA, 25 bp, Homo sapien
gggacattgtgagctgaccccacgc

SEQ ID NO: 1623417 - DNA, 25 bp, Homo sapien
tcgagtaacaggtgatcaggagtcc

SEQ ID NO: 1623418 - DNA, 25 bp, Homo sapien
cagctggtgacaggctcgagtaaca

SEQ ID NO: 1623419 - DNA, 25 bp, Homo sapien
aagttctctttgtgatgaagccagc

SEQ ID NO: 1623420 - DNA, 25 bp, Homo sapien
aggaggtgctttatcagagggatgg

SEQ ID NO: 1623421 - DNA, 25 bp, Homo sapien
gggatggcggtccaggtcattctta

SEQ ID NO: 1623422 - DNA, 25 bp, Homo sapien
ctttatcagagggatggcggtccag

SEQ ID NO: 1623423 - DNA, 25 bp, Homo sapien
ggcggtccaggtcattcttaatctt

SEQ ID NO: 1623424 - DNA, 25 bp, Homo sapien
gtcatgtatgtcgagcacagctcct

SEQ ID NO: 1623425 - DNA, 25 bp, Homo sapien
ccaattgcagcacctagaattctgc

SEQ ID NO: 1623426 - DNA, 25 bp, Homo sapien
ctgctattggcttcaaggtgcaagc

SEQ ID NO: 1623427 - DNA, 25 bp, Homo sapien
aggtgcaagcccgacaaagcccttt

SEQ ID NO: 1623428 - DNA, 25 bp, Homo sapien
ctagagagccccgtggtaactggtt

SEQ ID NO: 1623429 - DNA, 25 bp, Homo sapien
tggggcctgcgtcttggaacacgct

SEQ ID NO: 1623430 - DNA, 25 bp, Homo sapien
gccccgtggtaactggttatctcca

SEQ ID NO: 1623431 - DNA, 25 bp, Homo sapien
cgtggtaactggttatctccacaca

SEQ ID NO: 1623432 - DNA, 25 bp, Homo sapien
tattaagtgacttgataagcttctc

SEQ ID NO: 1623433 - DNA, 25 bp, Homo sapien
tatgcagagtattaagtgacttgat

SEQ ID NO: 1623434 - DNA, 25 bp, Homo sapien
aggtttgcactagcagccgtgtgta

SEQ ID NO: 1623435 - DNA, 25 bp, Homo sapien
tctctgcaggatacaaggctttcca

SEQ ID NO: 1623436 - DNA, 25 bp, Homo sapien
ccaggtccttcaggcagcatgaata

SEQ ID NO: 1623437 - DNA, 25 bp, Homo sapien
aggtccttcaggcagcatgaatact

SEQ ID NO: 1623438 - DNA, 25 bp, Homo sapien
ggctgacaaattccaggtccttcag

SEQ ID NO: 1623439 - DNA, 25 bp, Homo sapien
ccacgtgctggctgacaaattccag

SEQ ID NO: 1623440 - DNA, 25 bp, Homo sapien
cgatgttgattatgacaagactttg

SEQ ID NO: 1623441 - DNA, 25 bp, Homo sapien
aagactttgacccaagttgtcacag

SEQ ID NO: 1623442 - DNA, 25 bp, Homo sapien
aggatcacgatgttgattatgacaa

SEQ ID NO: 1623443 - DNA, 25 bp, Homo sapien
ttgacccaagttgtcacaggagtag

SEQ ID NO: 1623444 - DNA, 25 bp, Homo sapien
tgtctcagacacctcataaaacatt

SEQ ID NO: 1623445 - DNA, 25 bp, Homo sapien
gtgtctcagacacctcataaaacat

SEQ ID NO: 1623446 - DNA, 25 bp, Homo sapien
tggtccagctccatcaccaagcagt

SEQ ID NO: 1623447 - DNA, 25 bp, Homo sapien
caccaagcagtgtgggcctgattct

SEQ ID NO: 1623448 - DNA, 25 bp, Homo sapien
tgtgcaaggtgcaccgcctccgaac

SEQ ID NO: 1623449 - DNA, 25 bp, Homo sapien
ctccgaacatcccaaagctcccaga

SEQ ID NO: 1623450 - DNA, 25 bp, Homo sapien
catattaggccaattacttttacta

SEQ ID NO: 1623451 - DNA, 25 bp, Homo sapien
ttatctttggcgatgttatcttgag

SEQ ID NO: 1623452 - DNA, 25 bp, Homo sapien
cattatgaaccattagaggctgttc

SEQ ID NO: 1623453 - DNA, 25 bp, Homo sapien
tggccatcagtctgattcatattag

SEQ ID NO: 1623454 - DNA, 25 bp, Homo sapien
tacttgcagtcctggttactcggga

SEQ ID NO: 1623455 - DNA, 25 bp, Homo sapien
caaattctagcttcatcgtcctggg

SEQ ID NO: 1623456 - DNA, 25 bp, Homo sapien
tcacaatgtcaatggcctccaaggg

SEQ ID NO: 1623457 - DNA, 25 bp, Homo sapien
gaaaactgcagtgaactagctcaag

SEQ ID NO: 1623458 - DNA, 25 bp, Homo sapien
tgtgctgctggtgattaattgtggt

SEQ ID NO: 1623459 - DNA, 25 bp, Homo sapien
gctgctggtgattaattgtggtaat

SEQ ID NO: 1623460 - DNA, 25 bp, Homo sapien
gaggtcggcgaaggtgaggttgtgc

SEQ ID NO: 1623461 - DNA, 25 bp, Homo sapien
tcggcgaaggtgaggttgtgctgct

SEQ ID NO: 1623462 - DNA, 25 bp, Homo sapien
caccaaagacagacgagagagggag

SEQ ID NO: 1623463 - DNA, 25 bp, Homo sapien
acacaccaaagacagacgagagagg

SEQ ID NO: 1623464 - DNA, 25 bp, Homo sapien
ccacacaccaaagacagacgagaga

SEQ ID NO: 1623465 - DNA, 25 bp, Homo sapien
caccacacaccaaagacagacgaga

SEQ ID NO: 1623466 - DNA, 25 bp, Homo sapien
tgcccgcatgagaaagctcaaggct

SEQ ID NO: 1623467 - DNA, 25 bp, Homo sapien
cgaggccgcattccctaagatgaca

SEQ ID NO: 1623468 - DNA, 25 bp, Homo sapien
ttgtttccaatggtgcgaggccgca

SEQ ID NO: 1623469 - DNA, 25 bp, Homo sapien
taagatgacactagtcctcttcatg

SEQ ID NO: 1623470 - DNA, 25 bp, Homo sapien
agttcagtgcccacagtgagtgcag

SEQ ID NO: 1623471 - DNA, 25 bp, Homo sapien
tgcccacagtgagtgcagtgagagg

SEQ ID NO: 1623472 - DNA, 25 bp, Homo sapien
cccacagtgagtgcagtgagaggtg

SEQ ID NO: 1623473 - DNA, 25 bp, Homo sapien
ttcagtgcccacagtgagtgcagtg

SEQ ID NO: 1623474 - DNA, 25 bp, Homo sapien
acataacagcggtgaacctggcctg

SEQ ID NO: 1623475 - DNA, 25 bp, Homo sapien
gactggaatagcaaccaacaggctg

SEQ ID NO: 1623476 - DNA, 25 bp, Homo sapien
gctgatatccaagaagcgccctggc

SEQ ID NO: 1623477 - DNA, 25 bp, Homo sapien
cactgcctggtgaaaatatactgac

SEQ ID NO: 1623478 - DNA, 25 bp, Homo sapien
gcagcacaactgcacaccagacagt

SEQ ID NO: 1623479 - DNA, 25 bp, Homo sapien
cctgagcttctacatggcagttcta

SEQ ID NO: 1623480 - DNA, 25 bp, Homo sapien
cagacagtcacccttcttcctgaga

SEQ ID NO: 1623481 - DNA, 25 bp, Homo sapien
tgcttttctgcatcaccaccgttca

SEQ ID NO: 1623482 - DNA, 25 bp, Homo sapien
ggacttgaatcaaagcaacgagcct

SEQ ID NO: 1623483 - DNA, 25 bp, Homo sapien
cctcaggtattggtgtgggtcaaga

SEQ ID NO: 1623484 - DNA, 25 bp, Homo sapien
gaaccttagagcttgtccggacttg

SEQ ID NO: 1623485 - DNA, 25 bp, Homo sapien
gaattttctatggtgctcctgggag

SEQ ID NO: 1623486 - DNA, 25 bp, Homo sapien
acacagatgctgaggagtggtcctg

SEQ ID NO: 1623487 - DNA, 25 bp, Homo sapien
tgggcggagcaaacaccagcttcac

SEQ ID NO: 1623488 - DNA, 25 bp, Homo sapien
gcacgagacgctccaaggagccaga

SEQ ID NO: 1623489 - DNA, 25 bp, Homo sapien
gagacacaggtatggtattagttgc

SEQ ID NO: 1623490 - DNA, 25 bp, Homo sapien
tttcttgatgccgcctccaaagaac

SEQ ID NO: 1623491 - DNA, 25 bp, Homo sapien
gatgaaggatttgtccaaatgtatt

SEQ ID NO: 1623492 - DNA, 25 bp, Homo sapien
tattttcttgatgccgcctccaaag

SEQ ID NO: 1623493 - DNA, 25 bp, Homo sapien
agatgaaggatttgtccaaatgtat

SEQ ID NO: 1623494 - DNA, 25 bp, Homo sapien
gactccagacccacggagaggtggc

SEQ ID NO: 1623495 - DNA, 25 bp, Homo sapien
cagctcggaagacccaaccttacat

SEQ ID NO: 1623496 - DNA, 25 bp, Homo sapien
agttgccgggagatagctgagcctt

SEQ ID NO: 1623497 - DNA, 25 bp, Homo sapien
gctgagccttgtactgagatcgtga

SEQ ID NO: 1623498 - DNA, 25 bp, Homo sapien
tatcttgtttcgttgcaaatgagtt

SEQ ID NO: 1623499 - DNA, 25 bp, Homo sapien
aatatcttgtttcgttgcaaatgag

SEQ ID NO: 1623500 - DNA, 25 bp, Homo sapien
atcttgtttcgttgcaaatgagttt

SEQ ID NO: 1623501 - DNA, 25 bp, Homo sapien
aaatatcttgtttcgttgcaaatga

SEQ ID NO: 1623502 - DNA, 25 bp, Homo sapien
ccttacaggcttgctcagtggctat

SEQ ID NO: 1623503 - DNA, 25 bp, Homo sapien
gatggcttctgcaaactccccaggt

SEQ ID NO: 1623504 - DNA, 25 bp, Homo sapien
tgggcagaccaatagccttacaggc

SEQ ID NO: 1623505 - DNA, 25 bp, Homo sapien
catgcacagtctcttagttgggtca

SEQ ID NO: 1623506 - DNA, 25 bp, Homo sapien
gatgctgtaatcaagctgcctggtc

SEQ ID NO: 1623507 - DNA, 25 bp, Homo sapien
tcgttaacaattccaagagctggcc

SEQ ID NO: 1623508 - DNA, 25 bp, Homo sapien
taactaagagagcacaacgggaatg

SEQ ID NO: 1623509 - DNA, 25 bp, Homo sapien
cattaaagggcataaaggtcactca

SEQ ID NO: 1623510 - DNA, 25 bp, Homo sapien
tctgtaagctgttgctggaactgac

SEQ ID NO: 1623511 - DNA, 25 bp, Homo sapien
ttcctttcagaaggaccaccatgcc

SEQ ID NO: 1623512 - DNA, 25 bp, Homo sapien
agtttagaggcagagcttacaaccc

SEQ ID NO: 1623513 - DNA, 25 bp, Homo sapien
taagatagtaagtccgagagatggt

SEQ ID NO: 1623514 - DNA, 25 bp, Homo sapien
aaatagccctaaaggattctttatg

SEQ ID NO: 1623515 - DNA, 25 bp, Homo sapien
aatagccctaaaggattctttatga

SEQ ID NO: 1623516 - DNA, 25 bp, Homo sapien
gtgactatgtaagcacaggactggc

SEQ ID NO: 1623517 - DNA, 25 bp, Homo sapien
gcccagtgactatgtaagcacagga

SEQ ID NO: 1623518 - DNA, 25 bp, Homo sapien
tggtcagggcctcgttctgagcctt

SEQ ID NO: 1623519 - DNA, 25 bp, Homo sapien
agggcctcgttctgagccttcctct

SEQ ID NO: 1623520 - DNA, 25 bp, Homo sapien
tgtggtcagggcctcgttctgagcc

SEQ ID NO: 1623521 - DNA, 25 bp, Homo sapien
ctgctgtggtcagggcctcgttctg

SEQ ID NO: 1623522 - DNA, 25 bp, Homo sapien
ctcaagatcacagataaaaggcact

SEQ ID NO: 1623523 - DNA, 25 bp, Homo sapien
gggcagggtcttcacccattctaat

SEQ ID NO: 1623524 - DNA, 25 bp, Homo sapien
ccattctaatgtgtaatcctctgag

SEQ ID NO: 1623525 - DNA, 25 bp, Homo sapien
tgagtgcaaggactctctgaaagtc

SEQ ID NO: 1623526 - DNA, 25 bp, Homo sapien
gaaagtcttggcacacatccaaaac

SEQ ID NO: 1623527 - DNA, 25 bp, Homo sapien
tgtgcatagtcattgacatgcttca

SEQ ID NO: 1623528 - DNA, 25 bp, Homo sapien
tgcagcagccaaagaaccagcaccg

SEQ ID NO: 1623529 - DNA, 25 bp, Homo sapien
gaaccagcaccgatacctaaatgtg

SEQ ID NO: 1623530 - DNA, 25 bp, Homo sapien
gtggagatctttgttgaggaatcct

SEQ ID NO: 1623531 - DNA, 25 bp, Homo sapien
ccgctttccagagcttctataacca

SEQ ID NO: 1623532 - DNA, 25 bp, Homo sapien
tgacattgtaagacttaatggaggc

SEQ ID NO: 1623533 - DNA, 25 bp, Homo sapien
agacttaatggaggcttcttccagg

SEQ ID NO: 1623534 - DNA, 25 bp, Homo sapien
ctataaccaggcttgatgggatgac

SEQ ID NO: 1623535 - DNA, 25 bp, Homo sapien
catagaggcttcatgaagctggctg

SEQ ID NO: 1623536 - DNA, 25 bp, Homo sapien
ccccatagaggcttcatgaagctgg

SEQ ID NO: 1623537 - DNA, 25 bp, Homo sapien
ggctgtctaggcaggtaccccttgc

SEQ ID NO: 1623538 - DNA, 25 bp, Homo sapien
gggctgtctaggcaggtaccccttg

SEQ ID NO: 1623539 - DNA, 25 bp, Homo sapien
tgaatcctcaaaggtgatgctagaa

SEQ ID NO: 1623540 - DNA, 25 bp, Homo sapien
aggtgatgctagaaggtgcattggg

SEQ ID NO: 1623541 - DNA, 25 bp, Homo sapien
cctgaatcctcaaaggtgatgctag

SEQ ID NO: 1623542 - DNA, 25 bp, Homo sapien
accctgaatcctcaaaggtgatgct

SEQ ID NO: 1623543 - DNA, 25 bp, Homo sapien
gcccttgagggctgagtaagtacac

SEQ ID NO: 1623544 - DNA, 25 bp, Homo sapien
agtacacagtttggagaaatccctg

SEQ ID NO: 1623545 - DNA, 25 bp, Homo sapien
aatccctgagaaccactgagagcct

SEQ ID NO: 1623546 - DNA, 25 bp, Homo sapien
tgagaaccactgagagcctggatgg

SEQ ID NO: 1623547 - DNA, 25 bp, Homo sapien
caactgcaatttcagctgtccacag

SEQ ID NO: 1623548 - DNA, 25 bp, Homo sapien
ccacagcaccctgaaggctgcaaaa

SEQ ID NO: 1623549 - DNA, 25 bp, Homo sapien
tgcaatttcagctgtccacagcacc

SEQ ID NO: 1623550 - DNA, 25 bp, Homo sapien
accctgaaggctgcaaaaccactga

SEQ ID NO: 1623551 - DNA, 25 bp, Homo sapien
ccatctggtcttcgtggaaagccac

SEQ ID NO: 1623552 - DNA, 25 bp, Homo sapien
taaatctgtcttcagtcacaacgga

SEQ ID NO: 1623553 - DNA, 25 bp, Homo sapien
tgcctctgggtgaactaaatctgtc

SEQ ID NO: 1623554 - DNA, 25 bp, Homo sapien
cacaacggacctaagcttaatgagt

SEQ ID NO: 1623555 - DNA, 25 bp, Homo sapien
gcagggtggtgcaggatattcctgg

SEQ ID NO: 1623556 - DNA, 25 bp, Homo sapien
agaccaccttaggtgcagccaggcg

SEQ ID NO: 1623557 - DNA, 25 bp, Homo sapien
gactcgttgcaagggtactgcctga

SEQ ID NO: 1623558 - DNA, 25 bp, Homo sapien
tattcctggggggactcgttgcaag

SEQ ID NO: 1623559 - DNA, 25 bp, Homo sapien
agtaggactggacgccagatacagc

SEQ ID NO: 1623560 - DNA, 25 bp, Homo sapien
aggactggacgccagatacagcaaa

SEQ ID NO: 1623561 - DNA, 25 bp, Homo sapien
gactggacgccagatacagcaaaac

SEQ ID NO: 1623562 - DNA, 25 bp, Homo sapien
gagaagtaggactggacgccagata

SEQ ID NO: 1623563 - DNA, 25 bp, Homo sapien
catggccgttagatgcgggctcttc

SEQ ID NO: 1623564 - DNA, 25 bp, Homo sapien
tggccgttagatgcgggctcttcca

SEQ ID NO: 1623565 - DNA, 25 bp, Homo sapien
cttccagctggacagaccggcagtt

SEQ ID NO: 1623566 - DNA, 25 bp, Homo sapien
tctggatcttaacttcaggcgagtg

SEQ ID NO: 1623567 - DNA, 25 bp, Homo sapien
caatcgagcctttcatccagtggcc

SEQ ID NO: 1623568 - DNA, 25 bp, Homo sapien
aaaaactgtgaaagtctcattcgac

SEQ ID NO: 1623569 - DNA, 25 bp, Homo sapien
catggtacagaacttggctattaga

SEQ ID NO: 1623570 - DNA, 25 bp, Homo sapien
ttagagtcaacgcaccaatcgagcc

SEQ ID NO: 1623571 - DNA, 25 bp, Homo sapien
gactcgtcggtgctaaacagacaag

SEQ ID NO: 1623572 - DNA, 25 bp, Homo sapien
ccacaagccgctgtgagcgcataaa

SEQ ID NO: 1623573 - DNA, 25 bp, Homo sapien
gacaagtgattaaacatcagcctca

SEQ ID NO: 1623574 - DNA, 25 bp, Homo sapien
tgtcaacagtaatgaggcccagaga

SEQ ID NO: 1623575 - DNA, 25 bp, Homo sapien
cctttctctgggtggtctgtgcctg

SEQ ID NO: 1623576 - DNA, 25 bp, Homo sapien
tctcgcagtggtagtggtgaggcag

SEQ ID NO: 1623577 - DNA, 25 bp, Homo sapien
ctcgcagtggtagtggtgaggcagt

SEQ ID NO: 1623578 - DNA, 25 bp, Homo sapien
gtctcgcagtggtagtggtgaggca

SEQ ID NO: 1623579 - DNA, 25 bp, Homo sapien
ggctaggtgtttctctgagaccccg

SEQ ID NO: 1623580 - DNA, 25 bp, Homo sapien
gttgcaggccccctgtacagttgac

SEQ ID NO: 1623581 - DNA, 25 bp, Homo sapien
cactggccttggctaggtgtttctc

SEQ ID NO: 1623582 - DNA, 25 bp, Homo sapien
ccttggctaggtgtttctctgagac

SEQ ID NO: 1623583 - DNA, 25 bp, Homo sapien
tgtgtgtatatccttctccccagct

SEQ ID NO: 1623584 - DNA, 25 bp, Homo sapien
actgtctacattgcacgtctgggcc

SEQ ID NO: 1623585 - DNA, 25 bp, Homo sapien
tctgagaggacagcctacagttttt

SEQ ID NO: 1623586 - DNA, 25 bp, Homo sapien
tgtagcccattactatcagcaaatg

SEQ ID NO: 1623587 - DNA, 25 bp, Homo sapien
tcagcacacttcaaaggtgttgcta

SEQ ID NO: 1623588 - DNA, 25 bp, Homo sapien
gagctgctccagacaactctgtaac

SEQ ID NO: 1623589 - DNA, 25 bp, Homo sapien
tactttctcgctggcttatcccaca

SEQ ID NO: 1623590 - DNA, 25 bp, Homo sapien
gcaaacttcccaccatactggatgt

SEQ ID NO: 1623591 - DNA, 25 bp, Homo sapien
taacgtggaccctcaaggaactaga

SEQ ID NO: 1623592 - DNA, 25 bp, Homo sapien
gcatcagagactagtatgaacacct

SEQ ID NO: 1623593 - DNA, 25 bp, Homo sapien
gatacaatgcaccaaaacctagggc

SEQ ID NO: 1623594 - DNA, 25 bp, Homo sapien
gatccctccctaactacttctatga

SEQ ID NO: 1623595 - DNA, 25 bp, Homo sapien
caaagaagcccatggaatatttttc

SEQ ID NO: 1623596 - DNA, 25 bp, Homo sapien
ttaatttccaaagaagcccatggaa

SEQ ID NO: 1623597 - DNA, 25 bp, Homo sapien
atttccaaagaagcccatggaatat

SEQ ID NO: 1623598 - DNA, 25 bp, Homo sapien
tccaaagaagcccatggaatatttt

SEQ ID NO: 1623599 - DNA, 25 bp, Homo sapien
catttggtgcactcgtcttgcattc

SEQ ID NO: 1623600 - DNA, 25 bp, Homo sapien
gagaagaaggctgtacatgtgacac

SEQ ID NO: 1623601 - DNA, 25 bp, Homo sapien
taattgggataagaagacactctga

SEQ ID NO: 1623602 - DNA, 25 bp, Homo sapien
tttgaagccccagattaaagtataa

SEQ ID NO: 1623603 - DNA, 25 bp, Homo sapien
acatctgcctttctacttgtctgaa

SEQ ID NO: 1623604 - DNA, 25 bp, Homo sapien
taaaactccattttagcaggtgcac

SEQ ID NO: 1623605 - DNA, 25 bp, Homo sapien
gcaggtgcacattgcatcagctcct

SEQ ID NO: 1623606 - DNA, 25 bp, Homo sapien
gaaatgtgccaaaacactgtttctc

SEQ ID NO: 1623607 - DNA, 25 bp, Homo sapien
agccccaactgagctttcaaaccag

SEQ ID NO: 1623608 - DNA, 25 bp, Homo sapien
agaagacctgtgacactgaaaacaa

SEQ ID NO: 1623609 - DNA, 25 bp, Homo sapien
ttatgatattactcaccaaggatat

SEQ ID NO: 1623610 - DNA, 25 bp, Homo sapien
ttttatgatattactcaccaaggat

SEQ ID NO: 1623611 - DNA, 25 bp, Homo sapien
atgatattactcaccaaggatattt

SEQ ID NO: 1623612 - DNA, 25 bp, Homo sapien
gcaccctgcaagttacaatttgaga

SEQ ID NO: 1623613 - DNA, 25 bp, Homo sapien
caatcagtttcaaaaaggcaggaag

SEQ ID NO: 1623614 - DNA, 25 bp, Homo sapien
aggatatatttctatgccagcaccc

SEQ ID NO: 1623615 - DNA, 25 bp, Homo sapien
tttgagataataacaatcagtttca

SEQ ID NO: 1623616 - DNA, 25 bp, Homo sapien
gatttcttttataacaccatgctga

SEQ ID NO: 1623617 - DNA, 25 bp, Homo sapien
acaatattaattggtagaccatatc

SEQ ID NO: 1623618 - DNA, 25 bp, Homo sapien
cacaatattaattggtagaccatat

SEQ ID NO: 1623619 - DNA, 25 bp, Homo sapien
acaccatgctgaacaaatcttatgc

SEQ ID NO: 1623620 - DNA, 25 bp, Homo sapien
tccaactcaatggagtcaacactgc

SEQ ID NO: 1623621 - DNA, 25 bp, Homo sapien
cttccaactcaatggagtcaacact

SEQ ID NO: 1623622 - DNA, 25 bp, Homo sapien
aactcaatggagtcaacactgcact

SEQ ID NO: 1623623 - DNA, 25 bp, Homo sapien
ctcaatggagtcaacactgcactcc

SEQ ID NO: 1623624 - DNA, 25 bp, Homo sapien
taacagataatggatcaccgaagaa

SEQ ID NO: 1623625 - DNA, 25 bp, Homo sapien
cacaaaatggtcaggacaaacgata

SEQ ID NO: 1623626 - DNA, 25 bp, Homo sapien
gcaaagcctgtccatgagtagggtc

SEQ ID NO: 1623627 - DNA, 25 bp, Homo sapien
caaagcctgtccatgagtagggtcc

SEQ ID NO: 1623628 - DNA, 25 bp, Homo sapien
ggcaaagcctgtccatgagtagggt

SEQ ID NO: 1623629 - DNA, 25 bp, Homo sapien
aggcacacatacctcaacaaaggac

SEQ ID NO: 1623630 - DNA, 25 bp, Homo sapien
ccatgagttttagcttttgcttcac

SEQ ID NO: 1623631 - DNA, 25 bp, Homo sapien
aaaggcacacatacctcaacaaagg

SEQ ID NO: 1623632 - DNA, 25 bp, Homo sapien
aacaaaggactctccatgagtttta

SEQ ID NO: 1623633 - DNA, 25 bp, Homo sapien
tctcctcacattgagacaacagatt

SEQ ID NO: 1623634 - DNA, 25 bp, Homo sapien
taactctcctcacattgagacaaca

SEQ ID NO: 1623635 - DNA, 25 bp, Homo sapien
tcctcacattgagacaacagattgt

SEQ ID NO: 1623636 - DNA, 25 bp, Homo sapien
tgtaactctcctcacattgagacaa

SEQ ID NO: 1623637 - DNA, 25 bp, Homo sapien
tggcaggaacacaaaccctagggat

SEQ ID NO: 1623638 - DNA, 25 bp, Homo sapien
gcagcctcagaaaacaccttctctg

SEQ ID NO: 1623639 - DNA, 25 bp, Homo sapien
tctcatgtaagggacaaagggtctg

SEQ ID NO: 1623640 - DNA, 25 bp, Homo sapien
gtttgtacaggtggaaataactgcc

SEQ ID NO: 1623641 - DNA, 25 bp, Homo sapien
ctccttcaggggcaactgatgttcc

SEQ ID NO: 1623642 - DNA, 25 bp, Homo sapien
cttcctagctgacatgctcagttac

SEQ ID NO: 1623643 - DNA, 25 bp, Homo sapien
gtgctgtctccagaatcatcaaaca

SEQ ID NO: 1623644 - DNA, 25 bp, Homo sapien
tgacatgctcagttacaagttacaa

SEQ ID NO: 1623645 - DNA, 25 bp, Homo sapien
gaggtatggctcagcaagctgcacc

SEQ ID NO: 1623646 - DNA, 25 bp, Homo sapien
aagattcacagaggtatggctcagc

SEQ ID NO: 1623647 - DNA, 25 bp, Homo sapien
tatggctcagcaagctgcaccactg

SEQ ID NO: 1623648 - DNA, 25 bp, Homo sapien
tcaagattcacagaggtatggctca

SEQ ID NO: 1623649 - DNA, 25 bp, Homo sapien
caccttgagcacatcatgtgccaga

SEQ ID NO: 1623650 - DNA, 25 bp, Homo sapien
tgagcacatcatgtgccagactgtc

SEQ ID NO: 1623651 - DNA, 25 bp, Homo sapien
catcatgtgccagactgtccgccat

SEQ ID NO: 1623652 - DNA, 25 bp, Homo sapien
gcagcaccttgagcacatcatgtgc

SEQ ID NO: 1623653 - DNA, 25 bp, Homo sapien
agatggctcaaggaccttctccaag

SEQ ID NO: 1623654 - DNA, 25 bp, Homo sapien
cagatggctcaaggaccttctccaa

SEQ ID NO: 1623655 - DNA, 25 bp, Homo sapien
tggctcaaggaccttctccaagaac

SEQ ID NO: 1623656 - DNA, 25 bp, Homo sapien
gatggctcaaggaccttctccaaga

SEQ ID NO: 1623657 - DNA, 25 bp, Homo sapien
gacagttacaatcactgcgtgaatc

SEQ ID NO: 1623658 - DNA, 25 bp, Homo sapien
ctttgtaaactacaacctggctcat

SEQ ID NO: 1623659 - DNA, 25 bp, Homo sapien
cctggctcatcaagacagttacaat

SEQ ID NO: 1623660 - DNA, 25 bp, Homo sapien
ttgtaaactacaacctggctcatca

SEQ ID NO: 1623661 - DNA, 25 bp, Homo sapien
tctctctgtgcctcagttttcttgc

SEQ ID NO: 1623662 - DNA, 25 bp, Homo sapien
aatctctctgtgcctcagttttctt

SEQ ID NO: 1623663 - DNA, 25 bp, Homo sapien
tggctgtgtgacaatctctctgtgc

SEQ ID NO: 1623664 - DNA, 25 bp, Homo sapien
acaatctctctgtgcctcagttttc

SEQ ID NO: 1623665 - DNA, 25 bp, Homo sapien
ggcacttcaaattcccgcggacggc

SEQ ID NO: 1623666 - DNA, 25 bp, Homo sapien
aggtgcacgcgaccccgagactccg

SEQ ID NO: 1623667 - DNA, 25 bp, Homo sapien
acggcgcggcgcctctgattggacg

SEQ ID NO: 1623668 - DNA, 25 bp, Homo sapien
cccgggcactggagcctccctggcc

SEQ ID NO: 1623669 - DNA, 25 bp, Homo sapien
aaccagaagagattgagggcctata

SEQ ID NO: 1623670 - DNA, 25 bp, Homo sapien
taaatgctaaggcaatgatcaccag

SEQ ID NO: 1623671 - DNA, 25 bp, Homo sapien
gaaggccctcctcaagacacagagt

SEQ ID NO: 1623672 - DNA, 25 bp, Homo sapien
tagagaaccccttcaagatagacaa

SEQ ID NO: 1623673 - DNA, 25 bp, Homo sapien
cacaagcggttgaggaattcccttt

SEQ ID NO: 1623674 - DNA, 25 bp, Homo sapien
actgctagaacagcagtctcagatt

SEQ ID NO: 1623675 - DNA, 25 bp, Homo sapien
gaacagcagtctcagattgaactgc

SEQ ID NO: 1623676 - DNA, 25 bp, Homo sapien
gaagcacaagcggttgaggaattcc

SEQ ID NO: 1623677 - DNA, 25 bp, Homo sapien
gaagctgtcacttagttattttcta

SEQ ID NO: 1623678 - DNA, 25 bp, Homo sapien
tctcaaatgctgattgttgtaccaa

SEQ ID NO: 1623679 - DNA, 25 bp, Homo sapien
aaaacactctgtctttctgtactgc

SEQ ID NO: 1623680 - DNA, 25 bp, Homo sapien
tatagatagtttttgtgcagtggct

SEQ ID NO: 1623681 - DNA, 25 bp, Homo sapien
gaagagataagtcccaccctttgag

SEQ ID NO: 1623682 - DNA, 25 bp, Homo sapien
tgccctaagtgtactgaaaagcctg

SEQ ID NO: 1623683 - DNA, 25 bp, Homo sapien
gaaaacgtcatgattgtgtctgcag

SEQ ID NO: 1623684 - DNA, 25 bp, Homo sapien
caatggtaccacctgtcctttggga

SEQ ID NO: 1623685 - DNA, 25 bp, Homo sapien
gctttctcttaggaagtctagcctc

SEQ ID NO: 1623686 - DNA, 25 bp, Homo sapien
gaatatataataggttccaaaggcc

SEQ ID NO: 1623687 - DNA, 25 bp, Homo sapien
aaattcagacatggattggcacttc

SEQ ID NO: 1623688 - DNA, 25 bp, Homo sapien
tatttgacagttgctccactgtagg

SEQ ID NO: 1623689 - DNA, 25 bp, Homo sapien
gtgtttcagcaagaaagacaccctg

SEQ ID NO: 1623690 - DNA, 25 bp, Homo sapien
gagagaatcaccgtaggtaccaacg

SEQ ID NO: 1623691 - DNA, 25 bp, Homo sapien
tcaaacgtgctctcagtaagtagtc

SEQ ID NO: 1623692 - DNA, 25 bp, Homo sapien
aaatgatgtgtgataccgaccccag

SEQ ID NO: 1623693 - DNA, 25 bp, Homo sapien
ttctgaagcagtttccgcatgtaca

SEQ ID NO: 1623694 - DNA, 25 bp, Homo sapien
cagtttccgcatgtacatgaccttg

SEQ ID NO: 1623695 - DNA, 25 bp, Homo sapien
aagcagtttccgcatgtacatgacc

SEQ ID NO: 1623696 - DNA, 25 bp, Homo sapien
ccgcatgtacatgaccttgttgtag

SEQ ID NO: 1623697 - DNA, 25 bp, Homo sapien
catgtgcagtgtaccagattcagcc

SEQ ID NO: 1623698 - DNA, 25 bp, Homo sapien
ctccatgtgcagtgtaccagattca

SEQ ID NO: 1623699 - DNA, 25 bp, Homo sapien
gtgcagtgtaccagattcagccaga

SEQ ID NO: 1623700 - DNA, 25 bp, Homo sapien
gaactccatgtgcagtgtaccagat

SEQ ID NO: 1623701 - DNA, 25 bp, Homo sapien
tacatgcaggcccctagcttcagct

SEQ ID NO: 1623702 - DNA, 25 bp, Homo sapien
atgcaggcccctagcttcagctgca

SEQ ID NO: 1623703 - DNA, 25 bp, Homo sapien
gctacatgcaggcccctagcttcag

SEQ ID NO: 1623704 - DNA, 25 bp, Homo sapien
acatgcaggcccctagcttcagctg

SEQ ID NO: 1623705 - DNA, 25 bp, Homo sapien
gaatttcttagccagttgcacagct

SEQ ID NO: 1623706 - DNA, 25 bp, Homo sapien
tgtccagggaatcccagtacatgtg

SEQ ID NO: 1623707 - DNA, 25 bp, Homo sapien
tctgcaaatgtaccattgtccaggg

SEQ ID NO: 1623708 - DNA, 25 bp, Homo sapien
taaacaatctttgcacatctaggaa

SEQ ID NO: 1623709 - DNA, 25 bp, Homo sapien
cccaactgtatgtcctataattatc

SEQ ID NO: 1623710 - DNA, 25 bp, Homo sapien
ttttcaaatgttagtggcacatcct

SEQ ID NO: 1623711 - DNA, 25 bp, Homo sapien
tcaaatgttagtggcacatcctttc

SEQ ID NO: 1623712 - DNA, 25 bp, Homo sapien
cattatgcccccaactgtatgtcct

SEQ ID NO: 1623713 - DNA, 25 bp, Homo sapien
actacatgaggaattaacacatcgt

SEQ ID NO: 1623714 - DNA, 25 bp, Homo sapien
ttttagcccctttgccagctactac

SEQ ID NO: 1623715 - DNA, 25 bp, Homo sapien
tttagcccctttgccagctactaca

SEQ ID NO: 1623716 - DNA, 25 bp, Homo sapien
agtcatcgtttatgctcttgaagct

SEQ ID NO: 1623717 - DNA, 25 bp, Homo sapien
caaatgcacgatacattgaactgtc

SEQ ID NO: 1623718 - DNA, 25 bp, Homo sapien
tcttgaagcttacagcaaatgcacg

SEQ ID NO: 1623719 - DNA, 25 bp, Homo sapien
aacacagggtgatgaaggcattaaa

SEQ ID NO: 1623720 - DNA, 25 bp, Homo sapien
cgccgcactcgcctgtccggacgca

SEQ ID NO: 1623721 - DNA, 25 bp, Homo sapien
tgagcccggccagccgctgtcgctg

SEQ ID NO: 1623722 - DNA, 25 bp, Homo sapien
gtcgccgccgcactcgcctgtccgg

SEQ ID NO: 1623723 - DNA, 25 bp, Homo sapien
tcgcctgtccggacgcaccttcctc

SEQ ID NO: 1623724 - DNA, 25 bp, Homo sapien
ttgcctgacacttgttagattcaga

SEQ ID NO: 1623725 - DNA, 25 bp, Homo sapien
gaaacaggggatctcctacttcctg

SEQ ID NO: 1623726 - DNA, 25 bp, Homo sapien
tacttcctgatgtcacttgttctct

SEQ ID NO: 1623727 - DNA, 25 bp, Homo sapien
gcatagcctaatctggttgcctgac

SEQ ID NO: 1623728 - DNA, 25 bp, Homo sapien
ctggagttgccaccagattctcttc

SEQ ID NO: 1623729 - DNA, 25 bp, Homo sapien
gaactgtgggctccttgtgggggtg

SEQ ID NO: 1623730 - DNA, 25 bp, Homo sapien
tgaactgtgggctccttgtgggggt

SEQ ID NO: 1623731 - DNA, 25 bp, Homo sapien
tggagttgccaccagattctcttcc

SEQ ID NO: 1623732 - DNA, 25 bp, Homo sapien
tgtgaagtaggcgtaatgctgttcc

SEQ ID NO: 1623733 - DNA, 25 bp, Homo sapien
tgaagtaggcgtaatgctgttcctt

SEQ ID NO: 1623734 - DNA, 25 bp, Homo sapien
aagtaggcgtaatgctgttccttcc

SEQ ID NO: 1623735 - DNA, 25 bp, Homo sapien
gaagtaggcgtaatgctgttccttc

SEQ ID NO: 1623736 - DNA, 25 bp, Homo sapien
gagtggaaccacttcttctattcaa

SEQ ID NO: 1623737 - DNA, 25 bp, Homo sapien
actctccttacttggctctgggctg

SEQ ID NO: 1623738 - DNA, 25 bp, Homo sapien
tgggctgagttgagcccagttgagt

SEQ ID NO: 1623739 - DNA, 25 bp, Homo sapien
gtctgaggaatccagactctcctta

SEQ ID NO: 1623740 - DNA, 25 bp, Homo sapien
gatgccggacttggagcagttatgc

SEQ ID NO: 1623741 - DNA, 25 bp, Homo sapien
catctgggatgccggacttggagca

SEQ ID NO: 1623742 - DNA, 25 bp, Homo sapien
gcagttatgctcatgatgcagggaa

SEQ ID NO: 1623743 - DNA, 25 bp, Homo sapien
aagattcgcagagattccatattcg

SEQ ID NO: 1623744 - DNA, 25 bp, Homo sapien
gcagagcaattccttccaaagcatc

SEQ ID NO: 1623745 - DNA, 25 bp, Homo sapien
cagagcaattccttccaaagcatca

SEQ ID NO: 1623746 - DNA, 25 bp, Homo sapien
tgcagagcaattccttccaaagcat

SEQ ID NO: 1623747 - DNA, 25 bp, Homo sapien
gagcaattccttccaaagcatcaag

SEQ ID NO: 1623748 - DNA, 25 bp, Homo sapien
ggcaaatccacagtctcccaaataa

SEQ ID NO: 1623749 - DNA, 25 bp, Homo sapien
atccacagtctcccaaataatccat

SEQ ID NO: 1623750 - DNA, 25 bp, Homo sapien
cttgggcaaatccacagtctcccaa

SEQ ID NO: 1623751 - DNA, 25 bp, Homo sapien
aaatccacagtctcccaaataatcc

SEQ ID NO: 1623752 - DNA, 25 bp, Homo sapien
gggaatgtcactcctccttgacaag

SEQ ID NO: 1623753 - DNA, 25 bp, Homo sapien
acattgggatgatgggcaatcttgg

SEQ ID NO: 1623754 - DNA, 25 bp, Homo sapien
tgtcactgacgaagacgatgccact

SEQ ID NO: 1623755 - DNA, 25 bp, Homo sapien
tcttgggtgtatgttcctgaacatt

SEQ ID NO: 1623756 - DNA, 25 bp, Homo sapien
aatgatagctgccaacccagcctgg

SEQ ID NO: 1623757 - DNA, 25 bp, Homo sapien
ccagagctccgtgacatcagggacg

SEQ ID NO: 1623758 - DNA, 25 bp, Homo sapien
caagagccgcaagcatatgtgctgc

SEQ ID NO: 1623759 - DNA, 25 bp, Homo sapien
gggctgctcggtattggctggcaca

SEQ ID NO: 1623760 - DNA, 25 bp, Homo sapien
tcccaggtcatcagcaaccgtctgt

SEQ ID NO: 1623761 - DNA, 25 bp, Homo sapien
ccaggtcatcagcaaccgtctgtga

SEQ ID NO: 1623762 - DNA, 25 bp, Homo sapien
aggtcatcagcaaccgtctgtgact

SEQ ID NO: 1623763 - DNA, 25 bp, Homo sapien
cccaggtcatcagcaaccgtctgtg

SEQ ID NO: 1623764 - DNA, 25 bp, Homo sapien
taggtccagtaagtatcggaatcag

SEQ ID NO: 1623765 - DNA, 25 bp, Homo sapien
tgtaggtccagtaagtatcggaatc

SEQ ID NO: 1623766 - DNA, 25 bp, Homo sapien
tccagtaagtatcggaatcagatgc

SEQ ID NO: 1623767 - DNA, 25 bp, Homo sapien
gtaagtatcggaatcagatgccagc

SEQ ID NO: 1623768 - DNA, 25 bp, Homo sapien
gcccgatttcttgcagttgacaaac

SEQ ID NO: 1623769 - DNA, 25 bp, Homo sapien
aggccagaccgtcatcaggcactgt

SEQ ID NO: 1623770 - DNA, 25 bp, Homo sapien
agtgataagccctcctgcccgattt

SEQ ID NO: 1623771 - DNA, 25 bp, Homo sapien
gctcctttcacagtgcgctgccggc

SEQ ID NO: 1623772 - DNA, 25 bp, Homo sapien
gacaagcaggggactcctcatctct

SEQ ID NO: 1623773 - DNA, 25 bp, Homo sapien
cttcatggcaggagtaaaaactgtc

SEQ ID NO: 1623774 - DNA, 25 bp, Homo sapien
ctgggtaagagctctcaggattttg

SEQ ID NO: 1623775 - DNA, 25 bp, Homo sapien
taagagctctcaggattttgcctct

SEQ ID NO: 1623776 - DNA, 25 bp, Homo sapien
gtcttctgcatggccctttctatct

SEQ ID NO: 1623777 - DNA, 25 bp, Homo sapien
catggccctttctatcttgtccttc

SEQ ID NO: 1623778 - DNA, 25 bp, Homo sapien
atggccctttctatcttgtccttcc

SEQ ID NO: 1623779 - DNA, 25 bp, Homo sapien
tgactcgatgtcccccttgaacttt

SEQ ID NO: 1623780 - DNA, 25 bp, Homo sapien
ccaatggtaatagggcgttttcagg

SEQ ID NO: 1623781 - DNA, 25 bp, Homo sapien
tgccaatggtaatagggcgttttca

SEQ ID NO: 1623782 - DNA, 25 bp, Homo sapien
caatggtaatagggcgttttcaggg

SEQ ID NO: 1623783 - DNA, 25 bp, Homo sapien
ctgccaatggtaatagggcgttttc

SEQ ID NO: 1623784 - DNA, 25 bp, Homo sapien
gtgtgttttgtatccgtgacccaaa

SEQ ID NO: 1623785 - DNA, 25 bp, Homo sapien
tttgtatccgtgacccaaatcaggt

SEQ ID NO: 1623786 - DNA, 25 bp, Homo sapien
ctgtgtgttttgtatccgtgaccca

SEQ ID NO: 1623787 - DNA, 25 bp, Homo sapien
atccgtgacccaaatcaggtaaaag

SEQ ID NO: 1623788 - DNA, 25 bp, Homo sapien
ggaggtgctcctggttttcccatca

SEQ ID NO: 1623789 - DNA, 25 bp, Homo sapien
gactctgaggtgagcaggtcggagg

SEQ ID NO: 1623790 - DNA, 25 bp, Homo sapien
ccatcagccctggtcagtgtctggg

SEQ ID NO: 1623791 - DNA, 25 bp, Homo sapien
caggcccggcgagggggactctgag

SEQ ID NO: 1623792 - DNA, 25 bp, Homo sapien
ctgatgaccgggacgaatagtatgt

SEQ ID NO: 1623793 - DNA, 25 bp, Homo sapien
gactggttagtgactgtggtaatct

SEQ ID NO: 1623794 - DNA, 25 bp, Homo sapien
tgagtcatccttctgatgaccggga

SEQ ID NO: 1623795 - DNA, 25 bp, Homo sapien
cattgagtcactagggacttctgga

SEQ ID NO: 1623796 - DNA, 25 bp, Homo sapien
cttgccctgtggagaggcccgccat

SEQ ID NO: 1623797 - DNA, 25 bp, Homo sapien
gaagacacagacgatgctctcacca

SEQ ID NO: 1623798 - DNA, 25 bp, Homo sapien
acacagacgatgctctcaccaggtc

SEQ ID NO: 1623799 - DNA, 25 bp, Homo sapien
tcccaccgaagacacagacgatgct

SEQ ID NO: 1623800 - DNA, 25 bp, Homo sapien
tgattgctttattttactcttagaa

SEQ ID NO: 1623801 - DNA, 25 bp, Homo sapien
gctgaactggcattccatggagcac

SEQ ID NO: 1623802 - DNA, 25 bp, Homo sapien
ctgaactggcattccatggagcaca

SEQ ID NO: 1623803 - DNA, 25 bp, Homo sapien
actcagtggttccttcaatgtgcag

SEQ ID NO: 1623804 - DNA, 25 bp, Homo sapien
catactcagtggttccttcaatgtg

SEQ ID NO: 1623805 - DNA, 25 bp, Homo sapien
gtgtggttgcaaaccccgagctcct

SEQ ID NO: 1623806 - DNA, 25 bp, Homo sapien
cgtgtggttgcaaaccccgagctcc

SEQ ID NO: 1623807 - DNA, 25 bp, Homo sapien
atgatcgtgtggttgcaaaccccga

SEQ ID NO: 1623808 - DNA, 25 bp, Homo sapien
tcgtgtggttgcaaaccccgagctc

SEQ ID NO: 1623809 - DNA, 25 bp, Homo sapien
gcaagaaggcgtctgctggagcagt

SEQ ID NO: 1623810 - DNA, 25 bp, Homo sapien
ctggatgtgcaagaaggcgtctgct

SEQ ID NO: 1623811 - DNA, 25 bp, Homo sapien
tgctggagcagtcttgctctcccaa

SEQ ID NO: 1623812 - DNA, 25 bp, Homo sapien
tggttttctggatgtgcaagaaggc

SEQ ID NO: 1623813 - DNA, 25 bp, Homo sapien
caaattccaaatgcctccacagaga

SEQ ID NO: 1623814 - DNA, 25 bp, Homo sapien
gtgtggtaatgaagcctgctctgtt

SEQ ID NO: 1623815 - DNA, 25 bp, Homo sapien
aattccaaatgcctccacagagagg

SEQ ID NO: 1623816 - DNA, 25 bp, Homo sapien
gagggaggctccgtgtggtaatgaa

SEQ ID NO: 1623817 - DNA, 25 bp, Homo sapien
tcctggagggggttcttatgagcac

SEQ ID NO: 1623818 - DNA, 25 bp, Homo sapien
ctgctgtgtgcggatgaggaagtct

SEQ ID NO: 1623819 - DNA, 25 bp, Homo sapien
tgagcacaaacagtgatgaacgacg

SEQ ID NO: 1623820 - DNA, 25 bp, Homo sapien
cagtgatgaacgacgttaaatgcat

SEQ ID NO: 1623821 - DNA, 25 bp, Homo sapien
attgctggagtcgtagagcctcaca

SEQ ID NO: 1623822 - DNA, 25 bp, Homo sapien
tcattgctggagtcgtagagcctca

SEQ ID NO: 1623823 - DNA, 25 bp, Homo sapien
tcttaatcattgctggagtcgtaga

SEQ ID NO: 1623824 - DNA, 25 bp, Homo sapien
taatcattgctggagtcgtagagcc

SEQ ID NO: 1623825 - DNA, 25 bp, Homo sapien
caggctgcatgggaagagggcactt

SEQ ID NO: 1623826 - DNA, 25 bp, Homo sapien
gtgggtcacactgggtttgtcttct

SEQ ID NO: 1623827 - DNA, 25 bp, Homo sapien
tctgcttaggtgtctcacttgggga

SEQ ID NO: 1623828 - DNA, 25 bp, Homo sapien
gagatgtgagtctagggtccgcagg

SEQ ID NO: 1623829 - DNA, 25 bp, Homo sapien
agaagctttgctttaggctgtgggt

SEQ ID NO: 1623830 - DNA, 25 bp, Homo sapien
atgaattattgacaaatgcagtaac

SEQ ID NO: 1623831 - DNA, 25 bp, Homo sapien
aattattgacaaatgcagtaacttg

SEQ ID NO: 1623832 - DNA, 25 bp, Homo sapien
acttggatgaatctccaggtaattc

SEQ ID NO: 1623833 - DNA, 25 bp, Homo sapien
ttattgacaaatgcagtaacttgga

SEQ ID NO: 1623834 - DNA, 25 bp, Homo sapien
gagatgtatacatctgaagcctgct

SEQ ID NO: 1623835 - DNA, 25 bp, Homo sapien
gagcactctcgctgtccttccagag

SEQ ID NO: 1623836 - DNA, 25 bp, Homo sapien
aaagctccaatgtgctctgagcact

SEQ ID NO: 1623837 - DNA, 25 bp, Homo sapien
tctggtgtgggacaaagctccaatg

SEQ ID NO: 1623838 - DNA, 25 bp, Homo sapien
tgctctgagcactctcgctgtcctt

SEQ ID NO: 1623839 - DNA, 25 bp, Homo sapien
cattacgttcctgaacagcaaggga

SEQ ID NO: 1623840 - DNA, 25 bp, Homo sapien
tccaaaggactcaacacggaaagtg

SEQ ID NO: 1623841 - DNA, 25 bp, Homo sapien
acagaaagggcgttccagggactgc

SEQ ID NO: 1623842 - DNA, 25 bp, Homo sapien
catagagcagtgcaagctggtccac

SEQ ID NO: 1623843 - DNA, 25 bp, Homo sapien
aggaggaggaggtgttctctgcagc

SEQ ID NO: 1623844 - DNA, 25 bp, Homo sapien
tgttggaaaaggcccgaggccagga

SEQ ID NO: 1623845 - DNA, 25 bp, Homo sapien
gaggaggaggtgttctctgcagctg

SEQ ID NO: 1623846 - DNA, 25 bp, Homo sapien
ctgcacgtgttggaaaaggcccgag

SEQ ID NO: 1623847 - DNA, 25 bp, Homo sapien
tgacaaatgaacaagtgaacgcctc

SEQ ID NO: 1623848 - DNA, 25 bp, Homo sapien
tgaacgcctcaatggtaagtccacg

SEQ ID NO: 1623849 - DNA, 25 bp, Homo sapien
cgtagcccataagagaggatactcc

SEQ ID NO: 1623850 - DNA, 25 bp, Homo sapien
taagagaggatactccaggatgcca

SEQ ID NO: 1623851 - DNA, 25 bp, Homo sapien
aggccacccctggtaatatgtagag

SEQ ID NO: 1623852 - DNA, 25 bp, Homo sapien
tgtagagaatgataggattcatgaa

SEQ ID NO: 1623853 - DNA, 25 bp, Homo sapien
gaatgataggattcatgaatatgca

SEQ ID NO: 1623854 - DNA, 25 bp, Homo sapien
gctgttttgatgaaacgctgtttga

SEQ ID NO: 1623855 - DNA, 25 bp, Homo sapien
ttgctggtgcaaatggtgctctgca

SEQ ID NO: 1623856 - DNA, 25 bp, Homo sapien
agaggccatctggagttcacaggca

SEQ ID NO: 1623857 - DNA, 25 bp, Homo sapien
agggaatccaaacccactttgctgg

SEQ ID NO: 1623858 - DNA, 25 bp, Homo sapien
cccagggcgaggagaggccatctgg

SEQ ID NO: 1623859 - DNA, 25 bp, Homo sapien
atgaatcacagttcccaggccacag

SEQ ID NO: 1623860 - DNA, 25 bp, Homo sapien
tatggccttgattcataacccggtc

SEQ ID NO: 1623861 - DNA, 25 bp, Homo sapien
tagaatacttcctaggcaagcttgg

SEQ ID NO: 1623862 - DNA, 25 bp, Homo sapien
tctttgttcaggaaataggactcgg

SEQ ID NO: 1623863 - DNA, 25 bp, Homo sapien
tcttggaatctaacgccagcatgga

SEQ ID NO: 1623864 - DNA, 25 bp, Homo sapien
ccatgagcaagggagagaatgcgac

SEQ ID NO: 1623865 - DNA, 25 bp, Homo sapien
aaatatccgggtgtctggagatgca

SEQ ID NO: 1623866 - DNA, 25 bp, Homo sapien
gaatgcgaccaactcctgggactct

SEQ ID NO: 1623867 - DNA, 25 bp, Homo sapien
ccatcagccaggcccgccggcccat

SEQ ID NO: 1623868 - DNA, 25 bp, Homo sapien
cgccccatcagccaggcccgccggc

SEQ ID NO: 1623869 - DNA, 25 bp, Homo sapien
ccccatcagccaggcccgccggccc

SEQ ID NO: 1623870 - DNA, 25 bp, Homo sapien
ctgccaccgccccatcagccaggcc

SEQ ID NO: 1623871 - DNA, 25 bp, Homo sapien
agaaatacatagaggccattgagag

SEQ ID NO: 1623872 - DNA, 25 bp, Homo sapien
gctggtacttgcagatgggagctcc

SEQ ID NO: 1623873 - DNA, 25 bp, Homo sapien
ctgggctggtacttgcagatgggag

SEQ ID NO: 1623874 - DNA, 25 bp, Homo sapien
tagaggccattgagaggcaggcccc

SEQ ID NO: 1623875 - DNA, 25 bp, Homo sapien
ctccatggatgttctattgtactgg

SEQ ID NO: 1623876 - DNA, 25 bp, Homo sapien
gttctattgtactgggtgctgctgg

SEQ ID NO: 1623877 - DNA, 25 bp, Homo sapien
ccagggcacttccactctaatgggc

SEQ ID NO: 1623878 - DNA, 25 bp, Homo sapien
cagggcacttccactctaatgggct

SEQ ID NO: 1623879 - DNA, 25 bp, Homo sapien
ccacagggctgtcattgcctcgcag

SEQ ID NO: 1623880 - DNA, 25 bp, Homo sapien
acagggctgtcattgcctcgcaggg

SEQ ID NO: 1623881 - DNA, 25 bp, Homo sapien
agggctgtcattgcctcgcaggggc

SEQ ID NO: 1623882 - DNA, 25 bp, Homo sapien
tcccacagggctgtcattgcctcgc

SEQ ID NO: 1623883 - DNA, 25 bp, Homo sapien
tcagctccgtttgcagtgcctccat

SEQ ID NO: 1623884 - DNA, 25 bp, Homo sapien
tactgtgggtcctctcgcaacagca

SEQ ID NO: 1623885 - DNA, 25 bp, Homo sapien
tcatcatgaaacctactgtgggtcc

SEQ ID NO: 1623886 - DNA, 25 bp, Homo sapien
cacccttggtgaccgcctgcggatg

SEQ ID NO: 1623887 - DNA, 25 bp, Homo sapien
actgtaccggacattgtgctgacaa

SEQ ID NO: 1623888 - DNA, 25 bp, Homo sapien
tctatggaggtaacaactttggaca

SEQ ID NO: 1623889 - DNA, 25 bp, Homo sapien
aacatctgtcatttgggcttgtgca

SEQ ID NO: 1623890 - DNA, 25 bp, Homo sapien
gcaggtggagttgagctcctgtata

SEQ ID NO: 1623891 - DNA, 25 bp, Homo sapien
ctgcaaaccggaatagagcgagaat

SEQ ID NO: 1623892 - DNA, 25 bp, Homo sapien
ggaggagcctccagcgtggagcagc

SEQ ID NO: 1623893 - DNA, 25 bp, Homo sapien
gactctgacagtagacgactgtggg

SEQ ID NO: 1623894 - DNA, 25 bp, Homo sapien
gggtgactgagtgctgccaagctca

SEQ ID NO: 1623895 - DNA, 25 bp, Homo sapien
ttataggggactctgacagtagacg

SEQ ID NO: 1623896 - DNA, 25 bp, Homo sapien
ggacctagcagaccctgtgtagagc

SEQ ID NO: 1623897 - DNA, 25 bp, Homo sapien
ggcggagctccaccagtgtctccaa

SEQ ID NO: 1623898 - DNA, 25 bp, Homo sapien
tggaaaccagtcacagcactgggct

SEQ ID NO: 1623899 - DNA, 25 bp, Homo sapien
ctttcatttaaagccagcagtttga

SEQ ID NO: 1623900 - DNA, 25 bp, Homo sapien
ccctgacgatccacaaataaggctt

SEQ ID NO: 1623901 - DNA, 25 bp, Homo sapien
ttggtctcccctgacgatccacaaa

SEQ ID NO: 1623902 - DNA, 25 bp, Homo sapien
caaataaggcttttttgtggacgag

SEQ ID NO: 1623903 - DNA, 25 bp, Homo sapien
gcttttttgtggacgagtcgtgcct

SEQ ID NO: 1623904 - DNA, 25 bp, Homo sapien
tccaggcagggacggccaatgagaa

SEQ ID NO: 1623905 - DNA, 25 bp, Homo sapien
cttccttccaggcagggacggccaa

SEQ ID NO: 1623906 - DNA, 25 bp, Homo sapien
catgggacagaactttcgggaaagt

SEQ ID NO: 1623907 - DNA, 25 bp, Homo sapien
agtcatgggacagaactttcgggaa

SEQ ID NO: 1623908 - DNA, 25 bp, Homo sapien
ctggggaagtgatgtgcacgggatc

SEQ ID NO: 1623909 - DNA, 25 bp, Homo sapien
gaagtgatgtgcacgggatcctcca

SEQ ID NO: 1623910 - DNA, 25 bp, Homo sapien
catgctggggaagtgatgtgcacgg

SEQ ID NO: 1623911 - DNA, 25 bp, Homo sapien
gggaagtgatgtgcacgggatcctc

SEQ ID NO: 1623912 - DNA, 25 bp, Homo sapien
gccacaatgaccatactctaagctt

SEQ ID NO: 1623913 - DNA, 25 bp, Homo sapien
ctgccacaatgaccatactctaagc

SEQ ID NO: 1623914 - DNA, 25 bp, Homo sapien
gagtcctctgccacaatgaccatac

SEQ ID NO: 1623915 - DNA, 25 bp, Homo sapien
caggagtcctctgccacaatgacca

SEQ ID NO: 1623916 - DNA, 25 bp, Homo sapien
tggctaccagggacagcaataagcg

SEQ ID NO: 1623917 - DNA, 25 bp, Homo sapien
aacaggagcaaggatggctaccagg

SEQ ID NO: 1623918 - DNA, 25 bp, Homo sapien
caaatacttcctcgcagaacaggag

SEQ ID NO: 1623919 - DNA, 25 bp, Homo sapien
caataagcgcagtttcaggagcccc

SEQ ID NO: 1623920 - DNA, 25 bp, Homo sapien
tcttgaatgctaacgagaaccgtcc

SEQ ID NO: 1623921 - DNA, 25 bp, Homo sapien
tttgcacccatgtcctatcagggag

SEQ ID NO: 1623922 - DNA, 25 bp, Homo sapien
gaaccgtccttgattggaattgtca

SEQ ID NO: 1623923 - DNA, 25 bp, Homo sapien
gatgctgcctttcataccaacgaca

SEQ ID NO: 1623924 - DNA, 25 bp, Homo sapien
tatcctatttaggaacacacgcagt

SEQ ID NO: 1623925 - DNA, 25 bp, Homo sapien
gatagtaggttcacgactgctcatt

SEQ ID NO: 1623926 - DNA, 25 bp, Homo sapien
gtgaacacaaactccagggtaatgg

SEQ ID NO: 1623927 - DNA, 25 bp, Homo sapien
gaaatgggcatgactaaatatccta

SEQ ID NO: 1623928 - DNA, 25 bp, Homo sapien
aacaccgcagggatgacaattctca

SEQ ID NO: 1623929 - DNA, 25 bp, Homo sapien
ctagaacaccgcagggatgacaatt

SEQ ID NO: 1623930 - DNA, 25 bp, Homo sapien
gaacaccgcagggatgacaattctc

SEQ ID NO: 1623931 - DNA, 25 bp, Homo sapien
tagaacaccgcagggatgacaattc

SEQ ID NO: 1623932 - DNA, 25 bp, Homo sapien
tcaaatccccatgcactgcaagctt

SEQ ID NO: 1623933 - DNA, 25 bp, Homo sapien
caattctaggtggttgcagtcttga

SEQ ID NO: 1623934 - DNA, 25 bp, Homo sapien
ctgcaagcttctcgccagcaggggc

SEQ ID NO: 1623935 - DNA, 25 bp, Homo sapien
tgaaggaggcacattgaagaagtag

SEQ ID NO: 1623936 - DNA, 25 bp, Homo sapien
ctggagatgtagccaacagagatga

SEQ ID NO: 1623937 - DNA, 25 bp, Homo sapien
cctggagatgtagccaacagagatg

SEQ ID NO: 1623938 - DNA, 25 bp, Homo sapien
tcattctgccacctgcccattccct

SEQ ID NO: 1623939 - DNA, 25 bp, Homo sapien
tgccacctgcccattccctggctct

SEQ ID NO: 1623940 - DNA, 25 bp, Homo sapien
gctctccttcacctttgtccctcac

SEQ ID NO: 1623941 - DNA, 25 bp, Homo sapien
ctgcccattccctggctctccttca

SEQ ID NO: 1623942 - DNA, 25 bp, Homo sapien
cagatggctgttccgtcatccagca

SEQ ID NO: 1623943 - DNA, 25 bp, Homo sapien
cacagatggctgttccgtcatccag

SEQ ID NO: 1623944 - DNA, 25 bp, Homo sapien
atggctgttccgtcatccagcacgt

SEQ ID NO: 1623945 - DNA, 25 bp, Homo sapien
gatggctgttccgtcatccagcacg

SEQ ID NO: 1623946 - DNA, 25 bp, Homo sapien
ttaagacgttgatctgtttggcagc

SEQ ID NO: 1623947 - DNA, 25 bp, Homo sapien
tgcttgatttaagacgttgatctgt

SEQ ID NO: 1623948 - DNA, 25 bp, Homo sapien
gatttaagacgttgatctgtttggc

SEQ ID NO: 1623949 - DNA, 25 bp, Homo sapien
aggaaatgcttgatttaagacgttg

SEQ ID NO: 1623950 - DNA, 25 bp, Homo sapien
gcgggcggcccgtttcagccctgaa

SEQ ID NO: 1623951 - DNA, 25 bp, Homo sapien
tgaactgacgaggatgccccgcctg

SEQ ID NO: 1623952 - DNA, 25 bp, Homo sapien
cgtttcagccctgaactgacgagga

SEQ ID NO: 1623953 - DNA, 25 bp, Homo sapien
cagccctgaactgacgaggatgccc

SEQ ID NO: 1623954 - DNA, 25 bp, Homo sapien
acctgggccttgatgggagaaaaca

SEQ ID NO: 1623955 - DNA, 25 bp, Homo sapien
ttggctaagacctgggccttgatgg

SEQ ID NO: 1623956 - DNA, 25 bp, Homo sapien
tctctttggctaagacctgggcctt

SEQ ID NO: 1623957 - DNA, 25 bp, Homo sapien
ttccctctctttggctaagacctgg

SEQ ID NO: 1623958 - DNA, 25 bp, Homo sapien
agctgagtgttttcggctttcaaag

SEQ ID NO: 1623959 - DNA, 25 bp, Homo sapien
gctgagtgttttcggctttcaaaga

SEQ ID NO: 1623960 - DNA, 25 bp, Homo sapien
gagtgttttcggctttcaaagatga

SEQ ID NO: 1623961 - DNA, 25 bp, Homo sapien
tgttttcggctttcaaagatgatgc

SEQ ID NO: 1623962 - DNA, 25 bp, Homo sapien
gaagaggtgtgcaaaccgcacagct

SEQ ID NO: 1623963 - DNA, 25 bp, Homo sapien
tgtgaagtcatctcctcaaaatatt

SEQ ID NO: 1623964 - DNA, 25 bp, Homo sapien
gctagcaaacaatgctttaattgcc

SEQ ID NO: 1623965 - DNA, 25 bp, Homo sapien
cgagcaacgtgccttccctgtgaag

SEQ ID NO: 1623966 - DNA, 25 bp, Homo sapien
agaatggcccaagcagaagggtcac

SEQ ID NO: 1623967 - DNA, 25 bp, Homo sapien
gagaatggcccaagcagaagggtca

SEQ ID NO: 1623968 - DNA, 25 bp, Homo sapien
tgagaatggcccaagcagaagggtc

SEQ ID NO: 1623969 - DNA, 25 bp, Homo sapien
catgagaatggcccaagcagaaggg

SEQ ID NO: 1623970 - DNA, 25 bp, Homo sapien
gctgaggagtgaaatgtcagcacat

SEQ ID NO: 1623971 - DNA, 25 bp, Homo sapien
ctggagatggccaagtggcagcaga

SEQ ID NO: 1623972 - DNA, 25 bp, Homo sapien
ggtagccttgctacctaacaagaac

SEQ ID NO: 1623973 - DNA, 25 bp, Homo sapien
cttgggcacaagtgaagagtttcat

SEQ ID NO: 1623974 - DNA, 25 bp, Homo sapien
gtgccagacctcctagatgagccat

SEQ ID NO: 1623975 - DNA, 25 bp, Homo sapien
gggagtccccagtggtgccagacct

SEQ ID NO: 1623976 - DNA, 25 bp, Homo sapien
cagcaggtaagtgggagtccccagt

SEQ ID NO: 1623977 - DNA, 25 bp, Homo sapien
cccagtggtgccagacctcctagat

SEQ ID NO: 1623978 - DNA, 25 bp, Homo sapien
tgttatttgacggtgcttctcaagg

SEQ ID NO: 1623979 - DNA, 25 bp, Homo sapien
atggacagatgttatttgacggtgc

SEQ ID NO: 1623980 - DNA, 25 bp, Homo sapien
tgactcaagcttcctactgttgctc

SEQ ID NO: 1623981 - DNA, 25 bp, Homo sapien
tcctactgttgctccaagtcttgga

SEQ ID NO: 1623982 - DNA, 25 bp, Homo sapien
gaattccgatgtgctctgcgtctgg

SEQ ID NO: 1623983 - DNA, 25 bp, Homo sapien
taagtgagtacctagagacctgcaa

SEQ ID NO: 1623984 - DNA, 25 bp, Homo sapien
tatcaggtagactcagtaaagcacg

SEQ ID NO: 1623985 - DNA, 25 bp, Homo sapien
tgaaagatgaagtaagcagccacca

SEQ ID NO: 1623986 - DNA, 25 bp, Homo sapien
ttgtacctttcgcgtgtatgactga

SEQ ID NO: 1623987 - DNA, 25 bp, Homo sapien
gtacctttcgcgtgtatgactgagc

SEQ ID NO: 1623988 - DNA, 25 bp, Homo sapien
tgtacctttcgcgtgtatgactgag

SEQ ID NO: 1623989 - DNA, 25 bp, Homo sapien
tacctttcgcgtgtatgactgagca

SEQ ID NO: 1623990 - DNA, 25 bp, Homo sapien
aacagtgtctttattaagtgaatgc

SEQ ID NO: 1623991 - DNA, 25 bp, Homo sapien
gtgtctttattaagtgaatgcctga

SEQ ID NO: 1623992 - DNA, 25 bp, Homo sapien
cagtgtctttattaagtgaatgcct

SEQ ID NO: 1623993 - DNA, 25 bp, Homo sapien
tgtctttattaagtgaatgcctgaa

SEQ ID NO: 1623994 - DNA, 25 bp, Homo sapien
ggcttcctctcaaataagtctcctg

SEQ ID NO: 1623995 - DNA, 25 bp, Homo sapien
caaataagtctcctgaggtgacata

SEQ ID NO: 1623996 - DNA, 25 bp, Homo sapien
gaagcctatgacttgagtccaagtc

SEQ ID NO: 1623997 - DNA, 25 bp, Homo sapien
tcaacttcaagtacagaaggcttcc

SEQ ID NO: 1623998 - DNA, 25 bp, Homo sapien
gcatatgcgacacccacagtagtta

SEQ ID NO: 1623999 - DNA, 25 bp, Homo sapien
ctggaaacgaactgggtgacggcat

SEQ ID NO: 1624000 - DNA, 25 bp, Homo sapien
tcaaggcggcggtattcagagaagt

SEQ ID NO: 1624001 - DNA, 25 bp, Homo sapien
tgatttcgattttcgccagggccaa

SEQ ID NO: 1624002 - DNA, 25 bp, Homo sapien
tgggaataacaaacagaagcaggga

SEQ ID NO: 1624003 - DNA, 25 bp, Homo sapien
ctgtgtgggaataacaaacagaagc

SEQ ID NO: 1624004 - DNA, 25 bp, Homo sapien
tgtgtgggaataacaaacagaagca

SEQ ID NO: 1624005 - DNA, 25 bp, Homo sapien
tgtgggaataacaaacagaagcagg

SEQ ID NO: 1624006 - DNA, 25 bp, Homo sapien
aaatgtctgccccttatagtccaat

SEQ ID NO: 1624007 - DNA, 25 bp, Homo sapien
ctgtgaactgtataactctgctgca

SEQ ID NO: 1624008 - DNA, 25 bp, Homo sapien
tactctctggattagaaggacaccc

SEQ ID NO: 1624009 - DNA, 25 bp, Homo sapien
cacagtaagttgacgtgtgatcacc

SEQ ID NO: 1624010 - DNA, 25 bp, Homo sapien
ctggaacagcgggactacagagctc

SEQ ID NO: 1624011 - DNA, 25 bp, Homo sapien
tacagagctcgtgaactcggccgag

SEQ ID NO: 1624012 - DNA, 25 bp, Homo sapien
taagtgcccaaactgtgctaacggc

SEQ ID NO: 1624013 - DNA, 25 bp, Homo sapien
tagtggtgagaagaccaacttccca

SEQ ID NO: 1624014 - DNA, 25 bp, Homo sapien
gaacgggcctgagcgggatgctacc

SEQ ID NO: 1624015 - DNA, 25 bp, Homo sapien
ctgagcgggatgctaccgacaacat

SEQ ID NO: 1624016 - DNA, 25 bp, Homo sapien
cgcgaacgggcctgagcgggatgct

SEQ ID NO: 1624017 - DNA, 25 bp, Homo sapien
ggcctgagcgggatgctaccgacaa

SEQ ID NO: 1624018 - DNA, 25 bp, Homo sapien
gatccccagaagaacgagagggctg

SEQ ID NO: 1624019 - DNA, 25 bp, Homo sapien
cactgacgtccggtgggccgacttt

SEQ ID NO: 1624020 - DNA, 25 bp, Homo sapien
cgcgccgccggaaaggaaattctgc

SEQ ID NO: 1624021 - DNA, 25 bp, Homo sapien
ggtcacagggacgaccttccaacca

SEQ ID NO: 1624022 - DNA, 25 bp, Homo sapien
acttaggatggtaatatatctcaac

SEQ ID NO: 1624023 - DNA, 25 bp, Homo sapien
ctagagataacaataaacgattata

SEQ ID NO: 1624024 - DNA, 25 bp, Homo sapien
gagataacaataaacgattatagtt

SEQ ID NO: 1624025 - DNA, 25 bp, Homo sapien
tatagtttaacttaggatggtaata

SEQ ID NO: 1624026 - DNA, 25 bp, Homo sapien
tccacacaattaccccgggaaatgc

SEQ ID NO: 1624027 - DNA, 25 bp, Homo sapien
cccgggaaatgcctggcttcccatt

SEQ ID NO: 1624028 - DNA, 25 bp, Homo sapien
gcctccctgctgaagggaccccacg

SEQ ID NO: 1624029 - DNA, 25 bp, Homo sapien
ctttctccaagaataaggacaatga

SEQ ID NO: 1624030 - DNA, 25 bp, Homo sapien
agcaaggatggtgccgtccggctgc

SEQ ID NO: 1624031 - DNA, 25 bp, Homo sapien
tgctggctggaactcccggaggact

SEQ ID NO: 1624032 - DNA, 25 bp, Homo sapien
ataaggacaatgagagccagcaagc

SEQ ID NO: 1624033 - DNA, 25 bp, Homo sapien
tccgggtcaaggtccagcatgaact

SEQ ID NO: 1624034 - DNA, 25 bp, Homo sapien
tctgcctcattcttctccgggtcaa

SEQ ID NO: 1624035 - DNA, 25 bp, Homo sapien
ggtcaaggtccagcatgaactccat

SEQ ID NO: 1624036 - DNA, 25 bp, Homo sapien
ttctccgggtcaaggtccagcatga

SEQ ID NO: 1624037 - DNA, 25 bp, Homo sapien
cagcaaatgcatataaggcttcttg

SEQ ID NO: 1624038 - DNA, 25 bp, Homo sapien
ggtcagcaaatgcatataaggcttc

SEQ ID NO: 1624039 - DNA, 25 bp, Homo sapien
aatggaactttaggcacgcagagag

SEQ ID NO: 1624040 - DNA, 25 bp, Homo sapien
gtaatggaactttaggcacgcagag

SEQ ID NO: 1624041 - DNA, 25 bp, Homo sapien
agaatggagtgcagtcagtgagacc

SEQ ID NO: 1624042 - DNA, 25 bp, Homo sapien
ccagagagagaatggagtgcagtca

SEQ ID NO: 1624043 - DNA, 25 bp, Homo sapien
agagagagaatggagtgcagtcagt

SEQ ID NO: 1624044 - DNA, 25 bp, Homo sapien
ctccagagagagaatggagtgcagt

SEQ ID NO: 1624045 - DNA, 25 bp, Homo sapien
gaggctgtgcgcaaaatcaggccca

SEQ ID NO: 1624046 - DNA, 25 bp, Homo sapien
aggctgtgcgcaaaatcaggcccag

SEQ ID NO: 1624047 - DNA, 25 bp, Homo sapien
ctcctgagaggtcattatttggggg

SEQ ID NO: 1624048 - DNA, 25 bp, Homo sapien
cacccgactggcacagcgcattata

SEQ ID NO: 1624049 - DNA, 25 bp, Homo sapien
ttatttgggggctaaacttagtgca

SEQ ID NO: 1624050 - DNA, 25 bp, Homo sapien
gtgcagacacccgactggcacagcg

SEQ ID NO: 1624051 - DNA, 25 bp, Homo sapien
tgtgaaagtattcactgtctggaga

SEQ ID NO: 1624052 - DNA, 25 bp, Homo sapien
ggaaatctaagccacagctggtggg

SEQ ID NO: 1624053 - DNA, 25 bp, Homo sapien
tgggatgtaaaacagtgcaatcact

SEQ ID NO: 1624054 - DNA, 25 bp, Homo sapien
agacatacacgtttcatgtaaaccc

SEQ ID NO: 1624055 - DNA, 25 bp, Homo sapien
tgtgggaatgctgatggcgatgtgg

SEQ ID NO: 1624056 - DNA, 25 bp, Homo sapien
caggttgtctcagccttgcgtggga

SEQ ID NO: 1624057 - DNA, 25 bp, Homo sapien
tgtctcagccttgcgtgggagcagc

SEQ ID NO: 1624058 - DNA, 25 bp, Homo sapien
tggcgatgtgggtgactgggtccca

SEQ ID NO: 1624059 - DNA, 25 bp, Homo sapien
cctggggtgagcagttcacaaagca

SEQ ID NO: 1624060 - DNA, 25 bp, Homo sapien
gtgtgggctgtggatccatatcaca

SEQ ID NO: 1624061 - DNA, 25 bp, Homo sapien
cctgcatccctctctgggttgtgag

SEQ ID NO: 1624062 - DNA, 25 bp, Homo sapien
tggttctgcaatccagggctggctg

SEQ ID NO: 1624063 - DNA, 25 bp, Homo sapien
ccctctgatagagaccggagaaaag

SEQ ID NO: 1624064 - DNA, 25 bp, Homo sapien
tcagtcccctctgatagagaccgga

SEQ ID NO: 1624065 - DNA, 25 bp, Homo sapien
cagtcccctctgatagagaccggag

SEQ ID NO: 1624066 - DNA, 25 bp, Homo sapien
tcccctctgatagagaccggagaaa

SEQ ID NO: 1624067 - DNA, 25 bp, Homo sapien
tatgagttgctagaatgccgaacag

SEQ ID NO: 1624068 - DNA, 25 bp, Homo sapien
gaggagacatcgcagtgccactctg

SEQ ID NO: 1624069 - DNA, 25 bp, Homo sapien
tggatggccttgtcagcagcgagaa

SEQ ID NO: 1624070 - DNA, 25 bp, Homo sapien
tctttgtgaacgcaaatggatggcc

SEQ ID NO: 1624071 - DNA, 25 bp, Homo sapien
atgtgagctggaagaccattctcca

SEQ ID NO: 1624072 - DNA, 25 bp, Homo sapien
tgtgagctggaagaccattctccag

SEQ ID NO: 1624073 - DNA, 25 bp, Homo sapien
cactcagcagttgcagccaaggtga

SEQ ID NO: 1624074 - DNA, 25 bp, Homo sapien
caaattcgggagacagcatttccac

SEQ ID NO: 1624075 - DNA, 25 bp, Homo sapien
tacaaatctagcatgctggaggcag

SEQ ID NO: 1624076 - DNA, 25 bp, Homo sapien
tgttctcaagtgcaggtctcctcag

SEQ ID NO: 1624077 - DNA, 25 bp, Homo sapien
ttgctgacaaatcagccacctgtcc

SEQ ID NO: 1624078 - DNA, 25 bp, Homo sapien
ggagagcatcctgtgtacttgctga

SEQ ID NO: 1624079 - DNA, 25 bp, Homo sapien
gaggcttccggagagcatcctgtgt

SEQ ID NO: 1624080 - DNA, 25 bp, Homo sapien
tggcctcatgcgctgaagctcagcc

SEQ ID NO: 1624081 - DNA, 25 bp, Homo sapien
gcaagccgagaagcatggaggtcat

SEQ ID NO: 1624082 - DNA, 25 bp, Homo sapien
gtagaaccagagaagggcaagccga

SEQ ID NO: 1624083 - DNA, 25 bp, Homo sapien
cagagaagggcaagccgagaagcat

SEQ ID NO: 1624084 - DNA, 25 bp, Homo sapien
tcactcccggtagaaccagagaagg

SEQ ID NO: 1624085 - DNA, 25 bp, Homo sapien
taagaaaattgctcagagagtgagg

SEQ ID NO: 1624086 - DNA, 25 bp, Homo sapien
acagtttgccgggagattccaggtg

SEQ ID NO: 1624087 - DNA, 25 bp, Homo sapien
cagtttgccgggagattccaggtgt

SEQ ID NO: 1624088 - DNA, 25 bp, Homo sapien
agacagtttgccgggagattccagg

SEQ ID NO: 1624089 - DNA, 25 bp, Homo sapien
gagatgagcaaatgcctccgattta

SEQ ID NO: 1624090 - DNA, 25 bp, Homo sapien
gcctccgatttataaccaaatgtaa

SEQ ID NO: 1624091 - DNA, 25 bp, Homo sapien
ctgagcggaggcgtcggtcacatcc

SEQ ID NO: 1624092 - DNA, 25 bp, Homo sapien
cgtcggtcacatccatccggtttct

SEQ ID NO: 1624093 - DNA, 25 bp, Homo sapien
cctacgcagccaggtacagcattgc

SEQ ID NO: 1624094 - DNA, 25 bp, Homo sapien
tcttcttcctcctacgcagccaggt

SEQ ID NO: 1624095 - DNA, 25 bp, Homo sapien
tacgcagccaggtacagcattgcct

SEQ ID NO: 1624096 - DNA, 25 bp, Homo sapien
ctcctacgcagccaggtacagcatt

SEQ ID NO: 1624097 - DNA, 25 bp, Homo sapien
tgacccccagcgtcctgccctgaat

SEQ ID NO: 1624098 - DNA, 25 bp, Homo sapien
ctgacccccagcgtcctgccctgaa

SEQ ID NO: 1624099 - DNA, 25 bp, Homo sapien
ccccagcgtcctgccctgaatgagc

SEQ ID NO: 1624100 - DNA, 25 bp, Homo sapien
acccccagcgtcctgccctgaatga

SEQ ID NO: 1624101 - DNA, 25 bp, Homo sapien
cagctagtgccccactcggaagaac

SEQ ID NO: 1624102 - DNA, 25 bp, Homo sapien
ggccttaggcggtgcactggcacca

SEQ ID NO: 1624103 - DNA, 25 bp, Homo sapien
ggtcttgcatctcagctagtgcccc

SEQ ID NO: 1624104 - DNA, 25 bp, Homo sapien
tcggaagaacagcatcctgataggc

SEQ ID NO: 1624105 - DNA, 25 bp, Homo sapien
catcacagcggcttgattctggctc

SEQ ID NO: 1624106 - DNA, 25 bp, Homo sapien
ccgcatcacagcggcttgattctgg

SEQ ID NO: 1624107 - DNA, 25 bp, Homo sapien
ttgttccccaggtccgcatcacagc

SEQ ID NO: 1624108 - DNA, 25 bp, Homo sapien
tcacagcggcttgattctggctcct

SEQ ID NO: 1624109 - DNA, 25 bp, Homo sapien
ggcgatgcagatgaacactttgtcc

SEQ ID NO: 1624110 - DNA, 25 bp, Homo sapien
cctgtgattcattgctatcaggaga

SEQ ID NO: 1624111 - DNA, 25 bp, Homo sapien
cactttgtcctgtgattcattgcta

SEQ ID NO: 1624112 - DNA, 25 bp, Homo sapien
ttaaggagacttgcaatgaggtgtt

SEQ ID NO: 1624113 - DNA, 25 bp, Homo sapien
gaggagagagtgttcggcggccact

SEQ ID NO: 1624114 - DNA, 25 bp, Homo sapien
agaattaatcaagaggcccagagga

SEQ ID NO: 1624115 - DNA, 25 bp, Homo sapien
gagagagtgttcggcggccactcca

SEQ ID NO: 1624116 - DNA, 25 bp, Homo sapien
aagaattaatcaagaggcccagagg

SEQ ID NO: 1624117 - DNA, 25 bp, Homo sapien
ccggactgccaggcggcactggttt

SEQ ID NO: 1624118 - DNA, 25 bp, Homo sapien
agaagaactggaggttgactttagg

SEQ ID NO: 1624119 - DNA, 25 bp, Homo sapien
ctggaggttgactttaggaacttca

SEQ ID NO: 1624120 - DNA, 25 bp, Homo sapien
actcaagcttcccatattcacacat

SEQ ID NO: 1624121 - DNA, 25 bp, Homo sapien
aagtttcaatacatacaggatggcc

SEQ ID NO: 1624122 - DNA, 25 bp, Homo sapien
tgtgacaagttgacccacggcatct

SEQ ID NO: 1624123 - DNA, 25 bp, Homo sapien
gatggcccctgtgacaagttgaccc

SEQ ID NO: 1624124 - DNA, 25 bp, Homo sapien
tacatacaggatggcccctgtgaca

SEQ ID NO: 1624125 - DNA, 25 bp, Homo sapien
ctgccaggggtgtgatttccacagg

SEQ ID NO: 1624126 - DNA, 25 bp, Homo sapien
ttgctgccaggggtgtgatttccac

SEQ ID NO: 1624127 - DNA, 25 bp, Homo sapien
tgctgccaggggtgtgatttccaca

SEQ ID NO: 1624128 - DNA, 25 bp, Homo sapien
gccaggggtgtgatttccacaggct

SEQ ID NO: 1624129 - DNA, 25 bp, Homo sapien
gagggcaagagtccaggttcaatca

SEQ ID NO: 1624130 - DNA, 25 bp, Homo sapien
gaagtactctctgcttacagtgagc

SEQ ID NO: 1624131 - DNA, 25 bp, Homo sapien
tcacgtggcctgctcagtaggagga

SEQ ID NO: 1624132 - DNA, 25 bp, Homo sapien
cacacattccattcgttggagcaag

SEQ ID NO: 1624133 - DNA, 25 bp, Homo sapien
tattattttagtgggattttgctgc

SEQ ID NO: 1624134 - DNA, 25 bp, Homo sapien
tgagctaccatacccggtctagttt

SEQ ID NO: 1624135 - DNA, 25 bp, Homo sapien
catacccggtctagttttgttctgt

SEQ ID NO: 1624136 - DNA, 25 bp, Homo sapien
gctggacttaacaggcgtgagctac

SEQ ID NO: 1624137 - DNA, 25 bp, Homo sapien
gaggtggagggactcaagacagaga

SEQ ID NO: 1624138 - DNA, 25 bp, Homo sapien
ctatgcctgggatgcatgaagggct

SEQ ID NO: 1624139 - DNA, 25 bp, Homo sapien
tcagatggcacagatagggaggcca

SEQ ID NO: 1624140 - DNA, 25 bp, Homo sapien
tgcacagaccgacaggaacagacaa

SEQ ID NO: 1624141 - DNA, 25 bp, Homo sapien
tgggctcagctgtaatgacattagc

SEQ ID NO: 1624142 - DNA, 25 bp, Homo sapien
tccttaactctaggggcactcctgg

SEQ ID NO: 1624143 - DNA, 25 bp, Homo sapien
tcagaagcaatgtcactaatctgcg

SEQ ID NO: 1624144 - DNA, 25 bp, Homo sapien
acattagcgtgtttagagctgtcag

SEQ ID NO: 1624145 - DNA, 25 bp, Homo sapien
tgatggaacacataggcagacgtac

SEQ ID NO: 1624146 - DNA, 25 bp, Homo sapien
ctccattttccagcgcgtaaaacaa

SEQ ID NO: 1624147 - DNA, 25 bp, Homo sapien
taggcagacgtacagctccattttc

SEQ ID NO: 1624148 - DNA, 25 bp, Homo sapien
agggcatgacagtccaattcttggg

SEQ ID NO: 1624149 - DNA, 25 bp, Homo sapien
tcagcatccccgtttcagagaggag

SEQ ID NO: 1624150 - DNA, 25 bp, Homo sapien
cagagaggagaaaccgcaggatcag

SEQ ID NO: 1624151 - DNA, 25 bp, Homo sapien
gggctaaacagtcatcattgcaatg

SEQ ID NO: 1624152 - DNA, 25 bp, Homo sapien
tcaggaaggctggtgcttcacactt

SEQ ID NO: 1624153 - DNA, 25 bp, Homo sapien
aaacagggcttgtgttgcatggacc

SEQ ID NO: 1624154 - DNA, 25 bp, Homo sapien
ttcaaaaagggaagccgtgctcagg

SEQ ID NO: 1624155 - DNA, 25 bp, Homo sapien
ccagagaggttcaggtccgtgagtc

SEQ ID NO: 1624156 - DNA, 25 bp, Homo sapien
gaaatgagctgtagatggtgcccct

SEQ ID NO: 1624157 - DNA, 25 bp, Homo sapien
gaacaaatcggctgttgccttcatg

SEQ ID NO: 1624158 - DNA, 25 bp, Homo sapien
cactctcgactgtgaacaaatcggc

SEQ ID NO: 1624159 - DNA, 25 bp, Homo sapien
tcatgcaggttctcgtaaattcatt

SEQ ID NO: 1624160 - DNA, 25 bp, Homo sapien
gaaaagctcgtccaccctggctgtt

SEQ ID NO: 1624161 - DNA, 25 bp, Homo sapien
tgcccagaatgtgccaatcactcat

SEQ ID NO: 1624162 - DNA, 25 bp, Homo sapien
actgcagggacacactctggagaga

SEQ ID NO: 1624163 - DNA, 25 bp, Homo sapien
cctggtgctgagatgaaaggccagc

SEQ ID NO: 1624164 - DNA, 25 bp, Homo sapien
caccagcgactccacatatggctgg

SEQ ID NO: 1624165 - DNA, 25 bp, Homo sapien
caacggaaacttagctcgttctcca

SEQ ID NO: 1624166 - DNA, 25 bp, Homo sapien
tctggacaacggaaacttagctcgt

SEQ ID NO: 1624167 - DNA, 25 bp, Homo sapien
cttagctcgttctccaagttgattt

SEQ ID NO: 1624168 - DNA, 25 bp, Homo sapien
acctgagctctggacaacggaaact

SEQ ID NO: 1624169 - DNA, 25 bp, Homo sapien
ataaggcgctgaagaccccacagta

SEQ ID NO: 1624170 - DNA, 25 bp, Homo sapien
cacagtacccttcaggaggaagacc

SEQ ID NO: 1624171 - DNA, 25 bp, Homo sapien
ccaagctgttggtgagataaggcgc

SEQ ID NO: 1624172 - DNA, 25 bp, Homo sapien
tctgggcacactcagccaagctgtt

SEQ ID NO: 1624173 - DNA, 25 bp, Homo sapien
cgttgaggaggacctggtgtagaaa

SEQ ID NO: 1624174 - DNA, 25 bp, Homo sapien
ctcccgttgaggaggacctggtgta

SEQ ID NO: 1624175 - DNA, 25 bp, Homo sapien
cccgttgaggaggacctggtgtaga

SEQ ID NO: 1624176 - DNA, 25 bp, Homo sapien
ctctcccgttgaggaggacctggtg

SEQ ID NO: 1624177 - DNA, 25 bp, Homo sapien
tctctgcctgcgtgtggtagctggc

SEQ ID NO: 1624178 - DNA, 25 bp, Homo sapien
cacaatatcaaatcccgcaagcaga

SEQ ID NO: 1624179 - DNA, 25 bp, Homo sapien
ctctgcctgcgtgtggtagctggca

SEQ ID NO: 1624180 - DNA, 25 bp, Homo sapien
aaatcccgcaagcagaagcaggagg

SEQ ID NO: 1624181 - DNA, 25 bp, Homo sapien
cccttccgccacgatcataaatttc

SEQ ID NO: 1624182 - DNA, 25 bp, Homo sapien
ctctctcacctaccgccacgtaaga

SEQ ID NO: 1624183 - DNA, 25 bp, Homo sapien
catcctctctcacctaccgccacgt

SEQ ID NO: 1624184 - DNA, 25 bp, Homo sapien
ctcacctaccgccacgtaagacgtg

SEQ ID NO: 1624185 - DNA, 25 bp, Homo sapien
gggagtccacatggtacggtgaatt

SEQ ID NO: 1624186 - DNA, 25 bp, Homo sapien
aaggttctatccagggtgcccagag

SEQ ID NO: 1624187 - DNA, 25 bp, Homo sapien
gtgcccagagattcttagcaagtca

SEQ ID NO: 1624188 - DNA, 25 bp, Homo sapien
cagagattcttagcaagtcagtcct

SEQ ID NO: 1624189 - DNA, 25 bp, Homo sapien
ccactgttagaatgcacttctccag

SEQ ID NO: 1624190 - DNA, 25 bp, Homo sapien
tgaattccactgttagaatgcactt

SEQ ID NO: 1624191 - DNA, 25 bp, Homo sapien
gccgcctgaattccactgttagaat

SEQ ID NO: 1624192 - DNA, 25 bp, Homo sapien
tctcgccgcctgaattccactgtta

SEQ ID NO: 1624193 - DNA, 25 bp, Homo sapien
aagataagtatttgtccaggtatcc

SEQ ID NO: 1624194 - DNA, 25 bp, Homo sapien
ataggtgtctggaattatgtttgcc

SEQ ID NO: 1624195 - DNA, 25 bp, Homo sapien
caggtatccatgttactttctatca

SEQ ID NO: 1624196 - DNA, 25 bp, Homo sapien
tttctatcagcatacataggtgtct

SEQ ID NO: 1624197 - DNA, 25 bp, Homo sapien
caggaacaatcccactcatcatgat

SEQ ID NO: 1624198 - DNA, 25 bp, Homo sapien
gaacaatcccactcatcatgataaa

SEQ ID NO: 1624199 - DNA, 25 bp, Homo sapien
cccaggaacaatcccactcatcatg

SEQ ID NO: 1624200 - DNA, 25 bp, Homo sapien
tccccaggaacaatcccactcatca

SEQ ID NO: 1624201 - DNA, 25 bp, Homo sapien
tcctggatctgcacccagtgagctc

SEQ ID NO: 1624202 - DNA, 25 bp, Homo sapien
ctctcctggatctgcacccagtgag

SEQ ID NO: 1624203 - DNA, 25 bp, Homo sapien
ccggcctctcctggatctgcaccca

SEQ ID NO: 1624204 - DNA, 25 bp, Homo sapien
ggcctctcctggatctgcacccagt

SEQ ID NO: 1624205 - DNA, 25 bp, Homo sapien
tttctccagcgttgtctagctgcag

SEQ ID NO: 1624206 - DNA, 25 bp, Homo sapien
gtctagctgcaggtactgagtccgt

SEQ ID NO: 1624207 - DNA, 25 bp, Homo sapien
ggagtttctccagcgttgtctagct

SEQ ID NO: 1624208 - DNA, 25 bp, Homo sapien
tctagctgcaggtactgagtccgtc

SEQ ID NO: 1624209 - DNA, 25 bp, Homo sapien
tcaaaaaagccacctctggcaaggt

SEQ ID NO: 1624210 - DNA, 25 bp, Homo sapien
tctcccactaattgctaggaaggaa

SEQ ID NO: 1624211 - DNA, 25 bp, Homo sapien
ttctgcttcaaaagacctcgaggga

SEQ ID NO: 1624212 - DNA, 25 bp, Homo sapien
acctcgagggaagggtctcaactct

SEQ ID NO: 1624213 - DNA, 25 bp, Homo sapien
ggaaatggtccatggcagctcctga

SEQ ID NO: 1624214 - DNA, 25 bp, Homo sapien
actccccaggaagcgtgcagcagag

SEQ ID NO: 1624215 - DNA, 25 bp, Homo sapien
agggagcaacttgggcttgggaaat

SEQ ID NO: 1624216 - DNA, 25 bp, Homo sapien
ccagggtggcccgttcaggagggca

SEQ ID NO: 1624217 - DNA, 25 bp, Homo sapien
cagggacgtaaagccacatggacgc

SEQ ID NO: 1624218 - DNA, 25 bp, Homo sapien
caggacaagcgagtccagggacgta

SEQ ID NO: 1624219 - DNA, 25 bp, Homo sapien
ggctgttggggacccaatgcccaga

SEQ ID NO: 1624220 - DNA, 25 bp, Homo sapien
aatgcccagacaggacaagcgagtc

SEQ ID NO: 1624221 - DNA, 25 bp, Homo sapien
tttcagggtacacggtgctcgccac

SEQ ID NO: 1624222 - DNA, 25 bp, Homo sapien
cattttcagggtacacggtgctcgc

SEQ ID NO: 1624223 - DNA, 25 bp, Homo sapien
tcaccattttcagggtacacggtgc

SEQ ID NO: 1624224 - DNA, 25 bp, Homo sapien
gtcccagacgcacagctcaccattt

SEQ ID NO: 1624225 - DNA, 25 bp, Homo sapien
ccatgggccttatcgttaatcatac

SEQ ID NO: 1624226 - DNA, 25 bp, Homo sapien
gagccttcagaactccgtctgattg

SEQ ID NO: 1624227 - DNA, 25 bp, Homo sapien
tctgattggagggtagacccacgcc

SEQ ID NO: 1624228 - DNA, 25 bp, Homo sapien
aggcggagttaggatcagctctgcc

SEQ ID NO: 1624229 - DNA, 25 bp, Homo sapien
tggatagagactgccaggactcttt

SEQ ID NO: 1624230 - DNA, 25 bp, Homo sapien
cagcacggctgcatcgcgggagtca

SEQ ID NO: 1624231 - DNA, 25 bp, Homo sapien
taaggtccacggaattgaggaatgc

SEQ ID NO: 1624232 - DNA, 25 bp, Homo sapien
tgtggaatgcaacaggaaggtagta

SEQ ID NO: 1624233 - DNA, 25 bp, Homo sapien
gtgaaatcaccatgtctacccctgg

SEQ ID NO: 1624234 - DNA, 25 bp, Homo sapien
ggttgatgcgtcactcagccactta

SEQ ID NO: 1624235 - DNA, 25 bp, Homo sapien
caaggcaggcacagtcttagagacc

SEQ ID NO: 1624236 - DNA, 25 bp, Homo sapien
tgtaggcgctagagatacatcagtg

SEQ ID NO: 1624237 - DNA, 25 bp, Homo sapien
gcagatggtttgaccttggcagcca

SEQ ID NO: 1624238 - DNA, 25 bp, Homo sapien
gtaataccaactcatgcagtgggca

SEQ ID NO: 1624239 - DNA, 25 bp, Homo sapien
cacaaggcggtacagggataaatta

SEQ ID NO: 1624240 - DNA, 25 bp, Homo sapien
tacagggattctcccacgggcatcg

SEQ ID NO: 1624241 - DNA, 25 bp, Homo sapien
tcgctgggcgctgtgcgctcacttc

SEQ ID NO: 1624242 - DNA, 25 bp, Homo sapien
ctggctagcgtgtgcgctctccgcg

SEQ ID NO: 1624243 - DNA, 25 bp, Homo sapien
tagtctccggctgggcacagcgttc

SEQ ID NO: 1624244 - DNA, 25 bp, Homo sapien
atgagcggccgtctcgagccgtgca

SEQ ID NO: 1624245 - DNA, 25 bp, Homo sapien
gggctgattggcggccgccggcggc

SEQ ID NO: 1624246 - DNA, 25 bp, Homo sapien
cgcaccgggcaagccggcgagggag

SEQ ID NO: 1624247 - DNA, 25 bp, Homo sapien
ccgccggagccgcaccgggcaagcc

SEQ ID NO: 1624248 - DNA, 25 bp, Homo sapien
gagggagcggggctgattggcggcc

SEQ ID NO: 1624249 - DNA, 25 bp, Homo sapien
gctcggcgctgacctgtaaaactcc

SEQ ID NO: 1624250 - DNA, 25 bp, Homo sapien
tagggcagcgatcgcagccttgcat

SEQ ID NO: 1624251 - DNA, 25 bp, Homo sapien
ctcttttgtgtaaatcaagggtcca

SEQ ID NO: 1624252 - DNA, 25 bp, Homo sapien
ttgagtcccctaattcggctcggcg

SEQ ID NO: 1624253 - DNA, 25 bp, Homo sapien
catttgcccaggagtactcaggctc

SEQ ID NO: 1624254 - DNA, 25 bp, Homo sapien
cttccacgtcctggacacggaggca

SEQ ID NO: 1624255 - DNA, 25 bp, Homo sapien
tctgggcatcatcaccaagggatat

SEQ ID NO: 1624256 - DNA, 25 bp, Homo sapien
gaggacagcttgtctgcaaacccag

SEQ ID NO: 1624257 - DNA, 25 bp, Homo sapien
aagcgatggtctatggacaattcac

SEQ ID NO: 1624258 - DNA, 25 bp, Homo sapien
gtgcagaagcgatggtctatggaca

SEQ ID NO: 1624259 - DNA, 25 bp, Homo sapien
tgcagaagcgatggtctatggacaa

SEQ ID NO: 1624260 - DNA, 25 bp, Homo sapien
cagaagcgatggtctatggacaatt

SEQ ID NO: 1624261 - DNA, 25 bp, Homo sapien
tcggatgtttgaacacagcctgtgt

SEQ ID NO: 1624262 - DNA, 25 bp, Homo sapien
cacccactttgcattcggatgtttg

SEQ ID NO: 1624263 - DNA, 25 bp, Homo sapien
agatgatttgtacaacctcctcctt

SEQ ID NO: 1624264 - DNA, 25 bp, Homo sapien
gaatcctggactttcaggccagatg

SEQ ID NO: 1624265 - DNA, 25 bp, Homo sapien
tgcccggggccctcggtgaggacca

SEQ ID NO: 1624266 - DNA, 25 bp, Homo sapien
agctggatctcccctacaaccagag

SEQ ID NO: 1624267 - DNA, 25 bp, Homo sapien
ccctgatgctcggagagtcttatta

SEQ ID NO: 1624268 - DNA, 25 bp, Homo sapien
cagagccactgtcgtttgggcaaaa

SEQ ID NO: 1624269 - DNA, 25 bp, Homo sapien
aaaagtcaatccttcctcgccagcg

SEQ ID NO: 1624270 - DNA, 25 bp, Homo sapien
ctgtcaccagaagtggcagcctcat

SEQ ID NO: 1624271 - DNA, 25 bp, Homo sapien
gcagaatctttttgcaccatgcatg

SEQ ID NO: 1624272 - DNA, 25 bp, Homo sapien
gatgtgaactttagctgtatcctga

SEQ ID NO: 1624273 - DNA, 25 bp, Homo sapien
ggaagcttctaggattgacccaggc

SEQ ID NO: 1624274 - DNA, 25 bp, Homo sapien
acactgcagttggatggctcctgga

SEQ ID NO: 1624275 - DNA, 25 bp, Homo sapien
agtattatacaagttggaaggacaa

SEQ ID NO: 1624276 - DNA, 25 bp, Homo sapien
catctaaggctggatcaaagtctgt

SEQ ID NO: 1624277 - DNA, 25 bp, Homo sapien
tcattcaaccttgtcactgtgccct

SEQ ID NO: 1624278 - DNA, 25 bp, Homo sapien
gcactgattgagatgtcctttccca

SEQ ID NO: 1624279 - DNA, 25 bp, Homo sapien
ggtgtgcaatcacatatcataagtg

SEQ ID NO: 1624280 - DNA, 25 bp, Homo sapien
cggtcaagtgaacggtctgcgaaga

SEQ ID NO: 1624281 - DNA, 25 bp, Homo sapien
tgaacaacatgggaaggtcgcagcg

SEQ ID NO: 1624282 - DNA, 25 bp, Homo sapien
tctgcgaagaagttcaaagcgaagg

SEQ ID NO: 1624283 - DNA, 25 bp, Homo sapien
gccagtgacgctccgagttgaggat

SEQ ID NO: 1624284 - DNA, 25 bp, Homo sapien
gcaagacgctgtcagaaaaggaaga

SEQ ID NO: 1624285 - DNA, 25 bp, Homo sapien
tctgccattacaatccatactgggc

SEQ ID NO: 1624286 - DNA, 25 bp, Homo sapien
gaaccaccccaaaagacatctcaaa

SEQ ID NO: 1624287 - DNA, 25 bp, Homo sapien
tcagctaaccatctacacacaaagg

SEQ ID NO: 1624288 - DNA, 25 bp, Homo sapien
caggaagaagcccatttgagaggac

SEQ ID NO: 1624289 - DNA, 25 bp, Homo sapien
taaggaacaggaagaagcccatttg

SEQ ID NO: 1624290 - DNA, 25 bp, Homo sapien
aggaacaggaagaagcccatttgag

SEQ ID NO: 1624291 - DNA, 25 bp, Homo sapien
aacaggaagaagcccatttgagagg

SEQ ID NO: 1624292 - DNA, 25 bp, Homo sapien
ctccgattggccgagccaccgcggg

SEQ ID NO: 1624293 - DNA, 25 bp, Homo sapien
agcggcgagcggaaagggaagccgg

SEQ ID NO: 1624294 - DNA, 25 bp, Homo sapien
ggtcaaacacgggcgacagtcccgc

SEQ ID NO: 1624295 - DNA, 25 bp, Homo sapien
ctgcagcgcgcacaagctcgggcgc

SEQ ID NO: 1624296 - DNA, 25 bp, Homo sapien
gtttgtgattcttggtgggagctgc

SEQ ID NO: 1624297 - DNA, 25 bp, Homo sapien
tggcctcgtgtggccgccgggacct

SEQ ID NO: 1624298 - DNA, 25 bp, Homo sapien
agggaaacagggtcgggcactgctc

SEQ ID NO: 1624299 - DNA, 25 bp, Homo sapien
tgggagctgccaagggaaacagggt

SEQ ID NO: 1624300 - DNA, 25 bp, Homo sapien
gatgtggctcccaagccgcagtgct

SEQ ID NO: 1624301 - DNA, 25 bp, Homo sapien
tacagaacctggcttcatggcttct

SEQ ID NO: 1624302 - DNA, 25 bp, Homo sapien
gccgcagtgctcacatgagcacctc

SEQ ID NO: 1624303 - DNA, 25 bp, Homo sapien
ttctgcagccacacgggggctctca

SEQ ID NO: 1624304 - DNA, 25 bp, Homo sapien
tgcaggggcaagtggaacgggactc

SEQ ID NO: 1624305 - DNA, 25 bp, Homo sapien
gcaagtggaacgggactcgagggcc

SEQ ID NO: 1624306 - DNA, 25 bp, Homo sapien
ggacacttgtgatctgcaggggcaa

SEQ ID NO: 1624307 - DNA, 25 bp, Homo sapien
tcaggacacttgtgatctgcagggg

SEQ ID NO: 1624308 - DNA, 25 bp, Homo sapien
cagaatcttgctcttgtcgcctagg

SEQ ID NO: 1624309 - DNA, 25 bp, Homo sapien
ggattacaggtgcgtgccactacgc

SEQ ID NO: 1624310 - DNA, 25 bp, Homo sapien
tctgcctcagactgccgagtagctg

SEQ ID NO: 1624311 - DNA, 25 bp, Homo sapien
tcccgggttctaagcgattcttctg

SEQ ID NO: 1624312 - DNA, 25 bp, Homo sapien
ccaaccacttttagaggccgagacg

SEQ ID NO: 1624313 - DNA, 25 bp, Homo sapien
atccaaccacttttagaggccgaga

SEQ ID NO: 1624314 - DNA, 25 bp, Homo sapien
caaccacttttagaggccgagacgg

SEQ ID NO: 1624315 - DNA, 25 bp, Homo sapien
tccaaccacttttagaggccgagac

SEQ ID NO: 1624316 - DNA, 25 bp, Homo sapien
tcaaacaagcccagatgctaaattt

SEQ ID NO: 1624317 - DNA, 25 bp, Homo sapien
aacctgctcttgacctctaacaagg

SEQ ID NO: 1624318 - DNA, 25 bp, Homo sapien
cctggctctgaaaggagtgtctgta

SEQ ID NO: 1624319 - DNA, 25 bp, Homo sapien
tgtatcaccggcaacctgagtggaa

SEQ ID NO: 1624320 - DNA, 25 bp, Homo sapien
taagaaggcaagtacgttagaaata

SEQ ID NO: 1624321 - DNA, 25 bp, Homo sapien
tatatgtgtacctacatagcattaa

SEQ ID NO: 1624322 - DNA, 25 bp, Homo sapien
taaaacaattgcaggaaagacacca

SEQ ID NO: 1624323 - DNA, 25 bp, Homo sapien
caaaggggcatataggataagaagg

SEQ ID NO: 1624324 - DNA, 25 bp, Homo sapien
tcagccccgattgttccagaaggat

SEQ ID NO: 1624325 - DNA, 25 bp, Homo sapien
ccaggacctgatgcacgagtaagaa

SEQ ID NO: 1624326 - DNA, 25 bp, Homo sapien
tttagttccagggtccgtatgcagg

SEQ ID NO: 1624327 - DNA, 25 bp, Homo sapien
caagaaaagtgctttcggctcctgg

SEQ ID NO: 1624328 - DNA, 25 bp, Homo sapien
gcaagagaaaggctcggcccttcct

SEQ ID NO: 1624329 - DNA, 25 bp, Homo sapien
cctgatttgtgctagacgaggccag

SEQ ID NO: 1624330 - DNA, 25 bp, Homo sapien
cctgacgtccttacacacatggagg

SEQ ID NO: 1624331 - DNA, 25 bp, Homo sapien
actgagctttcctataagcagggcc

SEQ ID NO: 1624332 - DNA, 25 bp, Homo sapien
caatggcatagcgtttgcacgtaac

SEQ ID NO: 1624333 - DNA, 25 bp, Homo sapien
gaaaacacacagtacagctatgcct

SEQ ID NO: 1624334 - DNA, 25 bp, Homo sapien
tggagaccacagttacggagagctg

SEQ ID NO: 1624335 - DNA, 25 bp, Homo sapien
catcaggcaagtctatttggcacca

SEQ ID NO: 1624336 - DNA, 25 bp, Homo sapien
gggccattcgacagtccctgggtag

SEQ ID NO: 1624337 - DNA, 25 bp, Homo sapien
tacactgatgatgtggagattcccc

SEQ ID NO: 1624338 - DNA, 25 bp, Homo sapien
taatttctggaacatgacactgcac

SEQ ID NO: 1624339 - DNA, 25 bp, Homo sapien
tctccagcgggacattactagtaat

SEQ ID NO: 1624340 - DNA, 25 bp, Homo sapien
cggcccgcagctccttggtgacgta

SEQ ID NO: 1624341 - DNA, 25 bp, Homo sapien
atcatactggatctcggcccgcagc

SEQ ID NO: 1624342 - DNA, 25 bp, Homo sapien
ctagtcatcatactggatctcggcc

SEQ ID NO: 1624343 - DNA, 25 bp, Homo sapien
gtcatcatactggatctcggcccgc

SEQ ID NO: 1624344 - DNA, 25 bp, Homo sapien
catggccagcagctgctgctgcagg

SEQ ID NO: 1624345 - DNA, 25 bp, Homo sapien
tggccagcagctgctgctgcagggc

SEQ ID NO: 1624346 - DNA, 25 bp, Homo sapien
agcatggccagcagctgctgctgca

SEQ ID NO: 1624347 - DNA, 25 bp, Homo sapien
tcaccagcatggccagcagctgctg

SEQ ID NO: 1624348 - DNA, 25 bp, Homo sapien
ctcgctgcccatgaccagcgcggtc

SEQ ID NO: 1624349 - DNA, 25 bp, Homo sapien
tgcacggcgtccgtccactccaggt

SEQ ID NO: 1624350 - DNA, 25 bp, Homo sapien
accagcgcggtcagctgcacggcgt

SEQ ID NO: 1624351 - DNA, 25 bp, Homo sapien
tgcccatgaccagcgcggtcagctg

SEQ ID NO: 1624352 - DNA, 25 bp, Homo sapien
gggcagctccattaggatctgagga

SEQ ID NO: 1624353 - DNA, 25 bp, Homo sapien
ccggcttaaactgtccacttgtcat

SEQ ID NO: 1624354 - DNA, 25 bp, Homo sapien
ctgatgatggctgcggcttcgttaa

SEQ ID NO: 1624355 - DNA, 25 bp, Homo sapien
gcttcgttaaagagcctctgttgct

SEQ ID NO: 1624356 - DNA, 25 bp, Homo sapien
caggcacctaacagccccccgacag

SEQ ID NO: 1624357 - DNA, 25 bp, Homo sapien
ccaggcacctaacagccccccgaca

SEQ ID NO: 1624358 - DNA, 25 bp, Homo sapien
aggcacctaacagccccccgacagc

SEQ ID NO: 1624359 - DNA, 25 bp, Homo sapien
gcacattcatgagcgggctgcagcg

SEQ ID NO: 1624360 - DNA, 25 bp, Homo sapien
tcttcatgagctgacggaggtttct

SEQ ID NO: 1624361 - DNA, 25 bp, Homo sapien
taagcgatggccttacttaagttcc

SEQ ID NO: 1624362 - DNA, 25 bp, Homo sapien
tctctaatcacaaaggagaaggctg

SEQ ID NO: 1624363 - DNA, 25 bp, Homo sapien
tctacttctgccaccctaaaagggc

SEQ ID NO: 1624364 - DNA, 25 bp, Homo sapien
gagtggcagtggctacttcacgcca

SEQ ID NO: 1624365 - DNA, 25 bp, Homo sapien
ttctacctgaagaggccacgtgcag

SEQ ID NO: 1624366 - DNA, 25 bp, Homo sapien
gggtccaaagtcaagtgcctccaag

SEQ ID NO: 1624367 - DNA, 25 bp, Homo sapien
caggcgattcaatgcaatgcggtgt

SEQ ID NO: 1624368 - DNA, 25 bp, Homo sapien
gaaagcaggcgattcaatgcaatgc

SEQ ID NO: 1624369 - DNA, 25 bp, Homo sapien
gcaatgcggtgtcttagactggatc

SEQ ID NO: 1624370 - DNA, 25 bp, Homo sapien
aggagactaagaaagcaggcgattc

SEQ ID NO: 1624371 - DNA, 25 bp, Homo sapien
taatacatgtgatcgctaggagaac

SEQ ID NO: 1624372 - DNA, 25 bp, Homo sapien
tatcccagaggctgaatgccacacg

SEQ ID NO: 1624373 - DNA, 25 bp, Homo sapien
tggcaggctggactcagacaacagg

SEQ ID NO: 1624374 - DNA, 25 bp, Homo sapien
ctaggagaaccgaaactggatggaa

SEQ ID NO: 1624375 - DNA, 25 bp, Homo sapien
atggcccctgtgaccagggcaccct

SEQ ID NO: 1624376 - DNA, 25 bp, Homo sapien
tggcccctgtgaccagggcaccctt

SEQ ID NO: 1624377 - DNA, 25 bp, Homo sapien
catgatgtcctccaccatgatagtc

SEQ ID NO: 1624378 - DNA, 25 bp, Homo sapien
atgatgtcctccaccatgatagtca

SEQ ID NO: 1624379 - DNA, 25 bp, Homo sapien
tcatgatgtcctccaccatgatagt

SEQ ID NO: 1624380 - DNA, 25 bp, Homo sapien
tgatgtcctccaccatgatagtcat

SEQ ID NO: 1624381 - DNA, 25 bp, Homo sapien
caatgagcataagagtatttccatc

SEQ ID NO: 1624382 - DNA, 25 bp, Homo sapien
cactctagttcctagagttttaagg

SEQ ID NO: 1624383 - DNA, 25 bp, Homo sapien
gggacagtttcaatgagcataagag

SEQ ID NO: 1624384 - DNA, 25 bp, Homo sapien
gagtatttccatcacaatgccactc

SEQ ID NO: 1624385 - DNA, 25 bp, Homo sapien
gtgattctccacaagtgcacgggaa

SEQ ID NO: 1624386 - DNA, 25 bp, Homo sapien
gacatgtgtgcttttctgacccaag

SEQ ID NO: 1624387 - DNA, 25 bp, Homo sapien
taaaggcatgcaacactacgctcag

SEQ ID NO: 1624388 - DNA, 25 bp, Homo sapien
gaaattgcaaacaagcacccctaga

SEQ ID NO: 1624389 - DNA, 25 bp, Homo sapien
gccactacgtccagcacaaaatgag

SEQ ID NO: 1624390 - DNA, 25 bp, Homo sapien
taatcacctttgagcttagttctgg

SEQ ID NO: 1624391 - DNA, 25 bp, Homo sapien
agccctgccatgcttggtctgcaag

SEQ ID NO: 1624392 - DNA, 25 bp, Homo sapien
ttccccgggcgtgaagaccctgagc

SEQ ID NO: 1624393 - DNA, 25 bp, Homo sapien
caaaggcagtaggtggatcccacca

SEQ ID NO: 1624394 - DNA, 25 bp, Homo sapien
gaagaccagatcacattggacctgc

SEQ ID NO: 1624395 - DNA, 25 bp, Homo sapien
tgccattctgtgtagcaatggaggc

SEQ ID NO: 1624396 - DNA, 25 bp, Homo sapien
taaagcattaacgacccttcctgac

SEQ ID NO: 1624397 - DNA, 25 bp, Homo sapien
gacaatgactacactaacagtgtcc

SEQ ID NO: 1624398 - DNA, 25 bp, Homo sapien
caatgactacactaacagtgtccac

SEQ ID NO: 1624399 - DNA, 25 bp, Homo sapien
atgactacactaacagtgtccaccc

SEQ ID NO: 1624400 - DNA, 25 bp, Homo sapien
tccatagggacaatgactacactaa

SEQ ID NO: 1624401 - DNA, 25 bp, Homo sapien
agcggaggtctacgcggcgcgctcg

SEQ ID NO: 1624402 - DNA, 25 bp, Homo sapien
ggagggtcgcgcaggccttggtggc

SEQ ID NO: 1624403 - DNA, 25 bp, Homo sapien
ctcggcgatcagacgcggctgcagc

SEQ ID NO: 1624404 - DNA, 25 bp, Homo sapien
cccgcggagggtcgcgcaggccttg

SEQ ID NO: 1624405 - DNA, 25 bp, Homo sapien
cctggcttgggttgcgggtggcgta

SEQ ID NO: 1624406 - DNA, 25 bp, Homo sapien
gtaaggagacgaggcgcccggagaa

SEQ ID NO: 1624407 - DNA, 25 bp, Homo sapien
tggctccgagctgcgcccggcctta

SEQ ID NO: 1624408 - DNA, 25 bp, Homo sapien
agccgggggtcgctgctgggcaccc

SEQ ID NO: 1624409 - DNA, 25 bp, Homo sapien
ctgggaaccgcaaggccgcgctccc

SEQ ID NO: 1624410 - DNA, 25 bp, Homo sapien
agacctccctccctttggcctggag

SEQ ID NO: 1624411 - DNA, 25 bp, Homo sapien
ctttggcctggaggacccctctctc

SEQ ID NO: 1624412 - DNA, 25 bp, Homo sapien
cggagacctccctccctttggcctg

SEQ ID NO: 1624413 - DNA, 25 bp, Homo sapien
ctgcctccaggaccgcggggacctc

SEQ ID NO: 1624414 - DNA, 25 bp, Homo sapien
tggtaatgcacgctcccaggctcag

SEQ ID NO: 1624415 - DNA, 25 bp, Homo sapien
gccaccgtgtctccatgttcctggt

SEQ ID NO: 1624416 - DNA, 25 bp, Homo sapien
gctcagagtctggaactgctgatgg

SEQ ID NO: 1624417 - DNA, 25 bp, Homo sapien
ggctcagagtctggaactgctgatg

SEQ ID NO: 1624418 - DNA, 25 bp, Homo sapien
tctggtctaaatccccgccgtagga

SEQ ID NO: 1624419 - DNA, 25 bp, Homo sapien
cagaggcccttgctttagcggcggc

SEQ ID NO: 1624420 - DNA, 25 bp, Homo sapien
ccctgcgtgtgccagaggcttgcag

SEQ ID NO: 1624421 - DNA, 25 bp, Homo sapien
ggcggccctgcgtgtgccagaggct

SEQ ID NO: 1624422 - DNA, 25 bp, Homo sapien
tggtgccacagactttgactgttgg

SEQ ID NO: 1624423 - DNA, 25 bp, Homo sapien
aatgtagcggcgtggctcaccaggt

SEQ ID NO: 1624424 - DNA, 25 bp, Homo sapien
ctgttgggtctacagtggccagtga

SEQ ID NO: 1624425 - DNA, 25 bp, Homo sapien
cccaaagtctctataacacaaggtg

SEQ ID NO: 1624426 - DNA, 25 bp, Homo sapien
atagctgaatcagcggaggccagga

SEQ ID NO: 1624427 - DNA, 25 bp, Homo sapien
aggccaggaggatgcgaggcggtgc

SEQ ID NO: 1624428 - DNA, 25 bp, Homo sapien
actgccatagctgaatcagcggagg

SEQ ID NO: 1624429 - DNA, 25 bp, Homo sapien
gcggtgcccgtgattgtctgatcat

SEQ ID NO: 1624430 - DNA, 25 bp, Homo sapien
ccctcttggaccgctgagactcagg

SEQ ID NO: 1624431 - DNA, 25 bp, Homo sapien
ctccctcttggaccgctgagactca

SEQ ID NO: 1624432 - DNA, 25 bp, Homo sapien
tccctcttggaccgctgagactcag

SEQ ID NO: 1624433 - DNA, 25 bp, Homo sapien
gccagtacttccgttagctaagaag

SEQ ID NO: 1624434 - DNA, 25 bp, Homo sapien
ccaggaagccagtacttccgttagc

SEQ ID NO: 1624435 - DNA, 25 bp, Homo sapien
gcttgggccatattcccagggccag

SEQ ID NO: 1624436 - DNA, 25 bp, Homo sapien
cgttagctaagaagtcaccaggcac

SEQ ID NO: 1624437 - DNA, 25 bp, Homo sapien
cacaaggtgctcctttctcgcaggg

SEQ ID NO: 1624438 - DNA, 25 bp, Homo sapien
ttcctgatcctttgctcctcggtca

SEQ ID NO: 1624439 - DNA, 25 bp, Homo sapien
gtgtcatcagtttcctaatatttcc

SEQ ID NO: 1624440 - DNA, 25 bp, Homo sapien
tcagtttcctaatatttcccagttc

SEQ ID NO: 1624441 - DNA, 25 bp, Homo sapien
cggtgtgtgtctttataatctctgc

SEQ ID NO: 1624442 - DNA, 25 bp, Homo sapien
taatctctgctggacagccctgcag

SEQ ID NO: 1624443 - DNA, 25 bp, Homo sapien
agccctgcagcgcactgcccgccat

SEQ ID NO: 1624444 - DNA, 25 bp, Homo sapien
tgtgtgtctttataatctctgctgg

SEQ ID NO: 1624445 - DNA, 25 bp, Homo sapien
gggacaccccttggccataattcag

SEQ ID NO: 1624446 - DNA, 25 bp, Homo sapien
ccagaggggatgactttccgggatc

SEQ ID NO: 1624447 - DNA, 25 bp, Homo sapien
tccgggatccacacgggtgctgaag

SEQ ID NO: 1624448 - DNA, 25 bp, Homo sapien
cttggccataattcagctgcccaga

SEQ ID NO: 1624449 - DNA, 25 bp, Homo sapien
ggtgcacaattccaccacgagcagc

SEQ ID NO: 1624450 - DNA, 25 bp, Homo sapien
ttccttgggaagctgcgtctccagg

SEQ ID NO: 1624451 - DNA, 25 bp, Homo sapien
tgtttccggttgttcgtggtgcaca

SEQ ID NO: 1624452 - DNA, 25 bp, Homo sapien
cttccttgggaagctgcgtctccag

SEQ ID NO: 1624453 - DNA, 25 bp, Homo sapien
ccatgggacggatgagtgtcacagg

SEQ ID NO: 1624454 - DNA, 25 bp, Homo sapien
gacggatgagtgtcacagggcagct

SEQ ID NO: 1624455 - DNA, 25 bp, Homo sapien
gagggtggatatcacccccatcttc

SEQ ID NO: 1624456 - DNA, 25 bp, Homo sapien
gggagagggtggatatcacccccat

SEQ ID NO: 1624457 - DNA, 25 bp, Homo sapien
atggcctgaaagctgcgagaatggc

SEQ ID NO: 1624458 - DNA, 25 bp, Homo sapien
tgcccagttactcgggcctccactt

SEQ ID NO: 1624459 - DNA, 25 bp, Homo sapien
cactttgttggaagagggcttgtct

SEQ ID NO: 1624460 - DNA, 25 bp, Homo sapien
aagctgcgagaatggcttaacacac

SEQ ID NO: 1624461 - DNA, 25 bp, Homo sapien
gctgaggacctcttgcaatgctgcc

SEQ ID NO: 1624462 - DNA, 25 bp, Homo sapien
gaagcccgtggagacatctgctacg

SEQ ID NO: 1624463 - DNA, 25 bp, Homo sapien
caatgctgcccagactgcatggaga

SEQ ID NO: 1624464 - DNA, 25 bp, Homo sapien
tccctcccggaaatggatcggtgaa

SEQ ID NO: 1624465 - DNA, 25 bp, Homo sapien
taatagtaataacacctttgctgag

SEQ ID NO: 1624466 - DNA, 25 bp, Homo sapien
tgtcaagtattttatggtcaataat

SEQ ID NO: 1624467 - DNA, 25 bp, Homo sapien
tttgctgagcttggtgcctttttca

SEQ ID NO: 1624468 - DNA, 25 bp, Homo sapien
cctttttcaatgactctcagagcca

SEQ ID NO: 1624469 - DNA, 25 bp, Homo sapien
tgatattggtgggtctccagcccct

SEQ ID NO: 1624470 - DNA, 25 bp, Homo sapien
gtcttggcaggagggcgatccccct

SEQ ID NO: 1624471 - DNA, 25 bp, Homo sapien
aaacagcctagattgcacatgtgtg

SEQ ID NO: 1624472 - DNA, 25 bp, Homo sapien
acatgtgtgatattggtgggtctcc

SEQ ID NO: 1624473 - DNA, 25 bp, Homo sapien
ctacagcgagggcatcacgaatgtc

SEQ ID NO: 1624474 - DNA, 25 bp, Homo sapien
gagggcatcacgaatgtccatgtga

SEQ ID NO: 1624475 - DNA, 25 bp, Homo sapien
gcatcacgaatgtccatgtgaccca

SEQ ID NO: 1624476 - DNA, 25 bp, Homo sapien
cagcgagggcatcacgaatgtccat

SEQ ID NO: 1624477 - DNA, 25 bp, Homo sapien
ggagcatgggttgggcccttgcctg

SEQ ID NO: 1624478 - DNA, 25 bp, Homo sapien
caggcagattgtcccgcccagggag

SEQ ID NO: 1624479 - DNA, 25 bp, Homo sapien
gacactctgtggttgacagcctggt

SEQ ID NO: 1624480 - DNA, 25 bp, Homo sapien
tacacagcagtgtgcgctggttctg

SEQ ID NO: 1624481 - DNA, 25 bp, Homo sapien
tggaatttccatgcagggggctcga

SEQ ID NO: 1624482 - DNA, 25 bp, Homo sapien
acctgcaactcaggcagttctggaa

SEQ ID NO: 1624483 - DNA, 25 bp, Homo sapien
cacctccacctgcaactcaggcagt

SEQ ID NO: 1624484 - DNA, 25 bp, Homo sapien
actcaggcagttctggaatttccat

SEQ ID NO: 1624485 - DNA, 25 bp, Homo sapien
cactgagtaaagttgccgaggcgag

SEQ ID NO: 1624486 - DNA, 25 bp, Homo sapien
tgtagaaattatcagcactgccacc

SEQ ID NO: 1624487 - DNA, 25 bp, Homo sapien
tcctggagaaagtctcggtgtgaca

SEQ ID NO: 1624488 - DNA, 25 bp, Homo sapien
tggcatccttggtggatccaacact

SEQ ID NO: 1624489 - DNA, 25 bp, Homo sapien
ccgcaggtaggtttcacctttgatg

SEQ ID NO: 1624490 - DNA, 25 bp, Homo sapien
gcaggtaggtttcacctttgatgag

SEQ ID NO: 1624491 - DNA, 25 bp, Homo sapien
cgcaggtaggtttcacctttgatga

SEQ ID NO: 1624492 - DNA, 25 bp, Homo sapien
tctggtgtctcttagatctccctgt

SEQ ID NO: 1624493 - DNA, 25 bp, Homo sapien
caacaccgtaaggtccaaccttcag

SEQ ID NO: 1624494 - DNA, 25 bp, Homo sapien
ctaaggcccctagtttccctctctg

SEQ ID NO: 1624495 - DNA, 25 bp, Homo sapien
taaggtccaaccttcaggaccctga

SEQ ID NO: 1624496 - DNA, 25 bp, Homo sapien
aatgcacaggggctcttaggggccc

SEQ ID NO: 1624497 - DNA, 25 bp, Homo sapien
aaaggcggtgtcagggcggtgaggg

SEQ ID NO: 1624498 - DNA, 25 bp, Homo sapien
cctggcaatgcacaggggctcttag

SEQ ID NO: 1624499 - DNA, 25 bp, Homo sapien
cgcaaaaggcggtgtcagggcggtg

SEQ ID NO: 1624500 - DNA, 25 bp, Homo sapien
taaactgttttccacgtgctttctg

SEQ ID NO: 1624501 - DNA, 25 bp, Homo sapien
ctgatagttctaacagtagctaaac

SEQ ID NO: 1624502 - DNA, 25 bp, Homo sapien
ctgcatgcggatgatcctgatagtt

SEQ ID NO: 1624503 - DNA, 25 bp, Homo sapien
ttttccacgtgctttctgaacattg

SEQ ID NO: 1624504 - DNA, 25 bp, Homo sapien
ccccgcgcagcccgctgctctgagc

SEQ ID NO: 1624505 - DNA, 25 bp, Homo sapien
tctgagctccgtattccccgccggc

SEQ ID NO: 1624506 - DNA, 25 bp, Homo sapien
tgagctccgtattccccgccggccg

SEQ ID NO: 1624507 - DNA, 25 bp, Homo sapien
gcgcagcccgctgctctgagctccg

SEQ ID NO: 1624508 - DNA, 25 bp, Homo sapien
cagccgtatttgcacactgtcacag

SEQ ID NO: 1624509 - DNA, 25 bp, Homo sapien
cgatttggcggcagccgtatttgca

SEQ ID NO: 1624510 - DNA, 25 bp, Homo sapien
ctgcgggcacgaggctgcgatttgg

SEQ ID NO: 1624511 - DNA, 25 bp, Homo sapien
actgtcacagaattaacctcagagc

SEQ ID NO: 1624512 - DNA, 25 bp, Homo sapien
tgcagatcgccctgatcgtcaagag

SEQ ID NO: 1624513 - DNA, 25 bp, Homo sapien
aggcatgacccctgcagaacgggct

SEQ ID NO: 1624514 - DNA, 25 bp, Homo sapien
acccctgcagaacgggctgtaggct

SEQ ID NO: 1624515 - DNA, 25 bp, Homo sapien
tcgtcaagagcaaggcatgacccct

SEQ ID NO: 1624516 - DNA, 25 bp, Homo sapien
ctggtgtacagatggctcggccact

SEQ ID NO: 1624517 - DNA, 25 bp, Homo sapien
gtgtacagatggctcggccactctg

SEQ ID NO: 1624518 - DNA, 25 bp, Homo sapien
aagaggttagttaattctctgccag

SEQ ID NO: 1624519 - DNA, 25 bp, Homo sapien
tttccctctaagctccaagaggtta

SEQ ID NO: 1624520 - DNA, 25 bp, Homo sapien
cctgccttataggcaaggcctgttt

SEQ ID NO: 1624521 - DNA, 25 bp, Homo sapien
tcctgccttataggcaaggcctgtt

SEQ ID NO: 1624522 - DNA, 25 bp, Homo sapien
ctgccttataggcaaggcctgtttc

SEQ ID NO: 1624523 - DNA, 25 bp, Homo sapien
atgccaagcactgtcccggagaccc

SEQ ID NO: 1624524 - DNA, 25 bp, Homo sapien
actgtcccggagacccaggcttggt

SEQ ID NO: 1624525 - DNA, 25 bp, Homo sapien
aagcactgtcccggagacccaggct

SEQ ID NO: 1624526 - DNA, 25 bp, Homo sapien
gtcccggagacccaggcttggtgca

SEQ ID NO: 1624527 - DNA, 25 bp, Homo sapien
ttttcctcttgatatatcctcccca

SEQ ID NO: 1624528 - DNA, 25 bp, Homo sapien
cacgcactctacaccgttgttgtgt

SEQ ID NO: 1624529 - DNA, 25 bp, Homo sapien
gtgagtaccattcacctctcccaag

SEQ ID NO: 1624530 - DNA, 25 bp, Homo sapien
aagaggcgaggtgagtaccattcac

SEQ ID NO: 1624531 - DNA, 25 bp, Homo sapien
gtgcttggaattcaagatgcccaat

SEQ ID NO: 1624532 - DNA, 25 bp, Homo sapien
aataaaggatccatccacagcggct

SEQ ID NO: 1624533 - DNA, 25 bp, Homo sapien
caataaaggatccatccacagcggc

SEQ ID NO: 1624534 - DNA, 25 bp, Homo sapien
tggtgcttggaattcaagatgccca

SEQ ID NO: 1624535 - DNA, 25 bp, Homo sapien
ggccttctgagagatcaggtagaat

SEQ ID NO: 1624536 - DNA, 25 bp, Homo sapien
agttgcccttaggataactccccag

SEQ ID NO: 1624537 - DNA, 25 bp, Homo sapien
caaattgtcccattgaggaatgagg

SEQ ID NO: 1624538 - DNA, 25 bp, Homo sapien
cctttcttggtggagagttgccctt

SEQ ID NO: 1624539 - DNA, 25 bp, Homo sapien
ttttttaaaggacatatcatattta

SEQ ID NO: 1624540 - DNA, 25 bp, Homo sapien
atgccgccattgtcatcctggcccg

SEQ ID NO: 1624541 - DNA, 25 bp, Homo sapien
cacaatgccgccattgtcatcctgg

SEQ ID NO: 1624542 - DNA, 25 bp, Homo sapien
caatgccgccattgtcatcctggcc

SEQ ID NO: 1624543 - DNA, 25 bp, Homo sapien
tccacaatgccgccattgtcatcct

SEQ ID NO: 1624544 - DNA, 25 bp, Homo sapien
ggggtggctgccgggcggagacgct

SEQ ID NO: 1624545 - DNA, 25 bp, Homo sapien
gtggctgccgggcggagacgctcct

SEQ ID NO: 1624546 - DNA, 25 bp, Homo sapien
tcccagatggggtggctgccgggcg

SEQ ID NO: 1624547 - DNA, 25 bp, Homo sapien
gggtggctgccgggcggagacgctc

SEQ ID NO: 1624548 - DNA, 25 bp, Homo sapien
ttctcagacggggtggttgccaggc

SEQ ID NO: 1624549 - DNA, 25 bp, Homo sapien
tcagacggggtggttgccaggcaga

SEQ ID NO: 1624550 - DNA, 25 bp, Homo sapien
acttctcagacggggtggttgccag

SEQ ID NO: 1624551 - DNA, 25 bp, Homo sapien
tctcagacggggtggttgccaggca

SEQ ID NO: 1624552 - DNA, 25 bp, Homo sapien
tctgcctggcttcatagtattttga

SEQ ID NO: 1624553 - DNA, 25 bp, Homo sapien
gaccagtttgcctacttctgcaaaa

SEQ ID NO: 1624554 - DNA, 25 bp, Homo sapien
tgccattgggattggataggaattg

SEQ ID NO: 1624555 - DNA, 25 bp, Homo sapien
caaaataccatgacaggtggcttaa

SEQ ID NO: 1624556 - DNA, 25 bp, Homo sapien
ttaagaaggtccaaatcaataggtc

SEQ ID NO: 1624557 - DNA, 25 bp, Homo sapien
tgcatcattgaaatatcacaagtat

SEQ ID NO: 1624558 - DNA, 25 bp, Homo sapien
gaaatatcacaagtatgtcttagga

SEQ ID NO: 1624559 - DNA, 25 bp, Homo sapien
ttgaaatatcacaagtatgtcttag

SEQ ID NO: 1624560 - DNA, 25 bp, Homo sapien
cttctttctgtagctggataactct

SEQ ID NO: 1624561 - DNA, 25 bp, Homo sapien
agctggataactcttagatctgatt

SEQ ID NO: 1624562 - DNA, 25 bp, Homo sapien
tcttctttctgtagctggataactc

SEQ ID NO: 1624563 - DNA, 25 bp, Homo sapien
tggataactcttagatctgattcat

SEQ ID NO: 1624564 - DNA, 25 bp, Homo sapien
atttcggatttcaacaagagaccca

SEQ ID NO: 1624565 - DNA, 25 bp, Homo sapien
tcacccaagaaatttcggatttcaa

SEQ ID NO: 1624566 - DNA, 25 bp, Homo sapien
ccaagaaatttcggatttcaacaag

SEQ ID NO: 1624567 - DNA, 25 bp, Homo sapien
agaaatttcggatttcaacaagaga

SEQ ID NO: 1624568 - DNA, 25 bp, Homo sapien
gataacgacgttgatgggggaagtg

SEQ ID NO: 1624569 - DNA, 25 bp, Homo sapien
tgatgggggaagtgagcatacacag

SEQ ID NO: 1624570 - DNA, 25 bp, Homo sapien
atgggggaagtgagcatacacagac

SEQ ID NO: 1624571 - DNA, 25 bp, Homo sapien
ctggataacgacgttgatgggggaa

SEQ ID NO: 1624572 - DNA, 25 bp, Homo sapien
cccagtgtaacacccttgatcatgt

SEQ ID NO: 1624573 - DNA, 25 bp, Homo sapien
ctcatcttgtaatggaagcccagtg

SEQ ID NO: 1624574 - DNA, 25 bp, Homo sapien
atcttgtaatggaagcccagtgtaa

SEQ ID NO: 1624575 - DNA, 25 bp, Homo sapien
taacacccttgatcatgttctgtac

SEQ ID NO: 1624576 - DNA, 25 bp, Homo sapien
acaaatagtccgaacggtagccagt

SEQ ID NO: 1624577 - DNA, 25 bp, Homo sapien
gactacaaatagtccgaacggtagc

SEQ ID NO: 1624578 - DNA, 25 bp, Homo sapien
ttctgttacccgaccatttgtcaac

SEQ ID NO: 1624579 - DNA, 25 bp, Homo sapien
tctttccaaggagtctgagttctac

SEQ ID NO: 1624580 - DNA, 25 bp, Homo sapien
tatgataactgtgcgtcccttcaga

SEQ ID NO: 1624581 - DNA, 25 bp, Homo sapien
ctggggccctttatgataactgtgc

SEQ ID NO: 1624582 - DNA, 25 bp, Homo sapien
gccctttatgataactgtgcgtccc

SEQ ID NO: 1624583 - DNA, 25 bp, Homo sapien
gtcccttcagagtaacgttgacatt

SEQ ID NO: 1624584 - DNA, 25 bp, Homo sapien
cagtaaacgcagcaaaaaaaagtgg

SEQ ID NO: 1624585 - DNA, 25 bp, Homo sapien
tctcacagtaaacgcagcaaaaaaa

SEQ ID NO: 1624586 - DNA, 25 bp, Homo sapien
tcacagtaaacgcagcaaaaaaaag

SEQ ID NO: 1624587 - DNA, 25 bp, Homo sapien
cagcaaaaaaaagtggcccagagta

SEQ ID NO: 1624588 - DNA, 25 bp, Homo sapien
ttgtggttgtgttaatggtcttcat

SEQ ID NO: 1624589 - DNA, 25 bp, Homo sapien
ctaggctggtgtatttagtccttga

SEQ ID NO: 1624590 - DNA, 25 bp, Homo sapien
tgtatttagtccttgagcatttgca

SEQ ID NO: 1624591 - DNA, 25 bp, Homo sapien
tggtgtatttagtccttgagcattt

SEQ ID NO: 1624592 - DNA, 25 bp, Homo sapien
taggctggtgtatttagtccttgag

SEQ ID NO: 1624593 - DNA, 25 bp, Homo sapien
atcttgatagaggagatctggcttc

SEQ ID NO: 1624594 - DNA, 25 bp, Homo sapien
ctcatcttgatagaggagatctggc

SEQ ID NO: 1624595 - DNA, 25 bp, Homo sapien
tcatcttgatagaggagatctggct

SEQ ID NO: 1624596 - DNA, 25 bp, Homo sapien
catcttgatagaggagatctggctt

SEQ ID NO: 1624597 - DNA, 25 bp, Homo sapien
tctgtgcatttacagccatagactt

SEQ ID NO: 1624598 - DNA, 25 bp, Homo sapien
gcatttacagccatagacttatgca

SEQ ID NO: 1624599 - DNA, 25 bp, Homo sapien
gtatcttactcattattccagggat

SEQ ID NO: 1624600 - DNA, 25 bp, Homo sapien
tggaggcatcgctgttatcagtatc

SEQ ID NO: 1624601 - DNA, 25 bp, Homo sapien
cacgcccggccctatgttgtatttt

SEQ ID NO: 1624602 - DNA, 25 bp, Homo sapien
accacgcccggccctatgttgtatt

SEQ ID NO: 1624603 - DNA, 25 bp, Homo sapien
tatggtaagtactttggaagatatc

SEQ ID NO: 1624604 - DNA, 25 bp, Homo sapien
gctgcttttaccagttgaactccaa

SEQ ID NO: 1624605 - DNA, 25 bp, Homo sapien
tttaggaaagtaagctttaagctgc

SEQ ID NO: 1624606 - DNA, 25 bp, Homo sapien
ggctctatgctcatcgtgataaagt

SEQ ID NO: 1624607 - DNA, 25 bp, Homo sapien
gctgccagattgcaacagaaagact

SEQ ID NO: 1624608 - DNA, 25 bp, Homo sapien
gcactacccactattccagaacgaa

SEQ ID NO: 1624609 - DNA, 25 bp, Homo sapien
aaagaattgccaaatgagtgaatgg

SEQ ID NO: 1624610 - DNA, 25 bp, Homo sapien
tagtagtgttgtctagccaaaaatc

SEQ ID NO: 1624611 - DNA, 25 bp, Homo sapien
ttgcggctagttggctattcaagaa

SEQ ID NO: 1624612 - DNA, 25 bp, Homo sapien
acttctcttgtaggttttgcggcta

SEQ ID NO: 1624613 - DNA, 25 bp, Homo sapien
tattcaagaaacctcgcccctctga

SEQ ID NO: 1624614 - DNA, 25 bp, Homo sapien
aatacaggcagttttgtgccagctg

SEQ ID NO: 1624615 - DNA, 25 bp, Homo sapien
gcgagcttgcatccccactagttaa

SEQ ID NO: 1624616 - DNA, 25 bp, Homo sapien
tagaagctattcgtaactagagcag

SEQ ID NO: 1624617 - DNA, 25 bp, Homo sapien
ggtaaatctttcagtccatgcccca

SEQ ID NO: 1624618 - DNA, 25 bp, Homo sapien
ttaatggataattcaaaccgaggac

SEQ ID NO: 1624619 - DNA, 25 bp, Homo sapien
tctcagcaggatgtaagttgtcttc

SEQ ID NO: 1624620 - DNA, 25 bp, Homo sapien
gaccgatgagttccttgtctgtgaa

SEQ ID NO: 1624621 - DNA, 25 bp, Homo sapien
tcttggacttctggagctgcttata

SEQ ID NO: 1624622 - DNA, 25 bp, Homo sapien
tttatcaccgcaagttctcagcagg

SEQ ID NO: 1624623 - DNA, 25 bp, Homo sapien
tgtgtattcaagggtgtggtgggga

SEQ ID NO: 1624624 - DNA, 25 bp, Homo sapien
ctgtgtattcaagggtgtggtgggg

SEQ ID NO: 1624625 - DNA, 25 bp, Homo sapien
gtgtattcaagggtgtggtggggaa

SEQ ID NO: 1624626 - DNA, 25 bp, Homo sapien
ctcgctgtgcacagctcattgggtc

SEQ ID NO: 1624627 - DNA, 25 bp, Homo sapien
aaggcccagcacactcgctgtgcac

SEQ ID NO: 1624628 - DNA, 25 bp, Homo sapien
agcacactcgctgtgcacagctcat

SEQ ID NO: 1624629 - DNA, 25 bp, Homo sapien
cctccctgtcctgcatggtgaggaa

SEQ ID NO: 1624630 - DNA, 25 bp, Homo sapien
ctgatttgtggtccccagaaaggag

SEQ ID NO: 1624631 - DNA, 25 bp, Homo sapien
ggagcctgcattaggccgataagtc

SEQ ID NO: 1624632 - DNA, 25 bp, Homo sapien
aaaggagcctgcattaggccgataa

SEQ ID NO: 1624633 - DNA, 25 bp, Homo sapien
gagcctgcattaggccgataagtca

SEQ ID NO: 1624634 - DNA, 25 bp, Homo sapien
atcaggactcagtaccggtggccag

SEQ ID NO: 1624635 - DNA, 25 bp, Homo sapien
caggcgtccaattgctgcggatgag

SEQ ID NO: 1624636 - DNA, 25 bp, Homo sapien
tctgccacacgttgctcacaaagtg

SEQ ID NO: 1624637 - DNA, 25 bp, Homo sapien
aagtgtaggcaaaaggcaggcgtcc

SEQ ID NO: 1624638 - DNA, 25 bp, Homo sapien
attccacgagggcgtctgtgtccac

SEQ ID NO: 1624639 - DNA, 25 bp, Homo sapien
agggcgtctgtgtccacagaagctc

SEQ ID NO: 1624640 - DNA, 25 bp, Homo sapien
ccacgagggcgtctgtgtccacaga

SEQ ID NO: 1624641 - DNA, 25 bp, Homo sapien
gagggcgtctgtgtccacagaagct

SEQ ID NO: 1624642 - DNA, 25 bp, Homo sapien
tccagtcatgtgcatgagatcagga

SEQ ID NO: 1624643 - DNA, 25 bp, Homo sapien
ttccagtcatgtgcatgagatcagg

SEQ ID NO: 1624644 - DNA, 25 bp, Homo sapien
ccagtcatgtgcatgagatcaggag

SEQ ID NO: 1624645 - DNA, 25 bp, Homo sapien
cttccagtcatgtgcatgagatcag

SEQ ID NO: 1624646 - DNA, 25 bp, Homo sapien
caccttcttggtcattgtcggcggc

SEQ ID NO: 1624647 - DNA, 25 bp, Homo sapien
aggagaggcgtcttccgcgtgcccc

SEQ ID NO: 1624648 - DNA, 25 bp, Homo sapien
tgccccgaggtccaccttcttggtc

SEQ ID NO: 1624649 - DNA, 25 bp, Homo sapien
gcggccctgttggtagcttctccat

SEQ ID NO: 1624650 - DNA, 25 bp, Homo sapien
gcacaagcggctgagtcccaagatg

SEQ ID NO: 1624651 - DNA, 25 bp, Homo sapien
cacgccgcacaagcggctgagtccc

SEQ ID NO: 1624652 - DNA, 25 bp, Homo sapien
ccgcacaagcggctgagtcccaaga

SEQ ID NO: 1624653 - DNA, 25 bp, Homo sapien
acaagcggctgagtcccaagatgac

SEQ ID NO: 1624654 - DNA, 25 bp, Homo sapien
tggcaagaggggtggtcgtggaaga

SEQ ID NO: 1624655 - DNA, 25 bp, Homo sapien
ttggcaagaggggtggtcgtggaag

SEQ ID NO: 1624656 - DNA, 25 bp, Homo sapien
cttggcaagaggggtggtcgtggaa

SEQ ID NO: 1624657 - DNA, 25 bp, Homo sapien
ggcaagaggggtggtcgtggaagac

SEQ ID NO: 1624658 - DNA, 25 bp, Homo sapien
tcgcacatctctgttacaccacggg

SEQ ID NO: 1624659 - DNA, 25 bp, Homo sapien
cctcgcacatctctgttacaccacg

SEQ ID NO: 1624660 - DNA, 25 bp, Homo sapien
ggcctcgcacatctctgttacacca

SEQ ID NO: 1624661 - DNA, 25 bp, Homo sapien
ctcggcctcgcacatctctgttaca

SEQ ID NO: 1624662 - DNA, 25 bp, Homo sapien
tcaatattgcagatagcagatgccc

SEQ ID NO: 1624663 - DNA, 25 bp, Homo sapien
cctttcgaatcagaacaagcatatc

SEQ ID NO: 1624664 - DNA, 25 bp, Homo sapien
gaacaagcatatcttctatagcaac

SEQ ID NO: 1624665 - DNA, 25 bp, Homo sapien
tagcagatgccctttcgaatcagaa

SEQ ID NO: 1624666 - DNA, 25 bp, Homo sapien
attctgcttgttttcctaaatttat

SEQ ID NO: 1624667 - DNA, 25 bp, Homo sapien
ctgcttgttttcctaaatttattat

SEQ ID NO: 1624668 - DNA, 25 bp, Homo sapien
tctgcttgttttcctaaatttatta

SEQ ID NO: 1624669 - DNA, 25 bp, Homo sapien
tcattctgcttgttttcctaaattt

SEQ ID NO: 1624670 - DNA, 25 bp, Homo sapien
ttttgcaggcccggatctgaggggc

SEQ ID NO: 1624671 - DNA, 25 bp, Homo sapien
cctttggcgggctatgtgctggcac

SEQ ID NO: 1624672 - DNA, 25 bp, Homo sapien
ggtctgcctgcctgtcgttaaactt

SEQ ID NO: 1624673 - DNA, 25 bp, Homo sapien
ccgttatctgggttgcattggcgaa

SEQ ID NO: 1624674 - DNA, 25 bp, Homo sapien
gaccatggcgaggtttgcgtttgcc

SEQ ID NO: 1624675 - DNA, 25 bp, Homo sapien
cggaggcccggttccctcgaggctg

SEQ ID NO: 1624676 - DNA, 25 bp, Homo sapien
gtctgtcccactcttgcagggtctc

SEQ ID NO: 1624677 - DNA, 25 bp, Homo sapien
gtgaagtgctgttgacggaggcccg

SEQ ID NO: 1624678 - DNA, 25 bp, Homo sapien
tccagcttccgactcctcctgttct

SEQ ID NO: 1624679 - DNA, 25 bp, Homo sapien
ctgttgcgaggcgtagagtgtttat

SEQ ID NO: 1624680 - DNA, 25 bp, Homo sapien
gggaaccgtactgccttggcagcat

SEQ ID NO: 1624681 - DNA, 25 bp, Homo sapien
agtgtttataagaggagcctggaga

SEQ ID NO: 1624682 - DNA, 25 bp, Homo sapien
gagtccgaggttggaagtgccaacc

SEQ ID NO: 1624683 - DNA, 25 bp, Homo sapien
ggaacgagagatgctttcgtctgtt

SEQ ID NO: 1624684 - DNA, 25 bp, Homo sapien
gttttgagcagacccaacacaactc

SEQ ID NO: 1624685 - DNA, 25 bp, Homo sapien
gggaacaggaacgagagatgctttc

SEQ ID NO: 1624686 - DNA, 25 bp, Homo sapien
gatgctttcgtctgttttgagcaga

SEQ ID NO: 1624687 - DNA, 25 bp, Homo sapien
ggccttgcgtccttgatccttcaga

SEQ ID NO: 1624688 - DNA, 25 bp, Homo sapien
tgatggaccacctgatatgggcgtc

SEQ ID NO: 1624689 - DNA, 25 bp, Homo sapien
gatatgggcgtctttgtgtttccaa

SEQ ID NO: 1624690 - DNA, 25 bp, Homo sapien
agcaaggagatgatcatgtctcccc

SEQ ID NO: 1624691 - DNA, 25 bp, Homo sapien
gaggaagtttgcttggcccactgag

SEQ ID NO: 1624692 - DNA, 25 bp, Homo sapien
cactggtctgctttgggttgacccc

SEQ ID NO: 1624693 - DNA, 25 bp, Homo sapien
ggaagtttgcttggcccactgagag

SEQ ID NO: 1624694 - DNA, 25 bp, Homo sapien
ggagaggaagtttgcttggcccact

SEQ ID NO: 1624695 - DNA, 25 bp, Homo sapien
gcagttccaccgctaccaaggtgat

SEQ ID NO: 1624696 - DNA, 25 bp, Homo sapien
gggccacactttgggcaatgtctgg

SEQ ID NO: 1624697 - DNA, 25 bp, Homo sapien
ggctctaagctcagaaagtaggatc

SEQ ID NO: 1624698 - DNA, 25 bp, Homo sapien
gctaccaaggtgatcaattcttctg

SEQ ID NO: 1624699 - DNA, 25 bp, Homo sapien
ctgctgtcccgtgacctctgctgcc

SEQ ID NO: 1624700 - DNA, 25 bp, Homo sapien
cagcggagggtcttgtgcttttgca

SEQ ID NO: 1624701 - DNA, 25 bp, Homo sapien
gcagcagttccgccaacagcggagg

SEQ ID NO: 1624702 - DNA, 25 bp, Homo sapien
cgggctatgggtcaggacaggcagc

SEQ ID NO: 1624703 - DNA, 25 bp, Homo sapien
ggtggcctctccttattgtgttttc

SEQ ID NO: 1624704 - DNA, 25 bp, Homo sapien
tgaggattctgctacctggtggcct

SEQ ID NO: 1624705 - DNA, 25 bp, Homo sapien
ctggtggcctctccttattgtgttt

SEQ ID NO: 1624706 - DNA, 25 bp, Homo sapien
gattctgctacctggtggcctctcc

SEQ ID NO: 1624707 - DNA, 25 bp, Homo sapien
acaggggacagctgaatttttccaa

SEQ ID NO: 1624708 - DNA, 25 bp, Homo sapien
acaggaattaaatcaataaccagca

SEQ ID NO: 1624709 - DNA, 25 bp, Homo sapien
gggctagtgggtgcatagggtaggg

SEQ ID NO: 1624710 - DNA, 25 bp, Homo sapien
agtgaagtaaacaggaattaaatca

SEQ ID NO: 1624711 - DNA, 25 bp, Homo sapien
tcttctgccctccggacatgtggct

SEQ ID NO: 1624712 - DNA, 25 bp, Homo sapien
tcagagtgtgccgacgcatcctggg

SEQ ID NO: 1624713 - DNA, 25 bp, Homo sapien
cagccactttccacccgctgatggc

SEQ ID NO: 1624714 - DNA, 25 bp, Homo sapien
acccgctgatggctcccctctgtgg

SEQ ID NO: 1624715 - DNA, 25 bp, Homo sapien
ttctcagggacagaggcatagaacc

SEQ ID NO: 1624716 - DNA, 25 bp, Homo sapien
tgaaggccaggaatttccaagatcc

SEQ ID NO: 1624717 - DNA, 25 bp, Homo sapien
gaaggccaggaatttccaagatcct

SEQ ID NO: 1624718 - DNA, 25 bp, Homo sapien
gggacagaggcatagaacctctgcc

SEQ ID NO: 1624719 - DNA, 25 bp, Homo sapien
ttgggaaagtgcaggtacatgccag

SEQ ID NO: 1624720 - DNA, 25 bp, Homo sapien
tgggaaagtgcaggtacatgccagc

SEQ ID NO: 1624721 - DNA, 25 bp, Homo sapien
atgactggcccttctccttcacaga

SEQ ID NO: 1624722 - DNA, 25 bp, Homo sapien
tgccctggtgcctgcatgactggcc

SEQ ID NO: 1624723 - DNA, 25 bp, Homo sapien
ctggtgcctgcatgactggcccttc

SEQ ID NO: 1624724 - DNA, 25 bp, Homo sapien
ctgagtccatctgccctggtgcctg

SEQ ID NO: 1624725 - DNA, 25 bp, Homo sapien
cttgtgaagcatgttttagacgaac

SEQ ID NO: 1624726 - DNA, 25 bp, Homo sapien
cctgccatcccagaaagaaaatttg

SEQ ID NO: 1624727 - DNA, 25 bp, Homo sapien
ttttagacgaacagtcacggccacg

SEQ ID NO: 1624728 - DNA, 25 bp, Homo sapien
tgaaacacgattttctgatacctgt

SEQ ID NO: 1624729 - DNA, 25 bp, Homo sapien
atccccagtgcgggctggcggtagg

SEQ ID NO: 1624730 - DNA, 25 bp, Homo sapien
gcgggctggcggtaggagcactgta

SEQ ID NO: 1624731 - DNA, 25 bp, Homo sapien
tgcgggctggcggtaggagcactgt

SEQ ID NO: 1624732 - DNA, 25 bp, Homo sapien
ccagtgcgggctggcggtaggagca

SEQ ID NO: 1624733 - DNA, 25 bp, Homo sapien
catttgcatgggacacgttcttcca

SEQ ID NO: 1624734 - DNA, 25 bp, Homo sapien
tgtacaagaaacctaacagagcacc

SEQ ID NO: 1624735 - DNA, 25 bp, Homo sapien
gttatgaaccgccagggagcggcca

SEQ ID NO: 1624736 - DNA, 25 bp, Homo sapien
ggttaatgccataacacgctgacaa

SEQ ID NO: 1624737 - DNA, 25 bp, Homo sapien
agcagtttaacctctccactagcac

SEQ ID NO: 1624738 - DNA, 25 bp, Homo sapien
gatggaaactacagttctccagcag

SEQ ID NO: 1624739 - DNA, 25 bp, Homo sapien
gttctccagcagtttaacctctcca

SEQ ID NO: 1624740 - DNA, 25 bp, Homo sapien
gctgggatggaaactacagttctcc

SEQ ID NO: 1624741 - DNA, 25 bp, Homo sapien
acaatgtgtcaaacttgcgggcgcc

SEQ ID NO: 1624742 - DNA, 25 bp, Homo sapien
ttttgtgattgcatcggcctcctgt

SEQ ID NO: 1624743 - DNA, 25 bp, Homo sapien
gagagccgctgagatctgccatttt

SEQ ID NO: 1624744 - DNA, 25 bp, Homo sapien
tgtgtcaaacttgcgggcgccgaga

SEQ ID NO: 1624745 - DNA, 25 bp, Homo sapien
acatgtccaccgttcccgagttagg

SEQ ID NO: 1624746 - DNA, 25 bp, Homo sapien
tcacttctgtattgtgagtggttcc

SEQ ID NO: 1624747 - DNA, 25 bp, Homo sapien
agtgaactccggcagggctttcttt

SEQ ID NO: 1624748 - DNA, 25 bp, Homo sapien
cctactgtgtgcctgttggagaaca

SEQ ID NO: 1624749 - DNA, 25 bp, Homo sapien
gagggtcgccaggaaagtggacatt

SEQ ID NO: 1624750 - DNA, 25 bp, Homo sapien
ggagggtcgccaggaaagtggacat

SEQ ID NO: 1624751 - DNA, 25 bp, Homo sapien
gggtcgccaggaaagtggacattac

SEQ ID NO: 1624752 - DNA, 25 bp, Homo sapien
agggtcgccaggaaagtggacatta

SEQ ID NO: 1624753 - DNA, 25 bp, Homo sapien
cgctttaattaacttcgagatgctc

SEQ ID NO: 1624754 - DNA, 25 bp, Homo sapien
ttaacttcgagatgctccggcggcg

SEQ ID NO: 1624755 - DNA, 25 bp, Homo sapien
taattaacttcgagatgctccggcg

SEQ ID NO: 1624756 - DNA, 25 bp, Homo sapien
gggacctggcgtagccgtgacgcgc

SEQ ID NO: 1624757 - DNA, 25 bp, Homo sapien
agtagcggcgtcagatccatcccgc

SEQ ID NO: 1624758 - DNA, 25 bp, Homo sapien
gggctgctccgagaactcgtacagt

SEQ ID NO: 1624759 - DNA, 25 bp, Homo sapien
caagtgccaagtaagtgccctgcgg

SEQ ID NO: 1624760 - DNA, 25 bp, Homo sapien
acccaagtgaaaaccgcgacgatct

SEQ ID NO: 1624761 - DNA, 25 bp, Homo sapien
ggcgggcagtcggtcccagtggccg

SEQ ID NO: 1624762 - DNA, 25 bp, Homo sapien
ctgtggcgagactcgggaggcgatc

SEQ ID NO: 1624763 - DNA, 25 bp, Homo sapien
gcgcgcggtcgcagttgggcatctt

SEQ ID NO: 1624764 - DNA, 25 bp, Homo sapien
gcgagactcgggaggcgatcttggg

SEQ ID NO: 1624765 - DNA, 25 bp, Homo sapien
cgcgccgtaaatgcaagcctgtagc

SEQ ID NO: 1624766 - DNA, 25 bp, Homo sapien
ccgtaaatgcaagcctgtagccaaa

SEQ ID NO: 1624767 - DNA, 25 bp, Homo sapien
gcgccgcgccgtaaatgcaagcctg

SEQ ID NO: 1624768 - DNA, 25 bp, Homo sapien
tgctggtcgcgccgcgccgtaaatg

SEQ ID NO: 1624769 - DNA, 25 bp, Homo sapien
actcttcaggctgccgtgatggtcc

SEQ ID NO: 1624770 - DNA, 25 bp, Homo sapien
tcaggctgccgtgatggtccccttg

SEQ ID NO: 1624771 - DNA, 25 bp, Homo sapien
ttcaggctgccgtgatggtcccctt

SEQ ID NO: 1624772 - DNA, 25 bp, Homo sapien
tcttcaggctgccgtgatggtcccc

SEQ ID NO: 1624773 - DNA, 25 bp, Homo sapien
tgaggacttgcatgtagctgggaac

SEQ ID NO: 1624774 - DNA, 25 bp, Homo sapien
cagagagcgtctcacggatagaaca

SEQ ID NO: 1624775 - DNA, 25 bp, Homo sapien
aaggatttaatctgcgcagccgaaa

SEQ ID NO: 1624776 - DNA, 25 bp, Homo sapien
taaatctgcaccgagcagagagcgt

SEQ ID NO: 1624777 - DNA, 25 bp, Homo sapien
ccaataactattggctgattgattt

SEQ ID NO: 1624778 - DNA, 25 bp, Homo sapien
cctgggaatccaataactattggct

SEQ ID NO: 1624779 - DNA, 25 bp, Homo sapien
gtctttggggtgatgtacctgggaa

SEQ ID NO: 1624780 - DNA, 25 bp, Homo sapien
tattggctgattgatttcctatgta

SEQ ID NO: 1624781 - DNA, 25 bp, Homo sapien
aacactttgaccagcgtctggccag

SEQ ID NO: 1624782 - DNA, 25 bp, Homo sapien
ttccctgtgtttggacaaaggcttc

SEQ ID NO: 1624783 - DNA, 25 bp, Homo sapien
gaagcttttagcaccctctggatgc

SEQ ID NO: 1624784 - DNA, 25 bp, Homo sapien
gctgtctttgctccttgcccctgaa

SEQ ID NO: 1624785 - DNA, 25 bp, Homo sapien
ctgaggttggccacgcagtccctgc

SEQ ID NO: 1624786 - DNA, 25 bp, Homo sapien
tctgaggttggccacgcagtccctg

SEQ ID NO: 1624787 - DNA, 25 bp, Homo sapien
tggtctgaggttggccacgcagtcc

SEQ ID NO: 1624788 - DNA, 25 bp, Homo sapien
gtctgaggttggccacgcagtccct

SEQ ID NO: 1624789 - DNA, 25 bp, Homo sapien
cgttgggcacggagcgttggagtca

SEQ ID NO: 1624790 - DNA, 25 bp, Homo sapien
ggagccctgattaacacagataaag

SEQ ID NO: 1624791 - DNA, 25 bp, Homo sapien
caggttctttgtcgctgctgagagc

SEQ ID NO: 1624792 - DNA, 25 bp, Homo sapien
taaagttgttagtcgctctgtgttc

SEQ ID NO: 1624793 - DNA, 25 bp, Homo sapien
acgagagaagatgctgccccggccc

SEQ ID NO: 1624794 - DNA, 25 bp, Homo sapien
agacgagagaagatgctgccccggc

SEQ ID NO: 1624795 - DNA, 25 bp, Homo sapien
tggagacgagagaagatgctgcccc

SEQ ID NO: 1624796 - DNA, 25 bp, Homo sapien
cgtcgtggagacgagagaagatgct

SEQ ID NO: 1624797 - DNA, 25 bp, Homo sapien
ctgattggtgagccgctcatctgac

SEQ ID NO: 1624798 - DNA, 25 bp, Homo sapien
tgagtgaggtggagtaaccccactg

SEQ ID NO: 1624799 - DNA, 25 bp, Homo sapien
tgatgagtgaggtggagtaacccca

SEQ ID NO: 1624800 - DNA, 25 bp, Homo sapien
ttggtgagccgctcatctgactgat

SEQ ID NO: 1624801 - DNA, 25 bp, Homo sapien
cttctaaagcaaggagtccaaatcc

SEQ ID NO: 1624802 - DNA, 25 bp, Homo sapien
gggatgtgcattctttgaagattac

SEQ ID NO: 1624803 - DNA, 25 bp, Homo sapien
tctccaggcagtcacaagcagctcg

SEQ ID NO: 1624804 - DNA, 25 bp, Homo sapien
cagctcggagccttgttgtgtgact

SEQ ID NO: 1624805 - DNA, 25 bp, Homo sapien
ccagaaatgcaggatacgattacag

SEQ ID NO: 1624806 - DNA, 25 bp, Homo sapien
ttcaaactaataatgccaggatggg

SEQ ID NO: 1624807 - DNA, 25 bp, Homo sapien
cccgtcatgggagaatatgtgcgct

SEQ ID NO: 1624808 - DNA, 25 bp, Homo sapien
aactgtcgggtcaggctgtgaacca

SEQ ID NO: 1624809 - DNA, 25 bp, Homo sapien
aggtacttgagttgcatctgtttgc

SEQ ID NO: 1624810 - DNA, 25 bp, Homo sapien
gcggaagactttaatgttgagcact

SEQ ID NO: 1624811 - DNA, 25 bp, Homo sapien
taatcctcagataacattggctgtc

SEQ ID NO: 1624812 - DNA, 25 bp, Homo sapien
ccttttgaaattggtcttggcagat

SEQ ID NO: 1624813 - DNA, 25 bp, Homo sapien
atgctgctcctgggcggacccattg

SEQ ID NO: 1624814 - DNA, 25 bp, Homo sapien
ggaggagctgctcactctaagagtc

SEQ ID NO: 1624815 - DNA, 25 bp, Homo sapien
ctcctgggcggacccattgcaactg

SEQ ID NO: 1624816 - DNA, 25 bp, Homo sapien
gagctgctcactctaagagtctgca

SEQ ID NO: 1624817 - DNA, 25 bp, Homo sapien
catcctgcagggcattaggtgtttc

SEQ ID NO: 1624818 - DNA, 25 bp, Homo sapien
ggcattaggtgtttccatgttcagg

SEQ ID NO: 1624819 - DNA, 25 bp, Homo sapien
cagggcattaggtgtttccatgttc

SEQ ID NO: 1624820 - DNA, 25 bp, Homo sapien
tcctgcagggcattaggtgtttcca

SEQ ID NO: 1624821 - DNA, 25 bp, Homo sapien
ctgctggtgggtgcacttctgcgtc

SEQ ID NO: 1624822 - DNA, 25 bp, Homo sapien
gctggtgggtgcacttctgcgtctc

SEQ ID NO: 1624823 - DNA, 25 bp, Homo sapien
tgctggtgggtgcacttctgcgtct

SEQ ID NO: 1624824 - DNA, 25 bp, Homo sapien
tctgggctgatgcacgggtcaaagc

SEQ ID NO: 1624825 - DNA, 25 bp, Homo sapien
atgcacgggtcaaagcatggggctt

SEQ ID NO: 1624826 - DNA, 25 bp, Homo sapien
agcatggggcttgtgctgactcaga

SEQ ID NO: 1624827 - DNA, 25 bp, Homo sapien
gctgatgcacgggtcaaagcatggg

SEQ ID NO: 1624828 - DNA, 25 bp, Homo sapien
cgcagcgtggacaggcatgagggag

SEQ ID NO: 1624829 - DNA, 25 bp, Homo sapien
aagttcagggtgatagagaactccg

SEQ ID NO: 1624830 - DNA, 25 bp, Homo sapien
cagggtgatagagaactccgcagcg

SEQ ID NO: 1624831 - DNA, 25 bp, Homo sapien
tgatagagaactccgcagcgtggac

SEQ ID NO: 1624832 - DNA, 25 bp, Homo sapien
agaacccactgggaccagattccct

SEQ ID NO: 1624833 - DNA, 25 bp, Homo sapien
aacccactgggaccagattccctgg

SEQ ID NO: 1624834 - DNA, 25 bp, Homo sapien
ctggcatctcccagggaccatcccc

SEQ ID NO: 1624835 - DNA, 25 bp, Homo sapien
agcagaacccactgggaccagattc

SEQ ID NO: 1624836 - DNA, 25 bp, Homo sapien
tccccaatctcgctggccttagggt

SEQ ID NO: 1624837 - DNA, 25 bp, Homo sapien
tctgtgcttctgcaagccggaactc

SEQ ID NO: 1624838 - DNA, 25 bp, Homo sapien
aagaacggattcatgtgtcttcccc

SEQ ID NO: 1624839 - DNA, 25 bp, Homo sapien
cttagggtctccaagaacggattca

SEQ ID NO: 1624840 - DNA, 25 bp, Homo sapien
gacaccgtaaacaggtgcacccatt

SEQ ID NO: 1624841 - DNA, 25 bp, Homo sapien
caatatattcgcgtcttttagagtg

SEQ ID NO: 1624842 - DNA, 25 bp, Homo sapien
ccattattcccaaagcttgtggcaa

SEQ ID NO: 1624843 - DNA, 25 bp, Homo sapien
caattagcaaacagaggtgacaccg

SEQ ID NO: 1624844 - DNA, 25 bp, Homo sapien
caggaagtggctgtaggcctgactg

SEQ ID NO: 1624845 - DNA, 25 bp, Homo sapien
cccaggaagtggctgtaggcctgac

SEQ ID NO: 1624846 - DNA, 25 bp, Homo sapien
ggaagtggctgtaggcctgactgac

SEQ ID NO: 1624847 - DNA, 25 bp, Homo sapien
ccaggaagtggctgtaggcctgact

SEQ ID NO: 1624848 - DNA, 25 bp, Homo sapien
tcctccagagacacaagtccgtgcg

SEQ ID NO: 1624849 - DNA, 25 bp, Homo sapien
tctcctccagagacacaagtccgtg

SEQ ID NO: 1624850 - DNA, 25 bp, Homo sapien
cagagacacaagtccgtgcgttttg

SEQ ID NO: 1624851 - DNA, 25 bp, Homo sapien
gacacaagtccgtgcgttttgtgaa

SEQ ID NO: 1624852 - DNA, 25 bp, Homo sapien
tgccaagctctgtgcgtgctcctga

SEQ ID NO: 1624853 - DNA, 25 bp, Homo sapien
cttttgctggggagtaggaacccag

SEQ ID NO: 1624854 - DNA, 25 bp, Homo sapien
tgcgtgctcctgaggatacggccat

SEQ ID NO: 1624855 - DNA, 25 bp, Homo sapien
ccaggtgcagaatggtgccaagctc

SEQ ID NO: 1624856 - DNA, 25 bp, Homo sapien
cactggctgtgtctgaccggcggac

SEQ ID NO: 1624857 - DNA, 25 bp, Homo sapien
ggctgtgtctgaccggcggacatca

SEQ ID NO: 1624858 - DNA, 25 bp, Homo sapien
tgaccggcggacatcaggcagactt

SEQ ID NO: 1624859 - DNA, 25 bp, Homo sapien
gcggacatcaggcagacttgactgc

SEQ ID NO: 1624860 - DNA, 25 bp, Homo sapien
ggaacaattaggcagctgaatggat

SEQ ID NO: 1624861 - DNA, 25 bp, Homo sapien
gtttgaataccatgtgttagctatg

SEQ ID NO: 1624862 - DNA, 25 bp, Homo sapien
taatgtgtgggttgtttgaatacca

SEQ ID NO: 1624863 - DNA, 25 bp, Homo sapien
gttagctatggaacaattaggcagc

SEQ ID NO: 1624864 - DNA, 25 bp, Homo sapien
gatatatgttgatcaaggacacaaa

SEQ ID NO: 1624865 - DNA, 25 bp, Homo sapien
cggatatatgttgatcaaggacaca

SEQ ID NO: 1624866 - DNA, 25 bp, Homo sapien
ctttcggatatatgttgatcaagga

SEQ ID NO: 1624867 - DNA, 25 bp, Homo sapien
gaactttcggatatatgttgatcaa

SEQ ID NO: 1624868 - DNA, 25 bp, Homo sapien
tacgtatatactctggtgtctaatg

SEQ ID NO: 1624869 - DNA, 25 bp, Homo sapien
tacttagcttggattgcaaaggaag

SEQ ID NO: 1624870 - DNA, 25 bp, Homo sapien
cagagctgatgagcccaatcaggga

SEQ ID NO: 1624871 - DNA, 25 bp, Homo sapien
gagagagcactaacgactccttggt

SEQ ID NO: 1624872 - DNA, 25 bp, Homo sapien
ttgaggaagacagaatgactctgct

SEQ ID NO: 1624873 - DNA, 25 bp, Homo sapien
cataagcccactaatctgttggaag

SEQ ID NO: 1624874 - DNA, 25 bp, Homo sapien
tggaagagcacagcctccaatgtag

SEQ ID NO: 1624875 - DNA, 25 bp, Homo sapien
tccaatgtagccacgaggcttgtgc

SEQ ID NO: 1624876 - DNA, 25 bp, Homo sapien
ggtcagacacccttgcataagccca

SEQ ID NO: 1624877 - DNA, 25 bp, Homo sapien
gcatgccgtaggaggtgagatcacc

SEQ ID NO: 1624878 - DNA, 25 bp, Homo sapien
tcatagatgaacatcccagctttcc

SEQ ID NO: 1624879 - DNA, 25 bp, Homo sapien
tgcatccatcatagatgaacatccc

SEQ ID NO: 1624880 - DNA, 25 bp, Homo sapien
tgtcctttatcacctctgagcatgc

SEQ ID NO: 1624881 - DNA, 25 bp, Homo sapien
catcccattcctttgtgaaggagca

SEQ ID NO: 1624882 - DNA, 25 bp, Homo sapien
tttggagaacgcattctgagatgga

SEQ ID NO: 1624883 - DNA, 25 bp, Homo sapien
ggagcattgttgacacatcactggg

SEQ ID NO: 1624884 - DNA, 25 bp, Homo sapien
cttggtgtttggagaacgcattctg

SEQ ID NO: 1624885 - DNA, 25 bp, Homo sapien
gctagtcagcgacaacatataatta

SEQ ID NO: 1624886 - DNA, 25 bp, Homo sapien
tgtgtaattgtaccatcgtaaccac

SEQ ID NO: 1624887 - DNA, 25 bp, Homo sapien
tttctgtccctgacaagatcactga

SEQ ID NO: 1624888 - DNA, 25 bp, Homo sapien
cacccttgtagtcattgaacttttc

SEQ ID NO: 1624889 - DNA, 25 bp, Homo sapien
tgtgatgttgtctttgggagaggaa

SEQ ID NO: 1624890 - DNA, 25 bp, Homo sapien
gatgttaggtgagctaagctttcct

SEQ ID NO: 1624891 - DNA, 25 bp, Homo sapien
gcaccatcacactactttgtttgta

SEQ ID NO: 1624892 - DNA, 25 bp, Homo sapien
cactgctaggcctctaggggacttc

SEQ ID NO: 1624893 - DNA, 25 bp, Homo sapien
ggtgcttgctaaatactggaagaag

SEQ ID NO: 1624894 - DNA, 25 bp, Homo sapien
agtaggtgcttgctaaatactggaa

SEQ ID NO: 1624895 - DNA, 25 bp, Homo sapien
gtgcttgctaaatactggaagaagg

SEQ ID NO: 1624896 - DNA, 25 bp, Homo sapien
taggtgcttgctaaatactggaaga

SEQ ID NO: 1624897 - DNA, 25 bp, Homo sapien
cctttggctgcttcaggagatgtca

SEQ ID NO: 1624898 - DNA, 25 bp, Homo sapien
ttggctgcttcaggagatgtcacca

SEQ ID NO: 1624899 - DNA, 25 bp, Homo sapien
cttggtcaaagttccagttggccaa

SEQ ID NO: 1624900 - DNA, 25 bp, Homo sapien
caaagttccagttggccaagacatc

SEQ ID NO: 1624901 - DNA, 25 bp, Homo sapien
ctttgtcaactgcagaagaacggtg

SEQ ID NO: 1624902 - DNA, 25 bp, Homo sapien
gtttcctaatgctggtagcgttggg

SEQ ID NO: 1624903 - DNA, 25 bp, Homo sapien
gaccatttgcgtgggagtttcctaa

SEQ ID NO: 1624904 - DNA, 25 bp, Homo sapien
catcctgggctgttgaaagatcttt

SEQ ID NO: 1624905 - DNA, 25 bp, Homo sapien
aaagaggcctggagtaatttgccga

SEQ ID NO: 1624906 - DNA, 25 bp, Homo sapien
tggacccagcgcttatagtactctt

SEQ ID NO: 1624907 - DNA, 25 bp, Homo sapien
aggtacccggcaggatgatcgcaac

SEQ ID NO: 1624908 - DNA, 25 bp, Homo sapien
gctgaaaggaatattgccgactgga

SEQ ID NO: 1624909 - DNA, 25 bp, Homo sapien
cttgcgaattgcatgactgcacatt

SEQ ID NO: 1624910 - DNA, 25 bp, Homo sapien
atttagctttaacaactcttgcgaa

SEQ ID NO: 1624911 - DNA, 25 bp, Homo sapien
gcatgactgcacattccgtgttcac

SEQ ID NO: 1624912 - DNA, 25 bp, Homo sapien
cacattccgtgttcacagtttgtgc

SEQ ID NO: 1624913 - DNA, 25 bp, Homo sapien
ctctaacacgttgatagagctaatg

SEQ ID NO: 1624914 - DNA, 25 bp, Homo sapien
cgttgatagagctaatgaaagctgt

SEQ ID NO: 1624915 - DNA, 25 bp, Homo sapien
taacacgttgatagagctaatgaaa

SEQ ID NO: 1624916 - DNA, 25 bp, Homo sapien
acacgttgatagagctaatgaaagc

SEQ ID NO: 1624917 - DNA, 25 bp, Homo sapien
tgaaagtacatgagattcaagggga

SEQ ID NO: 1624918 - DNA, 25 bp, Homo sapien
gaaagcagcgtaacttggcctctct

SEQ ID NO: 1624919 - DNA, 25 bp, Homo sapien
atgggttacacattcctttaacact

SEQ ID NO: 1624920 - DNA, 25 bp, Homo sapien
gatgggttacacattcctttaacac

SEQ ID NO: 1624921 - DNA, 25 bp, Homo sapien
cctgggtacagtttgcacttgccat

SEQ ID NO: 1624922 - DNA, 25 bp, Homo sapien
gatggcgaggtgcatgtgaccttaa

SEQ ID NO: 1624923 - DNA, 25 bp, Homo sapien
ccgtgccacggttttggacacctgg

SEQ ID NO: 1624924 - DNA, 25 bp, Homo sapien
gatgagcctttccaggatggcgagg

SEQ ID NO: 1624925 - DNA, 25 bp, Homo sapien
cagagaacattagagtgaagggcct

SEQ ID NO: 1624926 - DNA, 25 bp, Homo sapien
ctgctgtgcagagaacattagagtg

SEQ ID NO: 1624927 - DNA, 25 bp, Homo sapien
tgcagagaacattagagtgaagggc

SEQ ID NO: 1624928 - DNA, 25 bp, Homo sapien
gctgtgcagagaacattagagtgaa

SEQ ID NO: 1624929 - DNA, 25 bp, Homo sapien
ttgaacccagccctcacggaggttg

SEQ ID NO: 1624930 - DNA, 25 bp, Homo sapien
cacggaggttgctggcaatgtgtct

SEQ ID NO: 1624931 - DNA, 25 bp, Homo sapien
ctgtgctccagaaggcgtaggccat

SEQ ID NO: 1624932 - DNA, 25 bp, Homo sapien
cgtaggccatgtgcgtttgaaccca

SEQ ID NO: 1624933 - DNA, 25 bp, Homo sapien
gctgctggagcggggctgggcattc

SEQ ID NO: 1624934 - DNA, 25 bp, Homo sapien
cgcctggctgctggagcggggctgg

SEQ ID NO: 1624935 - DNA, 25 bp, Homo sapien
ttgcgcctggctgctggagcggggc

SEQ ID NO: 1624936 - DNA, 25 bp, Homo sapien
gctggagcggggctgggcattcctt

SEQ ID NO: 1624937 - DNA, 25 bp, Homo sapien
ggcttccaagaatagtctgcacaaa

SEQ ID NO: 1624938 - DNA, 25 bp, Homo sapien
ccagcccttgctttgagttagttct

SEQ ID NO: 1624939 - DNA, 25 bp, Homo sapien
cacaaaattcagtttgcaaattgca

SEQ ID NO: 1624940 - DNA, 25 bp, Homo sapien
tccctaattcacaaaggcttccaag

SEQ ID NO: 1624941 - DNA, 25 bp, Homo sapien
aacttggggtcatgcatgaagtcat

SEQ ID NO: 1624942 - DNA, 25 bp, Homo sapien
atcacaaacagaaattgaacttggg

SEQ ID NO: 1624943 - DNA, 25 bp, Homo sapien
tcacaaacagaaattgaacttgggg

SEQ ID NO: 1624944 - DNA, 25 bp, Homo sapien
attgaacttggggtcatgcatgaag

SEQ ID NO: 1624945 - DNA, 25 bp, Homo sapien
agaagtgtcgcccatgcttctgcca

SEQ ID NO: 1624946 - DNA, 25 bp, Homo sapien
gaagtgtcgcccatgcttctgccat

SEQ ID NO: 1624947 - DNA, 25 bp, Homo sapien
gagaagtgtcgcccatgcttctgcc

SEQ ID NO: 1624948 - DNA, 25 bp, Homo sapien
aagtgtcgcccatgcttctgccatg

SEQ ID NO: 1624949 - DNA, 25 bp, Homo sapien
tgaggccgctggtcaagagattcct

SEQ ID NO: 1624950 - DNA, 25 bp, Homo sapien
aggccgctggtcaagagattcctcc

SEQ ID NO: 1624951 - DNA, 25 bp, Homo sapien
gccatgaggccgctggtcaagagat

SEQ ID NO: 1624952 - DNA, 25 bp, Homo sapien
catgaggccgctggtcaagagattc

SEQ ID NO: 1624953 - DNA, 25 bp, Homo sapien
agcccggaatagtgattatttttgc

SEQ ID NO: 1624954 - DNA, 25 bp, Homo sapien
tgttgagcccggaatagtgattatt

SEQ ID NO: 1624955 - DNA, 25 bp, Homo sapien
tgctgtcctcattaggggctcattg

SEQ ID NO: 1624956 - DNA, 25 bp, Homo sapien
ggctcattgttgagcccggaatagt

SEQ ID NO: 1624957 - DNA, 25 bp, Homo sapien
gcaatctctttagcaagccatggtt

SEQ ID NO: 1624958 - DNA, 25 bp, Homo sapien
cacacagcagccgttcggcagtgga

SEQ ID NO: 1624959 - DNA, 25 bp, Homo sapien
gccgttcggcagtggaaaaaatcat

SEQ ID NO: 1624960 - DNA, 25 bp, Homo sapien
atggttcagtgaactggcacacagc

SEQ ID NO: 1624961 - DNA, 25 bp, Homo sapien
ctgtcattagccacttccactaaag

SEQ ID NO: 1624962 - DNA, 25 bp, Homo sapien
attagccacttccactaaaggccag

SEQ ID NO: 1624963 - DNA, 25 bp, Homo sapien
tgctgcagggtgttccagggtctgc

SEQ ID NO: 1624964 - DNA, 25 bp, Homo sapien
cttctatggtagcatcctccaagct

SEQ ID NO: 1624965 - DNA, 25 bp, Homo sapien
tgaaaggggactggcctctggcttg

SEQ ID NO: 1624966 - DNA, 25 bp, Homo sapien
ctgaaaggggactggcctctggctt

SEQ ID NO: 1624967 - DNA, 25 bp, Homo sapien
aaggggactggcctctggcttggaa

SEQ ID NO: 1624968 - DNA, 25 bp, Homo sapien
aaaggggactggcctctggcttgga

SEQ ID NO: 1624969 - DNA, 25 bp, Homo sapien
ggtcccctcaacaagtcttcctgtg

SEQ ID NO: 1624970 - DNA, 25 bp, Homo sapien
gactgataatttgtgggcacccctg

SEQ ID NO: 1624971 - DNA, 25 bp, Homo sapien
cctgtgggtcccctcaacaagtctt

SEQ ID NO: 1624972 - DNA, 25 bp, Homo sapien
atggatggttgagtccaagatccag

SEQ ID NO: 1624973 - DNA, 25 bp, Homo sapien
tcacacatgcaggctggcctggggc

SEQ ID NO: 1624974 - DNA, 25 bp, Homo sapien
cacacatgcaggctggcctggggca

SEQ ID NO: 1624975 - DNA, 25 bp, Homo sapien
acacatgcaggctggcctggggcac

SEQ ID NO: 1624976 - DNA, 25 bp, Homo sapien
gaccccggtgtgaatgtcatccctc

SEQ ID NO: 1624977 - DNA, 25 bp, Homo sapien
gccttgaccccggtgtgaatgtcat

SEQ ID NO: 1624978 - DNA, 25 bp, Homo sapien
tgtttatggccttgaccccggtgtg

SEQ ID NO: 1624979 - DNA, 25 bp, Homo sapien
ctgttggttccagatgtttatggcc

SEQ ID NO: 1624980 - DNA, 25 bp, Homo sapien
tctggtgtctgccggacaatctcct

SEQ ID NO: 1624981 - DNA, 25 bp, Homo sapien
atatcattagaaagtctggtgtctg

SEQ ID NO: 1624982 - DNA, 25 bp, Homo sapien
ggtatatcattagaaagtctggtgt

SEQ ID NO: 1624983 - DNA, 25 bp, Homo sapien
tatatcattagaaagtctggtgtct

SEQ ID NO: 1624984 - DNA, 25 bp, Homo sapien
aagctctcggtgagtggtggctggc

SEQ ID NO: 1624985 - DNA, 25 bp, Homo sapien
cccagtaagctctcggtgagtggtg

SEQ ID NO: 1624986 - DNA, 25 bp, Homo sapien
ctgcccagtaagctctcggtgagtg

SEQ ID NO: 1624987 - DNA, 25 bp, Homo sapien
gtaagctctcggtgagtggtggctg

SEQ ID NO: 1624988 - DNA, 25 bp, Homo sapien
tgagtgttttccgtcagtttcttgg

SEQ ID NO: 1624989 - DNA, 25 bp, Homo sapien
tggcaccggtgacttctcagagcac

SEQ ID NO: 1624990 - DNA, 25 bp, Homo sapien
gaaaaaggaacagcgaacaccagca

SEQ ID NO: 1624991 - DNA, 25 bp, Homo sapien
gcagtggtcgcttccatcagtggat

SEQ ID NO: 1624992 - DNA, 25 bp, Homo sapien
tgccacgcggatgctcacagttttg

SEQ ID NO: 1624993 - DNA, 25 bp, Homo sapien
tctgcctgccagataagggaatgtc

SEQ ID NO: 1624994 - DNA, 25 bp, Homo sapien
gcatatcgccggcaggagcaatttt

SEQ ID NO: 1624995 - DNA, 25 bp, Homo sapien
tttggttgggaaaacaagcctgcag

SEQ ID NO: 1624996 - DNA, 25 bp, Homo sapien
ccctgatcccaatcgggatgggtag

SEQ ID NO: 1624997 - DNA, 25 bp, Homo sapien
ttcccctgatcccaatcgggatggg

SEQ ID NO: 1624998 - DNA, 25 bp, Homo sapien
tagggaagagaaggatgaactacct

SEQ ID NO: 1624999 - DNA, 25 bp, Homo sapien
aaggatgaactacctgcccaggtgc

SEQ ID NO: 1625000 - DNA, 25 bp, Homo sapien
aggccctggcatgagctttctgtgc

SEQ ID NO: 1625001 - DNA, 25 bp, Homo sapien
gctggtgatttgtccaaagctggga

SEQ ID NO: 1625002 - DNA, 25 bp, Homo sapien
cactggggatcctgctcttgaagca

SEQ ID NO: 1625003 - DNA, 25 bp, Homo sapien
tcttcggtgcaagaaagatggacag

SEQ ID NO: 1625004 - DNA, 25 bp, Homo sapien
ttcctttgatcagggaggcttggtt

SEQ ID NO: 1625005 - DNA, 25 bp, Homo sapien
tcttcctttgatcagggaggcttgg

SEQ ID NO: 1625006 - DNA, 25 bp, Homo sapien
ctttgatcagggaggcttggtttgg

SEQ ID NO: 1625007 - DNA, 25 bp, Homo sapien
tgcttcttcctttgatcagggaggc

SEQ ID NO: 1625008 - DNA, 25 bp, Homo sapien
cctggtccagactcttctccttcct

SEQ ID NO: 1625009 - DNA, 25 bp, Homo sapien
ttcctcaaagggagccaaagacctc

SEQ ID NO: 1625010 - DNA, 25 bp, Homo sapien
ctccttcctcaaagggagccaaaga

SEQ ID NO: 1625011 - DNA, 25 bp, Homo sapien
cctcagcttcccccatatgaagagt

SEQ ID NO: 1625012 - DNA, 25 bp, Homo sapien
agagaggcaagcaggtggcccagca

SEQ ID NO: 1625013 - DNA, 25 bp, Homo sapien
agaggcaagcaggtggcccagcatc

SEQ ID NO: 1625014 - DNA, 25 bp, Homo sapien
aggcaagcaggtggcccagcatctt

SEQ ID NO: 1625015 - DNA, 25 bp, Homo sapien
ctgcgggtcagagaggcaagcaggt

SEQ ID NO: 1625016 - DNA, 25 bp, Homo sapien
gtaatccctttattgtttgcacaac

SEQ ID NO: 1625017 - DNA, 25 bp, Homo sapien
gaaatcgggccttgtctgcatataa

SEQ ID NO: 1625018 - DNA, 25 bp, Homo sapien
gataattgcagaacgcctgcataag

SEQ ID NO: 1625019 - DNA, 25 bp, Homo sapien
gcacaactgctgtcagactgttgcc

SEQ ID NO: 1625020 - DNA, 25 bp, Homo sapien
gacctgaagttactcacagcactta

SEQ ID NO: 1625021 - DNA, 25 bp, Homo sapien
gtttctaattcactctgacagatag

SEQ ID NO: 1625022 - DNA, 25 bp, Homo sapien
tagtgcctgacaacttgccggcttt

SEQ ID NO: 1625023 - DNA, 25 bp, Homo sapien
cctccgtgacctgaagttactcaca

SEQ ID NO: 1625024 - DNA, 25 bp, Homo sapien
gggctggctccactgtccatggtgc

SEQ ID NO: 1625025 - DNA, 25 bp, Homo sapien
ttccctgctgttctacgactcttgg

SEQ ID NO: 1625026 - DNA, 25 bp, Homo sapien
ctccaggtagggctggctccactgt

SEQ ID NO: 1625027 - DNA, 25 bp, Homo sapien
gctgttctacgactcttggctccag

SEQ ID NO: 1625028 - DNA, 25 bp, Homo sapien
tgcttgttgcccctgcaagaggcag

SEQ ID NO: 1625029 - DNA, 25 bp, Homo sapien
tctatgaatgcaggcaagggccacg

SEQ ID NO: 1625030 - DNA, 25 bp, Homo sapien
ccgtgtagcaaggactcccgtggag

SEQ ID NO: 1625031 - DNA, 25 bp, Homo sapien
gaatccctggtgtgcttgaacatag

SEQ ID NO: 1625032 - DNA, 25 bp, Homo sapien
gcaccttcccatgtcggttttgctg

SEQ ID NO: 1625033 - DNA, 25 bp, Homo sapien
tagagccttgcacttcaccgtcttg

SEQ ID NO: 1625034 - DNA, 25 bp, Homo sapien
ggctctccaaggctaagcacagcat

SEQ ID NO: 1625035 - DNA, 25 bp, Homo sapien
gatcacagggaatgacaccgatgag

SEQ ID NO: 1625036 - DNA, 25 bp, Homo sapien
gcaactgaagtcacacggacgtcct

SEQ ID NO: 1625037 - DNA, 25 bp, Homo sapien
aactgaagtcacacggacgtcctgc

SEQ ID NO: 1625038 - DNA, 25 bp, Homo sapien
ttgcaactgaagtcacacggacgtc

SEQ ID NO: 1625039 - DNA, 25 bp, Homo sapien
ctttgcaactgaagtcacacggacg

SEQ ID NO: 1625040 - DNA, 25 bp, Homo sapien
ctgcagtttgagactgacacaaaaa

SEQ ID NO: 1625041 - DNA, 25 bp, Homo sapien
tctaaataccgaaccagaacagctt

SEQ ID NO: 1625042 - DNA, 25 bp, Homo sapien
gacacaaaaatgacaatctgccacc

SEQ ID NO: 1625043 - DNA, 25 bp, Homo sapien
gcttggttcaagtattcagccatta

SEQ ID NO: 1625044 - DNA, 25 bp, Homo sapien
tccctggagttagccttgccattgg

SEQ ID NO: 1625045 - DNA, 25 bp, Homo sapien
tcaagccatcaccactaaaatagca

SEQ ID NO: 1625046 - DNA, 25 bp, Homo sapien
tgccattggcatatgcgtttgggcc

SEQ ID NO: 1625047 - DNA, 25 bp, Homo sapien
gcatatgcgtttgggccaaaagtca

SEQ ID NO: 1625048 - DNA, 25 bp, Homo sapien
tccgctgcttgttttcgtaaggtaa

SEQ ID NO: 1625049 - DNA, 25 bp, Homo sapien
gtgtcatgaaactagaatccgctgc

SEQ ID NO: 1625050 - DNA, 25 bp, Homo sapien
tccttaagtgtcatgaaactagaat

SEQ ID NO: 1625051 - DNA, 25 bp, Homo sapien
aactagaatccgctgcttgttttcg

SEQ ID NO: 1625052 - DNA, 25 bp, Homo sapien
cgcttgtgcgcatatgggcatgagt

SEQ ID NO: 1625053 - DNA, 25 bp, Homo sapien
tccactcgcacagtgcgctgcggcc

SEQ ID NO: 1625054 - DNA, 25 bp, Homo sapien
gtgtccgcttgtgcgcatatgggca

SEQ ID NO: 1625055 - DNA, 25 bp, Homo sapien
catatgggcatgagtgtacatggcg

SEQ ID NO: 1625056 - DNA, 25 bp, Homo sapien
tacacgcctttgttgagggtgatgg

SEQ ID NO: 1625057 - DNA, 25 bp, Homo sapien
tgcctttgtcggctggccctgttcc

SEQ ID NO: 1625058 - DNA, 25 bp, Homo sapien
ggtggctcttgacctccatctgtgt

SEQ ID NO: 1625059 - DNA, 25 bp, Homo sapien
tgccctggtgtatttgcctttgtcg

SEQ ID NO: 1625060 - DNA, 25 bp, Homo sapien
cccactggatactccgtgggtctgg

SEQ ID NO: 1625061 - DNA, 25 bp, Homo sapien
cacagatagcacccactggatactc

SEQ ID NO: 1625062 - DNA, 25 bp, Homo sapien
cacacagatagcacccactggatac

SEQ ID NO: 1625063 - DNA, 25 bp, Homo sapien
acacagatagcacccactggatact

SEQ ID NO: 1625064 - DNA, 25 bp, Homo sapien
tctgtgtgcacagtgggtacggggc

SEQ ID NO: 1625065 - DNA, 25 bp, Homo sapien
cctgtgggctcatagtccatcaggg

SEQ ID NO: 1625066 - DNA, 25 bp, Homo sapien
cagcatctggctggttctgtgtgca

SEQ ID NO: 1625067 - DNA, 25 bp, Homo sapien
gatggccaacaggtgtttgcaggcc

SEQ ID NO: 1625068 - DNA, 25 bp, Homo sapien
catgggaccttcaggcatcgatgtg

SEQ ID NO: 1625069 - DNA, 25 bp, Homo sapien
ttcctgcattggatggaaaccagaa

SEQ ID NO: 1625070 - DNA, 25 bp, Homo sapien
ttggttgcatgggaccttcaggcat

SEQ ID NO: 1625071 - DNA, 25 bp, Homo sapien
caggcatcgatgtgggtctggacac

SEQ ID NO: 1625072 - DNA, 25 bp, Homo sapien
ggtcaaaggtcatccacttcttgca

SEQ ID NO: 1625073 - DNA, 25 bp, Homo sapien
gggtcaaaggtcatccacttcttgc

SEQ ID NO: 1625074 - DNA, 25 bp, Homo sapien
ttttcacccacactgacataagcca

SEQ ID NO: 1625075 - DNA, 25 bp, Homo sapien
ggccgtttttcacccacactgacat

SEQ ID NO: 1625076 - DNA, 25 bp, Homo sapien
tttcacccacactgacataagccat

SEQ ID NO: 1625077 - DNA, 25 bp, Homo sapien
tggaggccgtttttcacccacactg

SEQ ID NO: 1625078 - DNA, 25 bp, Homo sapien
tgagataaggtcaaatgctcaacag

SEQ ID NO: 1625079 - DNA, 25 bp, Homo sapien
cgaagctgatgacacacttgagata

SEQ ID NO: 1625080 - DNA, 25 bp, Homo sapien
gactctcgaagctgatgacacactt

SEQ ID NO: 1625081 - DNA, 25 bp, Homo sapien
gagataaggtcaaatgctcaacaga

SEQ ID NO: 1625082 - DNA, 25 bp, Homo sapien
agtatccgtatggatttcctttctg

SEQ ID NO: 1625083 - DNA, 25 bp, Homo sapien
tcaaagtatccgtatggatttcctt

SEQ ID NO: 1625084 - DNA, 25 bp, Homo sapien
tccgtatggatttcctttctgggtc

SEQ ID NO: 1625085 - DNA, 25 bp, Homo sapien
ctcggtcaaagtatccgtatggatt

SEQ ID NO: 1625086 - DNA, 25 bp, Homo sapien
cccaacacggccaaatcactcactg

SEQ ID NO: 1625087 - DNA, 25 bp, Homo sapien
ctgggaaggtggttaggagcaggcc

SEQ ID NO: 1625088 - DNA, 25 bp, Homo sapien
gaatccctcccaacacggccaaatc

SEQ ID NO: 1625089 - DNA, 25 bp, Homo sapien
aaggtggttaggagcaggcctggaa

SEQ ID NO: 1625090 - DNA, 25 bp, Homo sapien
aaatgcacaacgcagacaaggcagg

SEQ ID NO: 1625091 - DNA, 25 bp, Homo sapien
ggaaaatgcacaacgcagacaaggc

SEQ ID NO: 1625092 - DNA, 25 bp, Homo sapien
atgcacaacgcagacaaggcaggcc

SEQ ID NO: 1625093 - DNA, 25 bp, Homo sapien
ttcaggaaaatgcacaacgcagaca

SEQ ID NO: 1625094 - DNA, 25 bp, Homo sapien
tttgaagtctacaggggcttctctc

SEQ ID NO: 1625095 - DNA, 25 bp, Homo sapien
gactatctccaatcaggtccaggag

SEQ ID NO: 1625096 - DNA, 25 bp, Homo sapien
gaggaaactgtcatcgttgtggcat

SEQ ID NO: 1625097 - DNA, 25 bp, Homo sapien
catttgggtaagaaggactatctcc

SEQ ID NO: 1625098 - DNA, 25 bp, Homo sapien
ctgggttgggcacaaagggggccat

SEQ ID NO: 1625099 - DNA, 25 bp, Homo sapien
tgctcagacctgggttgggcacaaa

SEQ ID NO: 1625100 - DNA, 25 bp, Homo sapien
cttgtgctcagacctgggttgggca

SEQ ID NO: 1625101 - DNA, 25 bp, Homo sapien
ctcagacctgggttgggcacaaagg

SEQ ID NO: 1625102 - DNA, 25 bp, Homo sapien
gacattgatggagcattcctggtgt

SEQ ID NO: 1625103 - DNA, 25 bp, Homo sapien
tcatttttgacattgatggagcatt

SEQ ID NO: 1625104 - DNA, 25 bp, Homo sapien
aaatcttgcatcatcatttttgaca

SEQ ID NO: 1625105 - DNA, 25 bp, Homo sapien
ttttgacattgatggagcattcctg

SEQ ID NO: 1625106 - DNA, 25 bp, Homo sapien
ccattctttccggaaagctcctggg

SEQ ID NO: 1625107 - DNA, 25 bp, Homo sapien
tctaaggtgtctctatccaatgcag

SEQ ID NO: 1625108 - DNA, 25 bp, Homo sapien
ttcaatttcatctaaggtgtctcta

SEQ ID NO: 1625109 - DNA, 25 bp, Homo sapien
ctcctggggaggcatattaaacctg

SEQ ID NO: 1625110 - DNA, 25 bp, Homo sapien
tgaggttgaagttgtgcggcagacg

SEQ ID NO: 1625111 - DNA, 25 bp, Homo sapien
ttgagggaagtagggatctgttacc

SEQ ID NO: 1625112 - DNA, 25 bp, Homo sapien
gatctgttaccagctgtccctctgg

SEQ ID NO: 1625113 - DNA, 25 bp, Homo sapien
ctcttctttcccgtggctttgaggg

SEQ ID NO: 1625114 - DNA, 25 bp, Homo sapien
acctccctgcaagagtatagcccat

SEQ ID NO: 1625115 - DNA, 25 bp, Homo sapien
gccacctccctgcaagagtatagcc

SEQ ID NO: 1625116 - DNA, 25 bp, Homo sapien
cacctccctgcaagagtatagccca

SEQ ID NO: 1625117 - DNA, 25 bp, Homo sapien
tgccacctccctgcaagagtatagc

SEQ ID NO: 1625118 - DNA, 25 bp, Homo sapien
ccctgggccgacttctataaatatt

SEQ ID NO: 1625119 - DNA, 25 bp, Homo sapien
ctttgatcactcttgcgtatgtgca

SEQ ID NO: 1625120 - DNA, 25 bp, Homo sapien
tatttcaaaatcaagccccctttga

SEQ ID NO: 1625121 - DNA, 25 bp, Homo sapien
ttatgtcttcgacaggtgcccctgt

SEQ ID NO: 1625122 - DNA, 25 bp, Homo sapien
cctccgtgtacaatgcaaagagaaa

SEQ ID NO: 1625123 - DNA, 25 bp, Homo sapien
gtcattcaatgtagcctccgtgtac

SEQ ID NO: 1625124 - DNA, 25 bp, Homo sapien
cagtaatttcacaccgtggtcaatg

SEQ ID NO: 1625125 - DNA, 25 bp, Homo sapien
cacaccgtggtcaatgtcattcaat

SEQ ID NO: 1625126 - DNA, 25 bp, Homo sapien
tgagcagagttagctgatgaacaca

SEQ ID NO: 1625127 - DNA, 25 bp, Homo sapien
cagagttagctgatgaacacaattt

SEQ ID NO: 1625128 - DNA, 25 bp, Homo sapien
ttagtaactgagcagagttagctga

SEQ ID NO: 1625129 - DNA, 25 bp, Homo sapien
tagtaactgagcagagttagctgat

SEQ ID NO: 1625130 - DNA, 25 bp, Homo sapien
attgttgccgagcgaacagcagatt

SEQ ID NO: 1625131 - DNA, 25 bp, Homo sapien
tatcattcgctggttgcttggccca

SEQ ID NO: 1625132 - DNA, 25 bp, Homo sapien
agccaaactttataccggagctcgg

SEQ ID NO: 1625133 - DNA, 25 bp, Homo sapien
tttctgaggtcattatcattcgctg

SEQ ID NO: 1625134 - DNA, 25 bp, Homo sapien
agctgttttggagcattgatggcag

SEQ ID NO: 1625135 - DNA, 25 bp, Homo sapien
tagagctgttttggagcattgatgg

SEQ ID NO: 1625136 - DNA, 25 bp, Homo sapien
tggagcattgatggcaggggtggag

SEQ ID NO: 1625137 - DNA, 25 bp, Homo sapien
ccgtagagctgttttggagcattga

SEQ ID NO: 1625138 - DNA, 25 bp, Homo sapien
tctcctctgtcggcatctgatgggt

SEQ ID NO: 1625139 - DNA, 25 bp, Homo sapien
ctctgtcggcatctgatgggtgcat

SEQ ID NO: 1625140 - DNA, 25 bp, Homo sapien
tcctctcctctgtcggcatctgatg

SEQ ID NO: 1625141 - DNA, 25 bp, Homo sapien
tcctctgtcggcatctgatgggtgc

SEQ ID NO: 1625142 - DNA, 25 bp, Homo sapien
ggactctgcaggggttcgtgagggc

SEQ ID NO: 1625143 - DNA, 25 bp, Homo sapien
atggactctgcaggggttcgtgagg

SEQ ID NO: 1625144 - DNA, 25 bp, Homo sapien
gtatggactctgcaggggttcgtga

SEQ ID NO: 1625145 - DNA, 25 bp, Homo sapien
tggtatggactctgcaggggttcgt

SEQ ID NO: 1625146 - DNA, 25 bp, Homo sapien
tgtagggagaagagtgtacagctgc

SEQ ID NO: 1625147 - DNA, 25 bp, Homo sapien
cttctccttgctattattcacccag

SEQ ID NO: 1625148 - DNA, 25 bp, Homo sapien
agcagagtcctcacgatagcaggga

SEQ ID NO: 1625149 - DNA, 25 bp, Homo sapien
gtgtacagctgccaaccggcttctc

SEQ ID NO: 1625150 - DNA, 25 bp, Homo sapien
catgaagacggcaacggagtcgaac

SEQ ID NO: 1625151 - DNA, 25 bp, Homo sapien
gatgatttttgagccccatgaagac

SEQ ID NO: 1625152 - DNA, 25 bp, Homo sapien
cccaggaacttgtcactgtagagtg

SEQ ID NO: 1625153 - DNA, 25 bp, Homo sapien
gaactcatttgtctctccccgggtc

SEQ ID NO: 1625154 - DNA, 25 bp, Homo sapien
aatccgtggactctggccattagca

SEQ ID NO: 1625155 - DNA, 25 bp, Homo sapien
cagccgtggtgttaatccgtggact

SEQ ID NO: 1625156 - DNA, 25 bp, Homo sapien
tggccagccgtggtgttaatccgtg

SEQ ID NO: 1625157 - DNA, 25 bp, Homo sapien
ggtgttaatccgtggactctggcca

SEQ ID NO: 1625158 - DNA, 25 bp, Homo sapien
tggtgacctccttgacaatttgttt

SEQ ID NO: 1625159 - DNA, 25 bp, Homo sapien
tctctgggttgtacctgttgtacac

SEQ ID NO: 1625160 - DNA, 25 bp, Homo sapien
ctcattggaactggtgacctccttg

SEQ ID NO: 1625161 - DNA, 25 bp, Homo sapien
gggttgtacctgttgtacactgtgt

SEQ ID NO: 1625162 - DNA, 25 bp, Homo sapien
acaactgaatgtggaccaggggccg

SEQ ID NO: 1625163 - DNA, 25 bp, Homo sapien
gcactggggcattccatggagacag

SEQ ID NO: 1625164 - DNA, 25 bp, Homo sapien
agagctccttgatggacatgatgca

SEQ ID NO: 1625165 - DNA, 25 bp, Homo sapien
tgatgcagccatttacaatgatggt

SEQ ID NO: 1625166 - DNA, 25 bp, Homo sapien
gaaagctgtctttaggggcgttgag

SEQ ID NO: 1625167 - DNA, 25 bp, Homo sapien
ctggctgcttgttggagaaagctgt

SEQ ID NO: 1625168 - DNA, 25 bp, Homo sapien
tttaggggcgttgagggtgttagca

SEQ ID NO: 1625169 - DNA, 25 bp, Homo sapien
ggcgttgagggtgttagcaatgaac

SEQ ID NO: 1625170 - DNA, 25 bp, Homo sapien
ggggctgttcctcagcaccaggtcc

SEQ ID NO: 1625171 - DNA, 25 bp, Homo sapien
gggttggcctcgagtagatgctttt

SEQ ID NO: 1625172 - DNA, 25 bp, Homo sapien
aatgcactggatgctcaaggtctcc

SEQ ID NO: 1625173 - DNA, 25 bp, Homo sapien
ctttttatggtgagctagtcgagta

SEQ ID NO: 1625174 - DNA, 25 bp, Homo sapien
tctccagggatacaggtgagagtga

SEQ ID NO: 1625175 - DNA, 25 bp, Homo sapien
gaggagccgttccagcccgtgcgat

SEQ ID NO: 1625176 - DNA, 25 bp, Homo sapien
agcccgtgcgatcctgttcagctga

SEQ ID NO: 1625177 - DNA, 25 bp, Homo sapien
gtaggcagcgagcatgcagcgagga

SEQ ID NO: 1625178 - DNA, 25 bp, Homo sapien
agctgaatcgtcactgctgtttcca

SEQ ID NO: 1625179 - DNA, 25 bp, Homo sapien
ttcctacagcagttgtctggacttc

SEQ ID NO: 1625180 - DNA, 25 bp, Homo sapien
cttttcctacagcagttgtctggac

SEQ ID NO: 1625181 - DNA, 25 bp, Homo sapien
cctacagcagttgtctggacttctc

SEQ ID NO: 1625182 - DNA, 25 bp, Homo sapien
tacagcagttgtctggacttctcca

SEQ ID NO: 1625183 - DNA, 25 bp, Homo sapien
aataggagtgtaccaagctctcttc

SEQ ID NO: 1625184 - DNA, 25 bp, Homo sapien
ctttgttgaggctccttctggtgct

SEQ ID NO: 1625185 - DNA, 25 bp, Homo sapien
gagtgtaccaagctctcttccaggc

SEQ ID NO: 1625186 - DNA, 25 bp, Homo sapien
ttcttcgtcagtacaataggagtgt

SEQ ID NO: 1625187 - DNA, 25 bp, Homo sapien
cgggagggccattcgcagggcacca

SEQ ID NO: 1625188 - DNA, 25 bp, Homo sapien
accgggagggccattcgcagggcac

SEQ ID NO: 1625189 - DNA, 25 bp, Homo sapien
agggacacgaacactggaccgggag

SEQ ID NO: 1625190 - DNA, 25 bp, Homo sapien
ccgggagggccattcgcagggcacc

SEQ ID NO: 1625191 - DNA, 25 bp, Homo sapien
ccctgctcagcgacacgaatggtct

SEQ ID NO: 1625192 - DNA, 25 bp, Homo sapien
ttaggtgaccctgctcagcgacacg

SEQ ID NO: 1625193 - DNA, 25 bp, Homo sapien
ctcagcgacacgaatggtctctggg

SEQ ID NO: 1625194 - DNA, 25 bp, Homo sapien
gtgaccctgctcagcgacacgaatg

SEQ ID NO: 1625195 - DNA, 25 bp, Homo sapien
gccaccccttggggccttggcaaga

SEQ ID NO: 1625196 - DNA, 25 bp, Homo sapien
tggggccttggcaagatgtggcggt

SEQ ID NO: 1625197 - DNA, 25 bp, Homo sapien
agccagcccatagccaccccttggg

SEQ ID NO: 1625198 - DNA, 25 bp, Homo sapien
acagccagcccatagccaccccttg

SEQ ID NO: 1625199 - DNA, 25 bp, Homo sapien
gcatgcaccttcatgtcaccttgat

SEQ ID NO: 1625200 - DNA, 25 bp, Homo sapien
tactgccgctttgtggtccagtgga

SEQ ID NO: 1625201 - DNA, 25 bp, Homo sapien
ggattctaaaatgatccgtagccat

SEQ ID NO: 1625202 - DNA, 25 bp, Homo sapien
tctttgtctaactggtactgccgct

SEQ ID NO: 1625203 - DNA, 25 bp, Homo sapien
agcgaatgggcatgtagacaacatt

SEQ ID NO: 1625204 - DNA, 25 bp, Homo sapien
ggataagaacaagcgaatgggcatg

SEQ ID NO: 1625205 - DNA, 25 bp, Homo sapien
ctcggaggataagaacaagcgaatg

SEQ ID NO: 1625206 - DNA, 25 bp, Homo sapien
tgggcatgtagacaacattgctgac

SEQ ID NO: 1625207 - DNA, 25 bp, Homo sapien
gaaagctggcagagcttttgatgcc

SEQ ID NO: 1625208 - DNA, 25 bp, Homo sapien
tttgatgcctacttcaacacatttg

SEQ ID NO: 1625209 - DNA, 25 bp, Homo sapien
aaattaggaaggtctgttgcctgat

SEQ ID NO: 1625210 - DNA, 25 bp, Homo sapien
tttcagcttgtaggcacgggcagag

SEQ ID NO: 1625211 - DNA, 25 bp, Homo sapien
ccgcctgcagccaaaggtcccctcc

SEQ ID NO: 1625212 - DNA, 25 bp, Homo sapien
ctgagggtgcattaggcaagagagg

SEQ ID NO: 1625213 - DNA, 25 bp, Homo sapien
aggaacagatggcagcgttgaggct

SEQ ID NO: 1625214 - DNA, 25 bp, Homo sapien
ggcaggggtctgtcatttcacagat

SEQ ID NO: 1625215 - DNA, 25 bp, Homo sapien
aaatcaaaggttctagtgcccacag

SEQ ID NO: 1625216 - DNA, 25 bp, Homo sapien
gctccaggagagaacggctgttttg

SEQ ID NO: 1625217 - DNA, 25 bp, Homo sapien
atgcctggccgagacttttcttgga

SEQ ID NO: 1625218 - DNA, 25 bp, Homo sapien
cacagttggttagagttgagtgaca

SEQ ID NO: 1625219 - DNA, 25 bp, Homo sapien
ggtccactcgtcatttcagaacaaa

SEQ ID NO: 1625220 - DNA, 25 bp, Homo sapien
gatgtcgtttgcactgcaggatgac

SEQ ID NO: 1625221 - DNA, 25 bp, Homo sapien
gaactgttgtgtgaataccattgta

SEQ ID NO: 1625222 - DNA, 25 bp, Homo sapien
tctgtaagtcggcaaacactggtga

SEQ ID NO: 1625223 - DNA, 25 bp, Homo sapien
cagtggtctcgtgggtattactgct

SEQ ID NO: 1625224 - DNA, 25 bp, Homo sapien
tacagaaaagtgcagtaattctctt

SEQ ID NO: 1625225 - DNA, 25 bp, Homo sapien
tattactgcttgtgtctgattgtcc

SEQ ID NO: 1625226 - DNA, 25 bp, Homo sapien
gtctgattgtcctgtattttgtaac

SEQ ID NO: 1625227 - DNA, 25 bp, Homo sapien
tacttgtgtttgctgtaacaggctt

SEQ ID NO: 1625228 - DNA, 25 bp, Homo sapien
tctgctgaccttttcggactgtact

SEQ ID NO: 1625229 - DNA, 25 bp, Homo sapien
cttttcggactgtacttgtgtttgc

SEQ ID NO: 1625230 - DNA, 25 bp, Homo sapien
tcaggattcgcggaggtgggaatct

SEQ ID NO: 1625231 - DNA, 25 bp, Homo sapien
cctgagcccttgtctaactggtcct

SEQ ID NO: 1625232 - DNA, 25 bp, Homo sapien
attcaatgaccatccctgagccctt

SEQ ID NO: 1625233 - DNA, 25 bp, Homo sapien
tttgtggtccgtgagctggacttga

SEQ ID NO: 1625234 - DNA, 25 bp, Homo sapien
agggtcctgccatttcaacggtgtt

SEQ ID NO: 1625235 - DNA, 25 bp, Homo sapien
agaacagatgtgcaggtcatggctc

SEQ ID NO: 1625236 - DNA, 25 bp, Homo sapien
tgagaacagatgtgcaggtcatggc

SEQ ID NO: 1625237 - DNA, 25 bp, Homo sapien
gagaacagatgtgcaggtcatggct
